United States Patent Application Publication US 2025/0304994 A1 - sequence listing, part 2

SEQ ID NO: 5304 - DNA, 20 bp, synthetic construct
  source 1..20: mol_type = other DNA
cgtggtaagagcgccttaag

SEQ ID NO: 5305 - DNA, 20 bp, synthetic construct
  source 1..20: mol_type = other DNA
ctgtggtcgtaacgcggtaa

SEQ ID NO: 5306 - DNA, 20 bp, synthetic construct
  source 1..20: mol_type = other DNA
ctacgaccgttgactactgt

SEQ ID NO: 5307 - DNA, 20 bp, synthetic construct
  source 1..20: mol_type = other DNA
ggtgataattgggagccagt

SEQ ID NO: 5308 - DNA, 20 bp, synthetic construct
  source 1..20: mol_type = other DNA
agtgtgatgggagcgaactc

SEQ ID NO: 5309 - DNA, 20 bp, synthetic construct
  source 1..20: mol_type = other DNA
gtatccgggatttcaatgat

SEQ ID NO: 5310 - DNA, 20 bp, synthetic construct
  source 1..20: mol_type = other DNA
ttactcgtactgaggccata

SEQ ID NO: 5311 - DNA, 20 bp, synthetic construct
  source 1..20: mol_type = other DNA
aactctgttgtcgcgacgga

SEQ ID NO: 5312 - DNA, 20 bp, synthetic construct
  source 1..20: mol_type = other DNA
gtgccacgtagtccaacact

SEQ ID NO: 5313 - DNA, 20 bp, synthetic construct
  source 1..20: mol_type = other DNA
ggtgggatgtctcgactacg

SEQ ID NO: 5314 - DNA, 20 bp, synthetic construct
  source 1..20: mol_type = other DNA
atctcttcccgtataactgg

SEQ ID NO: 5315 - DNA, 20 bp, synthetic construct
  source 1..20: mol_type = other DNA
ccatgtcgcactcgtaagct

SEQ ID NO: 5316 - DNA, 20 bp, synthetic construct
  source 1..20: mol_type = other DNA
gctcgttagcactcagatag

SEQ ID NO: 5317 - DNA, 20 bp, synthetic construct
  source 1..20: mol_type = other DNA
cagcttcgtggccaacatac

SEQ ID NO: 5318 - DNA, 20 bp, synthetic construct
  source 1..20: mol_type = other DNA
tgcgcgaggagagaaactat

SEQ ID NO: 5319 - DNA, 20 bp, synthetic construct
  source 1..20: mol_type = other DNA
gctcaggaggacaaggcttt

SEQ ID NO: 5320 - DNA, 20 bp, synthetic construct
  source 1..20: mol_type = other DNA
ataattgctgcgatacgtta

SEQ ID NO: 5321 - DNA, 20 bp, synthetic construct
  source 1..20: mol_type = other DNA
caccatctgaacgggtgtga

SEQ ID NO: 5322 - DNA, 20 bp, synthetic construct
  source 1..20: mol_type = other DNA
ggatgcacatatcccgccga

SEQ ID NO: 5323 - DNA, 20 bp, synthetic construct
  source 1..20: mol_type = other DNA
aaacctagattgacggctca

SEQ ID NO: 5324 - DNA, 20 bp, synthetic construct
  source 1..20: mol_type = other DNA
gcaatacatagtgcgtttca

SEQ ID NO: 5325 - DNA, 20 bp, synthetic construct
  source 1..20: mol_type = other DNA
cctctgcacctgccatagct

SEQ ID NO: 5326 - DNA, 20 bp, synthetic construct
  source 1..20: mol_type = other DNA
cgtagccatcgaacatgctt

SEQ ID NO: 5327 - DNA, 20 bp, synthetic construct
  source 1..20: mol_type = other DNA
atcactcctgaatcgcaccg

SEQ ID NO: 5328 - DNA, 20 bp, synthetic construct
  source 1..20: mol_type = other DNA
gacagcacaggcagaacaat

SEQ ID NO: 5329 - DNA, 20 bp, synthetic construct
  source 1..20: mol_type = other DNA
agcagaagtatctcttcaca

SEQ ID NO: 5330 - DNA, 20 bp, synthetic construct
  source 1..20: mol_type = other DNA
ggtcaccagatccatgagac

SEQ ID NO: 5331 - DNA, 20 bp, synthetic construct
  source 1..20: mol_type = other DNA
cgactacgacctagcgcaat

SEQ ID NO: 5332 - DNA, 20 bp, synthetic construct
  source 1..20: mol_type = other DNA
caattaaacttccaacgtgt

SEQ ID NO: 5333 - DNA, 20 bp, synthetic construct
  source 1..20: mol_type = other DNA
ctcaaggatatttgaaaggg

SEQ ID NO: 5334 - DNA, 20 bp, synthetic construct
  source 1..20: mol_type = other DNA
acctttagcaacgcgagtgg

SEQ ID NO: 5335 - DNA, 20 bp, synthetic construct
  source 1..20: mol_type = other DNA
ccataaaggaggccgggctt

SEQ ID NO: 5336 - DNA, 20 bp, synthetic construct
  source 1..20: mol_type = other DNA
cttcttacgtcgtcttaaat

SEQ ID NO: 5337 - DNA, 20 bp, synthetic construct
  source 1..20: mol_type = other DNA
gtaatcataagggtcctcac

SEQ ID NO: 5338 - DNA, 20 bp, synthetic construct
  source 1..20: mol_type = other DNA
tcgaggaaccatcatcgcga

SEQ ID NO: 5339 - DNA, 20 bp, synthetic construct
  source 1..20: mol_type = other DNA
gacaactcccgaagtcagac

SEQ ID NO: 5340 - DNA, 20 bp, synthetic construct
  source 1..20: mol_type = other DNA
agcgagatcatatttgcatg

SEQ ID NO: 5341 - DNA, 20 bp, synthetic construct
  source 1..20: mol_type = other DNA
ccctcatagttatcgaaagg

SEQ ID NO: 5342 - DNA, 20 bp, synthetic construct
  source 1..20: mol_type = other DNA
cggaccgttctttgcagata

SEQ ID NO: 5343 - DNA, 20 bp, synthetic construct
  source 1..20: mol_type = other DNA
cactatactggccagctggc

SEQ ID NO: 5344 - DNA, 20 bp, synthetic construct
  source 1..20: mol_type = other DNA
tgagaggctattacattcct

SEQ ID NO: 5345 - DNA, 20 bp, synthetic construct
  source 1..20: mol_type = other DNA
gcgtgttcatgagattcggg

SEQ ID NO: 5346 - DNA, 20 bp, synthetic construct
  source 1..20: mol_type = other DNA
atgagtccgcgtttaccaag

SEQ ID NO: 5347 - DNA, 20 bp, synthetic construct
  source 1..20: mol_type = other DNA
cgaaggatccaactatggca

SEQ ID NO: 5348 - DNA, 20 bp, synthetic construct
  source 1..20: mol_type = other DNA
cagaccaggccacagtcatg

SEQ ID NO: 5349 - DNA, 20 bp, synthetic construct
  source 1..20: mol_type = other DNA
atcaggtcagacgggagatt

SEQ ID NO: 5350 - DNA, 20 bp, synthetic construct
  source 1..20: mol_type = other DNA
gaagaacaaccgctttcctg

SEQ ID NO: 5351 - DNA, 20 bp, synthetic construct
  source 1..20: mol_type = other DNA
gtcggaacagttcttcggga

SEQ ID NO: 5352 - DNA, 20 bp, synthetic construct
  source 1..20: mol_type = other DNA
actgagtgtacacaatagga

SEQ ID NO: 5353 - DNA, 20 bp, synthetic construct
  source 1..20: mol_type = other DNA
aaaggaccaggcttcatctg

SEQ ID NO: 5354 - DNA, 20 bp, synthetic construct
  source 1..20: mol_type = other DNA
atttacgtaaggctggtggg

SEQ ID NO: 5355 - DNA, 20 bp, synthetic construct
  source 1..20: mol_type = other DNA
gcgagagtgatgcactcccg

SEQ ID NO: 5356 - DNA, 20 bp, synthetic construct
  source 1..20: mol_type = other DNA
cacaatcgaccagagtgtgc

SEQ ID NO: 5357 - DNA, 20 bp, synthetic construct
  source 1..20: mol_type = other DNA
gattacttgattgctcggaa

SEQ ID NO: 5358 - DNA, 20 bp, synthetic construct
  source 1..20: mol_type = other DNA
ccacagacgattgactgcgg

SEQ ID NO: 5359 - DNA, 20 bp, synthetic construct
  source 1..20: mol_type = other DNA
agcgcacataggctgctgag

SEQ ID NO: 5360 - DNA, 20 bp, synthetic construct
  source 1..20: mol_type = other DNA
tgaacatgaatgtgtctaag

SEQ ID NO: 5361 - DNA, 20 bp, synthetic construct
  source 1..20: mol_type = other DNA
gtgttacaagtctgtggtcg

SEQ ID NO: 5362 - DNA, 20 bp, synthetic construct
  source 1..20: mol_type = other DNA
ggtcactttcctgattacac

SEQ ID NO: 5363 - DNA, 20 bp, synthetic construct
  source 1..20: mol_type = other DNA
ggcgcagacacgatctaggt

SEQ ID NO: 5364 - DNA, 20 bp, synthetic construct
  source 1..20: mol_type = other DNA
gtaggccgttgtccagagcc

SEQ ID NO: 5365 - DNA, 20 bp, synthetic construct
  source 1..20: mol_type = other DNA
gattcggttgccgtgtacga

SEQ ID NO: 5366 - DNA, 20 bp, synthetic construct
  source 1..20: mol_type = other DNA
gtctcagcagataacatagt

SEQ ID NO: 5367 - DNA, 20 bp, synthetic construct
  source 1..20: mol_type = other DNA
tcctcactgtctagttgaag

SEQ ID NO: 5368 - DNA, 20 bp, synthetic construct
  source 1..20: mol_type = other DNA
attagtgactgagccaagac

SEQ ID NO: 5369 - DNA, 20 bp, synthetic construct
  source 1..20: mol_type = other DNA
ttgtttcactaaacggacgt

SEQ ID NO: 5370 - DNA, 20 bp, synthetic construct
  source 1..20: mol_type = other DNA
ggataataaagcaaggtgaa

SEQ ID NO: 5371 - DNA, 20 bp, synthetic construct
  source 1..20: mol_type = other DNA
ctggtacaccgccaattagg

SEQ ID NO: 5372 - DNA, 20 bp, synthetic construct
  source 1..20: mol_type = other DNA
cggagacggcgtatgtacga

SEQ ID NO: 5373 - DNA, 20 bp, synthetic construct
  source 1..20: mol_type = other DNA
ccatctacgtgatctgttgc

SEQ ID NO: 5374 - DNA, 20 bp, synthetic construct
  source 1..20: mol_type = other DNA
agaatgcacggccggaatcg

SEQ ID NO: 5375 - DNA, 20 bp, synthetic construct
  source 1..20: mol_type = other DNA
ggtgttctgttagagacttg

SEQ ID NO: 5376 - DNA, 20 bp, synthetic construct
  source 1..20: mol_type = other DNA
ttgtcaccaccgctctcatt

SEQ ID NO: 5377 - DNA, 20 bp, synthetic construct
  source 1..20: mol_type = other DNA
agagtgatgaactcccgtag

SEQ ID NO: 5378 - DNA, 20 bp, synthetic construct
  source 1..20: mol_type = other DNA
gtagcagcctatccttgagt

SEQ ID NO: 5379 - DNA, 20 bp, synthetic construct
  source 1..20: mol_type = other DNA
gccgtaagctagtaactcag

SEQ ID NO: 5380 - DNA, 20 bp, synthetic construct
  source 1..20: mol_type = other DNA
cgcgtatgctctgcatccga

SEQ ID NO: 5381 - DNA, 20 bp, synthetic construct
  source 1..20: mol_type = other DNA
cagacaagccatgttcctgt

SEQ ID NO: 5382 - DNA, 20 bp, synthetic construct
  source 1..20: mol_type = other DNA
gcattagtccgctatgtgtt

SEQ ID NO: 5383 - DNA, 20 bp, synthetic construct
  source 1..20: mol_type = other DNA
agtccataatcctacagagg

SEQ ID NO: 5384 - DNA, 20 bp, synthetic construct
  source 1..20: mol_type = other DNA
cctctaatattaccacttag

SEQ ID NO: 5385 - DNA, 20 bp, synthetic construct
  source 1..20: mol_type = other DNA
ctctggcggaatcagtagag

SEQ ID NO: 5386 - DNA, 20 bp, synthetic construct
  source 1..20: mol_type = other DNA
cgtactatgtgtggtgtctc

SEQ ID NO: 5387 - DNA, 20 bp, synthetic construct
  source 1..20: mol_type = other DNA
aaatataccacggccatcgt

SEQ ID NO: 5388 - DNA, 20 bp, synthetic construct
  source 1..20: mol_type = other DNA
cgatcgcggcttagtacatc

SEQ ID NO: 5389 - DNA, 20 bp, synthetic construct
  source 1..20: mol_type = other DNA
ggacgctaacgtatgaaggg

SEQ ID NO: 5390 - DNA, 20 bp, synthetic construct
  source 1..20: mol_type = other DNA
ttctacagttgtaaaccctg

SEQ ID NO: 5391 - DNA, 20 bp, synthetic construct
  source 1..20: mol_type = other DNA
cgcggacagctgagtaagct

SEQ ID NO: 5392 - DNA, 20 bp, synthetic construct
  source 1..20: mol_type = other DNA
tgcccgcctggtattccggt

SEQ ID NO: 5393 - DNA, 20 bp, synthetic construct
  source 1..20: mol_type = other DNA
gaggttggtcagttcgtcat

SEQ ID NO: 5394 - DNA, 20 bp, synthetic construct
  source 1..20: mol_type = other DNA
cgcgctagacgtctcttagc

SEQ ID NO: 5395 - DNA, 20 bp, synthetic construct
  source 1..20: mol_type = other DNA
acctatcaccatcagagcat

SEQ ID NO: 5396 - DNA, 20 bp, synthetic construct
  source 1..20: mol_type = other DNA
tggttcattctagcgcgtgt

SEQ ID NO: 5397 - DNA, 20 bp, synthetic construct
  source 1..20: mol_type = other DNA
gttatgctaacgaccaggtc

SEQ ID NO: 5398 - DNA, 20 bp, synthetic construct
  source 1..20: mol_type = other DNA
ttgtcgtgtataacgagcat

SEQ ID NO: 5399 - DNA, 20 bp, synthetic construct
  source 1..20: mol_type = other DNA
ttgcagcccacgacggctcc

SEQ ID NO: 5400 - DNA, 20 bp, synthetic construct
  source 1..20: mol_type = other DNA
agaagagctccagcaaccca

SEQ ID NO: 5401 - DNA, 20 bp, synthetic construct
  source 1..20: mol_type = other DNA
tagggtgaaccgattgccct

SEQ ID NO: 5402 - DNA, 20 bp, synthetic construct
  source 1..20: mol_type = other DNA
taccaagctcctgatcataa

SEQ ID NO: 5403 - DNA, 20 bp, synthetic construct
  source 1..20: mol_type = other DNA
atgccttagcgttatttaga

SEQ ID NO: 5404 - DNA, 20 bp, synthetic construct
  source 1..20: mol_type = other DNA
gacgttatcttgctcgtatg

SEQ ID NO: 5405 - DNA, 20 bp, synthetic construct
  source 1..20: mol_type = other DNA
gacgccaacctatcgtgaat

SEQ ID NO: 5406 - DNA, 20 bp, synthetic construct
  source 1..20: mol_type = other DNA
acctatacatgctagcgaac

SEQ ID NO: 5407 - DNA, 20 bp, synthetic construct
  source 1..20: mol_type = other DNA
tagaataagagagatacgct

SEQ ID NO: 5408 - DNA, 20 bp, synthetic construct
  source 1..20: mol_type = other DNA
aaatgtccattgacatactc

SEQ ID NO: 5409 - DNA, 20 bp, synthetic construct
  source 1..20: mol_type = other DNA
aagcaggaaggaggcgacag

SEQ ID NO: 5410 - DNA, 20 bp, synthetic construct
  source 1..20: mol_type = other DNA
gattgcgtgactagctgtta

SEQ ID NO: 5411 - DNA, 20 bp, synthetic construct
  source 1..20: mol_type = other DNA
acccgtgtatgacacggctg

SEQ ID NO: 5412 - DNA, 20 bp, synthetic construct
  source 1..20: mol_type = other DNA
aagttaaggcatttgaagaa

SEQ ID NO: 5413 - DNA, 20 bp, synthetic construct
  source 1..20: mol_type = other DNA
gtagatgtaccatgccgact

SEQ ID NO: 5414 - DNA, 20 bp, synthetic construct
  source 1..20: mol_type = other DNA
catgtcgtcacaatccgccc

SEQ ID NO: 5415 - DNA, 20 bp, synthetic construct
  source 1..20: mol_type = other DNA
ctcacacatatccggtcaca

SEQ ID NO: 5416 - DNA, 20 bp, synthetic construct
  source 1..20: mol_type = other DNA
gtgaggataacgacggtcct

SEQ ID NO: 5417 - DNA, 20 bp, synthetic construct
  source 1..20: mol_type = other DNA
attgttcatgactggcgtat

SEQ ID NO: 5418 - DNA, 20 bp, synthetic construct
  source 1..20: mol_type = other DNA
tgggagtagcattattcaaa

SEQ ID NO: 5419 - DNA, 20 bp, synthetic construct
  source 1..20: mol_type = other DNA
cagcggaatcgcctcattca

SEQ ID NO: 5420 - DNA, 20 bp, synthetic construct
  source 1..20: mol_type = other DNA
tgcacgacgtcagcccacct

SEQ ID NO: 5421 - DNA, 20 bp, synthetic construct
  source 1..20: mol_type = other DNA
tgcgcctgcgtctccacgtt

SEQ ID NO: 5422 - DNA, 20 bp, synthetic construct
  source 1..20: mol_type = other DNA
gaattgaaaggtccgggcac

SEQ ID NO: 5423 - DNA, 20 bp, synthetic construct
  source 1..20: mol_type = other DNA
agagaggctttatagttgcc

SEQ ID NO: 5424 - DNA, 20 bp, synthetic construct
  source 1..20: mol_type = other DNA
gtgacgacattattgacaca

SEQ ID NO: 5425 - DNA, 20 bp, synthetic construct
  source 1..20: mol_type = other DNA
aagaagtactagggcgtaaa

SEQ ID NO: 5426 - DNA, 20 bp, synthetic construct
  source 1..20: mol_type = other DNA
cccgatccagggacgttgag

SEQ ID NO: 5427 - DNA, 20 bp, synthetic construct
  source 1..20: mol_type = other DNA
catctgtcacagtagctact

SEQ ID NO: 5428 - DNA, 20 bp, synthetic construct
  source 1..20: mol_type = other DNA
cttcgataggatgatccatt

SEQ ID NO: 5429 - DNA, 20 bp, synthetic construct
  source 1..20: mol_type = other DNA
tcctttgagtcgaatataac

SEQ ID NO: 5430 - DNA, 20 bp, synthetic construct
  source 1..20: mol_type = other DNA
cataataaccctcgaaagat

SEQ ID NO: 5431 - DNA, 20 bp, synthetic construct
  source 1..20: mol_type = other DNA
tgggtactcgtgccagtaat

SEQ ID NO: 5432 - DNA, 20 bp, synthetic construct
  source 1..20: mol_type = other DNA
catgcactctcgttccctta

SEQ ID NO: 5433 - DNA, 20 bp, synthetic construct
  source 1..20: mol_type = other DNA
cctcacattcgtcacgtaag

SEQ ID NO: 5434 - DNA, 20 bp, synthetic construct
  source 1..20: mol_type = other DNA
agtagccaccgatagaggtg

SEQ ID NO: 5435 - DNA, 20 bp, synthetic construct
  source 1..20: mol_type = other DNA
cagtgttcaaggctgcccta

SEQ ID NO: 5436 - DNA, 20 bp, synthetic construct
  source 1..20: mol_type = other DNA
cgtcaaggccgtgctgcaca

SEQ ID NO: 5437 - DNA, 20 bp, synthetic construct
  source 1..20: mol_type = other DNA
tttggtactgtcctaatcag

SEQ ID NO: 5438 - DNA, 20 bp, synthetic construct
  source 1..20: mol_type = other DNA
gatccaacgttcgccctgag

SEQ ID NO: 5439 - DNA, 20 bp, synthetic construct
  source 1..20: mol_type = other DNA
cgcatcgttctgagcgcgtg

SEQ ID NO: 5440 - DNA, 20 bp, synthetic construct
  source 1..20: mol_type = other DNA
gtaaaggcaactgaattaaa

SEQ ID NO: 5441 - DNA, 20 bp, synthetic construct
  source 1..20: mol_type = other DNA
cttgggtccgcactgaagcg

SEQ ID NO: 5442 - DNA, 20 bp, synthetic construct
  source 1..20: mol_type = other DNA
cccgcgcgtgggtaattgca

SEQ ID NO: 5443 - DNA, 20 bp, synthetic construct
  source 1..20: mol_type = other DNA
gcctgtgtttacgaatcgaa

SEQ ID NO: 5444 - DNA, 20 bp, synthetic construct
  source 1..20: mol_type = other DNA
gatccgttacaggcggctac

SEQ ID NO: 5445 - DNA, 20 bp, synthetic construct
  source 1..20: mol_type = other DNA
cctataagaaaccaagcccg

SEQ ID NO: 5446 - DNA, 20 bp, synthetic construct
  source 1..20: mol_type = other DNA
agaccgtaccgtaagggcaa

SEQ ID NO: 5447 - DNA, 20 bp, synthetic construct
  source 1..20: mol_type = other DNA
acgacgcctagcaagagtta

SEQ ID NO: 5448 - DNA, 20 bp, synthetic construct
  source 1..20: mol_type = other DNA
cgggtacgttgtgagtgaat

SEQ ID NO: 5449 - DNA, 20 bp, synthetic construct
  source 1..20: mol_type = other DNA
aacggctacgaaaccttccc

SEQ ID NO: 5450 - DNA, 20 bp, synthetic construct
  source 1..20: mol_type = other DNA
tctacagctctacaagacgc

SEQ ID NO: 5451 - DNA, 20 bp, synthetic construct
  source 1..20: mol_type = other DNA
agtattgatgggcattccgg

SEQ ID NO: 5452 - DNA, 20 bp, synthetic construct
  source 1..20: mol_type = other DNA
cgctcgcgtgtagtagtgga

SEQ ID NO: 5453 - DNA, 20 bp, synthetic construct
  source 1..20: mol_type = other DNA
gggttaggcgaatcactccc

SEQ ID NO: 5454 - DNA, 20 bp, synthetic construct
  source 1..20: mol_type = other DNA
gcctggacagggctagatct

SEQ ID NO: 5455 - DNA, 20 bp, synthetic construct
  source 1..20: mol_type = other DNA
gtgaccactataacgattca

SEQ ID NO: 5456 - DNA, 20 bp, synthetic construct
  source 1..20: mol_type = other DNA
gattctacttgccgttacat

SEQ ID NO: 5457 - DNA, 20 bp, synthetic construct
  source 1..20: mol_type = other DNA
atcagggtacttaccagtgg

SEQ ID NO: 5458 - DNA, 20 bp, synthetic construct
  source 1..20: mol_type = other DNA
ttgtgagtatgttgactgtt

SEQ ID NO: 5459 - DNA, 20 bp, synthetic construct
  source 1..20: mol_type = other DNA
agaatcactccttgcccacc

SEQ ID NO: 5460 - DNA, 20 bp, synthetic construct
  source 1..20: mol_type = other DNA
atcaccggacaaggtagacc

SEQ ID NO: 5461 - DNA, 20 bp, synthetic construct
  source 1..20: mol_type = other DNA
ccgattgatagaacgtacta

SEQ ID NO: 5462 - DNA, 20 bp, synthetic construct
  source 1..20: mol_type = other DNA
ttaataaggaacttccacga

SEQ ID NO: 5463 - DNA, 20 bp, synthetic construct
  source 1..20: mol_type = other DNA
taattcccgttccgccttta

SEQ ID NO: 5464 - DNA, 20 bp, synthetic construct
  source 1..20: mol_type = other DNA
gcatcttaagaaacgttatc

SEQ ID NO: 5465 - DNA, 20 bp, synthetic construct
  source 1..20: mol_type = other DNA
gtgactacatagcgagaagt

SEQ ID NO: 5466 - DNA, 20 bp, synthetic construct
  source 1..20: mol_type = other DNA
gaagttaacaggttcgttaa

SEQ ID NO: 5467 - DNA, 20 bp, synthetic construct
  source 1..20: mol_type = other DNA
tattatggtgcgtgcaaaca

SEQ ID NO: 5468 - DNA, 20 bp, synthetic construct
  source 1..20: mol_type = other DNA
gcgatgcgaattgcgatgga

SEQ ID NO: 5469 - DNA, 20 bp, synthetic construct
  source 1..20: mol_type = other DNA
ctatcttcaatcgtcagttg

SEQ ID NO: 5470 - DNA, 20 bp, synthetic construct
  source 1..20: mol_type = other DNA
agggctgtatgagctcgacg

SEQ ID NO: 5471 - DNA, 20 bp, synthetic construct
  source 1..20: mol_type = other DNA
tgtctgatcgcttcactcac

SEQ ID NO: 5472 - DNA, 20 bp, synthetic construct
  source 1..20: mol_type = other DNA
aagatacgtgtcatcattct

SEQ ID NO: 5473 - DNA, 20 bp, synthetic construct
  source 1..20: mol_type = other DNA
agagactgaaagagtggtgc

SEQ ID NO: 5474 - DNA, 20 bp, synthetic construct
  source 1..20: mol_type = other DNA
cgaaataagttcccaaagga

SEQ ID NO: 5475 - DNA, 20 bp, synthetic construct
  source 1..20: mol_type = other DNA
ctatggttcagctgcaactt

SEQ ID NO: 5476 - DNA, 20 bp, synthetic construct
  source 1..20: mol_type = other DNA
ctcagcatgacggtgattga

SEQ ID NO: 5477 - DNA, 20 bp, synthetic construct
  source 1..20: mol_type = other DNA
tacagcagctatcgaacgcg

SEQ ID NO: 5478 - DNA, 20 bp, synthetic construct
  source 1..20: mol_type = other DNA
cccgagtagatttcgcttta

SEQ ID NO: 5479 - DNA, 20 bp, synthetic construct
  source 1..20: mol_type = other DNA
gttggctacaagatccaaat

SEQ ID NO: 5480 - DNA, 20 bp, synthetic construct
  source 1..20: mol_type = other DNA
caatacgggctccacgaccg

SEQ ID NO: 5481 - DNA, 20 bp, synthetic construct
  source 1..20: mol_type = other DNA
ctgtacgtgacctgcattag

SEQ ID NO: 5482 - DNA, 20 bp, synthetic construct
  source 1..20: mol_type = other DNA
tataatccgaatactctcag

SEQ ID NO: 5483 - DNA, 20 bp, synthetic construct
  source 1..20: mol_type = other DNA
actaaacatctgtggccatc

SEQ ID NO: 5484 - DNA, 20 bp, synthetic construct
  source 1..20: mol_type = other DNA
ctagaacttgagtccattga

SEQ ID NO: 5485 - DNA, 20 bp, synthetic construct
  source 1..20: mol_type = other DNA
cagataatagcgaaaccgat

SEQ ID NO: 5486 - DNA, 20 bp, synthetic construct
  source 1..20: mol_type = other DNA
accgcgtatagcttagacat

SEQ ID NO: 5487 - DNA, 20 bp, synthetic construct
  source 1..20: mol_type = other DNA
caagggccagaagcgggtcc

SEQ ID NO: 5488 - DNA, 20 bp, synthetic construct
  source 1..20: mol_type = other DNA
tactggtcggcaatacggca

SEQ ID NO: 5489 - DNA, 20 bp, synthetic construct
  source 1..20: mol_type = other DNA
cccgcgcattcatgctagcg

SEQ ID NO: 5490 - DNA, 20 bp, synthetic construct
  source 1..20: mol_type = other DNA
atctagtccattggtgtgag

SEQ ID NO: 5491 - DNA, 20 bp, synthetic construct
  source 1..20: mol_type = other DNA
cgggagttctgttggcgaat

SEQ ID NO: 5492 - DNA, 20 bp, synthetic construct
  source 1..20: mol_type = other DNA
cgtgagggtttcagaggagt

SEQ ID NO: 5493 - DNA, 20 bp, synthetic construct
  source 1..20: mol_type = other DNA
acctcagttgatccttgcga

SEQ ID NO: 5494 - DNA, 20 bp, synthetic construct
  source 1..20: mol_type = other DNA
ctgaccacattacaagtgta

SEQ ID NO: 5495 - DNA, 20 bp, synthetic construct
  source 1..20: mol_type = other DNA
cggtgtactcatgagattcg

SEQ ID NO: 5496 - DNA, 20 bp, synthetic construct
  source 1..20: mol_type = other DNA
taatacgagccctttaaggg

SEQ ID NO: 5497 - DNA, 20 bp, synthetic construct
  source 1..20: mol_type = other DNA
catcagagtagcaaggtaat

SEQ ID NO: 5498 - DNA, 20 bp, synthetic construct
  source 1..20: mol_type = other DNA
tgtgagtgggacggcgagcc

SEQ ID NO: 5499 - DNA, 20 bp, synthetic construct
  source 1..20: mol_type = other DNA
agcagtctaccgaatggtta

SEQ ID NO: 5500 - DNA, 20 bp, synthetic construct
  source 1..20: mol_type = other DNA
attaccttacaaattctggg

SEQ ID NO: 5501 - DNA, 20 bp, synthetic construct
  source 1..20: mol_type = other DNA
tctcattgagggcgcattac

SEQ ID NO: 5502 - DNA, 20 bp, synthetic construct
  source 1..20: mol_type = other DNA
ttatactaacgcagaacgcg

SEQ ID NO: 5503 - DNA, 20 bp, synthetic construct
  source 1..20: mol_type = other DNA
tcccatatacatccgagctt

SEQ ID NO: 5504 - DNA, 20 bp, synthetic construct
  source 1..20: mol_type = other DNA
tcgaataggactcggtacaa

SEQ ID NO: 5505 - DNA, 20 bp, synthetic construct
  source 1..20: mol_type = other DNA
gaacagaactgcagtctcac

SEQ ID NO: 5506 - DNA, 20 bp, synthetic construct
  source 1..20: mol_type = other DNA
ggatatgagactgccggctg

SEQ ID NO: 5507 - DNA, 20 bp, synthetic construct
  source 1..20: mol_type = other DNA
attgcattgagacgcggttt

SEQ ID NO: 5508 - DNA, 20 bp, synthetic construct
  source 1..20: mol_type = other DNA
cccgcggcacattgctaatg

SEQ ID NO: 5509 - DNA, 20 bp, synthetic construct
  source 1..20: mol_type = other DNA
cggcacttatacggaaggca

SEQ ID NO: 5510 - DNA, 20 bp, synthetic construct
  source 1..20: mol_type = other DNA
actgccgttggtcagctgat

SEQ ID NO: 5511 - DNA, 20 bp, synthetic construct
  source 1..20: mol_type = other DNA
taaatgtaataggtgcaccg

SEQ ID NO: 5512 - DNA, 20 bp, synthetic construct
  source 1..20: mol_type = other DNA
cagattctgcaacacttaag

SEQ ID NO: 5513 - DNA, 20 bp, synthetic construct
  source 1..20: mol_type = other DNA
ttctaacacgcctaaccagg

SEQ ID NO: 5514 - DNA, 20 bp, synthetic construct
  source 1..20: mol_type = other DNA
gagacgcggtcactctatgg

SEQ ID NO: 5515 - DNA, 20 bp, synthetic construct
  source 1..20: mol_type = other DNA
ctatagacatcactcgctcc

SEQ ID NO: 5516 - DNA, 20 bp, synthetic construct
  source 1..20: mol_type = other DNA
actgccggtttcatgcttgg

SEQ ID NO: 5517 - DNA, 20 bp, synthetic construct
  source 1..20: mol_type = other DNA
cacaccgaaattccggttac

SEQ ID NO: 5518 - DNA, 20 bp, synthetic construct
  source 1..20: mol_type = other DNA
gaaagtagggtgtatgctga

SEQ ID NO: 5519 - DNA, 20 bp, synthetic construct
  source 1..20: mol_type = other DNA
atcgacgtatcggtcagcca

SEQ ID NO: 5520 - DNA, 20 bp, synthetic construct
  source 1..20: mol_type = other DNA
tatgcttggtctctgcattt

SEQ ID NO: 5521 - DNA, 20 bp, synthetic construct
  source 1..20: mol_type = other DNA
gcgcgcatatcacccgtcac

SEQ ID NO: 5522 - DNA, 20 bp, synthetic construct
  source 1..20: mol_type = other DNA
accgtgtgcgacggagatgg

SEQ ID NO: 5523 - DNA, 20 bp, synthetic construct
  source 1..20: mol_type = other DNA
ctttcaacccatctgatagc

SEQ ID NO: 5524 - DNA, 20 bp, synthetic construct
  source 1..20: mol_type = other DNA
agcatctgtttacactgact

SEQ ID NO: 5525 - DNA, 20 bp, synthetic construct
  source 1..20: mol_type = other DNA
atgcgggattgaggtcaaag

SEQ ID NO: 5526 - DNA, 20 bp, synthetic construct
  source 1..20: mol_type = other DNA
cggatagcaatatcctctaa

SEQ ID NO: 5527 - DNA, 20 bp, synthetic construct
  source 1..20: mol_type = other DNA
cgaccatccgtccagaatcg

SEQ ID NO: 5528 - DNA, 20 bp, synthetic construct
  source 1..20: mol_type = other DNA
ggcaccgaatcgtgacccgt

SEQ ID NO: 5529 - DNA, 20 bp, synthetic construct
  source 1..20: mol_type = other DNA
tcatacccgagactaggcaa

SEQ ID NO: 5530 - DNA, 20 bp, synthetic construct
  source 1..20: mol_type = other DNA
gattatgccgaactgatgat

SEQ ID NO: 5531 - DNA, 20 bp, synthetic construct
  source 1..20: mol_type = other DNA
ttggcagtaccgtgagtaat

SEQ ID NO: 5532 - DNA, 20 bp, synthetic construct
  source 1..20: mol_type = other DNA
ggtagagtcagcacctgcat

SEQ ID NO: 5533 - DNA, 20 bp, synthetic construct
  source 1..20: mol_type = other DNA
catcatgtccgcccgagtga

SEQ ID NO: 5534 - DNA, 20 bp, synthetic construct
  source 1..20: mol_type = other DNA
tcacgaggctgggatcgcat

SEQ ID NO: 5535 - DNA, 20 bp, synthetic construct
  source 1..20: mol_type = other DNA
aagacccacatcacctatag

SEQ ID NO: 5536 - DNA, 20 bp, synthetic construct
  source 1..20: mol_type = other DNA
aataagaatcacatgttcga

SEQ ID NO: 5537 - DNA, 20 bp, synthetic construct
  source 1..20: mol_type = other DNA
acgcccgagagcacaagaac

SEQ ID NO: 5538 - DNA, 20 bp, synthetic construct
  source 1..20: mol_type = other DNA
acaacagattatggttggag

SEQ ID NO: 5539 - DNA, 20 bp, synthetic construct
  source 1..20: mol_type = other DNA
tgcggtccactgccaagaac

SEQ ID NO: 5540 - DNA, 20 bp, synthetic construct
  source 1..20: mol_type = other DNA
tcttgatacgctattcgaga

SEQ ID NO: 5541 - DNA, 20 bp, synthetic construct
  source 1..20: mol_type = other DNA
agggtagtatggctctgagt

SEQ ID NO: 5542 - DNA, 20 bp, synthetic construct
  source 1..20: mol_type = other DNA
agtgcacgattatgcgtcat

SEQ ID NO: 5543 - DNA, 20 bp, synthetic construct
  source 1..20: mol_type = other DNA
gaacatccagttcctacgat

SEQ ID NO: 5544 - DNA, 20 bp, synthetic construct
  source 1..20: mol_type = other DNA
gctaaagtaaagcgatacac

SEQ ID NO: 5545 - DNA, 20 bp, synthetic construct
  source 1..20: mol_type = other DNA
ggatgaaggtatgtatgtat

SEQ ID NO: 5546 - DNA, 20 bp, synthetic construct
  source 1..20: mol_type = other DNA
ccctaggtacgatgaagtaa

SEQ ID NO: 5547 - DNA, 20 bp, synthetic construct
  source 1..20: mol_type = other DNA
tcaaagtgtaatccacaggg

SEQ ID NO: 5548 - DNA, 20 bp, synthetic construct
  source 1..20: mol_type = other DNA
caagacctccgcgttatgga

SEQ ID NO: 5549 - DNA, 20 bp, synthetic construct
  source 1..20: mol_type = other DNA
caccgccctaaagtacgtca

SEQ ID NO: 5550 - DNA, 20 bp, synthetic construct
  source 1..20: mol_type = other DNA
ggtcggaggcttgttagaaa

SEQ ID NO: 5551 - DNA, 20 bp, synthetic construct
  source 1..20: mol_type = other DNA
ttgcttcgcactgaacaagc

SEQ ID NO: 5552 - DNA, 20 bp, synthetic construct
  source 1..20: mol_type = other DNA
tgcccgagcgtatctgccga

SEQ ID NO: 5553 - DNA, 20 bp, synthetic construct
  source 1..20: mol_type = other DNA
catctttcctgatttgtgca

SEQ ID NO: 5554 - DNA, 20 bp, synthetic construct
  source 1..20: mol_type = other DNA
gcgtaacgcctaataatcgc

SEQ ID NO: 5555 - DNA, 20 bp, synthetic construct
  source 1..20: mol_type = other DNA
ctggccaatttgccaataaa

SEQ ID NO: 5556 - DNA, 20 bp, synthetic construct
  source 1..20: mol_type = other DNA
ggagaacccgcgtatcagac

SEQ ID NO: 5557 - DNA, 20 bp, synthetic construct
  source 1..20: mol_type = other DNA
ggatttcctattgtccgaag

SEQ ID NO: 5558 - DNA, 20 bp, synthetic construct
  source 1..20: mol_type = other DNA
aaacagtacacacggttagc

SEQ ID NO: 5559 - DNA, 20 bp, synthetic construct
  source 1..20: mol_type = other DNA
caaggaccaacttctagtaa

SEQ ID NO: 5560 - DNA, 20 bp, synthetic construct
  source 1..20: mol_type = other DNA
aagaacgcccaacccaacca

SEQ ID NO: 5561 - DNA, 20 bp, synthetic construct
  source 1..20: mol_type = other DNA
tttggttaacaggtccgggc

SEQ ID NO: 5562 - DNA, 20 bp, synthetic construct
  source 1..20: mol_type = other DNA
attcaggatcagtcacgatc

SEQ ID NO: 5563 - DNA, 20 bp, synthetic construct
  source 1..20: mol_type = other DNA
taggcaatcaggcagcgggc

SEQ ID NO: 5564 - DNA, 20 bp, synthetic construct
  source 1..20: mol_type = other DNA
tacaccctatctgtggagcg

SEQ ID NO: 5565 - DNA, 20 bp, synthetic construct
  source 1..20: mol_type = other DNA
cggagcactcatcgatctta

SEQ ID NO: 5566 - DNA, 20 bp, synthetic construct
  source 1..20: mol_type = other DNA
gacgctggtgtatgggtgga

SEQ ID NO: 5567 - DNA, 20 bp, synthetic construct
  source 1..20: mol_type = other DNA
tagggcagtgaatccgtcga

SEQ ID NO: 5568 - DNA, 20 bp, synthetic construct
  source 1..20: mol_type = other DNA
tctatatctatcggttcgac

SEQ ID NO: 5569 - DNA, 20 bp, synthetic construct
  source 1..20: mol_type = other DNA
tgatcatctccctgcgctcg

SEQ ID NO: 5570 - DNA, 20 bp, synthetic construct
  source 1..20: mol_type = other DNA
agtacacctggaagtgtggg

SEQ ID NO: 5571 - DNA, 20 bp, synthetic construct
  source 1..20: mol_type = other DNA
agcactacaatcaattgcct

SEQ ID NO: 5572 - DNA, 20 bp, synthetic construct
  source 1..20: mol_type = other DNA
tcttagagaagggtgaggaa

SEQ ID NO: 5573 - DNA, 20 bp, synthetic construct
  source 1..20: mol_type = other DNA
cgagatacgtgcgttgaatg

SEQ ID NO: 5574 - DNA, 20 bp, synthetic construct
  source 1..20: mol_type = other DNA
taaacgagcagcttgtggct

SEQ ID NO: 5575 - DNA, 20 bp, synthetic construct
  source 1..20: mol_type = other DNA
gagcggagttgtcatcgatc

SEQ ID NO: 5576 - DNA, 20 bp, synthetic construct
  source 1..20: mol_type = other DNA
cattcgaatccatctagctc

SEQ ID NO: 5577 - DNA, 20 bp, synthetic construct
  source 1..20: mol_type = other DNA
ggtgtatcacgtcgctgtga

SEQ ID NO: 5578 - DNA, 20 bp, synthetic construct
  source 1..20: mol_type = other DNA
attaggtacgctttgggcct

SEQ ID NO: 5579 - DNA, 20 bp, synthetic construct
  source 1..20: mol_type = other DNA
actttccaatggtcttcggt

SEQ ID NO: 5580 - DNA, 20 bp, synthetic construct
  source 1..20: mol_type = other DNA
ctaataccttaccgcttctg

SEQ ID NO: 5581 - DNA, 20 bp, synthetic construct
  source 1..20: mol_type = other DNA
gaagagtcaagcccggacgg

SEQ ID NO: 5582 - DNA, 20 bp, synthetic construct
  source 1..20: mol_type = other DNA
ctatggattccctctatagt

SEQ ID NO: 5583 - DNA, 20 bp, synthetic construct
  source 1..20: mol_type = other DNA
aaccaatcaacagaagagaa

SEQ ID NO: 5584 - DNA, 20 bp, synthetic construct
  source 1..20: mol_type = other DNA
tactgcgattagcctgaaca

SEQ ID NO: 5585 - DNA, 20 bp, synthetic construct
  source 1..20: mol_type = other DNA
ctcatcggtccgtgtggaac

SEQ ID NO: 5586 - DNA, 20 bp, synthetic construct
  source 1..20: mol_type = other DNA
atttcccaggttacgtacaa

SEQ ID NO: 5587 - DNA, 20 bp, synthetic construct
  source 1..20: mol_type = other DNA
ggcccattcccaatatggta

SEQ ID NO: 5588 - DNA, 20 bp, synthetic construct
  source 1..20: mol_type = other DNA
actaattctgagtcgtctag

SEQ ID NO: 5589 - DNA, 20 bp, synthetic construct
  source 1..20: mol_type = other DNA
gtcaccaggctaaatcagta

SEQ ID NO: 5590 - DNA, 20 bp, synthetic construct
  source 1..20: mol_type = other DNA
ccgtagagacgcactatgag

SEQ ID NO: 5591 - DNA, 20 bp, synthetic construct
  source 1..20: mol_type = other DNA
gcttggtacttcggaagcga

SEQ ID NO: 5592 - DNA, 20 bp, synthetic construct
  source 1..20: mol_type = other DNA
acttgttagaacctactcct

SEQ ID NO: 5593 - DNA, 20 bp, synthetic construct
  source 1..20: mol_type = other DNA
ggcccagcatggtatcgagt

SEQ ID NO: 5594 - DNA, 20 bp, synthetic construct
  source 1..20: mol_type = other DNA
gaatcatgatggctcattaa

SEQ ID NO: 5595 - DNA, 20 bp, synthetic construct
  source 1..20: mol_type = other DNA
cgggaactgggtggttctga

SEQ ID NO: 5596 - DNA, 20 bp, synthetic construct
  source 1..20: mol_type = other DNA
gcttggaaacaccaaggcga

SEQ ID NO: 5597 - DNA, 20 bp, synthetic construct
  source 1..20: mol_type = other DNA
attctcaggacctgagtcca

SEQ ID NO: 5598 - DNA, 20 bp, synthetic construct
  source 1..20: mol_type = other DNA
ggtccataaacccatgcaat

SEQ ID NO: 5599 - DNA, 20 bp, synthetic construct
  source 1..20: mol_type = other DNA
gtcactaagagcttagtgtt

SEQ ID NO: 5600 - DNA, 20 bp, synthetic construct
  source 1..20: mol_type = other DNA
cgtaggccacacgtcctctc

SEQ ID NO: 5601 - DNA, 20 bp, synthetic construct
  source 1..20: mol_type = other DNA
gtgatattcgaacgacttga

SEQ ID NO: 5602 - DNA, 20 bp, synthetic construct
  source 1..20: mol_type = other DNA
ttcggttatttaatggtgtg

SEQ ID NO: 5603 - DNA, 20 bp, synthetic construct
  source 1..20: mol_type = other DNA
cgcacagtcaacgactacaa

SEQ ID NO: 5604 - DNA, 20 bp, synthetic construct
  source 1..20: mol_type = other DNA
gcgtgaagagttaaccgaat

SEQ ID NO: 5605 - DNA, 20 bp, synthetic construct
  source 1..20: mol_type = other DNA
actcctagtagcgtgccatt

SEQ ID NO: 5606 - DNA, 20 bp, synthetic construct
  source 1..20: mol_type = other DNA
tgagggattcgagactggtg

SEQ ID NO: 5607 - DNA, 20 bp, synthetic construct
  source 1..20: mol_type = other DNA
tcactggcggaacatgctcc

SEQ ID NO: 5608 - DNA, 20 bp, synthetic construct
  source 1..20: mol_type = other DNA
gtgatctgagtcactctgct

SEQ ID NO: 5609 - DNA, 20 bp, synthetic construct
  source 1..20: mol_type = other DNA
gttagactcataaggttccc

SEQ ID NO: 5610 - DNA, 20 bp, synthetic construct
  source 1..20: mol_type = other DNA
ggcatgtccagaacgccgtt

SEQ ID NO: 5611 - DNA, 20 bp, synthetic construct
  source 1..20: mol_type = other DNA
acgctattctctttacgcta

SEQ ID NO: 5612 - DNA, 20 bp, synthetic construct
  source 1..20: mol_type = other DNA
tgcctaccataaagatacgg

SEQ ID NO: 5613 - DNA, 20 bp, synthetic construct
  source 1..20: mol_type = other DNA
ccaagcagtcgtgcgatcgt

SEQ ID NO: 5614 - DNA, 20 bp, synthetic construct
  source 1..20: mol_type = other DNA
gaacggtcgatctttgacga

SEQ ID NO: 5615 - DNA, 20 bp, synthetic construct
  source 1..20: mol_type = other DNA
cgaagtgttgggattctcca

SEQ ID NO: 5616 - DNA, 20 bp, synthetic construct
  source 1..20: mol_type = other DNA
tcaatttgtcggtccgccgt

SEQ ID NO: 5617 - DNA, 20 bp, synthetic construct
  source 1..20: mol_type = other DNA
ttagcatggtgtcatggaga

SEQ ID NO: 5618 - DNA, 20 bp, synthetic construct
  source 1..20: mol_type = other DNA
cccatccctagtgacctctg

SEQ ID NO: 5619 - DNA, 20 bp, synthetic construct
  source 1..20: mol_type = other DNA
ggattcctagcgctgtgtgt

SEQ ID NO: 5620 - DNA, 20 bp, synthetic construct
  source 1..20: mol_type = other DNA
atgcagtcaccgaagctctc

SEQ ID NO: 5621 - DNA, 20 bp, synthetic construct
  source 1..20: mol_type = other DNA
tattccgtgctgggcgccag

SEQ ID NO: 5622 - DNA, 20 bp, synthetic construct
  source 1..20: mol_type = other DNA
accatagctacacgctttgg

SEQ ID NO: 5623 - DNA, 20 bp, synthetic construct
  source 1..20: mol_type = other DNA
tcctcctattcatattcact

SEQ ID NO: 5624 - DNA, 20 bp, synthetic construct
  source 1..20: mol_type = other DNA
atcacaaatgcaactggcca

SEQ ID NO: 5625 - DNA, 20 bp, synthetic construct
  source 1..20: mol_type = other DNA
gtgtcctgtcgctccagaca

SEQ ID NO: 5626 - DNA, 20 bp, synthetic construct
  source 1..20: mol_type = other DNA
agagttgggaattgcgagac

SEQ ID NO: 5627 - DNA, 20 bp, synthetic construct
  source 1..20: mol_type = other DNA
aacgcaggactgacatgtct

SEQ ID NO: 5628 - DNA, 20 bp, synthetic construct
  source 1..20: mol_type = other DNA
tgccgtaatgggtgggagag

SEQ ID NO: 5629 - DNA, 20 bp, synthetic construct
  source 1..20: mol_type = other DNA
gtaaacttacgtatctgcga

SEQ ID NO: 5630 - DNA, 20 bp, synthetic construct
  source 1..20: mol_type = other DNA
acacctggtagttccgcgca

SEQ ID NO: 5631 - DNA, 20 bp, synthetic construct
  source 1..20: mol_type = other DNA
acacagtcgtcgtgacggtt

SEQ ID NO: 5632 - DNA, 20 bp, synthetic construct
  source 1..20: mol_type = other DNA
agaagtcagacttcttcgcg

SEQ ID NO: 5633 - DNA, 20 bp, synthetic construct
  source 1..20: mol_type = other DNA
atcaatcttcaagtgttggg

SEQ ID NO: 5634 - DNA, 20 bp, synthetic construct
  source 1..20: mol_type = other DNA
aagcacgcagctttctcatc

SEQ ID NO: 5635 - DNA, 20 bp, synthetic construct
  source 1..20: mol_type = other DNA
tcgaacggctgtgtctgcgt

SEQ ID NO: 5636 - DNA, 20 bp, synthetic construct
  source 1..20: mol_type = other DNA
aatgggtgcgggtcttaccg

SEQ ID NO: 5637 - DNA, 20 bp, synthetic construct
  source 1..20: mol_type = other DNA
aaacgcattgactagcgttg

SEQ ID NO: 5638 - DNA, 20 bp, synthetic construct
  source 1..20: mol_type = other DNA
tacacggcgcagtgaattaa

SEQ ID NO: 5639 - DNA, 20 bp, synthetic construct
  source 1..20: mol_type = other DNA
tctctctgcctcgcccaatg

SEQ ID NO: 5640 - DNA, 20 bp, synthetic construct
  source 1..20: mol_type = other DNA
ctttacgagcaagggacgag

SEQ ID NO: 5641 - DNA, 20 bp, synthetic construct
  source 1..20: mol_type = other DNA
acgtaactgctaagcaccac

SEQ ID NO: 5642 - DNA, 20 bp, synthetic construct
  source 1..20: mol_type = other DNA
taataagccgcacgtggtga

SEQ ID NO: 5643 - DNA, 20 bp, synthetic construct
  source 1..20: mol_type = other DNA
gtgctggcttactagcatgt

SEQ ID NO: 5644 - DNA, 20 bp, synthetic construct
  source 1..20: mol_type = other DNA
actaaacaattgaggtacag

SEQ ID NO: 5645 - DNA, 20 bp, synthetic construct
  source 1..20: mol_type = other DNA
cagggactgagacagtccac

SEQ ID NO: 5646 - DNA, 20 bp, synthetic construct
  source 1..20: mol_type = other DNA
tgttcccgtttactagcctg

SEQ ID NO: 5647 - DNA, 20 bp, synthetic construct
  source 1..20: mol_type = other DNA
gcctgaaatagttacaatca

SEQ ID NO: 5648 - DNA, 20 bp, synthetic construct
  source 1..20: mol_type = other DNA
ggtctcatggaccattggtc

SEQ ID NO: 5649 - DNA, 20 bp, synthetic construct
  source 1..20: mol_type = other DNA
acccattgagagccgtaggc

SEQ ID NO: 5650 - DNA, 20 bp, synthetic construct
  source 1..20: mol_type = other DNA
caaatgatgtaaagcgtctt

SEQ ID NO: 5651 - DNA, 20 bp, synthetic construct
  source 1..20: mol_type = other DNA
gtaatggttcactcttactg

SEQ ID NO: 5652 - DNA, 20 bp, synthetic construct
  source 1..20: mol_type = other DNA
cctggagctgacacttatga

SEQ ID NO: 5653 - DNA, 20 bp, synthetic construct
  source 1..20: mol_type = other DNA
ttggcagaactaaccattta

SEQ ID NO: 5654 - DNA, 20 bp, synthetic construct
  source 1..20: mol_type = other DNA
ttgtgtgttgtcatttccat

SEQ ID NO: 5655 - DNA, 20 bp, synthetic construct
  source 1..20: mol_type = other DNA
tacggtgtcagatctcctaa

SEQ ID NO: 5656 - DNA, 20 bp, synthetic construct
  source 1..20: mol_type = other DNA
tctcctgcgccgatcagatt

SEQ ID NO: 5657 - DNA, 20 bp, synthetic construct
  source 1..20: mol_type = other DNA
agtccatggctaggagagcc

SEQ ID NO: 5658 - DNA, 20 bp, synthetic construct
  source 1..20: mol_type = other DNA
tctattcgtgtgacactgcc

SEQ ID NO: 5659 - DNA, 20 bp, synthetic construct
  source 1..20: mol_type = other DNA
atgaccgcgaggacttacat

SEQ ID NO: 5660 - DNA, 20 bp, synthetic construct
  source 1..20: mol_type = other DNA
gatgaggaaacaattgccga

SEQ ID NO: 5661 - DNA, 20 bp, synthetic construct
  source 1..20: mol_type = other DNA
ttatttcagcaccgcctgcc

SEQ ID NO: 5662 - DNA, 20 bp, synthetic construct
  source 1..20: mol_type = other DNA
ccgctgcaggaccactttcc

SEQ ID NO: 5663 - DNA, 20 bp, synthetic construct
  source 1..20: mol_type = other DNA
acccgtttgatgagcagtga

SEQ ID NO: 5664 - DNA, 20 bp, synthetic construct
  source 1..20: mol_type = other DNA
gtgataggcagtctacctct

SEQ ID NO: 5665 - DNA, 20 bp, synthetic construct
  source 1..20: mol_type = other DNA
gctaatggatatttgagtcc

SEQ ID NO: 5666 - DNA, 20 bp, synthetic construct
  source 1..20: mol_type = other DNA
aggactcctaagacacgacc

SEQ ID NO: 5667 - DNA, 20 bp, synthetic construct
  source 1..20: mol_type = other DNA
accagaaacgcggagttcct

SEQ ID NO: 5668 - DNA, 20 bp, synthetic construct
  source 1..20: mol_type = other DNA
cggtcgtagttacaaccaat

SEQ ID NO: 5669 - DNA, 20 bp, synthetic construct
  source 1..20: mol_type = other DNA
aaagcgttagcggataggaa

SEQ ID NO: 5670 - DNA, 20 bp, synthetic construct
  source 1..20: mol_type = other DNA
ccgttacgatacgaattagc

SEQ ID NO: 5671 - DNA, 20 bp, synthetic construct
  source 1..20: mol_type = other DNA
ctgcgcatcaggctctcagt

SEQ ID NO: 5672 - DNA, 20 bp, synthetic construct
  source 1..20: mol_type = other DNA
ctatccggcagcccattgag

SEQ ID NO: 5673 - DNA, 20 bp, synthetic construct
  source 1..20: mol_type = other DNA
tctgatagagcttcgaagaa

SEQ ID NO: 5674 - DNA, 20 bp, synthetic construct
  source 1..20: mol_type = other DNA
ctttagtgatggacttccta

SEQ ID NO: 5675 - DNA, 20 bp, synthetic construct
  source 1..20: mol_type = other DNA
tgctagatgaagcgtgaaga

SEQ ID NO: 5676 - DNA, 20 bp, synthetic construct
  source 1..20: mol_type = other DNA
ttcacgacgcccttccgcat

SEQ ID NO: 5677 - DNA, 20 bp, synthetic construct
  source 1..20: mol_type = other DNA
gtttcgatggtaatgctgac

SEQ ID NO: 5678 - DNA, 20 bp, synthetic construct
  source 1..20: mol_type = other DNA
ttagtgcagtaacaatggac

SEQ ID NO: 5679 - DNA, 20 bp, synthetic construct
  source 1..20: mol_type = other DNA
tcgatccgtctcgggagctc

SEQ ID NO: 5680 - DNA, 20 bp, synthetic construct
  source 1..20: mol_type = other DNA
gcgctgaacaagccaagtaa

SEQ ID NO: 5681 - DNA, 20 bp, synthetic construct
  source 1..20: mol_type = other DNA
cgctcctgctagctaaagtt

SEQ ID NO: 5682 - DNA, 20 bp, synthetic construct
  source 1..20: mol_type = other DNA
cgccgcaccacgtctgatta

SEQ ID NO: 5683 - DNA, 20 bp, synthetic construct
  source 1..20: mol_type = other DNA
gcttgagcacgatgtcgaag

SEQ ID NO: 5684 - DNA, 20 bp, synthetic construct
  source 1..20: mol_type = other DNA
atagagttcgcaacccggat

SEQ ID NO: 5685 - DNA, 20 bp, synthetic construct
  source 1..20: mol_type = other DNA
ctccgccgagatggacacat

SEQ ID NO: 5686 - DNA, 20 bp, synthetic construct
  source 1..20: mol_type = other DNA
ctcggtccatgttaattaac

SEQ ID NO: 5687 - DNA, 20 bp, synthetic construct
  source 1..20: mol_type = other DNA
caatggctgggtcccgcgag

SEQ ID NO: 5688 - DNA, 20 bp, synthetic construct
  source 1..20: mol_type = other DNA
tggttctttatcctccgcga

SEQ ID NO: 5689 - DNA, 20 bp, synthetic construct
  source 1..20: mol_type = other DNA
acagtgtagataccgcagtt

SEQ ID NO: 5690 - DNA, 20 bp, synthetic construct
  source 1..20: mol_type = other DNA
ctctggtactacagagccat

SEQ ID NO: 5691 - DNA, 20 bp, synthetic construct
  source 1..20: mol_type = other DNA
ttacgggacggttacatatg

SEQ ID NO: 5692 - DNA, 20 bp, synthetic construct
  source 1..20: mol_type = other DNA
tcactaacctacccactcct

SEQ ID NO: 5693 - DNA, 20 bp, synthetic construct
  source 1..20: mol_type = other DNA
tacccggctgctagaatacg

SEQ ID NO: 5694 - DNA, 20 bp, synthetic construct
  source 1..20: mol_type = other DNA
ttgagatggcgtcagcttag

SEQ ID NO: 5695 - DNA, 20 bp, synthetic construct
  source 1..20: mol_type = other DNA
cagctgatcctttgggaata

SEQ ID NO: 5696 - DNA, 20 bp, synthetic construct
  source 1..20: mol_type = other DNA
tacttcggtttaagtactcc

SEQ ID NO: 5697 - DNA, 20 bp, synthetic construct
  source 1..20: mol_type = other DNA
gctagcttcggagcataaag

SEQ ID NO: 5698 - DNA, 20 bp, synthetic construct
  source 1..20: mol_type = other DNA
aagcgaaacgtagggaggcc

SEQ ID NO: 5699 - DNA, 20 bp, synthetic construct
  source 1..20: mol_type = other DNA
tttggcaggaatagaaggtc

SEQ ID NO: 5700 - DNA, 20 bp, synthetic construct
  source 1..20: mol_type = other DNA
gatgcatacgtagggagtgc

SEQ ID NO: 5701 - DNA, 20 bp, synthetic construct
  source 1..20: mol_type = other DNA
gtcctcctggagtcgatttg

SEQ ID NO: 5702 - DNA, 20 bp, synthetic construct
  source 1..20: mol_type = other DNA
ctctctgtatctacgtgctc

SEQ ID NO: 5703 - DNA, 20 bp, synthetic construct
  source 1..20: mol_type = other DNA
caacacaggcgggtataagg

SEQ ID NO: 5704 - DNA, 20 bp, synthetic construct
  source 1..20: mol_type = other DNA
atctatcccgcaaattggac

SEQ ID NO: 5705 - DNA, 20 bp, synthetic construct
  source 1..20: mol_type = other DNA
gttatataacaatcagggtc

SEQ ID NO: 5706 - DNA, 20 bp, synthetic construct
  source 1..20: mol_type = other DNA
taggacgccagatcatgtcc

SEQ ID NO: 5707 - DNA, 20 bp, synthetic construct
  source 1..20: mol_type = other DNA
ggccaagataacgatgcacg

SEQ ID NO: 5708 - DNA, 20 bp, synthetic construct
  source 1..20: mol_type = other DNA
gttgttgagcgcagactatt

SEQ ID NO: 5709 - DNA, 20 bp, synthetic construct
  source 1..20: mol_type = other DNA
ggttagttgcgctacctatt

SEQ ID NO: 5710 - DNA, 20 bp, synthetic construct
  source 1..20: mol_type = other DNA
ctgacggtatttgatcgtca

SEQ ID NO: 5711 - DNA, 20 bp, synthetic construct
  source 1..20: mol_type = other DNA
gatctacctcttacgagaat

SEQ ID NO: 5712 - DNA, 20 bp, synthetic construct
  source 1..20: mol_type = other DNA
cgagatactaattccgaggt

SEQ ID NO: 5713 - DNA, 20 bp, synthetic construct
  source 1..20: mol_type = other DNA
ccatgggtatcatacacctt

SEQ ID NO: 5714 - DNA, 20 bp, synthetic construct
  source 1..20: mol_type = other DNA
ctggcatgagggaagattct

SEQ ID NO: 5715 - DNA, 20 bp, synthetic construct
  source 1..20: mol_type = other DNA
gcctaatcatctcaaatgaa

SEQ ID NO: 5716 - DNA, 20 bp, synthetic construct
  source 1..20: mol_type = other DNA
aaacgcattcttagtcggtt

SEQ ID NO: 5717 - DNA, 20 bp, synthetic construct
  source 1..20: mol_type = other DNA
caaccacgtcctccgcgaaa

SEQ ID NO: 5718 - DNA, 20 bp, synthetic construct
  source 1..20: mol_type = other DNA
gctggctggaatgacagtgt

SEQ ID NO: 5719 - DNA, 20 bp, synthetic construct
  source 1..20: mol_type = other DNA
agtggattgtgtgtcgtgga

SEQ ID NO: 5720 - DNA, 20 bp, synthetic construct
  source 1..20: mol_type = other DNA
aacaaatcgaagtaactgca

SEQ ID NO: 5721 - DNA, 20 bp, synthetic construct
  source 1..20: mol_type = other DNA
gattcagcggcgatccttat

SEQ ID NO: 5722 - DNA, 20 bp, synthetic construct
  source 1..20: mol_type = other DNA
tgtttccgcagcagtggatt

SEQ ID NO: 5723 - DNA, 20 bp, synthetic construct
  source 1..20: mol_type = other DNA
cggatggtaccgtacaacag

SEQ ID NO: 5724 - DNA, 20 bp, synthetic construct
  source 1..20: mol_type = other DNA
atatgacgaacgatcccgat

SEQ ID NO: 5725 - DNA, 20 bp, synthetic construct
  source 1..20: mol_type = other DNA
caggcactttgtatggaatc

SEQ ID NO: 5726 - DNA, 20 bp, synthetic construct
  source 1..20: mol_type = other DNA
agccagactgaactgtattg

SEQ ID NO: 5727 - DNA, 20 bp, synthetic construct
  source 1..20: mol_type = other DNA
tgggtgcagtcaatgtaaat

SEQ ID NO: 5728 - DNA, 20 bp, synthetic construct
  source 1..20: mol_type = other DNA
ctactcggcaatagcgctta

SEQ ID NO: 5729 - DNA, 20 bp, synthetic construct
  source 1..20: mol_type = other DNA
acctggccaaagcgtgcaaa

SEQ ID NO: 5730 - DNA, 20 bp, synthetic construct
  source 1..20: mol_type = other DNA
ctgactatgccgatgcacaa

SEQ ID NO: 5731 - DNA, 20 bp, synthetic construct
  source 1..20: mol_type = other DNA
tgggcgtgaaatttgcccac

SEQ ID NO: 5732 - DNA, 20 bp, synthetic construct
  source 1..20: mol_type = other DNA
cgttcccgcagaatgtgata

SEQ ID NO: 5733 - DNA, 20 bp, synthetic construct
  source 1..20: mol_type = other DNA
caagaaacagagtttgactg

SEQ ID NO: 5734 - DNA, 20 bp, synthetic construct
  source 1..20: mol_type = other DNA
gcagggctaacacgagtcct

SEQ ID NO: 5735 - DNA, 20 bp, synthetic construct
  source 1..20: mol_type = other DNA
agaacagagaggagcacgcg

SEQ ID NO: 5736 - DNA, 20 bp, synthetic construct
  source 1..20: mol_type = other DNA
catgatcctgagagcaacag

SEQ ID NO: 5737 - DNA, 20 bp, synthetic construct
  source 1..20: mol_type = other DNA
ccgacaaatcttcggcatca

SEQ ID NO: 5738 - DNA, 20 bp, synthetic construct
  source 1..20: mol_type = other DNA
ttgtgcgtgtccctatcgga

SEQ ID NO: 5739 - DNA, 20 bp, synthetic construct
  source 1..20: mol_type = other DNA
aacctcccacttagtggtac

SEQ ID NO: 5740 - DNA, 20 bp, synthetic construct
  source 1..20: mol_type = other DNA
ggatctcctggaaataaatt

SEQ ID NO: 5741 - DNA, 20 bp, synthetic construct
  source 1..20: mol_type = other DNA
acaatcgataacgcaggcac

SEQ ID NO: 5742 - DNA, 20 bp, synthetic construct
  source 1..20: mol_type = other DNA
gcagactgtacccttcccat

SEQ ID NO: 5743 - DNA, 20 bp, synthetic construct
  source 1..20: mol_type = other DNA
tctaagcggacaattctcag

SEQ ID NO: 5744 - DNA, 20 bp, synthetic construct
  source 1..20: mol_type = other DNA
acgctgactctaatcgcaaa

SEQ ID NO: 5745 - DNA, 20 bp, synthetic construct
  source 1..20: mol_type = other DNA
caaccttacctgtactttgc

SEQ ID NO: 5746 - DNA, 20 bp, synthetic construct
  source 1..20: mol_type = other DNA
aatcgcttgctgccatgccg

SEQ ID NO: 5747 - DNA, 20 bp, synthetic construct
  source 1..20: mol_type = other DNA
tgggtttgatccctaactgt

SEQ ID NO: 5748 - DNA, 20 bp, synthetic construct
  source 1..20: mol_type = other DNA
tcaatctcgccacaggccat

SEQ ID NO: 5749 - DNA, 20 bp, synthetic construct
  source 1..20: mol_type = other DNA
ccaatctcccattcctgaaa

SEQ ID NO: 5750 - DNA, 20 bp, synthetic construct
  source 1..20: mol_type = other DNA
cgactctacttgttaaaggc

SEQ ID NO: 5751 - DNA, 20 bp, synthetic construct
  source 1..20: mol_type = other DNA
tgcagtacgtagcatcctaa

SEQ ID NO: 5752 - DNA, 20 bp, synthetic construct
  source 1..20: mol_type = other DNA
acgcgagagagtaaacacgc

SEQ ID NO: 5753 - DNA, 20 bp, synthetic construct
  source 1..20: mol_type = other DNA
gtccaaggtttatttcgatc

SEQ ID NO: 5754 - DNA, 20 bp, synthetic construct
  source 1..20: mol_type = other DNA
tttactctgtcagcgtatgt

SEQ ID NO: 5755 - DNA, 20 bp, synthetic construct
  source 1..20: mol_type = other DNA
ggccctggacacgttcatag

SEQ ID NO: 5756 - DNA, 20 bp, synthetic construct
  source 1..20: mol_type = other DNA
gacacggcactattgaccga

SEQ ID NO: 5757 - DNA, 20 bp, synthetic construct
  source 1..20: mol_type = other DNA
gttctgcgagggcgagaata

SEQ ID NO: 5758 - DNA, 20 bp, synthetic construct
  source 1..20: mol_type = other DNA
atagcctagtcctcggctct

SEQ ID NO: 5759 - DNA, 20 bp, synthetic construct
  source 1..20: mol_type = other DNA
aaagaactcaacatgctccg

SEQ ID NO: 5760 - DNA, 20 bp, synthetic construct
  source 1..20: mol_type = other DNA
tggttgttacttgcgcaatt

SEQ ID NO: 5761 - DNA, 20 bp, synthetic construct
  source 1..20: mol_type = other DNA
aactctaacccaagggtgtc

SEQ ID NO: 5762 - DNA, 20 bp, synthetic construct
  source 1..20: mol_type = other DNA
tgaatatgtatagctgcatc

SEQ ID NO: 5763 - DNA, 20 bp, synthetic construct
  source 1..20: mol_type = other DNA
gggttcacgtccggtaaagc

SEQ ID NO: 5764 - DNA, 20 bp, synthetic construct
  source 1..20: mol_type = other DNA
gaccgtcgagtctctttaag

SEQ ID NO: 5765 - DNA, 20 bp, synthetic construct
  source 1..20: mol_type = other DNA
ccggtaattagcaggattca

SEQ ID NO: 5766 - DNA, 20 bp, synthetic construct
  source 1..20: mol_type = other DNA
atgaggaagtgcaattcagc

SEQ ID NO: 5767 - DNA, 20 bp, synthetic construct
  source 1..20: mol_type = other DNA
ttcctccacgtgtttgcatg

SEQ ID NO: 5768 - DNA, 20 bp, synthetic construct
  source 1..20: mol_type = other DNA
cctagccaacaaagccctat

SEQ ID NO: 5769 - DNA, 20 bp, synthetic construct
  source 1..20: mol_type = other DNA
cgtggtgtacatgcggtttg

SEQ ID NO: 5770 - DNA, 20 bp, synthetic construct
  source 1..20: mol_type = other DNA
gatggcgagcaagtgatgct

SEQ ID NO: 5771 - DNA, 20 bp, synthetic construct
  source 1..20: mol_type = other DNA
tcgcgccgatattccctgga

SEQ ID NO: 5772 - DNA, 20 bp, synthetic construct
  source 1..20: mol_type = other DNA
agttcgttacggctcacctc

SEQ ID NO: 5773 - DNA, 20 bp, synthetic construct
  source 1..20: mol_type = other DNA
caccaagtcggctctgggta

SEQ ID NO: 5774 - DNA, 20 bp, synthetic construct
  source 1..20: mol_type = other DNA
attctaacgacaacctcgcc

SEQ ID NO: 5775 - DNA, 20 bp, synthetic construct
  source 1..20: mol_type = other DNA
gaggtttgaatagtgatgcc

SEQ ID NO: 5776 - DNA, 20 bp, synthetic construct
  source 1..20: mol_type = other DNA
gtggagtcgcgttctaaccc

SEQ ID NO: 5777 - DNA, 20 bp, synthetic construct
  source 1..20: mol_type = other DNA
cgtacactgtttgctatccc

SEQ ID NO: 5778 - DNA, 20 bp, synthetic construct
  source 1..20: mol_type = other DNA
gaaagctgtactagcgaggc

SEQ ID NO: 5779 - DNA, 20 bp, synthetic construct
  source 1..20: mol_type = other DNA
gaccaggatggttcattatt

SEQ ID NO: 5780 - DNA, 20 bp, synthetic construct
  source 1..20: mol_type = other DNA
aaagtcgcaaactgttgatg

SEQ ID NO: 5781 - DNA, 20 bp, synthetic construct
  source 1..20: mol_type = other DNA
cgtaatggtctacctaacgt

SEQ ID NO: 5782 - DNA, 20 bp, synthetic construct
  source 1..20: mol_type = other DNA
agtacggaagccacgctgcc

SEQ ID NO: 5783 - DNA, 20 bp, synthetic construct
  source 1..20: mol_type = other DNA
ctaaaggtccgtgtgaacat

SEQ ID NO: 5784 - DNA, 20 bp, synthetic construct
  source 1..20: mol_type = other DNA
ctggctttggagtccggcag

SEQ ID NO: 5785 - DNA, 20 bp, synthetic construct
  source 1..20: mol_type = other DNA
tacacctagaaggacgctaa

SEQ ID NO: 5786 - DNA, 20 bp, synthetic construct
  source 1..20: mol_type = other DNA
catattgttaccgactgtgt

SEQ ID NO: 5787 - DNA, 20 bp, synthetic construct
  source 1..20: mol_type = other DNA
catcagcgtattcaagttcg

SEQ ID NO: 5788 - DNA, 20 bp, synthetic construct
  source 1..20: mol_type = other DNA
caaccgtctgtgctcttggg

SEQ ID NO: 5789 - DNA, 20 bp, synthetic construct
  source 1..20: mol_type = other DNA
ctcaatcgcgaaacacggtt

SEQ ID NO: 5790 - DNA, 20 bp, synthetic construct
  source 1..20: mol_type = other DNA
ttggaactgttcagttaccc

SEQ ID NO: 5791 - DNA, 20 bp, synthetic construct
  source 1..20: mol_type = other DNA
cctgtgtaacgctccctgct

SEQ ID NO: 5792 - DNA, 20 bp, synthetic construct
  source 1..20: mol_type = other DNA
gacaggcacccaatagttgt

SEQ ID NO: 5793 - DNA, 20 bp, synthetic construct
  source 1..20: mol_type = other DNA
ggtgagcacaatgtcgtaga

SEQ ID NO: 5794 - DNA, 20 bp, synthetic construct
  source 1..20: mol_type = other DNA
aatctctacagtacgagtgt

SEQ ID NO: 5795 - DNA, 20 bp, synthetic construct
  source 1..20: mol_type = other DNA
tacgaggagttgcaatctac

SEQ ID NO: 5796 - DNA, 20 bp, synthetic construct
  source 1..20: mol_type = other DNA
gcaattcgaggcgcggtacg

SEQ ID NO: 5797 - DNA, 20 bp, synthetic construct
  source 1..20: mol_type = other DNA
cgttggcacggtatcgtaac

SEQ ID NO: 5798 - DNA, 20 bp, synthetic construct
  source 1..20: mol_type = other DNA
gcagtatagcctccagttcc

SEQ ID NO: 5799 - DNA, 20 bp, synthetic construct
  source 1..20: mol_type = other DNA
atgaattatcgcagaccaga

SEQ ID NO: 5800 - DNA, 20 bp, synthetic construct
  source 1..20: mol_type = other DNA
gatatgtcccggtgatagtc

SEQ ID NO: 5801 - DNA, 20 bp, synthetic construct
  source 1..20: mol_type = other DNA
cgcaactcctctttgcaggg

SEQ ID NO: 5802 - DNA, 20 bp, synthetic construct
  source 1..20: mol_type = other DNA
cgcggtgacatccaagagaa

SEQ ID NO: 5803 - DNA, 20 bp, synthetic construct
  source 1..20: mol_type = other DNA
aaggtgtgagggccgttgaa

SEQ ID NO: 5804 - DNA, 20 bp, synthetic construct
  source 1..20: mol_type = other DNA
cggaaggccgtaaccttccc

SEQ ID NO: 5805 - DNA, 20 bp, synthetic construct
  source 1..20: mol_type = other DNA
agggtaggtgaatatatagc

SEQ ID NO: 5806 - DNA, 20 bp, synthetic construct
  source 1..20: mol_type = other DNA
ccggcgaccactgcataagg

SEQ ID NO: 5807 - DNA, 20 bp, synthetic construct
  source 1..20: mol_type = other DNA
caccggtcacctatagctag

SEQ ID NO: 5808 - DNA, 20 bp, synthetic construct
  source 1..20: mol_type = other DNA
actgtcacctttgacgagca

SEQ ID NO: 5809 - DNA, 20 bp, synthetic construct
  source 1..20: mol_type = other DNA
acactcaaagtgtgaatccc

SEQ ID NO: 5810 - DNA, 20 bp, synthetic construct
  source 1..20: mol_type = other DNA
aacacaggtttgagcgcgga

SEQ ID NO: 5811 - DNA, 20 bp, synthetic construct
  source 1..20: mol_type = other DNA
gcatgagctctgcccgtgta

SEQ ID NO: 5812 - DNA, 20 bp, synthetic construct
  source 1..20: mol_type = other DNA
tcagcggagtgtttaatccc

SEQ ID NO: 5813 - DNA, 20 bp, synthetic construct
  source 1..20: mol_type = other DNA
tataacgatcagtgtgtggt

SEQ ID NO: 5814 - DNA, 20 bp, synthetic construct
  source 1..20: mol_type = other DNA
gtgatcctcgcgaaaggaat

SEQ ID NO: 5815 - DNA, 20 bp, synthetic construct
  source 1..20: mol_type = other DNA
caacctggtgatgtgcgatt

SEQ ID NO: 5816 - DNA, 20 bp, synthetic construct
  source 1..20: mol_type = other DNA
aggcaatctgttcgactttc

SEQ ID NO: 5817 - DNA, 20 bp, synthetic construct
  source 1..20: mol_type = other DNA
taccgggatttaagaaggga

SEQ ID NO: 5818 - DNA, 20 bp, synthetic construct
  source 1..20: mol_type = other DNA
tgtttgggccacatggcaaa

SEQ ID NO: 5819 - DNA, 20 bp, synthetic construct
  source 1..20: mol_type = other DNA
cttgaaccaggctgtggtgt

SEQ ID NO: 5820 - DNA, 20 bp, synthetic construct
  source 1..20: mol_type = other DNA
tagattgcgaccgggttcaa

SEQ ID NO: 5821 - DNA, 20 bp, synthetic construct
  source 1..20: mol_type = other DNA
aaatagtgcccacgtaaatc

SEQ ID NO: 5822 - DNA, 20 bp, synthetic construct
  source 1..20: mol_type = other DNA
gttaaatgattctcaaggca

SEQ ID NO: 5823 - DNA, 20 bp, synthetic construct
  source 1..20: mol_type = other DNA
tacctcactctaatcggtgc

SEQ ID NO: 5824 - DNA, 20 bp, synthetic construct
  source 1..20: mol_type = other DNA
ctaagttgggcacctacact

SEQ ID NO: 5825 - DNA, 20 bp, synthetic construct
  source 1..20: mol_type = other DNA
taggcaaggcggtggaaagg

SEQ ID NO: 5826 - DNA, 20 bp, synthetic construct
  source 1..20: mol_type = other DNA
ttgagagagtaggaagcggc

SEQ ID NO: 5827 - DNA, 20 bp, synthetic construct
  source 1..20: mol_type = other DNA
atctagtggttacggataaa

SEQ ID NO: 5828 - DNA, 20 bp, synthetic construct
  source 1..20: mol_type = other DNA
tacgggactcgacggattcc

SEQ ID NO: 5829 - DNA, 20 bp, synthetic construct
  source 1..20: mol_type = other DNA
tgaatagaccaccgagaacc

SEQ ID NO: 5830 - DNA, 20 bp, synthetic construct
  source 1..20: mol_type = other DNA
gggtatttcgatgctgacga

SEQ ID NO: 5831 - DNA, 20 bp, synthetic construct
  source 1..20: mol_type = other DNA
cccaaatgatactgtaatgg

SEQ ID NO: 5832 - DNA, 20 bp, synthetic construct
  source 1..20: mol_type = other DNA
actatgcagactaaggtcag

SEQ ID NO: 5833 - DNA, 20 bp, synthetic construct
  source 1..20: mol_type = other DNA
tacgaacacacgcctatttc

SEQ ID NO: 5834 - DNA, 20 bp, synthetic construct
  source 1..20: mol_type = other DNA
atggcaatttccctcacggc

SEQ ID NO: 5835 - DNA, 20 bp, synthetic construct
  source 1..20: mol_type = other DNA
agaagtgccgatagatctac

SEQ ID NO: 5836 - DNA, 20 bp, synthetic construct
  source 1..20: mol_type = other DNA
acccgtgtagtcggtaacat

SEQ ID NO: 5837 - DNA, 20 bp, synthetic construct
  source 1..20: mol_type = other DNA
gcaaagtcatctatgccgat

SEQ ID NO: 5838 - DNA, 20 bp, synthetic construct
  source 1..20: mol_type = other DNA
cgcataagtcacacatcaat

SEQ ID NO: 5839 - DNA, 20 bp, synthetic construct
  source 1..20: mol_type = other DNA
accctgactatcggcgtatt

SEQ ID NO: 5840 - DNA, 20 bp, synthetic construct
  source 1..20: mol_type = other DNA
ttactcagacgactttcgca

SEQ ID NO: 5841 - DNA, 20 bp, synthetic construct
  source 1..20: mol_type = other DNA
ggaaggcccaccgtagcttg

SEQ ID NO: 5842 - DNA, 20 bp, synthetic construct
  source 1..20: mol_type = other DNA
catgcggccggtccagatag

SEQ ID NO: 5843 - DNA, 20 bp, synthetic construct
  source 1..20: mol_type = other DNA
aactagtcgcccgtacaatc

SEQ ID NO: 5844 - DNA, 20 bp, synthetic construct
  source 1..20: mol_type = other DNA
atctttagcccggtaatacc

SEQ ID NO: 5845 - DNA, 20 bp, synthetic construct
  source 1..20: mol_type = other DNA
ggctactaggttcgatgccg

SEQ ID NO: 5846 - DNA, 20 bp, synthetic construct
  source 1..20: mol_type = other DNA
ggattcacaatagttcgcaa

SEQ ID NO: 5847 - DNA, 20 bp, synthetic construct
  source 1..20: mol_type = other DNA
tgtggcgacgcactcgatgt

SEQ ID NO: 5848 - DNA, 20 bp, synthetic construct
  source 1..20: mol_type = other DNA
tgcccacggttagtttcaat

SEQ ID NO: 5849 - DNA, 20 bp, synthetic construct
  source 1..20: mol_type = other DNA
aaacgcgcggaggcaaggtg

SEQ ID NO: 5850 - DNA, 20 bp, synthetic construct
  source 1..20: mol_type = other DNA
taatatggcaatcttactga

SEQ ID NO: 5851 - DNA, 20 bp, synthetic construct
  source 1..20: mol_type = other DNA
aattccaatggcagaactgc

SEQ ID NO: 5852 - DNA, 20 bp, synthetic construct
  source 1..20: mol_type = other DNA
tactcgacaggaaggcgttc

SEQ ID NO: 5853 - DNA, 20 bp, synthetic construct
  source 1..20: mol_type = other DNA
gagctcgattaggtacttct

SEQ ID NO: 5854 - DNA, 20 bp, synthetic construct
  source 1..20: mol_type = other DNA
cctagcgtagggactagttt

SEQ ID NO: 5855 - DNA, 20 bp, synthetic construct
  source 1..20: mol_type = other DNA
tgtttcacgtcacgcgtacc

SEQ ID NO: 5856 - DNA, 20 bp, synthetic construct
  source 1..20: mol_type = other DNA
cacgaaagagagtgtacaat

SEQ ID NO: 5857 - DNA, 20 bp, synthetic construct
  source 1..20: mol_type = other DNA
atgtcgtcgcagataggtgc

SEQ ID NO: 5858 - DNA, 20 bp, synthetic construct
  source 1..20: mol_type = other DNA
gacactggccttcaagggac

SEQ ID NO: 5859 - DNA, 20 bp, synthetic construct
  source 1..20: mol_type = other DNA
agggtggtcctatcgtagta

SEQ ID NO: 5860 - DNA, 20 bp, synthetic construct
  source 1..20: mol_type = other DNA
cttgctgtaatctaaagtct

SEQ ID NO: 5861 - DNA, 20 bp, synthetic construct
  source 1..20: mol_type = other DNA
agttgctctttccatcctca

SEQ ID NO: 5862 - DNA, 20 bp, synthetic construct
  source 1..20: mol_type = other DNA
accttcgatacggttatcta

SEQ ID NO: 5863 - DNA, 20 bp, synthetic construct
  source 1..20: mol_type = other DNA
cgcagaacaggcagaagagt

SEQ ID NO: 5864 - DNA, 20 bp, synthetic construct
  source 1..20: mol_type = other DNA
ctgcggtccatgattaagat

SEQ ID NO: 5865 - DNA, 20 bp, synthetic construct
  source 1..20: mol_type = other DNA
gcttgagtggacagaaatct

SEQ ID NO: 5866 - DNA, 20 bp, synthetic construct
  source 1..20: mol_type = other DNA
gaaagagcgaatgtacgaca

SEQ ID NO: 5867 - DNA, 20 bp, synthetic construct
  source 1..20: mol_type = other DNA
gccaagaacgataacaagcc

SEQ ID NO: 5868 - DNA, 20 bp, synthetic construct
  source 1..20: mol_type = other DNA
gagttagtatggacaaagga

SEQ ID NO: 5869 - DNA, 20 bp, synthetic construct
  source 1..20: mol_type = other DNA
tttgtagggctttcacactt

SEQ ID NO: 5870 - DNA, 20 bp, synthetic construct
  source 1..20: mol_type = other DNA
tccagtcacattggctgtgc

SEQ ID NO: 5871 - DNA, 20 bp, synthetic construct
  source 1..20: mol_type = other DNA
cacgtcagggtggatgacgt

SEQ ID NO: 5872 - DNA, 20 bp, synthetic construct
  source 1..20: mol_type = other DNA
acaacacggtgctcataaga

SEQ ID NO: 5873 - DNA, 20 bp, synthetic construct
  source 1..20: mol_type = other DNA
gaacgacccttgacgacata

SEQ ID NO: 5874 - DNA, 20 bp, synthetic construct
  source 1..20: mol_type = other DNA
acccgctggtacctcatcag

SEQ ID NO: 5875 - DNA, 20 bp, synthetic construct
  source 1..20: mol_type = other DNA
ggtgtattagacgaacgtca

SEQ ID NO: 5876 - DNA, 20 bp, synthetic construct
  source 1..20: mol_type = other DNA
ttcactccatcccatgcggc

SEQ ID NO: 5877 - DNA, 20 bp, synthetic construct
  source 1..20: mol_type = other DNA
ggccgtattcactatggagt

SEQ ID NO: 5878 - DNA, 20 bp, synthetic construct
  source 1..20: mol_type = other DNA
ctgtcttccgcaatgttgct

SEQ ID NO: 5879 - DNA, 20 bp, synthetic construct
  source 1..20: mol_type = other DNA
gagcgctgcagaatactgcg

SEQ ID NO: 5880 - DNA, 20 bp, synthetic construct
  source 1..20: mol_type = other DNA
gtctgccgaccagactaagt

SEQ ID NO: 5881 - DNA, 20 bp, synthetic construct
  source 1..20: mol_type = other DNA
gttccatccatggtggacag

SEQ ID NO: 5882 - DNA, 20 bp, synthetic construct
  source 1..20: mol_type = other DNA
ttgcaaatggatcctaccgg

SEQ ID NO: 5883 - DNA, 20 bp, synthetic construct
  source 1..20: mol_type = other DNA
atgttcgtcttatgcttatg

SEQ ID NO: 5884 - DNA, 20 bp, synthetic construct
  source 1..20: mol_type = other DNA
agcgtttgcagttgtacagg

SEQ ID NO: 5885 - DNA, 20 bp, synthetic construct
  source 1..20: mol_type = other DNA
cactttgagttcgctcaccc

SEQ ID NO: 5886 - DNA, 20 bp, synthetic construct
  source 1..20: mol_type = other DNA
ttcaagttaccacactcaca

SEQ ID NO: 5887 - DNA, 20 bp, synthetic construct
  source 1..20: mol_type = other DNA
taggcgtcgtagaatcaagt

SEQ ID NO: 5888 - DNA, 20 bp, synthetic construct
  source 1..20: mol_type = other DNA
ctttcaaactcttccggtgc

SEQ ID NO: 5889 - DNA, 20 bp, synthetic construct
  source 1..20: mol_type = other DNA
agaagtcaactacagggccc

SEQ ID NO: 5890 - DNA, 20 bp, synthetic construct
  source 1..20: mol_type = other DNA
gaaactaggcaggtcatccg

SEQ ID NO: 5891 - DNA, 20 bp, synthetic construct
  source 1..20: mol_type = other DNA
tttggaatgggagtaccata

SEQ ID NO: 5892 - DNA, 20 bp, synthetic construct
  source 1..20: mol_type = other DNA
tacttgggaacccgtgtgcc

SEQ ID NO: 5893 - DNA, 20 bp, synthetic construct
  source 1..20: mol_type = other DNA
actgaggccgagatagccca

SEQ ID NO: 5894 - DNA, 20 bp, synthetic construct
  source 1..20: mol_type = other DNA
ttggaagtcctcatatacta

SEQ ID NO: 5895 - DNA, 20 bp, synthetic construct
  source 1..20: mol_type = other DNA
cgatacccaagtccggtaat

SEQ ID NO: 5896 - DNA, 20 bp, synthetic construct
  source 1..20: mol_type = other DNA
aatttaaattccgctaccaa

SEQ ID NO: 5897 - DNA, 20 bp, synthetic construct
  source 1..20: mol_type = other DNA
ggaaagcgatgacctcgaat

SEQ ID NO: 5898 - DNA, 20 bp, synthetic construct
  source 1..20: mol_type = other DNA
tagggttatttccaacagcg

SEQ ID NO: 5899 - DNA, 20 bp, synthetic construct
  source 1..20: mol_type = other DNA
acggtgcccattgtgagcag

SEQ ID NO: 5900 - DNA, 20 bp, synthetic construct
  source 1..20: mol_type = other DNA
acaagtcaactgtcaactta

SEQ ID NO: 5901 - DNA, 20 bp, synthetic construct
  source 1..20: mol_type = other DNA
ataccttgagttagtacctt

SEQ ID NO: 5902 - DNA, 20 bp, synthetic construct
  source 1..20: mol_type = other DNA
caacactgttcccacagtgc

SEQ ID NO: 5903 - DNA, 20 bp, synthetic construct
  source 1..20: mol_type = other DNA
ggatcacggcggctagaacg

SEQ ID NO: 5904 - DNA, 20 bp, synthetic construct
  source 1..20: mol_type = other DNA
taaccgcttggtctgacggg

SEQ ID NO: 5905 - DNA, 20 bp, synthetic construct
  source 1..20: mol_type = other DNA
tagctcccgtgagaccaata

SEQ ID NO: 5906 - DNA, 20 bp, synthetic construct
  source 1..20: mol_type = other DNA
atctcgggtattggtaatta

SEQ ID NO: 5907 - DNA, 20 bp, synthetic construct
  source 1..20: mol_type = other DNA
attccgtaagccaacaccta

SEQ ID NO: 5908 - DNA, 20 bp, synthetic construct
  source 1..20: mol_type = other DNA
attgtccgcgcttagcggca

SEQ ID NO: 5909 - DNA, 20 bp, synthetic construct
  source 1..20: mol_type = other DNA
cagtatatacagagaattgt

SEQ ID NO: 5910 - DNA, 20 bp, synthetic construct
  source 1..20: mol_type = other DNA
gtgtcagacaccgcaaaccg

SEQ ID NO: 5911 - DNA, 20 bp, synthetic construct
  source 1..20: mol_type = other DNA
accgctttcgggactggacc

SEQ ID NO: 5912 - DNA, 20 bp, synthetic construct
  source 1..20: mol_type = other DNA
tgcctagagtgttggtttgc

SEQ ID NO: 5913 - DNA, 20 bp, synthetic construct
  source 1..20: mol_type = other DNA
catgatacaggaacctagct

SEQ ID NO: 5914 - DNA, 20 bp, synthetic construct
  source 1..20: mol_type = other DNA
gctcttcagattccgtcact

SEQ ID NO: 5915 - DNA, 20 bp, synthetic construct
  source 1..20: mol_type = other DNA
agacaactgggtgcttccac

SEQ ID NO: 5916 - DNA, 20 bp, synthetic construct
  source 1..20: mol_type = other DNA
taatatcccagcacgatatt

SEQ ID NO: 5917 - DNA, 20 bp, synthetic construct
  source 1..20: mol_type = other DNA
cgtcacggatgtagcctaag

SEQ ID NO: 5918 - DNA, 20 bp, synthetic construct
  source 1..20: mol_type = other DNA
atacggatcactattaggac

SEQ ID NO: 5919 - DNA, 20 bp, synthetic construct
  source 1..20: mol_type = other DNA
acgtttatttgggagttact

SEQ ID NO: 5920 - DNA, 20 bp, synthetic construct
  source 1..20: mol_type = other DNA
gacgacgttggctagttatc

SEQ ID NO: 5921 - DNA, 20 bp, synthetic construct
  source 1..20: mol_type = other DNA
gttctgtgctataacgaagg

SEQ ID NO: 5922 - DNA, 20 bp, synthetic construct
  source 1..20: mol_type = other DNA
gcatgcaatgtagggagatt

SEQ ID NO: 5923 - DNA, 20 bp, synthetic construct
  source 1..20: mol_type = other DNA
gggaccctcaagtgctacct

SEQ ID NO: 5924 - DNA, 20 bp, synthetic construct
  source 1..20: mol_type = other DNA
tatgtgacatttcccgccgc

SEQ ID NO: 5925 - DNA, 20 bp, synthetic construct
  source 1..20: mol_type = other DNA
tgccggcagagcaccatcac

SEQ ID NO: 5926 - DNA, 20 bp, synthetic construct
  source 1..20: mol_type = other DNA
atgcacaacatatttattgc

SEQ ID NO: 5927 - DNA, 20 bp, synthetic construct
  source 1..20: mol_type = other DNA
gcccgatcgttgtaagagcc

SEQ ID NO: 5928 - DNA, 20 bp, synthetic construct
  source 1..20: mol_type = other DNA
agggatactgaagagcggat

SEQ ID NO: 5929 - DNA, 20 bp, synthetic construct
  source 1..20: mol_type = other DNA
atcaggtacgtggatagata

SEQ ID NO: 5930 - DNA, 20 bp, synthetic construct
  source 1..20: mol_type = other DNA
catcgtcattggagtgattg

SEQ ID NO: 5931 - DNA, 20 bp, synthetic construct
  source 1..20: mol_type = other DNA
cagcacatgggattctcggt

SEQ ID NO: 5932 - DNA, 20 bp, synthetic construct
  source 1..20: mol_type = other DNA
gtactgccatttcgtggtca

SEQ ID NO: 5933 - DNA, 20 bp, synthetic construct
  source 1..20: mol_type = other DNA
atagtggacgtcacccttag

SEQ ID NO: 5934 - DNA, 20 bp, synthetic construct
  source 1..20: mol_type = other DNA
aacttcccattaacagacct

SEQ ID NO: 5935 - DNA, 20 bp, synthetic construct
  source 1..20: mol_type = other DNA
tccgccgctttcgtgcttcg

SEQ ID NO: 5936 - DNA, 20 bp, synthetic construct
  source 1..20: mol_type = other DNA
attaaacaggcatctgcggc

SEQ ID NO: 5937 - DNA, 20 bp, synthetic construct
  source 1..20: mol_type = other DNA
ctgtgaacagtctacaggct

SEQ ID NO: 5938 - DNA, 20 bp, synthetic construct
  source 1..20: mol_type = other DNA
atctacacttcgcatcttaa

SEQ ID NO: 5939 - DNA, 20 bp, synthetic construct
  source 1..20: mol_type = other DNA
acgatgcgagtacgccactt

SEQ ID NO: 5940 - DNA, 20 bp, synthetic construct
  source 1..20: mol_type = other DNA
ccttctttggagacccacgc

SEQ ID NO: 5941 - DNA, 20 bp, synthetic construct
  source 1..20: mol_type = other DNA
ggctattcggatgattagga

SEQ ID NO: 5942 - DNA, 20 bp, synthetic construct
  source 1..20: mol_type = other DNA
gatacgtgttgacgtgcgcc

SEQ ID NO: 5943 - DNA, 20 bp, synthetic construct
  source 1..20: mol_type = other DNA
tatctacatatgcccgtgaa

SEQ ID NO: 5944 - DNA, 20 bp, synthetic construct
  source 1..20: mol_type = other DNA
gcccaacttatttgctccgg

SEQ ID NO: 5945 - DNA, 20 bp, synthetic construct
  source 1..20: mol_type = other DNA
acagagcttcacgaacttgt

SEQ ID NO: 5946 - DNA, 20 bp, synthetic construct
  source 1..20: mol_type = other DNA
tacgggattcatgaggtgaa

SEQ ID NO: 5947 - DNA, 20 bp, synthetic construct
  source 1..20: mol_type = other DNA
tagagtctttggttctgata

SEQ ID NO: 5948 - DNA, 20 bp, synthetic construct
  source 1..20: mol_type = other DNA
cacttgaccctaacagtccc

SEQ ID NO: 5949 - DNA, 20 bp, synthetic construct
  source 1..20: mol_type = other DNA
ccatctacgtcgggcaccgc

SEQ ID NO: 5950 - DNA, 20 bp, synthetic construct
  source 1..20: mol_type = other DNA
gtccgccgcaagaacctgaa

SEQ ID NO: 5951 - DNA, 20 bp, synthetic construct
  source 1..20: mol_type = other DNA
ttctatatgtttgacggatg

SEQ ID NO: 5952 - DNA, 20 bp, synthetic construct
  source 1..20: mol_type = other DNA
cgcgaggcccgttagagaat

SEQ ID NO: 5953 - DNA, 20 bp, synthetic construct
  source 1..20: mol_type = other DNA
agaacacgttacgagcatca

SEQ ID NO: 5954 - DNA, 20 bp, synthetic construct
  source 1..20: mol_type = other DNA
agctgagcccggacaggtac

SEQ ID NO: 5955 - DNA, 20 bp, synthetic construct
  source 1..20: mol_type = other DNA
tcatgactagtcccacacta

SEQ ID NO: 5956 - DNA, 20 bp, synthetic construct
  source 1..20: mol_type = other DNA
ggactatatgtcatgacgta

SEQ ID NO: 5957 - DNA, 20 bp, synthetic construct
  source 1..20: mol_type = other DNA
tactcccatacagctggata

SEQ ID NO: 5958 - DNA, 20 bp, synthetic construct
  source 1..20: mol_type = other DNA
gactgaagtgtcggctaggc

SEQ ID NO: 5959 - DNA, 20 bp, synthetic construct
  source 1..20: mol_type = other DNA
gctttaaggcgaccgttaca

SEQ ID NO: 5960 - DNA, 20 bp, synthetic construct
  source 1..20: mol_type = other DNA
ctatctatcctataagggac

SEQ ID NO: 5961 - DNA, 20 bp, synthetic construct
  source 1..20: mol_type = other DNA
gtgcatgattctgtgcgctg

SEQ ID NO: 5962 - DNA, 20 bp, synthetic construct
  source 1..20: mol_type = other DNA
ctacttctggagagcatcga

SEQ ID NO: 5963 - DNA, 20 bp, synthetic construct
  source 1..20: mol_type = other DNA
gtgcggtatattgatgacgc

SEQ ID NO: 5964 - DNA, 20 bp, synthetic construct
  source 1..20: mol_type = other DNA
catgttcttcagggacaagg

SEQ ID NO: 5965 - DNA, 20 bp, synthetic construct
  source 1..20: mol_type = other DNA
aacccaggcagaacctttag

SEQ ID NO: 5966 - DNA, 20 bp, synthetic construct
  source 1..20: mol_type = other DNA
agatctggcaagcaatcagt

SEQ ID NO: 5967 - DNA, 20 bp, synthetic construct
  source 1..20: mol_type = other DNA
gtcagtgggaacctcataca

SEQ ID NO: 5968 - DNA, 20 bp, synthetic construct
  source 1..20: mol_type = other DNA
ggaatttaggatcgccacga

SEQ ID NO: 5969 - DNA, 20 bp, synthetic construct
  source 1..20: mol_type = other DNA
catcttgttcgcgagcggca

SEQ ID NO: 5970 - DNA, 20 bp, synthetic construct
  source 1..20: mol_type = other DNA
cggatccagattccaaatga

SEQ ID NO: 5971 - DNA, 20 bp, synthetic construct
  source 1..20: mol_type = other DNA
aatctcgccacgatgccgga

SEQ ID NO: 5972 - DNA, 20 bp, synthetic construct
  source 1..20: mol_type = other DNA
ccacctttcaccacattata

SEQ ID NO: 5973 - DNA, 20 bp, synthetic construct
  source 1..20: mol_type = other DNA
ggcgcaagatctccgggcta

SEQ ID NO: 5974 - DNA, 20 bp, synthetic construct
  source 1..20: mol_type = other DNA
gacggtgcaaccgcatgtgc

SEQ ID NO: 5975 - DNA, 20 bp, synthetic construct
  source 1..20: mol_type = other DNA
gactttgatgcacgtagtcc

SEQ ID NO: 5976 - DNA, 20 bp, synthetic construct
  source 1..20: mol_type = other DNA
gccctgctttacttacatta

SEQ ID NO: 5977 - DNA, 20 bp, synthetic construct
  source 1..20: mol_type = other DNA
tggaataagccagtagaagc

SEQ ID NO: 5978 - DNA, 20 bp, synthetic construct
  source 1..20: mol_type = other DNA
cgtgccggatttcttagacg

SEQ ID NO: 5979 - DNA, 20 bp, synthetic construct
  source 1..20: mol_type = other DNA
tcatcaagccttaaatatga

SEQ ID NO: 5980 - DNA, 20 bp, synthetic construct
  source 1..20: mol_type = other DNA
gatagtccaagtttactgca

SEQ ID NO: 5981 - DNA, 20 bp, synthetic construct
  source 1..20: mol_type = other DNA
aggacgatgcttgagggcgg

SEQ ID NO: 5982 - DNA, 20 bp, synthetic construct
  source 1..20: mol_type = other DNA
gatctacacactagaatcct

SEQ ID NO: 5983 - DNA, 20 bp, synthetic construct
  source 1..20: mol_type = other DNA
atggagtataggcagcggtt

SEQ ID NO: 5984 - DNA, 20 bp, synthetic construct
  source 1..20: mol_type = other DNA
ggctgtggagtcggtatgcg

SEQ ID NO: 5985 - DNA, 20 bp, synthetic construct
  source 1..20: mol_type = other DNA
ttctgagcttcgacgacact

SEQ ID NO: 5986 - DNA, 20 bp, synthetic construct
  source 1..20: mol_type = other DNA
tcaccagtacggtcagaatc

SEQ ID NO: 5987 - DNA, 20 bp, synthetic construct
  source 1..20: mol_type = other DNA
aggttggaggtgatataaga

SEQ ID NO: 5988 - DNA, 20 bp, synthetic construct
  source 1..20: mol_type = other DNA
atagtacccatccagaatga

SEQ ID NO: 5989 - DNA, 20 bp, synthetic construct
  source 1..20: mol_type = other DNA
taagcatgtagcgagacaac

SEQ ID NO: 5990 - DNA, 20 bp, synthetic construct
  source 1..20: mol_type = other DNA
ttacggcgtcagggactatt

SEQ ID NO: 5991 - DNA, 20 bp, synthetic construct
  source 1..20: mol_type = other DNA
gtcacgaaaccttgcggcaa

SEQ ID NO: 5992 - DNA, 20 bp, synthetic construct
  source 1..20: mol_type = other DNA
agcacgcggcgctagcagtt

SEQ ID NO: 5993 - DNA, 20 bp, synthetic construct
  source 1..20: mol_type = other DNA
atacctcgttagaaatctgc

SEQ ID NO: 5994 - DNA, 20 bp, synthetic construct
  source 1..20: mol_type = other DNA
ctggcgtgcactgtagagct

SEQ ID NO: 5995 - DNA, 20 bp, synthetic construct
  source 1..20: mol_type = other DNA
gtcgaatgcgacttcattcc

SEQ ID NO: 5996 - DNA, 20 bp, synthetic construct
  source 1..20: mol_type = other DNA
ctaatcaagaatgatcttgc

SEQ ID NO: 5997 - DNA, 20 bp, synthetic construct
  source 1..20: mol_type = other DNA
actctagtaggacttctgca

SEQ ID NO: 5998 - DNA, 20 bp, synthetic construct
  source 1..20: mol_type = other DNA
agtcgggtgctttgggtttc

SEQ ID NO: 5999 - DNA, 20 bp, synthetic construct
  source 1..20: mol_type = other DNA
gtagaaaccgtcttgtctta

SEQ ID NO: 6000 - DNA, 20 bp, synthetic construct
  source 1..20: mol_type = other DNA
agattgtaaataacgctgcg

SEQ ID NO: 6001 - DNA, 20 bp, synthetic construct
  source 1..20: mol_type = other DNA
gtcaataagactgaaggtcc

SEQ ID NO: 6002 - DNA, 20 bp, synthetic construct
  source 1..20: mol_type = other DNA
gtctggacaagggatctagc

SEQ ID NO: 6003 - DNA, 20 bp, synthetic construct
  source 1..20: mol_type = other DNA
gagatgatcataggcgttag

SEQ ID NO: 6004 - DNA, 20 bp, synthetic construct
  source 1..20: mol_type = other DNA
acggttcgacgtgtgacaac

SEQ ID NO: 6005 - DNA, 20 bp, synthetic construct
  source 1..20: mol_type = other DNA
ctccaatcgtttgaactggg

SEQ ID NO: 6006 - DNA, 20 bp, synthetic construct
  source 1..20: mol_type = other DNA
ctctgattgtgtgtccttgc

SEQ ID NO: 6007 - DNA, 20 bp, synthetic construct
  source 1..20: mol_type = other DNA
atcgcttcaatgtcgcccag

SEQ ID NO: 6008 - DNA, 20 bp, synthetic construct
  source 1..20: mol_type = other DNA
tgagccgctagcgcatgtcg

SEQ ID NO: 6009 - DNA, 20 bp, synthetic construct
  source 1..20: mol_type = other DNA
aacgagtaaccggatggtgc

SEQ ID NO: 6010 - DNA, 20 bp, synthetic construct
  source 1..20: mol_type = other DNA
cacccttactctcggtactt

SEQ ID NO: 6011 - DNA, 20 bp, synthetic construct
  source 1..20: mol_type = other DNA
accatgttagtttcgcaggc

SEQ ID NO: 6012 - DNA, 20 bp, synthetic construct
  source 1..20: mol_type = other DNA
gaccatttggcctaatcgaa

SEQ ID NO: 6013 - DNA, 20 bp, synthetic construct
  source 1..20: mol_type = other DNA
tacgtcgtgccagcttccga

SEQ ID NO: 6014 - DNA, 20 bp, synthetic construct
  source 1..20: mol_type = other DNA
ggagactagccaaacggtaa

SEQ ID NO: 6015 - DNA, 20 bp, synthetic construct
  source 1..20: mol_type = other DNA
tagatccaaacgtacggtcc

SEQ ID NO: 6016 - DNA, 20 bp, synthetic construct
  source 1..20: mol_type = other DNA
ccatagaactgtactccggg

SEQ ID NO: 6017 - DNA, 20 bp, synthetic construct
  source 1..20: mol_type = other DNA
tgcatccggtgttgcgggac

SEQ ID NO: 6018 - DNA, 20 bp, synthetic construct
  source 1..20: mol_type = other DNA
gattgaaggctcagatggag

SEQ ID NO: 6019 - DNA, 20 bp, synthetic construct
  source 1..20: mol_type = other DNA
ttagtagctacagggcactt

SEQ ID NO: 6020 - DNA, 20 bp, synthetic construct
  source 1..20: mol_type = other DNA
gatggatctccatcggatgc

SEQ ID NO: 6021 - DNA, 20 bp, synthetic construct
  source 1..20: mol_type = other DNA
tggtacttactacccgctga

SEQ ID NO: 6022 - DNA, 20 bp, synthetic construct
  source 1..20: mol_type = other DNA
gtttggatagattcgttcat

SEQ ID NO: 6023 - DNA, 20 bp, synthetic construct
  source 1..20: mol_type = other DNA
ctgcagctcacacgaagaac

SEQ ID NO: 6024 - DNA, 20 bp, synthetic construct
  source 1..20: mol_type = other DNA
cgtcgcggatcattggacga

SEQ ID NO: 6025 - DNA, 20 bp, synthetic construct
  source 1..20: mol_type = other DNA
ccgcaatcaggtgtgacgtg

SEQ ID NO: 6026 - DNA, 20 bp, synthetic construct
  source 1..20: mol_type = other DNA
tttcgtccggtcgttagaga

SEQ ID NO: 6027 - DNA, 20 bp, synthetic construct
  source 1..20: mol_type = other DNA
agtcgaacaaacaacagaac

SEQ ID NO: 6028 - DNA, 20 bp, synthetic construct
  source 1..20: mol_type = other DNA
tgagtgggctccatgcatac

SEQ ID NO: 6029 - DNA, 20 bp, synthetic construct
  source 1..20: mol_type = other DNA
catttggctccacttcggta

SEQ ID NO: 6030 - DNA, 20 bp, synthetic construct
  source 1..20: mol_type = other DNA
gtagcctaggtcaatatgaa

SEQ ID NO: 6031 - DNA, 20 bp, synthetic construct
  source 1..20: mol_type = other DNA
ggtagctgtaaccttgtcct

SEQ ID NO: 6032 - DNA, 20 bp, synthetic construct
  source 1..20: mol_type = other DNA
aggttcacgaggacgtgtta

SEQ ID NO: 6033 - DNA, 20 bp, synthetic construct
  source 1..20: mol_type = other DNA
gggcaagcactagagaccgt

SEQ ID NO: 6034 - DNA, 20 bp, synthetic construct
  source 1..20: mol_type = other DNA
ccagagcgaaaccgagcttc

SEQ ID NO: 6035 - DNA, 20 bp, synthetic construct
  source 1..20: mol_type = other DNA
gcctaatgcaggtgctgttt

SEQ ID NO: 6036 - DNA, 20 bp, synthetic construct
  source 1..20: mol_type = other DNA
aaattgaaggcggttacagt

SEQ ID NO: 6037 - DNA, 20 bp, synthetic construct
  source 1..20: mol_type = other DNA
acaggaaccgcgttgaagaa

SEQ ID NO: 6038 - DNA, 20 bp, synthetic construct
  source 1..20: mol_type = other DNA
tcggtcgtcgttcaattgcc

SEQ ID NO: 6039 - DNA, 20 bp, synthetic construct
  source 1..20: mol_type = other DNA
acgcttaggccaagcagggc

SEQ ID NO: 6040 - DNA, 20 bp, synthetic construct
  source 1..20: mol_type = other DNA
gggaaatcaagctcaaactt

SEQ ID NO: 6041 - DNA, 20 bp, synthetic construct
  source 1..20: mol_type = other DNA
tgaacgatcacgcatctgcg

SEQ ID NO: 6042 - DNA, 20 bp, synthetic construct
  source 1..20: mol_type = other DNA
cacgtgagtgttacggttgg

SEQ ID NO: 6043 - DNA, 20 bp, synthetic construct
  source 1..20: mol_type = other DNA
gcaaatttgacccgctcgaa

SEQ ID NO: 6044 - DNA, 20 bp, synthetic construct
  source 1..20: mol_type = other DNA
atttgaggccggtcagccaa

SEQ ID NO: 6045 - DNA, 20 bp, synthetic construct
  source 1..20: mol_type = other DNA
atggccagcctcgattcccg

SEQ ID NO: 6046 - DNA, 20 bp, synthetic construct
  source 1..20: mol_type = other DNA
aggtcaacgggcacctagtg

SEQ ID NO: 6047 - DNA, 20 bp, synthetic construct
  source 1..20: mol_type = other DNA
ttaccacgtggaacagttac

SEQ ID NO: 6048 - DNA, 20 bp, synthetic construct
  source 1..20: mol_type = other DNA
tctgttgctatacccttaat

SEQ ID NO: 6049 - DNA, 20 bp, synthetic construct
  source 1..20: mol_type = other DNA
tattatagctttgctatctg

SEQ ID NO: 6050 - DNA, 20 bp, synthetic construct
  source 1..20: mol_type = other DNA
ggattactgcgtttgcggat

SEQ ID NO: 6051 - DNA, 20 bp, synthetic construct
  source 1..20: mol_type = other DNA
tcgcggttatgttgagtcca

SEQ ID NO: 6052 - DNA, 20 bp, synthetic construct
  source 1..20: mol_type = other DNA
gctggtagattatgaggagg

SEQ ID NO: 6053 - DNA, 20 bp, synthetic construct
  source 1..20: mol_type = other DNA
ctcttcgttaagctgagatt

SEQ ID NO: 6054 - DNA, 20 bp, synthetic construct
  source 1..20: mol_type = other DNA
tcgcaacgggcggcatgtga

SEQ ID NO: 6055 - DNA, 20 bp, synthetic construct
  source 1..20: mol_type = other DNA
gaatagcgcaaacctcccag

SEQ ID NO: 6056 - DNA, 20 bp, synthetic construct
  source 1..20: mol_type = other DNA
cacaactcggtttcttgatt

SEQ ID NO: 6057 - DNA, 20 bp, synthetic construct
  source 1..20: mol_type = other DNA
cggatacccgttactttgcg

SEQ ID NO: 6058 - DNA, 20 bp, synthetic construct
  source 1..20: mol_type = other DNA
tacaactggaacggataaga

SEQ ID NO: 6059 - DNA, 20 bp, synthetic construct
  source 1..20: mol_type = other DNA
actcaagaacttatcttgac

SEQ ID NO: 6060 - DNA, 20 bp, synthetic construct
  source 1..20: mol_type = other DNA
catagctcatattatcccat

SEQ ID NO: 6061 - DNA, 20 bp, synthetic construct
  source 1..20: mol_type = other DNA
gggtgggctaggtctttcat

SEQ ID NO: 6062 - DNA, 20 bp, synthetic construct
  source 1..20: mol_type = other DNA
tccactaggtgggtcacact

SEQ ID NO: 6063 - DNA, 20 bp, synthetic construct
  source 1..20: mol_type = other DNA
aagcgacacgtaaggccagt

SEQ ID NO: 6064 - DNA, 20 bp, synthetic construct
  source 1..20: mol_type = other DNA
gttagcgaggttagttccaa

SEQ ID NO: 6065 - DNA, 20 bp, synthetic construct
  source 1..20: mol_type = other DNA
accgtcgagttgttgaaatc

SEQ ID NO: 6066 - DNA, 20 bp, synthetic construct
  source 1..20: mol_type = other DNA
agcctatgcatcgcgcactc

SEQ ID NO: 6067 - DNA, 20 bp, synthetic construct
  source 1..20: mol_type = other DNA
tcactgatctgttgattcat

SEQ ID NO: 6068 - DNA, 20 bp, synthetic construct
  source 1..20: mol_type = other DNA
ttgcatcgtgtagatgtctg

SEQ ID NO: 6069 - DNA, 20 bp, synthetic construct
  source 1..20: mol_type = other DNA
taatttcccgtgaagttcaa

SEQ ID NO: 6070 - DNA, 20 bp, synthetic construct
  source 1..20: mol_type = other DNA
gccctagctcagtactgggc

SEQ ID NO: 6071 - DNA, 20 bp, synthetic construct
  source 1..20: mol_type = other DNA
cgaagtggattctaacctga

SEQ ID NO: 6072 - DNA, 20 bp, synthetic construct
  source 1..20: mol_type = other DNA
gacagtgcggtaatgaggta

SEQ ID NO: 6073 - DNA, 20 bp, synthetic construct
  source 1..20: mol_type = other DNA
ccgttcgttggcggtcttgg

SEQ ID NO: 6074 - DNA, 20 bp, synthetic construct
  source 1..20: mol_type = other DNA
ctgcgcactcccgaaggcta

SEQ ID NO: 6075 - DNA, 20 bp, synthetic construct
  source 1..20: mol_type = other DNA
ctcgtctaaggcaaagacat

SEQ ID NO: 6076 - DNA, 20 bp, synthetic construct
  source 1..20: mol_type = other DNA
ccacaccctagcgttgctga

SEQ ID NO: 6077 - DNA, 20 bp, synthetic construct
  source 1..20: mol_type = other DNA
tcacgatccgtactaactcc

SEQ ID NO: 6078 - DNA, 20 bp, synthetic construct
  source 1..20: mol_type = other DNA
gtgcaccgcgtcctacacgt

SEQ ID NO: 6079 - DNA, 20 bp, synthetic construct
  source 1..20: mol_type = other DNA
gacgggttacgcagcgttta

SEQ ID NO: 6080 - DNA, 20 bp, synthetic construct
  source 1..20: mol_type = other DNA
ctacatcaccttgacacagt

SEQ ID NO: 6081 - DNA, 20 bp, synthetic construct
  source 1..20: mol_type = other DNA
tcaacagctgattactaacc

SEQ ID NO: 6082 - DNA, 20 bp, synthetic construct
  source 1..20: mol_type = other DNA
atgtgggcggtagatggaat

SEQ ID NO: 6083 - DNA, 20 bp, synthetic construct
  source 1..20: mol_type = other DNA
ctgtgtgctatggagtatta

SEQ ID NO: 6084 - DNA, 20 bp, synthetic construct
  source 1..20: mol_type = other DNA
actaacattgagatgaggct

SEQ ID NO: 6085 - DNA, 20 bp, synthetic construct
  source 1..20: mol_type = other DNA
tggcaacggacgcataacag

SEQ ID NO: 6086 - DNA, 20 bp, synthetic construct
  source 1..20: mol_type = other DNA
taacgccaatccggaggtat

SEQ ID NO: 6087 - DNA, 20 bp, synthetic construct
  source 1..20: mol_type = other DNA
cccatgcacgggatacgaga

SEQ ID NO: 6088 - DNA, 20 bp, synthetic construct
  source 1..20: mol_type = other DNA
aatgatggcgcgttaataca

SEQ ID NO: 6089 - DNA, 20 bp, synthetic construct
  source 1..20: mol_type = other DNA
cgtatgcgacactgttcagc

SEQ ID NO: 6090 - DNA, 20 bp, synthetic construct
  source 1..20: mol_type = other DNA
atcaagctacgtgggcgtcg

SEQ ID NO: 6091 - DNA, 20 bp, synthetic construct
  source 1..20: mol_type = other DNA
gatcttaagtccgcaattag

SEQ ID NO: 6092 - DNA, 20 bp, synthetic construct
  source 1..20: mol_type = other DNA
ataactaccgacccgctgcg

SEQ ID NO: 6093 - DNA, 20 bp, synthetic construct
  source 1..20: mol_type = other DNA
ccgctgtgtcaaagtgttct

SEQ ID NO: 6094 - DNA, 20 bp, synthetic construct
  source 1..20: mol_type = other DNA
acttgtggcaactttaactg

SEQ ID NO: 6095 - DNA, 20 bp, synthetic construct
  source 1..20: mol_type = other DNA
ccgactacacagattattta

SEQ ID NO: 6096 - DNA, 20 bp, synthetic construct
  source 1..20: mol_type = other DNA
accgtcgggcctatacaact

SEQ ID NO: 6097 - DNA, 20 bp, synthetic construct
  source 1..20: mol_type = other DNA
gcctaggagatcaggctcgt

SEQ ID NO: 6098 - DNA, 20 bp, synthetic construct
  source 1..20: mol_type = other DNA
gccagcaagacgtgatcctg

SEQ ID NO: 6099 - DNA, 20 bp, synthetic construct
  source 1..20: mol_type = other DNA
ttgctcgtggcggcggagtt

SEQ ID NO: 6100 - DNA, 20 bp, synthetic construct
  source 1..20: mol_type = other DNA
gataacaagggctcccggtc

SEQ ID NO: 6101 - DNA, 20 bp, synthetic construct
  source 1..20: mol_type = other DNA
cactttcgggagccaggacc

SEQ ID NO: 6102 - DNA, 20 bp, synthetic construct
  source 1..20: mol_type = other DNA
ggcggaggcttcgcgacata

SEQ ID NO: 6103 - DNA, 20 bp, synthetic construct
  source 1..20: mol_type = other DNA
gctccaggtttctccactat

SEQ ID NO: 6104 - DNA, 20 bp, synthetic construct
  source 1..20: mol_type = other DNA
acacatccaatcacactcgg

SEQ ID NO: 6105 - DNA, 20 bp, synthetic construct
  source 1..20: mol_type = other DNA
ggctttgttaccacttgagt

SEQ ID NO: 6106 - DNA, 20 bp, synthetic construct
  source 1..20: mol_type = other DNA
gaccgcttgcctcagcttaa

SEQ ID NO: 6107 - DNA, 20 bp, synthetic construct
  source 1..20: mol_type = other DNA
ttgttactttaatcgccgcc

SEQ ID NO: 6108 - DNA, 20 bp, synthetic construct
  source 1..20: mol_type = other DNA
tgcagcccatccgtgaatga

SEQ ID NO: 6109 - DNA, 20 bp, synthetic construct
  source 1..20: mol_type = other DNA
ccgcatacactaaacccaat

SEQ ID NO: 6110 - DNA, 20 bp, synthetic construct
  source 1..20: mol_type = other DNA
acgctttacacttccgcccg

SEQ ID NO: 6111 - DNA, 20 bp, synthetic construct
  source 1..20: mol_type = other DNA
ggtaatggctggagatacaa

SEQ ID NO: 6112 - DNA, 20 bp, synthetic construct
  source 1..20: mol_type = other DNA
ctgtacgagcagtccttagc

SEQ ID NO: 6113 - DNA, 20 bp, synthetic construct
  source 1..20: mol_type = other DNA
taggacctctcggcatatgt

SEQ ID NO: 6114 - DNA, 20 bp, synthetic construct
  source 1..20: mol_type = other DNA
cggtcaccggcttactgaga

SEQ ID NO: 6115 - DNA, 20 bp, synthetic construct
  source 1..20: mol_type = other DNA
ccggcgctagtccatgacct

SEQ ID NO: 6116 - DNA, 20 bp, synthetic construct
  source 1..20: mol_type = other DNA
aacattcttgcgctgaatac

SEQ ID NO: 6117 - DNA, 20 bp, synthetic construct
  source 1..20: mol_type = other DNA
cagactttagcgcatgggag

SEQ ID NO: 6118 - DNA, 20 bp, synthetic construct
  source 1..20: mol_type = other DNA
cttcagtgtaaagtctctac

SEQ ID NO: 6119 - DNA, 20 bp, synthetic construct
  source 1..20: mol_type = other DNA
cggtttgtccacttattaga

SEQ ID NO: 6120 - DNA, 20 bp, synthetic construct
  source 1..20: mol_type = other DNA
gacttgacttcagtgatccc

SEQ ID NO: 6121 - DNA, 20 bp, synthetic construct
  source 1..20: mol_type = other DNA
catctcactgaggacctaag

SEQ ID NO: 6122 - DNA, 20 bp, synthetic construct
  source 1..20: mol_type = other DNA
ccgggagcacttgagacgat

SEQ ID NO: 6123 - DNA, 20 bp, synthetic construct
  source 1..20: mol_type = other DNA
gagtgttaccgtcggaagtt

SEQ ID NO: 6124 - DNA, 20 bp, synthetic construct
  source 1..20: mol_type = other DNA
ccaacccgacttcttcacaa

SEQ ID NO: 6125 - DNA, 20 bp, synthetic construct
  source 1..20: mol_type = other DNA
ttcttacacggagagtcagg

SEQ ID NO: 6126 - DNA, 20 bp, synthetic construct
  source 1..20: mol_type = other DNA
ctcaccaagttccttcctag

SEQ ID NO: 6127 - DNA, 20 bp, synthetic construct
  source 1..20: mol_type = other DNA
tgacacgcgtcacgagggct

SEQ ID NO: 6128 - DNA, 20 bp, synthetic construct
  source 1..20: mol_type = other DNA
tatataagatggtcgagtta

SEQ ID NO: 6129 - DNA, 20 bp, synthetic construct
  source 1..20: mol_type = other DNA
cgcggctctcgtttcgatat

SEQ ID NO: 6130 - DNA, 20 bp, synthetic construct
  source 1..20: mol_type = other DNA
atgctggtgtgcatcatcac

SEQ ID NO: 6131 - DNA, 20 bp, synthetic construct
  source 1..20: mol_type = other DNA
tgctgtggtttgttaccgca

SEQ ID NO: 6132 - DNA, 20 bp, synthetic construct
  source 1..20: mol_type = other DNA
gttcatattgggccgagaac

SEQ ID NO: 6133 - DNA, 20 bp, synthetic construct
  source 1..20: mol_type = other DNA
atgtccgtcaacgaggactg

SEQ ID NO: 6134 - DNA, 20 bp, synthetic construct
  source 1..20: mol_type = other DNA
ccctgctaggagcacaccaa

SEQ ID NO: 6135 - DNA, 20 bp, synthetic construct
  source 1..20: mol_type = other DNA
actgaactagctgcgcccgg

SEQ ID NO: 6136 - DNA, 20 bp, synthetic construct
  source 1..20: mol_type = other DNA
caaggatctatattacgcta

SEQ ID NO: 6137 - DNA, 20 bp, synthetic construct
  source 1..20: mol_type = other DNA
cggtaaacggtgggtccatt

SEQ ID NO: 6138 - DNA, 20 bp, synthetic construct
  source 1..20: mol_type = other DNA
tcatgcatcgctggtaaggg

SEQ ID NO: 6139 - DNA, 20 bp, synthetic construct
  source 1..20: mol_type = other DNA
taatgtcctcccatgttaga

SEQ ID NO: 6140 - DNA, 20 bp, synthetic construct
  source 1..20: mol_type = other DNA
caccgctacccgatagtttc

SEQ ID NO: 6141 - DNA, 20 bp, synthetic construct
  source 1..20: mol_type = other DNA
caagtatgtaccaccaagtc

SEQ ID NO: 6142 - DNA, 20 bp, synthetic construct
  source 1..20: mol_type = other DNA
tagagatggcggcacggttt

SEQ ID NO: 6143 - DNA, 20 bp, synthetic construct
  source 1..20: mol_type = other DNA
cttgcggtcggaaactttgc

SEQ ID NO: 6144 - DNA, 20 bp, synthetic construct
  source 1..20: mol_type = other DNA
ctagcccatcctgttgcacc

SEQ ID NO: 6145 - DNA, 20 bp, synthetic construct
  source 1..20: mol_type = other DNA
ccggcgtaccaatcgttcga

SEQ ID NO: 6146 - DNA, 20 bp, synthetic construct
  source 1..20: mol_type = other DNA
aaaccgagctaacaacacgt

SEQ ID NO: 6147 - DNA, 20 bp, synthetic construct
  source 1..20: mol_type = other DNA
cactgtgagtaggaggagtg

SEQ ID NO: 6148 - DNA, 20 bp, synthetic construct
  source 1..20: mol_type = other DNA
tatgatgtatcatctggtct

SEQ ID NO: 6149 - DNA, 20 bp, synthetic construct
  source 1..20: mol_type = other DNA
acagggtccttatgttcttt

SEQ ID NO: 6150 - DNA, 20 bp, synthetic construct
  source 1..20: mol_type = other DNA
atcccgtacctaaattaaca

SEQ ID NO: 6151 - DNA, 20 bp, synthetic construct
  source 1..20: mol_type = other DNA
acgtacgacttgccaatgtc

SEQ ID NO: 6152 - DNA, 20 bp, synthetic construct
  source 1..20: mol_type = other DNA
aggagtgctgatatagattc

SEQ ID NO: 6153 - DNA, 20 bp, synthetic construct
  source 1..20: mol_type = other DNA
tactatttacgctccgggtt

SEQ ID NO: 6154 - DNA, 20 bp, synthetic construct
  source 1..20: mol_type = other DNA
aaggagctagtagcacccgc

SEQ ID NO: 6155 - DNA, 20 bp, synthetic construct
  source 1..20: mol_type = other DNA
aggcattagcagcatcgcaa

SEQ ID NO: 6156 - DNA, 20 bp, synthetic construct
  source 1..20: mol_type = other DNA
aaggcccatattgagtcctg

SEQ ID NO: 6157 - DNA, 20 bp, synthetic construct
  source 1..20: mol_type = other DNA
ttatccggaaccgtatcgct

SEQ ID NO: 6158 - DNA, 20 bp, synthetic construct
  source 1..20: mol_type = other DNA
tttagtgtgcccagatggtt

SEQ ID NO: 6159 - DNA, 20 bp, synthetic construct
  source 1..20: mol_type = other DNA
tatcgatttcgaccacacag

SEQ ID NO: 6160 - DNA, 20 bp, synthetic construct
  source 1..20: mol_type = other DNA
gctactgatttccctgtggt

SEQ ID NO: 6161 - DNA, 20 bp, synthetic construct
  source 1..20: mol_type = other DNA
cacctggactgccctaagtg

SEQ ID NO: 6162 - DNA, 20 bp, synthetic construct
  source 1..20: mol_type = other DNA
tgaggaaatggtatcgcgtg

SEQ ID NO: 6163 - DNA, 20 bp, synthetic construct
  source 1..20: mol_type = other DNA
ccgtccggagtcatgttgtc

SEQ ID NO: 6164 - DNA, 20 bp, synthetic construct
  source 1..20: mol_type = other DNA
ggaatacacactttacaaga

SEQ ID NO: 6165 - DNA, 20 bp, synthetic construct
  source 1..20: mol_type = other DNA
gagagctggtttcatcgaac

SEQ ID NO: 6166 - DNA, 20 bp, synthetic construct
  source 1..20: mol_type = other DNA
cggcatatgcgtgtagtagg

SEQ ID NO: 6167 - DNA, 20 bp, synthetic construct
  source 1..20: mol_type = other DNA
ccgtacgctcctctgagatt

SEQ ID NO: 6168 - DNA, 20 bp, synthetic construct
  source 1..20: mol_type = other DNA
tatctcgcatcggctccaca

SEQ ID NO: 6169 - DNA, 20 bp, synthetic construct
  source 1..20: mol_type = other DNA
acctcaccgagcgccgcaac

SEQ ID NO: 6170 - DNA, 20 bp, synthetic construct
  source 1..20: mol_type = other DNA
gacaatctgctaacttgtaa

SEQ ID NO: 6171 - DNA, 20 bp, synthetic construct
  source 1..20: mol_type = other DNA
aagatcatcatgacccattc

SEQ ID NO: 6172 - DNA, 20 bp, synthetic construct
  source 1..20: mol_type = other DNA
ccagctactaagaagaatca

SEQ ID NO: 6173 - DNA, 20 bp, synthetic construct
  source 1..20: mol_type = other DNA
gcgtggcggttacggtagtg

SEQ ID NO: 6174 - DNA, 20 bp, synthetic construct
  source 1..20: mol_type = other DNA
gtatgggcctgtagcggact

SEQ ID NO: 6175 - DNA, 20 bp, synthetic construct
  source 1..20: mol_type = other DNA
aacaaattgtccagcgagta

SEQ ID NO: 6176 - DNA, 20 bp, synthetic construct
  source 1..20: mol_type = other DNA
ctaactagctaactatgacc

SEQ ID NO: 6177 - DNA, 20 bp, synthetic construct
  source 1..20: mol_type = other DNA
tctcgatgactctctaactt

SEQ ID NO: 6178 - DNA, 20 bp, synthetic construct
  source 1..20: mol_type = other DNA
ggaagtaaacagtctctagg

SEQ ID NO: 6179 - DNA, 20 bp, synthetic construct
  source 1..20: mol_type = other DNA
ctagtggctgttccatcccg

SEQ ID NO: 6180 - DNA, 20 bp, synthetic construct
  source 1..20: mol_type = other DNA
gcctatcaaccctcaaagga

SEQ ID NO: 6181 - DNA, 20 bp, synthetic construct
  source 1..20: mol_type = other DNA
acactaacttcggagctacg

SEQ ID NO: 6182 - DNA, 20 bp, synthetic construct
  source 1..20: mol_type = other DNA
gatccaggcctattcgacct

SEQ ID NO: 6183 - DNA, 20 bp, synthetic construct
  source 1..20: mol_type = other DNA
caacagagcttaccctacta

SEQ ID NO: 6184 - DNA, 20 bp, synthetic construct
  source 1..20: mol_type = other DNA
cagtactataaggcagctcc

SEQ ID NO: 6185 - DNA, 20 bp, synthetic construct
  source 1..20: mol_type = other DNA
atctcaaccgtttgcacatg

SEQ ID NO: 6186 - DNA, 20 bp, synthetic construct
  source 1..20: mol_type = other DNA
tgcaggagtcatgaccgtat

SEQ ID NO: 6187 - DNA, 20 bp, synthetic construct
  source 1..20: mol_type = other DNA
cttccattctaaccggtagg

SEQ ID NO: 6188 - DNA, 20 bp, synthetic construct
  source 1..20: mol_type = other DNA
tactggcaaatcaaggcgag

SEQ ID NO: 6189 - DNA, 20 bp, synthetic construct
  source 1..20: mol_type = other DNA
agagcgcatttctcctgttt

SEQ ID NO: 6190 - DNA, 20 bp, synthetic construct
  source 1..20: mol_type = other DNA
tgaatcaaccttggaactcc

SEQ ID NO: 6191 - DNA, 20 bp, synthetic construct
  source 1..20: mol_type = other DNA
gctaccatgagttgaatctg

SEQ ID NO: 6192 - DNA, 20 bp, synthetic construct
  source 1..20: mol_type = other DNA
ctgaacagaccatctagcag

SEQ ID NO: 6193 - DNA, 20 bp, synthetic construct
  source 1..20: mol_type = other DNA
attcgacccgagtccgtagg

SEQ ID NO: 6194 - DNA, 20 bp, synthetic construct
  source 1..20: mol_type = other DNA
cacgagaggcgatccaaatc

SEQ ID NO: 6195 - DNA, 20 bp, synthetic construct
  source 1..20: mol_type = other DNA
tattgaaggagcctatctgg

SEQ ID NO: 6196 - DNA, 20 bp, synthetic construct
  source 1..20: mol_type = other DNA
agtatgaagcacaagtactg

SEQ ID NO: 6197 - DNA, 20 bp, synthetic construct
  source 1..20: mol_type = other DNA
tctgttagtggttgtgtact

SEQ ID NO: 6198 - DNA, 20 bp, synthetic construct
  source 1..20: mol_type = other DNA
gatacaggcatcgttattgt

SEQ ID NO: 6199 - DNA, 20 bp, synthetic construct
  source 1..20: mol_type = other DNA
atcccgcgccgcatgctgta

SEQ ID NO: 6200 - DNA, 20 bp, synthetic construct
  source 1..20: mol_type = other DNA
ctcccagggtctgtcaggcc

SEQ ID NO: 6201 - DNA, 20 bp, synthetic construct
  source 1..20: mol_type = other DNA
agcagcgctggcgtccatca

SEQ ID NO: 6202 - DNA, 20 bp, synthetic construct
  source 1..20: mol_type = other DNA
tgtgaatttcgacatgtcgt

SEQ ID NO: 6203 - DNA, 20 bp, synthetic construct
  source 1..20: mol_type = other DNA
gtgcttagcgaagaacacgg

SEQ ID NO: 6204 - DNA, 20 bp, synthetic construct
  source 1..20: mol_type = other DNA
tatgactgcgccctcactaa

SEQ ID NO: 6205 - DNA, 20 bp, synthetic construct
  source 1..20: mol_type = other DNA
ctccagatgtgcatcagatg

SEQ ID NO: 6206 - DNA, 20 bp, synthetic construct
  source 1..20: mol_type = other DNA
agagctccttggtactaaac

SEQ ID NO: 6207 - DNA, 20 bp, synthetic construct
  source 1..20: mol_type = other DNA
cttgatcaagagattgtcca

SEQ ID NO: 6208 - DNA, 20 bp, synthetic construct
  source 1..20: mol_type = other DNA
cacggtttaactgcgtcgga

SEQ ID NO: 6209 - DNA, 20 bp, synthetic construct
  source 1..20: mol_type = other DNA
ggcattggattctcgtggta

SEQ ID NO: 6210 - DNA, 20 bp, synthetic construct
  source 1..20: mol_type = other DNA
ccatattacccttcgtttac

SEQ ID NO: 6211 - DNA, 20 bp, synthetic construct
  source 1..20: mol_type = other DNA
ttacaccgtattcagcccat

SEQ ID NO: 6212 - DNA, 20 bp, synthetic construct
  source 1..20: mol_type = other DNA
gctaccactttccaccgcgt

SEQ ID NO: 6213 - DNA, 20 bp, synthetic construct
  source 1..20: mol_type = other DNA
attgtgagatgtttcggcta

SEQ ID NO: 6214 - DNA, 20 bp, synthetic construct
  source 1..20: mol_type = other DNA
gcacctagaccaccacagac

SEQ ID NO: 6215 - DNA, 20 bp, synthetic construct
  source 1..20: mol_type = other DNA
cttgacgagcttagcagtca

SEQ ID NO: 6216 - DNA, 20 bp, synthetic construct
  source 1..20: mol_type = other DNA
gcactgaccagtgcccgact

SEQ ID NO: 6217 - DNA, 20 bp, synthetic construct
  source 1..20: mol_type = other DNA
aggtcctcaaactgtaaggg

SEQ ID NO: 6218 - DNA, 20 bp, synthetic construct
  source 1..20: mol_type = other DNA
aattcgccaatccgtccttt

SEQ ID NO: 6219 - DNA, 20 bp, synthetic construct
  source 1..20: mol_type = other DNA
cgactcttctttggaaagta

SEQ ID NO: 6220 - DNA, 20 bp, synthetic construct
  source 1..20: mol_type = other DNA
tttgggatggtcgggcttag

SEQ ID NO: 6221 - DNA, 20 bp, synthetic construct
  source 1..20: mol_type = other DNA
gctaggagcgccataagagg

SEQ ID NO: 6222 - DNA, 20 bp, synthetic construct
  source 1..20: mol_type = other DNA
tgacagaactgcgagcctgt

SEQ ID NO: 6223 - DNA, 20 bp, synthetic construct
  source 1..20: mol_type = other DNA
ggataaagcacttccgctca

SEQ ID NO: 6224 - DNA, 20 bp, synthetic construct
  source 1..20: mol_type = other DNA
ctgggccgcgcacaattaga

SEQ ID NO: 6225 - DNA, 20 bp, synthetic construct
  source 1..20: mol_type = other DNA
catcggtgacttatttcacg

SEQ ID NO: 6226 - DNA, 20 bp, synthetic construct
  source 1..20: mol_type = other DNA
cgggcagagcttgtgaacac

SEQ ID NO: 6227 - DNA, 20 bp, synthetic construct
  source 1..20: mol_type = other DNA
caagagttcctgcccatctt

SEQ ID NO: 6228 - DNA, 20 bp, synthetic construct
  source 1..20: mol_type = other DNA
aactttgtgggcgtaagatt

SEQ ID NO: 6229 - DNA, 20 bp, synthetic construct
  source 1..20: mol_type = other DNA
gcctaactctcgtggttcgc

SEQ ID NO: 6230 - DNA, 20 bp, synthetic construct
  source 1..20: mol_type = other DNA
gatagaggaccaagaatcaa

SEQ ID NO: 6231 - DNA, 20 bp, synthetic construct
  source 1..20: mol_type = other DNA
agccgtggcagtaacacaat

SEQ ID NO: 6232 - DNA, 20 bp, synthetic construct
  source 1..20: mol_type = other DNA
ggaggctctatcacaatgct

SEQ ID NO: 6233 - DNA, 20 bp, synthetic construct
  source 1..20: mol_type = other DNA
ggtatccgagtcgcacttcg

SEQ ID NO: 6234 - DNA, 20 bp, synthetic construct
  source 1..20: mol_type = other DNA
ggtgccttaaactacagtgg

SEQ ID NO: 6235 - DNA, 20 bp, synthetic construct
  source 1..20: mol_type = other DNA
cagttggtaattcacgccct

SEQ ID NO: 6236 - DNA, 20 bp, synthetic construct
  source 1..20: mol_type = other DNA
ggtctggcggcaccataaga

SEQ ID NO: 6237 - DNA, 20 bp, synthetic construct
  source 1..20: mol_type = other DNA
gttgttctccaggaatagga

SEQ ID NO: 6238 - DNA, 20 bp, synthetic construct
  source 1..20: mol_type = other DNA
cggatcggtttgaacatctt

SEQ ID NO: 6239 - DNA, 20 bp, synthetic construct
  source 1..20: mol_type = other DNA
cgtctgaaatgctgcttcga

SEQ ID NO: 6240 - DNA, 20 bp, synthetic construct
  source 1..20: mol_type = other DNA
cagactatgctaagtgtagg

SEQ ID NO: 6241 - DNA, 20 bp, synthetic construct
  source 1..20: mol_type = other DNA
ttggacacagtcctgacgag

SEQ ID NO: 6242 - DNA, 20 bp, synthetic construct
  source 1..20: mol_type = other DNA
tagatatattgtagccaggt

SEQ ID NO: 6243 - DNA, 20 bp, synthetic construct
  source 1..20: mol_type = other DNA
attacctcttagtgcgcgac

SEQ ID NO: 6244 - DNA, 20 bp, synthetic construct
  source 1..20: mol_type = other DNA
atgacccattattggtacgg

SEQ ID NO: 6245 - DNA, 20 bp, synthetic construct
  source 1..20: mol_type = other DNA
acggcatccgtcgaatgtgt

SEQ ID NO: 6246 - DNA, 20 bp, synthetic construct
  source 1..20: mol_type = other DNA
tgatctacgagcaaagatcc

SEQ ID NO: 6247 - DNA, 20 bp, synthetic construct
  source 1..20: mol_type = other DNA
taaatagaccagctccacaa

SEQ ID NO: 6248 - DNA, 20 bp, synthetic construct
  source 1..20: mol_type = other DNA
tttctccgaggtccactcta

SEQ ID NO: 6249 - DNA, 20 bp, synthetic construct
  source 1..20: mol_type = other DNA
ttagctaggtttcctcggta

SEQ ID NO: 6250 - DNA, 20 bp, synthetic construct
  source 1..20: mol_type = other DNA
ccctcagagcactaagaagt

SEQ ID NO: 6251 - DNA, 20 bp, synthetic construct
  source 1..20: mol_type = other DNA
atctggtctatcacgtgacc

SEQ ID NO: 6252 - DNA, 20 bp, synthetic construct
  source 1..20: mol_type = other DNA
tcatcacttggctaacggga

SEQ ID NO: 6253 - DNA, 20 bp, synthetic construct
  source 1..20: mol_type = other DNA
agtcctcatgacaaatgatc

SEQ ID NO: 6254 - DNA, 20 bp, synthetic construct
  source 1..20: mol_type = other DNA
cctcttggacagaacatggt

SEQ ID NO: 6255 - DNA, 20 bp, synthetic construct
  source 1..20: mol_type = other DNA
tagaacggcacgcgattgat

SEQ ID NO: 6256 - DNA, 20 bp, synthetic construct
  source 1..20: mol_type = other DNA
gatcaaggcgaaccattcgt

SEQ ID NO: 6257 - DNA, 20 bp, synthetic construct
  source 1..20: mol_type = other DNA
cctccaagcgcatcatgaat

SEQ ID NO: 6258 - DNA, 20 bp, synthetic construct
  source 1..20: mol_type = other DNA
cagtactgtacctaggcaag

SEQ ID NO: 6259 - DNA, 20 bp, synthetic construct
  source 1..20: mol_type = other DNA
aaggcaggtggtggtaacga

SEQ ID NO: 6260 - DNA, 20 bp, synthetic construct
  source 1..20: mol_type = other DNA
ggtcgatcgaggtctacaaa

SEQ ID NO: 6261 - DNA, 20 bp, synthetic construct
  source 1..20: mol_type = other DNA
aatcggcacaatttcgagat

SEQ ID NO: 6262 - DNA, 20 bp, synthetic construct
  source 1..20: mol_type = other DNA
gttctggaccgtttcattgt

SEQ ID NO: 6263 - DNA, 20 bp, synthetic construct
  source 1..20: mol_type = other DNA
cgcgaatggctcgttgtagt

SEQ ID NO: 6264 - DNA, 20 bp, synthetic construct
  source 1..20: mol_type = other DNA
tacagctccttggcatcata

SEQ ID NO: 6265 - DNA, 20 bp, synthetic construct
  source 1..20: mol_type = other DNA
gtgattgcaaagctgaccaa

SEQ ID NO: 6266 - DNA, 20 bp, synthetic construct
  source 1..20: mol_type = other DNA
gtttcgatgaacaccaacaa

SEQ ID NO: 6267 - DNA, 20 bp, synthetic construct
  source 1..20: mol_type = other DNA
gagtgtgagcttagagtctc

SEQ ID NO: 6268 - DNA, 20 bp, synthetic construct
  source 1..20: mol_type = other DNA
ttcgtcgaaaccagaaggct

SEQ ID NO: 6269 - DNA, 20 bp, synthetic construct
  source 1..20: mol_type = other DNA
tattgctgtaaggacgaatc

SEQ ID NO: 6270 - DNA, 20 bp, synthetic construct
  source 1..20: mol_type = other DNA
gcatttacgttgctcgaagc

SEQ ID NO: 6271 - DNA, 20 bp, synthetic construct
  source 1..20: mol_type = other DNA
cgttagttgcgccgggtcaa

SEQ ID NO: 6272 - DNA, 20 bp, synthetic construct
  source 1..20: mol_type = other DNA
tggtattgtccaacggagaa

SEQ ID NO: 6273 - DNA, 20 bp, synthetic construct
  source 1..20: mol_type = other DNA
ccgacaacaatagggcaaag

SEQ ID NO: 6274 - DNA, 20 bp, synthetic construct
  source 1..20: mol_type = other DNA
tcagatcgattgatgcgcgc

SEQ ID NO: 6275 - DNA, 20 bp, synthetic construct
  source 1..20: mol_type = other DNA
gtatgttagtatcacccttc

SEQ ID NO: 6276 - DNA, 20 bp, synthetic construct
  source 1..20: mol_type = other DNA
gtgttatagtgaacggaccg

SEQ ID NO: 6277 - DNA, 20 bp, synthetic construct
  source 1..20: mol_type = other DNA
gggctttctctcggcttgtt

SEQ ID NO: 6278 - DNA, 20 bp, synthetic construct
  source 1..20: mol_type = other DNA
cattggtaattaagaccacc

SEQ ID NO: 6279 - DNA, 20 bp, synthetic construct
  source 1..20: mol_type = other DNA
cataatgccaaaggcagggc

SEQ ID NO: 6280 - DNA, 20 bp, synthetic construct
  source 1..20: mol_type = other DNA
gaccagtactgtccatgtac

SEQ ID NO: 6281 - DNA, 20 bp, synthetic construct
  source 1..20: mol_type = other DNA
accgctgtatgcactatcca

SEQ ID NO: 6282 - DNA, 20 bp, synthetic construct
  source 1..20: mol_type = other DNA
gagctaatgttgtgcaatat

SEQ ID NO: 6283 - DNA, 20 bp, synthetic construct
  source 1..20: mol_type = other DNA
gcgggtctttgtcgaacggc

SEQ ID NO: 6284 - DNA, 20 bp, synthetic construct
  source 1..20: mol_type = other DNA
tctcatggagatattggctg

SEQ ID NO: 6285 - DNA, 20 bp, synthetic construct
  source 1..20: mol_type = other DNA
tctctcgataacaccgttcc

SEQ ID NO: 6286 - DNA, 20 bp, synthetic construct
  source 1..20: mol_type = other DNA
gtccgaaggaagtgtggctg

SEQ ID NO: 6287 - DNA, 20 bp, synthetic construct
  source 1..20: mol_type = other DNA
atattgacaatcactatgcg

SEQ ID NO: 6288 - DNA, 20 bp, synthetic construct
  source 1..20: mol_type = other DNA
cctacaatgtggatgggtat

SEQ ID NO: 6289 - DNA, 20 bp, synthetic construct
  source 1..20: mol_type = other DNA
gatcagccgtattccaattc

SEQ ID NO: 6290 - DNA, 20 bp, synthetic construct
  source 1..20: mol_type = other DNA
acagccgcacgttggagaaa

SEQ ID NO: 6291 - DNA, 20 bp, synthetic construct
  source 1..20: mol_type = other DNA
ctaacccttggcgactaact

SEQ ID NO: 6292 - DNA, 20 bp, synthetic construct
  source 1..20: mol_type = other DNA
ccatcagatttcggcccggt

SEQ ID NO: 6293 - DNA, 20 bp, synthetic construct
  source 1..20: mol_type = other DNA
ttgggtgacggctgttgctg

SEQ ID NO: 6294 - DNA, 20 bp, synthetic construct
  source 1..20: mol_type = other DNA
aagtcataattccgagctcc

SEQ ID NO: 6295 - DNA, 20 bp, synthetic construct
  source 1..20: mol_type = other DNA
cgttatgagtactcgaacca

SEQ ID NO: 6296 - DNA, 20 bp, synthetic construct
  source 1..20: mol_type = other DNA
catcactagcccagcgagta

SEQ ID NO: 6297 - DNA, 20 bp, synthetic construct
  source 1..20: mol_type = other DNA
taatcagcgatgagtctaac

SEQ ID NO: 6298 - DNA, 20 bp, synthetic construct
  source 1..20: mol_type = other DNA
ttatacgagtaagtggttat

SEQ ID NO: 6299 - DNA, 20 bp, synthetic construct
  source 1..20: mol_type = other DNA
aacctcttcccatacctagt

SEQ ID NO: 6300 - DNA, 20 bp, synthetic construct
  source 1..20: mol_type = other DNA
tcgtagccgtcgctaacgta

SEQ ID NO: 6301 - DNA, 20 bp, synthetic construct
  source 1..20: mol_type = other DNA
gctaacaggtccagttataa

SEQ ID NO: 6302 - DNA, 20 bp, synthetic construct
  source 1..20: mol_type = other DNA
cttaaatagtcttgagggta

SEQ ID NO: 6303 - DNA, 20 bp, synthetic construct
  source 1..20: mol_type = other DNA
ctcggctcagacacttactc

SEQ ID NO: 6304 - DNA, 20 bp, synthetic construct
  source 1..20: mol_type = other DNA
agacaaggcgatgataatgt

SEQ ID NO: 6305 - DNA, 20 bp, synthetic construct
  source 1..20: mol_type = other DNA
tgttaatacggtagagtttc

SEQ ID NO: 6306 - DNA, 20 bp, synthetic construct
  source 1..20: mol_type = other DNA
caacctttggctagcttgtc

SEQ ID NO: 6307 - DNA, 20 bp, synthetic construct
  source 1..20: mol_type = other DNA
ggcctaggcgtaaggttgaa

SEQ ID NO: 6308 - DNA, 20 bp, synthetic construct
  source 1..20: mol_type = other DNA
aatgcgggtaattacggatg

SEQ ID NO: 6309 - DNA, 20 bp, synthetic construct
  source 1..20: mol_type = other DNA
ataaccttggttaccacttc

SEQ ID NO: 6310 - DNA, 20 bp, synthetic construct
  source 1..20: mol_type = other DNA
cagggagctatcatctctac

SEQ ID NO: 6311 - DNA, 20 bp, synthetic construct
  source 1..20: mol_type = other DNA
aaattcctaagcagaagccg

SEQ ID NO: 6312 - DNA, 20 bp, synthetic construct
  source 1..20: mol_type = other DNA
aacagcccgccgtagtgagt

SEQ ID NO: 6313 - DNA, 20 bp, synthetic construct
  source 1..20: mol_type = other DNA
tgaccacccaattcatccag

SEQ ID NO: 6314 - DNA, 20 bp, synthetic construct
  source 1..20: mol_type = other DNA
tttctggctacattactact

SEQ ID NO: 6315 - DNA, 20 bp, synthetic construct
  source 1..20: mol_type = other DNA
tacgcatttcgcatgtagat

SEQ ID NO: 6316 - DNA, 20 bp, synthetic construct
  source 1..20: mol_type = other DNA
tggaagaacttcataaggac

SEQ ID NO: 6317 - DNA, 20 bp, synthetic construct
  source 1..20: mol_type = other DNA
ctatagaatcggagaatctg

SEQ ID NO: 6318 - DNA, 20 bp, synthetic construct
  source 1..20: mol_type = other DNA
caacgtaagtcgaagtattc

SEQ ID NO: 6319 - DNA, 20 bp, synthetic construct
  source 1..20: mol_type = other DNA
aaatgtatccagttatacga

SEQ ID NO: 6320 - DNA, 20 bp, synthetic construct
  source 1..20: mol_type = other DNA
cggctctgacgtgactgaaa

SEQ ID NO: 6321 - DNA, 20 bp, synthetic construct
  source 1..20: mol_type = other DNA
caatcaacgaagcccacctg

SEQ ID NO: 6322 - DNA, 20 bp, synthetic construct
  source 1..20: mol_type = other DNA
acgcggcagactctggatac

SEQ ID NO: 6323 - DNA, 20 bp, synthetic construct
  source 1..20: mol_type = other DNA
cggatgacaagctgtgaagg

SEQ ID NO: 6324 - DNA, 20 bp, synthetic construct
  source 1..20: mol_type = other DNA
gataagctgtatctcatctg

SEQ ID NO: 6325 - DNA, 20 bp, synthetic construct
  source 1..20: mol_type = other DNA
gattaacacgtacgctcttt

SEQ ID NO: 6326 - DNA, 20 bp, synthetic construct
  source 1..20: mol_type = other DNA
tattgccgtgtagcatggcc

SEQ ID NO: 6327 - DNA, 20 bp, synthetic construct
  source 1..20: mol_type = other DNA
cgatcagcgcagaagttatg

SEQ ID NO: 6328 - DNA, 20 bp, synthetic construct
  source 1..20: mol_type = other DNA
ggttgcctacaataagcggc

SEQ ID NO: 6329 - DNA, 20 bp, synthetic construct
  source 1..20: mol_type = other DNA
ccttaagacacccggttgca

SEQ ID NO: 6330 - DNA, 20 bp, synthetic construct
  source 1..20: mol_type = other DNA
tcaaggaagcatatcaacag

SEQ ID NO: 6331 - DNA, 20 bp, synthetic construct
  source 1..20: mol_type = other DNA
aaggagatacttgcgtttgt

SEQ ID NO: 6332 - DNA, 20 bp, synthetic construct
  source 1..20: mol_type = other DNA
cgaaaggcttgcatagttcg

SEQ ID NO: 6333 - DNA, 20 bp, synthetic construct
  source 1..20: mol_type = other DNA
attacacgggaggattgtat

SEQ ID NO: 6334 - DNA, 20 bp, synthetic construct
  source 1..20: mol_type = other DNA
ggcctttgggcggattcgac

SEQ ID NO: 6335 - DNA, 20 bp, synthetic construct
  source 1..20: mol_type = other DNA
cgtcttgtttgttcccgcga

SEQ ID NO: 6336 - DNA, 20 bp, synthetic construct
  source 1..20: mol_type = other DNA
cttgctatctgccatacgtt

SEQ ID NO: 6337 - DNA, 20 bp, synthetic construct
  source 1..20: mol_type = other DNA
gacagactcctgctagacct

SEQ ID NO: 6338 - DNA, 20 bp, synthetic construct
  source 1..20: mol_type = other DNA
ccaacatggccagcagactt

SEQ ID NO: 6339 - DNA, 20 bp, synthetic construct
  source 1..20: mol_type = other DNA
taaaggtgttagggagtaag

SEQ ID NO: 6340 - DNA, 20 bp, synthetic construct
  source 1..20: mol_type = other DNA
ggtttaatggacaaatcaac

SEQ ID NO: 6341 - DNA, 20 bp, synthetic construct
  source 1..20: mol_type = other DNA
ctgagttctgatcagatcga

SEQ ID NO: 6342 - DNA, 20 bp, synthetic construct
  source 1..20: mol_type = other DNA
tcaaggtgtcggatatagcc

SEQ ID NO: 6343 - DNA, 20 bp, synthetic construct
  source 1..20: mol_type = other DNA
gttggcatcccgacctatgc

SEQ ID NO: 6344 - DNA, 20 bp, synthetic construct
  source 1..20: mol_type = other DNA
ctcggatgacatcacatatt

SEQ ID NO: 6345 - DNA, 20 bp, synthetic construct
  source 1..20: mol_type = other DNA
cagggttaacttacgcctgg

SEQ ID NO: 6346 - DNA, 20 bp, synthetic construct
  source 1..20: mol_type = other DNA
ggacaagatagctaactcct

SEQ ID NO: 6347 - DNA, 20 bp, synthetic construct
  source 1..20: mol_type = other DNA
gttcgcgtagttgtattctc

SEQ ID NO: 6348 - DNA, 20 bp, synthetic construct
  source 1..20: mol_type = other DNA
aggaccaaaggtgagaagat

SEQ ID NO: 6349 - DNA, 20 bp, synthetic construct
  source 1..20: mol_type = other DNA
atgaaagggtagtttcgacc

SEQ ID NO: 6350 - DNA, 20 bp, synthetic construct
  source 1..20: mol_type = other DNA
acagggatttccctcctcga

SEQ ID NO: 6351 - DNA, 20 bp, synthetic construct
  source 1..20: mol_type = other DNA
gtgttaagatgcgtcagacg

SEQ ID NO: 6352 - DNA, 20 bp, synthetic construct
  source 1..20: mol_type = other DNA
aggcacgctataggtttggt

SEQ ID NO: 6353 - DNA, 20 bp, synthetic construct
  source 1..20: mol_type = other DNA
gcgcaggaaattcccgagcc

SEQ ID NO: 6354 - DNA, 20 bp, synthetic construct
  source 1..20: mol_type = other DNA
gtttggtcatccacggaagc

SEQ ID NO: 6355 - DNA, 20 bp, synthetic construct
  source 1..20: mol_type = other DNA
attgcacgaccagccaagtg

SEQ ID NO: 6356 - DNA, 20 bp, synthetic construct
  source 1..20: mol_type = other DNA
ggtaatgaggttgtatacgt

SEQ ID NO: 6357 - DNA, 20 bp, synthetic construct
  source 1..20: mol_type = other DNA
ttcgtcgcgatttattggat

SEQ ID NO: 6358 - DNA, 20 bp, synthetic construct
  source 1..20: mol_type = other DNA
gtctacacgtatctcaacaa

SEQ ID NO: 6359 - DNA, 20 bp, synthetic construct
  source 1..20: mol_type = other DNA
atcggattgatcgtgcgtag

SEQ ID NO: 6360 - DNA, 20 bp, synthetic construct
  source 1..20: mol_type = other DNA
aaaccgtgctctgggccgaa

SEQ ID NO: 6361 - DNA, 20 bp, synthetic construct
  source 1..20: mol_type = other DNA
cgaggattgtgatagaatcc

SEQ ID NO: 6362 - DNA, 20 bp, synthetic construct
  source 1..20: mol_type = other DNA
accgtcatcgacctttgcac

SEQ ID NO: 6363 - DNA, 20 bp, synthetic construct
  source 1..20: mol_type = other DNA
ggctgtttaagaaatacatc

SEQ ID NO: 6364 - DNA, 20 bp, synthetic construct
  source 1..20: mol_type = other DNA
cgtgcatgagtctgttaaga

SEQ ID NO: 6365 - DNA, 20 bp, synthetic construct
  source 1..20: mol_type = other DNA
gaaggaattagatacgagaa

SEQ ID NO: 6366 - DNA, 20 bp, synthetic construct
  source 1..20: mol_type = other DNA
gtgatcatgggacagcaaac

SEQ ID NO: 6367 - DNA, 20 bp, synthetic construct
  source 1..20: mol_type = other DNA
tacatactagctggtacaat

SEQ ID NO: 6368 - DNA, 20 bp, synthetic construct
  source 1..20: mol_type = other DNA
tttggctgactgaagaaggt

SEQ ID NO: 6369 - DNA, 20 bp, synthetic construct
  source 1..20: mol_type = other DNA
agattcggcgaccattagga

SEQ ID NO: 6370 - DNA, 20 bp, synthetic construct
  source 1..20: mol_type = other DNA
cgacctgttgagatccgcgt

SEQ ID NO: 6371 - DNA, 20 bp, synthetic construct
  source 1..20: mol_type = other DNA
cctcgcgtcaacaatgcact

SEQ ID NO: 6372 - DNA, 20 bp, synthetic construct
  source 1..20: mol_type = other DNA
catcttatatctaactgacg

SEQ ID NO: 6373 - DNA, 20 bp, synthetic construct
  source 1..20: mol_type = other DNA
ctccctccgactcgttggag

SEQ ID NO: 6374 - DNA, 20 bp, synthetic construct
  source 1..20: mol_type = other DNA
tttcacggatgaactgtgct

SEQ ID NO: 6375 - DNA, 20 bp, synthetic construct
  source 1..20: mol_type = other DNA
aaattatctgcgtggtccgc

SEQ ID NO: 6376 - DNA, 20 bp, synthetic construct
  source 1..20: mol_type = other DNA
gtgaccagagtgaggttatg

SEQ ID NO: 6377 - DNA, 20 bp, synthetic construct
  source 1..20: mol_type = other DNA
gagtctagcaccatcattct

SEQ ID NO: 6378 - DNA, 20 bp, synthetic construct
  source 1..20: mol_type = other DNA
tatccttgaaggtcggctgt

SEQ ID NO: 6379 - DNA, 20 bp, synthetic construct
  source 1..20: mol_type = other DNA
cacataccctagtgtcgtgc

SEQ ID NO: 6380 - DNA, 20 bp, synthetic construct
  source 1..20: mol_type = other DNA
acacggtccacccttgacgc

SEQ ID NO: 6381 - DNA, 20 bp, synthetic construct
  source 1..20: mol_type = other DNA
tgagccaccagtgcaacaca

SEQ ID NO: 6382 - DNA, 20 bp, synthetic construct
  source 1..20: mol_type = other DNA
actatggcataagagcttcg

SEQ ID NO: 6383 - DNA, 20 bp, synthetic construct
  source 1..20: mol_type = other DNA
agtatgcggtacttgcacca

SEQ ID NO: 6384 - DNA, 20 bp, synthetic construct
  source 1..20: mol_type = other DNA
actcacgcttacatttgtgc

SEQ ID NO: 6385 - DNA, 20 bp, synthetic construct
  source 1..20: mol_type = other DNA
gtactcatgcagcttcccac

SEQ ID NO: 6386 - DNA, 20 bp, synthetic construct
  source 1..20: mol_type = other DNA
tcggaacgaatgaggcatat

SEQ ID NO: 6387 - DNA, 20 bp, synthetic construct
  source 1..20: mol_type = other DNA
ccttccgggtaagcgggttt

SEQ ID NO: 6388 - DNA, 20 bp, synthetic construct
  source 1..20: mol_type = other DNA
gatgtctgctggcttcatcc

SEQ ID NO: 6389 - DNA, 20 bp, synthetic construct
  source 1..20: mol_type = other DNA
cgtgacataggaatgcaaga

SEQ ID NO: 6390 - DNA, 20 bp, synthetic construct
  source 1..20: mol_type = other DNA
cgaacactaacccgaagaac

SEQ ID NO: 6391 - DNA, 20 bp, synthetic construct
  source 1..20: mol_type = other DNA
tagtgataacttggattgac

SEQ ID NO: 6392 - DNA, 20 bp, synthetic construct
  source 1..20: mol_type = other DNA
acatcgctgctcgacactag

SEQ ID NO: 6393 - DNA, 20 bp, synthetic construct
  source 1..20: mol_type = other DNA
cttcaagctcgaatggaaca

SEQ ID NO: 6394 - DNA, 20 bp, synthetic construct
  source 1..20: mol_type = other DNA
agagaagtatggtctggagt

SEQ ID NO: 6395 - DNA, 20 bp, synthetic construct
  source 1..20: mol_type = other DNA
tagtacactgcaactcggga

SEQ ID NO: 6396 - DNA, 20 bp, synthetic construct
  source 1..20: mol_type = other DNA
gtgcgtgtatgttagaattg

SEQ ID NO: 6397 - DNA, 20 bp, synthetic construct
  source 1..20: mol_type = other DNA
gactaggaaactaggagatc

SEQ ID NO: 6398 - DNA, 20 bp, synthetic construct
  source 1..20: mol_type = other DNA
acactgggatttccaacggc

SEQ ID NO: 6399 - DNA, 20 bp, synthetic construct
  source 1..20: mol_type = other DNA
tacagtacacctcggctccg

SEQ ID NO: 6400 - DNA, 20 bp, synthetic construct
  source 1..20: mol_type = other DNA
ttgttaaccctgcatcctca

SEQ ID NO: 6401 - DNA, 20 bp, synthetic construct
  source 1..20: mol_type = other DNA
agttagttccgctccgagac

SEQ ID NO: 6402 - DNA, 20 bp, synthetic construct
  source 1..20: mol_type = other DNA
tacagatgagaaagcacaag

SEQ ID NO: 6403 - DNA, 20 bp, synthetic construct
  source 1..20: mol_type = other DNA
taaggaggtaaggtctcgcg

SEQ ID NO: 6404 - DNA, 20 bp, synthetic construct
  source 1..20: mol_type = other DNA
tgcgtgtacatggctccgtc

SEQ ID NO: 6405 - DNA, 20 bp, synthetic construct
  source 1..20: mol_type = other DNA
tggccaggtgcgtagttcgt

SEQ ID NO: 6406 - DNA, 20 bp, synthetic construct
  source 1..20: mol_type = other DNA
tccgacatggtccgagcttg

SEQ ID NO: 6407 - DNA, 20 bp, synthetic construct
  source 1..20: mol_type = other DNA
tttgtggccattatagaact

SEQ ID NO: 6408 - DNA, 20 bp, synthetic construct
  source 1..20: mol_type = other DNA
cccacagtctacggaagtga

SEQ ID NO: 6409 - DNA, 20 bp, synthetic construct
  source 1..20: mol_type = other DNA
acattaaagatagtccgata

SEQ ID NO: 6410 - DNA, 20 bp, synthetic construct
  source 1..20: mol_type = other DNA
agccgtatgcgttgatttag

SEQ ID NO: 6411 - DNA, 20 bp, synthetic construct
  source 1..20: mol_type = other DNA
cggacacgactaccgatccg

SEQ ID NO: 6412 - DNA, 20 bp, synthetic construct
  source 1..20: mol_type = other DNA
atttgttgagatcactgcac

SEQ ID NO: 6413 - DNA, 20 bp, synthetic construct
  source 1..20: mol_type = other DNA
taaggaagccatacggcggt

SEQ ID NO: 6414 - DNA, 20 bp, synthetic construct
  source 1..20: mol_type = other DNA
tttctcctcctaccggactg

SEQ ID NO: 6415 - DNA, 20 bp, synthetic construct
  source 1..20: mol_type = other DNA
ccaggtagtatgctatgaca

SEQ ID NO: 6416 - DNA, 20 bp, synthetic construct
  source 1..20: mol_type = other DNA
ctggcgggccaaatctaccg

SEQ ID NO: 6417 - DNA, 20 bp, synthetic construct
  source 1..20: mol_type = other DNA
atcatagatttggtaccgac

SEQ ID NO: 6418 - DNA, 20 bp, synthetic construct
  source 1..20: mol_type = other DNA
catatatcgcaatatctcac

SEQ ID NO: 6419 - DNA, 20 bp, synthetic construct
  source 1..20: mol_type = other DNA
ggcgcctgcatgtcactctt

SEQ ID NO: 6420 - DNA, 20 bp, synthetic construct
  source 1..20: mol_type = other DNA
agccttgcgtggcaataagc

SEQ ID NO: 6421 - DNA, 20 bp, synthetic construct
  source 1..20: mol_type = other DNA
gctttcgcagagagttacgg

SEQ ID NO: 6422 - DNA, 20 bp, synthetic construct
  source 1..20: mol_type = other DNA
cctacgcgcatgagtgcacg

SEQ ID NO: 6423 - DNA, 20 bp, synthetic construct
  source 1..20: mol_type = other DNA
gactcttagaaggctggata

SEQ ID NO: 6424 - DNA, 20 bp, synthetic construct
  source 1..20: mol_type = other DNA
gtatgaaattcctgccaact

SEQ ID NO: 6425 - DNA, 20 bp, synthetic construct
  source 1..20: mol_type = other DNA
gcgtatgcattcttaaaccg

SEQ ID NO: 6426 - DNA, 20 bp, synthetic construct
  source 1..20: mol_type = other DNA
cgtttacggttctgtataat

SEQ ID NO: 6427 - DNA, 20 bp, synthetic construct
  source 1..20: mol_type = other DNA
cgggtacctattccgatctt

SEQ ID NO: 6428 - DNA, 20 bp, synthetic construct
  source 1..20: mol_type = other DNA
tacttatagcggctcacaga

SEQ ID NO: 6429 - DNA, 20 bp, synthetic construct
  source 1..20: mol_type = other DNA
ctgttaggttaacgcgcaga

SEQ ID NO: 6430 - DNA, 20 bp, synthetic construct
  source 1..20: mol_type = other DNA
cctcgccaaacagtcagagc

SEQ ID NO: 6431 - DNA, 20 bp, synthetic construct
  source 1..20: mol_type = other DNA
agtccgtaccatcatattca

SEQ ID NO: 6432 - DNA, 20 bp, synthetic construct
  source 1..20: mol_type = other DNA
attattggagatatgggtac

SEQ ID NO: 6433 - DNA, 20 bp, synthetic construct
  source 1..20: mol_type = other DNA
acgagacgagccttcagagg

SEQ ID NO: 6434 - DNA, 20 bp, synthetic construct
  source 1..20: mol_type = other DNA
aacttctcagacccattggt

SEQ ID NO: 6435 - DNA, 20 bp, synthetic construct
  source 1..20: mol_type = other DNA
cggatgcttcagcgcgtgag

SEQ ID NO: 6436 - DNA, 20 bp, synthetic construct
  source 1..20: mol_type = other DNA
ggcagggattcctaccgaac

SEQ ID NO: 6437 - DNA, 20 bp, synthetic construct
  source 1..20: mol_type = other DNA
tttaagctctggtcccagct

SEQ ID NO: 6438 - DNA, 20 bp, synthetic construct
  source 1..20: mol_type = other DNA
atgccgggttcaagtgattc

SEQ ID NO: 6439 - DNA, 20 bp, synthetic construct
  source 1..20: mol_type = other DNA
gttcaacttcctcctcctct

SEQ ID NO: 6440 - DNA, 20 bp, synthetic construct
  source 1..20: mol_type = other DNA
gattccgtctgtctgtatcg

SEQ ID NO: 6441 - DNA, 20 bp, synthetic construct
  source 1..20: mol_type = other DNA
cctctcggatgcacgaatgt

SEQ ID NO: 6442 - DNA, 20 bp, synthetic construct
  source 1..20: mol_type = other DNA
aatcaaattgtgacaacgta

SEQ ID NO: 6443 - DNA, 20 bp, synthetic construct
  source 1..20: mol_type = other DNA
gacgttgagacactgtcgaa

SEQ ID NO: 6444 - DNA, 20 bp, synthetic construct
  source 1..20: mol_type = other DNA
atgcggttatagttgtcgga

SEQ ID NO: 6445 - DNA, 20 bp, synthetic construct
  source 1..20: mol_type = other DNA
cgaaataagctgggatctgt

SEQ ID NO: 6446 - DNA, 20 bp, synthetic construct
  source 1..20: mol_type = other DNA
ggtgaccgacatgtcagatg

SEQ ID NO: 6447 - DNA, 20 bp, synthetic construct
  source 1..20: mol_type = other DNA
gcgatcgtcccgcatcagct

SEQ ID NO: 6448 - DNA, 20 bp, synthetic construct
  source 1..20: mol_type = other DNA
ccgaacaatttctgcccacg

SEQ ID NO: 6449 - DNA, 20 bp, synthetic construct
  source 1..20: mol_type = other DNA
tctgcctaggatgggattaa

SEQ ID NO: 6450 - DNA, 20 bp, synthetic construct
  source 1..20: mol_type = other DNA
gtctgaaggtgagtcctgtt

SEQ ID NO: 6451 - DNA, 20 bp, synthetic construct
  source 1..20: mol_type = other DNA
gttcggcggcgtagacttct

SEQ ID NO: 6452 - DNA, 20 bp, synthetic construct
  source 1..20: mol_type = other DNA
gattcctaatgggtaccaac

SEQ ID NO: 6453 - DNA, 20 bp, synthetic construct
  source 1..20: mol_type = other DNA
aatccgcccaatacaaatcg

SEQ ID NO: 6454 - DNA, 20 bp, synthetic construct
  source 1..20: mol_type = other DNA
acttcttgtgcacccagcaa

SEQ ID NO: 6455 - DNA, 20 bp, synthetic construct
  source 1..20: mol_type = other DNA
caccttcacttgttggagaa

SEQ ID NO: 6456 - DNA, 20 bp, synthetic construct
  source 1..20: mol_type = other DNA
atacagtcccagtggaggca

SEQ ID NO: 6457 - DNA, 20 bp, synthetic construct
  source 1..20: mol_type = other DNA
caacttagtccttactaacc

SEQ ID NO: 6458 - DNA, 20 bp, synthetic construct
  source 1..20: mol_type = other DNA
cttccgtatatactgctcga

SEQ ID NO: 6459 - DNA, 20 bp, synthetic construct
  source 1..20: mol_type = other DNA
cctgcatgggttactctaac

SEQ ID NO: 6460 - DNA, 20 bp, synthetic construct
  source 1..20: mol_type = other DNA
aggagaaggtagaagagtga

SEQ ID NO: 6461 - DNA, 20 bp, synthetic construct
  source 1..20: mol_type = other DNA
cttgtggcgtgcgtacatca

SEQ ID NO: 6462 - DNA, 20 bp, synthetic construct
  source 1..20: mol_type = other DNA
cctatgtagaacagacacgc

SEQ ID NO: 6463 - DNA, 20 bp, synthetic construct
  source 1..20: mol_type = other DNA
ggagcaaccagcttccgtcc

SEQ ID NO: 6464 - DNA, 20 bp, synthetic construct
  source 1..20: mol_type = other DNA
gtagaggacttctgtatcta

SEQ ID NO: 6465 - DNA, 20 bp, synthetic construct
  source 1..20: mol_type = other DNA
ttgttcttcgctcggtggct

SEQ ID NO: 6466 - DNA, 20 bp, synthetic construct
  source 1..20: mol_type = other DNA
tgatctacctccgcatcaag

SEQ ID NO: 6467 - DNA, 20 bp, synthetic construct
  source 1..20: mol_type = other DNA
aatgtccggccacttctaag

SEQ ID NO: 6468 - DNA, 20 bp, synthetic construct
  source 1..20: mol_type = other DNA
aggaagtcattccgcgagtc

SEQ ID NO: 6469 - DNA, 20 bp, synthetic construct
  source 1..20: mol_type = other DNA
cgcttaaggagtactcgcct

SEQ ID NO: 6470 - DNA, 20 bp, synthetic construct
  source 1..20: mol_type = other DNA
ggacagtcgtgtaatgatcc

SEQ ID NO: 6471 - DNA, 20 bp, synthetic construct
  source 1..20: mol_type = other DNA
caggctggtgtgcttatccg

SEQ ID NO: 6472 - DNA, 20 bp, synthetic construct
  source 1..20: mol_type = other DNA
ttccactgacgcacattctg

SEQ ID NO: 6473 - DNA, 20 bp, synthetic construct
  source 1..20: mol_type = other DNA
tgtgcttgagtctagggact

SEQ ID NO: 6474 - DNA, 20 bp, synthetic construct
  source 1..20: mol_type = other DNA
gggttggagccttccaagga

SEQ ID NO: 6475 - DNA, 20 bp, synthetic construct
  source 1..20: mol_type = other DNA
acgcaagatcttcgatagaa

SEQ ID NO: 6476 - DNA, 20 bp, synthetic construct
  source 1..20: mol_type = other DNA
gaggaataatacgggttgaa

SEQ ID NO: 6477 - DNA, 20 bp, synthetic construct
  source 1..20: mol_type = other DNA
taagcgttgatgagctttgt

SEQ ID NO: 6478 - DNA, 20 bp, synthetic construct
  source 1..20: mol_type = other DNA
aatattgtacgtatgcgcgg

SEQ ID NO: 6479 - DNA, 20 bp, synthetic construct
  source 1..20: mol_type = other DNA
ctccttgggccacagctttg

SEQ ID NO: 6480 - DNA, 20 bp, synthetic construct
  source 1..20: mol_type = other DNA
cacgtgcccagcaagaactt

SEQ ID NO: 6481 - DNA, 20 bp, synthetic construct
  source 1..20: mol_type = other DNA
aggagccgtgcactgtagcg

SEQ ID NO: 6482 - DNA, 20 bp, synthetic construct
  source 1..20: mol_type = other DNA
tgctgggtggaggagcgagc

SEQ ID NO: 6483 - DNA, 20 bp, synthetic construct
  source 1..20: mol_type = other DNA
tcccaggtcacgacccttaa

SEQ ID NO: 6484 - DNA, 20 bp, synthetic construct
  source 1..20: mol_type = other DNA
gccactgactcctgaacgca

SEQ ID NO: 6485 - DNA, 20 bp, synthetic construct
  source 1..20: mol_type = other DNA
gcaaatatctatacaagcat

SEQ ID NO: 6486 - DNA, 20 bp, synthetic construct
  source 1..20: mol_type = other DNA
gaggtaagactagggaagtc

SEQ ID NO: 6487 - DNA, 20 bp, synthetic construct
  source 1..20: mol_type = other DNA
gtctgtagtcattaagtgaa

SEQ ID NO: 6488 - DNA, 20 bp, synthetic construct
  source 1..20: mol_type = other DNA
gcgctatagcaccagcagca

SEQ ID NO: 6489 - DNA, 20 bp, synthetic construct
  source 1..20: mol_type = other DNA
cggactgcggtctaccttta

SEQ ID NO: 6490 - DNA, 20 bp, synthetic construct
  source 1..20: mol_type = other DNA
tgccaactggaacgaattta

SEQ ID NO: 6491 - DNA, 20 bp, synthetic construct
  source 1..20: mol_type = other DNA
actcaagttcgtcgtccgta

SEQ ID NO: 6492 - DNA, 20 bp, synthetic construct
  source 1..20: mol_type = other DNA
cgtgggcaataaccggcagc

SEQ ID NO: 6493 - DNA, 20 bp, synthetic construct
  source 1..20: mol_type = other DNA
ccaatacaaatcgccgataa

SEQ ID NO: 6494 - DNA, 20 bp, synthetic construct
  source 1..20: mol_type = other DNA
caccaaagcggacgaagagg

SEQ ID NO: 6495 - DNA, 20 bp, synthetic construct
  source 1..20: mol_type = other DNA
ccacgcaatcaggttggagc

SEQ ID NO: 6496 - DNA, 20 bp, synthetic construct
  source 1..20: mol_type = other DNA
cctgccgccaaatgatagcc

SEQ ID NO: 6497 - DNA, 20 bp, synthetic construct
  source 1..20: mol_type = other DNA
aaattcatccacgacgacca

SEQ ID NO: 6498 - DNA, 20 bp, synthetic construct
  source 1..20: mol_type = other DNA
tcaatggctaggttattgtt

SEQ ID NO: 6499 - DNA, 20 bp, synthetic construct
  source 1..20: mol_type = other DNA
ctgtggtccataagtcttac

SEQ ID NO: 6500 - DNA, 20 bp, synthetic construct
  source 1..20: mol_type = other DNA
tttaggagtgagttgacgac

SEQ ID NO: 6501 - DNA, 20 bp, synthetic construct
  source 1..20: mol_type = other DNA
tccggctttagcgcctacgc

SEQ ID NO: 6502 - DNA, 20 bp, synthetic construct
  source 1..20: mol_type = other DNA
gtgtgacaataatcgtcgcg

SEQ ID NO: 6503 - DNA, 20 bp, synthetic construct
  source 1..20: mol_type = other DNA
cataaggatagatgcagcga

SEQ ID NO: 6504 - DNA, 20 bp, synthetic construct
  source 1..20: mol_type = other DNA
tgataacgtactagagcgca

SEQ ID NO: 6505 - DNA, 20 bp, synthetic construct
  source 1..20: mol_type = other DNA
tcttccacgtacacgtaacg

SEQ ID NO: 6506 - DNA, 20 bp, synthetic construct
  source 1..20: mol_type = other DNA
caccactgtaggtctctcca

SEQ ID NO: 6507 - DNA, 20 bp, synthetic construct
  source 1..20: mol_type = other DNA
cgcggcaatttagggtgaca

SEQ ID NO: 6508 - DNA, 20 bp, synthetic construct
  source 1..20: mol_type = other DNA
ctgtgtatgatgtgcaggcc

SEQ ID NO: 6509 - DNA, 20 bp, synthetic construct
  source 1..20: mol_type = other DNA
cttaatgattcacccaggcg

SEQ ID NO: 6510 - DNA, 20 bp, synthetic construct
  source 1..20: mol_type = other DNA
cttcatgcgcgagatactcc

SEQ ID NO: 6511 - DNA, 20 bp, synthetic construct
  source 1..20: mol_type = other DNA
acgtctgtgcgaccctcacc

SEQ ID NO: 6512 - DNA, 20 bp, synthetic construct
  source 1..20: mol_type = other DNA
ggaccaaatccacctgcacg

SEQ ID NO: 6513 - DNA, 20 bp, synthetic construct
  source 1..20: mol_type = other DNA
tctcttccggactaggccaa

SEQ ID NO: 6514 - DNA, 20 bp, synthetic construct
  source 1..20: mol_type = other DNA
gctgattatacttcaggtga

SEQ ID NO: 6515 - DNA, 20 bp, synthetic construct
  source 1..20: mol_type = other DNA
tcatagccgaagaatacaca

SEQ ID NO: 6516 - DNA, 20 bp, synthetic construct
  source 1..20: mol_type = other DNA
atctacgagccaaccacaac

SEQ ID NO: 6517 - DNA, 20 bp, synthetic construct
  source 1..20: mol_type = other DNA
acctacttctccattgaagt

SEQ ID NO: 6518 - DNA, 20 bp, synthetic construct
  source 1..20: mol_type = other DNA
aggcaacacttatcctgcga

SEQ ID NO: 6519 - DNA, 20 bp, synthetic construct
  source 1..20: mol_type = other DNA
atttgactaagctaacagtg

SEQ ID NO: 6520 - DNA, 20 bp, synthetic construct
  source 1..20: mol_type = other DNA
gaggccgttcctgattaggt

SEQ ID NO: 6521 - DNA, 20 bp, synthetic construct
  source 1..20: mol_type = other DNA
tagatgggacccataatagt

SEQ ID NO: 6522 - DNA, 20 bp, synthetic construct
  source 1..20: mol_type = other DNA
gtctggttcaagggagattc

SEQ ID NO: 6523 - DNA, 20 bp, synthetic construct
  source 1..20: mol_type = other DNA
agtaacgtaagagtcttcaa

SEQ ID NO: 6524 - DNA, 20 bp, synthetic construct
  source 1..20: mol_type = other DNA
cacagatctcagctcttgct

SEQ ID NO: 6525 - DNA, 20 bp, synthetic construct
  source 1..20: mol_type = other DNA
ctgcgttgtctcagaagccc

SEQ ID NO: 6526 - DNA, 20 bp, synthetic construct
  source 1..20: mol_type = other DNA
tatctcttcataacatccag

SEQ ID NO: 6527 - DNA, 20 bp, synthetic construct
  source 1..20: mol_type = other DNA
ttcgggatacttaagtctaa

SEQ ID NO: 6528 - DNA, 20 bp, synthetic construct
  source 1..20: mol_type = other DNA
cttattgcgccaatcaacct

SEQ ID NO: 6529 - DNA, 20 bp, synthetic construct
  source 1..20: mol_type = other DNA
aatataccgcaggtgcttgc

SEQ ID NO: 6530 - DNA, 20 bp, synthetic construct
  source 1..20: mol_type = other DNA
gtcacgttaaggacaaccag

SEQ ID NO: 6531 - DNA, 20 bp, synthetic construct
  source 1..20: mol_type = other DNA
gtgtgctcactttctcgcag

SEQ ID NO: 6532 - DNA, 20 bp, synthetic construct
  source 1..20: mol_type = other DNA
ggtcatgtgttgtagcgtct

SEQ ID NO: 6533 - DNA, 20 bp, synthetic construct
  source 1..20: mol_type = other DNA
tagcacgcgtgtcacctctt

SEQ ID NO: 6534 - DNA, 20 bp, synthetic construct
  source 1..20: mol_type = other DNA
gacgttctacagagggtgcc

SEQ ID NO: 6535 - DNA, 20 bp, synthetic construct
  source 1..20: mol_type = other DNA
tagtgctggttgtcccgcag

SEQ ID NO: 6536 - DNA, 20 bp, synthetic construct
  source 1..20: mol_type = other DNA
agggctgtggatggttcgga

SEQ ID NO: 6537 - DNA, 20 bp, synthetic construct
  source 1..20: mol_type = other DNA
agcatacaaacccaaacaga

SEQ ID NO: 6538 - DNA, 20 bp, synthetic construct
  source 1..20: mol_type = other DNA
acatcagcaatcgctaattc

SEQ ID NO: 6539 - DNA, 20 bp, synthetic construct
  source 1..20: mol_type = other DNA
ggctaatctcgtttagagcc

SEQ ID NO: 6540 - DNA, 20 bp, synthetic construct
  source 1..20: mol_type = other DNA
tatatcacctttgagcgttt

SEQ ID NO: 6541 - DNA, 20 bp, synthetic construct
  source 1..20: mol_type = other DNA
gccgagtctaaggactcttt

SEQ ID NO: 6542 - DNA, 20 bp, synthetic construct
  source 1..20: mol_type = other DNA
gacgggcaccggatcgtact

SEQ ID NO: 6543 - DNA, 20 bp, synthetic construct
  source 1..20: mol_type = other DNA
tcactattagtaacgcctta

SEQ ID NO: 6544 - DNA, 20 bp, synthetic construct
  source 1..20: mol_type = other DNA
ataattaagcgactggtcag

SEQ ID NO: 6545 - DNA, 20 bp, synthetic construct
  source 1..20: mol_type = other DNA
tacaagaacggttgatttcc

SEQ ID NO: 6546 - DNA, 20 bp, synthetic construct
  source 1..20: mol_type = other DNA
cctactgtcttcttagggta

SEQ ID NO: 6547 - DNA, 20 bp, synthetic construct
  source 1..20: mol_type = other DNA
gaaattctgtgatacggtta

SEQ ID NO: 6548 - DNA, 20 bp, synthetic construct
  source 1..20: mol_type = other DNA
atgtcgaagtcatcttatat

SEQ ID NO: 6549 - DNA, 20 bp, synthetic construct
  source 1..20: mol_type = other DNA
ccaatcctccacatcctcac

SEQ ID NO: 6550 - DNA, 20 bp, synthetic construct
  source 1..20: mol_type = other DNA
ggtaataggtagcacggcaa

SEQ ID NO: 6551 - DNA, 20 bp, synthetic construct
  source 1..20: mol_type = other DNA
agtggaccctccgtggtgag

SEQ ID NO: 6552 - DNA, 20 bp, synthetic construct
  source 1..20: mol_type = other DNA
tgttacggcaactacacact

SEQ ID NO: 6553 - DNA, 20 bp, synthetic construct
  source 1..20: mol_type = other DNA
ttattatactgtcctacagg

SEQ ID NO: 6554 - DNA, 20 bp, synthetic construct
  source 1..20: mol_type = other DNA
gacaagcggcctcgggattt

SEQ ID NO: 6555 - DNA, 20 bp, synthetic construct
  source 1..20: mol_type = other DNA
tacgaggaagaacttatgtt

SEQ ID NO: 6556 - DNA, 20 bp, synthetic construct
  source 1..20: mol_type = other DNA
ccgttactggctcgcgagat

SEQ ID NO: 6557 - DNA, 20 bp, synthetic construct
  source 1..20: mol_type = other DNA
agtctgggcgagtgaagagt

SEQ ID NO: 6558 - DNA, 20 bp, synthetic construct
  source 1..20: mol_type = other DNA
ctagcgcttacccgtacagg

SEQ ID NO: 6559 - DNA, 20 bp, synthetic construct
  source 1..20: mol_type = other DNA
tcttactaggaacggtgccg

SEQ ID NO: 6560 - DNA, 20 bp, synthetic construct
  source 1..20: mol_type = other DNA
aatagctgacggaccggacg

SEQ ID NO: 6561 - DNA, 20 bp, synthetic construct
  source 1..20: mol_type = other DNA
gcgcattatttgcactagca

SEQ ID NO: 6562 - DNA, 20 bp, synthetic construct
  source 1..20: mol_type = other DNA
gctcaatcgagtaagtcgat

SEQ ID NO: 6563 - DNA, 20 bp, synthetic construct
  source 1..20: mol_type = other DNA
cgcttggtctgatcaccgga

SEQ ID NO: 6564 - DNA, 20 bp, synthetic construct
  source 1..20: mol_type = other DNA
ctacctctccgcgcttggga

SEQ ID NO: 6565 - DNA, 20 bp, synthetic construct
  source 1..20: mol_type = other DNA
acataaggttaaagctaacg

SEQ ID NO: 6566 - DNA, 20 bp, synthetic construct
  source 1..20: mol_type = other DNA
tttgctgggactgtgtttaa

SEQ ID NO: 6567 - DNA, 20 bp, synthetic construct
  source 1..20: mol_type = other DNA
atgtagcatgtagttcgatt

SEQ ID NO: 6568 - DNA, 20 bp, synthetic construct
  source 1..20: mol_type = other DNA
tccttgattatgatgaaccg

SEQ ID NO: 6569 - DNA, 20 bp, synthetic construct
  source 1..20: mol_type = other DNA
tggtcttacacctacggatc

SEQ ID NO: 6570 - DNA, 20 bp, synthetic construct
  source 1..20: mol_type = other DNA
atccatagcggattggaaca

SEQ ID NO: 6571 - DNA, 20 bp, synthetic construct
  source 1..20: mol_type = other DNA
tttccaaaggaacttgtgca

SEQ ID NO: 6572 - DNA, 20 bp, synthetic construct
  source 1..20: mol_type = other DNA
ctgtgcttgcatccgtctac

SEQ ID NO: 6573 - DNA, 20 bp, synthetic construct
  source 1..20: mol_type = other DNA
tccagctcaggctcagacat

SEQ ID NO: 6574 - DNA, 20 bp, synthetic construct
  source 1..20: mol_type = other DNA
cctgaaagaggctagcgttt

SEQ ID NO: 6575 - DNA, 20 bp, synthetic construct
  source 1..20: mol_type = other DNA
atcgtgctatagcccttcct

SEQ ID NO: 6576 - DNA, 20 bp, synthetic construct
  source 1..20: mol_type = other DNA
agtagcaatgatcgtctacg

SEQ ID NO: 6577 - DNA, 20 bp, synthetic construct
  source 1..20: mol_type = other DNA
taggcctcttagcatgtcta

SEQ ID NO: 6578 - DNA, 20 bp, synthetic construct
  source 1..20: mol_type = other DNA
ggtttcggacgagggcgtta

SEQ ID NO: 6579 - DNA, 20 bp, synthetic construct
  source 1..20: mol_type = other DNA
tcaacccggaagggtcaact

SEQ ID NO: 6580 - DNA, 20 bp, synthetic construct
  source 1..20: mol_type = other DNA
acggactagttgtctgaggg

SEQ ID NO: 6581 - DNA, 20 bp, synthetic construct
  source 1..20: mol_type = other DNA
agtcaccaagttaacaaagc

SEQ ID NO: 6582 - DNA, 20 bp, synthetic construct
  source 1..20: mol_type = other DNA
cgtagatgattcgaataact

SEQ ID NO: 6583 - DNA, 20 bp, synthetic construct
  source 1..20: mol_type = other DNA
gagtattgagcctcatcaac

SEQ ID NO: 6584 - DNA, 20 bp, synthetic construct
  source 1..20: mol_type = other DNA
gctcacgcggtcaagtcatc

SEQ ID NO: 6585 - DNA, 20 bp, synthetic construct
  source 1..20: mol_type = other DNA
ccggtgcggcaaagatgatg

SEQ ID NO: 6586 - DNA, 20 bp, synthetic construct
  source 1..20: mol_type = other DNA
gtttagcccgtgaactgctt

SEQ ID NO: 6587 - DNA, 20 bp, synthetic construct
  source 1..20: mol_type = other DNA
taggtgccttctgacggctc

SEQ ID NO: 6588 - DNA, 20 bp, synthetic construct
  source 1..20: mol_type = other DNA
cctacgatacgtttgaagat

SEQ ID NO: 6589 - DNA, 20 bp, synthetic construct
  source 1..20: mol_type = other DNA
ttctagcaggttaacgaact

SEQ ID NO: 6590 - DNA, 20 bp, synthetic construct
  source 1..20: mol_type = other DNA
ccactgatagagctattcaa

SEQ ID NO: 6591 - DNA, 20 bp, synthetic construct
  source 1..20: mol_type = other DNA
gcccaattaacgccgtattg

SEQ ID NO: 6592 - DNA, 20 bp, synthetic construct
  source 1..20: mol_type = other DNA
tgccatgcctatgggtgtta

SEQ ID NO: 6593 - DNA, 20 bp, synthetic construct
  source 1..20: mol_type = other DNA
cgagaccttacaacttccat

SEQ ID NO: 6594 - DNA, 20 bp, synthetic construct
  source 1..20: mol_type = other DNA
gggtttgaagggcggcaacg

SEQ ID NO: 6595 - DNA, 20 bp, synthetic construct
  source 1..20: mol_type = other DNA
agcgcgacgctgatcggtga

SEQ ID NO: 6596 - DNA, 20 bp, synthetic construct
  source 1..20: mol_type = other DNA
atgtccgtgctcgcaccaag

SEQ ID NO: 6597 - DNA, 20 bp, synthetic construct
  source 1..20: mol_type = other DNA
ttgggtgaccgttatcaagt

SEQ ID NO: 6598 - DNA, 20 bp, synthetic construct
  source 1..20: mol_type = other DNA
tactgtggtcagggcataag

SEQ ID NO: 6599 - DNA, 20 bp, synthetic construct
  source 1..20: mol_type = other DNA
tcggtcgtgccgatacagaa

SEQ ID NO: 6600 - DNA, 20 bp, synthetic construct
  source 1..20: mol_type = other DNA
aataatgcttccagatctct

SEQ ID NO: 6601 - DNA, 20 bp, synthetic construct
  source 1..20: mol_type = other DNA
agccgggagcaccggaacta

SEQ ID NO: 6602 - DNA, 20 bp, synthetic construct
  source 1..20: mol_type = other DNA
atgtactagccgagaggagg

SEQ ID NO: 6603 - DNA, 20 bp, synthetic construct
  source 1..20: mol_type = other DNA
gctaatcctcagcggtgtga

SEQ ID NO: 6604 - DNA, 20 bp, synthetic construct
  source 1..20: mol_type = other DNA
gcgtaaacgggcgttagtta

SEQ ID NO: 6605 - DNA, 20 bp, synthetic construct
  source 1..20: mol_type = other DNA
ccgccgtcattaacgttaca

SEQ ID NO: 6606 - DNA, 20 bp, synthetic construct
  source 1..20: mol_type = other DNA
actgtcgagtaatgaggctg

SEQ ID NO: 6607 - DNA, 20 bp, synthetic construct
  source 1..20: mol_type = other DNA
aaggctgactttgcagggta

SEQ ID NO: 6608 - DNA, 20 bp, synthetic construct
  source 1..20: mol_type = other DNA
tgtgcccagatttccaagcc

SEQ ID NO: 6609 - DNA, 20 bp, synthetic construct
  source 1..20: mol_type = other DNA
agagggatcatctaagctct

SEQ ID NO: 6610 - DNA, 20 bp, synthetic construct
  source 1..20: mol_type = other DNA
ctgtgctggtgttactgaga

SEQ ID NO: 6611 - DNA, 20 bp, synthetic construct
  source 1..20: mol_type = other DNA
tagactagcgagatctctct

SEQ ID NO: 6612 - DNA, 20 bp, synthetic construct
  source 1..20: mol_type = other DNA
ggatgcgcaaagtgatccct

SEQ ID NO: 6613 - DNA, 20 bp, synthetic construct
  source 1..20: mol_type = other DNA
ttctaggcaaacaagcgaag

SEQ ID NO: 6614 - DNA, 20 bp, synthetic construct
  source 1..20: mol_type = other DNA
ttgtggtacggagggcttta

SEQ ID NO: 6615 - DNA, 20 bp, synthetic construct
  source 1..20: mol_type = other DNA
attagcaatatgcctcctca

SEQ ID NO: 6616 - DNA, 20 bp, synthetic construct
  source 1..20: mol_type = other DNA
tgggaaagctatagcttcca

SEQ ID NO: 6617 - DNA, 20 bp, synthetic construct
  source 1..20: mol_type = other DNA
acacacctctacggtgtgat

SEQ ID NO: 6618 - DNA, 20 bp, synthetic construct
  source 1..20: mol_type = other DNA
tctcgggctctagcttggtt

SEQ ID NO: 6619 - DNA, 20 bp, synthetic construct
  source 1..20: mol_type = other DNA
gcaattggagatagtatccc

SEQ ID NO: 6620 - DNA, 20 bp, synthetic construct
  source 1..20: mol_type = other DNA
gtctaacacaacgagtccag

SEQ ID NO: 6621 - DNA, 20 bp, synthetic construct
  source 1..20: mol_type = other DNA
ccaggaatcgcgggcatgat

SEQ ID NO: 6622 - DNA, 20 bp, synthetic construct
  source 1..20: mol_type = other DNA
agaatattcacgaggttcca

SEQ ID NO: 6623 - DNA, 20 bp, synthetic construct
  source 1..20: mol_type = other DNA
taggccacacaaagacgcaa

SEQ ID NO: 6624 - DNA, 20 bp, synthetic construct
  source 1..20: mol_type = other DNA
gccgccagaatacctacgct

SEQ ID NO: 6625 - DNA, 20 bp, synthetic construct
  source 1..20: mol_type = other DNA
ccagaccagtggtgattgac

SEQ ID NO: 6626 - DNA, 20 bp, synthetic construct
  source 1..20: mol_type = other DNA
ggcctgtaatccggcacgac

SEQ ID NO: 6627 - DNA, 20 bp, synthetic construct
  source 1..20: mol_type = other DNA
gtcttcgaccacagttgagc

SEQ ID NO: 6628 - DNA, 20 bp, synthetic construct
  source 1..20: mol_type = other DNA
tgcagtgctttcggcgagtt

SEQ ID NO: 6629 - DNA, 20 bp, synthetic construct
  source 1..20: mol_type = other DNA
cgcgcaacgtatagtccggg

SEQ ID NO: 6630 - DNA, 20 bp, synthetic construct
  source 1..20: mol_type = other DNA
ctatcagaaacaacgatagc

SEQ ID NO: 6631 - DNA, 20 bp, synthetic construct
  source 1..20: mol_type = other DNA
gcagcctaactttaggtact

SEQ ID NO: 6632 - DNA, 20 bp, synthetic construct
  source 1..20: mol_type = other DNA
acgagtcggttagtgacaat

SEQ ID NO: 6633 - DNA, 20 bp, synthetic construct
  source 1..20: mol_type = other DNA
tggaggttgtgttaaatgaa

SEQ ID NO: 6634 - DNA, 20 bp, synthetic construct
  source 1..20: mol_type = other DNA
tcggcccttgccggttaacg

SEQ ID NO: 6635 - DNA, 20 bp, synthetic construct
  source 1..20: mol_type = other DNA
tttgcaaagacgcagacttc

SEQ ID NO: 6636 - DNA, 20 bp, synthetic construct
  source 1..20: mol_type = other DNA
taggaaaccgcttgcttagc

SEQ ID NO: 6637 - DNA, 20 bp, synthetic construct
  source 1..20: mol_type = other DNA
atgcgtggaccattccgagc

SEQ ID NO: 6638 - DNA, 20 bp, synthetic construct
  source 1..20: mol_type = other DNA
cacctcacatacttgtcatt

SEQ ID NO: 6639 - DNA, 20 bp, synthetic construct
  source 1..20: mol_type = other DNA
gtcgagagcggatactggta

SEQ ID NO: 6640 - DNA, 20 bp, synthetic construct
  source 1..20: mol_type = other DNA
actccttaagtgcgacggat

SEQ ID NO: 6641 - DNA, 20 bp, synthetic construct
  source 1..20: mol_type = other DNA
gaagatgcttgtaattggtc

SEQ ID NO: 6642 - DNA, 20 bp, synthetic construct
  source 1..20: mol_type = other DNA
acctgcttcgcacgaccagt

SEQ ID NO: 6643 - DNA, 20 bp, synthetic construct
  source 1..20: mol_type = other DNA
ccttatccgatattcaattc

SEQ ID NO: 6644 - DNA, 20 bp, synthetic construct
  source 1..20: mol_type = other DNA
cagtcactagattagtgaaa

SEQ ID NO: 6645 - DNA, 20 bp, synthetic construct
  source 1..20: mol_type = other DNA
tgagcaggcatgccacagat

SEQ ID NO: 6646 - DNA, 20 bp, synthetic construct
  source 1..20: mol_type = other DNA
gcgagttatggaccctaacg

SEQ ID NO: 6647 - DNA, 20 bp, synthetic construct
  source 1..20: mol_type = other DNA
tacatatccggatgagtacg

SEQ ID NO: 6648 - DNA, 20 bp, synthetic construct
  source 1..20: mol_type = other DNA
gtccgcatgtgtcctgatgc

SEQ ID NO: 6649 - DNA, 20 bp, synthetic construct
  source 1..20: mol_type = other DNA
gaggatgccattggacctgc

SEQ ID NO: 6650 - DNA, 20 bp, synthetic construct
  source 1..20: mol_type = other DNA
gggatattcgcacgactaca

SEQ ID NO: 6651 - DNA, 20 bp, synthetic construct
  source 1..20: mol_type = other DNA
acggcaatcgttgcacgcaa

SEQ ID NO: 6652 - DNA, 20 bp, synthetic construct
  source 1..20: mol_type = other DNA
tgagttcttcgtgacacaga

SEQ ID NO: 6653 - DNA, 20 bp, synthetic construct
  source 1..20: mol_type = other DNA
tgacttctcagcaacaatag

SEQ ID NO: 6654 - DNA, 20 bp, synthetic construct
  source 1..20: mol_type = other DNA
acaaacttattcgctcgctt

SEQ ID NO: 6655 - DNA, 20 bp, synthetic construct
  source 1..20: mol_type = other DNA
cggcgagtatgtggtacaga

SEQ ID NO: 6656 - DNA, 20 bp, synthetic construct
  source 1..20: mol_type = other DNA
attcgccgatcaaagaaccg

SEQ ID NO: 6657 - DNA, 20 bp, synthetic construct
  source 1..20: mol_type = other DNA
ccgaacacagttgcactaca

SEQ ID NO: 6658 - DNA, 20 bp, synthetic construct
  source 1..20: mol_type = other DNA
gggatagtgatcttcacaat

SEQ ID NO: 6659 - DNA, 20 bp, synthetic construct
  source 1..20: mol_type = other DNA
tagaccagtgtacttgacgt

SEQ ID NO: 6660 - DNA, 20 bp, synthetic construct
  source 1..20: mol_type = other DNA
tggtacgttgcctgcctcct

SEQ ID NO: 6661 - DNA, 20 bp, synthetic construct
  source 1..20: mol_type = other DNA
ggtcactcttgtgattcctc

SEQ ID NO: 6662 - DNA, 20 bp, synthetic construct
  source 1..20: mol_type = other DNA
tccacacgaggtgtggacaa

SEQ ID NO: 6663 - DNA, 20 bp, synthetic construct
  source 1..20: mol_type = other DNA
ccgtttgttgacaccgggtt

SEQ ID NO: 6664 - DNA, 20 bp, synthetic construct
  source 1..20: mol_type = other DNA
tgcggtacagagcgtaccat

SEQ ID NO: 6665 - DNA, 20 bp, synthetic construct
  source 1..20: mol_type = other DNA
gcacgcaaggaagaggataa

SEQ ID NO: 6666 - DNA, 20 bp, synthetic construct
  source 1..20: mol_type = other DNA
gcctggagactactaaatca

SEQ ID NO: 6667 - DNA, 20 bp, synthetic construct
  source 1..20: mol_type = other DNA
ggtatctacgtcttggacta

SEQ ID NO: 6668 - DNA, 20 bp, synthetic construct
  source 1..20: mol_type = other DNA
acggcgtcatctgccatcaa

SEQ ID NO: 6669 - DNA, 20 bp, synthetic construct
  source 1..20: mol_type = other DNA
ttacatgatgcagagggacc

SEQ ID NO: 6670 - DNA, 20 bp, synthetic construct
  source 1..20: mol_type = other DNA
tagagttataacctaacgga

SEQ ID NO: 6671 - DNA, 20 bp, synthetic construct
  source 1..20: mol_type = other DNA
aacaccgtcttaattagcac

SEQ ID NO: 6672 - DNA, 20 bp, synthetic construct
  source 1..20: mol_type = other DNA
tatgtcaactaccgtaacta

SEQ ID NO: 6673 - DNA, 20 bp, synthetic construct
  source 1..20: mol_type = other DNA
ggccaccaataaccatgagc

SEQ ID NO: 6674 - DNA, 20 bp, synthetic construct
  source 1..20: mol_type = other DNA
tagcacattagcatctagga

SEQ ID NO: 6675 - DNA, 20 bp, synthetic construct
  source 1..20: mol_type = other DNA
aaactgaatgacacgatttg

SEQ ID NO: 6676 - DNA, 20 bp, synthetic construct
  source 1..20: mol_type = other DNA
gcgcacctcaatgatgtggc

SEQ ID NO: 6677 - DNA, 20 bp, synthetic construct
  source 1..20: mol_type = other DNA
tgtacgtctctatcgctcca

SEQ ID NO: 6678 - DNA, 20 bp, synthetic construct
  source 1..20: mol_type = other DNA
gactaagtaacgtacagtca

SEQ ID NO: 6679 - DNA, 20 bp, synthetic construct
  source 1..20: mol_type = other DNA
gactcttaaccctagtgagt

SEQ ID NO: 6680 - DNA, 20 bp, synthetic construct
  source 1..20: mol_type = other DNA
gttgcaattagaggtggctt

SEQ ID NO: 6681 - DNA, 20 bp, synthetic construct
  source 1..20: mol_type = other DNA
cgcacgcgcgattagtttcg

SEQ ID NO: 6682 - DNA, 20 bp, synthetic construct
  source 1..20: mol_type = other DNA
tccgaagtagatggacccgc

SEQ ID NO: 6683 - DNA, 20 bp, synthetic construct
  source 1..20: mol_type = other DNA
aaactctggatgtcgcaaac

SEQ ID NO: 6684 - DNA, 20 bp, synthetic construct
  source 1..20: mol_type = other DNA
gggctcagtgacgtatgtga

SEQ ID NO: 6685 - DNA, 20 bp, synthetic construct
  source 1..20: mol_type = other DNA
atttgcgtcaaagggacggg

SEQ ID NO: 6686 - DNA, 20 bp, synthetic construct
  source 1..20: mol_type = other DNA
agacactggacggtagagcc

SEQ ID NO: 6687 - DNA, 20 bp, synthetic construct
  source 1..20: mol_type = other DNA
gcaaccatactctatgagtg

SEQ ID NO: 6688 - DNA, 20 bp, synthetic construct
  source 1..20: mol_type = other DNA
atcgggcacaaactaaatca

SEQ ID NO: 6689 - DNA, 20 bp, synthetic construct
  source 1..20: mol_type = other DNA
atgatagggctcgataatac

SEQ ID NO: 6690 - DNA, 20 bp, synthetic construct
  source 1..20: mol_type = other DNA
tccctcgacgcctgactcac

SEQ ID NO: 6691 - DNA, 20 bp, synthetic construct
  source 1..20: mol_type = other DNA
tcagttcttaccgaatgccg

SEQ ID NO: 6692 - DNA, 20 bp, synthetic construct
  source 1..20: mol_type = other DNA
tcaaccgccagattacgtct

SEQ ID NO: 6693 - DNA, 20 bp, synthetic construct
  source 1..20: mol_type = other DNA
cttggtgtcacgcttcagat

SEQ ID NO: 6694 - DNA, 20 bp, synthetic construct
  source 1..20: mol_type = other DNA
gggacagattgaaatgatac

SEQ ID NO: 6695 - DNA, 20 bp, synthetic construct
  source 1..20: mol_type = other DNA
ctgaattggcctgactcgcc

SEQ ID NO: 6696 - DNA, 20 bp, synthetic construct
  source 1..20: mol_type = other DNA
taaccaccggtccgtatgcc

SEQ ID NO: 6697 - DNA, 20 bp, synthetic construct
  source 1..20: mol_type = other DNA
gtgtggtggcgatcgcagtt

SEQ ID NO: 6698 - DNA, 20 bp, synthetic construct
  source 1..20: mol_type = other DNA
gataaagacctttcgcagcg

SEQ ID NO: 6699 - DNA, 20 bp, synthetic construct
  source 1..20: mol_type = other DNA
ggatctgccacgtgtgtgcg

SEQ ID NO: 6700 - DNA, 20 bp, synthetic construct
  source 1..20: mol_type = other DNA
aagatcggaataaactagtg

SEQ ID NO: 6701 - DNA, 20 bp, synthetic construct
  source 1..20: mol_type = other DNA
gttacgacaatccggtcagt

SEQ ID NO: 6702 - DNA, 20 bp, synthetic construct
  source 1..20: mol_type = other DNA
cgcactgttggtagattagg

SEQ ID NO: 6703 - DNA, 20 bp, synthetic construct
  source 1..20: mol_type = other DNA
acgtcttcgtattgcccgtc

SEQ ID NO: 6704 - DNA, 20 bp, synthetic construct
  source 1..20: mol_type = other DNA
gacccgcatccaatattctt

SEQ ID NO: 6705 - DNA, 20 bp, synthetic construct
  source 1..20: mol_type = other DNA
cgttcggagttctcgtgtag

SEQ ID NO: 6706 - DNA, 20 bp, synthetic construct
  source 1..20: mol_type = other DNA
tagggtgatgacgtatgtta

SEQ ID NO: 6707 - DNA, 20 bp, synthetic construct
  source 1..20: mol_type = other DNA
atcatacgatgcatctctga

SEQ ID NO: 6708 - DNA, 20 bp, synthetic construct
  source 1..20: mol_type = other DNA
agaaattgccaggatcaggg

SEQ ID NO: 6709 - DNA, 20 bp, synthetic construct
  source 1..20: mol_type = other DNA
ctaacctggtcttagccgtt

SEQ ID NO: 6710 - DNA, 20 bp, synthetic construct
  source 1..20: mol_type = other DNA
gcagacttgagtataatacc

SEQ ID NO: 6711 - DNA, 20 bp, synthetic construct
  source 1..20: mol_type = other DNA
ccgtcttaaggtctattgtt

SEQ ID NO: 6712 - DNA, 20 bp, synthetic construct
  source 1..20: mol_type = other DNA
tctaacgatttctccgtcgc

SEQ ID NO: 6713 - DNA, 20 bp, synthetic construct
  source 1..20: mol_type = other DNA
ttgtttacgggcttatgaag

SEQ ID NO: 6714 - DNA, 20 bp, synthetic construct
  source 1..20: mol_type = other DNA
accgaaacagctgcgtgtaa

SEQ ID NO: 6715 - DNA, 20 bp, synthetic construct
  source 1..20: mol_type = other DNA
atgctttcggctgcacctca

SEQ ID NO: 6716 - DNA, 20 bp, synthetic construct
  source 1..20: mol_type = other DNA
taacatagagcagtggcagt

SEQ ID NO: 6717 - DNA, 20 bp, synthetic construct
  source 1..20: mol_type = other DNA
gcaatgtgaacatagggtac

SEQ ID NO: 6718 - DNA, 20 bp, synthetic construct
  source 1..20: mol_type = other DNA
gtgacgacacggacgggttg

SEQ ID NO: 6719 - DNA, 20 bp, synthetic construct
  source 1..20: mol_type = other DNA
cccgtgcctttgtttgtgta

SEQ ID NO: 6720 - DNA, 20 bp, synthetic construct
  source 1..20: mol_type = other DNA
taggacatgcgcaactataa

SEQ ID NO: 6721 - DNA, 20 bp, synthetic construct
  source 1..20: mol_type = other DNA
ccggagatgatcggccttgg

SEQ ID NO: 6722 - DNA, 20 bp, synthetic construct
  source 1..20: mol_type = other DNA
tctgtttgcccgattaaatt

SEQ ID NO: 6723 - DNA, 20 bp, synthetic construct
  source 1..20: mol_type = other DNA
gaatattgatgtcgtgttac

SEQ ID NO: 6724 - DNA, 20 bp, synthetic construct
  source 1..20: mol_type = other DNA
tagaaacagtgttgtgccta

SEQ ID NO: 6725 - DNA, 20 bp, synthetic construct
  source 1..20: mol_type = other DNA
ttatctgattgttgtactcg

SEQ ID NO: 6726 - DNA, 20 bp, synthetic construct
  source 1..20: mol_type = other DNA
tgagtcgtattgggccacgt

SEQ ID NO: 6727 - DNA, 20 bp, synthetic construct
  source 1..20: mol_type = other DNA
tcgcgttctgtcactgttgt

SEQ ID NO: 6728 - DNA, 20 bp, synthetic construct
  source 1..20: mol_type = other DNA
tcaaggaaggcttgtcttag

SEQ ID NO: 6729 - DNA, 20 bp, synthetic construct
  source 1..20: mol_type = other DNA
agcaatatacaggtgcaacc

SEQ ID NO: 6730 - DNA, 20 bp, synthetic construct
  source 1..20: mol_type = other DNA
aagttggacaaggccgaact

SEQ ID NO: 6731 - DNA, 20 bp, synthetic construct
  source 1..20: mol_type = other DNA
cgcaagttagtagaggcatt

SEQ ID NO: 6732 - DNA, 20 bp, synthetic construct
  source 1..20: mol_type = other DNA
tttgtgcaggcttccactat

SEQ ID NO: 6733 - DNA, 20 bp, synthetic construct
  source 1..20: mol_type = other DNA
gacgagagagtcctaaatcc

SEQ ID NO: 6734 - DNA, 20 bp, synthetic construct
  source 1..20: mol_type = other DNA
acattacttcacggctggtc

SEQ ID NO: 6735 - DNA, 20 bp, synthetic construct
  source 1..20: mol_type = other DNA
tatctaagctcccgcgatgg

SEQ ID NO: 6736 - DNA, 20 bp, synthetic construct
  source 1..20: mol_type = other DNA
aatttgtcggcctgacatca

SEQ ID NO: 6737 - DNA, 20 bp, synthetic construct
  source 1..20: mol_type = other DNA
ggcgtaaacacgaggatcat

SEQ ID NO: 6738 - DNA, 20 bp, synthetic construct
  source 1..20: mol_type = other DNA
taccacgctactcctaagac

SEQ ID NO: 6739 - DNA, 20 bp, synthetic construct
  source 1..20: mol_type = other DNA
aatgctcttccagaaccttc

SEQ ID NO: 6740 - DNA, 20 bp, synthetic construct
  source 1..20: mol_type = other DNA
cagaatccagcaggaggtat

SEQ ID NO: 6741 - DNA, 20 bp, synthetic construct
  source 1..20: mol_type = other DNA
aatgaggcgccaggcttaga

SEQ ID NO: 6742 - DNA, 20 bp, synthetic construct
  source 1..20: mol_type = other DNA
gatcatcgattgccctttgc

SEQ ID NO: 6743 - DNA, 20 bp, synthetic construct
  source 1..20: mol_type = other DNA
cgtgctatcgagtcatgtta

SEQ ID NO: 6744 - DNA, 20 bp, synthetic construct
  source 1..20: mol_type = other DNA
agccgggaattatcacggca

SEQ ID NO: 6745 - DNA, 20 bp, synthetic construct
  source 1..20: mol_type = other DNA
cactgcgctcttaactatag

SEQ ID NO: 6746 - DNA, 20 bp, synthetic construct
  source 1..20: mol_type = other DNA
ggagacccagaggcgtttgt

SEQ ID NO: 6747 - DNA, 20 bp, synthetic construct
  source 1..20: mol_type = other DNA
gtggcgtaatgattattgcg

SEQ ID NO: 6748 - DNA, 20 bp, synthetic construct
  source 1..20: mol_type = other DNA
ttacagctcagtaatcgtca

SEQ ID NO: 6749 - DNA, 20 bp, synthetic construct
  source 1..20: mol_type = other DNA
gcctagcgatacaaactacg

SEQ ID NO: 6750 - DNA, 20 bp, synthetic construct
  source 1..20: mol_type = other DNA
atactaaccggtgacctact

SEQ ID NO: 6751 - DNA, 20 bp, synthetic construct
  source 1..20: mol_type = other DNA
tccgcccagtacattgatcc

SEQ ID NO: 6752 - DNA, 20 bp, synthetic construct
  source 1..20: mol_type = other DNA
atgcgtggcgtatttgccca

SEQ ID NO: 6753 - DNA, 20 bp, synthetic construct
  source 1..20: mol_type = other DNA
gctggctaagatctttgtaa

SEQ ID NO: 6754 - DNA, 20 bp, synthetic construct
  source 1..20: mol_type = other DNA
aaggcgttccaagggccgag

SEQ ID NO: 6755 - DNA, 20 bp, synthetic construct
  source 1..20: mol_type = other DNA
gtgtatagtggcactcccgg

SEQ ID NO: 6756 - DNA, 20 bp, synthetic construct
  source 1..20: mol_type = other DNA
tagtagaattagtccgggtc

SEQ ID NO: 6757 - DNA, 20 bp, synthetic construct
  source 1..20: mol_type = other DNA
caactggacctaagagtttg

SEQ ID NO: 6758 - DNA, 20 bp, synthetic construct
  source 1..20: mol_type = other DNA
tgactagatctacatagtgc

SEQ ID NO: 6759 - DNA, 20 bp, synthetic construct
  source 1..20: mol_type = other DNA
cagtcattcttgttccctgc

SEQ ID NO: 6760 - DNA, 20 bp, synthetic construct
  source 1..20: mol_type = other DNA
gacacctagtcctgccgcga

SEQ ID NO: 6761 - DNA, 20 bp, synthetic construct
  source 1..20: mol_type = other DNA
aactcgatcggtcatctctg

SEQ ID NO: 6762 - DNA, 20 bp, synthetic construct
  source 1..20: mol_type = other DNA
tacggcctcccaattgtgat

SEQ ID NO: 6763 - DNA, 20 bp, synthetic construct
  source 1..20: mol_type = other DNA
catccagctttaaacattac

SEQ ID NO: 6764 - DNA, 20 bp, synthetic construct
  source 1..20: mol_type = other DNA
ccgaggccgcctcatagtac

SEQ ID NO: 6765 - DNA, 20 bp, synthetic construct
  source 1..20: mol_type = other DNA
catcctcgggtaaacgctca

SEQ ID NO: 6766 - DNA, 20 bp, synthetic construct
  source 1..20: mol_type = other DNA
tgctcgtgacaggtacacaa

SEQ ID NO: 6767 - DNA, 20 bp, synthetic construct
  source 1..20: mol_type = other DNA
gtagactcagcctcttaact

SEQ ID NO: 6768 - DNA, 20 bp, synthetic construct
  source 1..20: mol_type = other DNA
gtataaacctcttgcagacg

SEQ ID NO: 6769 - DNA, 20 bp, synthetic construct
  source 1..20: mol_type = other DNA
aactgcgagaatgatatggc

SEQ ID NO: 6770 - DNA, 20 bp, synthetic construct
  source 1..20: mol_type = other DNA
cggttcgatcttgcgctcag

SEQ ID NO: 6771 - DNA, 20 bp, synthetic construct
  source 1..20: mol_type = other DNA
atggcgaccaatatcagctc

SEQ ID NO: 6772 - DNA, 20 bp, synthetic construct
  source 1..20: mol_type = other DNA
taccttaaagattcccgttc

SEQ ID NO: 6773 - DNA, 20 bp, synthetic construct
  source 1..20: mol_type = other DNA
agcatccgcgtggagccgat

SEQ ID NO: 6774 - DNA, 20 bp, synthetic construct
  source 1..20: mol_type = other DNA
agcgtattcagtccggaaca

SEQ ID NO: 6775 - DNA, 20 bp, synthetic construct
  source 1..20: mol_type = other DNA
cctttcgctttcctattctg

SEQ ID NO: 6776 - DNA, 20 bp, synthetic construct
  source 1..20: mol_type = other DNA
gaaagtaataaccctgtaca

SEQ ID NO: 6777 - DNA, 20 bp, synthetic construct
  source 1..20: mol_type = other DNA
cggaatctgcacagctgaat

SEQ ID NO: 6778 - DNA, 20 bp, synthetic construct
  source 1..20: mol_type = other DNA
gcggacgcgattgcatgcag

SEQ ID NO: 6779 - DNA, 20 bp, synthetic construct
  source 1..20: mol_type = other DNA
gatcctagcgttcgagcgaa

SEQ ID NO: 6780 - DNA, 20 bp, synthetic construct
  source 1..20: mol_type = other DNA
cacacgtcctgtccttggtc

SEQ ID NO: 6781 - DNA, 20 bp, synthetic construct
  source 1..20: mol_type = other DNA
ccaagagcatattcttgttt

SEQ ID NO: 6782 - DNA, 20 bp, synthetic construct
  source 1..20: mol_type = other DNA
cggatgggcctaaccacgta

SEQ ID NO: 6783 - DNA, 20 bp, synthetic construct
  source 1..20: mol_type = other DNA
ggagttgagcgctggtttac

SEQ ID NO: 6784 - DNA, 20 bp, synthetic construct
  source 1..20: mol_type = other DNA
gttatctcggacttaggttt

SEQ ID NO: 6785 - DNA, 20 bp, synthetic construct
  source 1..20: mol_type = other DNA
ctaattccatggtcacacag

SEQ ID NO: 6786 - DNA, 20 bp, synthetic construct
  source 1..20: mol_type = other DNA
tgcgccatacgtttagaaca

SEQ ID NO: 6787 - DNA, 20 bp, synthetic construct
  source 1..20: mol_type = other DNA
caccctcctccgtttagatt

SEQ ID NO: 6788 - DNA, 20 bp, synthetic construct
  source 1..20: mol_type = other DNA
agcacctaccctggtgacgc

SEQ ID NO: 6789 - DNA, 20 bp, synthetic construct
  source 1..20: mol_type = other DNA
ataatgatgttggacgctag

SEQ ID NO: 6790 - DNA, 20 bp, synthetic construct
  source 1..20: mol_type = other DNA
ggtcccggaaagagtaattg

SEQ ID NO: 6791 - DNA, 20 bp, synthetic construct
  source 1..20: mol_type = other DNA
acgctacatcggacccaatt

SEQ ID NO: 6792 - DNA, 20 bp, synthetic construct
  source 1..20: mol_type = other DNA
gatacagtgccttggcctag

SEQ ID NO: 6793 - DNA, 20 bp, synthetic construct
  source 1..20: mol_type = other DNA
tgtattcacagccatggctt

SEQ ID NO: 6794 - DNA, 20 bp, synthetic construct
  source 1..20: mol_type = other DNA
attaatattagcactcgacg

SEQ ID NO: 6795 - DNA, 20 bp, synthetic construct
  source 1..20: mol_type = other DNA
cttgattaggccgccagaat

SEQ ID NO: 6796 - DNA, 20 bp, synthetic construct
  source 1..20: mol_type = other DNA
aatttctaatctacgaccgt

SEQ ID NO: 6797 - DNA, 20 bp, synthetic construct
  source 1..20: mol_type = other DNA
gactcaatgcgagtggacac

SEQ ID NO: 6798 - DNA, 20 bp, synthetic construct
  source 1..20: mol_type = other DNA
cgaatttggccagaaacggc

SEQ ID NO: 6799 - DNA, 20 bp, synthetic construct
  source 1..20: mol_type = other DNA
acatgcatacgaccgtaagc

SEQ ID NO: 6800 - DNA, 20 bp, synthetic construct
  source 1..20: mol_type = other DNA
gcttacaatggatcttgact

SEQ ID NO: 6801 - DNA, 20 bp, synthetic construct
  source 1..20: mol_type = other DNA
gtcatagtttagtccactat

SEQ ID NO: 6802 - DNA, 20 bp, synthetic construct
  source 1..20: mol_type = other DNA
ctgaatggtgtaacggagtt

SEQ ID NO: 6803 - DNA, 20 bp, synthetic construct
  source 1..20: mol_type = other DNA
atactcagatcccgtgcatg

SEQ ID NO: 6804 - DNA, 20 bp, synthetic construct
  source 1..20: mol_type = other DNA
ggacgtcgtcaaactgcttt

SEQ ID NO: 6805 - DNA, 20 bp, synthetic construct
  source 1..20: mol_type = other DNA
gctacatcggttacgcccaa

SEQ ID NO: 6806 - DNA, 20 bp, synthetic construct
  source 1..20: mol_type = other DNA
cattcctagcgagttaagct

SEQ ID NO: 6807 - DNA, 20 bp, synthetic construct
  source 1..20: mol_type = other DNA
agaccctcagttactttaac

SEQ ID NO: 6808 - DNA, 20 bp, synthetic construct
  source 1..20: mol_type = other DNA
gtatgagtgctaagtcttaa

SEQ ID NO: 6809 - DNA, 20 bp, synthetic construct
  source 1..20: mol_type = other DNA
catatgggtaatcgacatcg

SEQ ID NO: 6810 - DNA, 20 bp, synthetic construct
  source 1..20: mol_type = other DNA
agacatgattgcatctacct

SEQ ID NO: 6811 - DNA, 20 bp, synthetic construct
  source 1..20: mol_type = other DNA
gcgcttaactcgattagaca

SEQ ID NO: 6812 - DNA, 20 bp, synthetic construct
  source 1..20: mol_type = other DNA
aattagacggtggagccatc

SEQ ID NO: 6813 - DNA, 20 bp, synthetic construct
  source 1..20: mol_type = other DNA
gcgcttctagtagagttagc

SEQ ID NO: 6814 - DNA, 20 bp, synthetic construct
  source 1..20: mol_type = other DNA
caacggtgtatctatgtact

SEQ ID NO: 6815 - DNA, 20 bp, synthetic construct
  source 1..20: mol_type = other DNA
catcgaatgcgggcggttgc

SEQ ID NO: 6816 - DNA, 20 bp, synthetic construct
  source 1..20: mol_type = other DNA
atataaccctgtgaggagtg

SEQ ID NO: 6817 - DNA, 20 bp, synthetic construct
  source 1..20: mol_type = other DNA
ttaacagacttacaggcttc

SEQ ID NO: 6818 - DNA, 20 bp, synthetic construct
  source 1..20: mol_type = other DNA
gtgccgttgatcgtcgtgtt

SEQ ID NO: 6819 - DNA, 20 bp, synthetic construct
  source 1..20: mol_type = other DNA
tagagtactctgaaggattt

SEQ ID NO: 6820 - DNA, 20 bp, synthetic construct
  source 1..20: mol_type = other DNA
ttaccgtccacggcgtcgta

SEQ ID NO: 6821 - DNA, 20 bp, synthetic construct
  source 1..20: mol_type = other DNA
aatgcgactatcagaaagca

SEQ ID NO: 6822 - DNA, 20 bp, synthetic construct
  source 1..20: mol_type = other DNA
ccctaggcttctcatgggtc

SEQ ID NO: 6823 - DNA, 20 bp, synthetic construct
  source 1..20: mol_type = other DNA
caggcctgccgtttccttgc

SEQ ID NO: 6824 - DNA, 20 bp, synthetic construct
  source 1..20: mol_type = other DNA
ataggtagggtagcacagtg

SEQ ID NO: 6825 - DNA, 20 bp, synthetic construct
  source 1..20: mol_type = other DNA
gcactttgtttcaggccact

SEQ ID NO: 6826 - DNA, 20 bp, synthetic construct
  source 1..20: mol_type = other DNA
tctcgcggcggaaggactat

SEQ ID NO: 6827 - DNA, 20 bp, synthetic construct
  source 1..20: mol_type = other DNA
gctgcagcctatctgctctt

SEQ ID NO: 6828 - DNA, 20 bp, synthetic construct
  source 1..20: mol_type = other DNA
cactcgatcccttgtttcag

SEQ ID NO: 6829 - DNA, 20 bp, synthetic construct
  source 1..20: mol_type = other DNA
gaacgtcaagctgaaataac

SEQ ID NO: 6830 - DNA, 20 bp, synthetic construct
  source 1..20: mol_type = other DNA
ttccacacccattccaaagt

SEQ ID NO: 6831 - DNA, 20 bp, synthetic construct
  source 1..20: mol_type = other DNA
gatcggttgtccgaataaca

SEQ ID NO: 6832 - DNA, 20 bp, synthetic construct
  source 1..20: mol_type = other DNA
actacggatatttcgctagg

SEQ ID NO: 6833 - DNA, 20 bp, synthetic construct
  source 1..20: mol_type = other DNA
cctggcgtgaagagtctctc

SEQ ID NO: 6834 - DNA, 20 bp, synthetic construct
  source 1..20: mol_type = other DNA
ttagagagtcgtcgtaattc

SEQ ID NO: 6835 - DNA, 20 bp, synthetic construct
  source 1..20: mol_type = other DNA
atacgggtggttatcatgga

SEQ ID NO: 6836 - DNA, 20 bp, synthetic construct
  source 1..20: mol_type = other DNA
ccattcgcagacaactccgt

SEQ ID NO: 6837 - DNA, 20 bp, synthetic construct
  source 1..20: mol_type = other DNA
cccgtgaactggatcgccct

SEQ ID NO: 6838 - DNA, 20 bp, synthetic construct
  source 1..20: mol_type = other DNA
taatctacacggttgtccgt

SEQ ID NO: 6839 - DNA, 20 bp, synthetic construct
  source 1..20: mol_type = other DNA
cgaaacgcgctgactctgat

SEQ ID NO: 6840 - DNA, 20 bp, synthetic construct
  source 1..20: mol_type = other DNA
tgcaccaactacgaagccaa

SEQ ID NO: 6841 - DNA, 20 bp, synthetic construct
  source 1..20: mol_type = other DNA
gtggaccttgtattcatata

SEQ ID NO: 6842 - DNA, 20 bp, synthetic construct
  source 1..20: mol_type = other DNA
ttactgcttacttggactgg

SEQ ID NO: 6843 - DNA, 20 bp, synthetic construct
  source 1..20: mol_type = other DNA
aagtaaacgtatcagaagaa

SEQ ID NO: 6844 - DNA, 20 bp, synthetic construct
  source 1..20: mol_type = other DNA
catctatatggcatctcgcg

SEQ ID NO: 6845 - DNA, 20 bp, synthetic construct
  source 1..20: mol_type = other DNA
gtgtaactcatctttagatc

SEQ ID NO: 6846 - DNA, 20 bp, synthetic construct
  source 1..20: mol_type = other DNA
tacaagccgtcacctcttat

SEQ ID NO: 6847 - DNA, 20 bp, synthetic construct
  source 1..20: mol_type = other DNA
gtacgagaccgctgtaggta

SEQ ID NO: 6848 - DNA, 20 bp, synthetic construct
  source 1..20: mol_type = other DNA
agaaaccgtatcgcgtggct

SEQ ID NO: 6849 - DNA, 20 bp, synthetic construct
  source 1..20: mol_type = other DNA
catcttcacctgtcaccctg

SEQ ID NO: 6850 - DNA, 20 bp, synthetic construct
  source 1..20: mol_type = other DNA
ctcggacgtagcgtcttatc

SEQ ID NO: 6851 - DNA, 20 bp, synthetic construct
  source 1..20: mol_type = other DNA
actcatctatctgtcctact

SEQ ID NO: 6852 - DNA, 20 bp, synthetic construct
  source 1..20: mol_type = other DNA
cttcgcaacatagtggccgg

SEQ ID NO: 6853 - DNA, 20 bp, synthetic construct
  source 1..20: mol_type = other DNA
gtgcacacaacatagctctc

SEQ ID NO: 6854 - DNA, 20 bp, synthetic construct
  source 1..20: mol_type = other DNA
aaccactcgctcacctatag

SEQ ID NO: 6855 - DNA, 20 bp, synthetic construct
  source 1..20: mol_type = other DNA
gcgtcggaacgacgtcgata

SEQ ID NO: 6856 - DNA, 20 bp, synthetic construct
  source 1..20: mol_type = other DNA
accacgtaaccggtaaccaa

SEQ ID NO: 6857 - DNA, 20 bp, synthetic construct
  source 1..20: mol_type = other DNA
tcctactccacaagtcgaag

SEQ ID NO: 6858 - DNA, 20 bp, synthetic construct
  source 1..20: mol_type = other DNA
aagaagctgaatgaaatccg

SEQ ID NO: 6859 - DNA, 20 bp, synthetic construct
  source 1..20: mol_type = other DNA
gaatcgtcatgcatttcatg

SEQ ID NO: 6860 - DNA, 20 bp, synthetic construct
  source 1..20: mol_type = other DNA
gggtgataccagtgacccgt

SEQ ID NO: 6861 - DNA, 20 bp, synthetic construct
  source 1..20: mol_type = other DNA
gaggatcgcaatcatccaat

SEQ ID NO: 6862 - DNA, 20 bp, synthetic construct
  source 1..20: mol_type = other DNA
ctcaccctacaatccaccaa

SEQ ID NO: 6863 - DNA, 20 bp, synthetic construct
  source 1..20: mol_type = other DNA
cccaggcacagatgttcgta

SEQ ID NO: 6864 - DNA, 20 bp, synthetic construct
  source 1..20: mol_type = other DNA
tctacagaactcgctactgt

SEQ ID NO: 6865 - DNA, 20 bp, synthetic construct
  source 1..20: mol_type = other DNA
acgtcaatgctatcctcggc

SEQ ID NO: 6866 - DNA, 20 bp, synthetic construct
  source 1..20: mol_type = other DNA
tagtgctcggaccctcacgc

SEQ ID NO: 6867 - DNA, 20 bp, synthetic construct
  source 1..20: mol_type = other DNA
aggtctgcaatttaatccgg

SEQ ID NO: 6868 - DNA, 20 bp, synthetic construct
  source 1..20: mol_type = other DNA
tatcgaacccgcgaatagta

SEQ ID NO: 6869 - DNA, 20 bp, synthetic construct
  source 1..20: mol_type = other DNA
caggtttggagctagtagtg

SEQ ID NO: 6870 - DNA, 20 bp, synthetic construct
  source 1..20: mol_type = other DNA
gacctactagttctgttacc

SEQ ID NO: 6871 - DNA, 20 bp, synthetic construct
  source 1..20: mol_type = other DNA
tcatagctcatatatctcag

SEQ ID NO: 6872 - DNA, 20 bp, synthetic construct
  source 1..20: mol_type = other DNA
gtcggcgaatacgaacggct

SEQ ID NO: 6873 - DNA, 20 bp, synthetic construct
  source 1..20: mol_type = other DNA
acactgggcggttaccacgc

SEQ ID NO: 6874 - DNA, 20 bp, synthetic construct
  source 1..20: mol_type = other DNA
agggcaatggatcgaccact

SEQ ID NO: 6875 - DNA, 20 bp, synthetic construct
  source 1..20: mol_type = other DNA
tgttcttcctcaaccgaggc

SEQ ID NO: 6876 - DNA, 20 bp, synthetic construct
  source 1..20: mol_type = other DNA
atccctaccgtcatagtcat

SEQ ID NO: 6877 - DNA, 20 bp, synthetic construct
  source 1..20: mol_type = other DNA
gaaatctactaatcgaatgg

SEQ ID NO: 6878 - DNA, 20 bp, synthetic construct
  source 1..20: mol_type = other DNA
cgctgattcggccgtcatat

SEQ ID NO: 6879 - DNA, 20 bp, synthetic construct
  source 1..20: mol_type = other DNA
attgtgcatgctacgtacgc

SEQ ID NO: 6880 - DNA, 20 bp, synthetic construct
  source 1..20: mol_type = other DNA
gcgagaatcagggttatctc

SEQ ID NO: 6881 - DNA, 20 bp, synthetic construct
  source 1..20: mol_type = other DNA
tggctcgaaccaggttcaaa

SEQ ID NO: 6882 - DNA, 20 bp, synthetic construct
  source 1..20: mol_type = other DNA
tctggtttgccaattcgatg

SEQ ID NO: 6883 - DNA, 20 bp, synthetic construct
  source 1..20: mol_type = other DNA
cgacattaaccctactgagg

SEQ ID NO: 6884 - DNA, 20 bp, synthetic construct
  source 1..20: mol_type = other DNA
gaatacctggtcaatccaga

SEQ ID NO: 6885 - DNA, 20 bp, synthetic construct
  source 1..20: mol_type = other DNA
gtgtttagggcgtcgggaga

SEQ ID NO: 6886 - DNA, 20 bp, synthetic construct
  source 1..20: mol_type = other DNA
tgcacaatcctaaatgccgc

SEQ ID NO: 6887 - DNA, 20 bp, synthetic construct
  source 1..20: mol_type = other DNA
gcatctgattgctttctcaa

SEQ ID NO: 6888 - DNA, 20 bp, synthetic construct
  source 1..20: mol_type = other DNA
tattgtaagcataatggctg

SEQ ID NO: 6889 - DNA, 20 bp, synthetic construct
  source 1..20: mol_type = other DNA
taaagcatggtagacacttc

SEQ ID NO: 6890 - DNA, 20 bp, synthetic construct
  source 1..20: mol_type = other DNA
tgaagtacagcttggatcgc

SEQ ID NO: 6891 - DNA, 20 bp, synthetic construct
  source 1..20: mol_type = other DNA
ctagggacggcagaggttta

SEQ ID NO: 6892 - DNA, 20 bp, synthetic construct
  source 1..20: mol_type = other DNA
agcgcatttcctgggttggt

SEQ ID NO: 6893 - DNA, 20 bp, synthetic construct
  source 1..20: mol_type = other DNA
acaaataagctaaccggtcc

SEQ ID NO: 6894 - DNA, 20 bp, synthetic construct
  source 1..20: mol_type = other DNA
gacggtaaagagcactgagt

SEQ ID NO: 6895 - DNA, 20 bp, synthetic construct
  source 1..20: mol_type = other DNA
agtcgcagtgcaggctcgta

SEQ ID NO: 6896 - DNA, 20 bp, synthetic construct
  source 1..20: mol_type = other DNA
cttgtatcaatcgtatcggg

SEQ ID NO: 6897 - DNA, 20 bp, synthetic construct
  source 1..20: mol_type = other DNA
cttaggcatacgtagcctcc

SEQ ID NO: 6898 - DNA, 20 bp, synthetic construct
  source 1..20: mol_type = other DNA
tatcaggtaacctgagtatg

SEQ ID NO: 6899 - DNA, 20 bp, synthetic construct
  source 1..20: mol_type = other DNA
tgctactcaagctgaacgcg

SEQ ID NO: 6900 - DNA, 20 bp, synthetic construct
  source 1..20: mol_type = other DNA
cctgttgctagcaaggttgg

SEQ ID NO: 6901 - DNA, 20 bp, synthetic construct
  source 1..20: mol_type = other DNA
ttacttgcctcactttacaa

SEQ ID NO: 6902 - DNA, 20 bp, synthetic construct
  source 1..20: mol_type = other DNA
cgtgtcgcacgcatataagg

SEQ ID NO: 6903 - DNA, 20 bp, synthetic construct
  source 1..20: mol_type = other DNA
cgggtggtggagtatcgcgt

SEQ ID NO: 6904 - DNA, 20 bp, synthetic construct
  source 1..20: mol_type = other DNA
aaagtatgcttgcagatcta

SEQ ID NO: 6905 - DNA, 20 bp, synthetic construct
  source 1..20: mol_type = other DNA
aataaattgcggagcatcta

SEQ ID NO: 6906 - DNA, 20 bp, synthetic construct
  source 1..20: mol_type = other DNA
ggatgcctaacatgtgatct

SEQ ID NO: 6907 - DNA, 20 bp, synthetic construct
  source 1..20: mol_type = other DNA
tggatacaaaccctctagta

SEQ ID NO: 6908 - DNA, 20 bp, synthetic construct
  source 1..20: mol_type = other DNA
tgatggcttcaattgttcga

SEQ ID NO: 6909 - DNA, 20 bp, synthetic construct
  source 1..20: mol_type = other DNA
gctcgtctttgctctgtcgt

SEQ ID NO: 6910 - DNA, 20 bp, synthetic construct
  source 1..20: mol_type = other DNA
ccaaagtttcttacgctgtg

SEQ ID NO: 6911 - DNA, 20 bp, synthetic construct
  source 1..20: mol_type = other DNA
ttcctcgcaggatgtatgaa

SEQ ID NO: 6912 - DNA, 20 bp, synthetic construct
  source 1..20: mol_type = other DNA
gtggcgagtcacttacctta

SEQ ID NO: 6913 - DNA, 20 bp, synthetic construct
  source 1..20: mol_type = other DNA
gggtaagcatctcagcctga

SEQ ID NO: 6914 - DNA, 20 bp, synthetic construct
  source 1..20: mol_type = other DNA
tgtaacccgtgttgtaggag

SEQ ID NO: 6915 - DNA, 20 bp, synthetic construct
  source 1..20: mol_type = other DNA
tcaccaattgcactgaacag

SEQ ID NO: 6916 - DNA, 20 bp, synthetic construct
  source 1..20: mol_type = other DNA
tactgtacggtgacagaaat

SEQ ID NO: 6917 - DNA, 20 bp, synthetic construct
  source 1..20: mol_type = other DNA
aacagacgcggaacctccag

SEQ ID NO: 6918 - DNA, 20 bp, synthetic construct
  source 1..20: mol_type = other DNA
cagggccctaatcacggtcc

SEQ ID NO: 6919 - DNA, 20 bp, synthetic construct
  source 1..20: mol_type = other DNA
aacaagacccatataccatt

SEQ ID NO: 6920 - DNA, 20 bp, synthetic construct
  source 1..20: mol_type = other DNA
gaaggaatgcacaaccagca

SEQ ID NO: 6921 - DNA, 20 bp, synthetic construct
  source 1..20: mol_type = other DNA
atatcttgcgacacgcgtct

SEQ ID NO: 6922 - DNA, 20 bp, synthetic construct
  source 1..20: mol_type = other DNA
gtcgagataaattaacgagt

SEQ ID NO: 6923 - DNA, 20 bp, synthetic construct
  source 1..20: mol_type = other DNA
aatagcaaggcattatgatg

SEQ ID NO: 6924 - DNA, 20 bp, synthetic construct
  source 1..20: mol_type = other DNA
atatggattcccatctgctt

SEQ ID NO: 6925 - DNA, 20 bp, synthetic construct
  source 1..20: mol_type = other DNA
agtaaggcccttggatacaa

SEQ ID NO: 6926 - DNA, 20 bp, synthetic construct
  source 1..20: mol_type = other DNA
ggcatcgggtttcttaacgc

SEQ ID NO: 6927 - DNA, 20 bp, synthetic construct
  source 1..20: mol_type = other DNA
aatagaacctcctatcctcg

SEQ ID NO: 6928 - DNA, 20 bp, synthetic construct
  source 1..20: mol_type = other DNA
gtgagactacgggctggtgc

SEQ ID NO: 6929 - DNA, 20 bp, synthetic construct
  source 1..20: mol_type = other DNA
tccgagaagcagtaacgcac

SEQ ID NO: 6930 - DNA, 20 bp, synthetic construct
  source 1..20: mol_type = other DNA
gggcatgtagatttatcttg

SEQ ID NO: 6931 - DNA, 20 bp, synthetic construct
  source 1..20: mol_type = other DNA
ggtcctagtaatcacaaatc

SEQ ID NO: 6932 - DNA, 20 bp, synthetic construct
  source 1..20: mol_type = other DNA
accagggtcaggtcattctg

SEQ ID NO: 6933 - DNA, 20 bp, synthetic construct
  source 1..20: mol_type = other DNA
aagccgtaacatgagtccaa

SEQ ID NO: 6934 - DNA, 20 bp, synthetic construct
  source 1..20: mol_type = other DNA
cacatctcactattcggccg

SEQ ID NO: 6935 - DNA, 20 bp, synthetic construct
  source 1..20: mol_type = other DNA
gtctgtccggtgaagcggtt

SEQ ID NO: 6936 - DNA, 20 bp, synthetic construct
  source 1..20: mol_type = other DNA
tgtcaggttagcagccgcca

SEQ ID NO: 6937 - DNA, 20 bp, synthetic construct
  source 1..20: mol_type = other DNA
ccgttacgtaggaaggccct

SEQ ID NO: 6938 - DNA, 20 bp, synthetic construct
  source 1..20: mol_type = other DNA
aggagtgagcgtagtgccgc

SEQ ID NO: 6939 - DNA, 20 bp, synthetic construct
  source 1..20: mol_type = other DNA
tgaccgtaagggctcaatga

SEQ ID NO: 6940 - DNA, 20 bp, synthetic construct
  source 1..20: mol_type = other DNA
cgttgcgtctgtaagcggtg

SEQ ID NO: 6941 - DNA, 20 bp, synthetic construct
  source 1..20: mol_type = other DNA
acatgaaagcgcgcggtcat

SEQ ID NO: 6942 - DNA, 20 bp, synthetic construct
  source 1..20: mol_type = other DNA
aagtgcgctatgctgtggaa

SEQ ID NO: 6943 - DNA, 20 bp, synthetic construct
  source 1..20: mol_type = other DNA
gcgtaatataagtcttggca

SEQ ID NO: 6944 - DNA, 20 bp, synthetic construct
  source 1..20: mol_type = other DNA
ggaggaggcctatatttgta

SEQ ID NO: 6945 - DNA, 20 bp, synthetic construct
  source 1..20: mol_type = other DNA
aggtttacactgagacatcc

SEQ ID NO: 6946 - DNA, 20 bp, synthetic construct
  source 1..20: mol_type = other DNA
tcggcgtcactgcaaaccac

SEQ ID NO: 6947 - DNA, 20 bp, synthetic construct
  source 1..20: mol_type = other DNA
tttccaggtcgcaagtacgc

SEQ ID NO: 6948 - DNA, 20 bp, synthetic construct
  source 1..20: mol_type = other DNA
tagtatgaaacgatcatcga

SEQ ID NO: 6949 - DNA, 20 bp, synthetic construct
  source 1..20: mol_type = other DNA
tgatgcgtgcaattgttaat

SEQ ID NO: 6950 - DNA, 20 bp, synthetic construct
  source 1..20: mol_type = other DNA
gaagttactcggtcctcgga

SEQ ID NO: 6951 - DNA, 20 bp, synthetic construct
  source 1..20: mol_type = other DNA
gaaggtactatagggtgatt

SEQ ID NO: 6952 - DNA, 20 bp, synthetic construct
  source 1..20: mol_type = other DNA
tactagcctgtcacgatgat

SEQ ID NO: 6953 - DNA, 20 bp, synthetic construct
  source 1..20: mol_type = other DNA
acaagtggtataccacctct

SEQ ID NO: 6954 - DNA, 20 bp, synthetic construct
  source 1..20: mol_type = other DNA
gtcagtccttaacttatctc

SEQ ID NO: 6955 - DNA, 20 bp, synthetic construct
  source 1..20: mol_type = other DNA
tttgttacgagaggtgtccc

SEQ ID NO: 6956 - DNA, 20 bp, synthetic construct
  source 1..20: mol_type = other DNA
ctgggataggtcttagacgc

SEQ ID NO: 6957 - DNA, 20 bp, synthetic construct
  source 1..20: mol_type = other DNA
ctaaatgtacggtctagctt

SEQ ID NO: 6958 - DNA, 20 bp, synthetic construct
  source 1..20: mol_type = other DNA
cttattgggtggcctcggcc

SEQ ID NO: 6959 - DNA, 20 bp, synthetic construct
  source 1..20: mol_type = other DNA
gaaagccacgtagatttaca

SEQ ID NO: 6960 - DNA, 20 bp, synthetic construct
  source 1..20: mol_type = other DNA
tgcggctagcgggctatgtt

SEQ ID NO: 6961 - DNA, 20 bp, synthetic construct
  source 1..20: mol_type = other DNA
actctcgacttctaaagaaa

SEQ ID NO: 6962 - DNA, 20 bp, synthetic construct
  source 1..20: mol_type = other DNA
aaacgctctggcgagggtgc

SEQ ID NO: 6963 - DNA, 20 bp, synthetic construct
  source 1..20: mol_type = other DNA
attaaacgcgaccatttgga

SEQ ID NO: 6964 - DNA, 20 bp, synthetic construct
  source 1..20: mol_type = other DNA
actgcgtatacgagggcgca

SEQ ID NO: 6965 - DNA, 20 bp, synthetic construct
  source 1..20: mol_type = other DNA
atacagctagtgccataagg

SEQ ID NO: 6966 - DNA, 20 bp, synthetic construct
  source 1..20: mol_type = other DNA
attctgagcattaaatagcg

SEQ ID NO: 6967 - DNA, 20 bp, synthetic construct
  source 1..20: mol_type = other DNA
tccgtacggctaaggcacct

SEQ ID NO: 6968 - DNA, 20 bp, synthetic construct
  source 1..20: mol_type = other DNA
cagtatggacatgccagaca

SEQ ID NO: 6969 - DNA, 20 bp, synthetic construct
  source 1..20: mol_type = other DNA
ggtcgcggttcctattcatg

SEQ ID NO: 6970 - DNA, 20 bp, synthetic construct
  source 1..20: mol_type = other DNA
tgacatacaaatgcttgcat

SEQ ID NO: 6971 - DNA, 20 bp, synthetic construct
  source 1..20: mol_type = other DNA
atcaccgaatcgctagcata

SEQ ID NO: 6972 - DNA, 20 bp, synthetic construct
  source 1..20: mol_type = other DNA
aataaacttgaagtgagtgc

SEQ ID NO: 6973 - DNA, 20 bp, synthetic construct
  source 1..20: mol_type = other DNA
ttattggagaccgccgttgt

SEQ ID NO: 6974 - DNA, 20 bp, synthetic construct
  source 1..20: mol_type = other DNA
gcgccatgatacagttctac

SEQ ID NO: 6975 - DNA, 20 bp, synthetic construct
  source 1..20: mol_type = other DNA
ggctcttcctgtaatacgca

SEQ ID NO: 6976 - DNA, 20 bp, synthetic construct
  source 1..20: mol_type = other DNA
tgatgtcccattgattctcc

SEQ ID NO: 6977 - DNA, 20 bp, synthetic construct
  source 1..20: mol_type = other DNA
actgtgtgattgtacgatat

SEQ ID NO: 6978 - DNA, 20 bp, synthetic construct
  source 1..20: mol_type = other DNA
tccaaatgttcggaaggtag

SEQ ID NO: 6979 - DNA, 20 bp, synthetic construct
  source 1..20: mol_type = other DNA
gatgtagatcaggatgatcg

SEQ ID NO: 6980 - DNA, 20 bp, synthetic construct
  source 1..20: mol_type = other DNA
cgcatcagacttgaggagct

SEQ ID NO: 6981 - DNA, 20 bp, synthetic construct
  source 1..20: mol_type = other DNA
ctcgggagtggctctaccct

SEQ ID NO: 6982 - DNA, 20 bp, synthetic construct
  source 1..20: mol_type = other DNA
agggtgtaagaacctaaaca

SEQ ID NO: 6983 - DNA, 20 bp, synthetic construct
  source 1..20: mol_type = other DNA
tagacgaaccggaaggcttc

SEQ ID NO: 6984 - DNA, 20 bp, synthetic construct
  source 1..20: mol_type = other DNA
ccacccatgaggacctgatt

SEQ ID NO: 6985 - DNA, 20 bp, synthetic construct
  source 1..20: mol_type = other DNA
gttgacgcacagctaggtag

SEQ ID NO: 6986 - DNA, 20 bp, synthetic construct
  source 1..20: mol_type = other DNA
atgttctccgcgtatcgatt

SEQ ID NO: 6987 - DNA, 20 bp, synthetic construct
  source 1..20: mol_type = other DNA
tagactgctatcaatcccgc

SEQ ID NO: 6988 - DNA, 20 bp, synthetic construct
  source 1..20: mol_type = other DNA
cacacaactaagtatcaaca

SEQ ID NO: 6989 - DNA, 20 bp, synthetic construct
  source 1..20: mol_type = other DNA
tagttgttgcccacggctgg

SEQ ID NO: 6990 - DNA, 20 bp, synthetic construct
  source 1..20: mol_type = other DNA
gttgaacggacgccgagacc

SEQ ID NO: 6991 - DNA, 20 bp, synthetic construct
  source 1..20: mol_type = other DNA
ggacattgccgccaacggtc

SEQ ID NO: 6992 - DNA, 20 bp, synthetic construct
  source 1..20: mol_type = other DNA
catatgcctcgccttgtcat

SEQ ID NO: 6993 - DNA, 20 bp, synthetic construct
  source 1..20: mol_type = other DNA
cttctagcgcatatgctggt

SEQ ID NO: 6994 - DNA, 20 bp, synthetic construct
  source 1..20: mol_type = other DNA
aaatacgtgcgccagtacgt

SEQ ID NO: 6995 - DNA, 20 bp, synthetic construct
  source 1..20: mol_type = other DNA
ccgtatgcaaggtataaacc

SEQ ID NO: 6996 - DNA, 20 bp, synthetic construct
  source 1..20: mol_type = other DNA
tgcagacattcggagaaacc

SEQ ID NO: 6997 - DNA, 20 bp, synthetic construct
  source 1..20: mol_type = other DNA
actctactagaatactgtac

SEQ ID NO: 6998 - DNA, 20 bp, synthetic construct
  source 1..20: mol_type = other DNA
tttacacacgcctacgacat

SEQ ID NO: 6999 - DNA, 20 bp, synthetic construct
  source 1..20: mol_type = other DNA
cttgagctcacgtaatgata

SEQ ID NO: 7000 - DNA, 20 bp, synthetic construct
  source 1..20: mol_type = other DNA
tcgtctaattcatataggca

SEQ ID NO: 7001 - DNA, 20 bp, synthetic construct
  source 1..20: mol_type = other DNA
agtgtcatagcatttatggg

SEQ ID NO: 7002 - DNA, 20 bp, synthetic construct
  source 1..20: mol_type = other DNA
ctgcttacgaccttgtggaa

SEQ ID NO: 7003 - DNA, 20 bp, synthetic construct
  source 1..20: mol_type = other DNA
tatcacaggtcccgattacc

SEQ ID NO: 7004 - DNA, 20 bp, synthetic construct
  source 1..20: mol_type = other DNA
ggttgtgtgtatgtgcagta

SEQ ID NO: 7005 - DNA, 20 bp, synthetic construct
  source 1..20: mol_type = other DNA
ctacaggcgctctgtagggc

SEQ ID NO: 7006 - DNA, 20 bp, synthetic construct
  source 1..20: mol_type = other DNA
ccaagatcctccacaggatt

SEQ ID NO: 7007 - DNA, 20 bp, synthetic construct
  source 1..20: mol_type = other DNA
acgccatctagccgaatcct

SEQ ID NO: 7008 - DNA, 20 bp, synthetic construct
  source 1..20: mol_type = other DNA
caccgacgaaggtcacgaag

SEQ ID NO: 7009 - DNA, 20 bp, synthetic construct
  source 1..20: mol_type = other DNA
agacacactagacaccacat

SEQ ID NO: 7010 - DNA, 20 bp, synthetic construct
  source 1..20: mol_type = other DNA
cgaagatcatactcacgcac

SEQ ID NO: 7011 - DNA, 20 bp, synthetic construct
  source 1..20: mol_type = other DNA
ttgcgaatcggtacatggtg

SEQ ID NO: 7012 - DNA, 20 bp, synthetic construct
  source 1..20: mol_type = other DNA
aggttcacctgatcgtagtt

SEQ ID NO: 7013 - DNA, 20 bp, synthetic construct
  source 1..20: mol_type = other DNA
ctcctccttgaatgatgcgg

SEQ ID NO: 7014 - DNA, 20 bp, synthetic construct
  source 1..20: mol_type = other DNA
gcggacgtcctattggtgta

SEQ ID NO: 7015 - DNA, 20 bp, synthetic construct
  source 1..20: mol_type = other DNA
tgttacatgccagcctactc

SEQ ID NO: 7016 - DNA, 20 bp, synthetic construct
  source 1..20: mol_type = other DNA
gtctccataaggctaacagc

SEQ ID NO: 7017 - DNA, 20 bp, synthetic construct
  source 1..20: mol_type = other DNA
cagcaaacagtttagagagg

SEQ ID NO: 7018 - DNA, 20 bp, synthetic construct
  source 1..20: mol_type = other DNA
cgcgaagtacgaatagggtt

SEQ ID NO: 7019 - DNA, 20 bp, synthetic construct
  source 1..20: mol_type = other DNA
agttgggagtgcctgagcgg

SEQ ID NO: 7020 - DNA, 20 bp, synthetic construct
  source 1..20: mol_type = other DNA
caccctgcactcgacggtct

SEQ ID NO: 7021 - DNA, 20 bp, synthetic construct
  source 1..20: mol_type = other DNA
gtgactttctgtaatggcta

SEQ ID NO: 7022 - DNA, 20 bp, synthetic construct
  source 1..20: mol_type = other DNA
tatcggtggtatagacccag

SEQ ID NO: 7023 - DNA, 20 bp, synthetic construct
  source 1..20: mol_type = other DNA
cgtgcgttctccacaagttt

SEQ ID NO: 7024 - DNA, 20 bp, synthetic construct
  source 1..20: mol_type = other DNA
ttgcgccgaccgagcatcat

SEQ ID NO: 7025 - DNA, 20 bp, synthetic construct
  source 1..20: mol_type = other DNA
tctcgattgatcaacgctga

SEQ ID NO: 7026 - DNA, 20 bp, synthetic construct
  source 1..20: mol_type = other DNA
tcgtgtctgcatagaacgtc

SEQ ID NO: 7027 - DNA, 20 bp, synthetic construct
  source 1..20: mol_type = other DNA
gttccgatcacctcctactg

SEQ ID NO: 7028 - DNA, 20 bp, synthetic construct
  source 1..20: mol_type = other DNA
cagatattcgagacttatct

SEQ ID NO: 7029 - DNA, 20 bp, synthetic construct
  source 1..20: mol_type = other DNA
agcagggccgatatatttgt

SEQ ID NO: 7030 - DNA, 20 bp, synthetic construct
  source 1..20: mol_type = other DNA
cttacgccgatttaagtgta

SEQ ID NO: 7031 - DNA, 20 bp, synthetic construct
  source 1..20: mol_type = other DNA
ccgggattgtaatcaagtag

SEQ ID NO: 7032 - DNA, 20 bp, synthetic construct
  source 1..20: mol_type = other DNA
tagctttcgacacgttgcca

SEQ ID NO: 7033 - DNA, 20 bp, synthetic construct
  source 1..20: mol_type = other DNA
gtttaattcgatgacggttg

SEQ ID NO: 7034 - DNA, 20 bp, synthetic construct
  source 1..20: mol_type = other DNA
aacaatctcttcttccagtg

SEQ ID NO: 7035 - DNA, 20 bp, synthetic construct
  source 1..20: mol_type = other DNA
cgagctatgcgaggcaccta

SEQ ID NO: 7036 - DNA, 20 bp, synthetic construct
  source 1..20: mol_type = other DNA
gactgaacgtttgtatcacc

SEQ ID NO: 7037 - DNA, 20 bp, synthetic construct
  source 1..20: mol_type = other DNA
gtcacgttcaggcacagaaa

SEQ ID NO: 7038 - DNA, 20 bp, synthetic construct
  source 1..20: mol_type = other DNA
gctgttgctcaatgattggc

SEQ ID NO: 7039 - DNA, 20 bp, synthetic construct
  source 1..20: mol_type = other DNA
agaagaggtcatctaataag

SEQ ID NO: 7040 - DNA, 20 bp, synthetic construct
  source 1..20: mol_type = other DNA
tccgagaattgtgcaggtgc

SEQ ID NO: 7041 - DNA, 20 bp, synthetic construct
  source 1..20: mol_type = other DNA
gtcttatgataccacgtaaa

SEQ ID NO: 7042 - DNA, 20 bp, synthetic construct
  source 1..20: mol_type = other DNA
taagtcgagggttggatcct

SEQ ID NO: 7043 - DNA, 20 bp, synthetic construct
  source 1..20: mol_type = other DNA
taccgcgcggtttagttgtg

SEQ ID NO: 7044 - DNA, 20 bp, synthetic construct
  source 1..20: mol_type = other DNA
gggcccattcgttgaacccg

SEQ ID NO: 7045 - DNA, 20 bp, synthetic construct
  source 1..20: mol_type = other DNA
tctaacctgcacctacacaa

SEQ ID NO: 7046 - DNA, 20 bp, synthetic construct
  source 1..20: mol_type = other DNA
tactcctcttagctgcccag

SEQ ID NO: 7047 - DNA, 20 bp, synthetic construct
  source 1..20: mol_type = other DNA
caggtaagtcggcgcctgtc

SEQ ID NO: 7048 - DNA, 20 bp, synthetic construct
  source 1..20: mol_type = other DNA
gtagtaactgctcggctggg

SEQ ID NO: 7049 - DNA, 20 bp, synthetic construct
  source 1..20: mol_type = other DNA
tacaacttgtcgtcaaccca

SEQ ID NO: 7050 - DNA, 20 bp, synthetic construct
  source 1..20: mol_type = other DNA
agcgctaacgtggtttcact

SEQ ID NO: 7051 - DNA, 20 bp, synthetic construct
  source 1..20: mol_type = other DNA
cacgacttcaccagtaggat

SEQ ID NO: 7052 - DNA, 20 bp, synthetic construct
  source 1..20: mol_type = other DNA
tcgaagtagggtctgtggtt

SEQ ID NO: 7053 - DNA, 20 bp, synthetic construct
  source 1..20: mol_type = other DNA
ggtggtgcattgcaaattta

SEQ ID NO: 7054 - DNA, 20 bp, synthetic construct
  source 1..20: mol_type = other DNA
tcgaatggccgggtctttcc

SEQ ID NO: 7055 - DNA, 20 bp, synthetic construct
  source 1..20: mol_type = other DNA
agctgttacggtacccgtca

SEQ ID NO: 7056 - DNA, 20 bp, synthetic construct
  source 1..20: mol_type = other DNA
atgtttgggacaatttgagg

SEQ ID NO: 7057 - DNA, 20 bp, synthetic construct
  source 1..20: mol_type = other DNA
tgaatgtacccgttccagta

SEQ ID NO: 7058 - DNA, 20 bp, synthetic construct
  source 1..20: mol_type = other DNA
gcatatgtagcctggaatcg

SEQ ID NO: 7059 - DNA, 20 bp, synthetic construct
  source 1..20: mol_type = other DNA
gagctaagggtccggtatga

SEQ ID NO: 7060 - DNA, 20 bp, synthetic construct
  source 1..20: mol_type = other DNA
ggagtccgtgacatacgatc

SEQ ID NO: 7061 - DNA, 20 bp, synthetic construct
  source 1..20: mol_type = other DNA
gattgccttcttattggcgc

SEQ ID NO: 7062 - DNA, 20 bp, synthetic construct
  source 1..20: mol_type = other DNA
ccgacaacattggaggagaa

SEQ ID NO: 7063 - DNA, 20 bp, synthetic construct
  source 1..20: mol_type = other DNA
gctttccatccatgatatag

SEQ ID NO: 7064 - DNA, 20 bp, synthetic construct
  source 1..20: mol_type = other DNA
aggtgcactccgtagttggg

SEQ ID NO: 7065 - DNA, 20 bp, synthetic construct
  source 1..20: mol_type = other DNA
agagggacagccttagtgtg

SEQ ID NO: 7066 - DNA, 20 bp, synthetic construct
  source 1..20: mol_type = other DNA
tagacgcggtctgattagcc

SEQ ID NO: 7067 - DNA, 20 bp, synthetic construct
  source 1..20: mol_type = other DNA
gactttcatatgaccgaaca

SEQ ID NO: 7068 - DNA, 20 bp, synthetic construct
  source 1..20: mol_type = other DNA
gcggatttagaccaggacga

SEQ ID NO: 7069 - DNA, 20 bp, synthetic construct
  source 1..20: mol_type = other DNA
tctgaatggcgtttcattgc

SEQ ID NO: 7070 - DNA, 20 bp, synthetic construct
  source 1..20: mol_type = other DNA
cgggagctcacacccgacaa

SEQ ID NO: 7071 - DNA, 20 bp, synthetic construct
  source 1..20: mol_type = other DNA
gcactaggctcaattgaagc

SEQ ID NO: 7072 - DNA, 20 bp, synthetic construct
  source 1..20: mol_type = other DNA
atgtaatgcctagcaaacgt

SEQ ID NO: 7073 - DNA, 20 bp, synthetic construct
  source 1..20: mol_type = other DNA
atggcctccgtggaaattaa

SEQ ID NO: 7074 - DNA, 20 bp, synthetic construct
  source 1..20: mol_type = other DNA
acgtgcagataggttccact

SEQ ID NO: 7075 - DNA, 20 bp, synthetic construct
  source 1..20: mol_type = other DNA
ctactctccgtgctccggtc

SEQ ID NO: 7076 - DNA, 20 bp, synthetic construct
  source 1..20: mol_type = other DNA
cgggcccagccgattataag

SEQ ID NO: 7077 - DNA, 20 bp, synthetic construct
  source 1..20: mol_type = other DNA
tttctaaggtgttacgcttc

SEQ ID NO: 7078 - DNA, 20 bp, synthetic construct
  source 1..20: mol_type = other DNA
atggttagatgactcgaatg

SEQ ID NO: 7079 - DNA, 20 bp, synthetic construct
  source 1..20: mol_type = other DNA
aagagcaagcgacactacag

SEQ ID NO: 7080 - DNA, 20 bp, synthetic construct
  source 1..20: mol_type = other DNA
gtgcgatcgcacttacagca

SEQ ID NO: 7081 - DNA, 20 bp, synthetic construct
  source 1..20: mol_type = other DNA
aatggctttggataggagct

SEQ ID NO: 7082 - DNA, 20 bp, synthetic construct
  source 1..20: mol_type = other DNA
cgtgatatgcgccatgtacc

SEQ ID NO: 7083 - DNA, 20 bp, synthetic construct
  source 1..20: mol_type = other DNA
ctaacgcggacctcaacctg

SEQ ID NO: 7084 - DNA, 20 bp, synthetic construct
  source 1..20: mol_type = other DNA
aaaccacgaataccgcactg

SEQ ID NO: 7085 - DNA, 20 bp, synthetic construct
  source 1..20: mol_type = other DNA
ccgggcgaaattgggtttcc

SEQ ID NO: 7086 - DNA, 20 bp, synthetic construct
  source 1..20: mol_type = other DNA
caacgacgcttatcgaccac

SEQ ID NO: 7087 - DNA, 20 bp, synthetic construct
  source 1..20: mol_type = other DNA
tcagcccaacctcttaaagg

SEQ ID NO: 7088 - DNA, 20 bp, synthetic construct
  source 1..20: mol_type = other DNA
gagatggttcatgttctgga

SEQ ID NO: 7089 - DNA, 20 bp, synthetic construct
  source 1..20: mol_type = other DNA
taatgaggcgctgggtccca

SEQ ID NO: 7090 - DNA, 20 bp, synthetic construct
  source 1..20: mol_type = other DNA
attaagatcgtgggcttatg

SEQ ID NO: 7091 - DNA, 20 bp, synthetic construct
  source 1..20: mol_type = other DNA
tagaacttgctgggccattg

SEQ ID NO: 7092 - DNA, 20 bp, synthetic construct
  source 1..20: mol_type = other DNA
cagaaccgttgttattcgcg

SEQ ID NO: 7093 - DNA, 20 bp, synthetic construct
  source 1..20: mol_type = other DNA
ccagggcctatgactcggct

SEQ ID NO: 7094 - DNA, 20 bp, synthetic construct
  source 1..20: mol_type = other DNA
acgttctccgtaattgcacg

SEQ ID NO: 7095 - DNA, 20 bp, synthetic construct
  source 1..20: mol_type = other DNA
cttgggcgcggtaaataaat

SEQ ID NO: 7096 - DNA, 20 bp, synthetic construct
  source 1..20: mol_type = other DNA
aaggtcagccatgacgtcaa

SEQ ID NO: 7097 - DNA, 20 bp, synthetic construct
  source 1..20: mol_type = other DNA
tcggtgcatgtacctgtttc

SEQ ID NO: 7098 - DNA, 20 bp, synthetic construct
  source 1..20: mol_type = other DNA
ggaactagaagtaaagatga

SEQ ID NO: 7099 - DNA, 20 bp, synthetic construct
  source 1..20: mol_type = other DNA
atacatactcccatcatcca

SEQ ID NO: 7100 - DNA, 20 bp, synthetic construct
  source 1..20: mol_type = other DNA
aacagggctacagcaactaa

SEQ ID NO: 7101 - DNA, 20 bp, synthetic construct
  source 1..20: mol_type = other DNA
gctatatcggcagcgttgtc

SEQ ID NO: 7102 - DNA, 20 bp, synthetic construct
  source 1..20: mol_type = other DNA
caggacgagctccagccttt

SEQ ID NO: 7103 - DNA, 20 bp, synthetic construct
  source 1..20: mol_type = other DNA
acccgactagcaacgcctac

SEQ ID NO: 7104 - DNA, 20 bp, synthetic construct
  source 1..20: mol_type = other DNA
tacgtatgaactctaggtag

SEQ ID NO: 7105 - DNA, 20 bp, synthetic construct
  source 1..20: mol_type = other DNA
atcagcaaggtgtgtcagac

SEQ ID NO: 7106 - DNA, 20 bp, synthetic construct
  source 1..20: mol_type = other DNA
gaacggctatttccgactaa

SEQ ID NO: 7107 - DNA, 20 bp, synthetic construct
  source 1..20: mol_type = other DNA
acgagcatgacgtaacaaga

SEQ ID NO: 7108 - DNA, 20 bp, synthetic construct
  source 1..20: mol_type = other DNA
accggcatcaaggctttcgg

SEQ ID NO: 7109 - DNA, 20 bp, synthetic construct
  source 1..20: mol_type = other DNA
taggtctccgtgacgtacat

SEQ ID NO: 7110 - DNA, 20 bp, synthetic construct
  source 1..20: mol_type = other DNA
ccataaggtgtcgagcactc

SEQ ID NO: 7111 - DNA, 20 bp, synthetic construct
  source 1..20: mol_type = other DNA
gccgtgtatagtggccgcat

SEQ ID NO: 7112 - DNA, 20 bp, synthetic construct
  source 1..20: mol_type = other DNA
cgtattcgtccatttgaaca

SEQ ID NO: 7113 - DNA, 20 bp, synthetic construct
  source 1..20: mol_type = other DNA
aacatctttcaccctcaaca

SEQ ID NO: 7114 - DNA, 20 bp, synthetic construct
  source 1..20: mol_type = other DNA
ctccgggttgctcaagttga

SEQ ID NO: 7115 - DNA, 20 bp, synthetic construct
  source 1..20: mol_type = other DNA
catccacttcgaagggctga

SEQ ID NO: 7116 - DNA, 20 bp, synthetic construct
  source 1..20: mol_type = other DNA
gcctcatagtcagagaagat

SEQ ID NO: 7117 - DNA, 20 bp, synthetic construct
  source 1..20: mol_type = other DNA
acacacatccgaggcgtaca

SEQ ID NO: 7118 - DNA, 20 bp, synthetic construct
  source 1..20: mol_type = other DNA
cagaatcagtctgatatgat

SEQ ID NO: 7119 - DNA, 20 bp, synthetic construct
  source 1..20: mol_type = other DNA
caatggaagtgctctaccag

SEQ ID NO: 7120 - DNA, 20 bp, synthetic construct
  source 1..20: mol_type = other DNA
cagcgcattatccaaggaat

SEQ ID NO: 7121 - DNA, 20 bp, synthetic construct
  source 1..20: mol_type = other DNA
ctgaatggttagattgcttt

SEQ ID NO: 7122 - DNA, 20 bp, synthetic construct
  source 1..20: mol_type = other DNA
ttggttcacgatgtgctagt

SEQ ID NO: 7123 - DNA, 20 bp, synthetic construct
  source 1..20: mol_type = other DNA
tgtactacccataacggctt

SEQ ID NO: 7124 - DNA, 20 bp, synthetic construct
  source 1..20: mol_type = other DNA
atatccctgtcaagcatcga

SEQ ID NO: 7125 - DNA, 20 bp, synthetic construct
  source 1..20: mol_type = other DNA
tcacggcaccgctatgtgat

SEQ ID NO: 7126 - DNA, 20 bp, synthetic construct
  source 1..20: mol_type = other DNA
tgagagatacccgtttattc

SEQ ID NO: 7127 - DNA, 20 bp, synthetic construct
  source 1..20: mol_type = other DNA
agtgtactgacgtattgaac

SEQ ID NO: 7128 - DNA, 20 bp, synthetic construct
  source 1..20: mol_type = other DNA
acgtgcgagagaccggaagg

SEQ ID NO: 7129 - DNA, 20 bp, synthetic construct
  source 1..20: mol_type = other DNA
tttatacgtcgcgaagggtt

SEQ ID NO: 7130 - DNA, 20 bp, synthetic construct
  source 1..20: mol_type = other DNA
actacacgtggtgcatattc

SEQ ID NO: 7131 - DNA, 20 bp, synthetic construct
  source 1..20: mol_type = other DNA
cagcatatgacccagaagat

SEQ ID NO: 7132 - DNA, 20 bp, synthetic construct
  source 1..20: mol_type = other DNA
tattcgctgccgtccggtcg

SEQ ID NO: 7133 - DNA, 20 bp, synthetic construct
  source 1..20: mol_type = other DNA
gatttgatgtagtcttccat

SEQ ID NO: 7134 - DNA, 20 bp, synthetic construct
  source 1..20: mol_type = other DNA
cgatgcctaatctgtaataa

SEQ ID NO: 7135 - DNA, 20 bp, synthetic construct
  source 1..20: mol_type = other DNA
cggagggctttaaagacctt

SEQ ID NO: 7136 - DNA, 20 bp, synthetic construct
  source 1..20: mol_type = other DNA
gcgagcgttgattgttctag

SEQ ID NO: 7137 - DNA, 20 bp, synthetic construct
  source 1..20: mol_type = other DNA
acaaatgtgtggaccggcgt

SEQ ID NO: 7138 - DNA, 20 bp, synthetic construct
  source 1..20: mol_type = other DNA
ctacggatggatgcagaagc

SEQ ID NO: 7139 - DNA, 20 bp, synthetic construct
  source 1..20: mol_type = other DNA
cccgcgtctcctgcaatttg

SEQ ID NO: 7140 - DNA, 20 bp, synthetic construct
  source 1..20: mol_type = other DNA
gcgaaacgatttcgcttgaa

SEQ ID NO: 7141 - DNA, 20 bp, synthetic construct
  source 1..20: mol_type = other DNA
catagaactttgcagagtgt

SEQ ID NO: 7142 - DNA, 20 bp, synthetic construct
  source 1..20: mol_type = other DNA
agtagtccattatccagtac

SEQ ID NO: 7143 - DNA, 20 bp, synthetic construct
  source 1..20: mol_type = other DNA
tttgtcgtttacacacctag

SEQ ID NO: 7144 - DNA, 20 bp, synthetic construct
  source 1..20: mol_type = other DNA
agtacacagtggccctagac

SEQ ID NO: 7145 - DNA, 20 bp, synthetic construct
  source 1..20: mol_type = other DNA
gtaggcccattaccgagaac

SEQ ID NO: 7146 - DNA, 20 bp, synthetic construct
  source 1..20: mol_type = other DNA
acgcgaatcaattaaacaga

SEQ ID NO: 7147 - DNA, 20 bp, synthetic construct
  source 1..20: mol_type = other DNA
gtagtgcggcgtttctccgt

SEQ ID NO: 7148 - DNA, 20 bp, synthetic construct
  source 1..20: mol_type = other DNA
tataagtccgcgatgtggat

SEQ ID NO: 7149 - DNA, 20 bp, synthetic construct
  source 1..20: mol_type = other DNA
tgcacctgcagttagttggg

SEQ ID NO: 7150 - DNA, 20 bp, synthetic construct
  source 1..20: mol_type = other DNA
tgtctggcgggtttatcgaa

SEQ ID NO: 7151 - DNA, 20 bp, synthetic construct
  source 1..20: mol_type = other DNA
caaatcccttctacaggatt

SEQ ID NO: 7152 - DNA, 20 bp, synthetic construct
  source 1..20: mol_type = other DNA
tgtctttgtcagggcgtagc

SEQ ID NO: 7153 - DNA, 20 bp, synthetic construct
  source 1..20: mol_type = other DNA
acctgtgaatagctttacca

SEQ ID NO: 7154 - DNA, 20 bp, synthetic construct
  source 1..20: mol_type = other DNA
agaccagataattcgggtct

SEQ ID NO: 7155 - DNA, 20 bp, synthetic construct
  source 1..20: mol_type = other DNA
ctcctatacgaaatctttgc

SEQ ID NO: 7156 - DNA, 20 bp, synthetic construct
  source 1..20: mol_type = other DNA
accagaataaagattgcggc

SEQ ID NO: 7157 - DNA, 20 bp, synthetic construct
  source 1..20: mol_type = other DNA
acatccgcggatggcttaag

SEQ ID NO: 7158 - DNA, 20 bp, synthetic construct
  source 1..20: mol_type = other DNA
agatacgcgtcattctaggg

SEQ ID NO: 7159 - DNA, 20 bp, synthetic construct
  source 1..20: mol_type = other DNA
tcccgtttacaggtcgagtt

SEQ ID NO: 7160 - DNA, 20 bp, synthetic construct
  source 1..20: mol_type = other DNA
ttacgaacaagccggaattt

SEQ ID NO: 7161 - DNA, 20 bp, synthetic construct
  source 1..20: mol_type = other DNA
tagagaacacaatgcagcca

SEQ ID NO: 7162 - DNA, 20 bp, synthetic construct
  source 1..20: mol_type = other DNA
gtgtactggacgtcttacag

SEQ ID NO: 7163 - DNA, 20 bp, synthetic construct
  source 1..20: mol_type = other DNA
aattataccatctgccagtc

SEQ ID NO: 7164 - DNA, 20 bp, synthetic construct
  source 1..20: mol_type = other DNA
aatgggttccctgctctccg

SEQ ID NO: 7165 - DNA, 20 bp, synthetic construct
  source 1..20: mol_type = other DNA
ataatacagatccggaagtc

SEQ ID NO: 7166 - DNA, 20 bp, synthetic construct
  source 1..20: mol_type = other DNA
gtcagttgttgcacacactg

SEQ ID NO: 7167 - DNA, 20 bp, synthetic construct
  source 1..20: mol_type = other DNA
tacatatccacgccgaagta

SEQ ID NO: 7168 - DNA, 20 bp, synthetic construct
  source 1..20: mol_type = other DNA
agacagtaacttactaccac

SEQ ID NO: 7169 - DNA, 20 bp, synthetic construct
  source 1..20: mol_type = other DNA
gtcaacactggcttagagtt

SEQ ID NO: 7170 - DNA, 20 bp, synthetic construct
  source 1..20: mol_type = other DNA
tgattctagcggagcacacc

SEQ ID NO: 7171 - DNA, 20 bp, synthetic construct
  source 1..20: mol_type = other DNA
gagaagcccgcctatccagg

SEQ ID NO: 7172 - DNA, 20 bp, synthetic construct
  source 1..20: mol_type = other DNA
aacctagtcgcatatgagac

SEQ ID NO: 7173 - DNA, 20 bp, synthetic construct
  source 1..20: mol_type = other DNA
attccttctctgcacacttg

SEQ ID NO: 7174 - DNA, 20 bp, synthetic construct
  source 1..20: mol_type = other DNA
agagtcaatagaaatggagt

SEQ ID NO: 7175 - DNA, 20 bp, synthetic construct
  source 1..20: mol_type = other DNA
tttaacgctgcggtggaggc

SEQ ID NO: 7176 - DNA, 20 bp, synthetic construct
  source 1..20: mol_type = other DNA
cagctgttcacgatgatttc

SEQ ID NO: 7177 - DNA, 20 bp, synthetic construct
  source 1..20: mol_type = other DNA
ttcgatgccgttaccatgaa

SEQ ID NO: 7178 - DNA, 20 bp, synthetic construct
  source 1..20: mol_type = other DNA
cccatatatgttcctcatga

SEQ ID NO: 7179 - DNA, 20 bp, synthetic construct
  source 1..20: mol_type = other DNA
agtgtgtgcagtcggtgagg

SEQ ID NO: 7180 - DNA, 20 bp, synthetic construct
  source 1..20: mol_type = other DNA
gtggtgatctctaacgtgaa

SEQ ID NO: 7181 - DNA, 20 bp, synthetic construct
  source 1..20: mol_type = other DNA
gctgctgctgtgttcacaga

SEQ ID NO: 7182 - DNA, 20 bp, synthetic construct
  source 1..20: mol_type = other DNA
ccctaagctgattgtaatga

SEQ ID NO: 7183 - DNA, 20 bp, synthetic construct
  source 1..20: mol_type = other DNA
ccttgttcctttgcgggtcc

SEQ ID NO: 7184 - DNA, 20 bp, synthetic construct
  source 1..20: mol_type = other DNA
tgtagaagaggtcttggcga

SEQ ID NO: 7185 - DNA, 20 bp, synthetic construct
  source 1..20: mol_type = other DNA
agggctcttatagactagcg

SEQ ID NO: 7186 - DNA, 20 bp, synthetic construct
  source 1..20: mol_type = other DNA
cgaatgcatcgcggtacgcg

SEQ ID NO: 7187 - DNA, 20 bp, synthetic construct
  source 1..20: mol_type = other DNA
aagagccttaaggagatagt

SEQ ID NO: 7188 - DNA, 20 bp, synthetic construct
  source 1..20: mol_type = other DNA
atactatgcggcgtcgtgac

SEQ ID NO: 7189 - DNA, 20 bp, synthetic construct
  source 1..20: mol_type = other DNA
ccttaggcgtatccgtattg

SEQ ID NO: 7190 - DNA, 20 bp, synthetic construct
  source 1..20: mol_type = other DNA
gctccctcgtaattcaatgc

SEQ ID NO: 7191 - DNA, 20 bp, synthetic construct
  source 1..20: mol_type = other DNA
agcaattattctgtctctca

SEQ ID NO: 7192 - DNA, 20 bp, synthetic construct
  source 1..20: mol_type = other DNA
atgcgtcaagaatggttggc

SEQ ID NO: 7193 - DNA, 20 bp, synthetic construct
  source 1..20: mol_type = other DNA
ggcgacttaaagagtgtaac

SEQ ID NO: 7194 - DNA, 20 bp, synthetic construct
  source 1..20: mol_type = other DNA
ccgacgtcgtatgtatcttc

SEQ ID NO: 7195 - DNA, 20 bp, synthetic construct
  source 1..20: mol_type = other DNA
cagtataggagttggaacct

SEQ ID NO: 7196 - DNA, 20 bp, synthetic construct
  source 1..20: mol_type = other DNA
accctgatatagcggtcagc

SEQ ID NO: 7197 - DNA, 20 bp, synthetic construct
  source 1..20: mol_type = other DNA
gttgaatgggaatgattctt

SEQ ID NO: 7198 - DNA, 20 bp, synthetic construct
  source 1..20: mol_type = other DNA
acccacgacgcaagggtcac

SEQ ID NO: 7199 - DNA, 20 bp, synthetic construct
  source 1..20: mol_type = other DNA
atccatattcgatcctagaa

SEQ ID NO: 7200 - DNA, 20 bp, synthetic construct
  source 1..20: mol_type = other DNA
ttgatgacctcgttatacca

SEQ ID NO: 7201 - DNA, 20 bp, synthetic construct
  source 1..20: mol_type = other DNA
gaatgaatctgtgtagtggt

SEQ ID NO: 7202 - DNA, 20 bp, synthetic construct
  source 1..20: mol_type = other DNA
gtttgatggcgtgaacagac

SEQ ID NO: 7203 - DNA, 20 bp, synthetic construct
  source 1..20: mol_type = other DNA
gatcccataacagaatcggc

SEQ ID NO: 7204 - DNA, 20 bp, synthetic construct
  source 1..20: mol_type = other DNA
ttgaaagctgagtgtcttgg

SEQ ID NO: 7205 - DNA, 20 bp, synthetic construct
  source 1..20: mol_type = other DNA
gaaggcgggtaagtcgctta

SEQ ID NO: 7206 - DNA, 20 bp, synthetic construct
  source 1..20: mol_type = other DNA
tcactatcgccgccagagat

SEQ ID NO: 7207 - DNA, 20 bp, synthetic construct
  source 1..20: mol_type = other DNA
tcgctgtggcctaccatctc

SEQ ID NO: 7208 - DNA, 20 bp, synthetic construct
  source 1..20: mol_type = other DNA
tccctcatcagtagccatgc

SEQ ID NO: 7209 - DNA, 20 bp, synthetic construct
  source 1..20: mol_type = other DNA
gcttgtgtgaacgcctgcat

SEQ ID NO: 7210 - DNA, 20 bp, synthetic construct
  source 1..20: mol_type = other DNA
tcccggcgagtcagttgtct

SEQ ID NO: 7211 - DNA, 20 bp, synthetic construct
  source 1..20: mol_type = other DNA
aataacactggcacctttcc

SEQ ID NO: 7212 - DNA, 20 bp, synthetic construct
  source 1..20: mol_type = other DNA
ggttaaatacgtgacgggct

SEQ ID NO: 7213 - DNA, 20 bp, synthetic construct
  source 1..20: mol_type = other DNA
agtcagaacgctcagatttg

SEQ ID NO: 7214 - DNA, 20 bp, synthetic construct
  source 1..20: mol_type = other DNA
tttgtaaccatcccgctgtg

SEQ ID NO: 7215 - DNA, 20 bp, synthetic construct
  source 1..20: mol_type = other DNA
tacctaagccctgtagcctt

SEQ ID NO: 7216 - DNA, 20 bp, synthetic construct
  source 1..20: mol_type = other DNA
cgtgccgaaacgtgccgtaa

SEQ ID NO: 7217 - DNA, 20 bp, synthetic construct
  source 1..20: mol_type = other DNA
attcttggtcacttcgcatg

SEQ ID NO: 7218 - DNA, 20 bp, synthetic construct
  source 1..20: mol_type = other DNA
agtaaagggacttataacag

SEQ ID NO: 7219 - DNA, 20 bp, synthetic construct
  source 1..20: mol_type = other DNA
acaacctgcaatcgctcgac

SEQ ID NO: 7220 - DNA, 20 bp, synthetic construct
  source 1..20: mol_type = other DNA
gtagtacccaggcgcaaact

SEQ ID NO: 7221 - DNA, 20 bp, synthetic construct
  source 1..20: mol_type = other DNA
ccacaggtactagaaccatg

SEQ ID NO: 7222 - DNA, 20 bp, synthetic construct
  source 1..20: mol_type = other DNA
tcggatagcgtaatgttctg

SEQ ID NO: 7223 - DNA, 20 bp, synthetic construct
  source 1..20: mol_type = other DNA
actggatcgatttgcggtga

SEQ ID NO: 7224 - DNA, 20 bp, synthetic construct
  source 1..20: mol_type = other DNA
aacttgagaaggaaccgggc

SEQ ID NO: 7225 - DNA, 20 bp, synthetic construct
  source 1..20: mol_type = other DNA
ttaagaacgggtgtactttc

SEQ ID NO: 7226 - DNA, 20 bp, synthetic construct
  source 1..20: mol_type = other DNA
cgtgtacggcacaaacgatg

SEQ ID NO: 7227 - DNA, 20 bp, synthetic construct
  source 1..20: mol_type = other DNA
tcaaacaggcgagcaattct

SEQ ID NO: 7228 - DNA, 20 bp, synthetic construct
  source 1..20: mol_type = other DNA
tgtacttctgaaagtgttac

SEQ ID NO: 7229 - DNA, 20 bp, synthetic construct
  source 1..20: mol_type = other DNA
tggactgctcagttctcttt

SEQ ID NO: 7230 - DNA, 20 bp, synthetic construct
  source 1..20: mol_type = other DNA
cgatagatgtagcatgcgtt

SEQ ID NO: 7231 - DNA, 20 bp, synthetic construct
  source 1..20: mol_type = other DNA
gcagctttagcgtcgcggta

SEQ ID NO: 7232 - DNA, 20 bp, synthetic construct
  source 1..20: mol_type = other DNA
gagtggttgagctaagtcgc

SEQ ID NO: 7233 - DNA, 20 bp, synthetic construct
  source 1..20: mol_type = other DNA
agcccttagaggctagttgc

SEQ ID NO: 7234 - DNA, 20 bp, synthetic construct
  source 1..20: mol_type = other DNA
aaagcacattgtcaccagag

SEQ ID NO: 7235 - DNA, 20 bp, synthetic construct
  source 1..20: mol_type = other DNA
tcaggaatgattaatggttg

SEQ ID NO: 7236 - DNA, 20 bp, synthetic construct
  source 1..20: mol_type = other DNA
caaccgcctatcaatttctc

SEQ ID NO: 7237 - DNA, 20 bp, synthetic construct
  source 1..20: mol_type = other DNA
accgcctgcctgattattgc

SEQ ID NO: 7238 - DNA, 20 bp, synthetic construct
  source 1..20: mol_type = other DNA
gagtagaacccacaaactaa

SEQ ID NO: 7239 - DNA, 20 bp, synthetic construct
  source 1..20: mol_type = other DNA
cgtatgccatgctaattccc

SEQ ID NO: 7240 - DNA, 20 bp, synthetic construct
  source 1..20: mol_type = other DNA
agttgcctcggtcctttgat

SEQ ID NO: 7241 - DNA, 20 bp, synthetic construct
  source 1..20: mol_type = other DNA
accctgaaatccaggaatat

SEQ ID NO: 7242 - DNA, 20 bp, synthetic construct
  source 1..20: mol_type = other DNA
tgggtcagtctctgacatag

SEQ ID NO: 7243 - DNA, 20 bp, synthetic construct
  source 1..20: mol_type = other DNA
atcacaaagttcggagctgg

SEQ ID NO: 7244 - DNA, 20 bp, synthetic construct
  source 1..20: mol_type = other DNA
acagagtttgtggtcagatt

SEQ ID NO: 7245 - DNA, 20 bp, synthetic construct
  source 1..20: mol_type = other DNA
gcgaacctcttaactctaac

SEQ ID NO: 7246 - DNA, 20 bp, synthetic construct
  source 1..20: mol_type = other DNA
cggattatgaatgcagcacg

SEQ ID NO: 7247 - DNA, 20 bp, synthetic construct
  source 1..20: mol_type = other DNA
tatacgcagtgggaccacca

SEQ ID NO: 7248 - DNA, 20 bp, synthetic construct
  source 1..20: mol_type = other DNA
ggtaatatattgtctctaac

SEQ ID NO: 7249 - DNA, 20 bp, synthetic construct
  source 1..20: mol_type = other DNA
gcgtgtatcggccgttcacg

SEQ ID NO: 7250 - DNA, 20 bp, synthetic construct
  source 1..20: mol_type = other DNA
tcaacctggtggcaaaggaa

SEQ ID NO: 7251 - DNA, 20 bp, synthetic construct
  source 1..20: mol_type = other DNA
agacccgacaccgatacgag

SEQ ID NO: 7252 - DNA, 20 bp, synthetic construct
  source 1..20: mol_type = other DNA
atgacttcctcacacttgga

SEQ ID NO: 7253 - DNA, 20 bp, synthetic construct
  source 1..20: mol_type = other DNA
aacaacagttgccacctaaa

SEQ ID NO: 7254 - DNA, 20 bp, synthetic construct
  source 1..20: mol_type = other DNA
ccattactacggctaatctt

SEQ ID NO: 7255 - DNA, 20 bp, synthetic construct
  source 1..20: mol_type = other DNA
gtaggtatagctgcttgata

SEQ ID NO: 7256 - DNA, 20 bp, synthetic construct
  source 1..20: mol_type = other DNA
tgagggttgggagcacatgt

SEQ ID NO: 7257 - DNA, 20 bp, synthetic construct
  source 1..20: mol_type = other DNA
aattgctttgaagggcccat

SEQ ID NO: 7258 - DNA, 20 bp, synthetic construct
  source 1..20: mol_type = other DNA
acaggtcagtaggcgtaacc

SEQ ID NO: 7259 - DNA, 20 bp, synthetic construct
  source 1..20: mol_type = other DNA
tttcccgtgcttctcgcacc

SEQ ID NO: 7260 - DNA, 20 bp, synthetic construct
  source 1..20: mol_type = other DNA
gggacattcctccttacgaa

SEQ ID NO: 7261 - DNA, 20 bp, synthetic construct
  source 1..20: mol_type = other DNA
ctggcgtaatttgacacacg

SEQ ID NO: 7262 - DNA, 20 bp, synthetic construct
  source 1..20: mol_type = other DNA
ttgttatctgcatagggttc

SEQ ID NO: 7263 - DNA, 20 bp, synthetic construct
  source 1..20: mol_type = other DNA
gggccgtattagtacttctc

SEQ ID NO: 7264 - DNA, 20 bp, synthetic construct
  source 1..20: mol_type = other DNA
aaagcgggataacaacttca

SEQ ID NO: 7265 - DNA, 20 bp, synthetic construct
  source 1..20: mol_type = other DNA
cgctagcaggacaatatcga

SEQ ID NO: 7266 - DNA, 20 bp, synthetic construct
  source 1..20: mol_type = other DNA
catcccggcacagattacat

SEQ ID NO: 7267 - DNA, 20 bp, synthetic construct
  source 1..20: mol_type = other DNA
gcgcaccctgcaaattaaat

SEQ ID NO: 7268 - DNA, 20 bp, synthetic construct
  source 1..20: mol_type = other DNA
cgaccatccatgcgcagaca

SEQ ID NO: 7269 - DNA, 20 bp, synthetic construct
  source 1..20: mol_type = other DNA
cttaccaagtgtgagcccat

SEQ ID NO: 7270 - DNA, 20 bp, synthetic construct
  source 1..20: mol_type = other DNA
ggagatgcgttaaagtcgct

SEQ ID NO: 7271 - DNA, 20 bp, synthetic construct
  source 1..20: mol_type = other DNA
tacgataacccaaaccgggc

SEQ ID NO: 7272 - DNA, 20 bp, synthetic construct
  source 1..20: mol_type = other DNA
cggcgtgaagttgcttagtt

SEQ ID NO: 7273 - DNA, 20 bp, synthetic construct
  source 1..20: mol_type = other DNA
cttggcctgtattctactta

SEQ ID NO: 7274 - DNA, 20 bp, synthetic construct
  source 1..20: mol_type = other DNA
aaacaggcgggaatgtggct

SEQ ID NO: 7275 - DNA, 20 bp, synthetic construct
  source 1..20: mol_type = other DNA
agtctagctgcgtctattta

SEQ ID NO: 7276 - DNA, 20 bp, synthetic construct
  source 1..20: mol_type = other DNA
ctggttcctgcgtacaacgg

SEQ ID NO: 7277 - DNA, 20 bp, synthetic construct
  source 1..20: mol_type = other DNA
tagtattcataggagcacga

SEQ ID NO: 7278 - DNA, 20 bp, synthetic construct
  source 1..20: mol_type = other DNA
gtgtttccaagtcccttacc

SEQ ID NO: 7279 - DNA, 20 bp, synthetic construct
  source 1..20: mol_type = other DNA
ggtcagcagttatataacga

SEQ ID NO: 7280 - DNA, 20 bp, synthetic construct
  source 1..20: mol_type = other DNA
gttactaggtatactctcaa

SEQ ID NO: 7281 - DNA, 20 bp, synthetic construct
  source 1..20: mol_type = other DNA
ctttaaggatagtcatgacc

SEQ ID NO: 7282 - DNA, 20 bp, synthetic construct
  source 1..20: mol_type = other DNA
ggtagtcgttacttgatgtt

SEQ ID NO: 7283 - DNA, 20 bp, synthetic construct
  source 1..20: mol_type = other DNA
gcgatgagccacctagttca

SEQ ID NO: 7284 - DNA, 20 bp, synthetic construct
  source 1..20: mol_type = other DNA
acacaggtggcgatttatat

SEQ ID NO: 7285 - DNA, 20 bp, synthetic construct
  source 1..20: mol_type = other DNA
agtaagctaagggacaccgc

SEQ ID NO: 7286 - DNA, 20 bp, synthetic construct
  source 1..20: mol_type = other DNA
ttccgggaagtgcttgtgta

SEQ ID NO: 7287 - DNA, 20 bp, synthetic construct
  source 1..20: mol_type = other DNA
ctcaatcatctaacaacgcc

SEQ ID NO: 7288 - DNA, 20 bp, synthetic construct
  source 1..20: mol_type = other DNA
ctcgcgatattcgaaggcta

SEQ ID NO: 7289 - DNA, 20 bp, synthetic construct
  source 1..20: mol_type = other DNA
tcccatggtcatcgagcaag

SEQ ID NO: 7290 - DNA, 20 bp, synthetic construct
  source 1..20: mol_type = other DNA
aggtttgatggtacttgaag

SEQ ID NO: 7291 - DNA, 20 bp, synthetic construct
  source 1..20: mol_type = other DNA
cggtttctggaattgaacca

SEQ ID NO: 7292 - DNA, 20 bp, synthetic construct
  source 1..20: mol_type = other DNA
acaaccaagacccggcgatt

SEQ ID NO: 7293 - DNA, 20 bp, synthetic construct
  source 1..20: mol_type = other DNA
cctccagaacattgctagga

SEQ ID NO: 7294 - DNA, 20 bp, synthetic construct
  source 1..20: mol_type = other DNA
ggtttatacggtctaggtaa

SEQ ID NO: 7295 - DNA, 20 bp, synthetic construct
  source 1..20: mol_type = other DNA
agtgcgtccaagtctggtgg

SEQ ID NO: 7296 - DNA, 20 bp, synthetic construct
  source 1..20: mol_type = other DNA
aggatttgagcgccaagcgt

SEQ ID NO: 7297 - DNA, 20 bp, synthetic construct
  source 1..20: mol_type = other DNA
agattgtcttacttacgtgt

SEQ ID NO: 7298 - DNA, 20 bp, synthetic construct
  source 1..20: mol_type = other DNA
atcttagtcatcttggacct

SEQ ID NO: 7299 - DNA, 20 bp, synthetic construct
  source 1..20: mol_type = other DNA
ctagccaatcctcttgtact

SEQ ID NO: 7300 - DNA, 20 bp, synthetic construct
  source 1..20: mol_type = other DNA
atgcaaagccaacccagagg

SEQ ID NO: 7301 - DNA, 20 bp, synthetic construct
  source 1..20: mol_type = other DNA
tgtagacctttgacaactca

SEQ ID NO: 7302 - DNA, 20 bp, synthetic construct
  source 1..20: mol_type = other DNA
gacgtaggtacggctgcgag

SEQ ID NO: 7303 - DNA, 20 bp, synthetic construct
  source 1..20: mol_type = other DNA
cagggcgtattatcactagt

SEQ ID NO: 7304 - DNA, 20 bp, synthetic construct
  source 1..20: mol_type = other DNA
cccagcctacactgactagg

SEQ ID NO: 7305 - DNA, 20 bp, synthetic construct
  source 1..20: mol_type = other DNA
tcccagcctgctaggaacct

SEQ ID NO: 7306 - DNA, 20 bp, synthetic construct
  source 1..20: mol_type = other DNA
cgttatgcatccaaacagaa

SEQ ID NO: 7307 - DNA, 20 bp, synthetic construct
  source 1..20: mol_type = other DNA
cttacggaaactaaagccga

SEQ ID NO: 7308 - DNA, 20 bp, synthetic construct
  source 1..20: mol_type = other DNA
ctaatgtctgttgtgccgga

SEQ ID NO: 7309 - DNA, 20 bp, synthetic construct
  source 1..20: mol_type = other DNA
tgcgaccgagatgcgttatc

SEQ ID NO: 7310 - DNA, 20 bp, synthetic construct
  source 1..20: mol_type = other DNA
gacaggattagcccatgcat

SEQ ID NO: 7311 - DNA, 20 bp, synthetic construct
  source 1..20: mol_type = other DNA
ccacacaagtgggtaagatc

SEQ ID NO: 7312 - DNA, 20 bp, synthetic construct
  source 1..20: mol_type = other DNA
tcggatacgtttcttgattc

SEQ ID NO: 7313 - DNA, 20 bp, synthetic construct
  source 1..20: mol_type = other DNA
gtttccagttgttaacggac

SEQ ID NO: 7314 - DNA, 20 bp, synthetic construct
  source 1..20: mol_type = other DNA
agtttgtgacgtcggttgaa

SEQ ID NO: 7315 - DNA, 20 bp, synthetic construct
  source 1..20: mol_type = other DNA
ttcactgacgggcagattcc

SEQ ID NO: 7316 - DNA, 20 bp, synthetic construct
  source 1..20: mol_type = other DNA
atgtgggtaatgagacgtct

SEQ ID NO: 7317 - DNA, 20 bp, synthetic construct
  source 1..20: mol_type = other DNA
tataggacggacccgtatag

SEQ ID NO: 7318 - DNA, 20 bp, synthetic construct
  source 1..20: mol_type = other DNA
cttaccaaagtgagcactga

SEQ ID NO: 7319 - DNA, 20 bp, synthetic construct
  source 1..20: mol_type = other DNA
tagttagacttaaagaggcg

SEQ ID NO: 7320 - DNA, 20 bp, synthetic construct
  source 1..20: mol_type = other DNA
aacatttcaacgccgccgag

SEQ ID NO: 7321 - DNA, 20 bp, synthetic construct
  source 1..20: mol_type = other DNA
tattatcgttgtgtggcaag

SEQ ID NO: 7322 - DNA, 20 bp, synthetic construct
  source 1..20: mol_type = other DNA
ctaagagggtacaggaatgt

SEQ ID NO: 7323 - DNA, 20 bp, synthetic construct
  source 1..20: mol_type = other DNA
atcgggcgtcatagtgatga

SEQ ID NO: 7324 - DNA, 20 bp, synthetic construct
  source 1..20: mol_type = other DNA
gctaagaggaagtgttagtg

SEQ ID NO: 7325 - DNA, 20 bp, synthetic construct
  source 1..20: mol_type = other DNA
cagccaggcccttcaataag

SEQ ID NO: 7326 - DNA, 20 bp, synthetic construct
  source 1..20: mol_type = other DNA
gtccataagtccgaattggc

SEQ ID NO: 7327 - DNA, 20 bp, synthetic construct
  source 1..20: mol_type = other DNA
gcgacttcattacgtagagc

SEQ ID NO: 7328 - DNA, 20 bp, synthetic construct
  source 1..20: mol_type = other DNA
gtcaagcagcgtgactgtct

SEQ ID NO: 7329 - DNA, 20 bp, synthetic construct
  source 1..20: mol_type = other DNA
gactgttacccgttgggagt

SEQ ID NO: 7330 - DNA, 20 bp, synthetic construct
  source 1..20: mol_type = other DNA
gtcgtgctcagtgggtgaac

SEQ ID NO: 7331 - DNA, 20 bp, synthetic construct
  source 1..20: mol_type = other DNA
tcggtgtcaggcctcacctt

SEQ ID NO: 7332 - DNA, 20 bp, synthetic construct
  source 1..20: mol_type = other DNA
acaggattcaaagttacttg

SEQ ID NO: 7333 - DNA, 20 bp, synthetic construct
  source 1..20: mol_type = other DNA
ttctttagtttcgatgtcct

SEQ ID NO: 7334 - DNA, 20 bp, synthetic construct
  source 1..20: mol_type = other DNA
ggaattgtgtccgcacctaa

SEQ ID NO: 7335 - DNA, 20 bp, synthetic construct
  source 1..20: mol_type = other DNA
gtcaaaccaataccgcgggt

SEQ ID NO: 7336 - DNA, 20 bp, synthetic construct
  source 1..20: mol_type = other DNA
aggtacagtcagcttaatac

SEQ ID NO: 7337 - DNA, 20 bp, synthetic construct
  source 1..20: mol_type = other DNA
ctcaacaacatcgtaccact

SEQ ID NO: 7338 - DNA, 20 bp, synthetic construct
  source 1..20: mol_type = other DNA
atccacggtccctcttccga

SEQ ID NO: 7339 - DNA, 20 bp, synthetic construct
  source 1..20: mol_type = other DNA
ctcggccgaagcaacagtgc

SEQ ID NO: 7340 - DNA, 20 bp, synthetic construct
  source 1..20: mol_type = other DNA
ggccgatgaatacaatggat

SEQ ID NO: 7341 - DNA, 20 bp, synthetic construct
  source 1..20: mol_type = other DNA
tgatagtgtttccatcgtac

SEQ ID NO: 7342 - DNA, 20 bp, synthetic construct
  source 1..20: mol_type = other DNA
tcctcgcttcatttgtcgag

SEQ ID NO: 7343 - DNA, 20 bp, synthetic construct
  source 1..20: mol_type = other DNA
gtgtaatgcattcaatagtc

SEQ ID NO: 7344 - DNA, 20 bp, synthetic construct
  source 1..20: mol_type = other DNA
cccttgttaacatgacgacc

SEQ ID NO: 7345 - DNA, 20 bp, synthetic construct
  source 1..20: mol_type = other DNA
cgtaaccaacataaacatga

SEQ ID NO: 7346 - DNA, 20 bp, synthetic construct
  source 1..20: mol_type = other DNA
ttgctgcatggttcaacctc

SEQ ID NO: 7347 - DNA, 20 bp, synthetic construct
  source 1..20: mol_type = other DNA
ccgactatacgtccgttaca

SEQ ID NO: 7348 - DNA, 20 bp, synthetic construct
  source 1..20: mol_type = other DNA
atggttataatttccgccta

SEQ ID NO: 7349 - DNA, 20 bp, synthetic construct
  source 1..20: mol_type = other DNA
agcgcaacgccagaaacgct

SEQ ID NO: 7350 - DNA, 20 bp, synthetic construct
  source 1..20: mol_type = other DNA
tataaacgtgggcagattat

SEQ ID NO: 7351 - DNA, 20 bp, synthetic construct
  source 1..20: mol_type = other DNA
cggtagttactagagagggc

SEQ ID NO: 7352 - DNA, 20 bp, synthetic construct
  source 1..20: mol_type = other DNA
gttcttgattggttctgatt

SEQ ID NO: 7353 - DNA, 20 bp, synthetic construct
  source 1..20: mol_type = other DNA
cggctgagttccactatcta

SEQ ID NO: 7354 - DNA, 20 bp, synthetic construct
  source 1..20: mol_type = other DNA
ctcgtttctccttactacag

SEQ ID NO: 7355 - DNA, 20 bp, synthetic construct
  source 1..20: mol_type = other DNA
gacgttcttagcgaagtgtt

SEQ ID NO: 7356 - DNA, 20 bp, synthetic construct
  source 1..20: mol_type = other DNA
acacccttgtccggctgtac

SEQ ID NO: 7357 - DNA, 20 bp, synthetic construct
  source 1..20: mol_type = other DNA
tcgatcatgtagtctttcaa

SEQ ID NO: 7358 - DNA, 20 bp, synthetic construct
  source 1..20: mol_type = other DNA
agctaacaacgcagtgttta

SEQ ID NO: 7359 - DNA, 20 bp, synthetic construct
  source 1..20: mol_type = other DNA
gtcagaaagtaattcatcgg

SEQ ID NO: 7360 - DNA, 20 bp, synthetic construct
  source 1..20: mol_type = other DNA
agacgtgttgacacatcgat

SEQ ID NO: 7361 - DNA, 20 bp, synthetic construct
  source 1..20: mol_type = other DNA
gatctcgcttgtacaccatg

SEQ ID NO: 7362 - DNA, 20 bp, synthetic construct
  source 1..20: mol_type = other DNA
tggaaattacctacgttata

SEQ ID NO: 7363 - DNA, 20 bp, synthetic construct
  source 1..20: mol_type = other DNA
ctcagccctacctattaggc

SEQ ID NO: 7364 - DNA, 20 bp, synthetic construct
  source 1..20: mol_type = other DNA
gtacctaaattgtgtcgtta

SEQ ID NO: 7365 - DNA, 20 bp, synthetic construct
  source 1..20: mol_type = other DNA
aattctactggcctttgtgc

SEQ ID NO: 7366 - DNA, 20 bp, synthetic construct
  source 1..20: mol_type = other DNA
accttaacggcctgtagatc

SEQ ID NO: 7367 - DNA, 20 bp, synthetic construct
  source 1..20: mol_type = other DNA
tcaacgttgacctacacggt

SEQ ID NO: 7368 - DNA, 20 bp, synthetic construct
  source 1..20: mol_type = other DNA
atggagcggacattagaatt

SEQ ID NO: 7369 - DNA, 20 bp, synthetic construct
  source 1..20: mol_type = other DNA
cgccgaaataacagcgtcga

SEQ ID NO: 7370 - DNA, 20 bp, synthetic construct
  source 1..20: mol_type = other DNA
tttatttctacgcacgccaa

SEQ ID NO: 7371 - DNA, 20 bp, synthetic construct
  source 1..20: mol_type = other DNA
tttgaggcgaaccgaaccta

SEQ ID NO: 7372 - DNA, 20 bp, synthetic construct
  source 1..20: mol_type = other DNA
atagttagctgggctcgtcg

SEQ ID NO: 7373 - DNA, 20 bp, synthetic construct
  source 1..20: mol_type = other DNA
aagagttgaagggatggtaa

SEQ ID NO: 7374 - DNA, 20 bp, synthetic construct
  source 1..20: mol_type = other DNA
gacaaagctggaaatttgct

SEQ ID NO: 7375 - DNA, 20 bp, synthetic construct
  source 1..20: mol_type = other DNA
ggaggtctaggagactaata

SEQ ID NO: 7376 - DNA, 20 bp, synthetic construct
  source 1..20: mol_type = other DNA
accgttccaggacaccactc

SEQ ID NO: 7377 - DNA, 20 bp, synthetic construct
  source 1..20: mol_type = other DNA
cggactctaataagcctgta

SEQ ID NO: 7378 - DNA, 20 bp, synthetic construct
  source 1..20: mol_type = other DNA
cgtactcccagcaattctga

SEQ ID NO: 7379 - DNA, 20 bp, synthetic construct
  source 1..20: mol_type = other DNA
atccgacgagctgagggagc

SEQ ID NO: 7380 - DNA, 20 bp, synthetic construct
  source 1..20: mol_type = other DNA
gatgcatttggctacggcgt

SEQ ID NO: 7381 - DNA, 20 bp, synthetic construct
  source 1..20: mol_type = other DNA
acaacactggccagcgtgag

SEQ ID NO: 7382 - DNA, 20 bp, synthetic construct
  source 1..20: mol_type = other DNA
cagcacgaactacctcggat

SEQ ID NO: 7383 - DNA, 20 bp, synthetic construct
  source 1..20: mol_type = other DNA
taaatgctcatgagcgaaat

SEQ ID NO: 7384 - DNA, 20 bp, synthetic construct
  source 1..20: mol_type = other DNA
acgaggcgctgcgaaggtca

SEQ ID NO: 7385 - DNA, 20 bp, synthetic construct
  source 1..20: mol_type = other DNA
tcaaatacacatgtagctca

SEQ ID NO: 7386 - DNA, 20 bp, synthetic construct
  source 1..20: mol_type = other DNA
ctaggcgtttctaacctcaa

SEQ ID NO: 7387 - DNA, 20 bp, synthetic construct
  source 1..20: mol_type = other DNA
actcaaactgtgccaggccg

SEQ ID NO: 7388 - DNA, 20 bp, synthetic construct
  source 1..20: mol_type = other DNA
tggcacaaccgtaactcttt

SEQ ID NO: 7389 - DNA, 20 bp, synthetic construct
  source 1..20: mol_type = other DNA
ccgaagatacctaagggaac

SEQ ID NO: 7390 - DNA, 20 bp, synthetic construct
  source 1..20: mol_type = other DNA
gtatgcgtccactgatgtta

SEQ ID NO: 7391 - DNA, 20 bp, synthetic construct
  source 1..20: mol_type = other DNA
gactccgacaagatcgagag

SEQ ID NO: 7392 - DNA, 20 bp, synthetic construct
  source 1..20: mol_type = other DNA
catctcccagactaatcaat

SEQ ID NO: 7393 - DNA, 20 bp, synthetic construct
  source 1..20: mol_type = other DNA
cggtgatctacagcgggaac

SEQ ID NO: 7394 - DNA, 20 bp, synthetic construct
  source 1..20: mol_type = other DNA
gcctattccaacaatctcat

SEQ ID NO: 7395 - DNA, 20 bp, synthetic construct
  source 1..20: mol_type = other DNA
cgagatggtacgtaggttcg

SEQ ID NO: 7396 - DNA, 20 bp, synthetic construct
  source 1..20: mol_type = other DNA
agtcgtgtctgacaacttct

SEQ ID NO: 7397 - DNA, 20 bp, synthetic construct
  source 1..20: mol_type = other DNA
cctgcgcaccaacacgggtc

SEQ ID NO: 7398 - DNA, 20 bp, synthetic construct
  source 1..20: mol_type = other DNA
ctgattaggacatagactac

SEQ ID NO: 7399 - DNA, 20 bp, synthetic construct
  source 1..20: mol_type = other DNA
gcagttctgaggctcttggt

SEQ ID NO: 7400 - DNA, 20 bp, synthetic construct
  source 1..20: mol_type = other DNA
gattcgtcgatggccacggt

SEQ ID NO: 7401 - DNA, 20 bp, synthetic construct
  source 1..20: mol_type = other DNA
ccgtgtacccatggttgtca

SEQ ID NO: 7402 - DNA, 20 bp, synthetic construct
  source 1..20: mol_type = other DNA
tagcatttgcataggaccag

SEQ ID NO: 7403 - DNA, 20 bp, synthetic construct
  source 1..20: mol_type = other DNA
tcaatcgtttgtcttgagtc

SEQ ID NO: 7404 - DNA, 20 bp, synthetic construct
  source 1..20: mol_type = other DNA
gactacatggatcacagggt

SEQ ID NO: 7405 - DNA, 20 bp, synthetic construct
  source 1..20: mol_type = other DNA
ggcttctgtggcactactac

SEQ ID NO: 7406 - DNA, 20 bp, synthetic construct
  source 1..20: mol_type = other DNA
gcctatcggtaaggtcagca

SEQ ID NO: 7407 - DNA, 20 bp, synthetic construct
  source 1..20: mol_type = other DNA
gcgttgcaagagttcaggct

SEQ ID NO: 7408 - DNA, 20 bp, synthetic construct
  source 1..20: mol_type = other DNA
tagccaagcccaacgtggcg

SEQ ID NO: 7409 - DNA, 20 bp, synthetic construct
  source 1..20: mol_type = other DNA
cctcctaccctatgaggccc

SEQ ID NO: 7410 - DNA, 20 bp, synthetic construct
  source 1..20: mol_type = other DNA
agagtgtacaggctcggtag

SEQ ID NO: 7411 - DNA, 20 bp, synthetic construct
  source 1..20: mol_type = other DNA
tttcattgtctgccctcgca

SEQ ID NO: 7412 - DNA, 20 bp, synthetic construct
  source 1..20: mol_type = other DNA
tgagcgtagtgctggaggca

SEQ ID NO: 7413 - DNA, 20 bp, synthetic construct
  source 1..20: mol_type = other DNA
acccaagagcaagccgtagt

SEQ ID NO: 7414 - DNA, 20 bp, synthetic construct
  source 1..20: mol_type = other DNA
ccgtcgtgcgtggatgctga

SEQ ID NO: 7415 - DNA, 20 bp, synthetic construct
  source 1..20: mol_type = other DNA
gaaggataccgggaattgcc

SEQ ID NO: 7416 - DNA, 20 bp, synthetic construct
  source 1..20: mol_type = other DNA
tcggtggcatatggcatgac

SEQ ID NO: 7417 - DNA, 20 bp, synthetic construct
  source 1..20: mol_type = other DNA
ccgttcatcatcgtcccgag

SEQ ID NO: 7418 - DNA, 20 bp, synthetic construct
  source 1..20: mol_type = other DNA
aacgaccatgttgaccgtct

SEQ ID NO: 7419 - DNA, 20 bp, synthetic construct
  source 1..20: mol_type = other DNA
caatcacccaaggctttacc

SEQ ID NO: 7420 - DNA, 20 bp, synthetic construct
  source 1..20: mol_type = other DNA
cctgtccgacgttgctcacg

SEQ ID NO: 7421 - DNA, 20 bp, synthetic construct
  source 1..20: mol_type = other DNA
cttgccattgcggttcccgc

SEQ ID NO: 7422 - DNA, 20 bp, synthetic construct
  source 1..20: mol_type = other DNA
ggcgctggtacacacataat

SEQ ID NO: 7423 - DNA, 20 bp, synthetic construct
  source 1..20: mol_type = other DNA
accatgtggcttacgggtgc

SEQ ID NO: 7424 - DNA, 20 bp, synthetic construct
  source 1..20: mol_type = other DNA
acgctgcgggtagcaagcta

SEQ ID NO: 7425 - DNA, 20 bp, synthetic construct
  source 1..20: mol_type = other DNA
ccacgcacataacagcacgg

SEQ ID NO: 7426 - DNA, 20 bp, synthetic construct
  source 1..20: mol_type = other DNA
atgtacgtcagacctgtcag

SEQ ID NO: 7427 - DNA, 20 bp, synthetic construct
  source 1..20: mol_type = other DNA
ctgtagcacaagtttgcaac

SEQ ID NO: 7428 - DNA, 20 bp, synthetic construct
  source 1..20: mol_type = other DNA
tgaaagcggctattaatgta

SEQ ID NO: 7429 - DNA, 20 bp, synthetic construct
  source 1..20: mol_type = other DNA
gagaacaaatagtggctctg

SEQ ID NO: 7430 - DNA, 20 bp, synthetic construct
  source 1..20: mol_type = other DNA
tgcgcccgcaatgactgcca

SEQ ID NO: 7431 - DNA, 20 bp, synthetic construct
  source 1..20: mol_type = other DNA
tccgacgctgatctggagat

SEQ ID NO: 7432 - DNA, 20 bp, synthetic construct
  source 1..20: mol_type = other DNA
ctgccgcacaatccctagag

SEQ ID NO: 7433 - DNA, 20 bp, synthetic construct
  source 1..20: mol_type = other DNA
ctagatgcttagtgacactg

SEQ ID NO: 7434 - DNA, 20 bp, synthetic construct
  source 1..20: mol_type = other DNA
agaaccattgcattccgttc

SEQ ID NO: 7435 - DNA, 20 bp, synthetic construct
  source 1..20: mol_type = other DNA
gcggataaacacacctcaat

SEQ ID NO: 7436 - DNA, 20 bp, synthetic construct
  source 1..20: mol_type = other DNA
ggaggcgcttcttattgagc

SEQ ID NO: 7437 - DNA, 20 bp, synthetic construct
  source 1..20: mol_type = other DNA
acaagacagaccctactgga

SEQ ID NO: 7438 - DNA, 20 bp, synthetic construct
  source 1..20: mol_type = other DNA
acaaatgtcgctcctggagg

SEQ ID NO: 7439 - DNA, 20 bp, synthetic construct
  source 1..20: mol_type = other DNA
catggtgggttccgcaccat

SEQ ID NO: 7440 - DNA, 20 bp, synthetic construct
  source 1..20: mol_type = other DNA
aagttgtcgcaagatcggtc

SEQ ID NO: 7441 - DNA, 20 bp, synthetic construct
  source 1..20: mol_type = other DNA
catcaaatatttgtctacct

SEQ ID NO: 7442 - DNA, 20 bp, synthetic construct
  source 1..20: mol_type = other DNA
cgacggtccctagtttccaa

SEQ ID NO: 7443 - DNA, 20 bp, synthetic construct
  source 1..20: mol_type = other DNA
cgaatcccggtattagagat

SEQ ID NO: 7444 - DNA, 20 bp, synthetic construct
  source 1..20: mol_type = other DNA
aggtatatatggtctgggcc

SEQ ID NO: 7445 - DNA, 20 bp, synthetic construct
  source 1..20: mol_type = other DNA
cgggtgttgtactctacagt

SEQ ID NO: 7446 - DNA, 20 bp, synthetic construct
  source 1..20: mol_type = other DNA
tcgctgctataagcaaatac

SEQ ID NO: 7447 - DNA, 20 bp, synthetic construct
  source 1..20: mol_type = other DNA
accttacgtaaatcgattga

SEQ ID NO: 7448 - DNA, 20 bp, synthetic construct
  source 1..20: mol_type = other DNA
ttgctggagtcagcaaccca

SEQ ID NO: 7449 - DNA, 20 bp, synthetic construct
  source 1..20: mol_type = other DNA
tctcgttgttggtcgggttg

SEQ ID NO: 7450 - DNA, 20 bp, synthetic construct
  source 1..20: mol_type = other DNA
actgctactccacagccgga

SEQ ID NO: 7451 - DNA, 20 bp, synthetic construct
  source 1..20: mol_type = other DNA
aaaggtatgctctcggctgc

SEQ ID NO: 7452 - DNA, 20 bp, synthetic construct
  source 1..20: mol_type = other DNA
caggttggtacgcgatagga

SEQ ID NO: 7453 - DNA, 20 bp, synthetic construct
  source 1..20: mol_type = other DNA
ataccacgatgttatgactt

SEQ ID NO: 7454 - DNA, 20 bp, synthetic construct
  source 1..20: mol_type = other DNA
tttacagccgccctcaatag

SEQ ID NO: 7455 - DNA, 20 bp, synthetic construct
  source 1..20: mol_type = other DNA
ctatagcccagtcgcatctt

SEQ ID NO: 7456 - DNA, 20 bp, synthetic construct
  source 1..20: mol_type = other DNA
aagttcgaagcctacagcca

SEQ ID NO: 7457 - DNA, 20 bp, synthetic construct
  source 1..20: mol_type = other DNA
aactttgaatgcatgtaccc

SEQ ID NO: 7458 - DNA, 20 bp, synthetic construct
  source 1..20: mol_type = other DNA
gacaagcgtcatccagtacg

SEQ ID NO: 7459 - DNA, 20 bp, synthetic construct
  source 1..20: mol_type = other DNA
gcttgtcatgcaatagtcaa

SEQ ID NO: 7460 - DNA, 20 bp, synthetic construct
  source 1..20: mol_type = other DNA
gcatgggagacgggcatcgg

SEQ ID NO: 7461 - DNA, 20 bp, synthetic construct
  source 1..20: mol_type = other DNA
gttgagcaccgtgaatcggg

SEQ ID NO: 7462 - DNA, 20 bp, synthetic construct
  source 1..20: mol_type = other DNA
gcttagacgataacgctgaa

SEQ ID NO: 7463 - DNA, 20 bp, synthetic construct
  source 1..20: mol_type = other DNA
ggctgatgcccttctatacc

SEQ ID NO: 7464 - DNA, 20 bp, synthetic construct
  source 1..20: mol_type = other DNA
ggaggatgatagggacactt

SEQ ID NO: 7465 - DNA, 20 bp, synthetic construct
  source 1..20: mol_type = other DNA
ttctggtggtcatgcaatca

SEQ ID NO: 7466 - DNA, 20 bp, synthetic construct
  source 1..20: mol_type = other DNA
gatccagtagagccacatta

SEQ ID NO: 7467 - DNA, 20 bp, synthetic construct
  source 1..20: mol_type = other DNA
gcagaacgggctagtaggta

SEQ ID NO: 7468 - DNA, 20 bp, synthetic construct
  source 1..20: mol_type = other DNA
gtgcaagggtcagcagatga

SEQ ID NO: 7469 - DNA, 20 bp, synthetic construct
  source 1..20: mol_type = other DNA
tctcacgccgagccgttgta

SEQ ID NO: 7470 - DNA, 20 bp, synthetic construct
  source 1..20: mol_type = other DNA
acagtcattaccttctctat

SEQ ID NO: 7471 - DNA, 20 bp, synthetic construct
  source 1..20: mol_type = other DNA
ttataagatgaggtaccgtt

SEQ ID NO: 7472 - DNA, 20 bp, synthetic construct
  source 1..20: mol_type = other DNA
catccgataattcaacgtgc

SEQ ID NO: 7473 - DNA, 20 bp, synthetic construct
  source 1..20: mol_type = other DNA
gaacaccaccgacatctggg

SEQ ID NO: 7474 - DNA, 20 bp, synthetic construct
  source 1..20: mol_type = other DNA
gcccaacggaagtctagctg

SEQ ID NO: 7475 - DNA, 20 bp, synthetic construct
  source 1..20: mol_type = other DNA
atccaggagtccaatgtctc

SEQ ID NO: 7476 - DNA, 20 bp, synthetic construct
  source 1..20: mol_type = other DNA
ggtcagaatgctagcgtgac

SEQ ID NO: 7477 - DNA, 20 bp, synthetic construct
  source 1..20: mol_type = other DNA
atgtagatccttccgtaagt

SEQ ID NO: 7478 - DNA, 20 bp, synthetic construct
  source 1..20: mol_type = other DNA
accctgaaacaccgtctttg

SEQ ID NO: 7479 - DNA, 20 bp, synthetic construct
  source 1..20: mol_type = other DNA
tcgattattgcatcgagtct

SEQ ID NO: 7480 - DNA, 20 bp, synthetic construct
  source 1..20: mol_type = other DNA
cccgtcaccatataggccgg

SEQ ID NO: 7481 - DNA, 20 bp, synthetic construct
  source 1..20: mol_type = other DNA
tcctcagtcttagcaatcat

SEQ ID NO: 7482 - DNA, 20 bp, synthetic construct
  source 1..20: mol_type = other DNA
attatcaagttcttccgtag

SEQ ID NO: 7483 - DNA, 20 bp, synthetic construct
  source 1..20: mol_type = other DNA
ggtgacagttcttcacgacc

SEQ ID NO: 7484 - DNA, 20 bp, synthetic construct
  source 1..20: mol_type = other DNA
gttccagcgactacctaagt

SEQ ID NO: 7485 - DNA, 20 bp, synthetic construct
  source 1..20: mol_type = other DNA
gtcggcatgagaccattgcg

SEQ ID NO: 7486 - DNA, 20 bp, synthetic construct
  source 1..20: mol_type = other DNA
tcagatagagcttatcgatc

SEQ ID NO: 7487 - DNA, 20 bp, synthetic construct
  source 1..20: mol_type = other DNA
tctctctataagacccagga

SEQ ID NO: 7488 - DNA, 20 bp, synthetic construct
  source 1..20: mol_type = other DNA
ggtatgtctggactacatag

SEQ ID NO: 7489 - DNA, 20 bp, synthetic construct
  source 1..20: mol_type = other DNA
ctacatcatgacaggcaaat

SEQ ID NO: 7490 - DNA, 20 bp, synthetic construct
  source 1..20: mol_type = other DNA
tgatgagcttgttcgaccac

SEQ ID NO: 7491 - DNA, 20 bp, synthetic construct
  source 1..20: mol_type = other DNA
cacacgctccgaccgctcga

SEQ ID NO: 7492 - DNA, 20 bp, synthetic construct
  source 1..20: mol_type = other DNA
gagaaaggcccgtgctcttg

SEQ ID NO: 7493 - DNA, 20 bp, synthetic construct
  source 1..20: mol_type = other DNA
gctagaaaccagtaggtaca

SEQ ID NO: 7494 - DNA, 20 bp, synthetic construct
  source 1..20: mol_type = other DNA
ttccaatggcgatgtgtatg

SEQ ID NO: 7495 - DNA, 20 bp, synthetic construct
  source 1..20: mol_type = other DNA
cgtgctaggccgtagatacc

SEQ ID NO: 7496 - DNA, 20 bp, synthetic construct
  source 1..20: mol_type = other DNA
gttccctgttatgctagcag

SEQ ID NO: 7497 - DNA, 20 bp, synthetic construct
  source 1..20: mol_type = other DNA
ccgagggctgataaagagat

SEQ ID NO: 7498 - DNA, 20 bp, synthetic construct
  source 1..20: mol_type = other DNA
tggcgctcaaagctaaacta

SEQ ID NO: 7499 - DNA, 20 bp, synthetic construct
  source 1..20: mol_type = other DNA
atcctaggacctaaggcctg

SEQ ID NO: 7500 - DNA, 20 bp, synthetic construct
  source 1..20: mol_type = other DNA
cgaaatacgcgagcctaagg

SEQ ID NO: 7501 - DNA, 20 bp, synthetic construct
  source 1..20: mol_type = other DNA
ctgttgaacgagatactggg

SEQ ID NO: 7502 - DNA, 20 bp, synthetic construct
  source 1..20: mol_type = other DNA
gatttacgcagaaaccgagc

SEQ ID NO: 7503 - DNA, 20 bp, synthetic construct
  source 1..20: mol_type = other DNA
ggccttacctttccctgacc

SEQ ID NO: 7504 - DNA, 20 bp, synthetic construct
  source 1..20: mol_type = other DNA
ctgggcgcttctgtgatcct

SEQ ID NO: 7505 - DNA, 20 bp, synthetic construct
  source 1..20: mol_type = other DNA
taagattatggatgtgtgtc

SEQ ID NO: 7506 - DNA, 20 bp, synthetic construct
  source 1..20: mol_type = other DNA
gtctggtgacatcgtagtgg

SEQ ID NO: 7507 - DNA, 20 bp, synthetic construct
  source 1..20: mol_type = other DNA
aggtccgggtgataggccat

SEQ ID NO: 7508 - DNA, 20 bp, synthetic construct
  source 1..20: mol_type = other DNA
agaccgtagtatccatatcg

SEQ ID NO: 7509 - DNA, 20 bp, synthetic construct
  source 1..20: mol_type = other DNA
gtgaactgccaccgtttatc

SEQ ID NO: 7510 - DNA, 20 bp, synthetic construct
  source 1..20: mol_type = other DNA
tgttaatagcacagctatag

SEQ ID NO: 7511 - DNA, 20 bp, synthetic construct
  source 1..20: mol_type = other DNA
ctggacttcgctgtcgccaa

SEQ ID NO: 7512 - DNA, 20 bp, synthetic construct
  source 1..20: mol_type = other DNA
ttctgggccgaagctcacca

SEQ ID NO: 7513 - DNA, 20 bp, synthetic construct
  source 1..20: mol_type = other DNA
atttgctccaaagaaaccac

SEQ ID NO: 7514 - DNA, 20 bp, synthetic construct
  source 1..20: mol_type = other DNA
ccgactactccgtgctctcc

SEQ ID NO: 7515 - DNA, 20 bp, synthetic construct
  source 1..20: mol_type = other DNA
tcttcgggcctgacgtatct

SEQ ID NO: 7516 - DNA, 20 bp, synthetic construct
  source 1..20: mol_type = other DNA
cgcaccttctttgtgttgac

SEQ ID NO: 7517 - DNA, 20 bp, synthetic construct
  source 1..20: mol_type = other DNA
gggcatcttgtaaggtgatc

SEQ ID NO: 7518 - DNA, 20 bp, synthetic construct
  source 1..20: mol_type = other DNA
gttcagccacctatcttgcg

SEQ ID NO: 7519 - DNA, 20 bp, synthetic construct
  source 1..20: mol_type = other DNA
ggttcgaaataatgcggaga

SEQ ID NO: 7520 - DNA, 20 bp, synthetic construct
  source 1..20: mol_type = other DNA
aggctctactctaaagtggg

SEQ ID NO: 7521 - DNA, 20 bp, synthetic construct
  source 1..20: mol_type = other DNA
aactcaggccttgcgcccac

SEQ ID NO: 7522 - DNA, 20 bp, synthetic construct
  source 1..20: mol_type = other DNA
ttataagaatcggaggcggg

SEQ ID NO: 7523 - DNA, 20 bp, synthetic construct
  source 1..20: mol_type = other DNA
ttagacacttgagtaagttg

SEQ ID NO: 7524 - DNA, 20 bp, synthetic construct
  source 1..20: mol_type = other DNA
aagtactgttaagttagcca

SEQ ID NO: 7525 - DNA, 20 bp, synthetic construct
  source 1..20: mol_type = other DNA
gcccatgagatcgtgcgaat

SEQ ID NO: 7526 - DNA, 20 bp, synthetic construct
  source 1..20: mol_type = other DNA
gtccacgactaaatcccaag

SEQ ID NO: 7527 - DNA, 20 bp, synthetic construct
  source 1..20: mol_type = other DNA
cgctggcatgccttagttgt

SEQ ID NO: 7528 - DNA, 20 bp, synthetic construct
  source 1..20: mol_type = other DNA
ccacgcataaagtggccatc

SEQ ID NO: 7529 - DNA, 20 bp, synthetic construct
  source 1..20: mol_type = other DNA
ttcagatgaaccacctaacg

SEQ ID NO: 7530 - DNA, 20 bp, synthetic construct
  source 1..20: mol_type = other DNA
tcagtcctgttgttgcagtg

SEQ ID NO: 7531 - DNA, 20 bp, synthetic construct
  source 1..20: mol_type = other DNA
gttggcgtgaatgaggtgta

SEQ ID NO: 7532 - DNA, 20 bp, synthetic construct
  source 1..20: mol_type = other DNA
gggaccacctagccagagac

SEQ ID NO: 7533 - DNA, 20 bp, synthetic construct
  source 1..20: mol_type = other DNA
tgcgatcataacggatactt

SEQ ID NO: 7534 - DNA, 20 bp, synthetic construct
  source 1..20: mol_type = other DNA
aaattagggtcgtgtgtaga

SEQ ID NO: 7535 - DNA, 20 bp, synthetic construct
  source 1..20: mol_type = other DNA
atttagagcgtgcgcagagt

SEQ ID NO: 7536 - DNA, 20 bp, synthetic construct
  source 1..20: mol_type = other DNA
tggcgctgtcgtctcttcac

SEQ ID NO: 7537 - DNA, 20 bp, synthetic construct
  source 1..20: mol_type = other DNA
gcgacaattctttgaatcta

SEQ ID NO: 7538 - DNA, 20 bp, synthetic construct
  source 1..20: mol_type = other DNA
gctgtctcgcactaacggca

SEQ ID NO: 7539 - DNA, 20 bp, synthetic construct
  source 1..20: mol_type = other DNA
tggactgacttatttccagg

SEQ ID NO: 7540 - DNA, 20 bp, synthetic construct
  source 1..20: mol_type = other DNA
ctcgcgcaataattgtcatc

SEQ ID NO: 7541 - DNA, 20 bp, synthetic construct
  source 1..20: mol_type = other DNA
aaccttgatagcagtgaatc

SEQ ID NO: 7542 - DNA, 20 bp, synthetic construct
  source 1..20: mol_type = other DNA
ccagaaagcaaggttcgtac

SEQ ID NO: 7543 - DNA, 20 bp, synthetic construct
  source 1..20: mol_type = other DNA
cagatccagttgctgatcgg

SEQ ID NO: 7544 - DNA, 20 bp, synthetic construct
  source 1..20: mol_type = other DNA
cagcgacgtcgtggactcct

SEQ ID NO: 7545 - DNA, 20 bp, synthetic construct
  source 1..20: mol_type = other DNA
gttcgtgcggtcggcttgtg

SEQ ID NO: 7546 - DNA, 20 bp, synthetic construct
  source 1..20: mol_type = other DNA
tggcatagtggagaggacat

SEQ ID NO: 7547 - DNA, 20 bp, synthetic construct
  source 1..20: mol_type = other DNA
acaagatttggttggactgc

SEQ ID NO: 7548 - DNA, 20 bp, synthetic construct
  source 1..20: mol_type = other DNA
acatcgagttagtagtaact

SEQ ID NO: 7549 - DNA, 20 bp, synthetic construct
  source 1..20: mol_type = other DNA
tggaaacacggcaacttagc

SEQ ID NO: 7550 - DNA, 20 bp, synthetic construct
  source 1..20: mol_type = other DNA
tgcacgtgcaggacggccta

SEQ ID NO: 7551 - DNA, 20 bp, synthetic construct
  source 1..20: mol_type = other DNA
ttggacaagtcctgtgtctt

SEQ ID NO: 7552 - DNA, 20 bp, synthetic construct
  source 1..20: mol_type = other DNA
tgcatgtgccggatttcgta

SEQ ID NO: 7553 - DNA, 20 bp, synthetic construct
  source 1..20: mol_type = other DNA
gctgaagtactcaagtttat

SEQ ID NO: 7554 - DNA, 20 bp, synthetic construct
  source 1..20: mol_type = other DNA
attccgcactactatatacc

SEQ ID NO: 7555 - DNA, 20 bp, synthetic construct
  source 1..20: mol_type = other DNA
aagcgtagcaccatctcgac

SEQ ID NO: 7556 - DNA, 20 bp, synthetic construct
  source 1..20: mol_type = other DNA
cgtcgagatagtttacaaat

SEQ ID NO: 7557 - DNA, 20 bp, synthetic construct
  source 1..20: mol_type = other DNA
tgcggacaattctccacaac

SEQ ID NO: 7558 - DNA, 20 bp, synthetic construct
  source 1..20: mol_type = other DNA
actcatacgcaacctgagcg

SEQ ID NO: 7559 - DNA, 20 bp, synthetic construct
  source 1..20: mol_type = other DNA
atagttggcgggcctgccta

SEQ ID NO: 7560 - DNA, 20 bp, synthetic construct
  source 1..20: mol_type = other DNA
gtctaagtcagttggcatag

SEQ ID NO: 7561 - DNA, 20 bp, synthetic construct
  source 1..20: mol_type = other DNA
ccgtcttcgcatctcctccc

SEQ ID NO: 7562 - DNA, 20 bp, synthetic construct
  source 1..20: mol_type = other DNA
ttgtactcccggactcagca

SEQ ID NO: 7563 - DNA, 20 bp, synthetic construct
  source 1..20: mol_type = other DNA
tagatggtgactctaactga

SEQ ID NO: 7564 - DNA, 20 bp, synthetic construct
  source 1..20: mol_type = other DNA
acggaatgtagcaccggact

SEQ ID NO: 7565 - DNA, 20 bp, synthetic construct
  source 1..20: mol_type = other DNA
ctgagcgactatctcaatgg

SEQ ID NO: 7566 - DNA, 20 bp, synthetic construct
  source 1..20: mol_type = other DNA
cactctgatgcacgttgaga

SEQ ID NO: 7567 - DNA, 20 bp, synthetic construct
  source 1..20: mol_type = other DNA
gtggctatgacgccagtgtg

SEQ ID NO: 7568 - DNA, 20 bp, synthetic construct
  source 1..20: mol_type = other DNA
atcatttcgcaacggatatt

SEQ ID NO: 7569 - DNA, 20 bp, synthetic construct
  source 1..20: mol_type = other DNA
tacgcgatctatatgattcc

SEQ ID NO: 7570 - DNA, 20 bp, synthetic construct
  source 1..20: mol_type = other DNA
agagacccatcgatacgtta

SEQ ID NO: 7571 - DNA, 20 bp, synthetic construct
  source 1..20: mol_type = other DNA
tgtttcatgtgcttggcacg

SEQ ID NO: 7572 - DNA, 20 bp, synthetic construct
  source 1..20: mol_type = other DNA
tctgaatggcttggagaggt

SEQ ID NO: 7573 - DNA, 20 bp, synthetic construct
  source 1..20: mol_type = other DNA
tgcagatccgggtgaaatgt

SEQ ID NO: 7574 - DNA, 20 bp, synthetic construct
  source 1..20: mol_type = other DNA
gcgggtgcactctatgtggt

SEQ ID NO: 7575 - DNA, 20 bp, synthetic construct
  source 1..20: mol_type = other DNA
ttctccctgccgctctgctc

SEQ ID NO: 7576 - DNA, 20 bp, synthetic construct
  source 1..20: mol_type = other DNA
agtactatgttgtccctaac

SEQ ID NO: 7577 - DNA, 20 bp, synthetic construct
  source 1..20: mol_type = other DNA
tgtaagtctcttccgtgggt

SEQ ID NO: 7578 - DNA, 20 bp, synthetic construct
  source 1..20: mol_type = other DNA
gtaccgtcggattaactccg

SEQ ID NO: 7579 - DNA, 20 bp, synthetic construct
  source 1..20: mol_type = other DNA
tggcattcgtcctcggtgtt

SEQ ID NO: 7580 - DNA, 20 bp, synthetic construct
  source 1..20: mol_type = other DNA
cttaagcgttccgccgtctc

SEQ ID NO: 7581 - DNA, 20 bp, synthetic construct
  source 1..20: mol_type = other DNA
gaaatgtgaggtatgtctag

SEQ ID NO: 7582 - DNA, 20 bp, synthetic construct
  source 1..20: mol_type = other DNA
gaggaatctcgtttcgatcg

SEQ ID NO: 7583 - DNA, 20 bp, synthetic construct
  source 1..20: mol_type = other DNA
ggaatacggacgcagcataa

SEQ ID NO: 7584 - DNA, 20 bp, synthetic construct
  source 1..20: mol_type = other DNA
tggaagatcgtcaagggaaa

SEQ ID NO: 7585 - DNA, 20 bp, synthetic construct
  source 1..20: mol_type = other DNA
ctatcgtaaagctgatttct

SEQ ID NO: 7586 - DNA, 20 bp, synthetic construct
  source 1..20: mol_type = other DNA
accacgtcgcgactcggaac

SEQ ID NO: 7587 - DNA, 20 bp, synthetic construct
  source 1..20: mol_type = other DNA
tgtcttcgcgactgattctt

SEQ ID NO: 7588 - DNA, 20 bp, synthetic construct
  source 1..20: mol_type = other DNA
acttaaactcgggataggac

SEQ ID NO: 7589 - DNA, 20 bp, synthetic construct
  source 1..20: mol_type = other DNA
gcgttccacagtcttagttc

SEQ ID NO: 7590 - DNA, 20 bp, synthetic construct
  source 1..20: mol_type = other DNA
tttgaaacggtggtcgcttg

SEQ ID NO: 7591 - DNA, 20 bp, synthetic construct
  source 1..20: mol_type = other DNA
acattgcccaccgggtgaac

SEQ ID NO: 7592 - DNA, 20 bp, synthetic construct
  source 1..20: mol_type = other DNA
tgcctccatctttggctatc

SEQ ID NO: 7593 - DNA, 20 bp, synthetic construct
  source 1..20: mol_type = other DNA
caactgcgccgcaaaccgtg

SEQ ID NO: 7594 - DNA, 20 bp, synthetic construct
  source 1..20: mol_type = other DNA
catgacgtgaagctactcca

SEQ ID NO: 7595 - DNA, 20 bp, synthetic construct
  source 1..20: mol_type = other DNA
gacccggagttaaactgcga

SEQ ID NO: 7596 - DNA, 20 bp, synthetic construct
  source 1..20: mol_type = other DNA
gtattcggcccaccacggac

SEQ ID NO: 7597 - DNA, 20 bp, synthetic construct
  source 1..20: mol_type = other DNA
cttcagatgtaaactgagcg

SEQ ID NO: 7598 - DNA, 20 bp, synthetic construct
  source 1..20: mol_type = other DNA
cgataccgtagggttcttgt

SEQ ID NO: 7599 - DNA, 20 bp, synthetic construct
  source 1..20: mol_type = other DNA
cttcttctgctgacccgttc

SEQ ID NO: 7600 - DNA, 20 bp, synthetic construct
  source 1..20: mol_type = other DNA
gatggtgagctggcacctca

SEQ ID NO: 7601 - DNA, 20 bp, synthetic construct
  source 1..20: mol_type = other DNA
acacgttgaatctttgaaat

SEQ ID NO: 7602 - DNA, 20 bp, synthetic construct
  source 1..20: mol_type = other DNA
gcataacgcgagtgcggctc

SEQ ID NO: 7603 - DNA, 20 bp, synthetic construct
  source 1..20: mol_type = other DNA
accgctaaatcgaacggtgc

SEQ ID NO: 7604 - DNA, 20 bp, synthetic construct
  source 1..20: mol_type = other DNA
aaacatcaaggtgtgagctc

SEQ ID NO: 7605 - DNA, 20 bp, synthetic construct
  source 1..20: mol_type = other DNA
cgggagataatagtgaggtt

SEQ ID NO: 7606 - DNA, 20 bp, synthetic construct
  source 1..20: mol_type = other DNA
acgactctacaggctggttg

SEQ ID NO: 7607 - DNA, 20 bp, synthetic construct
  source 1..20: mol_type = other DNA
cattacgcaaatccagtgga

SEQ ID NO: 7608 - DNA, 20 bp, synthetic construct
  source 1..20: mol_type = other DNA
gttagccagatttctatcac

SEQ ID NO: 7609 - DNA, 20 bp, synthetic construct
  source 1..20: mol_type = other DNA
agacgcggtctaagaaacgg

SEQ ID NO: 7610 - DNA, 20 bp, synthetic construct
  source 1..20: mol_type = other DNA
tatctgtcggcaatttcatg

SEQ ID NO: 7611 - DNA, 20 bp, synthetic construct
  source 1..20: mol_type = other DNA
tttgtagtcaatgtactggc

SEQ ID NO: 7612 - DNA, 20 bp, synthetic construct
  source 1..20: mol_type = other DNA
cgtgactgagataagcgcga

SEQ ID NO: 7613 - DNA, 20 bp, synthetic construct
  source 1..20: mol_type = other DNA
ttgaataaggcggcatcagc

SEQ ID NO: 7614 - DNA, 20 bp, synthetic construct
  source 1..20: mol_type = other DNA
actgtcgaattgttaggcac

SEQ ID NO: 7615 - DNA, 20 bp, synthetic construct
  source 1..20: mol_type = other DNA
cttaatgcattgtggtccgt

SEQ ID NO: 7616 - DNA, 20 bp, synthetic construct
  source 1..20: mol_type = other DNA
tggatcctgggatagcgtct

SEQ ID NO: 7617 - DNA, 20 bp, synthetic construct
  source 1..20: mol_type = other DNA
ctttctttacgcacattaat

SEQ ID NO: 7618 - DNA, 20 bp, synthetic construct
  source 1..20: mol_type = other DNA
ttaaatgtacacagccgtac

SEQ ID NO: 7619 - DNA, 20 bp, synthetic construct
  source 1..20: mol_type = other DNA
tttcaagcactaaggcacaa

SEQ ID NO: 7620 - DNA, 20 bp, synthetic construct
  source 1..20: mol_type = other DNA
cataagaaagggcgcgtgaa

SEQ ID NO: 7621 - DNA, 20 bp, synthetic construct
  source 1..20: mol_type = other DNA
actattctcaaagtccagat

SEQ ID NO: 7622 - DNA, 20 bp, synthetic construct
  source 1..20: mol_type = other DNA
ggcacaccgttacggaagga

SEQ ID NO: 7623 - DNA, 20 bp, synthetic construct
  source 1..20: mol_type = other DNA
ccgtgaactagcgcaatgta

SEQ ID NO: 7624 - DNA, 20 bp, synthetic construct
  source 1..20: mol_type = other DNA
tatctcaacccaccctgaat

SEQ ID NO: 7625 - DNA, 20 bp, synthetic construct
  source 1..20: mol_type = other DNA
tccgagacaatacttcagga

SEQ ID NO: 7626 - DNA, 20 bp, synthetic construct
  source 1..20: mol_type = other DNA
ttaaacgatttgaaactcgc

SEQ ID NO: 7627 - DNA, 20 bp, synthetic construct
  source 1..20: mol_type = other DNA
tagagcatcgggttagtcgc

SEQ ID NO: 7628 - DNA, 20 bp, synthetic construct
  source 1..20: mol_type = other DNA
gcaatacgtataagggtctt

SEQ ID NO: 7629 - DNA, 20 bp, synthetic construct
  source 1..20: mol_type = other DNA
taggaaggaggcgtgtttgg

SEQ ID NO: 7630 - DNA, 20 bp, synthetic construct
  source 1..20: mol_type = other DNA
ccaatcgatgtcgtaagcca

SEQ ID NO: 7631 - DNA, 20 bp, synthetic construct
  source 1..20: mol_type = other DNA
tagtcttcattcgggcgaaa

SEQ ID NO: 7632 - DNA, 20 bp, synthetic construct
  source 1..20: mol_type = other DNA
gttcgctggtacctctatcg

SEQ ID NO: 7633 - DNA, 20 bp, synthetic construct
  source 1..20: mol_type = other DNA
gggtgtacagcacgggataa

SEQ ID NO: 7634 - DNA, 20 bp, synthetic construct
  source 1..20: mol_type = other DNA
tgcgctgtccgatacactag

SEQ ID NO: 7635 - DNA, 20 bp, synthetic construct
  source 1..20: mol_type = other DNA
cgaagataaccttatcggct

SEQ ID NO: 7636 - DNA, 20 bp, synthetic construct
  source 1..20: mol_type = other DNA
tccatagctgcgtcaacgta

SEQ ID NO: 7637 - DNA, 20 bp, synthetic construct
  source 1..20: mol_type = other DNA
gacaagccaggaatagacgg

SEQ ID NO: 7638 - DNA, 20 bp, synthetic construct
  source 1..20: mol_type = other DNA
gaacgtagcggctacactac

SEQ ID NO: 7639 - DNA, 20 bp, synthetic construct
  source 1..20: mol_type = other DNA
gactgaaaccaatacattag

SEQ ID NO: 7640 - DNA, 20 bp, synthetic construct
  source 1..20: mol_type = other DNA
atgatttaggactagactct

SEQ ID NO: 7641 - DNA, 20 bp, synthetic construct
  source 1..20: mol_type = other DNA
ctcagctgatgtggatgctc

SEQ ID NO: 7642 - DNA, 20 bp, synthetic construct
  source 1..20: mol_type = other DNA
gacgtgtctgtggcacccgt

SEQ ID NO: 7643 - DNA, 20 bp, synthetic construct
  source 1..20: mol_type = other DNA
ctcgtggaccaaacggcaca

SEQ ID NO: 7644 - DNA, 20 bp, synthetic construct
  source 1..20: mol_type = other DNA
tccgtacaggctctgatacc

SEQ ID NO: 7645 - DNA, 20 bp, synthetic construct
  source 1..20: mol_type = other DNA
tacgtcgagcggagtacact

SEQ ID NO: 7646 - DNA, 20 bp, synthetic construct
  source 1..20: mol_type = other DNA
atctactaggcattgtagga

SEQ ID NO: 7647 - DNA, 20 bp, synthetic construct
  source 1..20: mol_type = other DNA
tcctaagttctgtagttcac

SEQ ID NO: 7648 - DNA, 20 bp, synthetic construct
  source 1..20: mol_type = other DNA
ataagaccgagtcctatgtt

SEQ ID NO: 7649 - DNA, 20 bp, synthetic construct
  source 1..20: mol_type = other DNA
atatctggcaatcgtatgtt

SEQ ID NO: 7650 - DNA, 20 bp, synthetic construct
  source 1..20: mol_type = other DNA
tatactgtccgcctcctttc

SEQ ID NO: 7651 - DNA, 20 bp, synthetic construct
  source 1..20: mol_type = other DNA
gaatatgccacgacgctatg

SEQ ID NO: 7652 - DNA, 20 bp, synthetic construct
  source 1..20: mol_type = other DNA
caagtagcaccgagctcgct

SEQ ID NO: 7653 - DNA, 20 bp, synthetic construct
  source 1..20: mol_type = other DNA
taactcatacttgttagtac

SEQ ID NO: 7654 - DNA, 20 bp, synthetic construct
  source 1..20: mol_type = other DNA
aacagggagcatcaagggcg

SEQ ID NO: 7655 - DNA, 20 bp, synthetic construct
  source 1..20: mol_type = other DNA
gaatggtcgtcccgaactcg

SEQ ID NO: 7656 - DNA, 20 bp, synthetic construct
  source 1..20: mol_type = other DNA
tagcttggacccttaagaca

SEQ ID NO: 7657 - DNA, 20 bp, synthetic construct
  source 1..20: mol_type = other DNA
aagtagctgccctcgttcgt

SEQ ID NO: 7658 - DNA, 20 bp, synthetic construct
  source 1..20: mol_type = other DNA
ctatctttcacgccgtcaca

SEQ ID NO: 7659 - DNA, 20 bp, synthetic construct
  source 1..20: mol_type = other DNA
gaagagctatccaaatggct

SEQ ID NO: 7660 - DNA, 20 bp, synthetic construct
  source 1..20: mol_type = other DNA
agtccctgattaggctgtag

SEQ ID NO: 7661 - DNA, 20 bp, synthetic construct
  source 1..20: mol_type = other DNA
atctagcaatctcaccctgt

SEQ ID NO: 7662 - DNA, 20 bp, synthetic construct
  source 1..20: mol_type = other DNA
cgcttcaatgagagtcactc

SEQ ID NO: 7663 - DNA, 20 bp, synthetic construct
  source 1..20: mol_type = other DNA
ttccactccacaagaaacgc

SEQ ID NO: 7664 - DNA, 20 bp, synthetic construct
  source 1..20: mol_type = other DNA
accagtgtggttagtaatgt

SEQ ID NO: 7665 - DNA, 20 bp, synthetic construct
  source 1..20: mol_type = other DNA
tcccagaaatgtgatactga

SEQ ID NO: 7666 - DNA, 20 bp, synthetic construct
  source 1..20: mol_type = other DNA
aaagttcgcgactcatactt

SEQ ID NO: 7667 - DNA, 20 bp, synthetic construct
  source 1..20: mol_type = other DNA
acaatccacaaaggttcacc

SEQ ID NO: 7668 - DNA, 20 bp, synthetic construct
  source 1..20: mol_type = other DNA
ctacgatcttgagctgcatt

SEQ ID NO: 7669 - DNA, 20 bp, synthetic construct
  source 1..20: mol_type = other DNA
agacggcgttcatgtttaga

SEQ ID NO: 7670 - DNA, 20 bp, synthetic construct
  source 1..20: mol_type = other DNA
agtgggtacataggttctga

SEQ ID NO: 7671 - DNA, 20 bp, synthetic construct
  source 1..20: mol_type = other DNA
cgacaaatacgacacacgca

SEQ ID NO: 7672 - DNA, 20 bp, synthetic construct
  source 1..20: mol_type = other DNA
ctcggatatgcaagctagtc

SEQ ID NO: 7673 - DNA, 20 bp, synthetic construct
  source 1..20: mol_type = other DNA
gaaggtgtattgcatgacaa

SEQ ID NO: 7674 - DNA, 20 bp, synthetic construct
  source 1..20: mol_type = other DNA
tcttcagcactatccctgtt

SEQ ID NO: 7675 - DNA, 20 bp, synthetic construct
  source 1..20: mol_type = other DNA
ctgatgacctacgtaaggaa

SEQ ID NO: 7676 - DNA, 20 bp, synthetic construct
  source 1..20: mol_type = other DNA
ggtataaattaggcctaaac

SEQ ID NO: 7677 - DNA, 20 bp, synthetic construct
  source 1..20: mol_type = other DNA
tcattccggacccttctacg

SEQ ID NO: 7678 - DNA, 20 bp, synthetic construct
  source 1..20: mol_type = other DNA
tcttacgtgtcttcattgtg

SEQ ID NO: 7679 - DNA, 20 bp, synthetic construct
  source 1..20: mol_type = other DNA
aagcatttcggagtaaacca

SEQ ID NO: 7680 - DNA, 20 bp, synthetic construct
  source 1..20: mol_type = other DNA
tcagctttcgccaaagattt

SEQ ID NO: 7681 - DNA, 20 bp, synthetic construct
  source 1..20: mol_type = other DNA
cactggatatagccctcaac

SEQ ID NO: 7682 - DNA, 20 bp, synthetic construct
  source 1..20: mol_type = other DNA
tctgttgaactgctttattg

SEQ ID NO: 7683 - DNA, 20 bp, synthetic construct
  source 1..20: mol_type = other DNA
gagtgaccagccactcgaat

SEQ ID NO: 7684 - DNA, 20 bp, synthetic construct
  source 1..20: mol_type = other DNA
tgaaagggtggtattcagca

SEQ ID NO: 7685 - DNA, 20 bp, synthetic construct
  source 1..20: mol_type = other DNA
taccgggtacagtagcagta

SEQ ID NO: 7686 - DNA, 20 bp, synthetic construct
  source 1..20: mol_type = other DNA
gaaacctgcgttacatcact

SEQ ID NO: 7687 - DNA, 20 bp, synthetic construct
  source 1..20: mol_type = other DNA
taggtggcctcgtatgacca

SEQ ID NO: 7688 - DNA, 20 bp, synthetic construct
  source 1..20: mol_type = other DNA
aagatgcaggcgagggcgag

SEQ ID NO: 7689 - DNA, 20 bp, synthetic construct
  source 1..20: mol_type = other DNA
tcggaccgccattctaatct

SEQ ID NO: 7690 - DNA, 20 bp, synthetic construct
  source 1..20: mol_type = other DNA
caggaaatgacaaatggaac

SEQ ID NO: 7691 - DNA, 20 bp, synthetic construct
  source 1..20: mol_type = other DNA
gagtcattgtttctgcctac

SEQ ID NO: 7692 - DNA, 20 bp, synthetic construct
  source 1..20: mol_type = other DNA
cctaccactaggcgttcacc

SEQ ID NO: 7693 - DNA, 20 bp, synthetic construct
  source 1..20: mol_type = other DNA
gtggtatcaagggccgaatc

SEQ ID NO: 7694 - DNA, 20 bp, synthetic construct
  source 1..20: mol_type = other DNA
tgaatagatggcctaagagc

SEQ ID NO: 7695 - DNA, 20 bp, synthetic construct
  source 1..20: mol_type = other DNA
tagacctatgataacacgtg

SEQ ID NO: 7696 - DNA, 20 bp, synthetic construct
  source 1..20: mol_type = other DNA
cctataacgttcgtaagatt

SEQ ID NO: 7697 - DNA, 20 bp, synthetic construct
  source 1..20: mol_type = other DNA
gtccgagagaatgtcgtcac

SEQ ID NO: 7698 - DNA, 20 bp, synthetic construct
  source 1..20: mol_type = other DNA
cttaggatccacagagcgcg

SEQ ID NO: 7699 - DNA, 20 bp, synthetic construct
  source 1..20: mol_type = other DNA
gaaacgactggaccatacca

SEQ ID NO: 7700 - DNA, 20 bp, synthetic construct
  source 1..20: mol_type = other DNA
cattgatgtacattccctcc

SEQ ID NO: 7701 - DNA, 20 bp, synthetic construct
  source 1..20: mol_type = other DNA
attcgcgcacatagggatgt

SEQ ID NO: 7702 - DNA, 20 bp, synthetic construct
  source 1..20: mol_type = other DNA
ggccggtcgatcagctcttt

SEQ ID NO: 7703 - DNA, 20 bp, synthetic construct
  source 1..20: mol_type = other DNA
agcaattcgcgggtgggtgg

SEQ ID NO: 7704 - DNA, 20 bp, synthetic construct
  source 1..20: mol_type = other DNA
tcccaacagctgggattgga

SEQ ID NO: 7705 - DNA, 20 bp, synthetic construct
  source 1..20: mol_type = other DNA
actacgtctgcacgtagatt

SEQ ID NO: 7706 - DNA, 20 bp, synthetic construct
  source 1..20: mol_type = other DNA
atacggtaagaccgtagtgt

SEQ ID NO: 7707 - DNA, 20 bp, synthetic construct
  source 1..20: mol_type = other DNA
cagcgcgcccttccttaaga

SEQ ID NO: 7708 - DNA, 20 bp, synthetic construct
  source 1..20: mol_type = other DNA
cgaactgctcacgagtcgat

SEQ ID NO: 7709 - DNA, 20 bp, synthetic construct
  source 1..20: mol_type = other DNA
atttaatatctcccgcgtat

SEQ ID NO: 7710 - DNA, 20 bp, synthetic construct
  source 1..20: mol_type = other DNA
actttcaggtggatggtcaa

SEQ ID NO: 7711 - DNA, 20 bp, synthetic construct
  source 1..20: mol_type = other DNA
gcctttgcatccgaacggta

SEQ ID NO: 7712 - DNA, 20 bp, synthetic construct
  source 1..20: mol_type = other DNA
cttacaccacacacgagtct

SEQ ID NO: 7713 - DNA, 20 bp, synthetic construct
  source 1..20: mol_type = other DNA
cggattctgaggcgatgaaa

SEQ ID NO: 7714 - DNA, 20 bp, synthetic construct
  source 1..20: mol_type = other DNA
cgctaaacggtttcagatcg

SEQ ID NO: 7715 - DNA, 20 bp, synthetic construct
  source 1..20: mol_type = other DNA
acgccgaaagatgctccagg

SEQ ID NO: 7716 - DNA, 20 bp, synthetic construct
  source 1..20: mol_type = other DNA
cgcggatgtgccattcacta

SEQ ID NO: 7717 - DNA, 20 bp, synthetic construct
  source 1..20: mol_type = other DNA
atgtgctatcctgagatccc

SEQ ID NO: 7718 - DNA, 20 bp, synthetic construct
  source 1..20: mol_type = other DNA
cccgcaaatctcggcttgac

SEQ ID NO: 7719 - DNA, 20 bp, synthetic construct
  source 1..20: mol_type = other DNA
gtcctctaatgtactagctg

SEQ ID NO: 7720 - DNA, 20 bp, synthetic construct
  source 1..20: mol_type = other DNA
ttagcggcaacctacctgaa

SEQ ID NO: 7721 - DNA, 20 bp, synthetic construct
  source 1..20: mol_type = other DNA
gcttagcgcatacgtgcgat

SEQ ID NO: 7722 - DNA, 20 bp, synthetic construct
  source 1..20: mol_type = other DNA
agtcttatcacgaccacggg

SEQ ID NO: 7723 - DNA, 20 bp, synthetic construct
  source 1..20: mol_type = other DNA
gtcggtttgatagtacctcc

SEQ ID NO: 7724 - DNA, 20 bp, synthetic construct
  source 1..20: mol_type = other DNA
gtccatctttgaacatgggt

SEQ ID NO: 7725 - DNA, 20 bp, synthetic construct
  source 1..20: mol_type = other DNA
gtgaagtgtcctgacctaaa

SEQ ID NO: 7726 - DNA, 20 bp, synthetic construct
  source 1..20: mol_type = other DNA
acagcgctcccagtcttgag

SEQ ID NO: 7727 - DNA, 20 bp, synthetic construct
  source 1..20: mol_type = other DNA
atagcgccgaacaatcatgt

SEQ ID NO: 7728 - DNA, 20 bp, synthetic construct
  source 1..20: mol_type = other DNA
taattcggtcaatcaccgat

SEQ ID NO: 7729 - DNA, 20 bp, synthetic construct
  source 1..20: mol_type = other DNA
aactgtacgctcaatgattt

SEQ ID NO: 7730 - DNA, 20 bp, synthetic construct
  source 1..20: mol_type = other DNA
tatgcgaccgccttgcacct

SEQ ID NO: 7731 - DNA, 20 bp, synthetic construct
  source 1..20: mol_type = other DNA
ccatccactatcacttgggc

SEQ ID NO: 7732 - DNA, 20 bp, synthetic construct
  source 1..20: mol_type = other DNA
acataagataagtgcttact

SEQ ID NO: 7733 - DNA, 20 bp, synthetic construct
  source 1..20: mol_type = other DNA
ggtcggcgcctgtgttaacg

SEQ ID NO: 7734 - DNA, 20 bp, synthetic construct
  source 1..20: mol_type = other DNA
cctatgtatccggaggcgaa

SEQ ID NO: 7735 - DNA, 20 bp, synthetic construct
  source 1..20: mol_type = other DNA
gtgatacgcccgtgagcgtc

SEQ ID NO: 7736 - DNA, 20 bp, synthetic construct
  source 1..20: mol_type = other DNA
tgaaccaccagagattctgg

SEQ ID NO: 7737 - DNA, 20 bp, synthetic construct
  source 1..20: mol_type = other DNA
tggtagcccttcggatcctc

SEQ ID NO: 7738 - DNA, 20 bp, synthetic construct
  source 1..20: mol_type = other DNA
gcctgaatttatctatcgtc

SEQ ID NO: 7739 - DNA, 20 bp, synthetic construct
  source 1..20: mol_type = other DNA
ccttgcaattgtgttggacg

SEQ ID NO: 7740 - DNA, 20 bp, synthetic construct
  source 1..20: mol_type = other DNA
ccgcatcttggctacaaccg

SEQ ID NO: 7741 - DNA, 20 bp, synthetic construct
  source 1..20: mol_type = other DNA
cacgcccacgtttcactaag

SEQ ID NO: 7742 - DNA, 20 bp, synthetic construct
  source 1..20: mol_type = other DNA
aaggaccaattccaatgtac

SEQ ID NO: 7743 - DNA, 20 bp, synthetic construct
  source 1..20: mol_type = other DNA
agctcctcacctacgagcgc

SEQ ID NO: 7744 - DNA, 20 bp, synthetic construct
  source 1..20: mol_type = other DNA
tgaagccgagatttgactag

SEQ ID NO: 7745 - DNA, 20 bp, synthetic construct
  source 1..20: mol_type = other DNA
atcataaagctagttgtacc

SEQ ID NO: 7746 - DNA, 20 bp, synthetic construct
  source 1..20: mol_type = other DNA
catactactttggatctact

SEQ ID NO: 7747 - DNA, 20 bp, synthetic construct
  source 1..20: mol_type = other DNA
taatcataagatactgcgca

SEQ ID NO: 7748 - DNA, 20 bp, synthetic construct
  source 1..20: mol_type = other DNA
gagacctaccggatggtagg

SEQ ID NO: 7749 - DNA, 20 bp, synthetic construct
  source 1..20: mol_type = other DNA
agggttgataagtctgatct

SEQ ID NO: 7750 - DNA, 20 bp, synthetic construct
  source 1..20: mol_type = other DNA
acgcatccgaaccattgcct

SEQ ID NO: 7751 - DNA, 20 bp, synthetic construct
  source 1..20: mol_type = other DNA
gcagcctacctgcttatgcc

SEQ ID NO: 7752 - DNA, 20 bp, synthetic construct
  source 1..20: mol_type = other DNA
tgcgcgacttgagaaaccgc

SEQ ID NO: 7753 - DNA, 20 bp, synthetic construct
  source 1..20: mol_type = other DNA
tagacaatatcctaagtgcc

SEQ ID NO: 7754 - DNA, 20 bp, synthetic construct
  source 1..20: mol_type = other DNA
ctgcatggctgtccggatgg

SEQ ID NO: 7755 - DNA, 20 bp, synthetic construct
  source 1..20: mol_type = other DNA
gatataagaggtaaccggct

SEQ ID NO: 7756 - DNA, 20 bp, synthetic construct
  source 1..20: mol_type = other DNA
cgtgctatttcctaacattg

SEQ ID NO: 7757 - DNA, 20 bp, synthetic construct
  source 1..20: mol_type = other DNA
acataagagcttgaggcacc

SEQ ID NO: 7758 - DNA, 20 bp, synthetic construct
  source 1..20: mol_type = other DNA
ggaagccggaaagaaggcgg

SEQ ID NO: 7759 - DNA, 20 bp, synthetic construct
  source 1..20: mol_type = other DNA
gacgatagtaacctggcgat

SEQ ID NO: 7760 - DNA, 20 bp, synthetic construct
  source 1..20: mol_type = other DNA
gtatcacagcgaacatcctg

SEQ ID NO: 7761 - DNA, 20 bp, synthetic construct
  source 1..20: mol_type = other DNA
tcacaattgagccctccatc

SEQ ID NO: 7762 - DNA, 20 bp, synthetic construct
  source 1..20: mol_type = other DNA
cggtggacgatcataaaggt

SEQ ID NO: 7763 - DNA, 20 bp, synthetic construct
  source 1..20: mol_type = other DNA
catgggaggtatgagaggcg

SEQ ID NO: 7764 - DNA, 20 bp, synthetic construct
  source 1..20: mol_type = other DNA
ggacgaaactcttccgccca

SEQ ID NO: 7765 - DNA, 20 bp, synthetic construct
  source 1..20: mol_type = other DNA
ccctactatggctaatgctt

SEQ ID NO: 7766 - DNA, 20 bp, synthetic construct
  source 1..20: mol_type = other DNA
cgcaagcgtctagctgctct

SEQ ID NO: 7767 - DNA, 20 bp, synthetic construct
  source 1..20: mol_type = other DNA
ttgatactctgttcttcagg

SEQ ID NO: 7768 - DNA, 20 bp, synthetic construct
  source 1..20: mol_type = other DNA
tgaaacagctagtcggcgat

SEQ ID NO: 7769 - DNA, 20 bp, synthetic construct
  source 1..20: mol_type = other DNA
tatcctgactcgataaccct

SEQ ID NO: 7770 - DNA, 20 bp, synthetic construct
  source 1..20: mol_type = other DNA
agatttgtgtccactggcct

SEQ ID NO: 7771 - DNA, 20 bp, synthetic construct
  source 1..20: mol_type = other DNA
ggcatgcagcacatatctct

SEQ ID NO: 7772 - DNA, 20 bp, synthetic construct
  source 1..20: mol_type = other DNA
gtaacgggatattacgcgag

SEQ ID NO: 7773 - DNA, 20 bp, synthetic construct
  source 1..20: mol_type = other DNA
ggacagacttaggtggtctc

SEQ ID NO: 7774 - DNA, 20 bp, synthetic construct
  source 1..20: mol_type = other DNA
ctacatgtcttccgactgtt

SEQ ID NO: 7775 - DNA, 20 bp, synthetic construct
  source 1..20: mol_type = other DNA
cgctatagtcgctgtcagat

SEQ ID NO: 7776 - DNA, 20 bp, synthetic construct
  source 1..20: mol_type = other DNA
catacgggctgacgtactaa

SEQ ID NO: 7777 - DNA, 20 bp, synthetic construct
  source 1..20: mol_type = other DNA
ggatcatactagcaacttca

SEQ ID NO: 7778 - DNA, 20 bp, synthetic construct
  source 1..20: mol_type = other DNA
caatggacaggtagggcgtt

SEQ ID NO: 7779 - DNA, 20 bp, synthetic construct
  source 1..20: mol_type = other DNA
ggaagagacttaaactgatg

SEQ ID NO: 7780 - DNA, 20 bp, synthetic construct
  source 1..20: mol_type = other DNA
aaatcgcggcggcttatccg

SEQ ID NO: 7781 - DNA, 20 bp, synthetic construct
  source 1..20: mol_type = other DNA
aatcctgtacttgtgcgccg

SEQ ID NO: 7782 - DNA, 20 bp, synthetic construct
  source 1..20: mol_type = other DNA
atgccggttaaatcctgtaa

SEQ ID NO: 7783 - DNA, 20 bp, synthetic construct
  source 1..20: mol_type = other DNA
tcggtgctattgtcatacgc

SEQ ID NO: 7784 - DNA, 20 bp, synthetic construct
  source 1..20: mol_type = other DNA
ctagtacctcggccttaaat

SEQ ID NO: 7785 - DNA, 20 bp, synthetic construct
  source 1..20: mol_type = other DNA
tacgaatccagcatacacga

SEQ ID NO: 7786 - DNA, 20 bp, synthetic construct
  source 1..20: mol_type = other DNA
cgcgccgttaacgcttgtga

SEQ ID NO: 7787 - DNA, 20 bp, synthetic construct
  source 1..20: mol_type = other DNA
tttggtgtagcgcaaattcg

SEQ ID NO: 7788 - DNA, 20 bp, synthetic construct
  source 1..20: mol_type = other DNA
gtataatacgaggtacctcg

SEQ ID NO: 7789 - DNA, 20 bp, synthetic construct
  source 1..20: mol_type = other DNA
actgagatgtaccagattac

SEQ ID NO: 7790 - DNA, 20 bp, synthetic construct
  source 1..20: mol_type = other DNA
tgatcacaattgcagcatca

SEQ ID NO: 7791 - DNA, 20 bp, synthetic construct
  source 1..20: mol_type = other DNA
gttcggtggtaagggcgcaa

SEQ ID NO: 7792 - DNA, 20 bp, synthetic construct
  source 1..20: mol_type = other DNA
ataggcgataagtggtcttg

SEQ ID NO: 7793 - DNA, 20 bp, synthetic construct
  source 1..20: mol_type = other DNA
tagggacgaggagatcacta

SEQ ID NO: 7794 - DNA, 20 bp, synthetic construct
  source 1..20: mol_type = other DNA
actgtgagtattgctacgtg

SEQ ID NO: 7795 - DNA, 20 bp, synthetic construct
  source 1..20: mol_type = other DNA
gccttggatgcgcaacaaat

SEQ ID NO: 7796 - DNA, 20 bp, synthetic construct
  source 1..20: mol_type = other DNA
gttctactcccaggtgatac

SEQ ID NO: 7797 - DNA, 20 bp, synthetic construct
  source 1..20: mol_type = other DNA
cctactacatccggtcacgc

SEQ ID NO: 7798 - DNA, 20 bp, synthetic construct
  source 1..20: mol_type = other DNA
ctcatatataaccggtccgt

SEQ ID NO: 7799 - DNA, 20 bp, synthetic construct
  source 1..20: mol_type = other DNA
gctccaaagtggtgcgcagt

SEQ ID NO: 7800 - DNA, 20 bp, synthetic construct
  source 1..20: mol_type = other DNA
cccgccaaatctccgatcag

SEQ ID NO: 7801 - DNA, 20 bp, synthetic construct
  source 1..20: mol_type = other DNA
tattgggcaagctactaaag

SEQ ID NO: 7802 - DNA, 20 bp, synthetic construct
  source 1..20: mol_type = other DNA
taggcatatcttaaggagga

SEQ ID NO: 7803 - DNA, 20 bp, synthetic construct
  source 1..20: mol_type = other DNA
tatcaactgcgtctgaggaa

SEQ ID NO: 7804 - DNA, 20 bp, synthetic construct
  source 1..20: mol_type = other DNA
tgctcgcagcttaacacccg

SEQ ID NO: 7805 - DNA, 20 bp, synthetic construct
  source 1..20: mol_type = other DNA
agattgtggtctttccttgg

SEQ ID NO: 7806 - DNA, 20 bp, synthetic construct
  source 1..20: mol_type = other DNA
aggcaaagggtccatccaac

SEQ ID NO: 7807 - DNA, 20 bp, synthetic construct
  source 1..20: mol_type = other DNA
aaggtcgctgttattctcag

SEQ ID NO: 7808 - DNA, 20 bp, synthetic construct
  source 1..20: mol_type = other DNA
gggtggatagatcttcgatg

SEQ ID NO: 7809 - DNA, 20 bp, synthetic construct
  source 1..20: mol_type = other DNA
atgagcctatgtagtcagat

SEQ ID NO: 7810 - DNA, 20 bp, synthetic construct
  source 1..20: mol_type = other DNA
ttggaataggcgattacaag

SEQ ID NO: 7811 - DNA, 20 bp, synthetic construct
  source 1..20: mol_type = other DNA
gcgagtacggctatcactac

SEQ ID NO: 7812 - DNA, 20 bp, synthetic construct
  source 1..20: mol_type = other DNA
atctggcgttgactggttaa

SEQ ID NO: 7813 - DNA, 20 bp, synthetic construct
  source 1..20: mol_type = other DNA
gattcttactcagtccacta

SEQ ID NO: 7814 - DNA, 20 bp, synthetic construct
  source 1..20: mol_type = other DNA
cgacgtttgatactacctta

SEQ ID NO: 7815 - DNA, 20 bp, synthetic construct
  source 1..20: mol_type = other DNA
cggcgatttgagagactttg

SEQ ID NO: 7816 - DNA, 20 bp, synthetic construct
  source 1..20: mol_type = other DNA
gagcatctatgcgattgtag

SEQ ID NO: 7817 - DNA, 20 bp, synthetic construct
  source 1..20: mol_type = other DNA
tgcaataaggatagggaggg

SEQ ID NO: 7818 - DNA, 20 bp, synthetic construct
  source 1..20: mol_type = other DNA
aagtgcccttagtctcttgc

SEQ ID NO: 7819 - DNA, 20 bp, synthetic construct
  source 1..20: mol_type = other DNA
ggttagataccgcccatggg

SEQ ID NO: 7820 - DNA, 20 bp, synthetic construct
  source 1..20: mol_type = other DNA
atctcattcaggcggagtaa

SEQ ID NO: 7821 - DNA, 20 bp, synthetic construct
  source 1..20: mol_type = other DNA
gtggaaggcccattcacagc

SEQ ID NO: 7822 - DNA, 20 bp, synthetic construct
  source 1..20: mol_type = other DNA
tggcccacaagatccattgc

SEQ ID NO: 7823 - DNA, 20 bp, synthetic construct
  source 1..20: mol_type = other DNA
tggaatcagccatcggactt

SEQ ID NO: 7824 - DNA, 20 bp, synthetic construct
  source 1..20: mol_type = other DNA
gtgcttgcatgtaccaggcg

SEQ ID NO: 7825 - DNA, 20 bp, synthetic construct
  source 1..20: mol_type = other DNA
tttgcgaatagctggagtat

SEQ ID NO: 7826 - DNA, 20 bp, synthetic construct
  source 1..20: mol_type = other DNA
tcgacgccactctaacgacg

SEQ ID NO: 7827 - DNA, 20 bp, synthetic construct
  source 1..20: mol_type = other DNA
accgtcgggcaactatgggc

SEQ ID NO: 7828 - DNA, 20 bp, synthetic construct
  source 1..20: mol_type = other DNA
gttcggagcacagactatag

SEQ ID NO: 7829 - DNA, 20 bp, synthetic construct
  source 1..20: mol_type = other DNA
atatagctgttattcagccg

SEQ ID NO: 7830 - DNA, 20 bp, synthetic construct
  source 1..20: mol_type = other DNA
cgaacgtaccgcaagcgagt

SEQ ID NO: 7831 - DNA, 20 bp, synthetic construct
  source 1..20: mol_type = other DNA
gatttctcccttcacaatat

SEQ ID NO: 7832 - DNA, 20 bp, synthetic construct
  source 1..20: mol_type = other DNA
ctaatggtcttcactgctta

SEQ ID NO: 7833 - DNA, 20 bp, synthetic construct
  source 1..20: mol_type = other DNA
tcgggacactttggtgtggt

SEQ ID NO: 7834 - DNA, 20 bp, synthetic construct
  source 1..20: mol_type = other DNA
ggtgtggcatgcatagattc

SEQ ID NO: 7835 - DNA, 20 bp, synthetic construct
  source 1..20: mol_type = other DNA
tggaatcgaatctgggcggc

SEQ ID NO: 7836 - DNA, 20 bp, synthetic construct
  source 1..20: mol_type = other DNA
attaatgctcagtgagctct

SEQ ID NO: 7837 - DNA, 20 bp, synthetic construct
  source 1..20: mol_type = other DNA
cgccgtcgaaccagatctaa

SEQ ID NO: 7838 - DNA, 20 bp, synthetic construct
  source 1..20: mol_type = other DNA
gacacagtgaatggcgagtg

SEQ ID NO: 7839 - DNA, 20 bp, synthetic construct
  source 1..20: mol_type = other DNA
tgccatttccatgatcgaga

SEQ ID NO: 7840 - DNA, 20 bp, synthetic construct
  source 1..20: mol_type = other DNA
acgagtcttatacatcctgg

SEQ ID NO: 7841 - DNA, 20 bp, synthetic construct
  source 1..20: mol_type = other DNA
acttcaattcgaatcgccat

SEQ ID NO: 7842 - DNA, 20 bp, synthetic construct
  source 1..20: mol_type = other DNA
tgataccctttggcatccgc

SEQ ID NO: 7843 - DNA, 20 bp, synthetic construct
  source 1..20: mol_type = other DNA
accacctctgcggtttgtat

SEQ ID NO: 7844 - DNA, 20 bp, synthetic construct
  source 1..20: mol_type = other DNA
aagggtagaacgcaaacgtc

SEQ ID NO: 7845 - DNA, 20 bp, synthetic construct
  source 1..20: mol_type = other DNA
gggcctaagctatggttcag

SEQ ID NO: 7846 - DNA, 20 bp, synthetic construct
  source 1..20: mol_type = other DNA
tacatagcatcggtcgtttg

SEQ ID NO: 7847 - DNA, 20 bp, synthetic construct
  source 1..20: mol_type = other DNA
tacggcatgtacggcttaaa

SEQ ID NO: 7848 - DNA, 20 bp, synthetic construct
  source 1..20: mol_type = other DNA
ctacgcagcactgcctctct

SEQ ID NO: 7849 - DNA, 20 bp, synthetic construct
  source 1..20: mol_type = other DNA
tgggcgcctatcttagagca

SEQ ID NO: 7850 - DNA, 20 bp, synthetic construct
  source 1..20: mol_type = other DNA
cgtttaactcccacccgacg

SEQ ID NO: 7851 - DNA, 20 bp, synthetic construct
  source 1..20: mol_type = other DNA
cccggatgacttgcgcgcat

SEQ ID NO: 7852 - DNA, 20 bp, synthetic construct
  source 1..20: mol_type = other DNA
gtgtcaagggaaagtttcgt

SEQ ID NO: 7853 - DNA, 20 bp, synthetic construct
  source 1..20: mol_type = other DNA
cgaatctcaaacatctatta

SEQ ID NO: 7854 - DNA, 20 bp, synthetic construct
  source 1..20: mol_type = other DNA
cgttggtcgtcggcaataat

SEQ ID NO: 7855 - DNA, 20 bp, synthetic construct
  source 1..20: mol_type = other DNA
aatcatgacgtgaccagtta

SEQ ID NO: 7856 - DNA, 20 bp, synthetic construct
  source 1..20: mol_type = other DNA
agtagcagtgcttacggcgc

SEQ ID NO: 7857 - DNA, 20 bp, synthetic construct
  source 1..20: mol_type = other DNA
tcatacagtaggactgtacc

SEQ ID NO: 7858 - DNA, 20 bp, synthetic construct
  source 1..20: mol_type = other DNA
aagcccgagccagtacaact

SEQ ID NO: 7859 - DNA, 20 bp, synthetic construct
  source 1..20: mol_type = other DNA
tctcgcttgctgtcatcagg

SEQ ID NO: 7860 - DNA, 20 bp, synthetic construct
  source 1..20: mol_type = other DNA
ttggacgacgggctcttcaa

SEQ ID NO: 7861 - DNA, 20 bp, synthetic construct
  source 1..20: mol_type = other DNA
ccattgaagggtgggacact

SEQ ID NO: 7862 - DNA, 20 bp, synthetic construct
  source 1..20: mol_type = other DNA
gattcgatttaccattgtgt

SEQ ID NO: 7863 - DNA, 20 bp, synthetic construct
  source 1..20: mol_type = other DNA
cctgaatctgctggtataag

SEQ ID NO: 7864 - DNA, 20 bp, synthetic construct
  source 1..20: mol_type = other DNA
acaaccttgtgcaccgagaa

SEQ ID NO: 7865 - DNA, 20 bp, synthetic construct
  source 1..20: mol_type = other DNA
attcctgacgtagtactatc

SEQ ID NO: 7866 - DNA, 20 bp, synthetic construct
  source 1..20: mol_type = other DNA
acacctgctattctcagatt

SEQ ID NO: 7867 - DNA, 20 bp, synthetic construct
  source 1..20: mol_type = other DNA
ccgccttattaatagctgct

SEQ ID NO: 7868 - DNA, 20 bp, synthetic construct
  source 1..20: mol_type = other DNA
gccgagtttactcccggacc

SEQ ID NO: 7869 - DNA, 20 bp, synthetic construct
  source 1..20: mol_type = other DNA
ctcaatggttcgactctact

SEQ ID NO: 7870 - DNA, 20 bp, synthetic construct
  source 1..20: mol_type = other DNA
agaggatttcacttcaggcc

SEQ ID NO: 7871 - DNA, 20 bp, synthetic construct
  source 1..20: mol_type = other DNA
gcctcgttgttctagcccga

SEQ ID NO: 7872 - DNA, 20 bp, synthetic construct
  source 1..20: mol_type = other DNA
ccttggaacattcctgccag

SEQ ID NO: 7873 - DNA, 20 bp, synthetic construct
  source 1..20: mol_type = other DNA
tgtcggtcgttgaccattat

SEQ ID NO: 7874 - DNA, 20 bp, synthetic construct
  source 1..20: mol_type = other DNA
tcctgtggcgagtccgtctg

SEQ ID NO: 7875 - DNA, 20 bp, synthetic construct
  source 1..20: mol_type = other DNA
actgatctagggaccctatg

SEQ ID NO: 7876 - DNA, 20 bp, synthetic construct
  source 1..20: mol_type = other DNA
tgctaccttgctctcatagg

SEQ ID NO: 7877 - DNA, 20 bp, synthetic construct
  source 1..20: mol_type = other DNA
tgcccagataattacaatga

SEQ ID NO: 7878 - DNA, 20 bp, synthetic construct
  source 1..20: mol_type = other DNA
cgggtaaatgatagagccac

SEQ ID NO: 7879 - DNA, 20 bp, synthetic construct
  source 1..20: mol_type = other DNA
gagtatgccatcgcgcaggg

SEQ ID NO: 7880 - DNA, 20 bp, synthetic construct
  source 1..20: mol_type = other DNA
atgcggcgcactcatcgcag

SEQ ID NO: 7881 - DNA, 20 bp, synthetic construct
  source 1..20: mol_type = other DNA
taccgtcagaagaaagccca

SEQ ID NO: 7882 - DNA, 20 bp, synthetic construct
  source 1..20: mol_type = other DNA
gtctacgacatgaagatact

SEQ ID NO: 7883 - DNA, 20 bp, synthetic construct
  source 1..20: mol_type = other DNA
atacttagctaggttcagac

SEQ ID NO: 7884 - DNA, 20 bp, synthetic construct
  source 1..20: mol_type = other DNA
ctaatgtcacggtcatggta

SEQ ID NO: 7885 - DNA, 20 bp, synthetic construct
  source 1..20: mol_type = other DNA
ggtcggtagttggctcgtaa

SEQ ID NO: 7886 - DNA, 20 bp, synthetic construct
  source 1..20: mol_type = other DNA
cgcggatgccaatccctcta

SEQ ID NO: 7887 - DNA, 20 bp, synthetic construct
  source 1..20: mol_type = other DNA
tcagctatagcttgtgggta

SEQ ID NO: 7888 - DNA, 20 bp, synthetic construct
  source 1..20: mol_type = other DNA
gtcaactacctgatagggcc

SEQ ID NO: 7889 - DNA, 20 bp, synthetic construct
  source 1..20: mol_type = other DNA
gtgaatatgcctcgtgcgac

SEQ ID NO: 7890 - DNA, 20 bp, synthetic construct
  source 1..20: mol_type = other DNA
aagcgcagggaagtttggcc

SEQ ID NO: 7891 - DNA, 20 bp, synthetic construct
  source 1..20: mol_type = other DNA
tcgattaacagaatgaggca

SEQ ID NO: 7892 - DNA, 20 bp, synthetic construct
  source 1..20: mol_type = other DNA
tcaatggtctactccatcct

SEQ ID NO: 7893 - DNA, 20 bp, synthetic construct
  source 1..20: mol_type = other DNA
acaagcaaagccaatgctcc

SEQ ID NO: 7894 - DNA, 20 bp, synthetic construct
  source 1..20: mol_type = other DNA
catgaactgatcacaagggc

SEQ ID NO: 7895 - DNA, 20 bp, synthetic construct
  source 1..20: mol_type = other DNA
tcgttctgtcctgtcgtcgc

SEQ ID NO: 7896 - DNA, 20 bp, synthetic construct
  source 1..20: mol_type = other DNA
aaacacccttggtcttaata

SEQ ID NO: 7897 - DNA, 20 bp, synthetic construct
  source 1..20: mol_type = other DNA
atggtcctcattctcaccat

SEQ ID NO: 7898 - DNA, 20 bp, synthetic construct
  source 1..20: mol_type = other DNA
gatccagcgtgagccttctc

SEQ ID NO: 7899 - DNA, 20 bp, synthetic construct
  source 1..20: mol_type = other DNA
cctaattgtcgtgcataagc

SEQ ID NO: 7900 - DNA, 20 bp, synthetic construct
  source 1..20: mol_type = other DNA
ccggtagcaggtaggcttta

SEQ ID NO: 7901 - DNA, 20 bp, synthetic construct
  source 1..20: mol_type = other DNA
ttggtctaacatgggagtcc

SEQ ID NO: 7902 - DNA, 20 bp, synthetic construct
  source 1..20: mol_type = other DNA
gggcctgtgcattgtttaac

SEQ ID NO: 7903 - DNA, 20 bp, synthetic construct
  source 1..20: mol_type = other DNA
tgacaactgggcacataata

SEQ ID NO: 7904 - DNA, 20 bp, synthetic construct
  source 1..20: mol_type = other DNA
caaactcagattgtcccaag

SEQ ID NO: 7905 - DNA, 20 bp, synthetic construct
  source 1..20: mol_type = other DNA
tatgaggaactgtctaacag

SEQ ID NO: 7906 - DNA, 20 bp, synthetic construct
  source 1..20: mol_type = other DNA
caacctagtatatcatccta

SEQ ID NO: 7907 - DNA, 20 bp, synthetic construct
  source 1..20: mol_type = other DNA
actaatgacctttaccgagt

SEQ ID NO: 7908 - DNA, 20 bp, synthetic construct
  source 1..20: mol_type = other DNA
acgttaagacgcccacatta

SEQ ID NO: 7909 - DNA, 20 bp, synthetic construct
  source 1..20: mol_type = other DNA
gtcgcgttatgctctttgct

SEQ ID NO: 7910 - DNA, 20 bp, synthetic construct
  source 1..20: mol_type = other DNA
acggatactcctctccctct

SEQ ID NO: 7911 - DNA, 20 bp, synthetic construct
  source 1..20: mol_type = other DNA
tagaactttctcggaacttg

SEQ ID NO: 7912 - DNA, 20 bp, synthetic construct
  source 1..20: mol_type = other DNA
gcgttgaccgccattggatg

SEQ ID NO: 7913 - DNA, 20 bp, synthetic construct
  source 1..20: mol_type = other DNA
gggaacgctgtggataggat

SEQ ID NO: 7914 - DNA, 20 bp, synthetic construct
  source 1..20: mol_type = other DNA
tcattggtccttccagcttg

SEQ ID NO: 7915 - DNA, 20 bp, synthetic construct
  source 1..20: mol_type = other DNA
caatacgtgggtattccacc

SEQ ID NO: 7916 - DNA, 20 bp, synthetic construct
  source 1..20: mol_type = other DNA
ctcattgtttgggtctcatg

SEQ ID NO: 7917 - DNA, 20 bp, synthetic construct
  source 1..20: mol_type = other DNA
ccaggagtctttatacacgg

SEQ ID NO: 7918 - DNA, 20 bp, synthetic construct
  source 1..20: mol_type = other DNA
gtgcacagatgaagtgctaa

SEQ ID NO: 7919 - DNA, 20 bp, synthetic construct
  source 1..20: mol_type = other DNA
ttctacaactgtattacaac

SEQ ID NO: 7920 - DNA, 20 bp, synthetic construct
  source 1..20: mol_type = other DNA
agctgctccatggagttcag

SEQ ID NO: 7921 - DNA, 20 bp, synthetic construct
  source 1..20: mol_type = other DNA
atgaccagcggacagcccaa

SEQ ID NO: 7922 - DNA, 20 bp, synthetic construct
  source 1..20: mol_type = other DNA
tattatcgtggatttaggcc

SEQ ID NO: 7923 - DNA, 20 bp, synthetic construct
  source 1..20: mol_type = other DNA
tgagcctaagacttgggcat

SEQ ID NO: 7924 - DNA, 20 bp, synthetic construct
  source 1..20: mol_type = other DNA
caaatcccattatctggtag

SEQ ID NO: 7925 - DNA, 20 bp, synthetic construct
  source 1..20: mol_type = other DNA
ggtgcaccagttacgtctga

SEQ ID NO: 7926 - DNA, 20 bp, synthetic construct
  source 1..20: mol_type = other DNA
cactttagtgcccagccctg

SEQ ID NO: 7927 - DNA, 20 bp, synthetic construct
  source 1..20: mol_type = other DNA
tacgatggcagtagggtgtg

SEQ ID NO: 7928 - DNA, 20 bp, synthetic construct
  source 1..20: mol_type = other DNA
tcactgcgcccgtctaccct

SEQ ID NO: 7929 - DNA, 20 bp, synthetic construct
  source 1..20: mol_type = other DNA
aatgcttatcttccaccgga

SEQ ID NO: 7930 - DNA, 20 bp, synthetic construct
  source 1..20: mol_type = other DNA
agtcgtgtatcactttaagg

SEQ ID NO: 7931 - DNA, 20 bp, synthetic construct
  source 1..20: mol_type = other DNA
ggttggtggtgtcagaaacg

SEQ ID NO: 7932 - DNA, 20 bp, synthetic construct
  source 1..20: mol_type = other DNA
atgactgttatatagtctcg

SEQ ID NO: 7933 - DNA, 20 bp, synthetic construct
  source 1..20: mol_type = other DNA
gggattaatacgcgcgggta

SEQ ID NO: 7934 - DNA, 20 bp, synthetic construct
  source 1..20: mol_type = other DNA
tctccgcgttaatagttgag

SEQ ID NO: 7935 - DNA, 20 bp, synthetic construct
  source 1..20: mol_type = other DNA
gatcaccttattagtgtacg

SEQ ID NO: 7936 - DNA, 20 bp, synthetic construct
  source 1..20: mol_type = other DNA
gcatacactaaatacccgtt

SEQ ID NO: 7937 - DNA, 20 bp, synthetic construct
  source 1..20: mol_type = other DNA
cgtcgcacgaccttacgaaa

SEQ ID NO: 7938 - DNA, 20 bp, synthetic construct
  source 1..20: mol_type = other DNA
cgagatggaagtcttaatca

SEQ ID NO: 7939 - DNA, 20 bp, synthetic construct
  source 1..20: mol_type = other DNA
gatcttccagttcaagagcg

SEQ ID NO: 7940 - DNA, 20 bp, synthetic construct
  source 1..20: mol_type = other DNA
tggaacgtgttaatgccacg

SEQ ID NO: 7941 - DNA, 20 bp, synthetic construct
  source 1..20: mol_type = other DNA
gtccactgagacatcttact

SEQ ID NO: 7942 - DNA, 20 bp, synthetic construct
  source 1..20: mol_type = other DNA
gcgacgggctttggtgatcc

SEQ ID NO: 7943 - DNA, 20 bp, synthetic construct
  source 1..20: mol_type = other DNA
gtcagctcgcccgcattact

SEQ ID NO: 7944 - DNA, 20 bp, synthetic construct
  source 1..20: mol_type = other DNA
gccagtatgccagaactaat

SEQ ID NO: 7945 - DNA, 20 bp, synthetic construct
  source 1..20: mol_type = other DNA
cgagataggaacaaagagtg

SEQ ID NO: 7946 - DNA, 20 bp, synthetic construct
  source 1..20: mol_type = other DNA
cgtctcaggcgtaaacagac

SEQ ID NO: 7947 - DNA, 20 bp, synthetic construct
  source 1..20: mol_type = other DNA
tcgtatcggccgatattcgc

SEQ ID NO: 7948 - DNA, 20 bp, synthetic construct
  source 1..20: mol_type = other DNA
agcagcaaaggaactgctag

SEQ ID NO: 7949 - DNA, 20 bp, synthetic construct
  source 1..20: mol_type = other DNA
gtcagttcgccgtgagaaac

SEQ ID NO: 7950 - DNA, 20 bp, synthetic construct
  source 1..20: mol_type = other DNA
ctttccttgtcgggtactct

SEQ ID NO: 7951 - DNA, 20 bp, synthetic construct
  source 1..20: mol_type = other DNA
tccagaactccaagccgttt

SEQ ID NO: 7952 - DNA, 20 bp, synthetic construct
  source 1..20: mol_type = other DNA
cagatgagggcagcttcacc

SEQ ID NO: 7953 - DNA, 20 bp, synthetic construct
  source 1..20: mol_type = other DNA
agggcccgatagtaaagtct

SEQ ID NO: 7954 - DNA, 20 bp, synthetic construct
  source 1..20: mol_type = other DNA
attggtttcgaggaaagatc

SEQ ID NO: 7955 - DNA, 20 bp, synthetic construct
  source 1..20: mol_type = other DNA
atctctccaggagtaattgg

SEQ ID NO: 7956 - DNA, 20 bp, synthetic construct
  source 1..20: mol_type = other DNA
ggtgcattcgacaagcgcgt

SEQ ID NO: 7957 - DNA, 20 bp, synthetic construct
  source 1..20: mol_type = other DNA
cggacctagtaaagaggact

SEQ ID NO: 7958 - DNA, 20 bp, synthetic construct
  source 1..20: mol_type = other DNA
gggtctctcgggacctgtac

SEQ ID NO: 7959 - DNA, 20 bp, synthetic construct
  source 1..20: mol_type = other DNA
aatcttcctaaggtccgtat

SEQ ID NO: 7960 - DNA, 20 bp, synthetic construct
  source 1..20: mol_type = other DNA
taccgccggaatagaagggt

SEQ ID NO: 7961 - DNA, 20 bp, synthetic construct
  source 1..20: mol_type = other DNA
acgcgatctggagcgaacgc

SEQ ID NO: 7962 - DNA, 20 bp, synthetic construct
  source 1..20: mol_type = other DNA
ataacttcacccgagccctg

SEQ ID NO: 7963 - DNA, 20 bp, synthetic construct
  source 1..20: mol_type = other DNA
cactgagcgagaggagatgc

SEQ ID NO: 7964 - DNA, 20 bp, synthetic construct
  source 1..20: mol_type = other DNA
gatcctgcgcccgaactgga

SEQ ID NO: 7965 - DNA, 20 bp, synthetic construct
  source 1..20: mol_type = other DNA
tgcaagtaacgctgagtctt

SEQ ID NO: 7966 - DNA, 20 bp, synthetic construct
  source 1..20: mol_type = other DNA
attattaatacaggaaccga

SEQ ID NO: 7967 - DNA, 20 bp, synthetic construct
  source 1..20: mol_type = other DNA
cctagcagagaccgtgattc

SEQ ID NO: 7968 - DNA, 20 bp, synthetic construct
  source 1..20: mol_type = other DNA
accaaacttggctggtattt

SEQ ID NO: 7969 - DNA, 20 bp, synthetic construct
  source 1..20: mol_type = other DNA
ttaagcggaagtcctgccta

SEQ ID NO: 7970 - DNA, 20 bp, synthetic construct
  source 1..20: mol_type = other DNA
taccgatttacgacacatga

SEQ ID NO: 7971 - DNA, 20 bp, synthetic construct
  source 1..20: mol_type = other DNA
ataactagccatgcctgttc

SEQ ID NO: 7972 - DNA, 20 bp, synthetic construct
  source 1..20: mol_type = other DNA
atttcacttggatagtcctc

SEQ ID NO: 7973 - DNA, 20 bp, synthetic construct
  source 1..20: mol_type = other DNA
catacgtacttagcaattag

SEQ ID NO: 7974 - DNA, 20 bp, synthetic construct
  source 1..20: mol_type = other DNA
agtatcgacctccgaggcac

SEQ ID NO: 7975 - DNA, 20 bp, synthetic construct
  source 1..20: mol_type = other DNA
cattgctctcggcagaccat

SEQ ID NO: 7976 - DNA, 20 bp, synthetic construct
  source 1..20: mol_type = other DNA
aacaaaggtaggctgagtgt

SEQ ID NO: 7977 - DNA, 20 bp, synthetic construct
  source 1..20: mol_type = other DNA
atccctctacccgccgctag

SEQ ID NO: 7978 - DNA, 20 bp, synthetic construct
  source 1..20: mol_type = other DNA
cacccaatcgcactgttcag

SEQ ID NO: 7979 - DNA, 20 bp, synthetic construct
  source 1..20: mol_type = other DNA
ggatcacgtcccgataaaga

SEQ ID NO: 7980 - DNA, 20 bp, synthetic construct
  source 1..20: mol_type = other DNA
taatggactgactacagaca

SEQ ID NO: 7981 - DNA, 20 bp, synthetic construct
  source 1..20: mol_type = other DNA
gtatcatcgcccggttcaca

SEQ ID NO: 7982 - DNA, 20 bp, synthetic construct
  source 1..20: mol_type = other DNA
ggcatatctttaatatctca

SEQ ID NO: 7983 - DNA, 20 bp, synthetic construct
  source 1..20: mol_type = other DNA
gtagtttctgtcagttcaaa

SEQ ID NO: 7984 - DNA, 20 bp, synthetic construct
  source 1..20: mol_type = other DNA
tcagactaagcgcagaggac

SEQ ID NO: 7985 - DNA, 20 bp, synthetic construct
  source 1..20: mol_type = other DNA
cgtataggcggtatgataag

SEQ ID NO: 7986 - DNA, 20 bp, synthetic construct
  source 1..20: mol_type = other DNA
tctcagctcctattatttgg

SEQ ID NO: 7987 - DNA, 20 bp, synthetic construct
  source 1..20: mol_type = other DNA
aggcaatgtgtgattggagg

SEQ ID NO: 7988 - DNA, 20 bp, synthetic construct
  source 1..20: mol_type = other DNA
gtgcgaacgttcagggttac

SEQ ID NO: 7989 - DNA, 20 bp, synthetic construct
  source 1..20: mol_type = other DNA
aagtatttagttccgtactt

SEQ ID NO: 7990 - DNA, 20 bp, synthetic construct
  source 1..20: mol_type = other DNA
gatcagctatatgctagaac

SEQ ID NO: 7991 - DNA, 20 bp, synthetic construct
  source 1..20: mol_type = other DNA
aagactacgaatatgaggtt

SEQ ID NO: 7992 - DNA, 20 bp, synthetic construct
  source 1..20: mol_type = other DNA
aaggtcgcgatctctctgtc

SEQ ID NO: 7993 - DNA, 20 bp, synthetic construct
  source 1..20: mol_type = other DNA
cactatgtatgctaccacct

SEQ ID NO: 7994 - DNA, 20 bp, synthetic construct
  source 1..20: mol_type = other DNA
gatgagatagcatacgcgct

SEQ ID NO: 7995 - DNA, 20 bp, synthetic construct
  source 1..20: mol_type = other DNA
agcgcgacttgtgaaacaat

SEQ ID NO: 7996 - DNA, 20 bp, synthetic construct
  source 1..20: mol_type = other DNA
gtcgtcaactaatcggcggt

SEQ ID NO: 7997 - DNA, 20 bp, synthetic construct
  source 1..20: mol_type = other DNA
ggagagagttctcttaatct

SEQ ID NO: 7998 - DNA, 20 bp, synthetic construct
  source 1..20: mol_type = other DNA
cgtcgcacgccctcaattaa

SEQ ID NO: 7999 - DNA, 20 bp, synthetic construct
  source 1..20: mol_type = other DNA
gatgacaatgaaagatagct

SEQ ID NO: 8000 - DNA, 20 bp, synthetic construct
  source 1..20: mol_type = other DNA
ccgctagattcgggcagcat

SEQ ID NO: 8001 - DNA, 20 bp, synthetic construct
  source 1..20: mol_type = other DNA
acggatccgtctcatgtaac

SEQ ID NO: 8002 - DNA, 20 bp, synthetic construct
  source 1..20: mol_type = other DNA
agaccggatgtcgaatcgaa

SEQ ID NO: 8003 - DNA, 20 bp, synthetic construct
  source 1..20: mol_type = other DNA
attcaggctatgcttatctc

SEQ ID NO: 8004 - DNA, 20 bp, synthetic construct
  source 1..20: mol_type = other DNA
tttcgaagtacgtgaggtga

SEQ ID NO: 8005 - DNA, 20 bp, synthetic construct
  source 1..20: mol_type = other DNA
tctgtccctctgttacgata

SEQ ID NO: 8006 - DNA, 20 bp, synthetic construct
  source 1..20: mol_type = other DNA
tgtcacacgattatacttga

SEQ ID NO: 8007 - DNA, 20 bp, synthetic construct
  source 1..20: mol_type = other DNA
cgggcctctttagcaaagtc

SEQ ID NO: 8008 - DNA, 20 bp, synthetic construct
  source 1..20: mol_type = other DNA
ccgaccaatccatggcagca

SEQ ID NO: 8009 - DNA, 20 bp, synthetic construct
  source 1..20: mol_type = other DNA
gtgcttgtagcagcggtaac

SEQ ID NO: 8010 - DNA, 20 bp, synthetic construct
  source 1..20: mol_type = other DNA
tgcactgctcggtttgttgt

SEQ ID NO: 8011 - DNA, 20 bp, synthetic construct
  source 1..20: mol_type = other DNA
aatgtgggcggtttgtcaat

SEQ ID NO: 8012 - DNA, 20 bp, synthetic construct
  source 1..20: mol_type = other DNA
tctcacaggtcataattcgt

SEQ ID NO: 8013 - DNA, 20 bp, synthetic construct
  source 1..20: mol_type = other DNA
cagcgcggtgagaccaaatg

SEQ ID NO: 8014 - DNA, 20 bp, synthetic construct
  source 1..20: mol_type = other DNA
ggttccagaggagcgagacc

SEQ ID NO: 8015 - DNA, 20 bp, synthetic construct
  source 1..20: mol_type = other DNA
gagtgcgaacataacgtggt

SEQ ID NO: 8016 - DNA, 20 bp, synthetic construct
  source 1..20: mol_type = other DNA
acgcatgcgatttctaatca

SEQ ID NO: 8017 - DNA, 20 bp, synthetic construct
  source 1..20: mol_type = other DNA
tggctgtttctccgtggctg

SEQ ID NO: 8018 - DNA, 20 bp, synthetic construct
  source 1..20: mol_type = other DNA
aattacttccgagacacaca

SEQ ID NO: 8019 - DNA, 20 bp, synthetic construct
  source 1..20: mol_type = other DNA
cgaatgacttacgctttaag

SEQ ID NO: 8020 - DNA, 20 bp, synthetic construct
  source 1..20: mol_type = other DNA
agaagtattggatcatggct

SEQ ID NO: 8021 - DNA, 20 bp, synthetic construct
  source 1..20: mol_type = other DNA
ggtaatagcaacaggaccag

SEQ ID NO: 8022 - DNA, 20 bp, synthetic construct
  source 1..20: mol_type = other DNA
cgttaaacggacctccctca

SEQ ID NO: 8023 - DNA, 20 bp, synthetic construct
  source 1..20: mol_type = other DNA
aaatgtaaggagggatcgat

SEQ ID NO: 8024 - DNA, 20 bp, synthetic construct
  source 1..20: mol_type = other DNA
ctctaaatcggccgagtact

SEQ ID NO: 8025 - DNA, 20 bp, synthetic construct
  source 1..20: mol_type = other DNA
ataacctctgctggagaggt

SEQ ID NO: 8026 - DNA, 20 bp, synthetic construct
  source 1..20: mol_type = other DNA
tagcgccgaagaacctccca

SEQ ID NO: 8027 - DNA, 20 bp, synthetic construct
  source 1..20: mol_type = other DNA
ccgtagctctactggcgttg

SEQ ID NO: 8028 - DNA, 20 bp, synthetic construct
  source 1..20: mol_type = other DNA
aagggatcttccactgatgt

SEQ ID NO: 8029 - DNA, 20 bp, synthetic construct
  source 1..20: mol_type = other DNA
agtcgtcccgtaggtgatga

SEQ ID NO: 8030 - DNA, 20 bp, synthetic construct
  source 1..20: mol_type = other DNA
acggaggtacacgcgctgat

SEQ ID NO: 8031 - DNA, 20 bp, synthetic construct
  source 1..20: mol_type = other DNA
caaaggattacaggttagtg

SEQ ID NO: 8032 - DNA, 20 bp, synthetic construct
  source 1..20: mol_type = other DNA
ggccctgacatcaaagtggg

SEQ ID NO: 8033 - DNA, 20 bp, synthetic construct
  source 1..20: mol_type = other DNA
gaggttgatgcgtgtgcaga

SEQ ID NO: 8034 - DNA, 20 bp, synthetic construct
  source 1..20: mol_type = other DNA
tctcccgtggcttgaggagc

SEQ ID NO: 8035 - DNA, 20 bp, synthetic construct
  source 1..20: mol_type = other DNA
ccacaggagtttgtcagctg

SEQ ID NO: 8036 - DNA, 20 bp, synthetic construct
  source 1..20: mol_type = other DNA
agatgcgacctaggtgaccg

SEQ ID NO: 8037 - DNA, 20 bp, synthetic construct
  source 1..20: mol_type = other DNA
gggaacgaaggacgactgcc

SEQ ID NO: 8038 - DNA, 20 bp, synthetic construct
  source 1..20: mol_type = other DNA
gttgtgccacgcctgctgct

SEQ ID NO: 8039 - DNA, 20 bp, synthetic construct
  source 1..20: mol_type = other DNA
cttatgcggcatcaacctga

SEQ ID NO: 8040 - DNA, 20 bp, synthetic construct
  source 1..20: mol_type = other DNA
taagactctaatgtagagcc

SEQ ID NO: 8041 - DNA, 20 bp, synthetic construct
  source 1..20: mol_type = other DNA
tagtagcaaacattcctttg

SEQ ID NO: 8042 - DNA, 20 bp, synthetic construct
  source 1..20: mol_type = other DNA
acacccatgtgcgtggcatt

SEQ ID NO: 8043 - DNA, 20 bp, synthetic construct
  source 1..20: mol_type = other DNA
cttgaggcgcttgacggtaa

SEQ ID NO: 8044 - DNA, 20 bp, synthetic construct
  source 1..20: mol_type = other DNA
ataattagtaccgcggcggg

SEQ ID NO: 8045 - DNA, 20 bp, synthetic construct
  source 1..20: mol_type = other DNA
gtagtcaccctcgaccggcc

SEQ ID NO: 8046 - DNA, 20 bp, synthetic construct
  source 1..20: mol_type = other DNA
tcgacccaacctgaccgatt

SEQ ID NO: 8047 - DNA, 20 bp, synthetic construct
  source 1..20: mol_type = other DNA
gtatccatgcagtagtcacc

SEQ ID NO: 8048 - DNA, 20 bp, synthetic construct
  source 1..20: mol_type = other DNA
aggaacaactcaacatggtt

SEQ ID NO: 8049 - DNA, 20 bp, synthetic construct
  source 1..20: mol_type = other DNA
tacgatccaggttcgtcgga

SEQ ID NO: 8050 - DNA, 20 bp, synthetic construct
  source 1..20: mol_type = other DNA
cgttgatacctaatagagat

SEQ ID NO: 8051 - DNA, 20 bp, synthetic construct
  source 1..20: mol_type = other DNA
cgtactgacaggttctgtaa

SEQ ID NO: 8052 - DNA, 20 bp, synthetic construct
  source 1..20: mol_type = other DNA
ctgcaaatctcttgtcgtat

SEQ ID NO: 8053 - DNA, 20 bp, synthetic construct
  source 1..20: mol_type = other DNA
ggacgccacggcatgatatt

SEQ ID NO: 8054 - DNA, 20 bp, synthetic construct
  source 1..20: mol_type = other DNA
cttggcaccgtttggctact

SEQ ID NO: 8055 - DNA, 20 bp, synthetic construct
  source 1..20: mol_type = other DNA
ctctatattaagacgaggaa

SEQ ID NO: 8056 - DNA, 20 bp, synthetic construct
  source 1..20: mol_type = other DNA
gccttctttgccttccgtgt

SEQ ID NO: 8057 - DNA, 20 bp, synthetic construct
  source 1..20: mol_type = other DNA
tcatgcgacaagttggcacg

SEQ ID NO: 8058 - DNA, 20 bp, synthetic construct
  source 1..20: mol_type = other DNA
tatctcgccattctcgggct

SEQ ID NO: 8059 - DNA, 20 bp, synthetic construct
  source 1..20: mol_type = other DNA
tgtgtcattctattcgtagg

SEQ ID NO: 8060 - DNA, 20 bp, synthetic construct
  source 1..20: mol_type = other DNA
atcaagatcgtctctcctgc

SEQ ID NO: 8061 - DNA, 20 bp, synthetic construct
  source 1..20: mol_type = other DNA
cgccatcgccggaaagtgac

SEQ ID NO: 8062 - DNA, 20 bp, synthetic construct
  source 1..20: mol_type = other DNA
acgagtggacgaatatcttc

SEQ ID NO: 8063 - DNA, 20 bp, synthetic construct
  source 1..20: mol_type = other DNA
ggctactgagatcccgcgga

SEQ ID NO: 8064 - DNA, 20 bp, synthetic construct
  source 1..20: mol_type = other DNA
ggtgccataaagcagctctt

SEQ ID NO: 8065 - DNA, 20 bp, synthetic construct
  source 1..20: mol_type = other DNA
gaacgtaacccgtcgtgaac

SEQ ID NO: 8066 - DNA, 20 bp, synthetic construct
  source 1..20: mol_type = other DNA
tcgtgtatgacaagggcgct

SEQ ID NO: 8067 - DNA, 20 bp, synthetic construct
  source 1..20: mol_type = other DNA
catcggtgagaaattgggaa

SEQ ID NO: 8068 - DNA, 20 bp, synthetic construct
  source 1..20: mol_type = other DNA
gtggcgttatcaggttacta

SEQ ID NO: 8069 - DNA, 20 bp, synthetic construct
  source 1..20: mol_type = other DNA
cggccgaaaggctcttagct

SEQ ID NO: 8070 - DNA, 20 bp, synthetic construct
  source 1..20: mol_type = other DNA
ataggcctgagggcatttac

SEQ ID NO: 8071 - DNA, 20 bp, synthetic construct
  source 1..20: mol_type = other DNA
gactggttacagtggtctct

SEQ ID NO: 8072 - DNA, 20 bp, synthetic construct
  source 1..20: mol_type = other DNA
ttcataacacctgcacccgg

SEQ ID NO: 8073 - DNA, 20 bp, synthetic construct
  source 1..20: mol_type = other DNA
taataggtactagcgtacgt

SEQ ID NO: 8074 - DNA, 20 bp, synthetic construct
  source 1..20: mol_type = other DNA
ttggtagtttgtcgtcatta

SEQ ID NO: 8075 - DNA, 20 bp, synthetic construct
  source 1..20: mol_type = other DNA
actccttgagccttctctgc

SEQ ID NO: 8076 - DNA, 20 bp, synthetic construct
  source 1..20: mol_type = other DNA
gattgcacctacttaatatt

SEQ ID NO: 8077 - DNA, 20 bp, synthetic construct
  source 1..20: mol_type = other DNA
ttctcatcatccgacaacat

SEQ ID NO: 8078 - DNA, 20 bp, synthetic construct
  source 1..20: mol_type = other DNA
gtgatacagaaactgcgcaa

SEQ ID NO: 8079 - DNA, 20 bp, synthetic construct
  source 1..20: mol_type = other DNA
ttaaccacgggaggctgttg

SEQ ID NO: 8080 - DNA, 20 bp, synthetic construct
  source 1..20: mol_type = other DNA
gtagctaaatgtgcttacaa

SEQ ID NO: 8081 - DNA, 20 bp, synthetic construct
  source 1..20: mol_type = other DNA
tttatgagatcagacgtgtg

SEQ ID NO: 8082 - DNA, 20 bp, synthetic construct
  source 1..20: mol_type = other DNA
cgcgtggatcgatggagtgc

SEQ ID NO: 8083 - DNA, 20 bp, synthetic construct
  source 1..20: mol_type = other DNA
gatgtaagcctttgacgcgc

SEQ ID NO: 8084 - DNA, 20 bp, synthetic construct
  source 1..20: mol_type = other DNA
attatatactcgggtccttg

SEQ ID NO: 8085 - DNA, 20 bp, synthetic construct
  source 1..20: mol_type = other DNA
ggcagtggtgctcacgagat

SEQ ID NO: 8086 - DNA, 20 bp, synthetic construct
  source 1..20: mol_type = other DNA
ggctgaagttcagtttcagc

SEQ ID NO: 8087 - DNA, 20 bp, synthetic construct
  source 1..20: mol_type = other DNA
gatctgtccgttaatgagcc

SEQ ID NO: 8088 - DNA, 20 bp, synthetic construct
  source 1..20: mol_type = other DNA
gaaccatagtaggcgcgagg

SEQ ID NO: 8089 - DNA, 20 bp, synthetic construct
  source 1..20: mol_type = other DNA
cagttcagcgtaggctattt

SEQ ID NO: 8090 - DNA, 20 bp, synthetic construct
  source 1..20: mol_type = other DNA
tttgttcctttgtcgcaatg

SEQ ID NO: 8091 - DNA, 20 bp, synthetic construct
  source 1..20: mol_type = other DNA
ccggactaccaacctataac

SEQ ID NO: 8092 - DNA, 20 bp, synthetic construct
  source 1..20: mol_type = other DNA
gaggttacgcagagaacagg

SEQ ID NO: 8093 - DNA, 20 bp, synthetic construct
  source 1..20: mol_type = other DNA
agctgtagaccactaatact

SEQ ID NO: 8094 - DNA, 20 bp, synthetic construct
  source 1..20: mol_type = other DNA
tggacctactggttgctatc

SEQ ID NO: 8095 - DNA, 20 bp, synthetic construct
  source 1..20: mol_type = other DNA
cgaacatagatgcgcgctgg

SEQ ID NO: 8096 - DNA, 20 bp, synthetic construct
  source 1..20: mol_type = other DNA
actctacaagtaacctcgcg

SEQ ID NO: 8097 - DNA, 20 bp, synthetic construct
  source 1..20: mol_type = other DNA
acctactattcctctaggga

SEQ ID NO: 8098 - DNA, 20 bp, synthetic construct
  source 1..20: mol_type = other DNA
gccagtgggatctaccatct

SEQ ID NO: 8099 - DNA, 20 bp, synthetic construct
  source 1..20: mol_type = other DNA
ctaatttcttgggttggact

SEQ ID NO: 8100 - DNA, 20 bp, synthetic construct
  source 1..20: mol_type = other DNA
gtacaggctaggagggtcta

SEQ ID NO: 8101 - DNA, 20 bp, synthetic construct
  source 1..20: mol_type = other DNA
gattaccgcatacgccattt

SEQ ID NO: 8102 - DNA, 20 bp, synthetic construct
  source 1..20: mol_type = other DNA
gcacatagaagcctatagag

SEQ ID NO: 8103 - DNA, 20 bp, synthetic construct
  source 1..20: mol_type = other DNA
gagttagcccatatgaccac

SEQ ID NO: 8104 - DNA, 20 bp, synthetic construct
  source 1..20: mol_type = other DNA
acacactcttacacgatctc

SEQ ID NO: 8105 - DNA, 20 bp, synthetic construct
  source 1..20: mol_type = other DNA
taggtaccgcaccgacgctt

SEQ ID NO: 8106 - DNA, 20 bp, synthetic construct
  source 1..20: mol_type = other DNA
gagtctgccgtcgttctctc

SEQ ID NO: 8107 - DNA, 20 bp, synthetic construct
  source 1..20: mol_type = other DNA
tggagtattccacggttgaa

SEQ ID NO: 8108 - DNA, 20 bp, synthetic construct
  source 1..20: mol_type = other DNA
acatagatagtcccggtcta

SEQ ID NO: 8109 - DNA, 20 bp, synthetic construct
  source 1..20: mol_type = other DNA
agactactcggtatattgca

SEQ ID NO: 8110 - DNA, 20 bp, synthetic construct
  source 1..20: mol_type = other DNA
acttagagtagtatcagccg

SEQ ID NO: 8111 - DNA, 20 bp, synthetic construct
  source 1..20: mol_type = other DNA
tagacgcggctgcgccataa

SEQ ID NO: 8112 - DNA, 20 bp, synthetic construct
  source 1..20: mol_type = other DNA
aaactgcaacaacattgtcg

SEQ ID NO: 8113 - DNA, 20 bp, synthetic construct
  source 1..20: mol_type = other DNA
attaatatcctccatccgac

SEQ ID NO: 8114 - DNA, 20 bp, synthetic construct
  source 1..20: mol_type = other DNA
aaccatagctagtgccgcag

SEQ ID NO: 8115 - DNA, 20 bp, synthetic construct
  source 1..20: mol_type = other DNA
caattagcgtatccttagcg

SEQ ID NO: 8116 - DNA, 20 bp, synthetic construct
  source 1..20: mol_type = other DNA
cttacttggtagttctcagg

SEQ ID NO: 8117 - DNA, 20 bp, synthetic construct
  source 1..20: mol_type = other DNA
acttgagagaattagatcat

SEQ ID NO: 8118 - DNA, 20 bp, synthetic construct
  source 1..20: mol_type = other DNA
ttagcgctttatgcgtgttg

SEQ ID NO: 8119 - DNA, 20 bp, synthetic construct
  source 1..20: mol_type = other DNA
ccgctactggagcaacccat

SEQ ID NO: 8120 - DNA, 20 bp, synthetic construct
  source 1..20: mol_type = other DNA
gaaccctttaggtttgtatc

SEQ ID NO: 8121 - DNA, 20 bp, synthetic construct
  source 1..20: mol_type = other DNA
tcgggaagggactcacgctg

SEQ ID NO: 8122 - DNA, 20 bp, synthetic construct
  source 1..20: mol_type = other DNA
gcgtggtgttagccggcgta

SEQ ID NO: 8123 - DNA, 20 bp, synthetic construct
  source 1..20: mol_type = other DNA
ctcagtacgctactatttaa

SEQ ID NO: 8124 - DNA, 20 bp, synthetic construct
  source 1..20: mol_type = other DNA
tagtgattccaacagctatc

SEQ ID NO: 8125 - DNA, 20 bp, synthetic construct
  source 1..20: mol_type = other DNA
tatcaatagtctcagggcat

SEQ ID NO: 8126 - DNA, 20 bp, synthetic construct
  source 1..20: mol_type = other DNA
gtctcaaggtcaatgtgtgg

SEQ ID NO: 8127 - DNA, 20 bp, synthetic construct
  source 1..20: mol_type = other DNA
ccaccacatcagtattatgc

SEQ ID NO: 8128 - DNA, 20 bp, synthetic construct
  source 1..20: mol_type = other DNA
gaactgggcactaatgtgat

SEQ ID NO: 8129 - DNA, 20 bp, synthetic construct
  source 1..20: mol_type = other DNA
aggcagccgcagtattgatg

SEQ ID NO: 8130 - DNA, 20 bp, synthetic construct
  source 1..20: mol_type = other DNA
ttagacagctgcgcccacca

SEQ ID NO: 8131 - DNA, 20 bp, synthetic construct
  source 1..20: mol_type = other DNA
tcagggatgcccaggatcga

SEQ ID NO: 8132 - DNA, 20 bp, synthetic construct
  source 1..20: mol_type = other DNA
ctaaggacccgacgtgtcag

SEQ ID NO: 8133 - DNA, 20 bp, synthetic construct
  source 1..20: mol_type = other DNA
gttatctcccaacgtatcac

SEQ ID NO: 8134 - DNA, 20 bp, synthetic construct
  source 1..20: mol_type = other DNA
gcgcaatacttcagtatgtt

SEQ ID NO: 8135 - DNA, 20 bp, synthetic construct
  source 1..20: mol_type = other DNA
acatgaacacttgcacttgg

SEQ ID NO: 8136 - DNA, 20 bp, synthetic construct
  source 1..20: mol_type = other DNA
accagcacctgatggcagcg

SEQ ID NO: 8137 - DNA, 20 bp, synthetic construct
  source 1..20: mol_type = other DNA
agatttacctacctgacatg

SEQ ID NO: 8138 - DNA, 20 bp, synthetic construct
  source 1..20: mol_type = other DNA
atgttggtcgcacgcgatat

SEQ ID NO: 8139 - DNA, 20 bp, synthetic construct
  source 1..20: mol_type = other DNA
ggcgtccgagcttgacgaga

SEQ ID NO: 8140 - DNA, 20 bp, synthetic construct
  source 1..20: mol_type = other DNA
gagctctgtcgggcgagaaa

SEQ ID NO: 8141 - DNA, 20 bp, synthetic construct
  source 1..20: mol_type = other DNA
aacagatccagctgggagac

SEQ ID NO: 8142 - DNA, 20 bp, synthetic construct
  source 1..20: mol_type = other DNA
gatttcgtcacaacacgttg

SEQ ID NO: 8143 - DNA, 20 bp, synthetic construct
  source 1..20: mol_type = other DNA
tactggaccgcagaggaaga

SEQ ID NO: 8144 - DNA, 20 bp, synthetic construct
  source 1..20: mol_type = other DNA
cgtttcaactttgctaccta

SEQ ID NO: 8145 - DNA, 20 bp, synthetic construct
  source 1..20: mol_type = other DNA
caacgctaaccaggaggttc

SEQ ID NO: 8146 - DNA, 20 bp, synthetic construct
  source 1..20: mol_type = other DNA
ggatcccgcattggcctgca

SEQ ID NO: 8147 - DNA, 20 bp, synthetic construct
  source 1..20: mol_type = other DNA
atactggacgtgtgtgtccc

SEQ ID NO: 8148 - DNA, 20 bp, synthetic construct
  source 1..20: mol_type = other DNA
cagcggaggcatcccataaa

SEQ ID NO: 8149 - DNA, 20 bp, synthetic construct
  source 1..20: mol_type = other DNA
atcagcggttccgtccttct

SEQ ID NO: 8150 - DNA, 20 bp, synthetic construct
  source 1..20: mol_type = other DNA
ttcacggcctgtatcagcta

SEQ ID NO: 8151 - DNA, 20 bp, synthetic construct
  source 1..20: mol_type = other DNA
gaataagaagcggttgcggg

SEQ ID NO: 8152 - DNA, 20 bp, synthetic construct
  source 1..20: mol_type = other DNA
gggaatcttgaactcgtcta

SEQ ID NO: 8153 - DNA, 20 bp, synthetic construct
  source 1..20: mol_type = other DNA
acagtacctaaagtgttcgc

SEQ ID NO: 8154 - DNA, 20 bp, synthetic construct
  source 1..20: mol_type = other DNA
acagagcaccatgcatagcg

SEQ ID NO: 8155 - DNA, 20 bp, synthetic construct
  source 1..20: mol_type = other DNA
tgagtctcttggctagtgta

SEQ ID NO: 8156 - DNA, 20 bp, synthetic construct
  source 1..20: mol_type = other DNA
tctaagaggcgtctcgctaa

SEQ ID NO: 8157 - DNA, 20 bp, synthetic construct
  source 1..20: mol_type = other DNA
atgttattatcggcatatgg

SEQ ID NO: 8158 - DNA, 20 bp, synthetic construct
  source 1..20: mol_type = other DNA
gcggcaagcatcacgcttta

SEQ ID NO: 8159 - DNA, 20 bp, synthetic construct
  source 1..20: mol_type = other DNA
ggcgttggatcaaacctcgc

SEQ ID NO: 8160 - DNA, 20 bp, synthetic construct
  source 1..20: mol_type = other DNA
ggtaagcagcttctgagcgt

SEQ ID NO: 8161 - DNA, 20 bp, synthetic construct
  source 1..20: mol_type = other DNA
ccgaccggactctagcgcaa

SEQ ID NO: 8162 - DNA, 20 bp, synthetic construct
  source 1..20: mol_type = other DNA
acgagaggttagggagagac

SEQ ID NO: 8163 - DNA, 20 bp, synthetic construct
  source 1..20: mol_type = other DNA
ctaaacttcgggtgttgtgt

SEQ ID NO: 8164 - DNA, 20 bp, synthetic construct
  source 1..20: mol_type = other DNA
cgatgatacatgaggttgag

SEQ ID NO: 8165 - DNA, 20 bp, synthetic construct
  source 1..20: mol_type = other DNA
atccgacagagcgatcgccg

SEQ ID NO: 8166 - DNA, 20 bp, synthetic construct
  source 1..20: mol_type = other DNA
cgaccattactcgtcatcag

SEQ ID NO: 8167 - DNA, 20 bp, synthetic construct
  source 1..20: mol_type = other DNA
gtcgatagacagtatgttaa

SEQ ID NO: 8168 - DNA, 20 bp, synthetic construct
  source 1..20: mol_type = other DNA
aatgtgcgagtttgatctgc

SEQ ID NO: 8169 - DNA, 20 bp, synthetic construct
  source 1..20: mol_type = other DNA
gggagaagccgatcaccgct

SEQ ID NO: 8170 - DNA, 20 bp, synthetic construct
  source 1..20: mol_type = other DNA
tgaaactcggatggtaatag

SEQ ID NO: 8171 - DNA, 20 bp, synthetic construct
  source 1..20: mol_type = other DNA
ccttggccacccatcgcata

SEQ ID NO: 8172 - DNA, 20 bp, synthetic construct
  source 1..20: mol_type = other DNA
aaccgttctattggctttag

SEQ ID NO: 8173 - DNA, 20 bp, synthetic construct
  source 1..20: mol_type = other DNA
gacgcgtgcaacagcttaag

SEQ ID NO: 8174 - DNA, 20 bp, synthetic construct
  source 1..20: mol_type = other DNA
aaggtggcgcgcatctcatg

SEQ ID NO: 8175 - DNA, 20 bp, synthetic construct
  source 1..20: mol_type = other DNA
atcccgagagttattactat

SEQ ID NO: 8176 - DNA, 20 bp, synthetic construct
  source 1..20: mol_type = other DNA
tcccacgcgtgctagctttg

SEQ ID NO: 8177 - DNA, 20 bp, synthetic construct
  source 1..20: mol_type = other DNA
gcaaagaacgttgtctacgg

SEQ ID NO: 8178 - DNA, 20 bp, synthetic construct
  source 1..20: mol_type = other DNA
gcaatatctggcacgtagct

SEQ ID NO: 8179 - DNA, 20 bp, synthetic construct
  source 1..20: mol_type = other DNA
agactcttgcggtaattagg

SEQ ID NO: 8180 - DNA, 20 bp, synthetic construct
  source 1..20: mol_type = other DNA
accgttatccgtatgcgacc

SEQ ID NO: 8181 - DNA, 20 bp, synthetic construct
  source 1..20: mol_type = other DNA
ctgaatgcgttgggtatcct

SEQ ID NO: 8182 - DNA, 20 bp, synthetic construct
  source 1..20: mol_type = other DNA
gcgtgtgctagtctcgttct

SEQ ID NO: 8183 - DNA, 20 bp, synthetic construct
  source 1..20: mol_type = other DNA
atatgccagaagaagcctgt

SEQ ID NO: 8184 - DNA, 20 bp, synthetic construct
  source 1..20: mol_type = other DNA
gcgtaagaactcgaactcgt

SEQ ID NO: 8185 - DNA, 20 bp, synthetic construct
  source 1..20: mol_type = other DNA
gacgcctagatgtcactcca

SEQ ID NO: 8186 - DNA, 20 bp, synthetic construct
  source 1..20: mol_type = other DNA
accgatctgggtggatagag

SEQ ID NO: 8187 - DNA, 20 bp, synthetic construct
  source 1..20: mol_type = other DNA
agcaccaattcgaaccgcga

SEQ ID NO: 8188 - DNA, 20 bp, synthetic construct
  source 1..20: mol_type = other DNA
tattcaggagatgtcagcgg

SEQ ID NO: 8189 - DNA, 20 bp, synthetic construct
  source 1..20: mol_type = other DNA
gcaaccgacttgaatgaacg

SEQ ID NO: 8190 - DNA, 20 bp, synthetic construct
  source 1..20: mol_type = other DNA
tcataccgaattgacctgtc

SEQ ID NO: 8191 - DNA, 20 bp, synthetic construct
  source 1..20: mol_type = other DNA
ggtcctataggcatccgtgc

SEQ ID NO: 8192 - DNA, 20 bp, synthetic construct
  source 1..20: mol_type = other DNA
ctggcatctccctcgttata

SEQ ID NO: 8193 - DNA, 20 bp, synthetic construct
  source 1..20: mol_type = other DNA
gctgagcaatccacggtcct

SEQ ID NO: 8194 - DNA, 20 bp, synthetic construct
  source 1..20: mol_type = other DNA
agcgagcggtctgctaagaa

SEQ ID NO: 8195 - DNA, 20 bp, synthetic construct
  source 1..20: mol_type = other DNA
tgcgaatctgacgtggtcag

SEQ ID NO: 8196 - DNA, 20 bp, synthetic construct
  source 1..20: mol_type = other DNA
gaatcgacgtgagctgctct

SEQ ID NO: 8197 - DNA, 20 bp, synthetic construct
  source 1..20: mol_type = other DNA
caccacattaactggttgcc

SEQ ID NO: 8198 - DNA, 20 bp, synthetic construct
  source 1..20: mol_type = other DNA
acagctatcgaacagcgaat

SEQ ID NO: 8199 - DNA, 20 bp, synthetic construct
  source 1..20: mol_type = other DNA
ttgttgacagagatcgcggg

SEQ ID NO: 8200 - DNA, 20 bp, synthetic construct
  source 1..20: mol_type = other DNA
tgtgcttccttctcgatgcc

SEQ ID NO: 8201 - DNA, 20 bp, synthetic construct
  source 1..20: mol_type = other DNA
gcgtcaaccgtgaaatccat

SEQ ID NO: 8202 - DNA, 20 bp, synthetic construct
  source 1..20: mol_type = other DNA
cgtcatggcaatcgctgtcg

SEQ ID NO: 8203 - DNA, 20 bp, synthetic construct
  source 1..20: mol_type = other DNA
cagaggtgggtcgggtcgtt

SEQ ID NO: 8204 - DNA, 20 bp, synthetic construct
  source 1..20: mol_type = other DNA
actagtgctaccatgccaca

SEQ ID NO: 8205 - DNA, 20 bp, synthetic construct
  source 1..20: mol_type = other DNA
cgtacctgtgccatactagc

SEQ ID NO: 8206 - DNA, 20 bp, synthetic construct
  source 1..20: mol_type = other DNA
tatcgtagacgagcacgtgc

SEQ ID NO: 8207 - DNA, 20 bp, synthetic construct
  source 1..20: mol_type = other DNA
ttatcagtccgaatgggatg

SEQ ID NO: 8208 - DNA, 20 bp, synthetic construct
  source 1..20: mol_type = other DNA
taaagctcgcggtaaccatg

SEQ ID NO: 8209 - DNA, 20 bp, synthetic construct
  source 1..20: mol_type = other DNA
cgagggtatcaaggcgctga

SEQ ID NO: 8210 - DNA, 20 bp, synthetic construct
  source 1..20: mol_type = other DNA
agactcggacgtgctgttgg

SEQ ID NO: 8211 - DNA, 20 bp, synthetic construct
  source 1..20: mol_type = other DNA
cgtgggaatcactcccggcc

SEQ ID NO: 8212 - DNA, 20 bp, synthetic construct
  source 1..20: mol_type = other DNA
ccgtaattaacttcgcggtt

SEQ ID NO: 8213 - DNA, 20 bp, synthetic construct
  source 1..20: mol_type = other DNA
tgcggactggttcctcagcc

SEQ ID NO: 8214 - DNA, 20 bp, synthetic construct
  source 1..20: mol_type = other DNA
ttccggcacggcgtcactaa

SEQ ID NO: 8215 - DNA, 20 bp, synthetic construct
  source 1..20: mol_type = other DNA
tcatctttgcttctccgaca

SEQ ID NO: 8216 - DNA, 20 bp, synthetic construct
  source 1..20: mol_type = other DNA
aatctccgagatggccagtt

SEQ ID NO: 8217 - DNA, 20 bp, synthetic construct
  source 1..20: mol_type = other DNA
agaaactaggtagccagatc

SEQ ID NO: 8218 - DNA, 20 bp, synthetic construct
  source 1..20: mol_type = other DNA
cccaagagatggctttcctg

SEQ ID NO: 8219 - DNA, 20 bp, synthetic construct
  source 1..20: mol_type = other DNA
ttcggctctcgccattgcgc

SEQ ID NO: 8220 - DNA, 20 bp, synthetic construct
  source 1..20: mol_type = other DNA
ccctctatacgtgggccttg

SEQ ID NO: 8221 - DNA, 20 bp, synthetic construct
  source 1..20: mol_type = other DNA
atgataacgggcctattaga

SEQ ID NO: 8222 - DNA, 20 bp, synthetic construct
  source 1..20: mol_type = other DNA
tgtgatgtttagaaccgtag

SEQ ID NO: 8223 - DNA, 20 bp, synthetic construct
  source 1..20: mol_type = other DNA
gtaggcttattggtcgagga

SEQ ID NO: 8224 - DNA, 20 bp, synthetic construct
  source 1..20: mol_type = other DNA
gacatgcggatctgtcttgg

SEQ ID NO: 8225 - DNA, 20 bp, synthetic construct
  source 1..20: mol_type = other DNA
gtccgtgtatctcaacgcaa

SEQ ID NO: 8226 - DNA, 20 bp, synthetic construct
  source 1..20: mol_type = other DNA
attaacagggctatctgaga

SEQ ID NO: 8227 - DNA, 20 bp, synthetic construct
  source 1..20: mol_type = other DNA
ctataagacggtggattaca

SEQ ID NO: 8228 - DNA, 20 bp, synthetic construct
  source 1..20: mol_type = other DNA
ttagctgctctacacagatg

SEQ ID NO: 8229 - DNA, 20 bp, synthetic construct
  source 1..20: mol_type = other DNA
acatgcaaagcattgttcgc

SEQ ID NO: 8230 - DNA, 20 bp, synthetic construct
  source 1..20: mol_type = other DNA
gcaaagttgatcccgcgctg

SEQ ID NO: 8231 - DNA, 20 bp, synthetic construct
  source 1..20: mol_type = other DNA
cacgacgacgcaggtagaac

SEQ ID NO: 8232 - DNA, 20 bp, synthetic construct
  source 1..20: mol_type = other DNA
gtacacgatctgattctacg

SEQ ID NO: 8233 - DNA, 20 bp, synthetic construct
  source 1..20: mol_type = other DNA
attaagctccattccatgct

SEQ ID NO: 8234 - DNA, 20 bp, synthetic construct
  source 1..20: mol_type = other DNA
cataggacggtcctatcaca

SEQ ID NO: 8235 - DNA, 20 bp, synthetic construct
  source 1..20: mol_type = other DNA
agtaaatgagagatagtgca

SEQ ID NO: 8236 - DNA, 20 bp, synthetic construct
  source 1..20: mol_type = other DNA
ctccatctaccgacggagca

SEQ ID NO: 8237 - DNA, 20 bp, synthetic construct
  source 1..20: mol_type = other DNA
ggaagcggcagtttattgac

SEQ ID NO: 8238 - DNA, 20 bp, synthetic construct
  source 1..20: mol_type = other DNA
acaaacaaccaatacccaag

SEQ ID NO: 8239 - DNA, 20 bp, synthetic construct
  source 1..20: mol_type = other DNA
aaacacggtccggctcaagc

SEQ ID NO: 8240 - DNA, 20 bp, synthetic construct
  source 1..20: mol_type = other DNA
cttgcgctagtggtctatta

SEQ ID NO: 8241 - DNA, 20 bp, synthetic construct
  source 1..20: mol_type = other DNA
caaacgtcctctgcgagggt

SEQ ID NO: 8242 - DNA, 20 bp, synthetic construct
  source 1..20: mol_type = other DNA
cgcgtttatggcacaatgaa

SEQ ID NO: 8243 - DNA, 20 bp, synthetic construct
  source 1..20: mol_type = other DNA
atttactgaccaggcctgaa

SEQ ID NO: 8244 - DNA, 20 bp, synthetic construct
  source 1..20: mol_type = other DNA
aatcctgtacgcttattgtt

SEQ ID NO: 8245 - DNA, 20 bp, synthetic construct
  source 1..20: mol_type = other DNA
tatggtggagaatgcgcctg

SEQ ID NO: 8246 - DNA, 20 bp, synthetic construct
  source 1..20: mol_type = other DNA
gttcggtgtactagcgagta

SEQ ID NO: 8247 - DNA, 20 bp, synthetic construct
  source 1..20: mol_type = other DNA
tgacgggtaaattgtggacg

SEQ ID NO: 8248 - DNA, 20 bp, synthetic construct
  source 1..20: mol_type = other DNA
ccggacccgaatcaaacgac

SEQ ID NO: 8249 - DNA, 20 bp, synthetic construct
  source 1..20: mol_type = other DNA
gattccgccggtgttcaagt

SEQ ID NO: 8250 - DNA, 20 bp, synthetic construct
  source 1..20: mol_type = other DNA
gaagtcgccaggtgggtaag

SEQ ID NO: 8251 - DNA, 20 bp, synthetic construct
  source 1..20: mol_type = other DNA
tcgcatccggcggttccaag

SEQ ID NO: 8252 - DNA, 20 bp, synthetic construct
  source 1..20: mol_type = other DNA
aacgggtctttgattaacgc

SEQ ID NO: 8253 - DNA, 20 bp, synthetic construct
  source 1..20: mol_type = other DNA
ctcaggaaagttcctctggt

SEQ ID NO: 8254 - DNA, 20 bp, synthetic construct
  source 1..20: mol_type = other DNA
attgcgagaaagcgtctggc

SEQ ID NO: 8255 - DNA, 20 bp, synthetic construct
  source 1..20: mol_type = other DNA
ctgaaacagacgtctaccag

SEQ ID NO: 8256 - DNA, 20 bp, synthetic construct
  source 1..20: mol_type = other DNA
gactgccgtgtgtggtatga

SEQ ID NO: 8257 - DNA, 20 bp, synthetic construct
  source 1..20: mol_type = other DNA
gctaaagagcgtatccgtat

SEQ ID NO: 8258 - DNA, 20 bp, synthetic construct
  source 1..20: mol_type = other DNA
aacgccacctcgttctactt

SEQ ID NO: 8259 - DNA, 20 bp, synthetic construct
  source 1..20: mol_type = other DNA
gcgcgcgctagtttaagacc

SEQ ID NO: 8260 - DNA, 20 bp, synthetic construct
  source 1..20: mol_type = other DNA
tcgccggaaggacatgttcg

SEQ ID NO: 8261 - DNA, 20 bp, synthetic construct
  source 1..20: mol_type = other DNA
tgccgctactcgcatgaaga

SEQ ID NO: 8262 - DNA, 20 bp, synthetic construct
  source 1..20: mol_type = other DNA
agtagcccatcacatgtcca

SEQ ID NO: 8263 - DNA, 20 bp, synthetic construct
  source 1..20: mol_type = other DNA
tagagtggaatagcacagtg

SEQ ID NO: 8264 - DNA, 20 bp, synthetic construct
  source 1..20: mol_type = other DNA
acgttagtgcactgcacagc

SEQ ID NO: 8265 - DNA, 20 bp, synthetic construct
  source 1..20: mol_type = other DNA
gggcgtatgaaacagtaccc

SEQ ID NO: 8266 - DNA, 20 bp, synthetic construct
  source 1..20: mol_type = other DNA
ttcgcaatatcagtgggatc

SEQ ID NO: 8267 - DNA, 20 bp, synthetic construct
  source 1..20: mol_type = other DNA
tcttaatctgcccatgcagg

SEQ ID NO: 8268 - DNA, 20 bp, synthetic construct
  source 1..20: mol_type = other DNA
ggaacgaagttctgagcctt

SEQ ID NO: 8269 - DNA, 20 bp, synthetic construct
  source 1..20: mol_type = other DNA
taccttgtaagctacggaac

SEQ ID NO: 8270 - DNA, 20 bp, synthetic construct
  source 1..20: mol_type = other DNA
tacaccacaatagtgttgtg

SEQ ID NO: 8271 - DNA, 20 bp, synthetic construct
  source 1..20: mol_type = other DNA
atgcggaccacccttgcgtg

SEQ ID NO: 8272 - DNA, 20 bp, synthetic construct
  source 1..20: mol_type = other DNA
agacatgggcttgtgtttgg

SEQ ID NO: 8273 - DNA, 20 bp, synthetic construct
  source 1..20: mol_type = other DNA
tgtacgtctatagtttgtaa

SEQ ID NO: 8274 - DNA, 20 bp, synthetic construct
  source 1..20: mol_type = other DNA
agttcttagtcgaaagtagg

SEQ ID NO: 8275 - DNA, 20 bp, synthetic construct
  source 1..20: mol_type = other DNA
aagcacgatgaggttggccc

SEQ ID NO: 8276 - DNA, 20 bp, synthetic construct
  source 1..20: mol_type = other DNA
ctaacagtcgtaccagttac

SEQ ID NO: 8277 - DNA, 20 bp, synthetic construct
  source 1..20: mol_type = other DNA
tacgcttatgcgtcgtatta

SEQ ID NO: 8278 - DNA, 20 bp, synthetic construct
  source 1..20: mol_type = other DNA
atcggtccgcacagtagctg

SEQ ID NO: 8279 - DNA, 20 bp, synthetic construct
  source 1..20: mol_type = other DNA
cgtatggtggtcgcaaatgt

SEQ ID NO: 8280 - DNA, 20 bp, synthetic construct
  source 1..20: mol_type = other DNA
ggtgaacgccgataactatt

SEQ ID NO: 8281 - DNA, 20 bp, synthetic construct
  source 1..20: mol_type = other DNA
gatgcctaagagaacacggc

SEQ ID NO: 8282 - DNA, 20 bp, synthetic construct
  source 1..20: mol_type = other DNA
agtgtaacataggacataga

SEQ ID NO: 8283 - DNA, 20 bp, synthetic construct
  source 1..20: mol_type = other DNA
tcatacgtggccactcgcga

SEQ ID NO: 8284 - DNA, 20 bp, synthetic construct
  source 1..20: mol_type = other DNA
tcgtccagggttcacagcag

SEQ ID NO: 8285 - DNA, 20 bp, synthetic construct
  source 1..20: mol_type = other DNA
ctgactgacttgtacaaggc

SEQ ID NO: 8286 - DNA, 20 bp, synthetic construct
  source 1..20: mol_type = other DNA
gttgtcaacagcggtgggta

SEQ ID NO: 8287 - DNA, 20 bp, synthetic construct
  source 1..20: mol_type = other DNA
gaaactctcccgtcgagatc

SEQ ID NO: 8288 - DNA, 20 bp, synthetic construct
  source 1..20: mol_type = other DNA
tcagcgagataaggtaccca

SEQ ID NO: 8289 - DNA, 20 bp, synthetic construct
  source 1..20: mol_type = other DNA
tgcgaatcaccacccatcca

SEQ ID NO: 8290 - DNA, 20 bp, synthetic construct
  source 1..20: mol_type = other DNA
gggcagcgtaccgatgatca

SEQ ID NO: 8291 - DNA, 20 bp, synthetic construct
  source 1..20: mol_type = other DNA
atactaatagacacgctggc

SEQ ID NO: 8292 - DNA, 20 bp, synthetic construct
  source 1..20: mol_type = other DNA
attgcctagtgtcttggctt

SEQ ID NO: 8293 - DNA, 20 bp, synthetic construct
  source 1..20: mol_type = other DNA
atctcatacagatagagcca

SEQ ID NO: 8294 - DNA, 20 bp, synthetic construct
  source 1..20: mol_type = other DNA
cactatggaccgcccgcact

SEQ ID NO: 8295 - DNA, 20 bp, synthetic construct
  source 1..20: mol_type = other DNA
ggtcgcacgattatactatt

SEQ ID NO: 8296 - DNA, 20 bp, synthetic construct
  source 1..20: mol_type = other DNA
acgagtgtttcgtgtactcc

SEQ ID NO: 8297 - DNA, 20 bp, synthetic construct
  source 1..20: mol_type = other DNA
gtgtgaaataccgccataat

SEQ ID NO: 8298 - DNA, 20 bp, synthetic construct
  source 1..20: mol_type = other DNA
ctgaccacaagataacgtct

SEQ ID NO: 8299 - DNA, 20 bp, synthetic construct
  source 1..20: mol_type = other DNA
tgggcttgttctgtacgtga

SEQ ID NO: 8300 - DNA, 20 bp, synthetic construct
  source 1..20: mol_type = other DNA
gtaccgagacaaccgatagg

SEQ ID NO: 8301 - DNA, 20 bp, synthetic construct
  source 1..20: mol_type = other DNA
ggttaatctatggtccgggc

SEQ ID NO: 8302 - DNA, 20 bp, synthetic construct
  source 1..20: mol_type = other DNA
caccagctcacacttgtcat

SEQ ID NO: 8303 - DNA, 20 bp, synthetic construct
  source 1..20: mol_type = other DNA
aactttaatgagccgagaca

SEQ ID NO: 8304 - DNA, 20 bp, synthetic construct
  source 1..20: mol_type = other DNA
ctaagaacttacatgagtag

SEQ ID NO: 8305 - DNA, 20 bp, synthetic construct
  source 1..20: mol_type = other DNA
tctcaactactcatcatcgt

SEQ ID NO: 8306 - DNA, 20 bp, synthetic construct
  source 1..20: mol_type = other DNA
gtcctaatgaccgagcataa

SEQ ID NO: 8307 - DNA, 20 bp, synthetic construct
  source 1..20: mol_type = other DNA
atcgagagcgatactactcg

SEQ ID NO: 8308 - DNA, 20 bp, synthetic construct
  source 1..20: mol_type = other DNA
atgcggtattgggcgcagtg

SEQ ID NO: 8309 - DNA, 20 bp, synthetic construct
  source 1..20: mol_type = other DNA
taacgttaagagacctaacc

SEQ ID NO: 8310 - DNA, 20 bp, synthetic construct
  source 1..20: mol_type = other DNA
tggcagtaaagcaggcttgt

SEQ ID NO: 8311 - DNA, 20 bp, synthetic construct
  source 1..20: mol_type = other DNA
catgtgtcgaggagcaccaa

SEQ ID NO: 8312 - DNA, 20 bp, synthetic construct
  source 1..20: mol_type = other DNA
gaatatcgccgagagccctg

SEQ ID NO: 8313 - DNA, 20 bp, synthetic construct
  source 1..20: mol_type = other DNA
tcttgtttcgactcagttag

SEQ ID NO: 8314 - DNA, 20 bp, synthetic construct
  source 1..20: mol_type = other DNA
agggcagacttgtaagaggt

SEQ ID NO: 8315 - DNA, 20 bp, synthetic construct
  source 1..20: mol_type = other DNA
atcgcttccggatactggaa

SEQ ID NO: 8316 - DNA, 20 bp, synthetic construct
  source 1..20: mol_type = other DNA
tagtcgcattcgtcggagta

SEQ ID NO: 8317 - DNA, 20 bp, synthetic construct
  source 1..20: mol_type = other DNA
cgatctgcctgtcacttagg

SEQ ID NO: 8318 - DNA, 20 bp, synthetic construct
  source 1..20: mol_type = other DNA
ccgcgcgtttcctagcgact

SEQ ID NO: 8319 - DNA, 20 bp, synthetic construct
  source 1..20: mol_type = other DNA
actacccattaagatggcct

SEQ ID NO: 8320 - DNA, 20 bp, synthetic construct
  source 1..20: mol_type = other DNA
actcttagttgtcagcttga

SEQ ID NO: 8321 - DNA, 20 bp, synthetic construct
  source 1..20: mol_type = other DNA
cggcctacaaagtgctaaga

SEQ ID NO: 8322 - DNA, 20 bp, synthetic construct
  source 1..20: mol_type = other DNA
gaggagactaggagatagca

SEQ ID NO: 8323 - DNA, 20 bp, synthetic construct
  source 1..20: mol_type = other DNA
tgacaggttgtgtatcgttg

SEQ ID NO: 8324 - DNA, 20 bp, synthetic construct
  source 1..20: mol_type = other DNA
agtcagcggaagctgcgcta

SEQ ID NO: 8325 - DNA, 20 bp, synthetic construct
  source 1..20: mol_type = other DNA
cataacaaggtctaatacgg

SEQ ID NO: 8326 - DNA, 20 bp, synthetic construct
  source 1..20: mol_type = other DNA
tcgctcatacgacctgatgt

SEQ ID NO: 8327 - DNA, 20 bp, synthetic construct
  source 1..20: mol_type = other DNA
atttgagatgtaatcggcgc

SEQ ID NO: 8328 - DNA, 20 bp, synthetic construct
  source 1..20: mol_type = other DNA
ctcgacctggatttgccgat

SEQ ID NO: 8329 - DNA, 20 bp, synthetic construct
  source 1..20: mol_type = other DNA
atccgagtacacacctgcgg

SEQ ID NO: 8330 - DNA, 20 bp, synthetic construct
  source 1..20: mol_type = other DNA
gaaactttgctaccttactg

SEQ ID NO: 8331 - DNA, 20 bp, synthetic construct
  source 1..20: mol_type = other DNA
aggatcaatcgcaagataaa

SEQ ID NO: 8332 - DNA, 20 bp, synthetic construct
  source 1..20: mol_type = other DNA
aacggattgcctccatatat

SEQ ID NO: 8333 - DNA, 20 bp, synthetic construct
  source 1..20: mol_type = other DNA
gatgcgggcctgtatcgcaa

SEQ ID NO: 8334 - DNA, 20 bp, synthetic construct
  source 1..20: mol_type = other DNA
tctaagtgccctcatgttcc

SEQ ID NO: 8335 - DNA, 20 bp, synthetic construct
  source 1..20: mol_type = other DNA
agcagagcccaagtaaggtg

SEQ ID NO: 8336 - DNA, 20 bp, synthetic construct
  source 1..20: mol_type = other DNA
gaaactatggatttgacacg

SEQ ID NO: 8337 - DNA, 20 bp, synthetic construct
  source 1..20: mol_type = other DNA
tagctgtattgggaaccaaa

SEQ ID NO: 8338 - DNA, 20 bp, synthetic construct
  source 1..20: mol_type = other DNA
tgtttgacttggtacggacc

SEQ ID NO: 8339 - DNA, 20 bp, synthetic construct
  source 1..20: mol_type = other DNA
ccatggtctcgtcacttagc

SEQ ID NO: 8340 - DNA, 20 bp, synthetic construct
  source 1..20: mol_type = other DNA
tgccacaggtgataattgag

SEQ ID NO: 8341 - DNA, 20 bp, synthetic construct
  source 1..20: mol_type = other DNA
aagagaaaggattcgtatgg

SEQ ID NO: 8342 - DNA, 20 bp, synthetic construct
  source 1..20: mol_type = other DNA
cttaggaacaactcagagaa

SEQ ID NO: 8343 - DNA, 20 bp, synthetic construct
  source 1..20: mol_type = other DNA
ttcgagagaaatgcatcttc

SEQ ID NO: 8344 - DNA, 20 bp, synthetic construct
  source 1..20: mol_type = other DNA
ggattccagaaacccacgag

SEQ ID NO: 8345 - DNA, 20 bp, synthetic construct
  source 1..20: mol_type = other DNA
ggtaccaccgctagcattga

SEQ ID NO: 8346 - DNA, 20 bp, synthetic construct
  source 1..20: mol_type = other DNA
cggagtaagatgtagagtta

SEQ ID NO: 8347 - DNA, 20 bp, synthetic construct
  source 1..20: mol_type = other DNA
agggcgttagattaaggccc

SEQ ID NO: 8348 - DNA, 20 bp, synthetic construct
  source 1..20: mol_type = other DNA
ccaggctatctagcttgaat

SEQ ID NO: 8349 - DNA, 20 bp, synthetic construct
  source 1..20: mol_type = other DNA
aatttaacaggcaggttcca

SEQ ID NO: 8350 - DNA, 20 bp, synthetic construct
  source 1..20: mol_type = other DNA
aaccagggtgggttagtaag

SEQ ID NO: 8351 - DNA, 20 bp, synthetic construct
  source 1..20: mol_type = other DNA
ggtggtcatgagcgcacgta

SEQ ID NO: 8352 - DNA, 20 bp, synthetic construct
  source 1..20: mol_type = other DNA
aaggtagatccaactaaccg

SEQ ID NO: 8353 - DNA, 20 bp, synthetic construct
  source 1..20: mol_type = other DNA
agtgcccgctcagctacgtt

SEQ ID NO: 8354 - DNA, 20 bp, synthetic construct
  source 1..20: mol_type = other DNA
agaattacttcatacacgtc

SEQ ID NO: 8355 - DNA, 20 bp, synthetic construct
  source 1..20: mol_type = other DNA
cggacataagatcgaatcga

SEQ ID NO: 8356 - DNA, 20 bp, synthetic construct
  source 1..20: mol_type = other DNA
gagtaggctggcctatgttg

SEQ ID NO: 8357 - DNA, 20 bp, synthetic construct
  source 1..20: mol_type = other DNA
ccagattaccttgtcacatt

SEQ ID NO: 8358 - DNA, 20 bp, synthetic construct
  source 1..20: mol_type = other DNA
ggaatgagctcttgtcggaa

SEQ ID NO: 8359 - DNA, 20 bp, synthetic construct
  source 1..20: mol_type = other DNA
tgaataactcgggctactta

SEQ ID NO: 8360 - DNA, 20 bp, synthetic construct
  source 1..20: mol_type = other DNA
agaccgcgagtcggcgtgat

SEQ ID NO: 8361 - DNA, 20 bp, synthetic construct
  source 1..20: mol_type = other DNA
acctcaccaagcggatgcgc

SEQ ID NO: 8362 - DNA, 20 bp, synthetic construct
  source 1..20: mol_type = other DNA
cggttggctttctgagaatg

SEQ ID NO: 8363 - DNA, 20 bp, synthetic construct
  source 1..20: mol_type = other DNA
tgtatttacgtatgtgtcgg

SEQ ID NO: 8364 - DNA, 20 bp, synthetic construct
  source 1..20: mol_type = other DNA
gaggatcattagtgggcttt

SEQ ID NO: 8365 - DNA, 20 bp, synthetic construct
  source 1..20: mol_type = other DNA
tgtaaacaggcttgatcgtc

SEQ ID NO: 8366 - DNA, 20 bp, synthetic construct
  source 1..20: mol_type = other DNA
acccgcaacgcgaagcagta

SEQ ID NO: 8367 - DNA, 20 bp, synthetic construct
  source 1..20: mol_type = other DNA
ggcttaccgaatatgaccag

SEQ ID NO: 8368 - DNA, 20 bp, synthetic construct
  source 1..20: mol_type = other DNA
atgtaacactatatgcagtg

SEQ ID NO: 8369 - DNA, 20 bp, synthetic construct
  source 1..20: mol_type = other DNA
accatggcattaattggtag

SEQ ID NO: 8370 - DNA, 20 bp, synthetic construct
  source 1..20: mol_type = other DNA
atctgcgttggagagtcaat

SEQ ID NO: 8371 - DNA, 20 bp, synthetic construct
  source 1..20: mol_type = other DNA
gggttgagttggttccgact

SEQ ID NO: 8372 - DNA, 20 bp, synthetic construct
  source 1..20: mol_type = other DNA
gctgcatcttgtcagacttt

SEQ ID NO: 8373 - DNA, 20 bp, synthetic construct
  source 1..20: mol_type = other DNA
ttactgtcgtagtccgcgac

SEQ ID NO: 8374 - DNA, 20 bp, synthetic construct
  source 1..20: mol_type = other DNA
gcacgagtcattacgtaggt

SEQ ID NO: 8375 - DNA, 20 bp, synthetic construct
  source 1..20: mol_type = other DNA
ggatttgtagatcctgcgca

SEQ ID NO: 8376 - DNA, 20 bp, synthetic construct
  source 1..20: mol_type = other DNA
ggacgagctaaacctgcctc

SEQ ID NO: 8377 - DNA, 20 bp, synthetic construct
  source 1..20: mol_type = other DNA
tcggatggcacgacctcctt

SEQ ID NO: 8378 - DNA, 20 bp, synthetic construct
  source 1..20: mol_type = other DNA
ctgggtctgtgttaatcctc

SEQ ID NO: 8379 - DNA, 20 bp, synthetic construct
  source 1..20: mol_type = other DNA
gcccactcggtattgctgtg

SEQ ID NO: 8380 - DNA, 20 bp, synthetic construct
  source 1..20: mol_type = other DNA
caagctcactcacttgtacg

SEQ ID NO: 8381 - DNA, 20 bp, synthetic construct
  source 1..20: mol_type = other DNA
atcgttctattgtcctgttt

SEQ ID NO: 8382 - DNA, 20 bp, synthetic construct
  source 1..20: mol_type = other DNA
agtcagacgcattgcggatt

SEQ ID NO: 8383 - DNA, 20 bp, synthetic construct
  source 1..20: mol_type = other DNA
gttgttaacatgactaggtc

SEQ ID NO: 8384 - DNA, 20 bp, synthetic construct
  source 1..20: mol_type = other DNA
ctatagttgctgtctgcggg

SEQ ID NO: 8385 - DNA, 20 bp, synthetic construct
  source 1..20: mol_type = other DNA
ttgttctgagtcggcttacc

SEQ ID NO: 8386 - DNA, 20 bp, synthetic construct
  source 1..20: mol_type = other DNA
tgtggttcccatcagggtct

SEQ ID NO: 8387 - DNA, 20 bp, synthetic construct
  source 1..20: mol_type = other DNA
ccagaacgttcggtcgtgta

SEQ ID NO: 8388 - DNA, 20 bp, synthetic construct
  source 1..20: mol_type = other DNA
gcgtcaatgtgaacactgaa

SEQ ID NO: 8389 - DNA, 20 bp, synthetic construct
  source 1..20: mol_type = other DNA
tcgccttgataaagatcgaa

SEQ ID NO: 8390 - DNA, 20 bp, synthetic construct
  source 1..20: mol_type = other DNA
gaggtatagaagaggagaat

SEQ ID NO: 8391 - DNA, 20 bp, synthetic construct
  source 1..20: mol_type = other DNA
tagcgaataggtgaccacgg

SEQ ID NO: 8392 - DNA, 20 bp, synthetic construct
  source 1..20: mol_type = other DNA
tgctcttcggagtttcacca

SEQ ID NO: 8393 - DNA, 20 bp, synthetic construct
  source 1..20: mol_type = other DNA
gtatgtagcccgaagtgtag

SEQ ID NO: 8394 - DNA, 20 bp, synthetic construct
  source 1..20: mol_type = other DNA
tatttgccttggtgcaatta

SEQ ID NO: 8395 - DNA, 20 bp, synthetic construct
  source 1..20: mol_type = other DNA
cattgagcatggttgtcggc

SEQ ID NO: 8396 - DNA, 20 bp, synthetic construct
  source 1..20: mol_type = other DNA
cttgacaggcattgtgtcgc

SEQ ID NO: 8397 - DNA, 20 bp, synthetic construct
  source 1..20: mol_type = other DNA
acgagtcaacctggcgttat

SEQ ID NO: 8398 - DNA, 20 bp, synthetic construct
  source 1..20: mol_type = other DNA
aatatgagcggcacatgtgc

SEQ ID NO: 8399 - DNA, 20 bp, synthetic construct
  source 1..20: mol_type = other DNA
cttattgcatgactggtaat

SEQ ID NO: 8400 - DNA, 20 bp, synthetic construct
  source 1..20: mol_type = other DNA
cccaagatttcttaagggac

SEQ ID NO: 8401 - DNA, 20 bp, synthetic construct
  source 1..20: mol_type = other DNA
tcaccaacgcacgatcccgt

SEQ ID NO: 8402 - DNA, 20 bp, synthetic construct
  source 1..20: mol_type = other DNA
gatagtcatgacgcctctag

SEQ ID NO: 8403 - DNA, 20 bp, synthetic construct
  source 1..20: mol_type = other DNA
acctattgcagagacacggg

SEQ ID NO: 8404 - DNA, 20 bp, synthetic construct
  source 1..20: mol_type = other DNA
ttcaagatgcggctgtacga

SEQ ID NO: 8405 - DNA, 20 bp, synthetic construct
  source 1..20: mol_type = other DNA
tagtattgcgccatgataac

SEQ ID NO: 8406 - DNA, 20 bp, synthetic construct
  source 1..20: mol_type = other DNA
tctcggcggccattgtccat

SEQ ID NO: 8407 - DNA, 20 bp, synthetic construct
  source 1..20: mol_type = other DNA
accggcctagtagcaggagc

SEQ ID NO: 8408 - DNA, 20 bp, synthetic construct
  source 1..20: mol_type = other DNA
gagtggcatgcccgtgcatt

SEQ ID NO: 8409 - DNA, 20 bp, synthetic construct
  source 1..20: mol_type = other DNA
gtagaggaattgttgggcta

SEQ ID NO: 8410 - DNA, 20 bp, synthetic construct
  source 1..20: mol_type = other DNA
gagggacaagtcgccttggt

SEQ ID NO: 8411 - DNA, 20 bp, synthetic construct
  source 1..20: mol_type = other DNA
atcgtgtgcaaacatctacg

SEQ ID NO: 8412 - DNA, 20 bp, synthetic construct
  source 1..20: mol_type = other DNA
ctatcgtttgtcacggacaa

SEQ ID NO: 8413 - DNA, 20 bp, synthetic construct
  source 1..20: mol_type = other DNA
agttcacgacaagctacgcc

SEQ ID NO: 8414 - DNA, 20 bp, synthetic construct
  source 1..20: mol_type = other DNA
cttgcgtgaaattagtccaa

SEQ ID NO: 8415 - DNA, 20 bp, synthetic construct
  source 1..20: mol_type = other DNA
taagccgtgattaggatacg

SEQ ID NO: 8416 - DNA, 20 bp, synthetic construct
  source 1..20: mol_type = other DNA
aagtccctacaactagtatc

SEQ ID NO: 8417 - DNA, 20 bp, synthetic construct
  source 1..20: mol_type = other DNA
gccgctttcagcggaatgtc

SEQ ID NO: 8418 - DNA, 20 bp, synthetic construct
  source 1..20: mol_type = other DNA
gtctgaggtttgtggctaca

SEQ ID NO: 8419 - DNA, 20 bp, synthetic construct
  source 1..20: mol_type = other DNA
ccgatgttaacttccgagtc

SEQ ID NO: 8420 - DNA, 20 bp, synthetic construct
  source 1..20: mol_type = other DNA
aacaccagtgaggagcaaat

SEQ ID NO: 8421 - DNA, 20 bp, synthetic construct
  source 1..20: mol_type = other DNA
atcaacgtaattgctctatg

SEQ ID NO: 8422 - DNA, 20 bp, synthetic construct
  source 1..20: mol_type = other DNA
gtacctttaggactatgctg

SEQ ID NO: 8423 - DNA, 20 bp, synthetic construct
  source 1..20: mol_type = other DNA
cgaaactcccacaggtaagc

SEQ ID NO: 8424 - DNA, 20 bp, synthetic construct
  source 1..20: mol_type = other DNA
gtgaatcgacttacttcaag

SEQ ID NO: 8425 - DNA, 20 bp, synthetic construct
  source 1..20: mol_type = other DNA
ccttacacttcgactgcatg

SEQ ID NO: 8426 - DNA, 20 bp, synthetic construct
  source 1..20: mol_type = other DNA
ctacctgactactagagtgg

SEQ ID NO: 8427 - DNA, 20 bp, synthetic construct
  source 1..20: mol_type = other DNA
tcgagaggtaaagttgctag

SEQ ID NO: 8428 - DNA, 20 bp, synthetic construct
  source 1..20: mol_type = other DNA
agtacttattgagaggctcc

SEQ ID NO: 8429 - DNA, 20 bp, synthetic construct
  source 1..20: mol_type = other DNA
tattggagagctccgacatg

SEQ ID NO: 8430 - DNA, 20 bp, synthetic construct
  source 1..20: mol_type = other DNA
tgaggacgcgcttagaatat

SEQ ID NO: 8431 - DNA, 20 bp, synthetic construct
  source 1..20: mol_type = other DNA
agagtcaatgtaaatactcc

SEQ ID NO: 8432 - DNA, 20 bp, synthetic construct
  source 1..20: mol_type = other DNA
tattcgcttctcatctgtag

SEQ ID NO: 8433 - DNA, 20 bp, synthetic construct
  source 1..20: mol_type = other DNA
ctctacacccgtcagtgctg

SEQ ID NO: 8434 - DNA, 20 bp, synthetic construct
  source 1..20: mol_type = other DNA
taagcgtacaacccaccgaa

SEQ ID NO: 8435 - DNA, 20 bp, synthetic construct
  source 1..20: mol_type = other DNA
atgccgagggcccgctacta

SEQ ID NO: 8436 - DNA, 20 bp, synthetic construct
  source 1..20: mol_type = other DNA
ggtccgaacaatgtcttggc

SEQ ID NO: 8437 - DNA, 20 bp, synthetic construct
  source 1..20: mol_type = other DNA
ccgcttaacggagaacagcc

SEQ ID NO: 8438 - DNA, 20 bp, synthetic construct
  source 1..20: mol_type = other DNA
gtaagcgttgtcccttgccg

SEQ ID NO: 8439 - DNA, 20 bp, synthetic construct
  source 1..20: mol_type = other DNA
tttggtcctagaataccctc

SEQ ID NO: 8440 - DNA, 20 bp, synthetic construct
  source 1..20: mol_type = other DNA
gctgacggatttgggacagg

SEQ ID NO: 8441 - DNA, 20 bp, synthetic construct
  source 1..20: mol_type = other DNA
gactgagtcaatatgcctgc

SEQ ID NO: 8442 - DNA, 20 bp, synthetic construct
  source 1..20: mol_type = other DNA
acctcgcgcctaatatcatg

SEQ ID NO: 8443 - DNA, 20 bp, synthetic construct
  source 1..20: mol_type = other DNA
agtcgagtgaaagcacagaa

SEQ ID NO: 8444 - DNA, 20 bp, synthetic construct
  source 1..20: mol_type = other DNA
tatcttccgtccgcttattt

SEQ ID NO: 8445 - DNA, 20 bp, synthetic construct
  source 1..20: mol_type = other DNA
gaaattcagagcggtaacgc

SEQ ID NO: 8446 - DNA, 20 bp, synthetic construct
  source 1..20: mol_type = other DNA
gttgcgtgaatcggtcaggt

SEQ ID NO: 8447 - DNA, 20 bp, synthetic construct
  source 1..20: mol_type = other DNA
ccgtgctggtgtctaatcgc

SEQ ID NO: 8448 - DNA, 20 bp, synthetic construct
  source 1..20: mol_type = other DNA
ataatcactgctcctggcca

SEQ ID NO: 8449 - DNA, 20 bp, synthetic construct
  source 1..20: mol_type = other DNA
ttgctcggttatcagttcta

SEQ ID NO: 8450 - DNA, 20 bp, synthetic construct
  source 1..20: mol_type = other DNA
ctcgcgatagatccagatca

SEQ ID NO: 8451 - DNA, 20 bp, synthetic construct
  source 1..20: mol_type = other DNA
agccgcaactggacaacaga

SEQ ID NO: 8452 - DNA, 20 bp, synthetic construct
  source 1..20: mol_type = other DNA
attgcgcaccgcaaagatgc

SEQ ID NO: 8453 - DNA, 20 bp, synthetic construct
  source 1..20: mol_type = other DNA
cgtcgtggcaggtaatccgt

SEQ ID NO: 8454 - DNA, 20 bp, synthetic construct
  source 1..20: mol_type = other DNA
tttccgtgccttcgcctgtg

SEQ ID NO: 8455 - DNA, 20 bp, synthetic construct
  source 1..20: mol_type = other DNA
gacttataatgagggcgtac

SEQ ID NO: 8456 - DNA, 20 bp, synthetic construct
  source 1..20: mol_type = other DNA
agcacgatgaatgacaagga

SEQ ID NO: 8457 - DNA, 20 bp, synthetic construct
  source 1..20: mol_type = other DNA
aagctccctgtcgatacgat

SEQ ID NO: 8458 - DNA, 20 bp, synthetic construct
  source 1..20: mol_type = other DNA
acatataccgcgagcgaggt

SEQ ID NO: 8459 - DNA, 20 bp, synthetic construct
  source 1..20: mol_type = other DNA
atctcgatggccattccatg

SEQ ID NO: 8460 - DNA, 20 bp, synthetic construct
  source 1..20: mol_type = other DNA
agttgtcccaatactaatgc

SEQ ID NO: 8461 - DNA, 20 bp, synthetic construct
  source 1..20: mol_type = other DNA
gcaactcaccaggaacctcg

SEQ ID NO: 8462 - DNA, 20 bp, synthetic construct
  source 1..20: mol_type = other DNA
ggtcatggcttaggaagggc

SEQ ID NO: 8463 - DNA, 20 bp, synthetic construct
  source 1..20: mol_type = other DNA
gcacgatactgtatgatatg

SEQ ID NO: 8464 - DNA, 20 bp, synthetic construct
  source 1..20: mol_type = other DNA
ctccacttctcggtaacaca

SEQ ID NO: 8465 - DNA, 20 bp, synthetic construct
  source 1..20: mol_type = other DNA
cattacccgctcccagtttg

SEQ ID NO: 8466 - DNA, 20 bp, synthetic construct
  source 1..20: mol_type = other DNA
acagcgtagccaagtatgct

SEQ ID NO: 8467 - DNA, 20 bp, synthetic construct
  source 1..20: mol_type = other DNA
ggatacgggacagctgtgca

SEQ ID NO: 8468 - DNA, 20 bp, synthetic construct
  source 1..20: mol_type = other DNA
acaggcaaactcgggtcaga

SEQ ID NO: 8469 - DNA, 20 bp, synthetic construct
  source 1..20: mol_type = other DNA
tgccatgcgtgtgatctgcc

SEQ ID NO: 8470 - DNA, 20 bp, synthetic construct
  source 1..20: mol_type = other DNA
cgtatcgcaggcaggtgcgt

SEQ ID NO: 8471 - DNA, 20 bp, synthetic construct
  source 1..20: mol_type = other DNA
cttgcgaggcttctagcacc

SEQ ID NO: 8472 - DNA, 20 bp, synthetic construct
  source 1..20: mol_type = other DNA
tggtactagccggtttcttc

SEQ ID NO: 8473 - DNA, 20 bp, synthetic construct
  source 1..20: mol_type = other DNA
gtggacatcaacacttaata

SEQ ID NO: 8474 - DNA, 20 bp, synthetic construct
  source 1..20: mol_type = other DNA
gggagtagagatacgcgagg

SEQ ID NO: 8475 - DNA, 20 bp, synthetic construct
  source 1..20: mol_type = other DNA
tagaacagatccttgccgtg

SEQ ID NO: 8476 - DNA, 20 bp, synthetic construct
  source 1..20: mol_type = other DNA
tttggacgagcagacaccca

SEQ ID NO: 8477 - DNA, 20 bp, synthetic construct
  source 1..20: mol_type = other DNA
atgtgcgccgacatgaacac

SEQ ID NO: 8478 - DNA, 20 bp, synthetic construct
  source 1..20: mol_type = other DNA
gttcaggacttcagtccgga

SEQ ID NO: 8479 - DNA, 20 bp, synthetic construct
  source 1..20: mol_type = other DNA
aactcataagtcggttctat

SEQ ID NO: 8480 - DNA, 20 bp, synthetic construct
  source 1..20: mol_type = other DNA
aagaccacggtatggtgtat

SEQ ID NO: 8481 - DNA, 20 bp, synthetic construct
  source 1..20: mol_type = other DNA
gtaattcctcgataatcatg

SEQ ID NO: 8482 - DNA, 20 bp, synthetic construct
  source 1..20: mol_type = other DNA
aacgaggatacaatcgcgcc

SEQ ID NO: 8483 - DNA, 20 bp, synthetic construct
  source 1..20: mol_type = other DNA
atcagggtaccaaaccgaat

SEQ ID NO: 8484 - DNA, 20 bp, synthetic construct
  source 1..20: mol_type = other DNA
ccttaacttaaccgccgtgt

SEQ ID NO: 8485 - DNA, 20 bp, synthetic construct
  source 1..20: mol_type = other DNA
attaggaaggaacggatccc

SEQ ID NO: 8486 - DNA, 20 bp, synthetic construct
  source 1..20: mol_type = other DNA
aatcgacagcagccaaagta

SEQ ID NO: 8487 - DNA, 20 bp, synthetic construct
  source 1..20: mol_type = other DNA
cagttggtgggtgtggttca

SEQ ID NO: 8488 - DNA, 20 bp, synthetic construct
  source 1..20: mol_type = other DNA
tggaggaggatacgttaggt

SEQ ID NO: 8489 - DNA, 20 bp, synthetic construct
  source 1..20: mol_type = other DNA
gcaaaggacctctcttgtcc

SEQ ID NO: 8490 - DNA, 20 bp, synthetic construct
  source 1..20: mol_type = other DNA
caggttcggatccacgatgt

SEQ ID NO: 8491 - DNA, 20 bp, synthetic construct
  source 1..20: mol_type = other DNA
tgcacagacaatttgcgcat

SEQ ID NO: 8492 - DNA, 20 bp, synthetic construct
  source 1..20: mol_type = other DNA
gttattaccctactaaccaa

SEQ ID NO: 8493 - DNA, 20 bp, synthetic construct
  source 1..20: mol_type = other DNA
cgtgtagtaagagttgacat

SEQ ID NO: 8494 - DNA, 20 bp, synthetic construct
  source 1..20: mol_type = other DNA
gctctagctgtcaaatgcta

SEQ ID NO: 8495 - DNA, 20 bp, synthetic construct
  source 1..20: mol_type = other DNA
cgatctttgtcaaataccgt

SEQ ID NO: 8496 - DNA, 20 bp, synthetic construct
  source 1..20: mol_type = other DNA
cgtagctagctattcgagga

SEQ ID NO: 8497 - DNA, 20 bp, synthetic construct
  source 1..20: mol_type = other DNA
cgactatcacgtgatcaaga

SEQ ID NO: 8498 - DNA, 20 bp, synthetic construct
  source 1..20: mol_type = other DNA
cggatcggtccaccactatt

SEQ ID NO: 8499 - DNA, 20 bp, synthetic construct
  source 1..20: mol_type = other DNA
ccatacctaatgctgagttc

SEQ ID NO: 8500 - DNA, 20 bp, synthetic construct
  source 1..20: mol_type = other DNA
tgctgctccactattggttc

SEQ ID NO: 8501 - DNA, 20 bp, synthetic construct
  source 1..20: mol_type = other DNA
agtggacaggctcataccca

SEQ ID NO: 8502 - DNA, 20 bp, synthetic construct
  source 1..20: mol_type = other DNA
agcagggcacgcttgagcaa

SEQ ID NO: 8503 - DNA, 20 bp, synthetic construct
  source 1..20: mol_type = other DNA
gaataccgcgtcgcctatgc

SEQ ID NO: 8504 - DNA, 20 bp, synthetic construct
  source 1..20: mol_type = other DNA
cagtcccggcgtatggcatc

SEQ ID NO: 8505 - DNA, 20 bp, synthetic construct
  source 1..20: mol_type = other DNA
acaattggacgtccgctgcc

SEQ ID NO: 8506 - DNA, 20 bp, synthetic construct
  source 1..20: mol_type = other DNA
cccgaaggcgcctgtttact

SEQ ID NO: 8507 - DNA, 20 bp, synthetic construct
  source 1..20: mol_type = other DNA
ggacctgccgtgtcgcaaac

SEQ ID NO: 8508 - DNA, 20 bp, synthetic construct
  source 1..20: mol_type = other DNA
cggacaatcgagcactttaa

SEQ ID NO: 8509 - DNA, 20 bp, synthetic construct
  source 1..20: mol_type = other DNA
tatttgccttcagctgggat

SEQ ID NO: 8510 - DNA, 20 bp, synthetic construct
  source 1..20: mol_type = other DNA
cttcaggcgagtattccggt

SEQ ID NO: 8511 - DNA, 20 bp, synthetic construct
  source 1..20: mol_type = other DNA
tcggcagctttgcaacttta

SEQ ID NO: 8512 - DNA, 20 bp, synthetic construct
  source 1..20: mol_type = other DNA
ttacaggagaacctccgcca

SEQ ID NO: 8513 - DNA, 20 bp, synthetic construct
  source 1..20: mol_type = other DNA
cctctgatgtataccagaaa

SEQ ID NO: 8514 - DNA, 20 bp, synthetic construct
  source 1..20: mol_type = other DNA
tctaagtgctcgggtaacga

SEQ ID NO: 8515 - DNA, 20 bp, synthetic construct
  source 1..20: mol_type = other DNA
cctatagagtgcgatcttag

SEQ ID NO: 8516 - DNA, 20 bp, synthetic construct
  source 1..20: mol_type = other DNA
cgtaacacacgtacgctcca

SEQ ID NO: 8517 - DNA, 20 bp, synthetic construct
  source 1..20: mol_type = other DNA
accctcactccaagggcttg

SEQ ID NO: 8518 - DNA, 20 bp, synthetic construct
  source 1..20: mol_type = other DNA
atatctacaccacatccaca

SEQ ID NO: 8519 - DNA, 20 bp, synthetic construct
  source 1..20: mol_type = other DNA
ccttcgctgagccaaacaga

SEQ ID NO: 8520 - DNA, 20 bp, synthetic construct
  source 1..20: mol_type = other DNA
cattgaacggcctcacgtaa

SEQ ID NO: 8521 - DNA, 20 bp, synthetic construct
  source 1..20: mol_type = other DNA
gtactccgcagtaatgactc

SEQ ID NO: 8522 - DNA, 20 bp, synthetic construct
  source 1..20: mol_type = other DNA
aatccgtaatcggcctttgc

SEQ ID NO: 8523 - DNA, 20 bp, synthetic construct
  source 1..20: mol_type = other DNA
ggtaccctcgttgtacaggg

SEQ ID NO: 8524 - DNA, 20 bp, synthetic construct
  source 1..20: mol_type = other DNA
gttcgtaactgcgggacaac

SEQ ID NO: 8525 - DNA, 20 bp, synthetic construct
  source 1..20: mol_type = other DNA
taccggatgtgggcctacat

SEQ ID NO: 8526 - DNA, 20 bp, synthetic construct
  source 1..20: mol_type = other DNA
agaagtggcaaagagacatg

SEQ ID NO: 8527 - DNA, 20 bp, synthetic construct
  source 1..20: mol_type = other DNA
taggtgtgactgcgttcatg

SEQ ID NO: 8528 - DNA, 20 bp, synthetic construct
  source 1..20: mol_type = other DNA
ctcgataactcgggtttccg

SEQ ID NO: 8529 - DNA, 20 bp, synthetic construct
  source 1..20: mol_type = other DNA
ggaagaatattaagctcgaa

SEQ ID NO: 8530 - DNA, 20 bp, synthetic construct
  source 1..20: mol_type = other DNA
ctaatttcagtttactccgc

SEQ ID NO: 8531 - DNA, 20 bp, synthetic construct
  source 1..20: mol_type = other DNA
atagaattggattcgcgtag

SEQ ID NO: 8532 - DNA, 20 bp, synthetic construct
  source 1..20: mol_type = other DNA
atagacgctcaagtcatcca

SEQ ID NO: 8533 - DNA, 20 bp, synthetic construct
  source 1..20: mol_type = other DNA
ggcacatttctacgaagcca

SEQ ID NO: 8534 - DNA, 20 bp, synthetic construct
  source 1..20: mol_type = other DNA
aagcgaccgaagatacgagt

SEQ ID NO: 8535 - DNA, 20 bp, synthetic construct
  source 1..20: mol_type = other DNA
atcgatgttgtaaccgggca

SEQ ID NO: 8536 - DNA, 20 bp, synthetic construct
  source 1..20: mol_type = other DNA
cagtgatggagtgtctaggc

SEQ ID NO: 8537 - DNA, 20 bp, synthetic construct
  source 1..20: mol_type = other DNA
ccagactagtcccagtccct

SEQ ID NO: 8538 - DNA, 20 bp, synthetic construct
  source 1..20: mol_type = other DNA
gtgcttatgatgcaattgct

SEQ ID NO: 8539 - DNA, 20 bp, synthetic construct
  source 1..20: mol_type = other DNA
ctggttagtttcttctgggt

SEQ ID NO: 8540 - DNA, 20 bp, synthetic construct
  source 1..20: mol_type = other DNA
ctttagatagaataccttcc

SEQ ID NO: 8541 - DNA, 20 bp, synthetic construct
  source 1..20: mol_type = other DNA
tgtcgagacgccagtttacc

SEQ ID NO: 8542 - DNA, 20 bp, synthetic construct
  source 1..20: mol_type = other DNA
atacttgcacccaatccacg

SEQ ID NO: 8543 - DNA, 20 bp, synthetic construct
  source 1..20: mol_type = other DNA
tacagctcagagtattaagc

SEQ ID NO: 8544 - DNA, 20 bp, synthetic construct
  source 1..20: mol_type = other DNA
aacatcaaactatctgtcac

SEQ ID NO: 8545 - DNA, 20 bp, synthetic construct
  source 1..20: mol_type = other DNA
tcgcctaaccacacaagact

SEQ ID NO: 8546 - DNA, 20 bp, synthetic construct
  source 1..20: mol_type = other DNA
tcaactcgccgttgtgatgt

SEQ ID NO: 8547 - DNA, 20 bp, synthetic construct
  source 1..20: mol_type = other DNA
agtggtagtgatagaactat

SEQ ID NO: 8548 - DNA, 20 bp, synthetic construct
  source 1..20: mol_type = other DNA
gtgcaagattaaaggcgccc

SEQ ID NO: 8549 - DNA, 20 bp, synthetic construct
  source 1..20: mol_type = other DNA
cttatctttcatgtatccgg

SEQ ID NO: 8550 - DNA, 20 bp, synthetic construct
  source 1..20: mol_type = other DNA
cacagccggcgatcagcatt

SEQ ID NO: 8551 - DNA, 20 bp, synthetic construct
  source 1..20: mol_type = other DNA
gactagataactcagtcttc

SEQ ID NO: 8552 - DNA, 20 bp, synthetic construct
  source 1..20: mol_type = other DNA
agtagtcggatgcctgactc

SEQ ID NO: 8553 - DNA, 20 bp, synthetic construct
  source 1..20: mol_type = other DNA
atgttatcggctcgtaaatt

SEQ ID NO: 8554 - DNA, 20 bp, synthetic construct
  source 1..20: mol_type = other DNA
agtacctgggttcgagtacc

SEQ ID NO: 8555 - DNA, 20 bp, synthetic construct
  source 1..20: mol_type = other DNA
aggcgcctagattcaggagc

SEQ ID NO: 8556 - DNA, 20 bp, synthetic construct
  source 1..20: mol_type = other DNA
gcaacggcctgctggttcaa

SEQ ID NO: 8557 - DNA, 20 bp, synthetic construct
  source 1..20: mol_type = other DNA
cggcccgttggtcaacttgg

SEQ ID NO: 8558 - DNA, 20 bp, synthetic construct
  source 1..20: mol_type = other DNA
tacacggtacatcttaccat

SEQ ID NO: 8559 - DNA, 20 bp, synthetic construct
  source 1..20: mol_type = other DNA
caacagcgtggagtaggtat

SEQ ID NO: 8560 - DNA, 20 bp, synthetic construct
  source 1..20: mol_type = other DNA
actacgtatcgtgctaactg

SEQ ID NO: 8561 - DNA, 20 bp, synthetic construct
  source 1..20: mol_type = other DNA
gcagaccctgcgttagagta

SEQ ID NO: 8562 - DNA, 20 bp, synthetic construct
  source 1..20: mol_type = other DNA
gactaggtttccatttgaaa

SEQ ID NO: 8563 - DNA, 20 bp, synthetic construct
  source 1..20: mol_type = other DNA
accgtaacggaatgacaatg

SEQ ID NO: 8564 - DNA, 20 bp, synthetic construct
  source 1..20: mol_type = other DNA
agacgcggactgcaggcata

SEQ ID NO: 8565 - DNA, 20 bp, synthetic construct
  source 1..20: mol_type = other DNA
ggaagggtgtagttcggtag

SEQ ID NO: 8566 - DNA, 20 bp, synthetic construct
  source 1..20: mol_type = other DNA
agaatcgatgcccgaatgtc

SEQ ID NO: 8567 - DNA, 20 bp, synthetic construct
  source 1..20: mol_type = other DNA
gtgggcgctagtagtctgcc

SEQ ID NO: 8568 - DNA, 20 bp, synthetic construct
  source 1..20: mol_type = other DNA
atcaacatggcaacgccgga

SEQ ID NO: 8569 - DNA, 20 bp, synthetic construct
  source 1..20: mol_type = other DNA
gtattagttgattgcagacc

SEQ ID NO: 8570 - DNA, 20 bp, synthetic construct
  source 1..20: mol_type = other DNA
agagtggtttatcttcgtct

SEQ ID NO: 8571 - DNA, 20 bp, synthetic construct
  source 1..20: mol_type = other DNA
ccagacccacaacacggcag

SEQ ID NO: 8572 - DNA, 20 bp, synthetic construct
  source 1..20: mol_type = other DNA
gtggcgctcatatatgatgc

SEQ ID NO: 8573 - DNA, 20 bp, synthetic construct
  source 1..20: mol_type = other DNA
tcccaacatcgctactcctt

SEQ ID NO: 8574 - DNA, 20 bp, synthetic construct
  source 1..20: mol_type = other DNA
acaccacgagcgtcctcaga

SEQ ID NO: 8575 - DNA, 20 bp, synthetic construct
  source 1..20: mol_type = other DNA
acactcttcaccagtccgat

SEQ ID NO: 8576 - DNA, 20 bp, synthetic construct
  source 1..20: mol_type = other DNA
ttgctcgacactgtcaattt

SEQ ID NO: 8577 - DNA, 20 bp, synthetic construct
  source 1..20: mol_type = other DNA
gaggacgggctacatcaact

SEQ ID NO: 8578 - DNA, 20 bp, synthetic construct
  source 1..20: mol_type = other DNA
gtgatctccttagagttcaa

SEQ ID NO: 8579 - DNA, 20 bp, synthetic construct
  source 1..20: mol_type = other DNA
ccgatcgtgcttgtggaaga

SEQ ID NO: 8580 - DNA, 20 bp, synthetic construct
  source 1..20: mol_type = other DNA
gactgatctcgtgtatctac

SEQ ID NO: 8581 - DNA, 20 bp, synthetic construct
  source 1..20: mol_type = other DNA
atatccagtttctgccagta

SEQ ID NO: 8582 - DNA, 20 bp, synthetic construct
  source 1..20: mol_type = other DNA
caaacctcacgcctatgcac

SEQ ID NO: 8583 - DNA, 20 bp, synthetic construct
  source 1..20: mol_type = other DNA
gtttgcgagccgaaagctca

SEQ ID NO: 8584 - DNA, 20 bp, synthetic construct
  source 1..20: mol_type = other DNA
tgtgtataacatgctttgcg

SEQ ID NO: 8585 - DNA, 20 bp, synthetic construct
  source 1..20: mol_type = other DNA
tgaagcgcttgcgcatcctg

SEQ ID NO: 8586 - DNA, 20 bp, synthetic construct
  source 1..20: mol_type = other DNA
ggctttatagacccacgaac

SEQ ID NO: 8587 - DNA, 20 bp, synthetic construct
  source 1..20: mol_type = other DNA
catgccgaggaaagttgcga

SEQ ID NO: 8588 - DNA, 20 bp, synthetic construct
  source 1..20: mol_type = other DNA
tgacgtttgatcggagggcc

SEQ ID NO: 8589 - DNA, 20 bp, synthetic construct
  source 1..20: mol_type = other DNA
tcacggtatttggctcagaa

SEQ ID NO: 8590 - DNA, 20 bp, synthetic construct
  source 1..20: mol_type = other DNA
agacacggaaggtgcgaatt

SEQ ID NO: 8591 - DNA, 20 bp, synthetic construct
  source 1..20: mol_type = other DNA
tcagagcgccagcgttgagc

SEQ ID NO: 8592 - DNA, 20 bp, synthetic construct
  source 1..20: mol_type = other DNA
acatagcccacccgatgcac

SEQ ID NO: 8593 - DNA, 20 bp, synthetic construct
  source 1..20: mol_type = other DNA
tagttagggaaagcaagacg

SEQ ID NO: 8594 - DNA, 20 bp, synthetic construct
  source 1..20: mol_type = other DNA
gcgagtgtaagtaactagat

SEQ ID NO: 8595 - DNA, 20 bp, synthetic construct
  source 1..20: mol_type = other DNA
cgagcacccaacattgcaag

SEQ ID NO: 8596 - DNA, 20 bp, synthetic construct
  source 1..20: mol_type = other DNA
aggcatctgctagttctgac

SEQ ID NO: 8597 - DNA, 20 bp, synthetic construct
  source 1..20: mol_type = other DNA
catcagccaacgggatggtt

SEQ ID NO: 8598 - DNA, 20 bp, synthetic construct
  source 1..20: mol_type = other DNA
cagttggtggaggtgtttac

SEQ ID NO: 8599 - DNA, 20 bp, synthetic construct
  source 1..20: mol_type = other DNA
accaaccatggagttgtctt

SEQ ID NO: 8600 - DNA, 20 bp, synthetic construct
  source 1..20: mol_type = other DNA
atcctccgccaaacgcgaaa

SEQ ID NO: 8601 - DNA, 20 bp, synthetic construct
  source 1..20: mol_type = other DNA
aatcactctccagtaacaac

SEQ ID NO: 8602 - DNA, 20 bp, synthetic construct
  source 1..20: mol_type = other DNA
gtagacgtgaataatcgtga

SEQ ID NO: 8603 - DNA, 20 bp, synthetic construct
  source 1..20: mol_type = other DNA
aactcccgagggttcccagg

SEQ ID NO: 8604 - DNA, 20 bp, synthetic construct
  source 1..20: mol_type = other DNA
cgaagcaagcgaaccctact

SEQ ID NO: 8605 - DNA, 20 bp, synthetic construct
  source 1..20: mol_type = other DNA
gcgaagatagccctcttgac

SEQ ID NO: 8606 - DNA, 20 bp, synthetic construct
  source 1..20: mol_type = other DNA
ccacccttgcaagacctcca

SEQ ID NO: 8607 - DNA, 20 bp, synthetic construct
  source 1..20: mol_type = other DNA
agtggcagatgctagcccag

SEQ ID NO: 8608 - DNA, 20 bp, synthetic construct
  source 1..20: mol_type = other DNA
cgtacttcccatatactgag

SEQ ID NO: 8609 - DNA, 20 bp, synthetic construct
  source 1..20: mol_type = other DNA
tagcgattccttccctcaag

SEQ ID NO: 8610 - DNA, 20 bp, synthetic construct
  source 1..20: mol_type = other DNA
aaatgcgagcatatccgatt

SEQ ID NO: 8611 - DNA, 20 bp, synthetic construct
  source 1..20: mol_type = other DNA
cggataggcgcgtgtaattg

SEQ ID NO: 8612 - DNA, 20 bp, synthetic construct
  source 1..20: mol_type = other DNA
gcggtagcgctcagttatgt

SEQ ID NO: 8613 - DNA, 20 bp, synthetic construct
  source 1..20: mol_type = other DNA
gattaactagaatagcctcg

SEQ ID NO: 8614 - DNA, 20 bp, synthetic construct
  source 1..20: mol_type = other DNA
gccatgtgaagcgagtgaac

SEQ ID NO: 8615 - DNA, 20 bp, synthetic construct
  source 1..20: mol_type = other DNA
cccatagttgctaggctgca

SEQ ID NO: 8616 - DNA, 20 bp, synthetic construct
  source 1..20: mol_type = other DNA
gttggtctaagctaacagaa

SEQ ID NO: 8617 - DNA, 20 bp, synthetic construct
  source 1..20: mol_type = other DNA
cacgtttgtgtaggctgtat

SEQ ID NO: 8618 - DNA, 20 bp, synthetic construct
  source 1..20: mol_type = other DNA
ggatgctactctttacttgg

SEQ ID NO: 8619 - DNA, 20 bp, synthetic construct
  source 1..20: mol_type = other DNA
gtcctactttaccgcgcaga

SEQ ID NO: 8620 - DNA, 20 bp, synthetic construct
  source 1..20: mol_type = other DNA
gagatgaatgcgtatcggtt

SEQ ID NO: 8621 - DNA, 20 bp, synthetic construct
  source 1..20: mol_type = other DNA
caaccacgcaagtacatgac

SEQ ID NO: 8622 - DNA, 20 bp, synthetic construct
  source 1..20: mol_type = other DNA
gtactctaacatacacccgc

SEQ ID NO: 8623 - DNA, 20 bp, synthetic construct
  source 1..20: mol_type = other DNA
actgtaggactgaatcacaa

SEQ ID NO: 8624 - DNA, 20 bp, synthetic construct
  source 1..20: mol_type = other DNA
gcatagtttctgtcgtcatt

SEQ ID NO: 8625 - DNA, 20 bp, synthetic construct
  source 1..20: mol_type = other DNA
atggttgagagacaggcgca

SEQ ID NO: 8626 - DNA, 20 bp, synthetic construct
  source 1..20: mol_type = other DNA
ttgggccgacgaactctgtg

SEQ ID NO: 8627 - DNA, 20 bp, synthetic construct
  source 1..20: mol_type = other DNA
tgtagcgatgatccaagtac

SEQ ID NO: 8628 - DNA, 20 bp, synthetic construct
  source 1..20: mol_type = other DNA
aacgagactcggacgtttcg

SEQ ID NO: 8629 - DNA, 20 bp, synthetic construct
  source 1..20: mol_type = other DNA
actgctactgcatggaccgc

SEQ ID NO: 8630 - DNA, 20 bp, synthetic construct
  source 1..20: mol_type = other DNA
tgagtccgtctaatcgttac

SEQ ID NO: 8631 - DNA, 20 bp, synthetic construct
  source 1..20: mol_type = other DNA
cagacacttgaaaccactcg

SEQ ID NO: 8632 - DNA, 20 bp, synthetic construct
  source 1..20: mol_type = other DNA
agtggttagatagcacgact

SEQ ID NO: 8633 - DNA, 20 bp, synthetic construct
  source 1..20: mol_type = other DNA
tggaatccaacaggtccgcg

SEQ ID NO: 8634 - DNA, 20 bp, synthetic construct
  source 1..20: mol_type = other DNA
ccacatgactcgtgcgctgc

SEQ ID NO: 8635 - DNA, 20 bp, synthetic construct
  source 1..20: mol_type = other DNA
cagcttggctgcgtagcgct

SEQ ID NO: 8636 - DNA, 20 bp, synthetic construct
  source 1..20: mol_type = other DNA
gtcggataacggatgtacgg

SEQ ID NO: 8637 - DNA, 20 bp, synthetic construct
  source 1..20: mol_type = other DNA
agttcgaacgattctagcat

SEQ ID NO: 8638 - DNA, 20 bp, synthetic construct
  source 1..20: mol_type = other DNA
acggccgggacacactacat

SEQ ID NO: 8639 - DNA, 20 bp, synthetic construct
  source 1..20: mol_type = other DNA
tccaacgcagagcaataccc

SEQ ID NO: 8640 - DNA, 20 bp, synthetic construct
  source 1..20: mol_type = other DNA
cctttgagcactttagctat

SEQ ID NO: 8641 - DNA, 20 bp, synthetic construct
  source 1..20: mol_type = other DNA
tgatgaaattgcgtgagcac

SEQ ID NO: 8642 - DNA, 20 bp, synthetic construct
  source 1..20: mol_type = other DNA
gttaccgcgctcatcggaag

SEQ ID NO: 8643 - DNA, 20 bp, synthetic construct
  source 1..20: mol_type = other DNA
taaagatgaaaggcactttc

SEQ ID NO: 8644 - DNA, 20 bp, synthetic construct
  source 1..20: mol_type = other DNA
ggtctcatctgagcccaaca

SEQ ID NO: 8645 - DNA, 20 bp, synthetic construct
  source 1..20: mol_type = other DNA
tggatactcgggacctggcg

SEQ ID NO: 8646 - DNA, 20 bp, synthetic construct
  source 1..20: mol_type = other DNA
atgaagaggactcatgccct

SEQ ID NO: 8647 - DNA, 20 bp, synthetic construct
  source 1..20: mol_type = other DNA
gtgcgcttctcgaagcaacg

SEQ ID NO: 8648 - DNA, 20 bp, synthetic construct
  source 1..20: mol_type = other DNA
actgtgataggagacttaat

SEQ ID NO: 8649 - DNA, 20 bp, synthetic construct
  source 1..20: mol_type = other DNA
tattcgctcacaccagtgag

SEQ ID NO: 8650 - DNA, 20 bp, synthetic construct
  source 1..20: mol_type = other DNA
aggttagtccagatagtcct

SEQ ID NO: 8651 - DNA, 20 bp, synthetic construct
  source 1..20: mol_type = other DNA
cctagtgtgacagtacttcg

SEQ ID NO: 8652 - DNA, 20 bp, synthetic construct
  source 1..20: mol_type = other DNA
ctgaagtgtggctttctgcg

SEQ ID NO: 8653 - DNA, 20 bp, synthetic construct
  source 1..20: mol_type = other DNA
atgcgcgtatgcttaaggtc

SEQ ID NO: 8654 - DNA, 20 bp, synthetic construct
  source 1..20: mol_type = other DNA
atctacgctctagcaacacc

SEQ ID NO: 8655 - DNA, 20 bp, synthetic construct
  source 1..20: mol_type = other DNA
ataggtgttgcgcgctacat

SEQ ID NO: 8656 - DNA, 20 bp, synthetic construct
  source 1..20: mol_type = other DNA
cccttcaagcgtcctttccc

SEQ ID NO: 8657 - DNA, 20 bp, synthetic construct
  source 1..20: mol_type = other DNA
aatggattccttagtgcccg

SEQ ID NO: 8658 - DNA, 20 bp, synthetic construct
  source 1..20: mol_type = other DNA
acagagactactaggtggag

SEQ ID NO: 8659 - DNA, 20 bp, synthetic construct
  source 1..20: mol_type = other DNA
cctccgtactggatccatag

SEQ ID NO: 8660 - DNA, 20 bp, synthetic construct
  source 1..20: mol_type = other DNA
gtaaccgtttacgtaattgc

SEQ ID NO: 8661 - DNA, 20 bp, synthetic construct
  source 1..20: mol_type = other DNA
tgttagaacgacacgcaatt

SEQ ID NO: 8662 - DNA, 20 bp, synthetic construct
  source 1..20: mol_type = other DNA
caaagcatgtccggaactag

SEQ ID NO: 8663 - DNA, 20 bp, synthetic construct
  source 1..20: mol_type = other DNA
catcgacatcggtgtgcaag

SEQ ID NO: 8664 - DNA, 20 bp, synthetic construct
  source 1..20: mol_type = other DNA
attggaactgattgaattag

SEQ ID NO: 8665 - DNA, 20 bp, synthetic construct
  source 1..20: mol_type = other DNA
gttgaaaggccaccggattt

SEQ ID NO: 8666 - DNA, 20 bp, synthetic construct
  source 1..20: mol_type = other DNA
agcgggttcaccgatctgtt

SEQ ID NO: 8667 - DNA, 20 bp, synthetic construct
  source 1..20: mol_type = other DNA
gggctcttacgtcactgcag

SEQ ID NO: 8668 - DNA, 20 bp, synthetic construct
  source 1..20: mol_type = other DNA
gtggagtcgggatctcccaa

SEQ ID NO: 8669 - DNA, 20 bp, synthetic construct
  source 1..20: mol_type = other DNA
tgggctggtaacagcgtccc

SEQ ID NO: 8670 - DNA, 20 bp, synthetic construct
  source 1..20: mol_type = other DNA
ggataccatagtgcaaacgg

SEQ ID NO: 8671 - DNA, 20 bp, synthetic construct
  source 1..20: mol_type = other DNA
acctggtcctgcgattgaat

SEQ ID NO: 8672 - DNA, 20 bp, synthetic construct
  source 1..20: mol_type = other DNA
tggagtccctgaaagtaacc

SEQ ID NO: 8673 - DNA, 20 bp, synthetic construct
  source 1..20: mol_type = other DNA
tcccttacggatcgccagat

SEQ ID NO: 8674 - DNA, 20 bp, synthetic construct
  source 1..20: mol_type = other DNA
taaggatcacgaatctacag

SEQ ID NO: 8675 - DNA, 20 bp, synthetic construct
  source 1..20: mol_type = other DNA
cgcgtagggaatggctgagg

SEQ ID NO: 8676 - DNA, 20 bp, synthetic construct
  source 1..20: mol_type = other DNA
ggtgacgtaaggcttaactg

SEQ ID NO: 8677 - DNA, 20 bp, synthetic construct
  source 1..20: mol_type = other DNA
ataagacgttgcactctcct

SEQ ID NO: 8678 - DNA, 20 bp, synthetic construct
  source 1..20: mol_type = other DNA
ggagccgtattgatagacct

SEQ ID NO: 8679 - DNA, 20 bp, synthetic construct
  source 1..20: mol_type = other DNA
cgtaccggccagcgtatgat

SEQ ID NO: 8680 - DNA, 20 bp, synthetic construct
  source 1..20: mol_type = other DNA
tttgcctctctctatgatac

SEQ ID NO: 8681 - DNA, 20 bp, synthetic construct
  source 1..20: mol_type = other DNA
gggagccttagtgattcgtc

SEQ ID NO: 8682 - DNA, 20 bp, synthetic construct
  source 1..20: mol_type = other DNA
ttatgctcctatcgctaaac

SEQ ID NO: 8683 - DNA, 20 bp, synthetic construct
  source 1..20: mol_type = other DNA
ggagacgactacatctgtcg

SEQ ID NO: 8684 - DNA, 20 bp, synthetic construct
  source 1..20: mol_type = other DNA
acgccgtcaatgatctcact

SEQ ID NO: 8685 - DNA, 20 bp, synthetic construct
  source 1..20: mol_type = other DNA
tctgtccgtagggataccgg

SEQ ID NO: 8686 - DNA, 20 bp, synthetic construct
  source 1..20: mol_type = other DNA
cggttccttgtaatcgaaac

SEQ ID NO: 8687 - DNA, 20 bp, synthetic construct
  source 1..20: mol_type = other DNA
aactgtgaacgcaagatggt

SEQ ID NO: 8688 - DNA, 20 bp, synthetic construct
  source 1..20: mol_type = other DNA
gctgtgaatacatgattgcc

SEQ ID NO: 8689 - DNA, 20 bp, synthetic construct
  source 1..20: mol_type = other DNA
tgccactagatgatgataat

SEQ ID NO: 8690 - DNA, 20 bp, synthetic construct
  source 1..20: mol_type = other DNA
gatcattctggaaggtgaaa

SEQ ID NO: 8691 - DNA, 20 bp, synthetic construct
  source 1..20: mol_type = other DNA
acaccctgtttgttcgtagg

SEQ ID NO: 8692 - DNA, 20 bp, synthetic construct
  source 1..20: mol_type = other DNA
taccttgaggagcgggtact

SEQ ID NO: 8693 - DNA, 20 bp, synthetic construct
  source 1..20: mol_type = other DNA
cagtggttcatgtttaagtc

SEQ ID NO: 8694 - DNA, 20 bp, synthetic construct
  source 1..20: mol_type = other DNA
ctagttgcatctgtactaag

SEQ ID NO: 8695 - DNA, 20 bp, synthetic construct
  source 1..20: mol_type = other DNA
gcgattacaggcacatttga

SEQ ID NO: 8696 - DNA, 20 bp, synthetic construct
  source 1..20: mol_type = other DNA
tcgtgtaattgaccctaatt

SEQ ID NO: 8697 - DNA, 20 bp, synthetic construct
  source 1..20: mol_type = other DNA
cgcacttagtgagcttggta

SEQ ID NO: 8698 - DNA, 20 bp, synthetic construct
  source 1..20: mol_type = other DNA
ctacgactctggtgtgtacc

SEQ ID NO: 8699 - DNA, 20 bp, synthetic construct
  source 1..20: mol_type = other DNA
atgtttacaggactggtctt

SEQ ID NO: 8700 - DNA, 20 bp, synthetic construct
  source 1..20: mol_type = other DNA
caggagctttaggagagatt

SEQ ID NO: 8701 - DNA, 20 bp, synthetic construct
  source 1..20: mol_type = other DNA
tagaaattagggctgcgagc

SEQ ID NO: 8702 - DNA, 20 bp, synthetic construct
  source 1..20: mol_type = other DNA
cctggtatagtccatacaac

SEQ ID NO: 8703 - DNA, 20 bp, synthetic construct
  source 1..20: mol_type = other DNA
ccggagcctgtttgaaccac

SEQ ID NO: 8704 - DNA, 20 bp, synthetic construct
  source 1..20: mol_type = other DNA
atgagagggttgctctaagc

SEQ ID NO: 8705 - DNA, 20 bp, synthetic construct
  source 1..20: mol_type = other DNA
aaccagctggtatgtcgctc

SEQ ID NO: 8706 - DNA, 20 bp, synthetic construct
  source 1..20: mol_type = other DNA
cttgtctatgcttgggtaag

SEQ ID NO: 8707 - DNA, 20 bp, synthetic construct
  source 1..20: mol_type = other DNA
atacaattcggcctcaatcg

SEQ ID NO: 8708 - DNA, 20 bp, synthetic construct
  source 1..20: mol_type = other DNA
atttgcgaggattatgctgg

SEQ ID NO: 8709 - DNA, 20 bp, synthetic construct
  source 1..20: mol_type = other DNA
ggcaagaaggttagtgaact

SEQ ID NO: 8710 - DNA, 20 bp, synthetic construct
  source 1..20: mol_type = other DNA
gaactgtcgatttgaacttc

SEQ ID NO: 8711 - DNA, 20 bp, synthetic construct
  source 1..20: mol_type = other DNA
ccacatatacaaggtccaga

SEQ ID NO: 8712 - DNA, 20 bp, synthetic construct
  source 1..20: mol_type = other DNA
aggctttcacagtccgcggt

SEQ ID NO: 8713 - DNA, 20 bp, synthetic construct
  source 1..20: mol_type = other DNA
gtctgtatagacggcgtcgt

SEQ ID NO: 8714 - DNA, 20 bp, synthetic construct
  source 1..20: mol_type = other DNA
ggtccacggccactcgcttc

SEQ ID NO: 8715 - DNA, 20 bp, synthetic construct
  source 1..20: mol_type = other DNA
acagcctgtgtgaccgtcta

SEQ ID NO: 8716 - DNA, 20 bp, synthetic construct
  source 1..20: mol_type = other DNA
ctgagttgatcactccctat

SEQ ID NO: 8717 - DNA, 20 bp, synthetic construct
  source 1..20: mol_type = other DNA
agcgagtacctctaacacca

SEQ ID NO: 8718 - DNA, 20 bp, synthetic construct
  source 1..20: mol_type = other DNA
gacccgttacgtgaattagt

SEQ ID NO: 8719 - DNA, 20 bp, synthetic construct
  source 1..20: mol_type = other DNA
ttggctcacactacgccgac

SEQ ID NO: 8720 - DNA, 20 bp, synthetic construct
  source 1..20: mol_type = other DNA
taaatttcgtcatggaggta

SEQ ID NO: 8721 - DNA, 20 bp, synthetic construct
  source 1..20: mol_type = other DNA
ttaggctaaagccctggaat

SEQ ID NO: 8722 - DNA, 20 bp, synthetic construct
  source 1..20: mol_type = other DNA
cgcatgtgccatcgcagact

SEQ ID NO: 8723 - DNA, 20 bp, synthetic construct
  source 1..20: mol_type = other DNA
gacggacctgttagcttgcc

SEQ ID NO: 8724 - DNA, 20 bp, synthetic construct
  source 1..20: mol_type = other DNA
tcactctctttatctacgct

SEQ ID NO: 8725 - DNA, 20 bp, synthetic construct
  source 1..20: mol_type = other DNA
ttaatattaggtgatcaggt

SEQ ID NO: 8726 - DNA, 20 bp, synthetic construct
  source 1..20: mol_type = other DNA
ccttgtgatgagcctagata

SEQ ID NO: 8727 - DNA, 20 bp, synthetic construct
  source 1..20: mol_type = other DNA
ctgcccgctcatagcatgat

SEQ ID NO: 8728 - DNA, 20 bp, synthetic construct
  source 1..20: mol_type = other DNA
gccgtattggatttagcaat

SEQ ID NO: 8729 - DNA, 20 bp, synthetic construct
  source 1..20: mol_type = other DNA
catcccagacccaacgagtc

SEQ ID NO: 8730 - DNA, 20 bp, synthetic construct
  source 1..20: mol_type = other DNA
agtgcatcgccactgcagca

SEQ ID NO: 8731 - DNA, 20 bp, synthetic construct
  source 1..20: mol_type = other DNA
gtgacgcaccacatagatag

SEQ ID NO: 8732 - DNA, 20 bp, synthetic construct
  source 1..20: mol_type = other DNA
tccgctctagggcacaccct

SEQ ID NO: 8733 - DNA, 20 bp, synthetic construct
  source 1..20: mol_type = other DNA
cataaccacaatctccttcg

SEQ ID NO: 8734 - DNA, 20 bp, synthetic construct
  source 1..20: mol_type = other DNA
gcccatcggatcgtaggatg

SEQ ID NO: 8735 - DNA, 20 bp, synthetic construct
  source 1..20: mol_type = other DNA
ccacttactatggctgagtt

SEQ ID NO: 8736 - DNA, 20 bp, synthetic construct
  source 1..20: mol_type = other DNA
tggacttggttaaacctccg

SEQ ID NO: 8737 - DNA, 20 bp, synthetic construct
  source 1..20: mol_type = other DNA
gaaatgacgaactacttgcc

SEQ ID NO: 8738 - DNA, 20 bp, synthetic construct
  source 1..20: mol_type = other DNA
gtgataccaagcggcactcg

SEQ ID NO: 8739 - DNA, 20 bp, synthetic construct
  source 1..20: mol_type = other DNA
cgtcctcagaaccacacagg

SEQ ID NO: 8740 - DNA, 20 bp, synthetic construct
  source 1..20: mol_type = other DNA
tggttcaagcatttctcacg

SEQ ID NO: 8741 - DNA, 20 bp, synthetic construct
  source 1..20: mol_type = other DNA
agggtcattatagcgtggag

SEQ ID NO: 8742 - DNA, 20 bp, synthetic construct
  source 1..20: mol_type = other DNA
ggtgggcgataaccgtgtcg

SEQ ID NO: 8743 - DNA, 20 bp, synthetic construct
  source 1..20: mol_type = other DNA
gttcgtggcttgggtagtac

SEQ ID NO: 8744 - DNA, 20 bp, synthetic construct
  source 1..20: mol_type = other DNA
tggatgccgattgcgccttg

SEQ ID NO: 8745 - DNA, 20 bp, synthetic construct
  source 1..20: mol_type = other DNA
accggcctttggcaatctgg

SEQ ID NO: 8746 - DNA, 20 bp, synthetic construct
  source 1..20: mol_type = other DNA
catgcattgctttggccggt

SEQ ID NO: 8747 - DNA, 20 bp, synthetic construct
  source 1..20: mol_type = other DNA
tgatgcggacagagagctga

SEQ ID NO: 8748 - DNA, 20 bp, synthetic construct
  source 1..20: mol_type = other DNA
cgggttcacgaaacagtaca

SEQ ID NO: 8749 - DNA, 20 bp, synthetic construct
  source 1..20: mol_type = other DNA
ttggagaaccactagcgttg

SEQ ID NO: 8750 - DNA, 20 bp, synthetic construct
  source 1..20: mol_type = other DNA
gccttagtatggactaggct

SEQ ID NO: 8751 - DNA, 20 bp, synthetic construct
  source 1..20: mol_type = other DNA
cactagcatcacagattcac

SEQ ID NO: 8752 - DNA, 20 bp, synthetic construct
  source 1..20: mol_type = other DNA
ttcttggcttacggtaccgg

SEQ ID NO: 8753 - DNA, 20 bp, synthetic construct
  source 1..20: mol_type = other DNA
aacgccgacggtccagacag

SEQ ID NO: 8754 - DNA, 20 bp, synthetic construct
  source 1..20: mol_type = other DNA
tgcgcaaagggctcgttagg

SEQ ID NO: 8755 - DNA, 20 bp, synthetic construct
  source 1..20: mol_type = other DNA
tcaatatgaatgtgcttgga

SEQ ID NO: 8756 - DNA, 20 bp, synthetic construct
  source 1..20: mol_type = other DNA
tagacctaaggctaccgtca

SEQ ID NO: 8757 - DNA, 20 bp, synthetic construct
  source 1..20: mol_type = other DNA
acgcgaatatgggtccatcc

SEQ ID NO: 8758 - DNA, 20 bp, synthetic construct
  source 1..20: mol_type = other DNA
gttggactaagcctgctggt

SEQ ID NO: 8759 - DNA, 20 bp, synthetic construct
  source 1..20: mol_type = other DNA
gcactggaccgccaacgtct

SEQ ID NO: 8760 - DNA, 20 bp, synthetic construct
  source 1..20: mol_type = other DNA
gtactgactcttgcgccaca

SEQ ID NO: 8761 - DNA, 20 bp, synthetic construct
  source 1..20: mol_type = other DNA
cccgaactgattagtccaca

SEQ ID NO: 8762 - DNA, 20 bp, synthetic construct
  source 1..20: mol_type = other DNA
ttcgcgcaggtatcaagacg

SEQ ID NO: 8763 - DNA, 20 bp, synthetic construct
  source 1..20: mol_type = other DNA
ctggatgccacgggactcca

SEQ ID NO: 8764 - DNA, 20 bp, synthetic construct
  source 1..20: mol_type = other DNA
tctttcgaccttgccgaata

SEQ ID NO: 8765 - DNA, 20 bp, synthetic construct
  source 1..20: mol_type = other DNA
tgaagctagcgtcctattgg

SEQ ID NO: 8766 - DNA, 20 bp, synthetic construct
  source 1..20: mol_type = other DNA
gtgcattgtggtttcacttc

SEQ ID NO: 8767 - DNA, 20 bp, synthetic construct
  source 1..20: mol_type = other DNA
tggctcatgcgtggagacac

SEQ ID NO: 8768 - DNA, 20 bp, synthetic construct
  source 1..20: mol_type = other DNA
cgttacctaaggtcctgctc

SEQ ID NO: 8769 - DNA, 20 bp, synthetic construct
  source 1..20: mol_type = other DNA
aggtgtcgccgtgcatgtgg

SEQ ID NO: 8770 - DNA, 20 bp, synthetic construct
  source 1..20: mol_type = other DNA
tggctgtctcgaacgaattg

SEQ ID NO: 8771 - DNA, 20 bp, synthetic construct
  source 1..20: mol_type = other DNA
ggtcgagggatcggaatctg

SEQ ID NO: 8772 - DNA, 20 bp, synthetic construct
  source 1..20: mol_type = other DNA
aaggaagcccgaaacaagac

SEQ ID NO: 8773 - DNA, 20 bp, synthetic construct
  source 1..20: mol_type = other DNA
gcagggtaatctacccggaa

SEQ ID NO: 8774 - DNA, 20 bp, synthetic construct
  source 1..20: mol_type = other DNA
tctttcttctgcggttacgc

SEQ ID NO: 8775 - DNA, 20 bp, synthetic construct
  source 1..20: mol_type = other DNA
cccatctcccaactgcttta

SEQ ID NO: 8776 - DNA, 20 bp, synthetic construct
  source 1..20: mol_type = other DNA
tataactgcgtcttaaccct

SEQ ID NO: 8777 - DNA, 20 bp, synthetic construct
  source 1..20: mol_type = other DNA
gaaacaaagaggtctaggtt

SEQ ID NO: 8778 - DNA, 20 bp, synthetic construct
  source 1..20: mol_type = other DNA
cattcagcgctcattggtag

SEQ ID NO: 8779 - DNA, 20 bp, synthetic construct
  source 1..20: mol_type = other DNA
acattcccggtgaatctacc

SEQ ID NO: 8780 - DNA, 20 bp, synthetic construct
  source 1..20: mol_type = other DNA
gggcgatcgaacgttctccc

SEQ ID NO: 8781 - DNA, 20 bp, synthetic construct
  source 1..20: mol_type = other DNA
aattggacggtatgtgacgt

SEQ ID NO: 8782 - DNA, 20 bp, synthetic construct
  source 1..20: mol_type = other DNA
tgggagcgattggttcgcct

SEQ ID NO: 8783 - DNA, 20 bp, synthetic construct
  source 1..20: mol_type = other DNA
aaagctagagcgagcagatg

SEQ ID NO: 8784 - DNA, 20 bp, synthetic construct
  source 1..20: mol_type = other DNA
atgactttactgttcggtaa

SEQ ID NO: 8785 - DNA, 20 bp, synthetic construct
  source 1..20: mol_type = other DNA
ctactaggctcaccgctaca

SEQ ID NO: 8786 - DNA, 20 bp, synthetic construct
  source 1..20: mol_type = other DNA
tgcaattctgtagtgcatcg

SEQ ID NO: 8787 - DNA, 20 bp, synthetic construct
  source 1..20: mol_type = other DNA
ggagagttccagtgtcgcgt

SEQ ID NO: 8788 - DNA, 20 bp, synthetic construct
  source 1..20: mol_type = other DNA
ccaacgactcgcgtggacga

SEQ ID NO: 8789 - DNA, 20 bp, synthetic construct
  source 1..20: mol_type = other DNA
gagcaagagcgtcactttag

SEQ ID NO: 8790 - DNA, 20 bp, synthetic construct
  source 1..20: mol_type = other DNA
atgttgcccgcactagacga

SEQ ID NO: 8791 - DNA, 20 bp, synthetic construct
  source 1..20: mol_type = other DNA
tagacctgtgggtatgccag

SEQ ID NO: 8792 - DNA, 20 bp, synthetic construct
  source 1..20: mol_type = other DNA
cgcgtgccttgtccagttct

SEQ ID NO: 8793 - DNA, 20 bp, synthetic construct
  source 1..20: mol_type = other DNA
ccagggctatttaaatgcac

SEQ ID NO: 8794 - DNA, 20 bp, synthetic construct
  source 1..20: mol_type = other DNA
aaaggttccgcgcctcgtcg

SEQ ID NO: 8795 - DNA, 20 bp, synthetic construct
  source 1..20: mol_type = other DNA
atcattaaccaactcatcgc

SEQ ID NO: 8796 - DNA, 20 bp, synthetic construct
  source 1..20: mol_type = other DNA
acctttagctcccagctact

SEQ ID NO: 8797 - DNA, 20 bp, synthetic construct
  source 1..20: mol_type = other DNA
ccctgtaagtatcgcctagg

SEQ ID NO: 8798 - DNA, 20 bp, synthetic construct
  source 1..20: mol_type = other DNA
gtctgcatgatggatgactt

SEQ ID NO: 8799 - DNA, 20 bp, synthetic construct
  source 1..20: mol_type = other DNA
gttatatgggagcaccttac

SEQ ID NO: 8800 - DNA, 20 bp, synthetic construct
  source 1..20: mol_type = other DNA
actactacatccaaaccctg

SEQ ID NO: 8801 - DNA, 20 bp, synthetic construct
  source 1..20: mol_type = other DNA
gtccaatctgcgcgagccag

SEQ ID NO: 8802 - DNA, 20 bp, synthetic construct
  source 1..20: mol_type = other DNA
tcgtgaacggtgcccactga

SEQ ID NO: 8803 - DNA, 20 bp, synthetic construct
  source 1..20: mol_type = other DNA
ctcaagccacttgcactaat

SEQ ID NO: 8804 - DNA, 20 bp, synthetic construct
  source 1..20: mol_type = other DNA
gctcgcagtggaagtctctt

SEQ ID NO: 8805 - DNA, 20 bp, synthetic construct
  source 1..20: mol_type = other DNA
cgatagatgtgagcccgact

SEQ ID NO: 8806 - DNA, 20 bp, synthetic construct
  source 1..20: mol_type = other DNA
cgcctaaagagtgtacaagc

SEQ ID NO: 8807 - DNA, 20 bp, synthetic construct
  source 1..20: mol_type = other DNA
cctcaaaccattcgctacga

SEQ ID NO: 8808 - DNA, 20 bp, synthetic construct
  source 1..20: mol_type = other DNA
gtggcatcccttgtatacca

SEQ ID NO: 8809 - DNA, 20 bp, synthetic construct
  source 1..20: mol_type = other DNA
cccacaaaccgatcaccggt

SEQ ID NO: 8810 - DNA, 20 bp, synthetic construct
  source 1..20: mol_type = other DNA
tcgaggtagcgcaatttctt

SEQ ID NO: 8811 - DNA, 20 bp, synthetic construct
  source 1..20: mol_type = other DNA
tacggtaaacctgcaaccca

SEQ ID NO: 8812 - DNA, 20 bp, synthetic construct
  source 1..20: mol_type = other DNA
gcatcccaggaagtacgacg

SEQ ID NO: 8813 - DNA, 20 bp, synthetic construct
  source 1..20: mol_type = other DNA
acacacgaccctaatatcgc

SEQ ID NO: 8814 - DNA, 20 bp, synthetic construct
  source 1..20: mol_type = other DNA
tttgacaacgtacaccgtag

SEQ ID NO: 8815 - DNA, 20 bp, synthetic construct
  source 1..20: mol_type = other DNA
gaaaccgagccgagctttcc

SEQ ID NO: 8816 - DNA, 20 bp, synthetic construct
  source 1..20: mol_type = other DNA
ctcccggacgtaatatgagg

SEQ ID NO: 8817 - DNA, 20 bp, synthetic construct
  source 1..20: mol_type = other DNA
ttaggtagctagccctgatg

SEQ ID NO: 8818 - DNA, 20 bp, synthetic construct
  source 1..20: mol_type = other DNA
caacggttccacccacgctg

SEQ ID NO: 8819 - DNA, 20 bp, synthetic construct
  source 1..20: mol_type = other DNA
gaggtgttagcaggcatcag

SEQ ID NO: 8820 - DNA, 20 bp, synthetic construct
  source 1..20: mol_type = other DNA
ttcgacaggcagcagtttag

SEQ ID NO: 8821 - DNA, 20 bp, synthetic construct
  source 1..20: mol_type = other DNA
atactcgggctccctgaatc

SEQ ID NO: 8822 - DNA, 20 bp, synthetic construct
  source 1..20: mol_type = other DNA
cgcagtatgcgcgctagctc

SEQ ID NO: 8823 - DNA, 20 bp, synthetic construct
  source 1..20: mol_type = other DNA
agttgcctgtgagaagtcaa

SEQ ID NO: 8824 - DNA, 20 bp, synthetic construct
  source 1..20: mol_type = other DNA
gtagtgagagtcgggttctc

SEQ ID NO: 8825 - DNA, 20 bp, synthetic construct
  source 1..20: mol_type = other DNA
ttcaggaaaggatttatgcg

SEQ ID NO: 8826 - DNA, 20 bp, synthetic construct
  source 1..20: mol_type = other DNA
ccttacgaaccgtagtgtgg

SEQ ID NO: 8827 - DNA, 20 bp, synthetic construct
  source 1..20: mol_type = other DNA
caggtcgggtaaatggcatt

SEQ ID NO: 8828 - DNA, 20 bp, synthetic construct
  source 1..20: mol_type = other DNA
ccgggagcaactttcgaccc

SEQ ID NO: 8829 - DNA, 20 bp, synthetic construct
  source 1..20: mol_type = other DNA
ggagtgttgctgcatgccta

SEQ ID NO: 8830 - DNA, 20 bp, synthetic construct
  source 1..20: mol_type = other DNA
gatgtagagcaacacgcaaa

SEQ ID NO: 8831 - DNA, 20 bp, synthetic construct
  source 1..20: mol_type = other DNA
ggtagtgtacctacggttac

SEQ ID NO: 8832 - DNA, 20 bp, synthetic construct
  source 1..20: mol_type = other DNA
acggaagtataagctgttgt

SEQ ID NO: 8833 - DNA, 20 bp, synthetic construct
  source 1..20: mol_type = other DNA
gagaaacctgttagcttctc

SEQ ID NO: 8834 - DNA, 20 bp, synthetic construct
  source 1..20: mol_type = other DNA
ttctgggcccgtatggaatg

SEQ ID NO: 8835 - DNA, 20 bp, synthetic construct
  source 1..20: mol_type = other DNA
tgtacatgttcgtcagctgg

SEQ ID NO: 8836 - DNA, 20 bp, synthetic construct
  source 1..20: mol_type = other DNA
agtccgccgagcatgctcaa

SEQ ID NO: 8837 - DNA, 20 bp, synthetic construct
  source 1..20: mol_type = other DNA
ggaattgctgctacgtaaag

SEQ ID NO: 8838 - DNA, 20 bp, synthetic construct
  source 1..20: mol_type = other DNA
gagaaccctagtcaagcctg

SEQ ID NO: 8839 - DNA, 20 bp, synthetic construct
  source 1..20: mol_type = other DNA
tccacaagtgagcgctacga

SEQ ID NO: 8840 - DNA, 20 bp, synthetic construct
  source 1..20: mol_type = other DNA
aggtatgtatctcgtaagct

SEQ ID NO: 8841 - DNA, 20 bp, synthetic construct
  source 1..20: mol_type = other DNA
ggtggtggtacattgttcac

SEQ ID NO: 8842 - DNA, 20 bp, synthetic construct
  source 1..20: mol_type = other DNA
tagtgcacgagaagcccaat

SEQ ID NO: 8843 - DNA, 20 bp, synthetic construct
  source 1..20: mol_type = other DNA
gatggtagcggccaataccc

SEQ ID NO: 8844 - DNA, 20 bp, synthetic construct
  source 1..20: mol_type = other DNA
cataagtaactgaaggagcc

SEQ ID NO: 8845 - DNA, 20 bp, synthetic construct
  source 1..20: mol_type = other DNA
gatagtatcccacatgtagc

SEQ ID NO: 8846 - DNA, 20 bp, synthetic construct
  source 1..20: mol_type = other DNA
atcagaagaagtaagcccgg

SEQ ID NO: 8847 - DNA, 20 bp, synthetic construct
  source 1..20: mol_type = other DNA
accactagcaccaagttaca

SEQ ID NO: 8848 - DNA, 20 bp, synthetic construct
  source 1..20: mol_type = other DNA
ggtccgtcctttagggtcag

SEQ ID NO: 8849 - DNA, 20 bp, synthetic construct
  source 1..20: mol_type = other DNA
cgatccctgcttgacactgc

SEQ ID NO: 8850 - DNA, 20 bp, synthetic construct
  source 1..20: mol_type = other DNA
aacgtttagctattggcgag

SEQ ID NO: 8851 - DNA, 20 bp, synthetic construct
  source 1..20: mol_type = other DNA
tcgggcgaagaagagaatca

SEQ ID NO: 8852 - DNA, 20 bp, synthetic construct
  source 1..20: mol_type = other DNA
ctgcgagatgccacgattta

SEQ ID NO: 8853 - DNA, 20 bp, synthetic construct
  source 1..20: mol_type = other DNA
tgatacggtgttacgaaacg

SEQ ID NO: 8854 - DNA, 20 bp, synthetic construct
  source 1..20: mol_type = other DNA
cgctttaatggcgtttcgac

SEQ ID NO: 8855 - DNA, 20 bp, synthetic construct
  source 1..20: mol_type = other DNA
gtcgttggagctacaaatgg

SEQ ID NO: 8856 - DNA, 20 bp, synthetic construct
  source 1..20: mol_type = other DNA
actttggctactacccaaga

SEQ ID NO: 8857 - DNA, 20 bp, synthetic construct
  source 1..20: mol_type = other DNA
accggtggagatacagcaca

SEQ ID NO: 8858 - DNA, 20 bp, synthetic construct
  source 1..20: mol_type = other DNA
ccagtgcgtatatgctccag

SEQ ID NO: 8859 - DNA, 20 bp, synthetic construct
  source 1..20: mol_type = other DNA
cccacgatatagtcagactg

SEQ ID NO: 8860 - DNA, 20 bp, synthetic construct
  source 1..20: mol_type = other DNA
gtaactactcccagactcga

SEQ ID NO: 8861 - DNA, 20 bp, synthetic construct
  source 1..20: mol_type = other DNA
gcatgattacttggaaggtc

SEQ ID NO: 8862 - DNA, 20 bp, synthetic construct
  source 1..20: mol_type = other DNA
agagtctgtctacatgaggg

SEQ ID NO: 8863 - DNA, 20 bp, synthetic construct
  source 1..20: mol_type = other DNA
gttaggaatctccgcgaggg

SEQ ID NO: 8864 - DNA, 20 bp, synthetic construct
  source 1..20: mol_type = other DNA
cgaagatcatccgtacgccg

SEQ ID NO: 8865 - DNA, 20 bp, synthetic construct
  source 1..20: mol_type = other DNA
aggttcgttgagcacgtggt

SEQ ID NO: 8866 - DNA, 20 bp, synthetic construct
  source 1..20: mol_type = other DNA
tgctactattctgttagcta

SEQ ID NO: 8867 - DNA, 20 bp, synthetic construct
  source 1..20: mol_type = other DNA
cgcgatttctccacttaatt

SEQ ID NO: 8868 - DNA, 20 bp, synthetic construct
  source 1..20: mol_type = other DNA
gagagaacgcacttcggatc

SEQ ID NO: 8869 - DNA, 20 bp, synthetic construct
  source 1..20: mol_type = other DNA
aacctataatcgctcgatat

SEQ ID NO: 8870 - DNA, 20 bp, synthetic construct
  source 1..20: mol_type = other DNA
agccctgggagataggagtg

SEQ ID NO: 8871 - DNA, 20 bp, synthetic construct
  source 1..20: mol_type = other DNA
tacatggagggtgcgtgaaa

SEQ ID NO: 8872 - DNA, 20 bp, synthetic construct
  source 1..20: mol_type = other DNA
gcatccgcaccttagcagtg

SEQ ID NO: 8873 - DNA, 20 bp, synthetic construct
  source 1..20: mol_type = other DNA
aatgacctttaaccagcgat

SEQ ID NO: 8874 - DNA, 20 bp, synthetic construct
  source 1..20: mol_type = other DNA
atacctgacatacaccaagg

SEQ ID NO: 8875 - DNA, 20 bp, synthetic construct
  source 1..20: mol_type = other DNA
acagacggccaggcacaagt

SEQ ID NO: 8876 - DNA, 20 bp, synthetic construct
  source 1..20: mol_type = other DNA
gccggctacacaaatgagat

SEQ ID NO: 8877 - DNA, 20 bp, synthetic construct
  source 1..20: mol_type = other DNA
attccgggcgttcacattct

SEQ ID NO: 8878 - DNA, 20 bp, synthetic construct
  source 1..20: mol_type = other DNA
cctccgaacttgaatagaca

SEQ ID NO: 8879 - DNA, 20 bp, synthetic construct
  source 1..20: mol_type = other DNA
gattaagtccactgaacatc

SEQ ID NO: 8880 - DNA, 20 bp, synthetic construct
  source 1..20: mol_type = other DNA
tttctaagaacagccgagag

SEQ ID NO: 8881 - DNA, 20 bp, synthetic construct
  source 1..20: mol_type = other DNA
ggctgtaagtccgagtttgc

SEQ ID NO: 8882 - DNA, 20 bp, synthetic construct
  source 1..20: mol_type = other DNA
aacgggaataggagtaccct

SEQ ID NO: 8883 - DNA, 20 bp, synthetic construct
  source 1..20: mol_type = other DNA
cgttgcaggtacgcagagcg

SEQ ID NO: 8884 - DNA, 20 bp, synthetic construct
  source 1..20: mol_type = other DNA
ctgagggttcaatgtcattg

SEQ ID NO: 8885 - DNA, 20 bp, synthetic construct
  source 1..20: mol_type = other DNA
atccctcgcctatcaccagc

SEQ ID NO: 8886 - DNA, 20 bp, synthetic construct
  source 1..20: mol_type = other DNA
ctctgttcaacgctggagtg

SEQ ID NO: 8887 - DNA, 20 bp, synthetic construct
  source 1..20: mol_type = other DNA
cgcgcatgctgccagttact

SEQ ID NO: 8888 - DNA, 20 bp, synthetic construct
  source 1..20: mol_type = other DNA
catgtatcgccagttcagac

SEQ ID NO: 8889 - DNA, 20 bp, synthetic construct
  source 1..20: mol_type = other DNA
atggagggatctcatatggt

SEQ ID NO: 8890 - DNA, 20 bp, synthetic construct
  source 1..20: mol_type = other DNA
gagagtaatgccgatatgac

SEQ ID NO: 8891 - DNA, 20 bp, synthetic construct
  source 1..20: mol_type = other DNA
tcctttgttgtcgttctcgc

SEQ ID NO: 8892 - DNA, 20 bp, synthetic construct
  source 1..20: mol_type = other DNA
tcagtgcagagaagaataga

SEQ ID NO: 8893 - DNA, 20 bp, synthetic construct
  source 1..20: mol_type = other DNA
gcataccattcttgtagcgg

SEQ ID NO: 8894 - DNA, 20 bp, synthetic construct
  source 1..20: mol_type = other DNA
gtggagtacgtgcgcgattg

SEQ ID NO: 8895 - DNA, 20 bp, synthetic construct
  source 1..20: mol_type = other DNA
ttgcagtccctgacgtctga

SEQ ID NO: 8896 - DNA, 20 bp, synthetic construct
  source 1..20: mol_type = other DNA
ctgcgagatcctaatctata

SEQ ID NO: 8897 - DNA, 20 bp, synthetic construct
  source 1..20: mol_type = other DNA
atcggctttcaatgatccat

SEQ ID NO: 8898 - DNA, 20 bp, synthetic construct
  source 1..20: mol_type = other DNA
attacaagccataaccactc

SEQ ID NO: 8899 - DNA, 20 bp, synthetic construct
  source 1..20: mol_type = other DNA
tttggcttacgaccatgcaa

SEQ ID NO: 8900 - DNA, 20 bp, synthetic construct
  source 1..20: mol_type = other DNA
ccatgcgataagatccagtg

SEQ ID NO: 8901 - DNA, 20 bp, synthetic construct
  source 1..20: mol_type = other DNA
cgttactgggagaccaggtc

SEQ ID NO: 8902 - DNA, 20 bp, synthetic construct
  source 1..20: mol_type = other DNA
gtgaccagttctcaggttca

SEQ ID NO: 8903 - DNA, 20 bp, synthetic construct
  source 1..20: mol_type = other DNA
ataattgaggcctgatgcgt

SEQ ID NO: 8904 - DNA, 20 bp, synthetic construct
  source 1..20: mol_type = other DNA
agatgtctgagccgttataa

SEQ ID NO: 8905 - DNA, 20 bp, synthetic construct
  source 1..20: mol_type = other DNA
agatagcgacgctcacgaga

SEQ ID NO: 8906 - DNA, 20 bp, synthetic construct
  source 1..20: mol_type = other DNA
tctctgtatcgataccagta

SEQ ID NO: 8907 - DNA, 20 bp, synthetic construct
  source 1..20: mol_type = other DNA
ggtgccgattcagacgttaa

SEQ ID NO: 8908 - DNA, 20 bp, synthetic construct
  source 1..20: mol_type = other DNA
ttaagtgatccgggtaatac

SEQ ID NO: 8909 - DNA, 20 bp, synthetic construct
  source 1..20: mol_type = other DNA
ctgtaaggcttggtatcttc

SEQ ID NO: 8910 - DNA, 20 bp, synthetic construct
  source 1..20: mol_type = other DNA
cggtaactcaaatgcgcatt

SEQ ID NO: 8911 - DNA, 20 bp, synthetic construct
  source 1..20: mol_type = other DNA
gggccataattatgaaggct

SEQ ID NO: 8912 - DNA, 20 bp, synthetic construct
  source 1..20: mol_type = other DNA
caccagatttaatgcgcgaa

SEQ ID NO: 8913 - DNA, 20 bp, synthetic construct
  source 1..20: mol_type = other DNA
gcggaagcgtcgcctaacat

SEQ ID NO: 8914 - DNA, 20 bp, synthetic construct
  source 1..20: mol_type = other DNA
ctgagctgcaccaggtccgt

SEQ ID NO: 8915 - DNA, 20 bp, synthetic construct
  source 1..20: mol_type = other DNA
ttgcctcaattcatctatag

SEQ ID NO: 8916 - DNA, 20 bp, synthetic construct
  source 1..20: mol_type = other DNA
cattaatatgcctgcaggcg

SEQ ID NO: 8917 - DNA, 20 bp, synthetic construct
  source 1..20: mol_type = other DNA
caatgctgcccggcatactc

SEQ ID NO: 8918 - DNA, 20 bp, synthetic construct
  source 1..20: mol_type = other DNA
tccggcattggtgtcgtaac

SEQ ID NO: 8919 - DNA, 20 bp, synthetic construct
  source 1..20: mol_type = other DNA
ggcgtatgcgtaataggcgg

SEQ ID NO: 8920 - DNA, 20 bp, synthetic construct
  source 1..20: mol_type = other DNA
ctagccgcgttatcgccagg

SEQ ID NO: 8921 - DNA, 20 bp, synthetic construct
  source 1..20: mol_type = other DNA
tctctcgcggtaagacctga

SEQ ID NO: 8922 - DNA, 20 bp, synthetic construct
  source 1..20: mol_type = other DNA
tccgaggcgtttacgtgagg

SEQ ID NO: 8923 - DNA, 20 bp, synthetic construct
  source 1..20: mol_type = other DNA
gttacgtcgtctctgaggag

SEQ ID NO: 8924 - DNA, 20 bp, synthetic construct
  source 1..20: mol_type = other DNA
ctagccctgtcttacctggg

SEQ ID NO: 8925 - DNA, 20 bp, synthetic construct
  source 1..20: mol_type = other DNA
atcacctcgtctctgttgtg

SEQ ID NO: 8926 - DNA, 20 bp, synthetic construct
  source 1..20: mol_type = other DNA
ggttgacaatgcagcgttct

SEQ ID NO: 8927 - DNA, 20 bp, synthetic construct
  source 1..20: mol_type = other DNA
cagcagccttactagaaact

SEQ ID NO: 8928 - DNA, 20 bp, synthetic construct
  source 1..20: mol_type = other DNA
ggacaagttcattcagatta

SEQ ID NO: 8929 - DNA, 20 bp, synthetic construct
  source 1..20: mol_type = other DNA
aagtccctatttcacaagta

SEQ ID NO: 8930 - DNA, 20 bp, synthetic construct
  source 1..20: mol_type = other DNA
acgcacactgcgggctgatg

SEQ ID NO: 8931 - DNA, 20 bp, synthetic construct
  source 1..20: mol_type = other DNA
ggtgtggagtgcttagacca

SEQ ID NO: 8932 - DNA, 20 bp, synthetic construct
  source 1..20: mol_type = other DNA
gaagcaggcccgtcacttac

SEQ ID NO: 8933 - DNA, 20 bp, synthetic construct
  source 1..20: mol_type = other DNA
atagtcaccaatatctggtc

SEQ ID NO: 8934 - DNA, 20 bp, synthetic construct
  source 1..20: mol_type = other DNA
attactctccgatgcgctgc

SEQ ID NO: 8935 - DNA, 20 bp, synthetic construct
  source 1..20: mol_type = other DNA
gggttaatggaactgattac

SEQ ID NO: 8936 - DNA, 20 bp, synthetic construct
  source 1..20: mol_type = other DNA
cgtcctgtttccttagtatt

SEQ ID NO: 8937 - DNA, 20 bp, synthetic construct
  source 1..20: mol_type = other DNA
tggtcgtaccgcaagccaga

SEQ ID NO: 8938 - DNA, 20 bp, synthetic construct
  source 1..20: mol_type = other DNA
ctcgggaaggcgattacctc

SEQ ID NO: 8939 - DNA, 20 bp, synthetic construct
  source 1..20: mol_type = other DNA
tggttaactttggcggcctt

SEQ ID NO: 8940 - DNA, 20 bp, synthetic construct
  source 1..20: mol_type = other DNA
atatgttacagatgatcgcg

SEQ ID NO: 8941 - DNA, 20 bp, synthetic construct
  source 1..20: mol_type = other DNA
ttatttcggtacacagatcg

SEQ ID NO: 8942 - DNA, 20 bp, synthetic construct
  source 1..20: mol_type = other DNA
ctaatcaatattcacgtggg

SEQ ID NO: 8943 - DNA, 20 bp, synthetic construct
  source 1..20: mol_type = other DNA
ccatctgtattacctgcgcc

SEQ ID NO: 8944 - DNA, 20 bp, synthetic construct
  source 1..20: mol_type = other DNA
ccaacagctgggaatactaa

SEQ ID NO: 8945 - DNA, 20 bp, synthetic construct
  source 1..20: mol_type = other DNA
aaagtcgagaagtcaacttt

SEQ ID NO: 8946 - DNA, 20 bp, synthetic construct
  source 1..20: mol_type = other DNA
aatggctttcgataggtgat

SEQ ID NO: 8947 - DNA, 20 bp, synthetic construct
  source 1..20: mol_type = other DNA
gtatacttggtggaacaaac

SEQ ID NO: 8948 - DNA, 20 bp, synthetic construct
  source 1..20: mol_type = other DNA
gctcgcatagtctcaccctg

SEQ ID NO: 8949 - DNA, 20 bp, synthetic construct
  source 1..20: mol_type = other DNA
tttgagacacttgggagccg

SEQ ID NO: 8950 - DNA, 20 bp, synthetic construct
  source 1..20: mol_type = other DNA
tgagctgctcgtacatgcgc

SEQ ID NO: 8951 - DNA, 20 bp, synthetic construct
  source 1..20: mol_type = other DNA
gagttgaagaagcgtataaa

SEQ ID NO: 8952 - DNA, 20 bp, synthetic construct
  source 1..20: mol_type = other DNA
ctttgcttacccgcacaata

SEQ ID NO: 8953 - DNA, 20 bp, synthetic construct
  source 1..20: mol_type = other DNA
cgaagtagacgtaataggcg

SEQ ID NO: 8954 - DNA, 20 bp, synthetic construct
  source 1..20: mol_type = other DNA
gtgatcaaatctattgccgt

SEQ ID NO: 8955 - DNA, 20 bp, synthetic construct
  source 1..20: mol_type = other DNA
accagtctgttcgcctctac

SEQ ID NO: 8956 - DNA, 20 bp, synthetic construct
  source 1..20: mol_type = other DNA
gcaggctctgctataacggc

SEQ ID NO: 8957 - DNA, 20 bp, synthetic construct
  source 1..20: mol_type = other DNA
ttctggtgtcgaatgttact

SEQ ID NO: 8958 - DNA, 20 bp, synthetic construct
  source 1..20: mol_type = other DNA
cctttctcaataggcacgga

SEQ ID NO: 8959 - DNA, 20 bp, synthetic construct
  source 1..20: mol_type = other DNA
ctgagggtgtcttagggcga

SEQ ID NO: 8960 - DNA, 20 bp, synthetic construct
  source 1..20: mol_type = other DNA
ctccaaccacgtttgtcgta

SEQ ID NO: 8961 - DNA, 20 bp, synthetic construct
  source 1..20: mol_type = other DNA
cgtatcgtaagattcctgaa

SEQ ID NO: 8962 - DNA, 20 bp, synthetic construct
  source 1..20: mol_type = other DNA
gtcccaacaggcatcactga

SEQ ID NO: 8963 - DNA, 20 bp, synthetic construct
  source 1..20: mol_type = other DNA
agcaacacttcaagcgctag

SEQ ID NO: 8964 - DNA, 20 bp, synthetic construct
  source 1..20: mol_type = other DNA
tacgttggtcaggttgttag

SEQ ID NO: 8965 - DNA, 20 bp, synthetic construct
  source 1..20: mol_type = other DNA
tgtgggacgtcgtcgtctct

SEQ ID NO: 8966 - DNA, 20 bp, synthetic construct
  source 1..20: mol_type = other DNA
caaccgaattgcagttagct

SEQ ID NO: 8967 - DNA, 20 bp, synthetic construct
  source 1..20: mol_type = other DNA
ccttattgcagaggctgctt

SEQ ID NO: 8968 - DNA, 20 bp, synthetic construct
  source 1..20: mol_type = other DNA
gttaccatgtggtgagtcca

SEQ ID NO: 8969 - DNA, 20 bp, synthetic construct
  source 1..20: mol_type = other DNA
ggacgcaatacccagagatg

SEQ ID NO: 8970 - DNA, 20 bp, synthetic construct
  source 1..20: mol_type = other DNA
ttgcagcgcaatgcttacgt

SEQ ID NO: 8971 - DNA, 20 bp, synthetic construct
  source 1..20: mol_type = other DNA
taaagtttcacgggtgtaag

SEQ ID NO: 8972 - DNA, 20 bp, synthetic construct
  source 1..20: mol_type = other DNA
gccacaagcccttgatagta

SEQ ID NO: 8973 - DNA, 20 bp, synthetic construct
  source 1..20: mol_type = other DNA
cgatgtcgaatgtcttctct

SEQ ID NO: 8974 - DNA, 20 bp, synthetic construct
  source 1..20: mol_type = other DNA
acagtatggccagaaatatc

SEQ ID NO: 8975 - DNA, 20 bp, synthetic construct
  source 1..20: mol_type = other DNA
tatcggttcgatcccgaggg

SEQ ID NO: 8976 - DNA, 20 bp, synthetic construct
  source 1..20: mol_type = other DNA
gtgctagccctgcctacata

SEQ ID NO: 8977 - DNA, 20 bp, synthetic construct
  source 1..20: mol_type = other DNA
taggtccgagtgtgtctccg

SEQ ID NO: 8978 - DNA, 20 bp, synthetic construct
  source 1..20: mol_type = other DNA
ccatcgtgatgtacgcgcgc

SEQ ID NO: 8979 - DNA, 20 bp, synthetic construct
  source 1..20: mol_type = other DNA
ctgcaaatatagacgtggcc

SEQ ID NO: 8980 - DNA, 20 bp, synthetic construct
  source 1..20: mol_type = other DNA
gataagtcaggcgatgcaga

SEQ ID NO: 8981 - DNA, 20 bp, synthetic construct
  source 1..20: mol_type = other DNA
acgtataatccgacgctccg

SEQ ID NO: 8982 - DNA, 20 bp, synthetic construct
  source 1..20: mol_type = other DNA
acctcgaaccgtagaagtga

SEQ ID NO: 8983 - DNA, 20 bp, synthetic construct
  source 1..20: mol_type = other DNA
aggacaactcctggacttgg

SEQ ID NO: 8984 - DNA, 20 bp, synthetic construct
  source 1..20: mol_type = other DNA
tgatatggagcgcattgtcc

SEQ ID NO: 8985 - DNA, 20 bp, synthetic construct
  source 1..20: mol_type = other DNA
gtatccttcattagcggcac

SEQ ID NO: 8986 - DNA, 20 bp, synthetic construct
  source 1..20: mol_type = other DNA
ggagagaataaaggcaccct

SEQ ID NO: 8987 - DNA, 20 bp, synthetic construct
  source 1..20: mol_type = other DNA
cgtcaactgtatgagttggg

SEQ ID NO: 8988 - DNA, 20 bp, synthetic construct
  source 1..20: mol_type = other DNA
aaggcgcgcccatccacact

SEQ ID NO: 8989 - DNA, 20 bp, synthetic construct
  source 1..20: mol_type = other DNA
ggttacccgatgctgccgtt

SEQ ID NO: 8990 - DNA, 20 bp, synthetic construct
  source 1..20: mol_type = other DNA
cgaaatcagctggtcgaggg

SEQ ID NO: 8991 - DNA, 20 bp, synthetic construct
  source 1..20: mol_type = other DNA
ttattgcgatttccctggta

SEQ ID NO: 8992 - DNA, 20 bp, synthetic construct
  source 1..20: mol_type = other DNA
tctgccaatgggctacttta

SEQ ID NO: 8993 - DNA, 20 bp, synthetic construct
  source 1..20: mol_type = other DNA
agaggaaagtactctgggaa

SEQ ID NO: 8994 - DNA, 20 bp, synthetic construct
  source 1..20: mol_type = other DNA
agtaaccaaacctatcgtac

SEQ ID NO: 8995 - DNA, 20 bp, synthetic construct
  source 1..20: mol_type = other DNA
atttacctgttggcagtgga

SEQ ID NO: 8996 - DNA, 20 bp, synthetic construct
  source 1..20: mol_type = other DNA
gcatttcacaaaggcgtcct

SEQ ID NO: 8997 - DNA, 20 bp, synthetic construct
  source 1..20: mol_type = other DNA
tgcttggctaacctgcttat

SEQ ID NO: 8998 - DNA, 20 bp, synthetic construct
  source 1..20: mol_type = other DNA
gggagacaggtgtagacgat

SEQ ID NO: 8999 - DNA, 20 bp, synthetic construct
  source 1..20: mol_type = other DNA
actggtaggactagaacaac

SEQ ID NO: 9000 - DNA, 20 bp, synthetic construct
  source 1..20: mol_type = other DNA
tagagcctcgcgcgtaagag

SEQ ID NO: 9001 - DNA, 20 bp, synthetic construct
  source 1..20: mol_type = other DNA
gctggctgaacttacttcag

SEQ ID NO: 9002 - DNA, 20 bp, synthetic construct
  source 1..20: mol_type = other DNA
taagccagtagtaggcgcga

SEQ ID NO: 9003 - DNA, 20 bp, synthetic construct
  source 1..20: mol_type = other DNA
aagactccagggagtgtgcc

SEQ ID NO: 9004 - DNA, 20 bp, synthetic construct
  source 1..20: mol_type = other DNA
accgtgcttgcctgctacaa

SEQ ID NO: 9005 - DNA, 20 bp, synthetic construct
  source 1..20: mol_type = other DNA
caatgccagtcctgttataa

SEQ ID NO: 9006 - DNA, 20 bp, synthetic construct
  source 1..20: mol_type = other DNA
cattgcttaggataacctcg

SEQ ID NO: 9007 - DNA, 20 bp, synthetic construct
  source 1..20: mol_type = other DNA
gtaatgtatgtcgtccacgc

SEQ ID NO: 9008 - DNA, 20 bp, synthetic construct
  source 1..20: mol_type = other DNA
tgatagcagtcctaggtgtc

SEQ ID NO: 9009 - DNA, 20 bp, synthetic construct
  source 1..20: mol_type = other DNA
gtaaagctgacctgctgtga

SEQ ID NO: 9010 - DNA, 20 bp, synthetic construct
  source 1..20: mol_type = other DNA
gaacgcatgttgagtcggag

SEQ ID NO: 9011 - DNA, 20 bp, synthetic construct
  source 1..20: mol_type = other DNA
ttacttcagtgatctggcga

SEQ ID NO: 9012 - DNA, 20 bp, synthetic construct
  source 1..20: mol_type = other DNA
cagtgaatacataaacgaat

SEQ ID NO: 9013 - DNA, 20 bp, synthetic construct
  source 1..20: mol_type = other DNA
tcacaggctgtaaggatgag

SEQ ID NO: 9014 - DNA, 20 bp, synthetic construct
  source 1..20: mol_type = other DNA
agcggactaaggctcttctg

SEQ ID NO: 9015 - DNA, 20 bp, synthetic construct
  source 1..20: mol_type = other DNA
gttgatgggaacgcaaccac

SEQ ID NO: 9016 - DNA, 20 bp, synthetic construct
  source 1..20: mol_type = other DNA
atcactagtggtcgagatgt

SEQ ID NO: 9017 - DNA, 20 bp, synthetic construct
  source 1..20: mol_type = other DNA
ttagtgagctcgctcttgac

SEQ ID NO: 9018 - DNA, 20 bp, synthetic construct
  source 1..20: mol_type = other DNA
tgcacaaccagattcgccat

SEQ ID NO: 9019 - DNA, 20 bp, synthetic construct
  source 1..20: mol_type = other DNA
gctgaaagctgcacatgagc

SEQ ID NO: 9020 - DNA, 20 bp, synthetic construct
  source 1..20: mol_type = other DNA
ccctcaataccgccgatcgg

SEQ ID NO: 9021 - DNA, 20 bp, synthetic construct
  source 1..20: mol_type = other DNA
acgacgttagatttgaaacg

SEQ ID NO: 9022 - DNA, 20 bp, synthetic construct
  source 1..20: mol_type = other DNA
ccttcctgaattaagagctg

SEQ ID NO: 9023 - DNA, 20 bp, synthetic construct
  source 1..20: mol_type = other DNA
cgcagtgctaactctgtgtg

SEQ ID NO: 9024 - DNA, 20 bp, synthetic construct
  source 1..20: mol_type = other DNA
agcttaacatcaaaggaccc

SEQ ID NO: 9025 - DNA, 20 bp, synthetic construct
  source 1..20: mol_type = other DNA
aataaattgaacgggctagg

SEQ ID NO: 9026 - DNA, 20 bp, synthetic construct
  source 1..20: mol_type = other DNA
atatactggagagacaacat

SEQ ID NO: 9027 - DNA, 20 bp, synthetic construct
  source 1..20: mol_type = other DNA
tttgttgctactgcaaatga

SEQ ID NO: 9028 - DNA, 20 bp, synthetic construct
  source 1..20: mol_type = other DNA
attccatcatatcgagcgcg

SEQ ID NO: 9029 - DNA, 20 bp, synthetic construct
  source 1..20: mol_type = other DNA
acatattattgaacggtccg

SEQ ID NO: 9030 - DNA, 20 bp, synthetic construct
  source 1..20: mol_type = other DNA
agcgccattctccatgtcgc

SEQ ID NO: 9031 - DNA, 20 bp, synthetic construct
  source 1..20: mol_type = other DNA
ttctaggcagctaagccctg

SEQ ID NO: 9032 - DNA, 20 bp, synthetic construct
  source 1..20: mol_type = other DNA
cgaaggtagtgctgaatccc

SEQ ID NO: 9033 - DNA, 20 bp, synthetic construct
  source 1..20: mol_type = other DNA
catgcgatgttaatagttct

SEQ ID NO: 9034 - DNA, 20 bp, synthetic construct
  source 1..20: mol_type = other DNA
ggcaccgtgtatatagtaac

SEQ ID NO: 9035 - DNA, 20 bp, synthetic construct
  source 1..20: mol_type = other DNA
atatgcacagctcgaccgag

SEQ ID NO: 9036 - DNA, 20 bp, synthetic construct
  source 1..20: mol_type = other DNA
tcacactctccctgggagtt

SEQ ID NO: 9037 - DNA, 20 bp, synthetic construct
  source 1..20: mol_type = other DNA
gttaaattcttgggtcatgg

SEQ ID NO: 9038 - DNA, 20 bp, synthetic construct
  source 1..20: mol_type = other DNA
gctgtatgtccacctaaaca

SEQ ID NO: 9039 - DNA, 20 bp, synthetic construct
  source 1..20: mol_type = other DNA
ccgaaatcaggcagccaaat

SEQ ID NO: 9040 - DNA, 20 bp, synthetic construct
  source 1..20: mol_type = other DNA
ggaacgacgctacctttaat

SEQ ID NO: 9041 - DNA, 20 bp, synthetic construct
  source 1..20: mol_type = other DNA
cacgtgctatatgctatgct

SEQ ID NO: 9042 - DNA, 20 bp, synthetic construct
  source 1..20: mol_type = other DNA
ctctattcactcatacgtga

SEQ ID NO: 9043 - DNA, 20 bp, synthetic construct
  source 1..20: mol_type = other DNA
tacgctaacggaccgggctc

SEQ ID NO: 9044 - DNA, 20 bp, synthetic construct
  source 1..20: mol_type = other DNA
tcgagacgctgtgcttcaag

SEQ ID NO: 9045 - DNA, 20 bp, synthetic construct
  source 1..20: mol_type = other DNA
gcgatcgcgaatgttataaa

SEQ ID NO: 9046 - DNA, 20 bp, synthetic construct
  source 1..20: mol_type = other DNA
agttaggtgcttaactctta

SEQ ID NO: 9047 - DNA, 20 bp, synthetic construct
  source 1..20: mol_type = other DNA
tcgacttgaggtgcgtattt

SEQ ID NO: 9048 - DNA, 20 bp, synthetic construct
  source 1..20: mol_type = other DNA
cagcgcaaatgctgtccgcg

SEQ ID NO: 9049 - DNA, 20 bp, synthetic construct
  source 1..20: mol_type = other DNA
caagaaagaatctgcagcta

SEQ ID NO: 9050 - DNA, 20 bp, synthetic construct
  source 1..20: mol_type = other DNA
caacgaagattgcacccgag

SEQ ID NO: 9051 - DNA, 20 bp, synthetic construct
  source 1..20: mol_type = other DNA
acacagataacgcgctagcg

SEQ ID NO: 9052 - DNA, 20 bp, synthetic construct
  source 1..20: mol_type = other DNA
acgtttgcggccttaaggaa

SEQ ID NO: 9053 - DNA, 20 bp, synthetic construct
  source 1..20: mol_type = other DNA
ggtcacccggtttccgatga

SEQ ID NO: 9054 - DNA, 20 bp, synthetic construct
  source 1..20: mol_type = other DNA
catactagctatcccgaggc

SEQ ID NO: 9055 - DNA, 20 bp, synthetic construct
  source 1..20: mol_type = other DNA
gggtgtgaacttgaatccac

SEQ ID NO: 9056 - DNA, 20 bp, synthetic construct
  source 1..20: mol_type = other DNA
ggtcggtactcaaggaaatt

SEQ ID NO: 9057 - DNA, 20 bp, synthetic construct
  source 1..20: mol_type = other DNA
gagcgcgatagtagatcgcc

SEQ ID NO: 9058 - DNA, 20 bp, synthetic construct
  source 1..20: mol_type = other DNA
catgctttgagacctcttcg

SEQ ID NO: 9059 - DNA, 20 bp, synthetic construct
  source 1..20: mol_type = other DNA
ccatatcggacttcttcacc

SEQ ID NO: 9060 - DNA, 20 bp, synthetic construct
  source 1..20: mol_type = other DNA
ttgtatgttgaggctaagag

SEQ ID NO: 9061 - DNA, 20 bp, synthetic construct
  source 1..20: mol_type = other DNA
cctgacagattcggttgagg

SEQ ID NO: 9062 - DNA, 20 bp, synthetic construct
  source 1..20: mol_type = other DNA
agatgtaccggagagtccat

SEQ ID NO: 9063 - DNA, 20 bp, synthetic construct
  source 1..20: mol_type = other DNA
tgatcagcagcggacgagcc

SEQ ID NO: 9064 - DNA, 20 bp, synthetic construct
  source 1..20: mol_type = other DNA
aatgttggagcctgaagctc

SEQ ID NO: 9065 - DNA, 20 bp, synthetic construct
  source 1..20: mol_type = other DNA
aagaagtgcgtgtactcatc

SEQ ID NO: 9066 - DNA, 20 bp, synthetic construct
  source 1..20: mol_type = other DNA
gtcatttgtacctcacgctg

SEQ ID NO: 9067 - DNA, 20 bp, synthetic construct
  source 1..20: mol_type = other DNA
tctattaagaacctcggcgc

SEQ ID NO: 9068 - DNA, 20 bp, synthetic construct
  source 1..20: mol_type = other DNA
cagggtgttgaaacagtgac

SEQ ID NO: 9069 - DNA, 20 bp, synthetic construct
  source 1..20: mol_type = other DNA
cagcacgtgatattgttaaa

SEQ ID NO: 9070 - DNA, 20 bp, synthetic construct
  source 1..20: mol_type = other DNA
gtttaacgacccgtaaggaa

SEQ ID NO: 9071 - DNA, 20 bp, synthetic construct
  source 1..20: mol_type = other DNA
cttaacgatggttagatacg

SEQ ID NO: 9072 - DNA, 20 bp, synthetic construct
  source 1..20: mol_type = other DNA
cgaacgtgagcgagggattt

SEQ ID NO: 9073 - DNA, 20 bp, synthetic construct
  source 1..20: mol_type = other DNA
cctgtatactcagcggtttg

SEQ ID NO: 9074 - DNA, 20 bp, synthetic construct
  source 1..20: mol_type = other DNA
acattcccttcgtgccggat

SEQ ID NO: 9075 - DNA, 20 bp, synthetic construct
  source 1..20: mol_type = other DNA
cccatgagtctacagaggct

SEQ ID NO: 9076 - DNA, 20 bp, synthetic construct
  source 1..20: mol_type = other DNA
ttataggacgtcgtccgtat

SEQ ID NO: 9077 - DNA, 20 bp, synthetic construct
  source 1..20: mol_type = other DNA
ctgcacctagtctttgcaaa

SEQ ID NO: 9078 - DNA, 20 bp, synthetic construct
  source 1..20: mol_type = other DNA
agatatgttccgcgtgccta

SEQ ID NO: 9079 - DNA, 20 bp, synthetic construct
  source 1..20: mol_type = other DNA
ctgtgactattcgcttcgcg

SEQ ID NO: 9080 - DNA, 20 bp, synthetic construct
  source 1..20: mol_type = other DNA
atggtgtccttacgcggccg

SEQ ID NO: 9081 - DNA, 20 bp, synthetic construct
  source 1..20: mol_type = other DNA
gggaggcgtatcacacggca

SEQ ID NO: 9082 - DNA, 20 bp, synthetic construct
  source 1..20: mol_type = other DNA
cgatagcatcgtcttgactc

SEQ ID NO: 9083 - DNA, 20 bp, synthetic construct
  source 1..20: mol_type = other DNA
cttcgctgattcgatcaagt

SEQ ID NO: 9084 - DNA, 20 bp, synthetic construct
  source 1..20: mol_type = other DNA
agcgcgtcgtagatagcaaa

SEQ ID NO: 9085 - DNA, 20 bp, synthetic construct
  source 1..20: mol_type = other DNA
cctccgagggtgacgagtag

SEQ ID NO: 9086 - DNA, 20 bp, synthetic construct
  source 1..20: mol_type = other DNA
ctcaggcgatcttcatacct

SEQ ID NO: 9087 - DNA, 20 bp, synthetic construct
  source 1..20: mol_type = other DNA
gatacagttctgtcgtcaag

SEQ ID NO: 9088 - DNA, 20 bp, synthetic construct
  source 1..20: mol_type = other DNA
ttggtaagtgattacccgca

SEQ ID NO: 9089 - DNA, 20 bp, synthetic construct
  source 1..20: mol_type = other DNA
gatgctacaaccggtcctgt

SEQ ID NO: 9090 - DNA, 20 bp, synthetic construct
  source 1..20: mol_type = other DNA
caagcatgctcaaacgggag

SEQ ID NO: 9091 - DNA, 20 bp, synthetic construct
  source 1..20: mol_type = other DNA
ccttcgtctcccacacatcg

SEQ ID NO: 9092 - DNA, 20 bp, synthetic construct
  source 1..20: mol_type = other DNA
gtctctgaggctgcaaagaa

SEQ ID NO: 9093 - DNA, 20 bp, synthetic construct
  source 1..20: mol_type = other DNA
attgattgccaaagctgcgc

SEQ ID NO: 9094 - DNA, 20 bp, synthetic construct
  source 1..20: mol_type = other DNA
cctccacgcaagacagaccg

SEQ ID NO: 9095 - DNA, 20 bp, synthetic construct
  source 1..20: mol_type = other DNA
ggcgttacctggttggtatc

SEQ ID NO: 9096 - DNA, 20 bp, synthetic construct
  source 1..20: mol_type = other DNA
agaattgccgtatctactcc

SEQ ID NO: 9097 - DNA, 20 bp, synthetic construct
  source 1..20: mol_type = other DNA
cgacatttcccgtaccgcag

SEQ ID NO: 9098 - DNA, 20 bp, synthetic construct
  source 1..20: mol_type = other DNA
ggtagagaatgagagaaggg

SEQ ID NO: 9099 - DNA, 20 bp, synthetic construct
  source 1..20: mol_type = other DNA
ttcaagtactgaagtcaagc

SEQ ID NO: 9100 - DNA, 20 bp, synthetic construct
  source 1..20: mol_type = other DNA
gaatgtagcgcttagctggg

SEQ ID NO: 9101 - DNA, 20 bp, synthetic construct
  source 1..20: mol_type = other DNA
gaggtatatcaagtctccca

SEQ ID NO: 9102 - DNA, 20 bp, synthetic construct
  source 1..20: mol_type = other DNA
aagcctagaagctgcatcag

SEQ ID NO: 9103 - DNA, 20 bp, synthetic construct
  source 1..20: mol_type = other DNA
catgcgacgaagttggtatt

SEQ ID NO: 9104 - DNA, 20 bp, synthetic construct
  source 1..20: mol_type = other DNA
aatggcttggccctggcgta

SEQ ID NO: 9105 - DNA, 20 bp, synthetic construct
  source 1..20: mol_type = other DNA
acggacaaccgccatccgga

SEQ ID NO: 9106 - DNA, 20 bp, synthetic construct
  source 1..20: mol_type = other DNA
cggtgacaatcactagaacc

SEQ ID NO: 9107 - DNA, 20 bp, synthetic construct
  source 1..20: mol_type = other DNA
atcctctttaatgtcgggtt

SEQ ID NO: 9108 - DNA, 20 bp, synthetic construct
  source 1..20: mol_type = other DNA
tgcatgtctggcagcacatg

SEQ ID NO: 9109 - DNA, 20 bp, synthetic construct
  source 1..20: mol_type = other DNA
taagccgataatggtatacc

SEQ ID NO: 9110 - DNA, 20 bp, synthetic construct
  source 1..20: mol_type = other DNA
gagttcatgacacgcggcct

SEQ ID NO: 9111 - DNA, 20 bp, synthetic construct
  source 1..20: mol_type = other DNA
atccggcgctaaacagaaca

SEQ ID NO: 9112 - DNA, 20 bp, synthetic construct
  source 1..20: mol_type = other DNA
tgaactcaagtgggccagag

SEQ ID NO: 9113 - DNA, 20 bp, synthetic construct
  source 1..20: mol_type = other DNA
gttcgcttaaagcctaggca

SEQ ID NO: 9114 - DNA, 20 bp, synthetic construct
  source 1..20: mol_type = other DNA
atgagtgtgagtggtgccct

SEQ ID NO: 9115 - DNA, 20 bp, synthetic construct
  source 1..20: mol_type = other DNA
gaaagtaaacgggcgcaccg

SEQ ID NO: 9116 - DNA, 20 bp, synthetic construct
  source 1..20: mol_type = other DNA
tgtctgaagaggagtagtac

SEQ ID NO: 9117 - DNA, 20 bp, synthetic construct
  source 1..20: mol_type = other DNA
gatacgtctaggcgtttacc

SEQ ID NO: 9118 - DNA, 20 bp, synthetic construct
  source 1..20: mol_type = other DNA
gtttctcccacgcaggcctt

SEQ ID NO: 9119 - DNA, 20 bp, synthetic construct
  source 1..20: mol_type = other DNA
aatttgtctttccaccgagc

SEQ ID NO: 9120 - DNA, 20 bp, synthetic construct
  source 1..20: mol_type = other DNA
aaccgtgagtcgccgtgtgt

SEQ ID NO: 9121 - DNA, 20 bp, synthetic construct
  source 1..20: mol_type = other DNA
tctacagccattgggtcttc

SEQ ID NO: 9122 - DNA, 20 bp, synthetic construct
  source 1..20: mol_type = other DNA
aattcgagccttgtgcagac

SEQ ID NO: 9123 - DNA, 20 bp, synthetic construct
  source 1..20: mol_type = other DNA
gcggtacatatcgtaggagt

SEQ ID NO: 9124 - DNA, 20 bp, synthetic construct
  source 1..20: mol_type = other DNA
aatcttggtctgacccttaa

SEQ ID NO: 9125 - DNA, 20 bp, synthetic construct
  source 1..20: mol_type = other DNA
gcgttgtgacgtagtaggaa

SEQ ID NO: 9126 - DNA, 20 bp, synthetic construct
  source 1..20: mol_type = other DNA
cactatgctttgcacaacga

SEQ ID NO: 9127 - DNA, 20 bp, synthetic construct
  source 1..20: mol_type = other DNA
ttgtactgagtgtcaacttt

SEQ ID NO: 9128 - DNA, 20 bp, synthetic construct
  source 1..20: mol_type = other DNA
actgtctctcggctgattat

SEQ ID NO: 9129 - DNA, 20 bp, synthetic construct
  source 1..20: mol_type = other DNA
tgaatatcgcaaatatgccc

SEQ ID NO: 9130 - DNA, 20 bp, synthetic construct
  source 1..20: mol_type = other DNA
gaatcattaccatggagcag

SEQ ID NO: 9131 - DNA, 20 bp, synthetic construct
  source 1..20: mol_type = other DNA
tgagcccgagtgattccctg

SEQ ID NO: 9132 - DNA, 20 bp, synthetic construct
  source 1..20: mol_type = other DNA
tggacacgatccagtaccgt

SEQ ID NO: 9133 - DNA, 20 bp, synthetic construct
  source 1..20: mol_type = other DNA
tctatgcacctgaatattga

SEQ ID NO: 9134 - DNA, 20 bp, synthetic construct
  source 1..20: mol_type = other DNA
ttacacctataacggacaaa

SEQ ID NO: 9135 - DNA, 20 bp, synthetic construct
  source 1..20: mol_type = other DNA
gtgttaggaattatgatgct

SEQ ID NO: 9136 - DNA, 20 bp, synthetic construct
  source 1..20: mol_type = other DNA
ttagtcgtcggatgtagctg

SEQ ID NO: 9137 - DNA, 20 bp, synthetic construct
  source 1..20: mol_type = other DNA
cgtgtaccattggtgctcac

SEQ ID NO: 9138 - DNA, 20 bp, synthetic construct
  source 1..20: mol_type = other DNA
agaccgctgtgcccagtggt

SEQ ID NO: 9139 - DNA, 20 bp, synthetic construct
  source 1..20: mol_type = other DNA
gtatcagttcagaggccgcc

SEQ ID NO: 9140 - DNA, 20 bp, synthetic construct
  source 1..20: mol_type = other DNA
cggtatgtcttagactgcta

SEQ ID NO: 9141 - DNA, 20 bp, synthetic construct
  source 1..20: mol_type = other DNA
tagctcggtgtgctcgcctt

SEQ ID NO: 9142 - DNA, 20 bp, synthetic construct
  source 1..20: mol_type = other DNA
actcggttccagtgcatacc

SEQ ID NO: 9143 - DNA, 20 bp, synthetic construct
  source 1..20: mol_type = other DNA
gatgaaatagggataaggcc

SEQ ID NO: 9144 - DNA, 20 bp, synthetic construct
  source 1..20: mol_type = other DNA
gtactgtcgtcagtttgtct

SEQ ID NO: 9145 - DNA, 20 bp, synthetic construct
  source 1..20: mol_type = other DNA
gagatcccgtatcgcacaga

SEQ ID NO: 9146 - DNA, 20 bp, synthetic construct
  source 1..20: mol_type = other DNA
cactttcaactactctacag

SEQ ID NO: 9147 - DNA, 20 bp, synthetic construct
  source 1..20: mol_type = other DNA
atcagcatgtgctcagtcat

SEQ ID NO: 9148 - DNA, 20 bp, synthetic construct
  source 1..20: mol_type = other DNA
gtggtttgcatgcgttcatg

SEQ ID NO: 9149 - DNA, 20 bp, synthetic construct
  source 1..20: mol_type = other DNA
gcgctattacgggactttgt

SEQ ID NO: 9150 - DNA, 20 bp, synthetic construct
  source 1..20: mol_type = other DNA
tcacaagttgtccgtgtaga

SEQ ID NO: 9151 - DNA, 20 bp, synthetic construct
  source 1..20: mol_type = other DNA
gtcattcgcctatctatgat

SEQ ID NO: 9152 - DNA, 20 bp, synthetic construct
  source 1..20: mol_type = other DNA
ctaaggatccgcggtagtac

SEQ ID NO: 9153 - DNA, 20 bp, synthetic construct
  source 1..20: mol_type = other DNA
ccaattggacgttattagga

SEQ ID NO: 9154 - DNA, 20 bp, synthetic construct
  source 1..20: mol_type = other DNA
acgtaccaggtcaatggacc

SEQ ID NO: 9155 - DNA, 20 bp, synthetic construct
  source 1..20: mol_type = other DNA
cggaggctatatgggttctt

SEQ ID NO: 9156 - DNA, 20 bp, synthetic construct
  source 1..20: mol_type = other DNA
ggcaactcgatcagagttaa

SEQ ID NO: 9157 - DNA, 20 bp, synthetic construct
  source 1..20: mol_type = other DNA
aacgctgcagcaagtatcca

SEQ ID NO: 9158 - DNA, 20 bp, synthetic construct
  source 1..20: mol_type = other DNA
cgttactttgttgatcggcg

SEQ ID NO: 9159 - DNA, 20 bp, synthetic construct
  source 1..20: mol_type = other DNA
tgcgattaactttcttggat

SEQ ID NO: 9160 - DNA, 20 bp, synthetic construct
  source 1..20: mol_type = other DNA
taactcagtatacccactgc

SEQ ID NO: 9161 - DNA, 20 bp, synthetic construct
  source 1..20: mol_type = other DNA
agcaaccggtgtacctgacc

SEQ ID NO: 9162 - DNA, 20 bp, synthetic construct
  source 1..20: mol_type = other DNA
gtcctcctggcagaaggtcc

SEQ ID NO: 9163 - DNA, 20 bp, synthetic construct
  source 1..20: mol_type = other DNA
agaacagcagcagacgtaag

SEQ ID NO: 9164 - DNA, 20 bp, synthetic construct
  source 1..20: mol_type = other DNA
gcatccggatactcaacctc

SEQ ID NO: 9165 - DNA, 20 bp, synthetic construct
  source 1..20: mol_type = other DNA
aacgggctaaaccagactga

SEQ ID NO: 9166 - DNA, 20 bp, synthetic construct
  source 1..20: mol_type = other DNA
cgctatctgcgatgagccga

SEQ ID NO: 9167 - DNA, 20 bp, synthetic construct
  source 1..20: mol_type = other DNA
tatacaccagaatgacctcc

SEQ ID NO: 9168 - DNA, 20 bp, synthetic construct
  source 1..20: mol_type = other DNA
ccgaggaatctcggcagcgt

SEQ ID NO: 9169 - DNA, 20 bp, synthetic construct
  source 1..20: mol_type = other DNA
caagcaaatgacacgttact

SEQ ID NO: 9170 - DNA, 20 bp, synthetic construct
  source 1..20: mol_type = other DNA
gtcacttattaacacagaac

SEQ ID NO: 9171 - DNA, 20 bp, synthetic construct
  source 1..20: mol_type = other DNA
tcgtcgggcactgcttcgga

SEQ ID NO: 9172 - DNA, 20 bp, synthetic construct
  source 1..20: mol_type = other DNA
tttcatttcatctggccgct

SEQ ID NO: 9173 - DNA, 20 bp, synthetic construct
  source 1..20: mol_type = other DNA
gccatcgccagcataatgtc

SEQ ID NO: 9174 - DNA, 20 bp, synthetic construct
  source 1..20: mol_type = other DNA
cagcacagttatatgacttt

SEQ ID NO: 9175 - DNA, 20 bp, synthetic construct
  source 1..20: mol_type = other DNA
atctacattaccacaatggc

SEQ ID NO: 9176 - DNA, 20 bp, synthetic construct
  source 1..20: mol_type = other DNA
tactgactagtgggaccgtt

SEQ ID NO: 9177 - DNA, 20 bp, synthetic construct
  source 1..20: mol_type = other DNA
tgaagttgcaactcatcgcg

SEQ ID NO: 9178 - DNA, 20 bp, synthetic construct
  source 1..20: mol_type = other DNA
tggcaatgcagcggaggcaa

SEQ ID NO: 9179 - DNA, 20 bp, synthetic construct
  source 1..20: mol_type = other DNA
gcttacgtccggacgacaca

SEQ ID NO: 9180 - DNA, 20 bp, synthetic construct
  source 1..20: mol_type = other DNA
gccgtagcatatacaccctg

SEQ ID NO: 9181 - DNA, 20 bp, synthetic construct
  source 1..20: mol_type = other DNA
acttagggtcccgagtgctt

SEQ ID NO: 9182 - DNA, 20 bp, synthetic construct
  source 1..20: mol_type = other DNA
taagttatacggccgcccac

SEQ ID NO: 9183 - DNA, 20 bp, synthetic construct
  source 1..20: mol_type = other DNA
ggatacgggtatacgggctg

SEQ ID NO: 9184 - DNA, 20 bp, synthetic construct
  source 1..20: mol_type = other DNA
ccactaacagaccattgaat

SEQ ID NO: 9185 - DNA, 20 bp, synthetic construct
  source 1..20: mol_type = other DNA
ctaatccgctctctacgttc

SEQ ID NO: 9186 - DNA, 20 bp, synthetic construct
  source 1..20: mol_type = other DNA
cacgcggttgatatactggt

SEQ ID NO: 9187 - DNA, 20 bp, synthetic construct
  source 1..20: mol_type = other DNA
gtgcaccttgtctgcaaggc

SEQ ID NO: 9188 - DNA, 20 bp, synthetic construct
  source 1..20: mol_type = other DNA
ctattcatcatccagcattg

SEQ ID NO: 9189 - DNA, 20 bp, synthetic construct
  source 1..20: mol_type = other DNA
acatgcagtgtgatccagcg

SEQ ID NO: 9190 - DNA, 20 bp, synthetic construct
  source 1..20: mol_type = other DNA
gggcgcatccactagataat

SEQ ID NO: 9191 - DNA, 20 bp, synthetic construct
  source 1..20: mol_type = other DNA
gacgatctggtggaacatca

SEQ ID NO: 9192 - DNA, 20 bp, synthetic construct
  source 1..20: mol_type = other DNA
tcggatgtcgcctaagcgtt

SEQ ID NO: 9193 - DNA, 20 bp, synthetic construct
  source 1..20: mol_type = other DNA
cggtgatcctctcttgtcta

SEQ ID NO: 9194 - DNA, 20 bp, synthetic construct
  source 1..20: mol_type = other DNA
tggatgtcgtacaggccagg

SEQ ID NO: 9195 - DNA, 20 bp, synthetic construct
  source 1..20: mol_type = other DNA
gggagccaagtcggactttc

SEQ ID NO: 9196 - DNA, 20 bp, synthetic construct
  source 1..20: mol_type = other DNA
tcgctagggacatacacggt

SEQ ID NO: 9197 - DNA, 20 bp, synthetic construct
  source 1..20: mol_type = other DNA
ccatggaatgttataacatt

SEQ ID NO: 9198 - DNA, 20 bp, synthetic construct
  source 1..20: mol_type = other DNA
gctgtacctagtgcaatctt

SEQ ID NO: 9199 - DNA, 20 bp, synthetic construct
  source 1..20: mol_type = other DNA
acaaagatactggttaccca

SEQ ID NO: 9200 - DNA, 20 bp, synthetic construct
  source 1..20: mol_type = other DNA
tcctggacgttagcctacag

SEQ ID NO: 9201 - DNA, 20 bp, synthetic construct
  source 1..20: mol_type = other DNA
aagtgaaccaccgtgacaat

SEQ ID NO: 9202 - DNA, 20 bp, synthetic construct
  source 1..20: mol_type = other DNA
gaagatattatgaaccgctt

SEQ ID NO: 9203 - DNA, 20 bp, synthetic construct
  source 1..20: mol_type = other DNA
gcttgtgctctattcgatat

SEQ ID NO: 9204 - DNA, 20 bp, synthetic construct
  source 1..20: mol_type = other DNA
ttaggttagcaactcgatag

SEQ ID NO: 9205 - DNA, 20 bp, synthetic construct
  source 1..20: mol_type = other DNA
aacaccgaacagaagttggt

SEQ ID NO: 9206 - DNA, 20 bp, synthetic construct
  source 1..20: mol_type = other DNA
ttattccctagacccgattg

SEQ ID NO: 9207 - DNA, 20 bp, synthetic construct
  source 1..20: mol_type = other DNA
gcggcccatcacgtataagt

SEQ ID NO: 9208 - DNA, 20 bp, synthetic construct
  source 1..20: mol_type = other DNA
taatccactctcagtgacct

SEQ ID NO: 9209 - DNA, 20 bp, synthetic construct
  source 1..20: mol_type = other DNA
acgccctggtaccaaagcaa

SEQ ID NO: 9210 - DNA, 20 bp, synthetic construct
  source 1..20: mol_type = other DNA
gagtgttactccacggcgtt

SEQ ID NO: 9211 - DNA, 20 bp, synthetic construct
  source 1..20: mol_type = other DNA
tttaaacaggccgatccgta

SEQ ID NO: 9212 - DNA, 20 bp, synthetic construct
  source 1..20: mol_type = other DNA
gcttggctacaagaataacg

SEQ ID NO: 9213 - DNA, 20 bp, synthetic construct
  source 1..20: mol_type = other DNA
gctggcagcattgccatacg

SEQ ID NO: 9214 - DNA, 20 bp, synthetic construct
  source 1..20: mol_type = other DNA
ggccttctcgtgaaggtgca

SEQ ID NO: 9215 - DNA, 20 bp, synthetic construct
  source 1..20: mol_type = other DNA
tcaaatcttagtaaacaggg

SEQ ID NO: 9216 - DNA, 20 bp, synthetic construct
  source 1..20: mol_type = other DNA
taatcatgtatgccaatgcc

SEQ ID NO: 9217 - DNA, 20 bp, synthetic construct
  source 1..20: mol_type = other DNA
ctggagtcgctaaggatgaa

SEQ ID NO: 9218 - DNA, 20 bp, synthetic construct
  source 1..20: mol_type = other DNA
ttcagcgtcatcatgctgat

SEQ ID NO: 9219 - DNA, 20 bp, synthetic construct
  source 1..20: mol_type = other DNA
tttcctacgaagccacgatg

SEQ ID NO: 9220 - DNA, 20 bp, synthetic construct
  source 1..20: mol_type = other DNA
gtcatgttgccagtgctcgg

SEQ ID NO: 9221 - DNA, 20 bp, synthetic construct
  source 1..20: mol_type = other DNA
aattgcatgggtgggctaca

SEQ ID NO: 9222 - DNA, 20 bp, synthetic construct
  source 1..20: mol_type = other DNA
aattacgtacttcaccatct

SEQ ID NO: 9223 - DNA, 20 bp, synthetic construct
  source 1..20: mol_type = other DNA
ggtccactcattaacaaccg

SEQ ID NO: 9224 - DNA, 20 bp, synthetic construct
  source 1..20: mol_type = other DNA
ctttagagcatgatgtccat

SEQ ID NO: 9225 - DNA, 20 bp, synthetic construct
  source 1..20: mol_type = other DNA
agtaaagaccaccttatact

SEQ ID NO: 9226 - DNA, 20 bp, synthetic construct
  source 1..20: mol_type = other DNA
cgcgagaaaggaatggtaat

SEQ ID NO: 9227 - DNA, 20 bp, synthetic construct
  source 1..20: mol_type = other DNA
taagccatatgtcaggaggc

SEQ ID NO: 9228 - DNA, 20 bp, synthetic construct
  source 1..20: mol_type = other DNA
tgaggagagatttccctatc

SEQ ID NO: 9229 - DNA, 20 bp, synthetic construct
  source 1..20: mol_type = other DNA
ctaagtttaaagagtccgtc

SEQ ID NO: 9230 - DNA, 20 bp, synthetic construct
  source 1..20: mol_type = other DNA
tctgctcctcgtggcattac

SEQ ID NO: 9231 - DNA, 20 bp, synthetic construct
  source 1..20: mol_type = other DNA
cctgctaatagaaaggtctt

SEQ ID NO: 9232 - DNA, 20 bp, synthetic construct
  source 1..20: mol_type = other DNA
gtcaatctttcagggtacta

SEQ ID NO: 9233 - DNA, 20 bp, synthetic construct
  source 1..20: mol_type = other DNA
gaaacacgtaacactcgttg

SEQ ID NO: 9234 - DNA, 20 bp, synthetic construct
  source 1..20: mol_type = other DNA
tccgaaacacggacacctgt

SEQ ID NO: 9235 - DNA, 20 bp, synthetic construct
  source 1..20: mol_type = other DNA
gtcctgaactatcacctgaa

SEQ ID NO: 9236 - DNA, 20 bp, synthetic construct
  source 1..20: mol_type = other DNA
ctgcagatcataaggcagtc

SEQ ID NO: 9237 - DNA, 20 bp, synthetic construct
  source 1..20: mol_type = other DNA
tcctaaggcggtcccatagc

SEQ ID NO: 9238 - DNA, 20 bp, synthetic construct
  source 1..20: mol_type = other DNA
ccgcaatatggtccatccga

SEQ ID NO: 9239 - DNA, 20 bp, synthetic construct
  source 1..20: mol_type = other DNA
cccaattgttatcaccagtg

SEQ ID NO: 9240 - DNA, 20 bp, synthetic construct
  source 1..20: mol_type = other DNA
attaatttcctggagtatga

SEQ ID NO: 9241 - DNA, 20 bp, synthetic construct
  source 1..20: mol_type = other DNA
aacaagtccgagatggagga

SEQ ID NO: 9242 - DNA, 20 bp, synthetic construct
  source 1..20: mol_type = other DNA
gagattgcgcaacttaagat

SEQ ID NO: 9243 - DNA, 20 bp, synthetic construct
  source 1..20: mol_type = other DNA
ctaaacgtgggccaggagca

SEQ ID NO: 9244 - DNA, 20 bp, synthetic construct
  source 1..20: mol_type = other DNA
gatcctaggtcgaacactag

SEQ ID NO: 9245 - DNA, 20 bp, synthetic construct
  source 1..20: mol_type = other DNA
aacacttatcgccacgcacg

SEQ ID NO: 9246 - DNA, 20 bp, synthetic construct
  source 1..20: mol_type = other DNA
acttgtacccgcttctttgc

SEQ ID NO: 9247 - DNA, 20 bp, synthetic construct
  source 1..20: mol_type = other DNA
cgttctcgttacccggcgtc

SEQ ID NO: 9248 - DNA, 20 bp, synthetic construct
  source 1..20: mol_type = other DNA
gtaatcgttaacagcgctat

SEQ ID NO: 9249 - DNA, 20 bp, synthetic construct
  source 1..20: mol_type = other DNA
gtcagtactagttaagtacg

SEQ ID NO: 9250 - DNA, 20 bp, synthetic construct
  source 1..20: mol_type = other DNA
gtaaaggattatgagcggtc

SEQ ID NO: 9251 - DNA, 20 bp, synthetic construct
  source 1..20: mol_type = other DNA
atgactactactagcctacc

SEQ ID NO: 9252 - DNA, 20 bp, synthetic construct
  source 1..20: mol_type = other DNA
ttcgcaggtactgacaccat

SEQ ID NO: 9253 - DNA, 20 bp, synthetic construct
  source 1..20: mol_type = other DNA
ttatctggactctagcctga

SEQ ID NO: 9254 - DNA, 20 bp, synthetic construct
  source 1..20: mol_type = other DNA
ctgaatagcttacacatgga

SEQ ID NO: 9255 - DNA, 20 bp, synthetic construct
  source 1..20: mol_type = other DNA
tcaccttgaaactgtttaga

SEQ ID NO: 9256 - DNA, 20 bp, synthetic construct
  source 1..20: mol_type = other DNA
gtaccagggaccagtgcacg

SEQ ID NO: 9257 - DNA, 20 bp, synthetic construct
  source 1..20: mol_type = other DNA
cccactgctatcagtttaga

SEQ ID NO: 9258 - DNA, 20 bp, synthetic construct
  source 1..20: mol_type = other DNA
ctgttaccttattccacagg

SEQ ID NO: 9259 - DNA, 20 bp, synthetic construct
  source 1..20: mol_type = other DNA
gtcgaaaggtaattgcctag

SEQ ID NO: 9260 - DNA, 20 bp, synthetic construct
  source 1..20: mol_type = other DNA
cgcttacgagggtgaaaggc

SEQ ID NO: 9261 - DNA, 20 bp, synthetic construct
  source 1..20: mol_type = other DNA
tgacccgaacactgaccctg

SEQ ID NO: 9262 - DNA, 20 bp, synthetic construct
  source 1..20: mol_type = other DNA
catcaatcattgcactgcct

SEQ ID NO: 9263 - DNA, 20 bp, synthetic construct
  source 1..20: mol_type = other DNA
acctctgggagcgtggtagg

SEQ ID NO: 9264 - DNA, 20 bp, synthetic construct
  source 1..20: mol_type = other DNA
ttgtctcagtgcgagccaag

SEQ ID NO: 9265 - DNA, 20 bp, synthetic construct
  source 1..20: mol_type = other DNA
gtgatgtgtctaaacctttc

SEQ ID NO: 9266 - DNA, 20 bp, synthetic construct
  source 1..20: mol_type = other DNA
aatccattagagcttgtgta

SEQ ID NO: 9267 - DNA, 20 bp, synthetic construct
  source 1..20: mol_type = other DNA
acggagtgccttattgatcg

SEQ ID NO: 9268 - DNA, 20 bp, synthetic construct
  source 1..20: mol_type = other DNA
caactccaatgctaggaagt

SEQ ID NO: 9269 - DNA, 20 bp, synthetic construct
  source 1..20: mol_type = other DNA
tcctatgcagtttctttacc

SEQ ID NO: 9270 - DNA, 20 bp, synthetic construct
  source 1..20: mol_type = other DNA
aagtgagcggtgcgatcaag

SEQ ID NO: 9271 - DNA, 20 bp, synthetic construct
  source 1..20: mol_type = other DNA
ccagaaattacggtatatca

SEQ ID NO: 9272 - DNA, 20 bp, synthetic construct
  source 1..20: mol_type = other DNA
ctcaagctcccttgacggat

SEQ ID NO: 9273 - DNA, 20 bp, synthetic construct
  source 1..20: mol_type = other DNA
ttattgggtgtgcataacac

SEQ ID NO: 9274 - DNA, 20 bp, synthetic construct
  source 1..20: mol_type = other DNA
atgactatgtgccctatggc

SEQ ID NO: 9275 - DNA, 20 bp, synthetic construct
  source 1..20: mol_type = other DNA
ccgtacagtacgcttcgcct

SEQ ID NO: 9276 - DNA, 20 bp, synthetic construct
  source 1..20: mol_type = other DNA
catagtatgcccggatactt

SEQ ID NO: 9277 - DNA, 20 bp, synthetic construct
  source 1..20: mol_type = other DNA
gactatatgggctccgtccc

SEQ ID NO: 9278 - DNA, 20 bp, synthetic construct
  source 1..20: mol_type = other DNA
tacgacaagatgggattcga

SEQ ID NO: 9279 - DNA, 20 bp, synthetic construct
  source 1..20: mol_type = other DNA
ggacctaccgctgtcccatg

SEQ ID NO: 9280 - DNA, 20 bp, synthetic construct
  source 1..20: mol_type = other DNA
tacatacagggcttgagcta

SEQ ID NO: 9281 - DNA, 20 bp, synthetic construct
  source 1..20: mol_type = other DNA
ggtagctgcgggaccttgat

SEQ ID NO: 9282 - DNA, 20 bp, synthetic construct
  source 1..20: mol_type = other DNA
aagcggactgcggctgacac

SEQ ID NO: 9283 - DNA, 20 bp, synthetic construct
  source 1..20: mol_type = other DNA
ttagcagcgaatacggcgta

SEQ ID NO: 9284 - DNA, 20 bp, synthetic construct
  source 1..20: mol_type = other DNA
taggacctactatcatccca

SEQ ID NO: 9285 - DNA, 20 bp, synthetic construct
  source 1..20: mol_type = other DNA
gaggcactgccgtgagtctg

SEQ ID NO: 9286 - DNA, 20 bp, synthetic construct
  source 1..20: mol_type = other DNA
ggatagtaaccaaacacatc

SEQ ID NO: 9287 - DNA, 20 bp, synthetic construct
  source 1..20: mol_type = other DNA
agccgccgataggagcgtat

SEQ ID NO: 9288 - DNA, 20 bp, synthetic construct
  source 1..20: mol_type = other DNA
taaacagctcagcggatcct

SEQ ID NO: 9289 - DNA, 20 bp, synthetic construct
  source 1..20: mol_type = other DNA
gttgcgatctgggagctcgc

SEQ ID NO: 9290 - DNA, 20 bp, synthetic construct
  source 1..20: mol_type = other DNA
cagcagctcattcagccaga

SEQ ID NO: 9291 - DNA, 20 bp, synthetic construct
  source 1..20: mol_type = other DNA
aagccgtattacctggcata

SEQ ID NO: 9292 - DNA, 20 bp, synthetic construct
  source 1..20: mol_type = other DNA
gcaaacgcccgctaacaacc

SEQ ID NO: 9293 - DNA, 20 bp, synthetic construct
  source 1..20: mol_type = other DNA
cgaatacccgacagcggcga

SEQ ID NO: 9294 - DNA, 20 bp, synthetic construct
  source 1..20: mol_type = other DNA
accgactgtacagccgtctg

SEQ ID NO: 9295 - DNA, 20 bp, synthetic construct
  source 1..20: mol_type = other DNA
acgtgggagatgacagcgtg

SEQ ID NO: 9296 - DNA, 20 bp, synthetic construct
  source 1..20: mol_type = other DNA
gaggactttctcctggcaga

SEQ ID NO: 9297 - DNA, 20 bp, synthetic construct
  source 1..20: mol_type = other DNA
cgtcgaggtggctgagtgag

SEQ ID NO: 9298 - DNA, 20 bp, synthetic construct
  source 1..20: mol_type = other DNA
ctgaatccgctcaagattga

SEQ ID NO: 9299 - DNA, 20 bp, synthetic construct
  source 1..20: mol_type = other DNA
aatcattccgctccgccagc

SEQ ID NO: 9300 - DNA, 20 bp, synthetic construct
  source 1..20: mol_type = other DNA
atgcaaccgtccctgcgtgt

SEQ ID NO: 9301 - DNA, 20 bp, synthetic construct
  source 1..20: mol_type = other DNA
agcccaaccaccagaggatg

SEQ ID NO: 9302 - DNA, 20 bp, synthetic construct
  source 1..20: mol_type = other DNA
cggtcgtctttgaagtctgc

SEQ ID NO: 9303 - DNA, 20 bp, synthetic construct
  source 1..20: mol_type = other DNA
ctgggattcatagtgttcca

SEQ ID NO: 9304 - DNA, 20 bp, synthetic construct
  source 1..20: mol_type = other DNA
gcctcatctcctgccgatac

SEQ ID NO: 9305 - DNA, 20 bp, synthetic construct
  source 1..20: mol_type = other DNA
gcctaggtgtggtgtgccgt

SEQ ID NO: 9306 - DNA, 20 bp, synthetic construct
  source 1..20: mol_type = other DNA
actcgaatcctcagggaaga

SEQ ID NO: 9307 - DNA, 20 bp, synthetic construct
  source 1..20: mol_type = other DNA
tgcgcacagactatatggga

SEQ ID NO: 9308 - DNA, 20 bp, synthetic construct
  source 1..20: mol_type = other DNA
gctattaagactccgggtgc

SEQ ID NO: 9309 - DNA, 20 bp, synthetic construct
  source 1..20: mol_type = other DNA
ctaggaacacgactagagta

SEQ ID NO: 9310 - DNA, 20 bp, synthetic construct
  source 1..20: mol_type = other DNA
ggcaactagtaatgtgaata

SEQ ID NO: 9311 - DNA, 20 bp, synthetic construct
  source 1..20: mol_type = other DNA
gagcggctagccctgtgttt

SEQ ID NO: 9312 - DNA, 20 bp, synthetic construct
  source 1..20: mol_type = other DNA
gatacccgtggcttaagccg

SEQ ID NO: 9313 - DNA, 20 bp, synthetic construct
  source 1..20: mol_type = other DNA
acgagttgcaggacggtcac

SEQ ID NO: 9314 - DNA, 20 bp, synthetic construct
  source 1..20: mol_type = other DNA
gaccgtagttaatctgtcat

SEQ ID NO: 9315 - DNA, 20 bp, synthetic construct
  source 1..20: mol_type = other DNA
attacgcatggcggactgtc

SEQ ID NO: 9316 - DNA, 20 bp, synthetic construct
  source 1..20: mol_type = other DNA
ggtgacctgagatcgaatcg

SEQ ID NO: 9317 - DNA, 20 bp, synthetic construct
  source 1..20: mol_type = other DNA
ccgatcgatgacgtgtccgc

SEQ ID NO: 9318 - DNA, 20 bp, synthetic construct
  source 1..20: mol_type = other DNA
tccaagaccgggaaacagta

SEQ ID NO: 9319 - DNA, 20 bp, synthetic construct
  source 1..20: mol_type = other DNA
actgacgtgacgctggcgac

SEQ ID NO: 9320 - DNA, 20 bp, synthetic construct
  source 1..20: mol_type = other DNA
tgcgcaatatccaagacctg

SEQ ID NO: 9321 - DNA, 20 bp, synthetic construct
  source 1..20: mol_type = other DNA
ccagtcgttcgtataggtat

SEQ ID NO: 9322 - DNA, 20 bp, synthetic construct
  source 1..20: mol_type = other DNA
aatgcagttgttctaaagca

SEQ ID NO: 9323 - DNA, 20 bp, synthetic construct
  source 1..20: mol_type = other DNA
gttcacaaggttgtgtcaaa

SEQ ID NO: 9324 - DNA, 20 bp, synthetic construct
  source 1..20: mol_type = other DNA
agtatctctagctccagaca

SEQ ID NO: 9325 - DNA, 20 bp, synthetic construct
  source 1..20: mol_type = other DNA
atcaagccatatcaatctgg

SEQ ID NO: 9326 - DNA, 20 bp, synthetic construct
  source 1..20: mol_type = other DNA
cgcaatcacctctctttgcc

SEQ ID NO: 9327 - DNA, 20 bp, synthetic construct
  source 1..20: mol_type = other DNA
tctatatgctgtggtcccat

SEQ ID NO: 9328 - DNA, 20 bp, synthetic construct
  source 1..20: mol_type = other DNA
gacgcgtggtggtattggcc

SEQ ID NO: 9329 - DNA, 20 bp, synthetic construct
  source 1..20: mol_type = other DNA
tggttcatgagctggtacgg

SEQ ID NO: 9330 - DNA, 20 bp, synthetic construct
  source 1..20: mol_type = other DNA
cttggccgtcaagctcctta

SEQ ID NO: 9331 - DNA, 20 bp, synthetic construct
  source 1..20: mol_type = other DNA
ggtgtgcaatgttgtcgggc

SEQ ID NO: 9332 - DNA, 20 bp, synthetic construct
  source 1..20: mol_type = other DNA
ctgtccagcgcatgacttta

SEQ ID NO: 9333 - DNA, 20 bp, synthetic construct
  source 1..20: mol_type = other DNA
cgcattaatccagatgaagc

SEQ ID NO: 9334 - DNA, 20 bp, synthetic construct
  source 1..20: mol_type = other DNA
tttcgggattgactgacctc

SEQ ID NO: 9335 - DNA, 20 bp, synthetic construct
  source 1..20: mol_type = other DNA
gtgcggtgaacgagttggca

SEQ ID NO: 9336 - DNA, 20 bp, synthetic construct
  source 1..20: mol_type = other DNA
cgcgggtcgtcaaactcacg

SEQ ID NO: 9337 - DNA, 20 bp, synthetic construct
  source 1..20: mol_type = other DNA
cccgacttaattggcatgca

SEQ ID NO: 9338 - DNA, 20 bp, synthetic construct
  source 1..20: mol_type = other DNA
ccggaggtaagtgatacccg

SEQ ID NO: 9339 - DNA, 20 bp, synthetic construct
  source 1..20: mol_type = other DNA
aggatcgctgcaaactcgat

SEQ ID NO: 9340 - DNA, 20 bp, synthetic construct
  source 1..20: mol_type = other DNA
aacttcgtacggttcagtcc

SEQ ID NO: 9341 - DNA, 20 bp, synthetic construct
  source 1..20: mol_type = other DNA
tatcctaaccctctcgtgca

SEQ ID NO: 9342 - DNA, 20 bp, synthetic construct
  source 1..20: mol_type = other DNA
gatacgggcaaattcacaac

SEQ ID NO: 9343 - DNA, 20 bp, synthetic construct
  source 1..20: mol_type = other DNA
tcgagggagagataacgcat

SEQ ID NO: 9344 - DNA, 20 bp, synthetic construct
  source 1..20: mol_type = other DNA
cgtgactgtagtgccgatac

SEQ ID NO: 9345 - DNA, 20 bp, synthetic construct
  source 1..20: mol_type = other DNA
aacagcgacaaagctgcgca

SEQ ID NO: 9346 - DNA, 20 bp, synthetic construct
  source 1..20: mol_type = other DNA
cccacggtattcacaagtat

SEQ ID NO: 9347 - DNA, 20 bp, synthetic construct
  source 1..20: mol_type = other DNA
accagccgcaagtcgtgcac

SEQ ID NO: 9348 - DNA, 20 bp, synthetic construct
  source 1..20: mol_type = other DNA
gatcaatctgaagttctcca

SEQ ID NO: 9349 - DNA, 20 bp, synthetic construct
  source 1..20: mol_type = other DNA
gaataaacttcgaggctgag

SEQ ID NO: 9350 - DNA, 20 bp, synthetic construct
  source 1..20: mol_type = other DNA
ggctcacttgcagcctgatt

SEQ ID NO: 9351 - DNA, 20 bp, synthetic construct
  source 1..20: mol_type = other DNA
ttcgctgagtgctggattgg

SEQ ID NO: 9352 - DNA, 20 bp, synthetic construct
  source 1..20: mol_type = other DNA
ctgcgatgcacatcaaattg

SEQ ID NO: 9353 - DNA, 20 bp, synthetic construct
  source 1..20: mol_type = other DNA
accttcggagttgtatactc

SEQ ID NO: 9354 - DNA, 20 bp, synthetic construct
  source 1..20: mol_type = other DNA
agacgtgtttacctctggga

SEQ ID NO: 9355 - DNA, 20 bp, synthetic construct
  source 1..20: mol_type = other DNA
aaatcacgttccgggtgatg

SEQ ID NO: 9356 - DNA, 20 bp, synthetic construct
  source 1..20: mol_type = other DNA
tacaattagcgaacataatg

SEQ ID NO: 9357 - DNA, 20 bp, synthetic construct
  source 1..20: mol_type = other DNA
ccacaaggactgcattgtgc

SEQ ID NO: 9358 - DNA, 20 bp, synthetic construct
  source 1..20: mol_type = other DNA
cctcagtgtttctaaacgtt

SEQ ID NO: 9359 - DNA, 20 bp, synthetic construct
  source 1..20: mol_type = other DNA
tgagcctggcgaatgggcaa

SEQ ID NO: 9360 - DNA, 20 bp, synthetic construct
  source 1..20: mol_type = other DNA
gtatgcgataggacggatac

SEQ ID NO: 9361 - DNA, 20 bp, synthetic construct
  source 1..20: mol_type = other DNA
ttacccatgagaatgccatg

SEQ ID NO: 9362 - DNA, 20 bp, synthetic construct
  source 1..20: mol_type = other DNA
ccataagttgtgtagcgatg

SEQ ID NO: 9363 - DNA, 20 bp, synthetic construct
  source 1..20: mol_type = other DNA
caaatgcacttgcgtgaggg

SEQ ID NO: 9364 - DNA, 20 bp, synthetic construct
  source 1..20: mol_type = other DNA
aaccgtgcaaagaccacact

SEQ ID NO: 9365 - DNA, 20 bp, synthetic construct
  source 1..20: mol_type = other DNA
ggcttgcgtaccaccacttt

SEQ ID NO: 9366 - DNA, 20 bp, synthetic construct
  source 1..20: mol_type = other DNA
ttccaatgagcgcctcgact

SEQ ID NO: 9367 - DNA, 20 bp, synthetic construct
  source 1..20: mol_type = other DNA
cctcgcctacgctgatactt

SEQ ID NO: 9368 - DNA, 20 bp, synthetic construct
  source 1..20: mol_type = other DNA
ctctagtttgttgggcttaa

SEQ ID NO: 9369 - DNA, 20 bp, synthetic construct
  source 1..20: mol_type = other DNA
gtacattgcacccaaggcat

SEQ ID NO: 9370 - DNA, 20 bp, synthetic construct
  source 1..20: mol_type = other DNA
tgttggtgattaatcctgtg

SEQ ID NO: 9371 - DNA, 20 bp, synthetic construct
  source 1..20: mol_type = other DNA
acacactgtgagaaacgatt

SEQ ID NO: 9372 - DNA, 20 bp, synthetic construct
  source 1..20: mol_type = other DNA
aacgaaaccatttagggtca

SEQ ID NO: 9373 - DNA, 20 bp, synthetic construct
  source 1..20: mol_type = other DNA
ctgtccctacagcggaagtt

SEQ ID NO: 9374 - DNA, 20 bp, synthetic construct
  source 1..20: mol_type = other DNA
caagggaacctcaggttaga

SEQ ID NO: 9375 - DNA, 20 bp, synthetic construct
  source 1..20: mol_type = other DNA
acgctccgcattcaagtggg

SEQ ID NO: 9376 - DNA, 20 bp, synthetic construct
  source 1..20: mol_type = other DNA
tgcttgaccaaagacacggt

SEQ ID NO: 9377 - DNA, 20 bp, synthetic construct
  source 1..20: mol_type = other DNA
gctgcagtcatgtttagttg

SEQ ID NO: 9378 - DNA, 20 bp, synthetic construct
  source 1..20: mol_type = other DNA
cttccgcgcttaccgttcaa

SEQ ID NO: 9379 - DNA, 20 bp, synthetic construct
  source 1..20: mol_type = other DNA
tacgtgcagcatctcaagct

SEQ ID NO: 9380 - DNA, 20 bp, synthetic construct
  source 1..20: mol_type = other DNA
tgcttgtctcagtacatcca

SEQ ID NO: 9381 - DNA, 20 bp, synthetic construct
  source 1..20: mol_type = other DNA
ccgtcagtgaacagtgtttc

SEQ ID NO: 9382 - DNA, 20 bp, synthetic construct
  source 1..20: mol_type = other DNA
gagatgcctttcgatcctat

SEQ ID NO: 9383 - DNA, 20 bp, synthetic construct
  source 1..20: mol_type = other DNA
cccttgctaaatttgtcaac

SEQ ID NO: 9384 - DNA, 20 bp, synthetic construct
  source 1..20: mol_type = other DNA
gacacagcctattatctcaa

SEQ ID NO: 9385 - DNA, 20 bp, synthetic construct
  source 1..20: mol_type = other DNA
cttaactggaggtgacgcgc

SEQ ID NO: 9386 - DNA, 20 bp, synthetic construct
  source 1..20: mol_type = other DNA
cgttccaaatgacacgcggg

SEQ ID NO: 9387 - DNA, 20 bp, synthetic construct
  source 1..20: mol_type = other DNA
tggcaagaccacaacgaacc

SEQ ID NO: 9388 - DNA, 20 bp, synthetic construct
  source 1..20: mol_type = other DNA
tacctcatagccaaagcgcc

SEQ ID NO: 9389 - DNA, 20 bp, synthetic construct
  source 1..20: mol_type = other DNA
cgtgcactcttgatacgcgc

SEQ ID NO: 9390 - DNA, 20 bp, synthetic construct
  source 1..20: mol_type = other DNA
gtatggctgtcatgcatccc

SEQ ID NO: 9391 - DNA, 20 bp, synthetic construct
  source 1..20: mol_type = other DNA
ctacattaccgtggttacat

SEQ ID NO: 9392 - DNA, 20 bp, synthetic construct
  source 1..20: mol_type = other DNA
catatcggatgtggagttcg

SEQ ID NO: 9393 - DNA, 20 bp, synthetic construct
  source 1..20: mol_type = other DNA
aacctctgtacgttgaagcg

SEQ ID NO: 9394 - DNA, 20 bp, synthetic construct
  source 1..20: mol_type = other DNA
cacctccgcctccatatcgt

SEQ ID NO: 9395 - DNA, 20 bp, synthetic construct
  source 1..20: mol_type = other DNA
ctactttcggtcacacacca

SEQ ID NO: 9396 - DNA, 20 bp, synthetic construct
  source 1..20: mol_type = other DNA
ggcgaccatttgagctacta

SEQ ID NO: 9397 - DNA, 20 bp, synthetic construct
  source 1..20: mol_type = other DNA
tattattccggcatttgcgg

SEQ ID NO: 9398 - DNA, 20 bp, synthetic construct
  source 1..20: mol_type = other DNA
gcagtataggctccctcgga

SEQ ID NO: 9399 - DNA, 20 bp, synthetic construct
  source 1..20: mol_type = other DNA
aacgaaatcctcgctaacgt

SEQ ID NO: 9400 - DNA, 20 bp, synthetic construct
  source 1..20: mol_type = other DNA
ccaaggattgatcatgtagg

SEQ ID NO: 9401 - DNA, 20 bp, synthetic construct
  source 1..20: mol_type = other DNA
agagggagtcggagcgtcgt

SEQ ID NO: 9402 - DNA, 20 bp, synthetic construct
  source 1..20: mol_type = other DNA
atctatctactgaccgacat

SEQ ID NO: 9403 - DNA, 20 bp, synthetic construct
  source 1..20: mol_type = other DNA
tcgtaactgtttgtcaatgg

SEQ ID NO: 9404 - DNA, 20 bp, synthetic construct
  source 1..20: mol_type = other DNA
gcgcagacatgtaaatgcga

SEQ ID NO: 9405 - DNA, 20 bp, synthetic construct
  source 1..20: mol_type = other DNA
tgtgcaatgttgtggagcgc

SEQ ID NO: 9406 - DNA, 20 bp, synthetic construct
  source 1..20: mol_type = other DNA
agagttattaatctgacaca

SEQ ID NO: 9407 - DNA, 20 bp, synthetic construct
  source 1..20: mol_type = other DNA
gcctcggcaacgatatggcg

SEQ ID NO: 9408 - DNA, 20 bp, synthetic construct
  source 1..20: mol_type = other DNA
gcgcgaaagctatttgaatg

SEQ ID NO: 9409 - DNA, 20 bp, synthetic construct
  source 1..20: mol_type = other DNA
acggaggcctcagtcacccg

SEQ ID NO: 9410 - DNA, 20 bp, synthetic construct
  source 1..20: mol_type = other DNA
gtttggacaacgtctgcaac

SEQ ID NO: 9411 - DNA, 20 bp, synthetic construct
  source 1..20: mol_type = other DNA
tagcttgatagctcacctgt

SEQ ID NO: 9412 - DNA, 20 bp, synthetic construct
  source 1..20: mol_type = other DNA
atctcgttaccggaatgtta

SEQ ID NO: 9413 - DNA, 20 bp, synthetic construct
  source 1..20: mol_type = other DNA
aatgactttaaacggagagg

SEQ ID NO: 9414 - DNA, 20 bp, synthetic construct
  source 1..20: mol_type = other DNA
gatgcggtttaagcaagcgt

SEQ ID NO: 9415 - DNA, 20 bp, synthetic construct
  source 1..20: mol_type = other DNA
cgatcagagcaacacctgcg

SEQ ID NO: 9416 - DNA, 20 bp, synthetic construct
  source 1..20: mol_type = other DNA
acgatcgtttgagacaggac

SEQ ID NO: 9417 - DNA, 20 bp, synthetic construct
  source 1..20: mol_type = other DNA
aggcgtagacctctatgaca

SEQ ID NO: 9418 - DNA, 20 bp, synthetic construct
  source 1..20: mol_type = other DNA
ttggaaagtcttgtgtaggc

SEQ ID NO: 9419 - DNA, 20 bp, synthetic construct
  source 1..20: mol_type = other DNA
gtacgacgtctggcgggact

SEQ ID NO: 9420 - DNA, 20 bp, synthetic construct
  source 1..20: mol_type = other DNA
acgaatttcgcattctttgc

SEQ ID NO: 9421 - DNA, 20 bp, synthetic construct
  source 1..20: mol_type = other DNA
ggctacgtctgccacttatg

SEQ ID NO: 9422 - DNA, 20 bp, synthetic construct
  source 1..20: mol_type = other DNA
atccagcgctgctatgctag

SEQ ID NO: 9423 - DNA, 20 bp, synthetic construct
  source 1..20: mol_type = other DNA
gtcgctcaactatagtaacg

SEQ ID NO: 9424 - DNA, 20 bp, synthetic construct
  source 1..20: mol_type = other DNA
cgttcgggcaagcgactgat

SEQ ID NO: 9425 - DNA, 20 bp, synthetic construct
  source 1..20: mol_type = other DNA
aacatcatatcggagccatg

SEQ ID NO: 9426 - DNA, 20 bp, synthetic construct
  source 1..20: mol_type = other DNA
tacagcctacccagatcgca

SEQ ID NO: 9427 - DNA, 20 bp, synthetic construct
  source 1..20: mol_type = other DNA
tgagctctcgctatgcctgt

SEQ ID NO: 9428 - DNA, 20 bp, synthetic construct
  source 1..20: mol_type = other DNA
catgttcagcaacctctgac

SEQ ID NO: 9429 - DNA, 20 bp, synthetic construct
  source 1..20: mol_type = other DNA
taatgaagagtaactgcggc

SEQ ID NO: 9430 - DNA, 20 bp, synthetic construct
  source 1..20: mol_type = other DNA
ttagtcccagggacgtgcac

SEQ ID NO: 9431 - DNA, 20 bp, synthetic construct
  source 1..20: mol_type = other DNA
tgatggctcgcgtatgttcc

SEQ ID NO: 9432 - DNA, 20 bp, synthetic construct
  source 1..20: mol_type = other DNA
ctaactgggagcccacgact

SEQ ID NO: 9433 - DNA, 20 bp, synthetic construct
  source 1..20: mol_type = other DNA
gaacgtcaaatgtagaggct

SEQ ID NO: 9434 - DNA, 20 bp, synthetic construct
  source 1..20: mol_type = other DNA
aaaccgccttatgaccgttc

SEQ ID NO: 9435 - DNA, 20 bp, synthetic construct
  source 1..20: mol_type = other DNA
ggactgtgtggtgcgggaaa

SEQ ID NO: 9436 - DNA, 20 bp, synthetic construct
  source 1..20: mol_type = other DNA
ttgtatctcgccaggtgcct

SEQ ID NO: 9437 - DNA, 20 bp, synthetic construct
  source 1..20: mol_type = other DNA
cgaagggcccacgaatatca

SEQ ID NO: 9438 - DNA, 20 bp, synthetic construct
  source 1..20: mol_type = other DNA
tcccacgagtcgagtcacgt

SEQ ID NO: 9439 - DNA, 20 bp, synthetic construct
  source 1..20: mol_type = other DNA
gtagcccgcgtttgccgata

SEQ ID NO: 9440 - DNA, 20 bp, synthetic construct
  source 1..20: mol_type = other DNA
accaatcttgagcgaactgt

SEQ ID NO: 9441 - DNA, 20 bp, synthetic construct
  source 1..20: mol_type = other DNA
aagccggtaggcaatgcctt

SEQ ID NO: 9442 - DNA, 20 bp, synthetic construct
  source 1..20: mol_type = other DNA
agtgtaggtatccatcgtag

SEQ ID NO: 9443 - DNA, 20 bp, synthetic construct
  source 1..20: mol_type = other DNA
ctggtagtgaccgagattag

SEQ ID NO: 9444 - DNA, 20 bp, synthetic construct
  source 1..20: mol_type = other DNA
cgagagttctttacactctg

SEQ ID NO: 9445 - DNA, 20 bp, synthetic construct
  source 1..20: mol_type = other DNA
gcatatgagaatttgatccc

SEQ ID NO: 9446 - DNA, 20 bp, synthetic construct
  source 1..20: mol_type = other DNA
agattacattgagtaacgct

SEQ ID NO: 9447 - DNA, 20 bp, synthetic construct
  source 1..20: mol_type = other DNA
tgactggcacaatgtaagat

SEQ ID NO: 9448 - DNA, 20 bp, synthetic construct
  source 1..20: mol_type = other DNA
taattacggcggtcaaatga

SEQ ID NO: 9449 - DNA, 20 bp, synthetic construct
  source 1..20: mol_type = other DNA
acccgagtacaatgtctgcc

SEQ ID NO: 9450 - DNA, 20 bp, synthetic construct
  source 1..20: mol_type = other DNA
gctgctatatggaacatacc

SEQ ID NO: 9451 - DNA, 20 bp, synthetic construct
  source 1..20: mol_type = other DNA
agcgtagacgatttcgtcct

SEQ ID NO: 9452 - DNA, 20 bp, synthetic construct
  source 1..20: mol_type = other DNA
gtacgccggaaccgtacatc

SEQ ID NO: 9453 - DNA, 20 bp, synthetic construct
  source 1..20: mol_type = other DNA
aatgaaggtcgggagtcaga

SEQ ID NO: 9454 - DNA, 20 bp, synthetic construct
  source 1..20: mol_type = other DNA
agccaaggccatcagcccag

SEQ ID NO: 9455 - DNA, 20 bp, synthetic construct
  source 1..20: mol_type = other DNA
tctacttcaccgatgatatt

SEQ ID NO: 9456 - DNA, 20 bp, synthetic construct
  source 1..20: mol_type = other DNA
gtctggtcattaccctgcaa

SEQ ID NO: 9457 - DNA, 20 bp, synthetic construct
  source 1..20: mol_type = other DNA
cattagtctcggcatcgagc

SEQ ID NO: 9458 - DNA, 20 bp, synthetic construct
  source 1..20: mol_type = other DNA
aggagctatcagaatatcgg

SEQ ID NO: 9459 - DNA, 20 bp, synthetic construct
  source 1..20: mol_type = other DNA
acatgccaaaccagcgcgtc

SEQ ID NO: 9460 - DNA, 20 bp, synthetic construct
  source 1..20: mol_type = other DNA
ccgggatcaaccgcctatgg

SEQ ID NO: 9461 - DNA, 20 bp, synthetic construct
  source 1..20: mol_type = other DNA
gaaccattcaggcagattag

SEQ ID NO: 9462 - DNA, 20 bp, synthetic construct
  source 1..20: mol_type = other DNA
cctcgatgatattggtatgt

SEQ ID NO: 9463 - DNA, 20 bp, synthetic construct
  source 1..20: mol_type = other DNA
ggtaaatgggtatcgaccga

SEQ ID NO: 9464 - DNA, 20 bp, synthetic construct
  source 1..20: mol_type = other DNA
gtctacagttgacctaagct

SEQ ID NO: 9465 - DNA, 20 bp, synthetic construct
  source 1..20: mol_type = other DNA
gtcgcataactccctgccca

SEQ ID NO: 9466 - DNA, 20 bp, synthetic construct
  source 1..20: mol_type = other DNA
tctggaagttgtaggcctag

SEQ ID NO: 9467 - DNA, 20 bp, synthetic construct
  source 1..20: mol_type = other DNA
gtggctccaagattgaatac

SEQ ID NO: 9468 - DNA, 20 bp, synthetic construct
  source 1..20: mol_type = other DNA
cgaacgcagtaccaggctct

SEQ ID NO: 9469 - DNA, 20 bp, synthetic construct
  source 1..20: mol_type = other DNA
cgagacgaaaccgggagaca

SEQ ID NO: 9470 - DNA, 20 bp, synthetic construct
  source 1..20: mol_type = other DNA
tctccaagtacttaaggacc

SEQ ID NO: 9471 - DNA, 20 bp, synthetic construct
  source 1..20: mol_type = other DNA
cgtgaactacatcaatgcat

SEQ ID NO: 9472 - DNA, 20 bp, synthetic construct
  source 1..20: mol_type = other DNA
ctacattaggtcgctgaccg

SEQ ID NO: 9473 - DNA, 20 bp, synthetic construct
  source 1..20: mol_type = other DNA
tctcaatgcgcagagcatta

SEQ ID NO: 9474 - DNA, 20 bp, synthetic construct
  source 1..20: mol_type = other DNA
aacagtctcaatttgagatc

SEQ ID NO: 9475 - DNA, 20 bp, synthetic construct
  source 1..20: mol_type = other DNA
ccttactatactgatccgcg

SEQ ID NO: 9476 - DNA, 20 bp, synthetic construct
  source 1..20: mol_type = other DNA
tctcccagccgcaactaaag

SEQ ID NO: 9477 - DNA, 20 bp, synthetic construct
  source 1..20: mol_type = other DNA
agtgtttagcggcccatggt

SEQ ID NO: 9478 - DNA, 20 bp, synthetic construct
  source 1..20: mol_type = other DNA
cgaataaacctgacatgaga

SEQ ID NO: 9479 - DNA, 20 bp, synthetic construct
  source 1..20: mol_type = other DNA
gaaagaaatgggcgggtttc

SEQ ID NO: 9480 - DNA, 20 bp, synthetic construct
  source 1..20: mol_type = other DNA
gttgtgagtgctgggtcaag

SEQ ID NO: 9481 - DNA, 20 bp, synthetic construct
  source 1..20: mol_type = other DNA
cattcgggttggcacaaata

SEQ ID NO: 9482 - DNA, 20 bp, synthetic construct
  source 1..20: mol_type = other DNA
acggaagtcgttcgaagcgg

SEQ ID NO: 9483 - DNA, 20 bp, synthetic construct
  source 1..20: mol_type = other DNA
ccctacactagaattaggaa

SEQ ID NO: 9484 - DNA, 20 bp, synthetic construct
  source 1..20: mol_type = other DNA
tggcatatgatggtttgttg

SEQ ID NO: 9485 - DNA, 20 bp, synthetic construct
  source 1..20: mol_type = other DNA
cgttccgtccgttacgatcc

SEQ ID NO: 9486 - DNA, 20 bp, synthetic construct
  source 1..20: mol_type = other DNA
gggctcacctttgtttatag

SEQ ID NO: 9487 - DNA, 20 bp, synthetic construct
  source 1..20: mol_type = other DNA
cgaacagtacaacgcctctg

SEQ ID NO: 9488 - DNA, 20 bp, synthetic construct
  source 1..20: mol_type = other DNA
tgtccgtcagcaacaggtcg

SEQ ID NO: 9489 - DNA, 20 bp, synthetic construct
  source 1..20: mol_type = other DNA
ttgttcgaccgcgaagtatt

SEQ ID NO: 9490 - DNA, 20 bp, synthetic construct
  source 1..20: mol_type = other DNA
ctaatcaccgagattcctcg

SEQ ID NO: 9491 - DNA, 20 bp, synthetic construct
  source 1..20: mol_type = other DNA
ttctaattgcgggcgtgagc

SEQ ID NO: 9492 - DNA, 20 bp, synthetic construct
  source 1..20: mol_type = other DNA
ccagtcactactgcccacct

SEQ ID NO: 9493 - DNA, 20 bp, synthetic construct
  source 1..20: mol_type = other DNA
agggttggaaaccgcagtta

SEQ ID NO: 9494 - DNA, 20 bp, synthetic construct
  source 1..20: mol_type = other DNA
acgagttgcacgtataattc

SEQ ID NO: 9495 - DNA, 20 bp, synthetic construct
  source 1..20: mol_type = other DNA
gttgaccgacgccgctacta

SEQ ID NO: 9496 - DNA, 20 bp, synthetic construct
  source 1..20: mol_type = other DNA
gagtggtaatcgtctcggtg

SEQ ID NO: 9497 - DNA, 20 bp, synthetic construct
  source 1..20: mol_type = other DNA
tatgccgttcttggcgggct

SEQ ID NO: 9498 - DNA, 20 bp, synthetic construct
  source 1..20: mol_type = other DNA
gatagctgcctcgccacaat

SEQ ID NO: 9499 - DNA, 20 bp, synthetic construct
  source 1..20: mol_type = other DNA
tgactttagcactgagacga

SEQ ID NO: 9500 - DNA, 20 bp, synthetic construct
  source 1..20: mol_type = other DNA
tgaactcccgtgtgtacgtt

SEQ ID NO: 9501 - DNA, 20 bp, synthetic construct
  source 1..20: mol_type = other DNA
gttacagacggtgcctcgga

SEQ ID NO: 9502 - DNA, 20 bp, synthetic construct
  source 1..20: mol_type = other DNA
cattgccttcctatggtcct

SEQ ID NO: 9503 - DNA, 20 bp, synthetic construct
  source 1..20: mol_type = other DNA
catccagtagtgagcggcca

SEQ ID NO: 9504 - DNA, 20 bp, synthetic construct
  source 1..20: mol_type = other DNA
ccaatgcgataatgctccag

SEQ ID NO: 9505 - DNA, 20 bp, synthetic construct
  source 1..20: mol_type = other DNA
tttggttagattcgtagccc

SEQ ID NO: 9506 - DNA, 20 bp, synthetic construct
  source 1..20: mol_type = other DNA
gtgatcactgacgtcaggct

SEQ ID NO: 9507 - DNA, 20 bp, synthetic construct
  source 1..20: mol_type = other DNA
cacgggtgcgcttagctgcc

SEQ ID NO: 9508 - DNA, 20 bp, synthetic construct
  source 1..20: mol_type = other DNA
aataggtaggtacatacggg

SEQ ID NO: 9509 - DNA, 20 bp, synthetic construct
  source 1..20: mol_type = other DNA
acactcagggcagtcggaca

SEQ ID NO: 9510 - DNA, 20 bp, synthetic construct
  source 1..20: mol_type = other DNA
ttccacttgcgtagccgtct

SEQ ID NO: 9511 - DNA, 20 bp, synthetic construct
  source 1..20: mol_type = other DNA
ttcttctatgttgccacaga

SEQ ID NO: 9512 - DNA, 20 bp, synthetic construct
  source 1..20: mol_type = other DNA
atgctagagtgggaggacca

SEQ ID NO: 9513 - DNA, 20 bp, synthetic construct
  source 1..20: mol_type = other DNA
cgtggcgtcatcagtcctac

SEQ ID NO: 9514 - DNA, 20 bp, synthetic construct
  source 1..20: mol_type = other DNA
ctgtcacggaactatctacg

SEQ ID NO: 9515 - DNA, 20 bp, synthetic construct
  source 1..20: mol_type = other DNA
tcctcatcgctcagccacag

SEQ ID NO: 9516 - DNA, 20 bp, synthetic construct
  source 1..20: mol_type = other DNA
aaacaagcccacggagtccc

SEQ ID NO: 9517 - DNA, 20 bp, synthetic construct
  source 1..20: mol_type = other DNA
gtatcaagcctcctgtatct

SEQ ID NO: 9518 - DNA, 20 bp, synthetic construct
  source 1..20: mol_type = other DNA
ccgattatacgtaactcgtt

SEQ ID NO: 9519 - DNA, 20 bp, synthetic construct
  source 1..20: mol_type = other DNA
attatgccgttcggtcattt

SEQ ID NO: 9520 - DNA, 20 bp, synthetic construct
  source 1..20: mol_type = other DNA
gctaggtgggaacaacttca

SEQ ID NO: 9521 - DNA, 20 bp, synthetic construct
  source 1..20: mol_type = other DNA
cgccctgacaatggagactc

SEQ ID NO: 9522 - DNA, 20 bp, synthetic construct
  source 1..20: mol_type = other DNA
ggttatcgtgtacaggaccg

SEQ ID NO: 9523 - DNA, 20 bp, synthetic construct
  source 1..20: mol_type = other DNA
taagtggtatccgtctacgt

SEQ ID NO: 9524 - DNA, 20 bp, synthetic construct
  source 1..20: mol_type = other DNA
accatctacctggatcgata

SEQ ID NO: 9525 - DNA, 20 bp, synthetic construct
  source 1..20: mol_type = other DNA
aagggcgcatacatgacatt

SEQ ID NO: 9526 - DNA, 20 bp, synthetic construct
  source 1..20: mol_type = other DNA
tggtcgaaatgctcagtcca

SEQ ID NO: 9527 - DNA, 20 bp, synthetic construct
  source 1..20: mol_type = other DNA
ttcgctgatacaccacgata

SEQ ID NO: 9528 - DNA, 20 bp, synthetic construct
  source 1..20: mol_type = other DNA
cactccggtgcatttcttcc

SEQ ID NO: 9529 - DNA, 20 bp, synthetic construct
  source 1..20: mol_type = other DNA
ctgtgacaagcagccacctg

SEQ ID NO: 9530 - DNA, 20 bp, synthetic construct
  source 1..20: mol_type = other DNA
catcacacaggatacaaggt

SEQ ID NO: 9531 - DNA, 20 bp, synthetic construct
  source 1..20: mol_type = other DNA
gggtgcatgtctcgttatta

SEQ ID NO: 9532 - DNA, 20 bp, synthetic construct
  source 1..20: mol_type = other DNA
tcccgaacgctcgacgatcc

SEQ ID NO: 9533 - DNA, 20 bp, synthetic construct
  source 1..20: mol_type = other DNA
agcatacttcctttcttaac

SEQ ID NO: 9534 - DNA, 20 bp, synthetic construct
  source 1..20: mol_type = other DNA
gccgggaaggacccacctat

SEQ ID NO: 9535 - DNA, 20 bp, synthetic construct
  source 1..20: mol_type = other DNA
tatcctttgtaggagtatcg

SEQ ID NO: 9536 - DNA, 20 bp, synthetic construct
  source 1..20: mol_type = other DNA
ctaatcggtttacgggcggg

SEQ ID NO: 9537 - DNA, 20 bp, synthetic construct
  source 1..20: mol_type = other DNA
ttggatgtccgctcgctgtg

SEQ ID NO: 9538 - DNA, 20 bp, synthetic construct
  source 1..20: mol_type = other DNA
cgtgatagcatagagacaat

SEQ ID NO: 9539 - DNA, 20 bp, synthetic construct
  source 1..20: mol_type = other DNA
atctgttatggtactctatg

SEQ ID NO: 9540 - DNA, 20 bp, synthetic construct
  source 1..20: mol_type = other DNA
ataaacgcgacctcctgctc

SEQ ID NO: 9541 - DNA, 20 bp, synthetic construct
  source 1..20: mol_type = other DNA
tgacacataaccttgtcctc

SEQ ID NO: 9542 - DNA, 20 bp, synthetic construct
  source 1..20: mol_type = other DNA
cccatcagtcgagggaacgg

SEQ ID NO: 9543 - DNA, 20 bp, synthetic construct
  source 1..20: mol_type = other DNA
gatgaaatcatcttcggatg

SEQ ID NO: 9544 - DNA, 20 bp, synthetic construct
  source 1..20: mol_type = other DNA
tgacacatcattcaaccagg

SEQ ID NO: 9545 - DNA, 20 bp, synthetic construct
  source 1..20: mol_type = other DNA
agatcagaaatggcgtgacc

SEQ ID NO: 9546 - DNA, 20 bp, synthetic construct
  source 1..20: mol_type = other DNA
tggtattattatcctcgtaa

SEQ ID NO: 9547 - DNA, 20 bp, synthetic construct
  source 1..20: mol_type = other DNA
gggacagaagaggcgtatca

SEQ ID NO: 9548 - DNA, 20 bp, synthetic construct
  source 1..20: mol_type = other DNA
tactggcccaatcataagat

SEQ ID NO: 9549 - DNA, 20 bp, synthetic construct
  source 1..20: mol_type = other DNA
gcacacaagtcgtaaacatg

SEQ ID NO: 9550 - DNA, 20 bp, synthetic construct
  source 1..20: mol_type = other DNA
aatagctacaagattgtcca

SEQ ID NO: 9551 - DNA, 20 bp, synthetic construct
  source 1..20: mol_type = other DNA
cgctattgctcatcctggag

SEQ ID NO: 9552 - DNA, 20 bp, synthetic construct
  source 1..20: mol_type = other DNA
ttacacaatgcgtccggcaa

SEQ ID NO: 9553 - DNA, 20 bp, synthetic construct
  source 1..20: mol_type = other DNA
aagttcgatggctctcctta

SEQ ID NO: 9554 - DNA, 20 bp, synthetic construct
  source 1..20: mol_type = other DNA
aatcgagatatagacgagac

SEQ ID NO: 9555 - DNA, 20 bp, synthetic construct
  source 1..20: mol_type = other DNA
cgtaatcttatagccaagag

SEQ ID NO: 9556 - DNA, 20 bp, synthetic construct
  source 1..20: mol_type = other DNA
gtgataacgtcttgagactg

SEQ ID NO: 9557 - DNA, 20 bp, synthetic construct
  source 1..20: mol_type = other DNA
tccgaggaacagcataaaca

SEQ ID NO: 9558 - DNA, 20 bp, synthetic construct
  source 1..20: mol_type = other DNA
gggttgctatatgcagtact

SEQ ID NO: 9559 - DNA, 20 bp, synthetic construct
  source 1..20: mol_type = other DNA
gtgcctcacattgctaacag

SEQ ID NO: 9560 - DNA, 20 bp, synthetic construct
  source 1..20: mol_type = other DNA
atagtgagagctcgataagg

SEQ ID NO: 9561 - DNA, 20 bp, synthetic construct
  source 1..20: mol_type = other DNA
gcctatctaactacatcgga

SEQ ID NO: 9562 - DNA, 20 bp, synthetic construct
  source 1..20: mol_type = other DNA
acccgtgatgcatgccggtc

SEQ ID NO: 9563 - DNA, 20 bp, synthetic construct
  source 1..20: mol_type = other DNA
tgctgcccagcgtgatgcct

SEQ ID NO: 9564 - DNA, 20 bp, synthetic construct
  source 1..20: mol_type = other DNA
atagtaggagactgtatcag

SEQ ID NO: 9565 - DNA, 20 bp, synthetic construct
  source 1..20: mol_type = other DNA
ttctcgctacccacaagtca

SEQ ID NO: 9566 - DNA, 20 bp, synthetic construct
  source 1..20: mol_type = other DNA
tagtattgtcgtgtacgcta

SEQ ID NO: 9567 - DNA, 20 bp, synthetic construct
  source 1..20: mol_type = other DNA
actccatggagttcacctcg

SEQ ID NO: 9568 - DNA, 20 bp, synthetic construct
  source 1..20: mol_type = other DNA
tatgcgccataacgtagtag

SEQ ID NO: 9569 - DNA, 20 bp, synthetic construct
  source 1..20: mol_type = other DNA
ttggtaaacatcacacacac

SEQ ID NO: 9570 - DNA, 20 bp, synthetic construct
  source 1..20: mol_type = other DNA
tgggacgcatgactggtaca

SEQ ID NO: 9571 - DNA, 20 bp, synthetic construct
  source 1..20: mol_type = other DNA
ccactacgctgacgcttcag

SEQ ID NO: 9572 - DNA, 20 bp, synthetic construct
  source 1..20: mol_type = other DNA
tcctacgaacgcggctaagt

SEQ ID NO: 9573 - DNA, 20 bp, synthetic construct
  source 1..20: mol_type = other DNA
gttgctcagtctctccgtct

SEQ ID NO: 9574 - DNA, 20 bp, synthetic construct
  source 1..20: mol_type = other DNA
ccggatatagacggagattt

SEQ ID NO: 9575 - DNA, 20 bp, synthetic construct
  source 1..20: mol_type = other DNA
catagaccgagtcgtcatgt

SEQ ID NO: 9576 - DNA, 20 bp, synthetic construct
  source 1..20: mol_type = other DNA
gttacctcgtggctgtaggc

SEQ ID NO: 9577 - DNA, 20 bp, synthetic construct
  source 1..20: mol_type = other DNA
ggttaatctgcgatcacttt

SEQ ID NO: 9578 - DNA, 20 bp, synthetic construct
  source 1..20: mol_type = other DNA
ctacccgatgcctctcaatc

SEQ ID NO: 9579 - DNA, 20 bp, synthetic construct
  source 1..20: mol_type = other DNA
cgacccaagtctacgattag

SEQ ID NO: 9580 - DNA, 20 bp, synthetic construct
  source 1..20: mol_type = other DNA
ctatgctgaccataccatag

SEQ ID NO: 9581 - DNA, 20 bp, synthetic construct
  source 1..20: mol_type = other DNA
caggttagacagagcggctc

SEQ ID NO: 9582 - DNA, 20 bp, synthetic construct
  source 1..20: mol_type = other DNA
tagctggaccagttgcatcg

SEQ ID NO: 9583 - DNA, 20 bp, synthetic construct
  source 1..20: mol_type = other DNA
agagattacgtcttcagggc

SEQ ID NO: 9584 - DNA, 20 bp, synthetic construct
  source 1..20: mol_type = other DNA
aatactgccgctgctctgaa

SEQ ID NO: 9585 - DNA, 20 bp, synthetic construct
  source 1..20: mol_type = other DNA
tcagcgtagtcagatgttcg

SEQ ID NO: 9586 - DNA, 20 bp, synthetic construct
  source 1..20: mol_type = other DNA
cagcgcgtgttagccggaga

SEQ ID NO: 9587 - DNA, 20 bp, synthetic construct
  source 1..20: mol_type = other DNA
tcaataggcatgctagggcg

SEQ ID NO: 9588 - DNA, 20 bp, synthetic construct
  source 1..20: mol_type = other DNA
agccgctctattcagtcagc

SEQ ID NO: 9589 - DNA, 20 bp, synthetic construct
  source 1..20: mol_type = other DNA
cttgctgggcgaattgcaag

SEQ ID NO: 9590 - DNA, 20 bp, synthetic construct
  source 1..20: mol_type = other DNA
ggtcctagctgggtcgcagt

SEQ ID NO: 9591 - DNA, 20 bp, synthetic construct
  source 1..20: mol_type = other DNA
atcacacaattgatagcagg

SEQ ID NO: 9592 - DNA, 20 bp, synthetic construct
  source 1..20: mol_type = other DNA
gtcgcttgctgcataccgcc

SEQ ID NO: 9593 - DNA, 20 bp, synthetic construct
  source 1..20: mol_type = other DNA
tgtcttcgtccggcacactc

SEQ ID NO: 9594 - DNA, 20 bp, synthetic construct
  source 1..20: mol_type = other DNA
cctgtgaaggcttaaggcat

SEQ ID NO: 9595 - DNA, 20 bp, synthetic construct
  source 1..20: mol_type = other DNA
tgcgagggcttagctgtgac

SEQ ID NO: 9596 - DNA, 20 bp, synthetic construct
  source 1..20: mol_type = other DNA
cctataatagcgcttaactc

SEQ ID NO: 9597 - DNA, 20 bp, synthetic construct
  source 1..20: mol_type = other DNA
gactagaaatacttatgggt

SEQ ID NO: 9598 - DNA, 20 bp, synthetic construct
  source 1..20: mol_type = other DNA
aagcgaattgcgctcgcctc

SEQ ID NO: 9599 - DNA, 20 bp, synthetic construct
  source 1..20: mol_type = other DNA
gggttgttgcagctgatcgc

SEQ ID NO: 9600 - DNA, 20 bp, synthetic construct
  source 1..20: mol_type = other DNA
tgagaccagagacgtggctt

SEQ ID NO: 9601 - DNA, 20 bp, synthetic construct
  source 1..20: mol_type = other DNA
tatcgctcgttggattgaat

SEQ ID NO: 9602 - DNA, 20 bp, synthetic construct
  source 1..20: mol_type = other DNA
gtttgtactacggtaacgtg

SEQ ID NO: 9603 - DNA, 20 bp, synthetic construct
  source 1..20: mol_type = other DNA
atacatcatcgactgaggcg

SEQ ID NO: 9604 - DNA, 20 bp, synthetic construct
  source 1..20: mol_type = other DNA
cactcatcggcatgctgttg

SEQ ID NO: 9605 - DNA, 20 bp, synthetic construct
  source 1..20: mol_type = other DNA
tggctcttaccatctgagtc

SEQ ID NO: 9606 - DNA, 20 bp, synthetic construct
  source 1..20: mol_type = other DNA
agacccatagcgcatattcc

SEQ ID NO: 9607 - DNA, 20 bp, synthetic construct
  source 1..20: mol_type = other DNA
ggtgtgacgtgatgaccgcg

SEQ ID NO: 9608 - DNA, 20 bp, synthetic construct
  source 1..20: mol_type = other DNA
gagacagagaggattgggca

SEQ ID NO: 9609 - DNA, 20 bp, synthetic construct
  source 1..20: mol_type = other DNA
aatcagtctgcggatctgct

SEQ ID NO: 9610 - DNA, 20 bp, synthetic construct
  source 1..20: mol_type = other DNA
gaaaggcttgagcacaccga

SEQ ID NO: 9611 - DNA, 20 bp, synthetic construct
  source 1..20: mol_type = other DNA
tgccagagcgaatttcatgc

SEQ ID NO: 9612 - DNA, 20 bp, synthetic construct
  source 1..20: mol_type = other DNA
accatggactgcgaacgatg

SEQ ID NO: 9613 - DNA, 20 bp, synthetic construct
  source 1..20: mol_type = other DNA
aacgtcaacagactcgttaa

SEQ ID NO: 9614 - DNA, 20 bp, synthetic construct
  source 1..20: mol_type = other DNA
tttaggccgctagcaatata

SEQ ID NO: 9615 - DNA, 20 bp, synthetic construct
  source 1..20: mol_type = other DNA
gacagcgtagtgattcagat

SEQ ID NO: 9616 - DNA, 20 bp, synthetic construct
  source 1..20: mol_type = other DNA
gatggtggtcacgactcaca

SEQ ID NO: 9617 - DNA, 20 bp, synthetic construct
  source 1..20: mol_type = other DNA
gtggtcaacactttgtaggg

SEQ ID NO: 9618 - DNA, 20 bp, synthetic construct
  source 1..20: mol_type = other DNA
ttgatattgtaaccagagtc

SEQ ID NO: 9619 - DNA, 20 bp, synthetic construct
  source 1..20: mol_type = other DNA
ctacaaacaaaccagtgctg

SEQ ID NO: 9620 - DNA, 20 bp, synthetic construct
  source 1..20: mol_type = other DNA
acgataggccgtgatttgag

SEQ ID NO: 9621 - DNA, 20 bp, synthetic construct
  source 1..20: mol_type = other DNA
aaaggcatgaagcaacttag

SEQ ID NO: 9622 - DNA, 20 bp, synthetic construct
  source 1..20: mol_type = other DNA
agcgagaaccgtcaagcgca

SEQ ID NO: 9623 - DNA, 20 bp, synthetic construct
  source 1..20: mol_type = other DNA
cagaaggcgccggaaccact

SEQ ID NO: 9624 - DNA, 20 bp, synthetic construct
  source 1..20: mol_type = other DNA
agtgcgtgttcagtaacatt

SEQ ID NO: 9625 - DNA, 20 bp, synthetic construct
  source 1..20: mol_type = other DNA
gaccagtaagtcacagggct

SEQ ID NO: 9626 - DNA, 20 bp, synthetic construct
  source 1..20: mol_type = other DNA
gcatgtagcgggagtcaatt

SEQ ID NO: 9627 - DNA, 20 bp, synthetic construct
  source 1..20: mol_type = other DNA
gataatgctaccgtgcgcat

SEQ ID NO: 9628 - DNA, 20 bp, synthetic construct
  source 1..20: mol_type = other DNA
attcaacggcctactgtgct

SEQ ID NO: 9629 - DNA, 20 bp, synthetic construct
  source 1..20: mol_type = other DNA
atctgtattgtgccctcagg

SEQ ID NO: 9630 - DNA, 20 bp, synthetic construct
  source 1..20: mol_type = other DNA
agttaagcaggagccctcta

SEQ ID NO: 9631 - DNA, 20 bp, synthetic construct
  source 1..20: mol_type = other DNA
tccgtaataggctgcatttc

SEQ ID NO: 9632 - DNA, 20 bp, synthetic construct
  source 1..20: mol_type = other DNA
tgactgtaccttattagatt

SEQ ID NO: 9633 - DNA, 20 bp, synthetic construct
  source 1..20: mol_type = other DNA
cgatattcaggttcgattat

SEQ ID NO: 9634 - DNA, 20 bp, synthetic construct
  source 1..20: mol_type = other DNA
ccgctatcatagactaatgt

SEQ ID NO: 9635 - DNA, 20 bp, synthetic construct
  source 1..20: mol_type = other DNA
cgtataagtccaatggtcgt

SEQ ID NO: 9636 - DNA, 20 bp, synthetic construct
  source 1..20: mol_type = other DNA
ttggcaggacgcatacgcac

SEQ ID NO: 9637 - DNA, 20 bp, synthetic construct
  source 1..20: mol_type = other DNA
actacattcgcaggaacgtg

SEQ ID NO: 9638 - DNA, 20 bp, synthetic construct
  source 1..20: mol_type = other DNA
gtcatgtccactagtcagaa

SEQ ID NO: 9639 - DNA, 20 bp, synthetic construct
  source 1..20: mol_type = other DNA
gacgacacgatagataatct

SEQ ID NO: 9640 - DNA, 20 bp, synthetic construct
  source 1..20: mol_type = other DNA
gagcatggttcatattcaac

SEQ ID NO: 9641 - DNA, 20 bp, synthetic construct
  source 1..20: mol_type = other DNA
cagtatctgtacggttcaac

SEQ ID NO: 9642 - DNA, 20 bp, synthetic construct
  source 1..20: mol_type = other DNA
atatgcagaggaggtaacag

SEQ ID NO: 9643 - DNA, 20 bp, synthetic construct
  source 1..20: mol_type = other DNA
tagagaccacgttctcttgg

SEQ ID NO: 9644 - DNA, 20 bp, synthetic construct
  source 1..20: mol_type = other DNA
gcagaccctgcacggtgtac

SEQ ID NO: 9645 - DNA, 20 bp, synthetic construct
  source 1..20: mol_type = other DNA
aaagggttctgtaagctggt

SEQ ID NO: 9646 - DNA, 20 bp, synthetic construct
  source 1..20: mol_type = other DNA
gttagccaggctcatatcag

SEQ ID NO: 9647 - DNA, 20 bp, synthetic construct
  source 1..20: mol_type = other DNA
cttcgtctaggaaggcgagg

SEQ ID NO: 9648 - DNA, 20 bp, synthetic construct
  source 1..20: mol_type = other DNA
acgagcaacgggttacaaga

SEQ ID NO: 9649 - DNA, 20 bp, synthetic construct
  source 1..20: mol_type = other DNA
ggaacagttaatctgtcatt

SEQ ID NO: 9650 - DNA, 20 bp, synthetic construct
  source 1..20: mol_type = other DNA
caaacaagctacagtacgta

SEQ ID NO: 9651 - DNA, 20 bp, synthetic construct
  source 1..20: mol_type = other DNA
gactccacatggatacacaa

SEQ ID NO: 9652 - DNA, 20 bp, synthetic construct
  source 1..20: mol_type = other DNA
cagctgcgagcgctacttct

SEQ ID NO: 9653 - DNA, 20 bp, synthetic construct
  source 1..20: mol_type = other DNA
tgctgaatggtcccttcccg

SEQ ID NO: 9654 - DNA, 20 bp, synthetic construct
  source 1..20: mol_type = other DNA
ggttaggcactaatccggct

SEQ ID NO: 9655 - DNA, 20 bp, synthetic construct
  source 1..20: mol_type = other DNA
gtctctcgctgtccacaaga

SEQ ID NO: 9656 - DNA, 20 bp, synthetic construct
  source 1..20: mol_type = other DNA
taatattctgaacgaacctg

SEQ ID NO: 9657 - DNA, 20 bp, synthetic construct
  source 1..20: mol_type = other DNA
gtgaccaaactggcctatgc

SEQ ID NO: 9658 - DNA, 20 bp, synthetic construct
  source 1..20: mol_type = other DNA
tagtatcaggcggctcgctg

SEQ ID NO: 9659 - DNA, 20 bp, synthetic construct
  source 1..20: mol_type = other DNA
atgtcactgtattcccttta

SEQ ID NO: 9660 - DNA, 20 bp, synthetic construct
  source 1..20: mol_type = other DNA
cgacgctctgcgaatctaac

SEQ ID NO: 9661 - DNA, 20 bp, synthetic construct
  source 1..20: mol_type = other DNA
catagttgcactgaggtccg

SEQ ID NO: 9662 - DNA, 20 bp, synthetic construct
  source 1..20: mol_type = other DNA
tagggatgcaacctatatgc

SEQ ID NO: 9663 - DNA, 20 bp, synthetic construct
  source 1..20: mol_type = other DNA
gcggctcgactcagaaggac

SEQ ID NO: 9664 - DNA, 20 bp, synthetic construct
  source 1..20: mol_type = other DNA
agagaggctcaaagctagtc

SEQ ID NO: 9665 - DNA, 20 bp, synthetic construct
  source 1..20: mol_type = other DNA
attcatagttgtccgcctta

SEQ ID NO: 9666 - DNA, 20 bp, synthetic construct
  source 1..20: mol_type = other DNA
cttgttcactaactcctcag

SEQ ID NO: 9667 - DNA, 20 bp, synthetic construct
  source 1..20: mol_type = other DNA
gaatctccttcggtgggttt

SEQ ID NO: 9668 - DNA, 20 bp, synthetic construct
  source 1..20: mol_type = other DNA
cctggagtcagtatctacag

SEQ ID NO: 9669 - DNA, 20 bp, synthetic construct
  source 1..20: mol_type = other DNA
cttgtaatccgggcgataat

SEQ ID NO: 9670 - DNA, 20 bp, synthetic construct
  source 1..20: mol_type = other DNA
ctggactaagtccttgtccc

SEQ ID NO: 9671 - DNA, 20 bp, synthetic construct
  source 1..20: mol_type = other DNA
gaggtaggatgcctcactgc

SEQ ID NO: 9672 - DNA, 20 bp, synthetic construct
  source 1..20: mol_type = other DNA
cgatgtctgcgcgtgaaccg

SEQ ID NO: 9673 - DNA, 20 bp, synthetic construct
  source 1..20: mol_type = other DNA
agataactcggttccggctc

SEQ ID NO: 9674 - DNA, 20 bp, synthetic construct
  source 1..20: mol_type = other DNA
agaatgggacagtccttacg

SEQ ID NO: 9675 - DNA, 20 bp, synthetic construct
  source 1..20: mol_type = other DNA
tactggctatagggaacctg

SEQ ID NO: 9676 - DNA, 20 bp, synthetic construct
  source 1..20: mol_type = other DNA
tcttaatcgtcaatggtaca

SEQ ID NO: 9677 - DNA, 20 bp, synthetic construct
  source 1..20: mol_type = other DNA
cctatgaaacagagcagcaa

SEQ ID NO: 9678 - DNA, 20 bp, synthetic construct
  source 1..20: mol_type = other DNA
agggtagcaacactaggctg

SEQ ID NO: 9679 - DNA, 20 bp, synthetic construct
  source 1..20: mol_type = other DNA
aagggttcatgcatcgaggc

SEQ ID NO: 9680 - DNA, 20 bp, synthetic construct
  source 1..20: mol_type = other DNA
agcatggccgctacagtatt

SEQ ID NO: 9681 - DNA, 20 bp, synthetic construct
  source 1..20: mol_type = other DNA
ctaagtatgctagcaagttc

SEQ ID NO: 9682 - DNA, 20 bp, synthetic construct
  source 1..20: mol_type = other DNA
accgaagagtagacttagct

SEQ ID NO: 9683 - DNA, 20 bp, synthetic construct
  source 1..20: mol_type = other DNA
cacagtgagtgcgaccacac

SEQ ID NO: 9684 - DNA, 20 bp, synthetic construct
  source 1..20: mol_type = other DNA
taccgcaacgggtgatttca

SEQ ID NO: 9685 - DNA, 20 bp, synthetic construct
  source 1..20: mol_type = other DNA
ctactccactatacattatc

SEQ ID NO: 9686 - DNA, 20 bp, synthetic construct
  source 1..20: mol_type = other DNA
accgccttctttcatggaaa

SEQ ID NO: 9687 - DNA, 20 bp, synthetic construct
  source 1..20: mol_type = other DNA
ttaagacctaacggcaactt

SEQ ID NO: 9688 - DNA, 20 bp, synthetic construct
  source 1..20: mol_type = other DNA
tagctataagatctcctgct

SEQ ID NO: 9689 - DNA, 20 bp, synthetic construct
  source 1..20: mol_type = other DNA
atccaatcgtagcctaacgc

SEQ ID NO: 9690 - DNA, 20 bp, synthetic construct
  source 1..20: mol_type = other DNA
cctctctgtcaggctatccc

SEQ ID NO: 9691 - DNA, 20 bp, synthetic construct
  source 1..20: mol_type = other DNA
tggtcttctcattgtccgag

SEQ ID NO: 9692 - DNA, 20 bp, synthetic construct
  source 1..20: mol_type = other DNA
accatcgttagtgataggag

SEQ ID NO: 9693 - DNA, 20 bp, synthetic construct
  source 1..20: mol_type = other DNA
actatacgtacagccctcga

SEQ ID NO: 9694 - DNA, 20 bp, synthetic construct
  source 1..20: mol_type = other DNA
gggtctgtgtagatttccgt

SEQ ID NO: 9695 - DNA, 20 bp, synthetic construct
  source 1..20: mol_type = other DNA
gctatccgtgggcaaagaag

SEQ ID NO: 9696 - DNA, 20 bp, synthetic construct
  source 1..20: mol_type = other DNA
agtgtgctgtgcatccactt

SEQ ID NO: 9697 - DNA, 20 bp, synthetic construct
  source 1..20: mol_type = other DNA
taacgatataccaaggacaa

SEQ ID NO: 9698 - DNA, 20 bp, synthetic construct
  source 1..20: mol_type = other DNA
agtatttgaaggattacatc

SEQ ID NO: 9699 - DNA, 20 bp, synthetic construct
  source 1..20: mol_type = other DNA
actttcttcgtacgagactt

SEQ ID NO: 9700 - DNA, 20 bp, synthetic construct
  source 1..20: mol_type = other DNA
aatcagtctagtacagagat

SEQ ID NO: 9701 - DNA, 20 bp, synthetic construct
  source 1..20: mol_type = other DNA
tgaggtcggcagtcacaatc

SEQ ID NO: 9702 - DNA, 20 bp, synthetic construct
  source 1..20: mol_type = other DNA
aggcgtgtatctcatctcgg

SEQ ID NO: 9703 - DNA, 20 bp, synthetic construct
  source 1..20: mol_type = other DNA
caagttctatctcaccagcc

SEQ ID NO: 9704 - DNA, 20 bp, synthetic construct
  source 1..20: mol_type = other DNA
ctacaatcagcttcgttata

SEQ ID NO: 9705 - DNA, 20 bp, synthetic construct
  source 1..20: mol_type = other DNA
ctctaccagtcgtgtacgct

SEQ ID NO: 9706 - DNA, 20 bp, synthetic construct
  source 1..20: mol_type = other DNA
attaagccagtggagatgag

SEQ ID NO: 9707 - DNA, 20 bp, synthetic construct
  source 1..20: mol_type = other DNA
tgtgctgatggagggaatcc

SEQ ID NO: 9708 - DNA, 20 bp, synthetic construct
  source 1..20: mol_type = other DNA
aacatgagcgccacggttaa

SEQ ID NO: 9709 - DNA, 20 bp, synthetic construct
  source 1..20: mol_type = other DNA
catcgatacctcaaggtgaa

SEQ ID NO: 9710 - DNA, 20 bp, synthetic construct
  source 1..20: mol_type = other DNA
gcgtgtggcctgaggagact

SEQ ID NO: 9711 - DNA, 20 bp, synthetic construct
  source 1..20: mol_type = other DNA
atgtgatgggtaacggtata

SEQ ID NO: 9712 - DNA, 20 bp, synthetic construct
  source 1..20: mol_type = other DNA
cgagctcaaagcgacaacac

SEQ ID NO: 9713 - DNA, 20 bp, synthetic construct
  source 1..20: mol_type = other DNA
ggccgaagatgccagacatc

SEQ ID NO: 9714 - DNA, 20 bp, synthetic construct
  source 1..20: mol_type = other DNA
cactttatggctcgcagacg

SEQ ID NO: 9715 - DNA, 20 bp, synthetic construct
  source 1..20: mol_type = other DNA
ttagcgacgatccaatggta

SEQ ID NO: 9716 - DNA, 20 bp, synthetic construct
  source 1..20: mol_type = other DNA
ttcccacctttcaactagtc

SEQ ID NO: 9717 - DNA, 20 bp, synthetic construct
  source 1..20: mol_type = other DNA
atttacagctggtccggaat

SEQ ID NO: 9718 - DNA, 20 bp, synthetic construct
  source 1..20: mol_type = other DNA
tatgcacgactagtctggcg

SEQ ID NO: 9719 - DNA, 20 bp, synthetic construct
  source 1..20: mol_type = other DNA
aaaccgcgcaatccatccag

SEQ ID NO: 9720 - DNA, 20 bp, synthetic construct
  source 1..20: mol_type = other DNA
ccaccagatcggcgacacgc

SEQ ID NO: 9721 - DNA, 20 bp, synthetic construct
  source 1..20: mol_type = other DNA
gtcaaacctggagtcgtgcg

SEQ ID NO: 9722 - DNA, 20 bp, synthetic construct
  source 1..20: mol_type = other DNA
gtacgggtacccataatccg

SEQ ID NO: 9723 - DNA, 20 bp, synthetic construct
  source 1..20: mol_type = other DNA
cctagtagccttcaaagtat

SEQ ID NO: 9724 - DNA, 20 bp, synthetic construct
  source 1..20: mol_type = other DNA
tagttccaagtcgtacataa

SEQ ID NO: 9725 - DNA, 20 bp, synthetic construct
  source 1..20: mol_type = other DNA
actcgtgatccgtacgcagt

SEQ ID NO: 9726 - DNA, 20 bp, synthetic construct
  source 1..20: mol_type = other DNA
cccttacacccaggaattat

SEQ ID NO: 9727 - DNA, 20 bp, synthetic construct
  source 1..20: mol_type = other DNA
gtgtgccaggctacgttgca

SEQ ID NO: 9728 - DNA, 20 bp, synthetic construct
  source 1..20: mol_type = other DNA
aatgcgtgcagtcctgttag

SEQ ID NO: 9729 - DNA, 20 bp, synthetic construct
  source 1..20: mol_type = other DNA
acgcgaggtagctgtgattg

SEQ ID NO: 9730 - DNA, 20 bp, synthetic construct
  source 1..20: mol_type = other DNA
aattaggacggtcttccact

SEQ ID NO: 9731 - DNA, 20 bp, synthetic construct
  source 1..20: mol_type = other DNA
cacagatctccaacgaccga

SEQ ID NO: 9732 - DNA, 20 bp, synthetic construct
  source 1..20: mol_type = other DNA
tcagttgccgaagcagaatc

SEQ ID NO: 9733 - DNA, 20 bp, synthetic construct
  source 1..20: mol_type = other DNA
caagccaggacacgggaggt

SEQ ID NO: 9734 - DNA, 20 bp, synthetic construct
  source 1..20: mol_type = other DNA
gacttcgcgtaataagatgt

SEQ ID NO: 9735 - DNA, 20 bp, synthetic construct
  source 1..20: mol_type = other DNA
ccggtatggatctgccgtgc

SEQ ID NO: 9736 - DNA, 20 bp, synthetic construct
  source 1..20: mol_type = other DNA
cacttacgaatggtcactcg

SEQ ID NO: 9737 - DNA, 20 bp, synthetic construct
  source 1..20: mol_type = other DNA
gtgatcagaggcagccgtcg

SEQ ID NO: 9738 - DNA, 20 bp, synthetic construct
  source 1..20: mol_type = other DNA
aaccgccctttgagctgagt

SEQ ID NO: 9739 - DNA, 20 bp, synthetic construct
  source 1..20: mol_type = other DNA
ggaccattaattgctcagaa

SEQ ID NO: 9740 - DNA, 20 bp, synthetic construct
  source 1..20: mol_type = other DNA
tgcacatggtctcttcgcgg

SEQ ID NO: 9741 - DNA, 20 bp, synthetic construct
  source 1..20: mol_type = other DNA
ggaatatctgcctatttcca

SEQ ID NO: 9742 - DNA, 20 bp, synthetic construct
  source 1..20: mol_type = other DNA
cgcggtgcctttaataaatc

SEQ ID NO: 9743 - DNA, 20 bp, synthetic construct
  source 1..20: mol_type = other DNA
acatgctggctattgaaccc

SEQ ID NO: 9744 - DNA, 20 bp, synthetic construct
  source 1..20: mol_type = other DNA
tgccgtttattgatacgtct

SEQ ID NO: 9745 - DNA, 20 bp, synthetic construct
  source 1..20: mol_type = other DNA
acgctaccatctttgggaaa

SEQ ID NO: 9746 - DNA, 20 bp, synthetic construct
  source 1..20: mol_type = other DNA
ccaaattacgcatgatcggc

SEQ ID NO: 9747 - DNA, 20 bp, synthetic construct
  source 1..20: mol_type = other DNA
tctacgggttgcgccgaaac

SEQ ID NO: 9748 - DNA, 20 bp, synthetic construct
  source 1..20: mol_type = other DNA
aaagaacgcccttataacgt

SEQ ID NO: 9749 - DNA, 20 bp, synthetic construct
  source 1..20: mol_type = other DNA
ctcaaactcaataatccgaa

SEQ ID NO: 9750 - DNA, 20 bp, synthetic construct
  source 1..20: mol_type = other DNA
aacacgcaagctcgcgagtg

SEQ ID NO: 9751 - DNA, 20 bp, synthetic construct
  source 1..20: mol_type = other DNA
tattcggccgtgcgccggta

SEQ ID NO: 9752 - DNA, 20 bp, synthetic construct
  source 1..20: mol_type = other DNA
caagacgtccgcctagctac

SEQ ID NO: 9753 - DNA, 20 bp, synthetic construct
  source 1..20: mol_type = other DNA
gcgccttatttagaacgcga

SEQ ID NO: 9754 - DNA, 20 bp, synthetic construct
  source 1..20: mol_type = other DNA
gaatttagacaccgttgtcc

SEQ ID NO: 9755 - DNA, 20 bp, synthetic construct
  source 1..20: mol_type = other DNA
atgctgagtattccgatctt

SEQ ID NO: 9756 - DNA, 20 bp, synthetic construct
  source 1..20: mol_type = other DNA
atagatttcaaaccacagac

SEQ ID NO: 9757 - DNA, 20 bp, synthetic construct
  source 1..20: mol_type = other DNA
tagtgtaggacaatcgtcta

SEQ ID NO: 9758 - DNA, 20 bp, synthetic construct
  source 1..20: mol_type = other DNA
ctgtcaacagcctcgtactc

SEQ ID NO: 9759 - DNA, 20 bp, synthetic construct
  source 1..20: mol_type = other DNA
gtgtgaaagcatacctctca

SEQ ID NO: 9760 - DNA, 20 bp, synthetic construct
  source 1..20: mol_type = other DNA
accagcacctttaggcggga

SEQ ID NO: 9761 - DNA, 20 bp, synthetic construct
  source 1..20: mol_type = other DNA
aaccgtcatctcggtcagtt

SEQ ID NO: 9762 - DNA, 20 bp, synthetic construct
  source 1..20: mol_type = other DNA
gcactaccagagacaaagca

SEQ ID NO: 9763 - DNA, 20 bp, synthetic construct
  source 1..20: mol_type = other DNA
tccggtttgcgctattcgtt

SEQ ID NO: 9764 - DNA, 20 bp, synthetic construct
  source 1..20: mol_type = other DNA
tgggcagtcagggatgagag

SEQ ID NO: 9765 - DNA, 20 bp, synthetic construct
  source 1..20: mol_type = other DNA
agattacctgttgaggatca

SEQ ID NO: 9766 - DNA, 20 bp, synthetic construct
  source 1..20: mol_type = other DNA
ctataacgtgagcggccacg

SEQ ID NO: 9767 - DNA, 20 bp, synthetic construct
  source 1..20: mol_type = other DNA
cctcaatatgaaatcatggg

SEQ ID NO: 9768 - DNA, 20 bp, synthetic construct
  source 1..20: mol_type = other DNA
ctaaatagacccagtatgca

SEQ ID NO: 9769 - DNA, 20 bp, synthetic construct
  source 1..20: mol_type = other DNA
ggcccgtttacccgaacctg

SEQ ID NO: 9770 - DNA, 20 bp, synthetic construct
  source 1..20: mol_type = other DNA
tacatatagtggttccctat

SEQ ID NO: 9771 - DNA, 20 bp, synthetic construct
  source 1..20: mol_type = other DNA
aacgctgggactaactggtt

SEQ ID NO: 9772 - DNA, 20 bp, synthetic construct
  source 1..20: mol_type = other DNA
gataagtttccgaaacccta

SEQ ID NO: 9773 - DNA, 20 bp, synthetic construct
  source 1..20: mol_type = other DNA
attgtgcctcaggcgaagtg

SEQ ID NO: 9774 - DNA, 20 bp, synthetic construct
  source 1..20: mol_type = other DNA
agtttctcacgctattgcgt

SEQ ID NO: 9775 - DNA, 20 bp, synthetic construct
  source 1..20: mol_type = other DNA
tcatcgaccaatccggtgat

SEQ ID NO: 9776 - DNA, 20 bp, synthetic construct
  source 1..20: mol_type = other DNA
gtacatgacagatcgttata

SEQ ID NO: 9777 - DNA, 20 bp, synthetic construct
  source 1..20: mol_type = other DNA
gatgcaacgtggtattcagg

SEQ ID NO: 9778 - DNA, 20 bp, synthetic construct
  source 1..20: mol_type = other DNA
aaacggttagttgctggaat

SEQ ID NO: 9779 - DNA, 20 bp, synthetic construct
  source 1..20: mol_type = other DNA
atttgggcacaccagacgta

SEQ ID NO: 9780 - DNA, 20 bp, synthetic construct
  source 1..20: mol_type = other DNA
aagtactttgctagcgcctc

SEQ ID NO: 9781 - DNA, 20 bp, synthetic construct
  source 1..20: mol_type = other DNA
gtagtatgaacacagctccg

SEQ ID NO: 9782 - DNA, 20 bp, synthetic construct
  source 1..20: mol_type = other DNA
tagccatcggatcctggacg

SEQ ID NO: 9783 - DNA, 20 bp, synthetic construct
  source 1..20: mol_type = other DNA
cggatgaaccggccacggta

SEQ ID NO: 9784 - DNA, 20 bp, synthetic construct
  source 1..20: mol_type = other DNA
acagtagttctaagcgtaga

SEQ ID NO: 9785 - DNA, 20 bp, synthetic construct
  source 1..20: mol_type = other DNA
tctggcattactgcacaggt

SEQ ID NO: 9786 - DNA, 20 bp, synthetic construct
  source 1..20: mol_type = other DNA
ggattactacagcttccttt

SEQ ID NO: 9787 - DNA, 20 bp, synthetic construct
  source 1..20: mol_type = other DNA
gagacacatcgtggttcgtg

SEQ ID NO: 9788 - DNA, 20 bp, synthetic construct
  source 1..20: mol_type = other DNA
aactttcaactagtctctat

SEQ ID NO: 9789 - DNA, 20 bp, synthetic construct
  source 1..20: mol_type = other DNA
gcgtgctgtagtgacaggat

SEQ ID NO: 9790 - DNA, 20 bp, synthetic construct
  source 1..20: mol_type = other DNA
ctcaatgactactgatcgac

SEQ ID NO: 9791 - DNA, 20 bp, synthetic construct
  source 1..20: mol_type = other DNA
agctctaaacgatgggatgc

SEQ ID NO: 9792 - DNA, 20 bp, synthetic construct
  source 1..20: mol_type = other DNA
tgctaccctccggattctcg

SEQ ID NO: 9793 - DNA, 20 bp, synthetic construct
  source 1..20: mol_type = other DNA
cgggcgtcatcacggaacat

SEQ ID NO: 9794 - DNA, 20 bp, synthetic construct
  source 1..20: mol_type = other DNA
gactaggatcaaacaacgtt

SEQ ID NO: 9795 - DNA, 20 bp, synthetic construct
  source 1..20: mol_type = other DNA
tattgatcaccgtgaagaag

SEQ ID NO: 9796 - DNA, 20 bp, synthetic construct
  source 1..20: mol_type = other DNA
taagactctcacagtgtgag

SEQ ID NO: 9797 - DNA, 20 bp, synthetic construct
  source 1..20: mol_type = other DNA
agtggatcgggctagcgaca

SEQ ID NO: 9798 - DNA, 20 bp, synthetic construct
  source 1..20: mol_type = other DNA
acctcaaagaaagcacgcac

SEQ ID NO: 9799 - DNA, 20 bp, synthetic construct
  source 1..20: mol_type = other DNA
tcccttgggagagtctttga

SEQ ID NO: 9800 - DNA, 20 bp, synthetic construct
  source 1..20: mol_type = other DNA
gaatttaagggagtatgtgc

SEQ ID NO: 9801 - DNA, 20 bp, synthetic construct
  source 1..20: mol_type = other DNA
acaaagcgtcagagtatttg

SEQ ID NO: 9802 - DNA, 20 bp, synthetic construct
  source 1..20: mol_type = other DNA
cggtagttatcgcagtccag

SEQ ID NO: 9803 - DNA, 20 bp, synthetic construct
  source 1..20: mol_type = other DNA
ccgtggttatataaccattt

SEQ ID NO: 9804 - DNA, 20 bp, synthetic construct
  source 1..20: mol_type = other DNA
atgagcctttcccatgctga

SEQ ID NO: 9805 - DNA, 20 bp, synthetic construct
  source 1..20: mol_type = other DNA
aaggccctaactgcgaaagg

SEQ ID NO: 9806 - DNA, 20 bp, synthetic construct
  source 1..20: mol_type = other DNA
atcctatagtacttgtggga

SEQ ID NO: 9807 - DNA, 20 bp, synthetic construct
  source 1..20: mol_type = other DNA
agatggccgaaactctttac

SEQ ID NO: 9808 - DNA, 20 bp, synthetic construct
  source 1..20: mol_type = other DNA
tgttagcagggctaagagaa

SEQ ID NO: 9809 - DNA, 20 bp, synthetic construct
  source 1..20: mol_type = other DNA
ttgcctctggtatatccaaa

SEQ ID NO: 9810 - DNA, 20 bp, synthetic construct
  source 1..20: mol_type = other DNA
tccactgtccaccgaaggct

SEQ ID NO: 9811 - DNA, 20 bp, synthetic construct
  source 1..20: mol_type = other DNA
atggaaacgcatacactgca

SEQ ID NO: 9812 - DNA, 20 bp, synthetic construct
  source 1..20: mol_type = other DNA
aagacgtaagtcacggtgac

SEQ ID NO: 9813 - DNA, 20 bp, synthetic construct
  source 1..20: mol_type = other DNA
ctaggctcggtggtttaccc

SEQ ID NO: 9814 - DNA, 20 bp, synthetic construct
  source 1..20: mol_type = other DNA
catacagcctatggcgcata

SEQ ID NO: 9815 - DNA, 20 bp, synthetic construct
  source 1..20: mol_type = other DNA
ctcgtagccacggaccttca

SEQ ID NO: 9816 - DNA, 20 bp, synthetic construct
  source 1..20: mol_type = other DNA
cgttcactcctgccaaatta

SEQ ID NO: 9817 - DNA, 20 bp, synthetic construct
  source 1..20: mol_type = other DNA
tggtcaagtgacccactatt

SEQ ID NO: 9818 - DNA, 20 bp, synthetic construct
  source 1..20: mol_type = other DNA
tctaggagcatatcgcgatc

SEQ ID NO: 9819 - DNA, 20 bp, synthetic construct
  source 1..20: mol_type = other DNA
cgtgccaccgggtaagatga

SEQ ID NO: 9820 - DNA, 20 bp, synthetic construct
  source 1..20: mol_type = other DNA
tcgtaggctaaggcagtcgg

SEQ ID NO: 9821 - DNA, 20 bp, synthetic construct
  source 1..20: mol_type = other DNA
tatctgtcgccctcgcttgg

SEQ ID NO: 9822 - DNA, 20 bp, synthetic construct
  source 1..20: mol_type = other DNA
tcttgcgtgtcctacaacgc

SEQ ID NO: 9823 - DNA, 20 bp, synthetic construct
  source 1..20: mol_type = other DNA
ggtttggacgaacgcatttg

SEQ ID NO: 9824 - DNA, 20 bp, synthetic construct
  source 1..20: mol_type = other DNA
ctataaagtaggactcgata

SEQ ID NO: 9825 - DNA, 20 bp, synthetic construct
  source 1..20: mol_type = other DNA
aagaggttatctcagccata

SEQ ID NO: 9826 - DNA, 20 bp, synthetic construct
  source 1..20: mol_type = other DNA
atgccgcactaattattgtg

SEQ ID NO: 9827 - DNA, 20 bp, synthetic construct
  source 1..20: mol_type = other DNA
atgcgcgcgttatcccatgt

SEQ ID NO: 9828 - DNA, 20 bp, synthetic construct
  source 1..20: mol_type = other DNA
caaacagtgcatcccagaat

SEQ ID NO: 9829 - DNA, 20 bp, synthetic construct
  source 1..20: mol_type = other DNA
gttgcttagtattgatccgt

SEQ ID NO: 9830 - DNA, 20 bp, synthetic construct
  source 1..20: mol_type = other DNA
atatcagtggcgtccaacgt

SEQ ID NO: 9831 - DNA, 20 bp, synthetic construct
  source 1..20: mol_type = other DNA
cgaattgcaggtcttaagta

SEQ ID NO: 9832 - DNA, 20 bp, synthetic construct
  source 1..20: mol_type = other DNA
gccgaaccactttaattaat

SEQ ID NO: 9833 - DNA, 20 bp, synthetic construct
  source 1..20: mol_type = other DNA
tggccctccaatctctgagt

SEQ ID NO: 9834 - DNA, 20 bp, synthetic construct
  source 1..20: mol_type = other DNA
gattgtctgctcaggcagcg

SEQ ID NO: 9835 - DNA, 20 bp, synthetic construct
  source 1..20: mol_type = other DNA
cgtctttactactacgcagt

SEQ ID NO: 9836 - DNA, 20 bp, synthetic construct
  source 1..20: mol_type = other DNA
ggaaggctgacttctctgag

SEQ ID NO: 9837 - DNA, 20 bp, synthetic construct
  source 1..20: mol_type = other DNA
catggacagggtagcggcct

SEQ ID NO: 9838 - DNA, 20 bp, synthetic construct
  source 1..20: mol_type = other DNA
aatgcacacgccgattccta

SEQ ID NO: 9839 - DNA, 20 bp, synthetic construct
  source 1..20: mol_type = other DNA
cttgaaccttctacggagac

SEQ ID NO: 9840 - DNA, 20 bp, synthetic construct
  source 1..20: mol_type = other DNA
gcaattagggctggaggaag

SEQ ID NO: 9841 - DNA, 20 bp, synthetic construct
  source 1..20: mol_type = other DNA
tgggatctgctcataaagtt

SEQ ID NO: 9842 - DNA, 20 bp, synthetic construct
  source 1..20: mol_type = other DNA
ctcgctcatcaatgtttggt

SEQ ID NO: 9843 - DNA, 20 bp, synthetic construct
  source 1..20: mol_type = other DNA
gttacaaatcggagagggtg

SEQ ID NO: 9844 - DNA, 20 bp, synthetic construct
  source 1..20: mol_type = other DNA
acggtaggaatcttctcggc

SEQ ID NO: 9845 - DNA, 20 bp, synthetic construct
  source 1..20: mol_type = other DNA
atacaggcaccgatatgtcg

SEQ ID NO: 9846 - DNA, 20 bp, synthetic construct
  source 1..20: mol_type = other DNA
acgaatccactctcacagat

SEQ ID NO: 9847 - DNA, 20 bp, synthetic construct
  source 1..20: mol_type = other DNA
cgagtcgttaaacgccctgg

SEQ ID NO: 9848 - DNA, 20 bp, synthetic construct
  source 1..20: mol_type = other DNA
gttccgataagagaggcggg

SEQ ID NO: 9849 - DNA, 20 bp, synthetic construct
  source 1..20: mol_type = other DNA
ggcatcagtggtatacgata

SEQ ID NO: 9850 - DNA, 20 bp, synthetic construct
  source 1..20: mol_type = other DNA
acggacaaacaaagaataga

SEQ ID NO: 9851 - DNA, 20 bp, synthetic construct
  source 1..20: mol_type = other DNA
ccgcgaactacataacctga

SEQ ID NO: 9852 - DNA, 20 bp, synthetic construct
  source 1..20: mol_type = other DNA
aagggagccctcgggaaact

SEQ ID NO: 9853 - DNA, 20 bp, synthetic construct
  source 1..20: mol_type = other DNA
tgctgggcaaacgccgttga

SEQ ID NO: 9854 - DNA, 20 bp, synthetic construct
  source 1..20: mol_type = other DNA
aatacgtacggcgaggtttg

SEQ ID NO: 9855 - DNA, 20 bp, synthetic construct
  source 1..20: mol_type = other DNA
agttctgtaagtgggcgatt

SEQ ID NO: 9856 - DNA, 20 bp, synthetic construct
  source 1..20: mol_type = other DNA
acagcaacaaagattctagc

SEQ ID NO: 9857 - DNA, 20 bp, synthetic construct
  source 1..20: mol_type = other DNA
tcaaagtttgcggtctgtgc

SEQ ID NO: 9858 - DNA, 20 bp, synthetic construct
  source 1..20: mol_type = other DNA
accgtcagagtcactattat

SEQ ID NO: 9859 - DNA, 20 bp, synthetic construct
  source 1..20: mol_type = other DNA
aacccaactgcgtttgcaca

SEQ ID NO: 9860 - DNA, 20 bp, synthetic construct
  source 1..20: mol_type = other DNA
gtccgctctaacgaccggta

SEQ ID NO: 9861 - DNA, 20 bp, synthetic construct
  source 1..20: mol_type = other DNA
ctaaggcacaatggctaacc

SEQ ID NO: 9862 - DNA, 20 bp, synthetic construct
  source 1..20: mol_type = other DNA
agtttgtgtaagctgccgtc

SEQ ID NO: 9863 - DNA, 20 bp, synthetic construct
  source 1..20: mol_type = other DNA
atcgacttctccctaaccag

SEQ ID NO: 9864 - DNA, 20 bp, synthetic construct
  source 1..20: mol_type = other DNA
attacggctcaaagctgttg

SEQ ID NO: 9865 - DNA, 20 bp, synthetic construct
  source 1..20: mol_type = other DNA
tgattcacagacgaactcga

SEQ ID NO: 9866 - DNA, 20 bp, synthetic construct
  source 1..20: mol_type = other DNA
acagtgtgcgtgactatcga

SEQ ID NO: 9867 - DNA, 20 bp, synthetic construct
  source 1..20: mol_type = other DNA
gcagataattaacgggtctg

SEQ ID NO: 9868 - DNA, 20 bp, synthetic construct
  source 1..20: mol_type = other DNA
tcaaaggtcgtcatagggag

SEQ ID NO: 9869 - DNA, 20 bp, synthetic construct
  source 1..20: mol_type = other DNA
agaagtctactgaaccagat

SEQ ID NO: 9870 - DNA, 20 bp, synthetic construct
  source 1..20: mol_type = other DNA
tttaaatggtgccgcacttg

SEQ ID NO: 9871 - DNA, 20 bp, synthetic construct
  source 1..20: mol_type = other DNA
cagtcggtggaaattacact

SEQ ID NO: 9872 - DNA, 20 bp, synthetic construct
  source 1..20: mol_type = other DNA
aagtcaatgtcatcggttcc

SEQ ID NO: 9873 - DNA, 20 bp, synthetic construct
  source 1..20: mol_type = other DNA
gggacgcagctaagattcat

SEQ ID NO: 9874 - DNA, 20 bp, synthetic construct
  source 1..20: mol_type = other DNA
aactaaccctcaataagact

SEQ ID NO: 9875 - DNA, 20 bp, synthetic construct
  source 1..20: mol_type = other DNA
aaagagtcgcgtgaacgtca

SEQ ID NO: 9876 - DNA, 20 bp, synthetic construct
  source 1..20: mol_type = other DNA
gtttcaatcgcgtacagaat

SEQ ID NO: 9877 - DNA, 20 bp, synthetic construct
  source 1..20: mol_type = other DNA
atttagctcaatatgatggc

SEQ ID NO: 9878 - DNA, 20 bp, synthetic construct
  source 1..20: mol_type = other DNA
ggtggtgagatctaaagatt

SEQ ID NO: 9879 - DNA, 20 bp, synthetic construct
  source 1..20: mol_type = other DNA
ctcctgaggaccatgtaacg

SEQ ID NO: 9880 - DNA, 20 bp, synthetic construct
  source 1..20: mol_type = other DNA
ctaactgactagcccgctga

SEQ ID NO: 9881 - DNA, 20 bp, synthetic construct
  source 1..20: mol_type = other DNA
cccatttatgagggacgaac

SEQ ID NO: 9882 - DNA, 20 bp, synthetic construct
  source 1..20: mol_type = other DNA
tttctcttgtcgctcaccca

SEQ ID NO: 9883 - DNA, 20 bp, synthetic construct
  source 1..20: mol_type = other DNA
gtgacttaaagactcataat

SEQ ID NO: 9884 - DNA, 20 bp, synthetic construct
  source 1..20: mol_type = other DNA
cttctcaaaccttcgtagaa

SEQ ID NO: 9885 - DNA, 20 bp, synthetic construct
  source 1..20: mol_type = other DNA
atggaatttctccactcgcg

SEQ ID NO: 9886 - DNA, 20 bp, synthetic construct
  source 1..20: mol_type = other DNA
tgtgttagtcgcaagcctcc

SEQ ID NO: 9887 - DNA, 20 bp, synthetic construct
  source 1..20: mol_type = other DNA
cggaaggtcgaactgaccaa

SEQ ID NO: 9888 - DNA, 20 bp, synthetic construct
  source 1..20: mol_type = other DNA
gacccggttatgggagtaaa

SEQ ID NO: 9889 - DNA, 20 bp, synthetic construct
  source 1..20: mol_type = other DNA
ctatcttatcgtatccagct

SEQ ID NO: 9890 - DNA, 20 bp, synthetic construct
  source 1..20: mol_type = other DNA
gcatagaaacatccatatcc

SEQ ID NO: 9891 - DNA, 20 bp, synthetic construct
  source 1..20: mol_type = other DNA
cggatcctggtctactgccg

SEQ ID NO: 9892 - DNA, 20 bp, synthetic construct
  source 1..20: mol_type = other DNA
ttccctaggcgtagagatgt

SEQ ID NO: 9893 - DNA, 20 bp, synthetic construct
  source 1..20: mol_type = other DNA
tcccaatcagagcagatacg

SEQ ID NO: 9894 - DNA, 20 bp, synthetic construct
  source 1..20: mol_type = other DNA
gtctaacacagtaccgggag

SEQ ID NO: 9895 - DNA, 20 bp, synthetic construct
  source 1..20: mol_type = other DNA
attgaggtaacgattgatac

SEQ ID NO: 9896 - DNA, 20 bp, synthetic construct
  source 1..20: mol_type = other DNA
agggaacctccactcccgca

SEQ ID NO: 9897 - DNA, 20 bp, synthetic construct
  source 1..20: mol_type = other DNA
agaactcgacgactttacgt

SEQ ID NO: 9898 - DNA, 20 bp, synthetic construct
  source 1..20: mol_type = other DNA
aggccgattcgccgttcgta

SEQ ID NO: 9899 - DNA, 20 bp, synthetic construct
  source 1..20: mol_type = other DNA
cgctagagctcaccgcactt

SEQ ID NO: 9900 - DNA, 20 bp, synthetic construct
  source 1..20: mol_type = other DNA
gccaggagatgcttgtgact

SEQ ID NO: 9901 - DNA, 20 bp, synthetic construct
  source 1..20: mol_type = other DNA
attggattacgtttgttcat

SEQ ID NO: 9902 - DNA, 20 bp, synthetic construct
  source 1..20: mol_type = other DNA
gtaactggtaggttccatag

SEQ ID NO: 9903 - DNA, 20 bp, synthetic construct
  source 1..20: mol_type = other DNA
ctacaattggtttaggcgga

SEQ ID NO: 9904 - DNA, 20 bp, synthetic construct
  source 1..20: mol_type = other DNA
tattcggtaccgcccacatc

SEQ ID NO: 9905 - DNA, 20 bp, synthetic construct
  source 1..20: mol_type = other DNA
attcattggccagtcgagca

SEQ ID NO: 9906 - DNA, 20 bp, synthetic construct
  source 1..20: mol_type = other DNA
aaacgactgaggacgtgtgt

SEQ ID NO: 9907 - DNA, 20 bp, synthetic construct
  source 1..20: mol_type = other DNA
ggaatgggagctcgaaccag

SEQ ID NO: 9908 - DNA, 20 bp, synthetic construct
  source 1..20: mol_type = other DNA
gcccatttcaaatcgtgtac

SEQ ID NO: 9909 - DNA, 20 bp, synthetic construct
  source 1..20: mol_type = other DNA
aaggcggtctcgctgtctca

SEQ ID NO: 9910 - DNA, 20 bp, synthetic construct
  source 1..20: mol_type = other DNA
agtcagtcgcagaagtctaa

SEQ ID NO: 9911 - DNA, 20 bp, synthetic construct
  source 1..20: mol_type = other DNA
gagccagtggcagcgaatgt

SEQ ID NO: 9912 - DNA, 20 bp, synthetic construct
  source 1..20: mol_type = other DNA
ttctatggaacatttggcat

SEQ ID NO: 9913 - DNA, 20 bp, synthetic construct
  source 1..20: mol_type = other DNA
atcttcccttagtctagcgc

SEQ ID NO: 9914 - DNA, 20 bp, synthetic construct
  source 1..20: mol_type = other DNA
acctacatatggattggata

SEQ ID NO: 9915 - DNA, 20 bp, synthetic construct
  source 1..20: mol_type = other DNA
ggattaccaagcaatccata

SEQ ID NO: 9916 - DNA, 20 bp, synthetic construct
  source 1..20: mol_type = other DNA
agcccattactgcagaatgg

SEQ ID NO: 9917 - DNA, 20 bp, synthetic construct
  source 1..20: mol_type = other DNA
ctgactgatcggtttaagtg

SEQ ID NO: 9918 - DNA, 20 bp, synthetic construct
  source 1..20: mol_type = other DNA
gtcctgataggagcagcaga

SEQ ID NO: 9919 - DNA, 20 bp, synthetic construct
  source 1..20: mol_type = other DNA
cgaatacactgtcctccgta

SEQ ID NO: 9920 - DNA, 20 bp, synthetic construct
  source 1..20: mol_type = other DNA
gttcaaggtcctgcggctat

SEQ ID NO: 9921 - DNA, 20 bp, synthetic construct
  source 1..20: mol_type = other DNA
gaaggacgcgggcttacgta

SEQ ID NO: 9922 - DNA, 20 bp, synthetic construct
  source 1..20: mol_type = other DNA
tgagcgtataagctccgcat

SEQ ID NO: 9923 - DNA, 20 bp, synthetic construct
  source 1..20: mol_type = other DNA
acgttctaaaccatttcgcg

SEQ ID NO: 9924 - DNA, 20 bp, synthetic construct
  source 1..20: mol_type = other DNA
ctgagaatctcgcccttgtt

SEQ ID NO: 9925 - DNA, 20 bp, synthetic construct
  source 1..20: mol_type = other DNA
tcttggcgctgacatttcac

SEQ ID NO: 9926 - DNA, 20 bp, synthetic construct
  source 1..20: mol_type = other DNA
tataggtacaaccggcaaca

SEQ ID NO: 9927 - DNA, 20 bp, synthetic construct
  source 1..20: mol_type = other DNA
agaaacttacagcacttgct

SEQ ID NO: 9928 - DNA, 20 bp, synthetic construct
  source 1..20: mol_type = other DNA
catacatgctccacttaagc

SEQ ID NO: 9929 - DNA, 20 bp, synthetic construct
  source 1..20: mol_type = other DNA
atcgtgtctgggtcgggatc

SEQ ID NO: 9930 - DNA, 20 bp, synthetic construct
  source 1..20: mol_type = other DNA
cttgccaagtgctcggtagg

SEQ ID NO: 9931 - DNA, 20 bp, synthetic construct
  source 1..20: mol_type = other DNA
acttccctgaaacctagaag

SEQ ID NO: 9932 - DNA, 20 bp, synthetic construct
  source 1..20: mol_type = other DNA
gactttggaggcatgggttt

SEQ ID NO: 9933 - DNA, 20 bp, synthetic construct
  source 1..20: mol_type = other DNA
cttgatcgataacacactcc

SEQ ID NO: 9934 - DNA, 20 bp, synthetic construct
  source 1..20: mol_type = other DNA
atccctgcgttgattagtcc

SEQ ID NO: 9935 - DNA, 20 bp, synthetic construct
  source 1..20: mol_type = other DNA
ctatcaactgactctcgtaa

SEQ ID NO: 9936 - DNA, 20 bp, synthetic construct
  source 1..20: mol_type = other DNA
gtatgatcctgcgtaaagtc

SEQ ID NO: 9937 - DNA, 20 bp, synthetic construct
  source 1..20: mol_type = other DNA
atggagacttaattgtgtta

SEQ ID NO: 9938 - DNA, 20 bp, synthetic construct
  source 1..20: mol_type = other DNA
ggcttctgcactgtgcatta

SEQ ID NO: 9939 - DNA, 20 bp, synthetic construct
  source 1..20: mol_type = other DNA
ctataagtcgtgatggactc

SEQ ID NO: 9940 - DNA, 20 bp, synthetic construct
  source 1..20: mol_type = other DNA
gaagcgcgtctcctgggcaa

SEQ ID NO: 9941 - DNA, 20 bp, synthetic construct
  source 1..20: mol_type = other DNA
gcccatccgaactagcgcta

SEQ ID NO: 9942 - DNA, 20 bp, synthetic construct
  source 1..20: mol_type = other DNA
cacgttcctgatattgcagc

SEQ ID NO: 9943 - DNA, 20 bp, synthetic construct
  source 1..20: mol_type = other DNA
cgactgaagaggaccataca

SEQ ID NO: 9944 - DNA, 20 bp, synthetic construct
  source 1..20: mol_type = other DNA
aactggctagtcctcttacg

SEQ ID NO: 9945 - DNA, 20 bp, synthetic construct
  source 1..20: mol_type = other DNA
agttagaggcgcagaccaaa

SEQ ID NO: 9946 - DNA, 20 bp, synthetic construct
  source 1..20: mol_type = other DNA
cgcaaccttggcgttatgaa

SEQ ID NO: 9947 - DNA, 20 bp, synthetic construct
  source 1..20: mol_type = other DNA
ctgctatttaattgggactt

SEQ ID NO: 9948 - DNA, 20 bp, synthetic construct
  source 1..20: mol_type = other DNA
caagacgtgcatgaatgtag

SEQ ID NO: 9949 - DNA, 20 bp, synthetic construct
  source 1..20: mol_type = other DNA
tgagtagtttccgcgataga

SEQ ID NO: 9950 - DNA, 20 bp, synthetic construct
  source 1..20: mol_type = other DNA
ctcgataccattgggcacaa

SEQ ID NO: 9951 - DNA, 20 bp, synthetic construct
  source 1..20: mol_type = other DNA
tcactatagagaatggttga

SEQ ID NO: 9952 - DNA, 20 bp, synthetic construct
  source 1..20: mol_type = other DNA
gcaagactggcaattgcttc

SEQ ID NO: 9953 - DNA, 20 bp, synthetic construct
  source 1..20: mol_type = other DNA
caccctcaggtgcaaagatg

SEQ ID NO: 9954 - DNA, 20 bp, synthetic construct
  source 1..20: mol_type = other DNA
gagggtggagggtctaatac

SEQ ID NO: 9955 - DNA, 20 bp, synthetic construct
  source 1..20: mol_type = other DNA
ttaccctgggctgtcctggg

SEQ ID NO: 9956 - DNA, 20 bp, synthetic construct
  source 1..20: mol_type = other DNA
ttatctaagccaagcgccac

SEQ ID NO: 9957 - DNA, 20 bp, synthetic construct
  source 1..20: mol_type = other DNA
taatctacgagacgcacgaa

SEQ ID NO: 9958 - DNA, 20 bp, synthetic construct
  source 1..20: mol_type = other DNA
tactaaggatgggctgtcta

SEQ ID NO: 9959 - DNA, 20 bp, synthetic construct
  source 1..20: mol_type = other DNA
taccgggtgacacgtgtcat

SEQ ID NO: 9960 - DNA, 20 bp, synthetic construct
  source 1..20: mol_type = other DNA
cgtggtcagtcgtgttgcgc

SEQ ID NO: 9961 - DNA, 20 bp, synthetic construct
  source 1..20: mol_type = other DNA
actaacctaccaaataaagg

SEQ ID NO: 9962 - DNA, 20 bp, synthetic construct
  source 1..20: mol_type = other DNA
cctcttccggtggaaactac

SEQ ID NO: 9963 - DNA, 20 bp, synthetic construct
  source 1..20: mol_type = other DNA
cgcactacactagcgaaccc

SEQ ID NO: 9964 - DNA, 20 bp, synthetic construct
  source 1..20: mol_type = other DNA
aagtatatccgaaccgatca

SEQ ID NO: 9965 - DNA, 20 bp, synthetic construct
  source 1..20: mol_type = other DNA
atgttggcgatgtcgccttc

SEQ ID NO: 9966 - DNA, 20 bp, synthetic construct
  source 1..20: mol_type = other DNA
catcatgatcaaccgtttca

SEQ ID NO: 9967 - DNA, 20 bp, synthetic construct
  source 1..20: mol_type = other DNA
cgatagctgtgactcccttt

SEQ ID NO: 9968 - DNA, 20 bp, synthetic construct
  source 1..20: mol_type = other DNA
gcacgatggagctccctagt

SEQ ID NO: 9969 - DNA, 20 bp, synthetic construct
  source 1..20: mol_type = other DNA
gtggttacgtagtcaatttg

SEQ ID NO: 9970 - DNA, 20 bp, synthetic construct
  source 1..20: mol_type = other DNA
acatttgggtgctggccatg

SEQ ID NO: 9971 - DNA, 20 bp, synthetic construct
  source 1..20: mol_type = other DNA
cccaagtgcggacgttatca

SEQ ID NO: 9972 - DNA, 20 bp, synthetic construct
  source 1..20: mol_type = other DNA
gaccatccaataatgggcat

SEQ ID NO: 9973 - DNA, 20 bp, synthetic construct
  source 1..20: mol_type = other DNA
accgttgagtctcagcgatg

SEQ ID NO: 9974 - DNA, 20 bp, synthetic construct
  source 1..20: mol_type = other DNA
tatgccaggaaagcgacgac

SEQ ID NO: 9975 - DNA, 20 bp, synthetic construct
  source 1..20: mol_type = other DNA
accctaaagttgatggagtc

SEQ ID NO: 9976 - DNA, 20 bp, synthetic construct
  source 1..20: mol_type = other DNA
ccacgtatgagagccaccgc

SEQ ID NO: 9977 - DNA, 20 bp, synthetic construct
  source 1..20: mol_type = other DNA
tcgggcttatagaaatgagg

SEQ ID NO: 9978 - DNA, 20 bp, synthetic construct
  source 1..20: mol_type = other DNA
ggtggcgagatcgatagtgt

SEQ ID NO: 9979 - DNA, 20 bp, synthetic construct
  source 1..20: mol_type = other DNA
cgcatgatgattatcgggcc

SEQ ID NO: 9980 - DNA, 20 bp, synthetic construct
  source 1..20: mol_type = other DNA
agctgccatccgatcgtatg

SEQ ID NO: 9981 - DNA, 20 bp, synthetic construct
  source 1..20: mol_type = other DNA
ctctgctccttgtagcgcat

SEQ ID NO: 9982 - DNA, 20 bp, synthetic construct
  source 1..20: mol_type = other DNA
agcttccctcaccacccagt

SEQ ID NO: 9983 - DNA, 20 bp, synthetic construct
  source 1..20: mol_type = other DNA
cctcagaaagaccaatgtag

SEQ ID NO: 9984 - DNA, 20 bp, synthetic construct
  source 1..20: mol_type = other DNA
ccgtattgaaacccacctga

SEQ ID NO: 9985 - DNA, 20 bp, synthetic construct
  source 1..20: mol_type = other DNA
gtgggtattcaccgctacca

SEQ ID NO: 9986 - DNA, 20 bp, synthetic construct
  source 1..20: mol_type = other DNA
gccatctcaacattacagag

SEQ ID NO: 9987 - DNA, 20 bp, synthetic construct
  source 1..20: mol_type = other DNA
tttctgggttcgtttagatt

SEQ ID NO: 9988 - DNA, 20 bp, synthetic construct
  source 1..20: mol_type = other DNA
ggagacctactggcagacct

SEQ ID NO: 9989 - DNA, 20 bp, synthetic construct
  source 1..20: mol_type = other DNA
atccgggtaaactatcatag

SEQ ID NO: 9990 - DNA, 20 bp, synthetic construct
  source 1..20: mol_type = other DNA
acgtgcaaacccttacgtgc

SEQ ID NO: 9991 - DNA, 20 bp, synthetic construct
  source 1..20: mol_type = other DNA
agtacctctcaaggcatccc

SEQ ID NO: 9992 - DNA, 20 bp, synthetic construct
  source 1..20: mol_type = other DNA
ttcgtagagtgcgtgtagga

SEQ ID NO: 9993 - DNA, 20 bp, synthetic construct
  source 1..20: mol_type = other DNA
tgaaagatgacgtacagatg

SEQ ID NO: 9994 - DNA, 20 bp, synthetic construct
  source 1..20: mol_type = other DNA
cggacagtgtatttgaggat

SEQ ID NO: 9995 - DNA, 20 bp, synthetic construct
  source 1..20: mol_type = other DNA
attcgcgcgttaccttcgag

SEQ ID NO: 9996 - DNA, 20 bp, synthetic construct
  source 1..20: mol_type = other DNA
gcattgtagttgtagcgttc

SEQ ID NO: 9997 - DNA, 20 bp, synthetic construct
  source 1..20: mol_type = other DNA
taggtcggcgatggccataa

SEQ ID NO: 9998 - DNA, 20 bp, synthetic construct
  source 1..20: mol_type = other DNA
gccatggatgaaagtcaacc

SEQ ID NO: 9999 - DNA, 20 bp, synthetic construct
  source 1..20: mol_type = other DNA
gctcaacatggttatgctac

SEQ ID NO: 10000 - DNA, 20 bp, synthetic construct
  source 1..20: mol_type = other DNA
ttgtgactgatagcagccat

SEQ ID NO: 10001 - DNA, 20 bp, synthetic construct
  source 1..20: mol_type = other DNA
tcctacattacaataagcct

SEQ ID NO: 10002 - DNA, 20 bp, synthetic construct
  source 1..20: mol_type = other DNA
gagtactcgaagtacaaact

SEQ ID NO: 10003 - DNA, 20 bp, synthetic construct
  source 1..20: mol_type = other DNA
tagccggaataaacgtaaac

SEQ ID NO: 10004 - DNA, 20 bp, synthetic construct
  source 1..20: mol_type = other DNA
agttacttgggctgcactgg

SEQ ID NO: 10005 - DNA, 20 bp, synthetic construct
  source 1..20: mol_type = other DNA
acactagacacaacagcaca

SEQ ID NO: 10006 - DNA, 20 bp, synthetic construct
  source 1..20: mol_type = other DNA
tgtctgaactgaaatcgtgg

SEQ ID NO: 10007 - DNA, 20 bp, synthetic construct
  source 1..20: mol_type = other DNA
tcaggctctactggagtgac

SEQ ID NO: 10008 - DNA, 20 bp, synthetic construct
  source 1..20: mol_type = other DNA
atatctggatcagtctcccg

SEQ ID NO: 10009 - DNA, 20 bp, synthetic construct
  source 1..20: mol_type = other DNA
gagatcctgcattaagagcg

SEQ ID NO: 10010 - DNA, 20 bp, synthetic construct
  source 1..20: mol_type = other DNA
atttgtttggccagtccata

SEQ ID NO: 10011 - DNA, 20 bp, synthetic construct
  source 1..20: mol_type = other DNA
agccgtctctaagtctcaaa

SEQ ID NO: 10012 - DNA, 20 bp, synthetic construct
  source 1..20: mol_type = other DNA
atatgaacatactgacaaac

SEQ ID NO: 10013 - DNA, 20 bp, synthetic construct
  source 1..20: mol_type = other DNA
tgataaacgctcgttaacat

SEQ ID NO: 10014 - DNA, 20 bp, synthetic construct
  source 1..20: mol_type = other DNA
agatgaccaccacggcggat

SEQ ID NO: 10015 - DNA, 20 bp, synthetic construct
  source 1..20: mol_type = other DNA
acaatcaaaccgattgctcc

SEQ ID NO: 10016 - DNA, 20 bp, synthetic construct
  source 1..20: mol_type = other DNA
ggtcgccactaaacaccacc

SEQ ID NO: 10017 - DNA, 20 bp, synthetic construct
  source 1..20: mol_type = other DNA
ttgtgtggaatcgcacaatg

SEQ ID NO: 10018 - DNA, 20 bp, synthetic construct
  source 1..20: mol_type = other DNA
ggagaccagactaagtcagc

SEQ ID NO: 10019 - DNA, 20 bp, synthetic construct
  source 1..20: mol_type = other DNA
tcggaaacagtatgctcgat

SEQ ID NO: 10020 - DNA, 20 bp, synthetic construct
  source 1..20: mol_type = other DNA
ggaatttgagttattacttg

SEQ ID NO: 10021 - DNA, 20 bp, synthetic construct
  source 1..20: mol_type = other DNA
atcagcgatccattaagtat

SEQ ID NO: 10022 - DNA, 20 bp, synthetic construct
  source 1..20: mol_type = other DNA
atctcaggaagtggcgatgc

SEQ ID NO: 10023 - DNA, 20 bp, synthetic construct
  source 1..20: mol_type = other DNA
taacagagaattaggccgta

SEQ ID NO: 10024 - DNA, 20 bp, synthetic construct
  source 1..20: mol_type = other DNA
ttcaaggatccatggtgtgt

SEQ ID NO: 10025 - DNA, 20 bp, synthetic construct
  source 1..20: mol_type = other DNA
agtcgaagatagtaatggat

SEQ ID NO: 10026 - DNA, 20 bp, synthetic construct
  source 1..20: mol_type = other DNA
ctgtctgtcacttctcgttt

SEQ ID NO: 10027 - DNA, 20 bp, synthetic construct
  source 1..20: mol_type = other DNA
atcatactcaattgctctga

SEQ ID NO: 10028 - DNA, 20 bp, synthetic construct
  source 1..20: mol_type = other DNA
cagactaccaagtgcggatg

SEQ ID NO: 10029 - DNA, 20 bp, synthetic construct
  source 1..20: mol_type = other DNA
ttggacaccttacctgaatt

SEQ ID NO: 10030 - DNA, 20 bp, synthetic construct
  source 1..20: mol_type = other DNA
catatctactagcaggactt

SEQ ID NO: 10031 - DNA, 20 bp, synthetic construct
  source 1..20: mol_type = other DNA
gacactagctaccgttccgc

SEQ ID NO: 10032 - DNA, 20 bp, synthetic construct
  source 1..20: mol_type = other DNA
atgtgaagcagttatgaatg

SEQ ID NO: 10033 - DNA, 20 bp, synthetic construct
  source 1..20: mol_type = other DNA
attagcatgtgtatagggtg

SEQ ID NO: 10034 - DNA, 20 bp, synthetic construct
  source 1..20: mol_type = other DNA
tcctatacagacccaatcac

SEQ ID NO: 10035 - DNA, 20 bp, synthetic construct
  source 1..20: mol_type = other DNA
tttcgcctaacctgggaccg

SEQ ID NO: 10036 - DNA, 20 bp, synthetic construct
  source 1..20: mol_type = other DNA
tgttggatagtcatgctacc

SEQ ID NO: 10037 - DNA, 20 bp, synthetic construct
  source 1..20: mol_type = other DNA
gacaatcgataaacaccaag

SEQ ID NO: 10038 - DNA, 20 bp, synthetic construct
  source 1..20: mol_type = other DNA
cgtacctagccatggagcat

SEQ ID NO: 10039 - DNA, 20 bp, synthetic construct
  source 1..20: mol_type = other DNA
ctagaactaaagcgtgccga

SEQ ID NO: 10040 - DNA, 20 bp, synthetic construct
  source 1..20: mol_type = other DNA
caatcagattcatgtcattt

SEQ ID NO: 10041 - DNA, 20 bp, synthetic construct
  source 1..20: mol_type = other DNA
ctatttgtcggtcatgtaac

SEQ ID NO: 10042 - DNA, 20 bp, synthetic construct
  source 1..20: mol_type = other DNA
accagggactgaatgcgttc

SEQ ID NO: 10043 - DNA, 20 bp, synthetic construct
  source 1..20: mol_type = other DNA
gtggtgtctcactctacgtg

SEQ ID NO: 10044 - DNA, 20 bp, synthetic construct
  source 1..20: mol_type = other DNA
gcagcgctcgctgagtagtc

SEQ ID NO: 10045 - DNA, 20 bp, synthetic construct
  source 1..20: mol_type = other DNA
cgtttctcacacagggcaag

SEQ ID NO: 10046 - DNA, 20 bp, synthetic construct
  source 1..20: mol_type = other DNA
agagatcacccgtacagacg

SEQ ID NO: 10047 - DNA, 20 bp, synthetic construct
  source 1..20: mol_type = other DNA
gtggcgtctcctaggtgcgg

SEQ ID NO: 10048 - DNA, 20 bp, synthetic construct
  source 1..20: mol_type = other DNA
tcatgcataatatctcggac

SEQ ID NO: 10049 - DNA, 20 bp, synthetic construct
  source 1..20: mol_type = other DNA
tagacagacttcatgaaaga

SEQ ID NO: 10050 - DNA, 20 bp, synthetic construct
  source 1..20: mol_type = other DNA
acacggagcatcgaactaga

SEQ ID NO: 10051 - DNA, 20 bp, synthetic construct
  source 1..20: mol_type = other DNA
ttctgctgttctgctgatgc

SEQ ID NO: 10052 - DNA, 20 bp, synthetic construct
  source 1..20: mol_type = other DNA
tctattctgggtacccaatc

SEQ ID NO: 10053 - DNA, 20 bp, synthetic construct
  source 1..20: mol_type = other DNA
ttgcagaccagcgactatat

SEQ ID NO: 10054 - DNA, 20 bp, synthetic construct
  source 1..20: mol_type = other DNA
ttgaactcgctaacatagtc

SEQ ID NO: 10055 - DNA, 20 bp, synthetic construct
  source 1..20: mol_type = other DNA
gcccactggaactcgtctcc

SEQ ID NO: 10056 - DNA, 20 bp, synthetic construct
  source 1..20: mol_type = other DNA
gcgagcatagctggtcactt

SEQ ID NO: 10057 - DNA, 20 bp, synthetic construct
  source 1..20: mol_type = other DNA
gccactcttgattaccttca

SEQ ID NO: 10058 - DNA, 20 bp, synthetic construct
  source 1..20: mol_type = other DNA
cctaagattcggtgaatggt

SEQ ID NO: 10059 - DNA, 20 bp, synthetic construct
  source 1..20: mol_type = other DNA
tactacaattgtgccctgtg

SEQ ID NO: 10060 - DNA, 20 bp, synthetic construct
  source 1..20: mol_type = other DNA
ttggcctaacagtacaaact

SEQ ID NO: 10061 - DNA, 20 bp, synthetic construct
  source 1..20: mol_type = other DNA
agtgtagacgattgtgtagc

SEQ ID NO: 10062 - DNA, 20 bp, synthetic construct
  source 1..20: mol_type = other DNA
gtcaagggtggtttaatcta

SEQ ID NO: 10063 - DNA, 20 bp, synthetic construct
  source 1..20: mol_type = other DNA
ctgaccaattaagtggtatt

SEQ ID NO: 10064 - DNA, 20 bp, synthetic construct
  source 1..20: mol_type = other DNA
aggcaccgtcttgtaaaggc

SEQ ID NO: 10065 - DNA, 20 bp, synthetic construct
  source 1..20: mol_type = other DNA
atttgcattagcgtgggtcg

SEQ ID NO: 10066 - DNA, 20 bp, synthetic construct
  source 1..20: mol_type = other DNA
ttcttaaagcgcgttacaga

SEQ ID NO: 10067 - DNA, 20 bp, synthetic construct
  source 1..20: mol_type = other DNA
actcggccgcagtttaaagg

SEQ ID NO: 10068 - DNA, 20 bp, synthetic construct
  source 1..20: mol_type = other DNA
tacatcggctgaagtttctc

SEQ ID NO: 10069 - DNA, 20 bp, synthetic construct
  source 1..20: mol_type = other DNA
tatgacagtgccatggttct

SEQ ID NO: 10070 - DNA, 20 bp, synthetic construct
  source 1..20: mol_type = other DNA
gtagcctcgattaaagagcg

SEQ ID NO: 10071 - DNA, 20 bp, synthetic construct
  source 1..20: mol_type = other DNA
gtccatcgcgaacgtaccca

SEQ ID NO: 10072 - DNA, 20 bp, synthetic construct
  source 1..20: mol_type = other DNA
gtcgaagtggtctaacagtt

SEQ ID NO: 10073 - DNA, 20 bp, synthetic construct
  source 1..20: mol_type = other DNA
tctcttgcggttaacctacc

SEQ ID NO: 10074 - DNA, 20 bp, synthetic construct
  source 1..20: mol_type = other DNA
tgaaccgttacataatagcg

SEQ ID NO: 10075 - DNA, 20 bp, synthetic construct
  source 1..20: mol_type = other DNA
atggactaattgttcctggc

SEQ ID NO: 10076 - DNA, 20 bp, synthetic construct
  source 1..20: mol_type = other DNA
tatgctacccagcaagttta

SEQ ID NO: 10077 - DNA, 20 bp, synthetic construct
  source 1..20: mol_type = other DNA
gatgagtgaacgcgatctgc

SEQ ID NO: 10078 - DNA, 20 bp, synthetic construct
  source 1..20: mol_type = other DNA
tttgggaacctctggtgggt

SEQ ID NO: 10079 - DNA, 20 bp, synthetic construct
  source 1..20: mol_type = other DNA
gggaatctgggcctcccaat

SEQ ID NO: 10080 - DNA, 20 bp, synthetic construct
  source 1..20: mol_type = other DNA
accgtcgtaagtggaaagcc

SEQ ID NO: 10081 - DNA, 20 bp, synthetic construct
  source 1..20: mol_type = other DNA
gtgaagctacatgtcggcac

SEQ ID NO: 10082 - DNA, 20 bp, synthetic construct
  source 1..20: mol_type = other DNA
ttgatactaaggctgagtga

SEQ ID NO: 10083 - DNA, 20 bp, synthetic construct
  source 1..20: mol_type = other DNA
acaatatccaccgctactga

SEQ ID NO: 10084 - DNA, 20 bp, synthetic construct
  source 1..20: mol_type = other DNA
cgacggttaaatatgcaccc

SEQ ID NO: 10085 - DNA, 20 bp, synthetic construct
  source 1..20: mol_type = other DNA
cacggcgcattgtccatcat

SEQ ID NO: 10086 - DNA, 20 bp, synthetic construct
  source 1..20: mol_type = other DNA
gaccacctcagtgtactggc

SEQ ID NO: 10087 - DNA, 20 bp, synthetic construct
  source 1..20: mol_type = other DNA
atcgatactgtgttgcatgc

SEQ ID NO: 10088 - DNA, 20 bp, synthetic construct
  source 1..20: mol_type = other DNA
gtaggtagtgtacagcagct

SEQ ID NO: 10089 - DNA, 20 bp, synthetic construct
  source 1..20: mol_type = other DNA
gtcagcgacattcagctcac

SEQ ID NO: 10090 - DNA, 20 bp, synthetic construct
  source 1..20: mol_type = other DNA
tgcttctccgccggtcaaga

SEQ ID NO: 10091 - DNA, 20 bp, synthetic construct
  source 1..20: mol_type = other DNA
atcatatacacttcgaggta

SEQ ID NO: 10092 - DNA, 20 bp, synthetic construct
  source 1..20: mol_type = other DNA
tctcgtaatcatccaatact

SEQ ID NO: 10093 - DNA, 20 bp, synthetic construct
  source 1..20: mol_type = other DNA
ccgggtgtcccgcatttaaa

SEQ ID NO: 10094 - DNA, 20 bp, synthetic construct
  source 1..20: mol_type = other DNA
tgcccacgttgagatggact

SEQ ID NO: 10095 - DNA, 20 bp, synthetic construct
  source 1..20: mol_type = other DNA
tagccgacactctgaaacag

SEQ ID NO: 10096 - DNA, 20 bp, synthetic construct
  source 1..20: mol_type = other DNA
caactcgctttaatgttcca

SEQ ID NO: 10097 - DNA, 20 bp, synthetic construct
  source 1..20: mol_type = other DNA
ctcccggcagatattgacct

SEQ ID NO: 10098 - DNA, 20 bp, synthetic construct
  source 1..20: mol_type = other DNA
acgcagccagcttcgcaact

SEQ ID NO: 10099 - DNA, 20 bp, synthetic construct
  source 1..20: mol_type = other DNA
acactattcacgaggcgtct

SEQ ID NO: 10100 - DNA, 20 bp, synthetic construct
  source 1..20: mol_type = other DNA
aatcgaggtttgctatgctt

SEQ ID NO: 10101 - DNA, 20 bp, synthetic construct
  source 1..20: mol_type = other DNA
cgtccaaagtttggtcgttc

SEQ ID NO: 10102 - DNA, 20 bp, synthetic construct
  source 1..20: mol_type = other DNA
gggcatcactgctccgttgg

SEQ ID NO: 10103 - DNA, 20 bp, synthetic construct
  source 1..20: mol_type = other DNA
catgtcgcgcggacgaagat

SEQ ID NO: 10104 - DNA, 20 bp, synthetic construct
  source 1..20: mol_type = other DNA
gtcaccaatgggcgctgcat

SEQ ID NO: 10105 - DNA, 20 bp, synthetic construct
  source 1..20: mol_type = other DNA
ttgtcctgcgcccatccagg

SEQ ID NO: 10106 - DNA, 20 bp, synthetic construct
  source 1..20: mol_type = other DNA
cgccggattgccttcacgtg

SEQ ID NO: 10107 - DNA, 20 bp, synthetic construct
  source 1..20: mol_type = other DNA
aacgtcaattcggaaaccac

SEQ ID NO: 10108 - DNA, 20 bp, synthetic construct
  source 1..20: mol_type = other DNA
taatactgagagagaggttg

SEQ ID NO: 10109 - DNA, 20 bp, synthetic construct
  source 1..20: mol_type = other DNA
ctttacgatccctatgtctc

SEQ ID NO: 10110 - DNA, 20 bp, synthetic construct
  source 1..20: mol_type = other DNA
gagcaattggtaaggtgaat

SEQ ID NO: 10111 - DNA, 20 bp, synthetic construct
  source 1..20: mol_type = other DNA
gctgatttgccaagtgtgaa

SEQ ID NO: 10112 - DNA, 20 bp, synthetic construct
  source 1..20: mol_type = other DNA
caacaacaatggtacatccg

SEQ ID NO: 10113 - DNA, 20 bp, synthetic construct
  source 1..20: mol_type = other DNA
aacccaagcgccagctgtga

SEQ ID NO: 10114 - DNA, 20 bp, synthetic construct
  source 1..20: mol_type = other DNA
gtccacacgcatcgccacaa

SEQ ID NO: 10115 - DNA, 20 bp, synthetic construct
  source 1..20: mol_type = other DNA
agttataggttgaaggcctg

SEQ ID NO: 10116 - DNA, 20 bp, synthetic construct
  source 1..20: mol_type = other DNA
tcggagctgtgattagatga

SEQ ID NO: 10117 - DNA, 20 bp, synthetic construct
  source 1..20: mol_type = other DNA
gtttgcaaggtattctgtgc

SEQ ID NO: 10118 - DNA, 20 bp, synthetic construct
  source 1..20: mol_type = other DNA
ctcgtggataccagtccata

SEQ ID NO: 10119 - DNA, 20 bp, synthetic construct
  source 1..20: mol_type = other DNA
caaccctccgctctattctc

SEQ ID NO: 10120 - DNA, 20 bp, synthetic construct
  source 1..20: mol_type = other DNA
ctcttggaattattgtgcca

SEQ ID NO: 10121 - DNA, 20 bp, synthetic construct
  source 1..20: mol_type = other DNA
gtggctattgtctacgaatt

SEQ ID NO: 10122 - DNA, 20 bp, synthetic construct
  source 1..20: mol_type = other DNA
agttattggtatcctcagac

SEQ ID NO: 10123 - DNA, 20 bp, synthetic construct
  source 1..20: mol_type = other DNA
cagctgcctaatgtccaggg

SEQ ID NO: 10124 - DNA, 20 bp, synthetic construct
  source 1..20: mol_type = other DNA
gccagtaacgcgcctttcgt

SEQ ID NO: 10125 - DNA, 20 bp, synthetic construct
  source 1..20: mol_type = other DNA
cagtgccttcaattggcgtt

SEQ ID NO: 10126 - DNA, 20 bp, synthetic construct
  source 1..20: mol_type = other DNA
acgagtcagcactgatttaa

SEQ ID NO: 10127 - DNA, 20 bp, synthetic construct
  source 1..20: mol_type = other DNA
taataatcgatcaagcaaca

SEQ ID NO: 10128 - DNA, 20 bp, synthetic construct
  source 1..20: mol_type = other DNA
tccagcaagctccgcgtaaa

SEQ ID NO: 10129 - DNA, 20 bp, synthetic construct
  source 1..20: mol_type = other DNA
agccactcgttgttgatgca

SEQ ID NO: 10130 - DNA, 20 bp, synthetic construct
  source 1..20: mol_type = other DNA
atttaactaaccgttggttc

SEQ ID NO: 10131 - DNA, 20 bp, synthetic construct
  source 1..20: mol_type = other DNA
cagaccaatatgaagtctgc

SEQ ID NO: 10132 - DNA, 20 bp, synthetic construct
  source 1..20: mol_type = other DNA
tgtggcgttcgagggccttg

SEQ ID NO: 10133 - DNA, 20 bp, synthetic construct
  source 1..20: mol_type = other DNA
gaccgaggagtcttgagtcg

SEQ ID NO: 10134 - DNA, 20 bp, synthetic construct
  source 1..20: mol_type = other DNA
tcactatagaacgtagtacg

SEQ ID NO: 10135 - DNA, 20 bp, synthetic construct
  source 1..20: mol_type = other DNA
aaccaacgagggcattcatc

SEQ ID NO: 10136 - DNA, 20 bp, synthetic construct
  source 1..20: mol_type = other DNA
gtgggatgtatcagagcacc

SEQ ID NO: 10137 - DNA, 20 bp, synthetic construct
  source 1..20: mol_type = other DNA
caatgcttatggtacatgcg

SEQ ID NO: 10138 - DNA, 20 bp, synthetic construct
  source 1..20: mol_type = other DNA
aaagagggtttgggagccaa

SEQ ID NO: 10139 - DNA, 20 bp, synthetic construct
  source 1..20: mol_type = other DNA
agactaagcggtccacctcc

SEQ ID NO: 10140 - DNA, 20 bp, synthetic construct
  source 1..20: mol_type = other DNA
ggatctcagcttcgaccaga

SEQ ID NO: 10141 - DNA, 20 bp, synthetic construct
  source 1..20: mol_type = other DNA
ttggtctttaccctctattt

SEQ ID NO: 10142 - DNA, 20 bp, synthetic construct
  source 1..20: mol_type = other DNA
ttgcccgcgcgctgatatta

SEQ ID NO: 10143 - DNA, 20 bp, synthetic construct
  source 1..20: mol_type = other DNA
tgtctttacaatgggtagtt

SEQ ID NO: 10144 - DNA, 20 bp, synthetic construct
  source 1..20: mol_type = other DNA
ttctcaatggaacgggtcct

SEQ ID NO: 10145 - DNA, 20 bp, synthetic construct
  source 1..20: mol_type = other DNA
aacattgcaataggtgattg

SEQ ID NO: 10146 - DNA, 20 bp, synthetic construct
  source 1..20: mol_type = other DNA
atgatcgactacaagccatg

SEQ ID NO: 10147 - DNA, 20 bp, synthetic construct
  source 1..20: mol_type = other DNA
agttggacagatgtagcgca

SEQ ID NO: 10148 - DNA, 20 bp, synthetic construct
  source 1..20: mol_type = other DNA
gttatgagtcgccgcaagag

SEQ ID NO: 10149 - DNA, 20 bp, synthetic construct
  source 1..20: mol_type = other DNA
tgatatatccgtcagctatg

SEQ ID NO: 10150 - DNA, 20 bp, synthetic construct
  source 1..20: mol_type = other DNA
ggtcttacagcgttgacgtt

SEQ ID NO: 10151 - DNA, 20 bp, synthetic construct
  source 1..20: mol_type = other DNA
aaatggcgttggatgtccga

SEQ ID NO: 10152 - DNA, 20 bp, synthetic construct
  source 1..20: mol_type = other DNA
tgaacacactatgaggtgtg

SEQ ID NO: 10153 - DNA, 20 bp, synthetic construct
  source 1..20: mol_type = other DNA
gtcagtcatgggtggagaga

SEQ ID NO: 10154 - DNA, 20 bp, synthetic construct
  source 1..20: mol_type = other DNA
gcggaatgagcattcagact

SEQ ID NO: 10155 - DNA, 20 bp, synthetic construct
  source 1..20: mol_type = other DNA
agggtatggatgaaggtcta

SEQ ID NO: 10156 - DNA, 20 bp, synthetic construct
  source 1..20: mol_type = other DNA
tttcagttagagacttggat

SEQ ID NO: 10157 - DNA, 20 bp, synthetic construct
  source 1..20: mol_type = other DNA
gatcttgtgtctcctgcgtc

SEQ ID NO: 10158 - DNA, 20 bp, synthetic construct
  source 1..20: mol_type = other DNA
ggattcactgcggtgcgact

SEQ ID NO: 10159 - DNA, 20 bp, synthetic construct
  source 1..20: mol_type = other DNA
ttagtcaaagcaacgctagc

SEQ ID NO: 10160 - DNA, 20 bp, synthetic construct
  source 1..20: mol_type = other DNA
tgaacttgatcaaactccaa

SEQ ID NO: 10161 - DNA, 20 bp, synthetic construct
  source 1..20: mol_type = other DNA
agcagtcagccggttacggc

SEQ ID NO: 10162 - DNA, 20 bp, synthetic construct
  source 1..20: mol_type = other DNA
tggtaggatacggatttacc

SEQ ID NO: 10163 - DNA, 20 bp, synthetic construct
  source 1..20: mol_type = other DNA
gcgaaaggatcatgatccaa

SEQ ID NO: 10164 - DNA, 20 bp, synthetic construct
  source 1..20: mol_type = other DNA
catccggtagctactgaatg

SEQ ID NO: 10165 - DNA, 20 bp, synthetic construct
  source 1..20: mol_type = other DNA
tgatttgccggtgtttaatc

SEQ ID NO: 10166 - DNA, 20 bp, synthetic construct
  source 1..20: mol_type = other DNA
atagccagcctacccagcca

SEQ ID NO: 10167 - DNA, 20 bp, synthetic construct
  source 1..20: mol_type = other DNA
taagaagcatccacgccgag

SEQ ID NO: 10168 - DNA, 20 bp, synthetic construct
  source 1..20: mol_type = other DNA
ggtatctttatgcggatgct

SEQ ID NO: 10169 - DNA, 20 bp, synthetic construct
  source 1..20: mol_type = other DNA
atgaccgggcccactaaccc

SEQ ID NO: 10170 - DNA, 20 bp, synthetic construct
  source 1..20: mol_type = other DNA
cttgtgcgaatgccaatagc

SEQ ID NO: 10171 - DNA, 20 bp, synthetic construct
  source 1..20: mol_type = other DNA
atcgggcggcatacacctaa

SEQ ID NO: 10172 - DNA, 20 bp, synthetic construct
  source 1..20: mol_type = other DNA
cgcgtattagcagcttgatg

SEQ ID NO: 10173 - DNA, 20 bp, synthetic construct
  source 1..20: mol_type = other DNA
cgtaatggccggtcaaggct

SEQ ID NO: 10174 - DNA, 20 bp, synthetic construct
  source 1..20: mol_type = other DNA
acgcgcgcgaaagtccatgg

SEQ ID NO: 10175 - DNA, 20 bp, synthetic construct
  source 1..20: mol_type = other DNA
gaaccggaagagaagccgag

SEQ ID NO: 10176 - DNA, 20 bp, synthetic construct
  source 1..20: mol_type = other DNA
ctcgcatgataccagccacg

SEQ ID NO: 10177 - DNA, 20 bp, synthetic construct
  source 1..20: mol_type = other DNA
tgcgtaacgagcaaatgctt

SEQ ID NO: 10178 - DNA, 20 bp, synthetic construct
  source 1..20: mol_type = other DNA
tacatccatcattgggcgtg

SEQ ID NO: 10179 - DNA, 20 bp, synthetic construct
  source 1..20: mol_type = other DNA
catgcagacatcaagccgag

SEQ ID NO: 10180 - DNA, 20 bp, synthetic construct
  source 1..20: mol_type = other DNA
aaacggtaaccgaaccgtta

SEQ ID NO: 10181 - DNA, 20 bp, synthetic construct
  source 1..20: mol_type = other DNA
atgacagtagctggcagcct

SEQ ID NO: 10182 - DNA, 20 bp, synthetic construct
  source 1..20: mol_type = other DNA
ccgagactatgttcgataag

SEQ ID NO: 10183 - DNA, 20 bp, synthetic construct
  source 1..20: mol_type = other DNA
ggtactaccatatagtcgct

SEQ ID NO: 10184 - DNA, 20 bp, synthetic construct
  source 1..20: mol_type = other DNA
tgacccaacccggctgagct

SEQ ID NO: 10185 - DNA, 20 bp, synthetic construct
  source 1..20: mol_type = other DNA
ccaagcatgctgggaggctg

SEQ ID NO: 10186 - DNA, 20 bp, synthetic construct
  source 1..20: mol_type = other DNA
atagcaattgcgtgaaatag

SEQ ID NO: 10187 - DNA, 20 bp, synthetic construct
  source 1..20: mol_type = other DNA
tgctgagggcaacgtacgaa

SEQ ID NO: 10188 - DNA, 20 bp, synthetic construct
  source 1..20: mol_type = other DNA
cggcagcgggatagcgttac

SEQ ID NO: 10189 - DNA, 20 bp, synthetic construct
  source 1..20: mol_type = other DNA
gtccacaggcccgtaaccga

SEQ ID NO: 10190 - DNA, 20 bp, synthetic construct
  source 1..20: mol_type = other DNA
aggtggagacgaccatgtcc

SEQ ID NO: 10191 - DNA, 20 bp, synthetic construct
  source 1..20: mol_type = other DNA
gcacttcctagacttaaccc

SEQ ID NO: 10192 - DNA, 20 bp, synthetic construct
  source 1..20: mol_type = other DNA
tgacttctccaggatgtcat

SEQ ID NO: 10193 - DNA, 20 bp, synthetic construct
  source 1..20: mol_type = other DNA
acctagtcctcctatcacag

SEQ ID NO: 10194 - DNA, 20 bp, synthetic construct
  source 1..20: mol_type = other DNA
cacacggcctaagacaattg

SEQ ID NO: 10195 - DNA, 20 bp, synthetic construct
  source 1..20: mol_type = other DNA
tgtcaaccaagggcgccggt

SEQ ID NO: 10196 - DNA, 20 bp, synthetic construct
  source 1..20: mol_type = other DNA
cacgttactctcatattgat

SEQ ID NO: 10197 - DNA, 20 bp, synthetic construct
  source 1..20: mol_type = other DNA
aggacttcctgtttagcagc

SEQ ID NO: 10198 - DNA, 20 bp, synthetic construct
  source 1..20: mol_type = other DNA
tcgctaagcgtagccgacgc

SEQ ID NO: 10199 - DNA, 20 bp, synthetic construct
  source 1..20: mol_type = other DNA
tagtagtcctttgcctcgtg

SEQ ID NO: 10200 - DNA, 20 bp, synthetic construct
  source 1..20: mol_type = other DNA
cctacattctacactcaata

SEQ ID NO: 10201 - DNA, 20 bp, synthetic construct
  source 1..20: mol_type = other DNA
gtcaagctgttgccacagtc

SEQ ID NO: 10202 - DNA, 20 bp, synthetic construct
  source 1..20: mol_type = other DNA
tttactgcgtccaggccttc

SEQ ID NO: 10203 - DNA, 20 bp, synthetic construct
  source 1..20: mol_type = other DNA
agacagcagactctgatcgc

SEQ ID NO: 10204 - DNA, 20 bp, synthetic construct
  source 1..20: mol_type = other DNA
tagactttcggcaacgtcat

SEQ ID NO: 10205 - DNA, 20 bp, synthetic construct
  source 1..20: mol_type = other DNA
tggacacagtaactctgaga

SEQ ID NO: 10206 - DNA, 20 bp, synthetic construct
  source 1..20: mol_type = other DNA
caagtcgtggctctatgaat

SEQ ID NO: 10207 - DNA, 20 bp, synthetic construct
  source 1..20: mol_type = other DNA
ggcagcctaattgtatctaa

SEQ ID NO: 10208 - DNA, 20 bp, synthetic construct
  source 1..20: mol_type = other DNA
gttcgctgaactggactctt

SEQ ID NO: 10209 - DNA, 20 bp, synthetic construct
  source 1..20: mol_type = other DNA
gagtacaccatcaggagtgc

SEQ ID NO: 10210 - DNA, 20 bp, synthetic construct
  source 1..20: mol_type = other DNA
agtctgtaggagagaaaggt

SEQ ID NO: 10211 - DNA, 20 bp, synthetic construct
  source 1..20: mol_type = other DNA
ttggattgggtagccgtaag

SEQ ID NO: 10212 - DNA, 20 bp, synthetic construct
  source 1..20: mol_type = other DNA
ggtgggtagcgaaagcaaca

SEQ ID NO: 10213 - DNA, 20 bp, synthetic construct
  source 1..20: mol_type = other DNA
aatgagtacccacttggtac

SEQ ID NO: 10214 - DNA, 20 bp, synthetic construct
  source 1..20: mol_type = other DNA
gtccggcaggtgtgaggtca

SEQ ID NO: 10215 - DNA, 20 bp, synthetic construct
  source 1..20: mol_type = other DNA
tttgcttaggaaggcctcta

SEQ ID NO: 10216 - DNA, 20 bp, synthetic construct
  source 1..20: mol_type = other DNA
cccgctaattcgtccaaagc

SEQ ID NO: 10217 - DNA, 20 bp, synthetic construct
  source 1..20: mol_type = other DNA
aaggaggatgtctgattcag

SEQ ID NO: 10218 - DNA, 20 bp, synthetic construct
  source 1..20: mol_type = other DNA
atcccagagcaggacttacc

SEQ ID NO: 10219 - DNA, 20 bp, synthetic construct
  source 1..20: mol_type = other DNA
gaagctgtccgaaagcctct

SEQ ID NO: 10220 - DNA, 20 bp, synthetic construct
  source 1..20: mol_type = other DNA
aaggctgtttgtcgtcgctc

SEQ ID NO: 10221 - DNA, 20 bp, synthetic construct
  source 1..20: mol_type = other DNA
ttaactgagctgtctgcaac

SEQ ID NO: 10222 - DNA, 20 bp, synthetic construct
  source 1..20: mol_type = other DNA
gttgtcctgttgtggaatga

SEQ ID NO: 10223 - DNA, 20 bp, synthetic construct
  source 1..20: mol_type = other DNA
ttgcgtagagtacacctcga

SEQ ID NO: 10224 - DNA, 20 bp, synthetic construct
  source 1..20: mol_type = other DNA
accgggcagacggatgaaac

SEQ ID NO: 10225 - DNA, 20 bp, synthetic construct
  source 1..20: mol_type = other DNA
gataacaggccaccggtcca

SEQ ID NO: 10226 - DNA, 20 bp, synthetic construct
  source 1..20: mol_type = other DNA
gcgagacgatttgtcctcat

SEQ ID NO: 10227 - DNA, 20 bp, synthetic construct
  source 1..20: mol_type = other DNA
gttgaccttgacactcctag

SEQ ID NO: 10228 - DNA, 20 bp, synthetic construct
  source 1..20: mol_type = other DNA
ggcagacttactcatggttc

SEQ ID NO: 10229 - DNA, 20 bp, synthetic construct
  source 1..20: mol_type = other DNA
atccttgagtgaccaggtag

SEQ ID NO: 10230 - DNA, 20 bp, synthetic construct
  source 1..20: mol_type = other DNA
gtccttcgttagacactgct

SEQ ID NO: 10231 - DNA, 20 bp, synthetic construct
  source 1..20: mol_type = other DNA
accacaacctatgatgccca

SEQ ID NO: 10232 - DNA, 20 bp, synthetic construct
  source 1..20: mol_type = other DNA
gattgactgacaagcggccc

SEQ ID NO: 10233 - DNA, 20 bp, synthetic construct
  source 1..20: mol_type = other DNA
tgcggatacccggatgctat

SEQ ID NO: 10234 - DNA, 20 bp, synthetic construct
  source 1..20: mol_type = other DNA
ctcgcacaccaacaagtccc

SEQ ID NO: 10235 - DNA, 20 bp, synthetic construct
  source 1..20: mol_type = other DNA
cagagtgccctgaatccgag

SEQ ID NO: 10236 - DNA, 20 bp, synthetic construct
  source 1..20: mol_type = other DNA
tcctcctaacggaagttctt

SEQ ID NO: 10237 - DNA, 20 bp, synthetic construct
  source 1..20: mol_type = other DNA
tccctcgcggtaatagttcc

SEQ ID NO: 10238 - DNA, 20 bp, synthetic construct
  source 1..20: mol_type = other DNA
gatggtctggagagaaagag

SEQ ID NO: 10239 - DNA, 20 bp, synthetic construct
  source 1..20: mol_type = other DNA
tcgtattgggctgtattgca

SEQ ID NO: 10240 - DNA, 20 bp, synthetic construct
  source 1..20: mol_type = other DNA
acattcaattctcttgaact

SEQ ID NO: 10241 - DNA, 20 bp, synthetic construct
  source 1..20: mol_type = other DNA
gcctcacttaaatcccaatt

SEQ ID NO: 10242 - DNA, 20 bp, synthetic construct
  source 1..20: mol_type = other DNA
gataatcgtcgttctgctcg

SEQ ID NO: 10243 - DNA, 20 bp, synthetic construct
  source 1..20: mol_type = other DNA
atatagattgggtggtgcgg

SEQ ID NO: 10244 - DNA, 20 bp, synthetic construct
  source 1..20: mol_type = other DNA
ctatgcaccacggaccgctt

SEQ ID NO: 10245 - DNA, 20 bp, synthetic construct
  source 1..20: mol_type = other DNA
tccacacaaggaagcattca

SEQ ID NO: 10246 - DNA, 20 bp, synthetic construct
  source 1..20: mol_type = other DNA
cgtgtgtacagcacgacccg

SEQ ID NO: 10247 - DNA, 20 bp, synthetic construct
  source 1..20: mol_type = other DNA
gaaggtgccgctaagggaat

SEQ ID NO: 10248 - DNA, 20 bp, synthetic construct
  source 1..20: mol_type = other DNA
tgagaagcattgacggcgaa

SEQ ID NO: 10249 - DNA, 20 bp, synthetic construct
  source 1..20: mol_type = other DNA
cctaaccctagaaaggatga

SEQ ID NO: 10250 - DNA, 20 bp, synthetic construct
  source 1..20: mol_type = other DNA
tcttgggtggatcttaggct

SEQ ID NO: 10251 - DNA, 20 bp, synthetic construct
  source 1..20: mol_type = other DNA
gcataacttctttctgcacc

SEQ ID NO: 10252 - DNA, 20 bp, synthetic construct
  source 1..20: mol_type = other DNA
agtggcctctggacctttaa

SEQ ID NO: 10253 - DNA, 20 bp, synthetic construct
  source 1..20: mol_type = other DNA
ccgtcagcagtagtgcacca

SEQ ID NO: 10254 - DNA, 20 bp, synthetic construct
  source 1..20: mol_type = other DNA
ttgatgtatacacatccatc

SEQ ID NO: 10255 - DNA, 20 bp, synthetic construct
  source 1..20: mol_type = other DNA
gttgtcgcgtaaggttctct

SEQ ID NO: 10256 - DNA, 20 bp, synthetic construct
  source 1..20: mol_type = other DNA
aagtccacgacggagaggat

SEQ ID NO: 10257 - DNA, 20 bp, synthetic construct
  source 1..20: mol_type = other DNA
cttaacctggtgacgcgttg

SEQ ID NO: 10258 - DNA, 20 bp, synthetic construct
  source 1..20: mol_type = other DNA
tgcaccggaccaacaacacc

SEQ ID NO: 10259 - DNA, 20 bp, synthetic construct
  source 1..20: mol_type = other DNA
cgttcaaggcgtgagtaaca

SEQ ID NO: 10260 - DNA, 20 bp, synthetic construct
  source 1..20: mol_type = other DNA
attacatccaagggatctac

SEQ ID NO: 10261 - DNA, 20 bp, synthetic construct
  source 1..20: mol_type = other DNA
tgtcttgcagtgagaggtat

SEQ ID NO: 10262 - DNA, 20 bp, synthetic construct
  source 1..20: mol_type = other DNA
ggtttatgcttggagggctc

SEQ ID NO: 10263 - DNA, 20 bp, synthetic construct
  source 1..20: mol_type = other DNA
aaagccgcgcacaccttgag

SEQ ID NO: 10264 - DNA, 20 bp, synthetic construct
  source 1..20: mol_type = other DNA
gccgtgggaatggaacgtat

SEQ ID NO: 10265 - DNA, 20 bp, synthetic construct
  source 1..20: mol_type = other DNA
attgacaatcactatcgaaa

SEQ ID NO: 10266 - DNA, 20 bp, synthetic construct
  source 1..20: mol_type = other DNA
tcccatgtcaaagctaagac

SEQ ID NO: 10267 - DNA, 20 bp, synthetic construct
  source 1..20: mol_type = other DNA
atccactacgaagttggtgt

SEQ ID NO: 10268 - DNA, 20 bp, synthetic construct
  source 1..20: mol_type = other DNA
cctcattaagaaatctctag

SEQ ID NO: 10269 - DNA, 20 bp, synthetic construct
  source 1..20: mol_type = other DNA
gttcaggactcttagtttag

SEQ ID NO: 10270 - DNA, 20 bp, synthetic construct
  source 1..20: mol_type = other DNA
accgatggtgccatcggctt

SEQ ID NO: 10271 - DNA, 20 bp, synthetic construct
  source 1..20: mol_type = other DNA
ggatcactacagtaaggtga

SEQ ID NO: 10272 - DNA, 20 bp, synthetic construct
  source 1..20: mol_type = other DNA
ctgtaatctcagggcaaatc

SEQ ID NO: 10273 - DNA, 20 bp, synthetic construct
  source 1..20: mol_type = other DNA
aggttagagaattgacgcca

SEQ ID NO: 10274 - DNA, 20 bp, synthetic construct
  source 1..20: mol_type = other DNA
ccagcacattgttctctaaa

SEQ ID NO: 10275 - DNA, 20 bp, synthetic construct
  source 1..20: mol_type = other DNA
actatcgctcggactatacg

SEQ ID NO: 10276 - DNA, 20 bp, synthetic construct
  source 1..20: mol_type = other DNA
gtaaggcaccagaataatct

SEQ ID NO: 10277 - DNA, 20 bp, synthetic construct
  source 1..20: mol_type = other DNA
ctcaatgggagtttaagatg

SEQ ID NO: 10278 - DNA, 20 bp, synthetic construct
  source 1..20: mol_type = other DNA
agccttggccaccatagcta

SEQ ID NO: 10279 - DNA, 20 bp, synthetic construct
  source 1..20: mol_type = other DNA
gctaggttactcgggttccg

SEQ ID NO: 10280 - DNA, 20 bp, synthetic construct
  source 1..20: mol_type = other DNA
tctttagccgttggacgagg

SEQ ID NO: 10281 - DNA, 20 bp, synthetic construct
  source 1..20: mol_type = other DNA
ccgcaagtttgccgcacctc

SEQ ID NO: 10282 - DNA, 20 bp, synthetic construct
  source 1..20: mol_type = other DNA
ataagagttgccgccgtact

SEQ ID NO: 10283 - DNA, 20 bp, synthetic construct
  source 1..20: mol_type = other DNA
ctatggtagttgtgttcgcc

SEQ ID NO: 10284 - DNA, 20 bp, synthetic construct
  source 1..20: mol_type = other DNA
acaattctaacaaacagcag

SEQ ID NO: 10285 - DNA, 20 bp, synthetic construct
  source 1..20: mol_type = other DNA
gtcgcacgcaagcaagtgtg

SEQ ID NO: 10286 - DNA, 20 bp, synthetic construct
  source 1..20: mol_type = other DNA
gctgaagcgatcagagcgac

SEQ ID NO: 10287 - DNA, 20 bp, synthetic construct
  source 1..20: mol_type = other DNA
tcccgtcagggcaagcgtcg

SEQ ID NO: 10288 - DNA, 20 bp, synthetic construct
  source 1..20: mol_type = other DNA
agctttagacgttatggcag

SEQ ID NO: 10289 - DNA, 20 bp, synthetic construct
  source 1..20: mol_type = other DNA
tcgttggccaacttcgataa

SEQ ID NO: 10290 - DNA, 20 bp, synthetic construct
  source 1..20: mol_type = other DNA
ttggcgggtagacccgcaca

SEQ ID NO: 10291 - DNA, 20 bp, synthetic construct
  source 1..20: mol_type = other DNA
gtcaacggcctgacctttcg

SEQ ID NO: 10292 - DNA, 20 bp, synthetic construct
  source 1..20: mol_type = other DNA
gtccggcggaactgtgaaga

SEQ ID NO: 10293 - DNA, 20 bp, synthetic construct
  source 1..20: mol_type = other DNA
cctcctcagggctttgcacc

SEQ ID NO: 10294 - DNA, 20 bp, synthetic construct
  source 1..20: mol_type = other DNA
aaagccataaataagatgcc

SEQ ID NO: 10295 - DNA, 20 bp, synthetic construct
  source 1..20: mol_type = other DNA
cgcaaatggccaacagctta

SEQ ID NO: 10296 - DNA, 20 bp, synthetic construct
  source 1..20: mol_type = other DNA
agcactctgggaactatgat

SEQ ID NO: 10297 - DNA, 20 bp, synthetic construct
  source 1..20: mol_type = other DNA
aattgatgtagcgagaaagg

SEQ ID NO: 10298 - DNA, 20 bp, synthetic construct
  source 1..20: mol_type = other DNA
ataaccacgaaagatacgaa

SEQ ID NO: 10299 - DNA, 20 bp, synthetic construct
  source 1..20: mol_type = other DNA
gtacggaagctgttcacggc

SEQ ID NO: 10300 - DNA, 20 bp, synthetic construct
  source 1..20: mol_type = other DNA
agtcctagagactggactgg

SEQ ID NO: 10301 - DNA, 20 bp, synthetic construct
  source 1..20: mol_type = other DNA
aaagtggcgagaatcgcctg

SEQ ID NO: 10302 - DNA, 20 bp, synthetic construct
  source 1..20: mol_type = other DNA
ttgatttcccagggagaaca

SEQ ID NO: 10303 - DNA, 20 bp, synthetic construct
  source 1..20: mol_type = other DNA
cagatacctaccaagtgacc

SEQ ID NO: 10304 - DNA, 20 bp, synthetic construct
  source 1..20: mol_type = other DNA
aaccgcacatcatgagtctt

SEQ ID NO: 10305 - DNA, 20 bp, synthetic construct
  source 1..20: mol_type = other DNA
aatttagacggagtggacaa

SEQ ID NO: 10306 - DNA, 20 bp, synthetic construct
  source 1..20: mol_type = other DNA
aattcgctccaacgtaaatc

SEQ ID NO: 10307 - DNA, 20 bp, synthetic construct
  source 1..20: mol_type = other DNA
agtatcaaggtccgaagctg

SEQ ID NO: 10308 - DNA, 20 bp, synthetic construct
  source 1..20: mol_type = other DNA
tgatcgaggaacgatcgatt

SEQ ID NO: 10309 - DNA, 20 bp, synthetic construct
  source 1..20: mol_type = other DNA
tctgaggcgaattaccttgt

SEQ ID NO: 10310 - DNA, 20 bp, synthetic construct
  source 1..20: mol_type = other DNA
ctgatcaagcataactacat

SEQ ID NO: 10311 - DNA, 20 bp, synthetic construct
  source 1..20: mol_type = other DNA
catggtgtgactgagtctaa

SEQ ID NO: 10312 - DNA, 20 bp, synthetic construct
  source 1..20: mol_type = other DNA
aaatacccgctgcaatgttt

SEQ ID NO: 10313 - DNA, 20 bp, synthetic construct
  source 1..20: mol_type = other DNA
gtcagcttggctgaggacta

SEQ ID NO: 10314 - DNA, 20 bp, synthetic construct
  source 1..20: mol_type = other DNA
ccgcgagttaagagatcagc

SEQ ID NO: 10315 - DNA, 20 bp, synthetic construct
  source 1..20: mol_type = other DNA
atatcttgattgggaacgcc

SEQ ID NO: 10316 - DNA, 20 bp, synthetic construct
  source 1..20: mol_type = other DNA
gagaacagtggtgggacgaa

SEQ ID NO: 10317 - DNA, 20 bp, synthetic construct
  source 1..20: mol_type = other DNA
tccgcgataaagcacgtttg

SEQ ID NO: 10318 - DNA, 20 bp, synthetic construct
  source 1..20: mol_type = other DNA
gacaagcgcgacgtgtaaat

SEQ ID NO: 10319 - DNA, 20 bp, synthetic construct
  source 1..20: mol_type = other DNA
tttggaaagtacagcaggcg

SEQ ID NO: 10320 - DNA, 20 bp, synthetic construct
  source 1..20: mol_type = other DNA
catttgagtgaggttgatgg

SEQ ID NO: 10321 - DNA, 20 bp, synthetic construct
  source 1..20: mol_type = other DNA
ctcaaataatttagctccgc

SEQ ID NO: 10322 - DNA, 20 bp, synthetic construct
  source 1..20: mol_type = other DNA
tacaagggagagaccaaacg

SEQ ID NO: 10323 - DNA, 20 bp, synthetic construct
  source 1..20: mol_type = other DNA
agggtatcaacttaacgcga

SEQ ID NO: 10324 - DNA, 20 bp, synthetic construct
  source 1..20: mol_type = other DNA
tcttaagtcgttagctgcgc

SEQ ID NO: 10325 - DNA, 20 bp, synthetic construct
  source 1..20: mol_type = other DNA
tcggaggagtatgacggcgt

SEQ ID NO: 10326 - DNA, 20 bp, synthetic construct
  source 1..20: mol_type = other DNA
ttggccttcgtccggatgca

SEQ ID NO: 10327 - DNA, 20 bp, synthetic construct
  source 1..20: mol_type = other DNA
gaacgttgttgcttccagca

SEQ ID NO: 10328 - DNA, 20 bp, synthetic construct
  source 1..20: mol_type = other DNA
agaaggcgtaattcttggct

SEQ ID NO: 10329 - DNA, 20 bp, synthetic construct
  source 1..20: mol_type = other DNA
aaacaggtacctgaaagaac

SEQ ID NO: 10330 - DNA, 20 bp, synthetic construct
  source 1..20: mol_type = other DNA
cgtcgatcggaaggcctggt

SEQ ID NO: 10331 - DNA, 20 bp, synthetic construct
  source 1..20: mol_type = other DNA
tcatccatgtcattaggagt

SEQ ID NO: 10332 - DNA, 20 bp, synthetic construct
  source 1..20: mol_type = other DNA
gcaaaggtctgcgctctctg

SEQ ID NO: 10333 - DNA, 20 bp, synthetic construct
  source 1..20: mol_type = other DNA
tccatgtcccgttaggttca

SEQ ID NO: 10334 - DNA, 20 bp, synthetic construct
  source 1..20: mol_type = other DNA
attccacttgtattctggcg

SEQ ID NO: 10335 - DNA, 20 bp, synthetic construct
  source 1..20: mol_type = other DNA
gtagctgctttcgcatgacc

SEQ ID NO: 10336 - DNA, 20 bp, synthetic construct
  source 1..20: mol_type = other DNA
aagcccttccggaaggattt

SEQ ID NO: 10337 - DNA, 20 bp, synthetic construct
  source 1..20: mol_type = other DNA
ttgagcgtccgactagctcc

SEQ ID NO: 10338 - DNA, 20 bp, synthetic construct
  source 1..20: mol_type = other DNA
ggcagcctaattaactagta

SEQ ID NO: 10339 - DNA, 20 bp, synthetic construct
  source 1..20: mol_type = other DNA
tccagaccgttcctaccgac

SEQ ID NO: 10340 - DNA, 20 bp, synthetic construct
  source 1..20: mol_type = other DNA
cgatgaccgatgccacggac

SEQ ID NO: 10341 - DNA, 20 bp, synthetic construct
  source 1..20: mol_type = other DNA
gtggccactttgggtagcga

SEQ ID NO: 10342 - DNA, 20 bp, synthetic construct
  source 1..20: mol_type = other DNA
cgggtgctaggttctgttct

SEQ ID NO: 10343 - DNA, 20 bp, synthetic construct
  source 1..20: mol_type = other DNA
ggtaacctgcacttacgtct

SEQ ID NO: 10344 - DNA, 20 bp, synthetic construct
  source 1..20: mol_type = other DNA
ccggcgaacctgtcaacagc

SEQ ID NO: 10345 - DNA, 20 bp, synthetic construct
  source 1..20: mol_type = other DNA
ttctataacttaagccgctg

SEQ ID NO: 10346 - DNA, 20 bp, synthetic construct
  source 1..20: mol_type = other DNA
agcatgtggtttgtgttcgg

SEQ ID NO: 10347 - DNA, 20 bp, synthetic construct
  source 1..20: mol_type = other DNA
actggccttgaggtagttat

SEQ ID NO: 10348 - DNA, 20 bp, synthetic construct
  source 1..20: mol_type = other DNA
tacagggaactcactagatg

SEQ ID NO: 10349 - DNA, 20 bp, synthetic construct
  source 1..20: mol_type = other DNA
caaatagagcagtacgtcta

SEQ ID NO: 10350 - DNA, 20 bp, synthetic construct
  source 1..20: mol_type = other DNA
tgcatggcctggttatttcg

SEQ ID NO: 10351 - DNA, 20 bp, synthetic construct
  source 1..20: mol_type = other DNA
agcttacctattccgagatg

SEQ ID NO: 10352 - DNA, 20 bp, synthetic construct
  source 1..20: mol_type = other DNA
gtgcaagcacgttacgagta

SEQ ID NO: 10353 - DNA, 20 bp, synthetic construct
  source 1..20: mol_type = other DNA
tcttgaaggtagtttactgc

SEQ ID NO: 10354 - DNA, 20 bp, synthetic construct
  source 1..20: mol_type = other DNA
taatacgatggtaactccgg

SEQ ID NO: 10355 - DNA, 20 bp, synthetic construct
  source 1..20: mol_type = other DNA
tccgggaatgctcgcccttc

SEQ ID NO: 10356 - DNA, 20 bp, synthetic construct
  source 1..20: mol_type = other DNA
gggtaggtatgcatgagcca

SEQ ID NO: 10357 - DNA, 20 bp, synthetic construct
  source 1..20: mol_type = other DNA
gggtcacggataatgtggcc

SEQ ID NO: 10358 - DNA, 20 bp, synthetic construct
  source 1..20: mol_type = other DNA
ctttgtatgtagtcgccact

SEQ ID NO: 10359 - DNA, 20 bp, synthetic construct
  source 1..20: mol_type = other DNA
ctagaagattaggacggaaa

SEQ ID NO: 10360 - DNA, 20 bp, synthetic construct
  source 1..20: mol_type = other DNA
tgtagtattgaaatccgacc

SEQ ID NO: 10361 - DNA, 20 bp, synthetic construct
  source 1..20: mol_type = other DNA
ggtatgatatacgaacgtcc

SEQ ID NO: 10362 - DNA, 20 bp, synthetic construct
  source 1..20: mol_type = other DNA
atcatgttctcgtccacagg

SEQ ID NO: 10363 - DNA, 20 bp, synthetic construct
  source 1..20: mol_type = other DNA
tgctcatgcagcgtcattga

SEQ ID NO: 10364 - DNA, 20 bp, synthetic construct
  source 1..20: mol_type = other DNA
gtcctgcgaccctccctatg

SEQ ID NO: 10365 - DNA, 20 bp, synthetic construct
  source 1..20: mol_type = other DNA
ccttaccggcgggtgtgtaa

SEQ ID NO: 10366 - DNA, 20 bp, synthetic construct
  source 1..20: mol_type = other DNA
caatgcaacttgtgaccagc

SEQ ID NO: 10367 - DNA, 20 bp, synthetic construct
  source 1..20: mol_type = other DNA
ctttattggttcgctgctcc

SEQ ID NO: 10368 - DNA, 20 bp, synthetic construct
  source 1..20: mol_type = other DNA
gtgagaagtgggattgaagg

SEQ ID NO: 10369 - DNA, 20 bp, synthetic construct
  source 1..20: mol_type = other DNA
aagccgttgctagatgcggc

SEQ ID NO: 10370 - DNA, 20 bp, synthetic construct
  source 1..20: mol_type = other DNA
ccgaatgtagtccctgcagt

SEQ ID NO: 10371 - DNA, 20 bp, synthetic construct
  source 1..20: mol_type = other DNA
cggaccgttcaacaggcgat

SEQ ID NO: 10372 - DNA, 20 bp, synthetic construct
  source 1..20: mol_type = other DNA
gtatcccttatgctgcgcta

SEQ ID NO: 10373 - DNA, 20 bp, synthetic construct
  source 1..20: mol_type = other DNA
cgggtcggcgaagtaagtct

SEQ ID NO: 10374 - DNA, 20 bp, synthetic construct
  source 1..20: mol_type = other DNA
ccaggaccctctaacacata

SEQ ID NO: 10375 - DNA, 20 bp, synthetic construct
  source 1..20: mol_type = other DNA
ctttcggttggccgagcacc

SEQ ID NO: 10376 - DNA, 20 bp, synthetic construct
  source 1..20: mol_type = other DNA
cagctttgtcatcaccacaa

SEQ ID NO: 10377 - DNA, 20 bp, synthetic construct
  source 1..20: mol_type = other DNA
aacgtgtcctgttcggaata

SEQ ID NO: 10378 - DNA, 20 bp, synthetic construct
  source 1..20: mol_type = other DNA
agacgatcccgaacaacgca

SEQ ID NO: 10379 - DNA, 20 bp, synthetic construct
  source 1..20: mol_type = other DNA
cgtgaggtcgaatgtgggag

SEQ ID NO: 10380 - DNA, 20 bp, synthetic construct
  source 1..20: mol_type = other DNA
tcaagtagctctgctccgtc

SEQ ID NO: 10381 - DNA, 20 bp, synthetic construct
  source 1..20: mol_type = other DNA
tgtgtaaccctgggtggtgc

SEQ ID NO: 10382 - DNA, 20 bp, synthetic construct
  source 1..20: mol_type = other DNA
accgaggccagtaactccac

SEQ ID NO: 10383 - DNA, 20 bp, synthetic construct
  source 1..20: mol_type = other DNA
tccagcacgattgtggctac

SEQ ID NO: 10384 - DNA, 20 bp, synthetic construct
  source 1..20: mol_type = other DNA
cacacctgcgtcgaaggagg

SEQ ID NO: 10385 - DNA, 20 bp, synthetic construct
  source 1..20: mol_type = other DNA
tcctctgggacggccacgta

SEQ ID NO: 10386 - DNA, 20 bp, synthetic construct
  source 1..20: mol_type = other DNA
ctttgaggaacttccttctt

SEQ ID NO: 10387 - DNA, 20 bp, synthetic construct
  source 1..20: mol_type = other DNA
ttagtccgccggtatttggc

SEQ ID NO: 10388 - DNA, 20 bp, synthetic construct
  source 1..20: mol_type = other DNA
gcattcaacgcgggtcctgc

SEQ ID NO: 10389 - DNA, 20 bp, synthetic construct
  source 1..20: mol_type = other DNA
ttcatatcggtgcaacagcc

SEQ ID NO: 10390 - DNA, 20 bp, synthetic construct
  source 1..20: mol_type = other DNA
tggagttcgcccacgccacg

SEQ ID NO: 10391 - DNA, 20 bp, synthetic construct
  source 1..20: mol_type = other DNA
gacgtgttcctaacacattt

SEQ ID NO: 10392 - DNA, 20 bp, synthetic construct
  source 1..20: mol_type = other DNA
cctatgtgcgagttcacggc

SEQ ID NO: 10393 - DNA, 20 bp, synthetic construct
  source 1..20: mol_type = other DNA
tgtggctcagggtcgggtct

SEQ ID NO: 10394 - DNA, 20 bp, synthetic construct
  source 1..20: mol_type = other DNA
tataacagctgtcagaagcg

SEQ ID NO: 10395 - DNA, 20 bp, synthetic construct
  source 1..20: mol_type = other DNA
tatgaatcaagaaccagcac

SEQ ID NO: 10396 - DNA, 20 bp, synthetic construct
  source 1..20: mol_type = other DNA
cgttgttgagttgacacgat

SEQ ID NO: 10397 - DNA, 20 bp, synthetic construct
  source 1..20: mol_type = other DNA
ggcagtcccagtcaaactcg

SEQ ID NO: 10398 - DNA, 20 bp, synthetic construct
  source 1..20: mol_type = other DNA
tacttagctgcccttagcga

SEQ ID NO: 10399 - DNA, 20 bp, synthetic construct
  source 1..20: mol_type = other DNA
gagaaggtatgaactcagca

SEQ ID NO: 10400 - DNA, 20 bp, synthetic construct
  source 1..20: mol_type = other DNA
ggtactgtttctaaagtggc

SEQ ID NO: 10401 - DNA, 20 bp, synthetic construct
  source 1..20: mol_type = other DNA
gactcttaccctacatgtac

SEQ ID NO: 10402 - DNA, 20 bp, synthetic construct
  source 1..20: mol_type = other DNA
aatcgtgctttgtacttact

SEQ ID NO: 10403 - DNA, 20 bp, synthetic construct
  source 1..20: mol_type = other DNA
tgtatgtcatcaagagtacc

SEQ ID NO: 10404 - DNA, 20 bp, synthetic construct
  source 1..20: mol_type = other DNA
tactttagttgcagatatgt

SEQ ID NO: 10405 - DNA, 20 bp, synthetic construct
  source 1..20: mol_type = other DNA
tccattcgtagaaccgaacc

SEQ ID NO: 10406 - DNA, 20 bp, synthetic construct
  source 1..20: mol_type = other DNA
tcccgcgtagggaatctagc

SEQ ID NO: 10407 - DNA, 20 bp, synthetic construct
  source 1..20: mol_type = other DNA
cgggtggaactaaccgaagt

SEQ ID NO: 10408 - DNA, 20 bp, synthetic construct
  source 1..20: mol_type = other DNA
tagatgctcttcatcaacca

SEQ ID NO: 10409 - DNA, 20 bp, synthetic construct
  source 1..20: mol_type = other DNA
tttgataccaggcatcgtga

SEQ ID NO: 10410 - DNA, 20 bp, synthetic construct
  source 1..20: mol_type = other DNA
gagttatgttacagccgaca

SEQ ID NO: 10411 - DNA, 20 bp, synthetic construct
  source 1..20: mol_type = other DNA
ctatgtgtggactggatagc

SEQ ID NO: 10412 - DNA, 20 bp, synthetic construct
  source 1..20: mol_type = other DNA
cgacactgagatccaactta

SEQ ID NO: 10413 - DNA, 20 bp, synthetic construct
  source 1..20: mol_type = other DNA
gcttggtagcaagagaatac

SEQ ID NO: 10414 - DNA, 20 bp, synthetic construct
  source 1..20: mol_type = other DNA
tatcgtgctaacagggagga

SEQ ID NO: 10415 - DNA, 20 bp, synthetic construct
  source 1..20: mol_type = other DNA
gtagaagggccacaactagt

SEQ ID NO: 10416 - DNA, 20 bp, synthetic construct
  source 1..20: mol_type = other DNA
taccggtaagtcgctcttgc

SEQ ID NO: 10417 - DNA, 20 bp, synthetic construct
  source 1..20: mol_type = other DNA
attacgatggcatgaccact

SEQ ID NO: 10418 - DNA, 20 bp, synthetic construct
  source 1..20: mol_type = other DNA
catcgctccacgtgctcaag

SEQ ID NO: 10419 - DNA, 20 bp, synthetic construct
  source 1..20: mol_type = other DNA
tataccctagattccgctag

SEQ ID NO: 10420 - DNA, 20 bp, synthetic construct
  source 1..20: mol_type = other DNA
tccgacggcctttgtcctga

SEQ ID NO: 10421 - DNA, 20 bp, synthetic construct
  source 1..20: mol_type = other DNA
gaagcaggcttgcagagtca

SEQ ID NO: 10422 - DNA, 20 bp, synthetic construct
  source 1..20: mol_type = other DNA
tggacactttcattaagcgg

SEQ ID NO: 10423 - DNA, 20 bp, synthetic construct
  source 1..20: mol_type = other DNA
tgaacggctaatgcgcacgt

SEQ ID NO: 10424 - DNA, 20 bp, synthetic construct
  source 1..20: mol_type = other DNA
atatgcctctcttccaagaa

SEQ ID NO: 10425 - DNA, 20 bp, synthetic construct
  source 1..20: mol_type = other DNA
ttaggtgatgtcctagttgt

SEQ ID NO: 10426 - DNA, 20 bp, synthetic construct
  source 1..20: mol_type = other DNA
cattgtgttgccgcgttcga

SEQ ID NO: 10427 - DNA, 20 bp, synthetic construct
  source 1..20: mol_type = other DNA
gtgcttcgttggttcctcga

SEQ ID NO: 10428 - DNA, 20 bp, synthetic construct
  source 1..20: mol_type = other DNA
gcacactgctagcaatgagc

SEQ ID NO: 10429 - DNA, 20 bp, synthetic construct
  source 1..20: mol_type = other DNA
tccacacgcacgcagtgaga

SEQ ID NO: 10430 - DNA, 20 bp, synthetic construct
  source 1..20: mol_type = other DNA
gagtaagtacactttgaaac

SEQ ID NO: 10431 - DNA, 20 bp, synthetic construct
  source 1..20: mol_type = other DNA
gcatacaatctatcgtggtt

SEQ ID NO: 10432 - DNA, 20 bp, synthetic construct
  source 1..20: mol_type = other DNA
cccttgcatagcttctgata

SEQ ID NO: 10433 - DNA, 20 bp, synthetic construct
  source 1..20: mol_type = other DNA
tgtaaccaacgacatgctta

SEQ ID NO: 10434 - DNA, 20 bp, synthetic construct
  source 1..20: mol_type = other DNA
ctattcccacccaattattt

SEQ ID NO: 10435 - DNA, 20 bp, synthetic construct
  source 1..20: mol_type = other DNA
tgtgacccagttatcgctca

SEQ ID NO: 10436 - DNA, 20 bp, synthetic construct
  source 1..20: mol_type = other DNA
gtctgatggtatagtgccgg

SEQ ID NO: 10437 - DNA, 20 bp, synthetic construct
  source 1..20: mol_type = other DNA
gcaattgggattctccgtag

SEQ ID NO: 10438 - DNA, 20 bp, synthetic construct
  source 1..20: mol_type = other DNA
attctaccgtcgttacagta

SEQ ID NO: 10439 - DNA, 20 bp, synthetic construct
  source 1..20: mol_type = other DNA
tcgtacatctgcgtcagtcc

SEQ ID NO: 10440 - DNA, 20 bp, synthetic construct
  source 1..20: mol_type = other DNA
ccaccttggtgaattaactc

SEQ ID NO: 10441 - DNA, 20 bp, synthetic construct
  source 1..20: mol_type = other DNA
gtgttcagtgtgaccatatc

SEQ ID NO: 10442 - DNA, 20 bp, synthetic construct
  source 1..20: mol_type = other DNA
atgcaatttcgagagcacac

SEQ ID NO: 10443 - DNA, 20 bp, synthetic construct
  source 1..20: mol_type = other DNA
cggacttcgcctagataagg

SEQ ID NO: 10444 - DNA, 20 bp, synthetic construct
  source 1..20: mol_type = other DNA
cctcagggtaccctgtaacc

SEQ ID NO: 10445 - DNA, 20 bp, synthetic construct
  source 1..20: mol_type = other DNA
cagagaaataaagtttccct

SEQ ID NO: 10446 - DNA, 20 bp, synthetic construct
  source 1..20: mol_type = other DNA
aaacaagactgtggtactaa

SEQ ID NO: 10447 - DNA, 20 bp, synthetic construct
  source 1..20: mol_type = other DNA
tcccgtgaaatctgcaagac

SEQ ID NO: 10448 - DNA, 20 bp, synthetic construct
  source 1..20: mol_type = other DNA
agtcgcagtgtgctagggtc

SEQ ID NO: 10449 - DNA, 20 bp, synthetic construct
  source 1..20: mol_type = other DNA
ctggacttaaatacgatcct

SEQ ID NO: 10450 - DNA, 20 bp, synthetic construct
  source 1..20: mol_type = other DNA
actgccttgtcaatgtttgg

SEQ ID NO: 10451 - DNA, 20 bp, synthetic construct
  source 1..20: mol_type = other DNA
gtcatagcatttgcggtcct

SEQ ID NO: 10452 - DNA, 20 bp, synthetic construct
  source 1..20: mol_type = other DNA
caatcacagagataaccgta

SEQ ID NO: 10453 - DNA, 20 bp, synthetic construct
  source 1..20: mol_type = other DNA
gggacaaagcctccgaaaga

SEQ ID NO: 10454 - DNA, 20 bp, synthetic construct
  source 1..20: mol_type = other DNA
tgttcatgtaaatcccatgt

SEQ ID NO: 10455 - DNA, 20 bp, synthetic construct
  source 1..20: mol_type = other DNA
tgactagatgctctactgat

SEQ ID NO: 10456 - DNA, 20 bp, synthetic construct
  source 1..20: mol_type = other DNA
gcggcattcgtattcgtaga

SEQ ID NO: 10457 - DNA, 20 bp, synthetic construct
  source 1..20: mol_type = other DNA
ctaagagagcaatcatcaat

SEQ ID NO: 10458 - DNA, 20 bp, synthetic construct
  source 1..20: mol_type = other DNA
tgtcaatgtgaatctcccga

SEQ ID NO: 10459 - DNA, 20 bp, synthetic construct
  source 1..20: mol_type = other DNA
cattgcgttgaccaattgcg

SEQ ID NO: 10460 - DNA, 20 bp, synthetic construct
  source 1..20: mol_type = other DNA
ctgcatcggagccgcatctt

SEQ ID NO: 10461 - DNA, 20 bp, synthetic construct
  source 1..20: mol_type = other DNA
attcgctcatgcccggtata

SEQ ID NO: 10462 - DNA, 20 bp, synthetic construct
  source 1..20: mol_type = other DNA
cactccagatggaggtcgca

SEQ ID NO: 10463 - DNA, 20 bp, synthetic construct
  source 1..20: mol_type = other DNA
agttacaggcgtccaacttc

SEQ ID NO: 10464 - DNA, 20 bp, synthetic construct
  source 1..20: mol_type = other DNA
tgtcttcctagaagcgactc

SEQ ID NO: 10465 - DNA, 20 bp, synthetic construct
  source 1..20: mol_type = other DNA
attggtggtcgcagcaggtc

SEQ ID NO: 10466 - DNA, 20 bp, synthetic construct
  source 1..20: mol_type = other DNA
gaatatcatgcccgttgtat

SEQ ID NO: 10467 - DNA, 20 bp, synthetic construct
  source 1..20: mol_type = other DNA
acggttgtaccgtatgctag

SEQ ID NO: 10468 - DNA, 20 bp, synthetic construct
  source 1..20: mol_type = other DNA
ctccttacagcgtcaccatg

SEQ ID NO: 10469 - DNA, 20 bp, synthetic construct
  source 1..20: mol_type = other DNA
tttcccgcgccagtgtattc

SEQ ID NO: 10470 - DNA, 20 bp, synthetic construct
  source 1..20: mol_type = other DNA
gtaccacgctagtagttgaa

SEQ ID NO: 10471 - DNA, 20 bp, synthetic construct
  source 1..20: mol_type = other DNA
gtgatggctcgtatcgaagt

SEQ ID NO: 10472 - DNA, 20 bp, synthetic construct
  source 1..20: mol_type = other DNA
agctttcgtatagagctaaa

SEQ ID NO: 10473 - DNA, 20 bp, synthetic construct
  source 1..20: mol_type = other DNA
gatgggttataatgacttcc

SEQ ID NO: 10474 - DNA, 20 bp, synthetic construct
  source 1..20: mol_type = other DNA
gaccatcgaatttctgaatt

SEQ ID NO: 10475 - DNA, 20 bp, synthetic construct
  source 1..20: mol_type = other DNA
tgtctggtcgatttactgct

SEQ ID NO: 10476 - DNA, 20 bp, synthetic construct
  source 1..20: mol_type = other DNA
ccattgccggttaagatcct

SEQ ID NO: 10477 - DNA, 20 bp, synthetic construct
  source 1..20: mol_type = other DNA
cctggttgctacgcatttca

SEQ ID NO: 10478 - DNA, 20 bp, synthetic construct
  source 1..20: mol_type = other DNA
tgaacggatcattctcttga

SEQ ID NO: 10479 - DNA, 20 bp, synthetic construct
  source 1..20: mol_type = other DNA
aacactatacacacgtgccg

SEQ ID NO: 10480 - DNA, 20 bp, synthetic construct
  source 1..20: mol_type = other DNA
gctccttctctaggccggca

SEQ ID NO: 10481 - DNA, 20 bp, synthetic construct
  source 1..20: mol_type = other DNA
tttagtgcgtgagtttatcc

SEQ ID NO: 10482 - DNA, 20 bp, synthetic construct
  source 1..20: mol_type = other DNA
ttcgaatggttaaaccgcta

SEQ ID NO: 10483 - DNA, 20 bp, synthetic construct
  source 1..20: mol_type = other DNA
ccgatgtatttctacgagaa

SEQ ID NO: 10484 - DNA, 20 bp, synthetic construct
  source 1..20: mol_type = other DNA
cgatgaccgactatgcatag

SEQ ID NO: 10485 - DNA, 20 bp, synthetic construct
  source 1..20: mol_type = other DNA
cgttggcccatgcatggatt

SEQ ID NO: 10486 - DNA, 20 bp, synthetic construct
  source 1..20: mol_type = other DNA
caggttacgttcttccggat

SEQ ID NO: 10487 - DNA, 20 bp, synthetic construct
  source 1..20: mol_type = other DNA
gagggctagcttccacgacc

SEQ ID NO: 10488 - DNA, 20 bp, synthetic construct
  source 1..20: mol_type = other DNA
ctaagtttccgactgttcca

SEQ ID NO: 10489 - DNA, 20 bp, synthetic construct
  source 1..20: mol_type = other DNA
gttcggcataacttaacgta

SEQ ID NO: 10490 - DNA, 20 bp, synthetic construct
  source 1..20: mol_type = other DNA
aggacctaacatacatcctt

SEQ ID NO: 10491 - DNA, 20 bp, synthetic construct
  source 1..20: mol_type = other DNA
gtgggtaccaaaggtgttgg

SEQ ID NO: 10492 - DNA, 20 bp, synthetic construct
  source 1..20: mol_type = other DNA
ttcatcaggagatcaagacg

SEQ ID NO: 10493 - DNA, 20 bp, synthetic construct
  source 1..20: mol_type = other DNA
cgacttgtttggagcgttaa

SEQ ID NO: 10494 - DNA, 20 bp, synthetic construct
  source 1..20: mol_type = other DNA
agatcacaatccctgccgca

SEQ ID NO: 10495 - DNA, 20 bp, synthetic construct
  source 1..20: mol_type = other DNA
cagtcggtctgatcaatatt

SEQ ID NO: 10496 - DNA, 20 bp, synthetic construct
  source 1..20: mol_type = other DNA
cacattgtttcccataagca

SEQ ID NO: 10497 - DNA, 20 bp, synthetic construct
  source 1..20: mol_type = other DNA
ccatcgaagaagctcagacc

SEQ ID NO: 10498 - DNA, 20 bp, synthetic construct
  source 1..20: mol_type = other DNA
tcaagtgtgctttccaacct

SEQ ID NO: 10499 - DNA, 20 bp, synthetic construct
  source 1..20: mol_type = other DNA
gtgacttgtattgctcgaca

SEQ ID NO: 10500 - DNA, 20 bp, synthetic construct
  source 1..20: mol_type = other DNA
actgtcagtgcgactcgtgg

SEQ ID NO: 10501 - DNA, 20 bp, synthetic construct
  source 1..20: mol_type = other DNA
tacgaaacgcgtgagtttcg

SEQ ID NO: 10502 - DNA, 20 bp, synthetic construct
  source 1..20: mol_type = other DNA
gagcgcactttatgttaagt

SEQ ID NO: 10503 - DNA, 20 bp, synthetic construct
  source 1..20: mol_type = other DNA
tatcgaccgcattaagacag

SEQ ID NO: 10504 - DNA, 20 bp, synthetic construct
  source 1..20: mol_type = other DNA
cgggtctacattctggcttg

SEQ ID NO: 10505 - DNA, 20 bp, synthetic construct
  source 1..20: mol_type = other DNA
tccgcactgcgttacgtcga

SEQ ID NO: 10506 - DNA, 20 bp, synthetic construct
  source 1..20: mol_type = other DNA
gttcggataccgccgcatat

SEQ ID NO: 10507 - DNA, 20 bp, synthetic construct
  source 1..20: mol_type = other DNA
caatattccagtacgcatat

SEQ ID NO: 10508 - DNA, 20 bp, synthetic construct
  source 1..20: mol_type = other DNA
tggagttacactatagacta

SEQ ID NO: 10509 - DNA, 20 bp, synthetic construct
  source 1..20: mol_type = other DNA
taacttggagggtgccctcg

SEQ ID NO: 10510 - DNA, 20 bp, synthetic construct
  source 1..20: mol_type = other DNA
gctaaccatgtacggaaatg

SEQ ID NO: 10511 - DNA, 20 bp, synthetic construct
  source 1..20: mol_type = other DNA
ccttggccgggtgtgttatt

SEQ ID NO: 10512 - DNA, 20 bp, synthetic construct
  source 1..20: mol_type = other DNA
atcccatcgggaacgagaga

SEQ ID NO: 10513 - DNA, 20 bp, synthetic construct
  source 1..20: mol_type = other DNA
ggatattaatctcctaccgt

SEQ ID NO: 10514 - DNA, 20 bp, synthetic construct
  source 1..20: mol_type = other DNA
tccaaggcttactctcccag

SEQ ID NO: 10515 - DNA, 20 bp, synthetic construct
  source 1..20: mol_type = other DNA
tcatgcgacaggccgggaga

SEQ ID NO: 10516 - DNA, 20 bp, synthetic construct
  source 1..20: mol_type = other DNA
aagtgtcacgatcatgactc

SEQ ID NO: 10517 - DNA, 20 bp, synthetic construct
  source 1..20: mol_type = other DNA
gctataccgagcctcaagga

SEQ ID NO: 10518 - DNA, 20 bp, synthetic construct
  source 1..20: mol_type = other DNA
tgttacacgactcggactac

SEQ ID NO: 10519 - DNA, 20 bp, synthetic construct
  source 1..20: mol_type = other DNA
gtcagacttgtcacaagcta

SEQ ID NO: 10520 - DNA, 20 bp, synthetic construct
  source 1..20: mol_type = other DNA
atttgctcgcatgaggtagg

SEQ ID NO: 10521 - DNA, 20 bp, synthetic construct
  source 1..20: mol_type = other DNA
attaactaaagggtcctagc

SEQ ID NO: 10522 - DNA, 20 bp, synthetic construct
  source 1..20: mol_type = other DNA
caccgttactacttaattgt

SEQ ID NO: 10523 - DNA, 20 bp, synthetic construct
  source 1..20: mol_type = other DNA
cctccgactaatgagttcag

SEQ ID NO: 10524 - DNA, 20 bp, synthetic construct
  source 1..20: mol_type = other DNA
caaatagtgtcggaacatat

SEQ ID NO: 10525 - DNA, 20 bp, synthetic construct
  source 1..20: mol_type = other DNA
ttgctaacttatgcattctc

SEQ ID NO: 10526 - DNA, 20 bp, synthetic construct
  source 1..20: mol_type = other DNA
gcaatcctgttagtcgcggt

SEQ ID NO: 10527 - DNA, 20 bp, synthetic construct
  source 1..20: mol_type = other DNA
ccgacatcgatcactaattt

SEQ ID NO: 10528 - DNA, 20 bp, synthetic construct
  source 1..20: mol_type = other DNA
aaggatgcgagggcgacaca

SEQ ID NO: 10529 - DNA, 20 bp, synthetic construct
  source 1..20: mol_type = other DNA
ggaaccggttacgtcggtcg

SEQ ID NO: 10530 - DNA, 20 bp, synthetic construct
  source 1..20: mol_type = other DNA
gataactacttgtgagtgag

SEQ ID NO: 10531 - DNA, 20 bp, synthetic construct
  source 1..20: mol_type = other DNA
ctctattctagtgtgggcgt

SEQ ID NO: 10532 - DNA, 20 bp, synthetic construct
  source 1..20: mol_type = other DNA
ctgtgacgatgtatgcgtta

SEQ ID NO: 10533 - DNA, 20 bp, synthetic construct
  source 1..20: mol_type = other DNA
ggctgttggtgtagtcctca

SEQ ID NO: 10534 - DNA, 20 bp, synthetic construct
  source 1..20: mol_type = other DNA
agcaggtacagtctgacggt

SEQ ID NO: 10535 - DNA, 20 bp, synthetic construct
  source 1..20: mol_type = other DNA
agtgccaaagttgccgtgga

SEQ ID NO: 10536 - DNA, 20 bp, synthetic construct
  source 1..20: mol_type = other DNA
gctaacaacgtctactatct

SEQ ID NO: 10537 - DNA, 20 bp, synthetic construct
  source 1..20: mol_type = other DNA
gcatcatgtagtcgtccgct

SEQ ID NO: 10538 - DNA, 20 bp, synthetic construct
  source 1..20: mol_type = other DNA
ttgatagggtgtgcatgttg

SEQ ID NO: 10539 - DNA, 20 bp, synthetic construct
  source 1..20: mol_type = other DNA
gtaacagccgtcacatagcg

SEQ ID NO: 10540 - DNA, 20 bp, synthetic construct
  source 1..20: mol_type = other DNA
tgcgaggtccaatagttgaa

SEQ ID NO: 10541 - DNA, 20 bp, synthetic construct
  source 1..20: mol_type = other DNA
gtagaccaggcactcgtaag

SEQ ID NO: 10542 - DNA, 20 bp, synthetic construct
  source 1..20: mol_type = other DNA
cccaattcaatgatcacaag

SEQ ID NO: 10543 - DNA, 20 bp, synthetic construct
  source 1..20: mol_type = other DNA
cctcaggcttgggcttggtt

SEQ ID NO: 10544 - DNA, 20 bp, synthetic construct
  source 1..20: mol_type = other DNA
ttgctcgcgtgtggaatgtc

SEQ ID NO: 10545 - DNA, 20 bp, synthetic construct
  source 1..20: mol_type = other DNA
ccgccggacgtaatgctggt

SEQ ID NO: 10546 - DNA, 20 bp, synthetic construct
  source 1..20: mol_type = other DNA
gcattccctactataggccg

SEQ ID NO: 10547 - DNA, 20 bp, synthetic construct
  source 1..20: mol_type = other DNA
cgctcgctacagacctttaa

SEQ ID NO: 10548 - DNA, 20 bp, synthetic construct
  source 1..20: mol_type = other DNA
acgcgccatacttacacgct

SEQ ID NO: 10549 - DNA, 20 bp, synthetic construct
  source 1..20: mol_type = other DNA
ataatggcatggtacctact

SEQ ID NO: 10550 - DNA, 20 bp, synthetic construct
  source 1..20: mol_type = other DNA
gaaggtacatgtgcctgata

SEQ ID NO: 10551 - DNA, 20 bp, synthetic construct
  source 1..20: mol_type = other DNA
ctagagggctcacatgtgtc

SEQ ID NO: 10552 - DNA, 20 bp, synthetic construct
  source 1..20: mol_type = other DNA
tgccgcaaatgagggccaag

SEQ ID NO: 10553 - DNA, 20 bp, synthetic construct
  source 1..20: mol_type = other DNA
tcgtggtcgtggtaccttcg

SEQ ID NO: 10554 - DNA, 20 bp, synthetic construct
  source 1..20: mol_type = other DNA
tcgccgtcaatgagggtgta

SEQ ID NO: 10555 - DNA, 20 bp, synthetic construct
  source 1..20: mol_type = other DNA
ggtgggcagatacgtaggat

SEQ ID NO: 10556 - DNA, 20 bp, synthetic construct
  source 1..20: mol_type = other DNA
aggtctccgtgaatacccta

SEQ ID NO: 10557 - DNA, 20 bp, synthetic construct
  source 1..20: mol_type = other DNA
gtccggctttataccaggaa

SEQ ID NO: 10558 - DNA, 20 bp, synthetic construct
  source 1..20: mol_type = other DNA
tcatggcataagcctttgcc

SEQ ID NO: 10559 - DNA, 20 bp, synthetic construct
  source 1..20: mol_type = other DNA
gggcttatgtagacataatg

SEQ ID NO: 10560 - DNA, 20 bp, synthetic construct
  source 1..20: mol_type = other DNA
agcgtgctagggcattgact

SEQ ID NO: 10561 - DNA, 20 bp, synthetic construct
  source 1..20: mol_type = other DNA
tctaatttctgaatgatgcg

SEQ ID NO: 10562 - DNA, 20 bp, synthetic construct
  source 1..20: mol_type = other DNA
gcactctagcttaactgggt

SEQ ID NO: 10563 - DNA, 20 bp, synthetic construct
  source 1..20: mol_type = other DNA
ttcccgcaggattcgagtct

SEQ ID NO: 10564 - DNA, 20 bp, synthetic construct
  source 1..20: mol_type = other DNA
tattcctaccggtttagaag

SEQ ID NO: 10565 - DNA, 20 bp, synthetic construct
  source 1..20: mol_type = other DNA
cgtagcgacagactagacaa

SEQ ID NO: 10566 - DNA, 20 bp, synthetic construct
  source 1..20: mol_type = other DNA
cgaggtggtactctcggaaa

SEQ ID NO: 10567 - DNA, 20 bp, synthetic construct
  source 1..20: mol_type = other DNA
gcaattgtggtagatgacct

SEQ ID NO: 10568 - DNA, 20 bp, synthetic construct
  source 1..20: mol_type = other DNA
ggtgtcgaaccagatacaga

SEQ ID NO: 10569 - DNA, 20 bp, synthetic construct
  source 1..20: mol_type = other DNA
gggtgtgacagacctctgaa

SEQ ID NO: 10570 - DNA, 20 bp, synthetic construct
  source 1..20: mol_type = other DNA
tcctcgggactgaacaaagg

SEQ ID NO: 10571 - DNA, 20 bp, synthetic construct
  source 1..20: mol_type = other DNA
aatgcgttattatataccca

SEQ ID NO: 10572 - DNA, 20 bp, synthetic construct
  source 1..20: mol_type = other DNA
taaagcatccttatggagta

SEQ ID NO: 10573 - DNA, 20 bp, synthetic construct
  source 1..20: mol_type = other DNA
atgcaacgtcgcgatagacg

SEQ ID NO: 10574 - DNA, 20 bp, synthetic construct
  source 1..20: mol_type = other DNA
ttctgtgtccatgcgaaccc

SEQ ID NO: 10575 - DNA, 20 bp, synthetic construct
  source 1..20: mol_type = other DNA
gacactatcggagacaccat

SEQ ID NO: 10576 - DNA, 20 bp, synthetic construct
  source 1..20: mol_type = other DNA
agaaatgctcaagtggatta

SEQ ID NO: 10577 - DNA, 20 bp, synthetic construct
  source 1..20: mol_type = other DNA
tcgtagtatactctgagatt

SEQ ID NO: 10578 - DNA, 20 bp, synthetic construct
  source 1..20: mol_type = other DNA
aatctgagagctgcttacgt

SEQ ID NO: 10579 - DNA, 20 bp, synthetic construct
  source 1..20: mol_type = other DNA
aactctctaacgaagagaag

SEQ ID NO: 10580 - DNA, 20 bp, synthetic construct
  source 1..20: mol_type = other DNA
tggtcggcactcgtatactg

SEQ ID NO: 10581 - DNA, 20 bp, synthetic construct
  source 1..20: mol_type = other DNA
gtcggctggatgggttataa

SEQ ID NO: 10582 - DNA, 20 bp, synthetic construct
  source 1..20: mol_type = other DNA
ctttattagtcggactccga

SEQ ID NO: 10583 - DNA, 20 bp, synthetic construct
  source 1..20: mol_type = other DNA
ggcgttagggaacgacagcg

SEQ ID NO: 10584 - DNA, 20 bp, synthetic construct
  source 1..20: mol_type = other DNA
gtagcacaacgggttcttat

SEQ ID NO: 10585 - DNA, 20 bp, synthetic construct
  source 1..20: mol_type = other DNA
gatcgctgggagactgttga

SEQ ID NO: 10586 - DNA, 20 bp, synthetic construct
  source 1..20: mol_type = other DNA
tgtcgtacgtaacggaacgc

SEQ ID NO: 10587 - DNA, 20 bp, synthetic construct
  source 1..20: mol_type = other DNA
catcgataggcaactggccg

SEQ ID NO: 10588 - DNA, 20 bp, synthetic construct
  source 1..20: mol_type = other DNA
ttggctgccagctgatccat

SEQ ID NO: 10589 - DNA, 20 bp, synthetic construct
  source 1..20: mol_type = other DNA
cgaggcaaataattaccgca

SEQ ID NO: 10590 - DNA, 20 bp, synthetic construct
  source 1..20: mol_type = other DNA
gtgagtaaatcaccttcctt

SEQ ID NO: 10591 - DNA, 20 bp, synthetic construct
  source 1..20: mol_type = other DNA
cctacacgtgagatctaccg

SEQ ID NO: 10592 - DNA, 20 bp, synthetic construct
  source 1..20: mol_type = other DNA
gacttattcgtaatgtttgg

SEQ ID NO: 10593 - DNA, 20 bp, synthetic construct
  source 1..20: mol_type = other DNA
ggacagacagctaaggactt

SEQ ID NO: 10594 - DNA, 20 bp, synthetic construct
  source 1..20: mol_type = other DNA
acttatcccagatactggag

SEQ ID NO: 10595 - DNA, 20 bp, synthetic construct
  source 1..20: mol_type = other DNA
acggtttacatatgactggc

SEQ ID NO: 10596 - DNA, 20 bp, synthetic construct
  source 1..20: mol_type = other DNA
cgcttccatgggtagaggca

SEQ ID NO: 10597 - DNA, 20 bp, synthetic construct
  source 1..20: mol_type = other DNA
aagaatccacgctggacttg

SEQ ID NO: 10598 - DNA, 20 bp, synthetic construct
  source 1..20: mol_type = other DNA
tatctgggtttcgatttaga

SEQ ID NO: 10599 - DNA, 20 bp, synthetic construct
  source 1..20: mol_type = other DNA
agtataagtgctctgtgatg

SEQ ID NO: 10600 - DNA, 20 bp, synthetic construct
  source 1..20: mol_type = other DNA
cttgggaccgtcggcttatg

SEQ ID NO: 10601 - DNA, 20 bp, synthetic construct
  source 1..20: mol_type = other DNA
gagagatgctcatgtagaca

SEQ ID NO: 10602 - DNA, 20 bp, synthetic construct
  source 1..20: mol_type = other DNA
ctcaacccaagcgggctgtt

SEQ ID NO: 10603 - DNA, 20 bp, synthetic construct
  source 1..20: mol_type = other DNA
tacgtgctctggatccgaca

SEQ ID NO: 10604 - DNA, 20 bp, synthetic construct
  source 1..20: mol_type = other DNA
acggaactggttcgtcgaga

SEQ ID NO: 10605 - DNA, 20 bp, synthetic construct
  source 1..20: mol_type = other DNA
atggtcgtagcaaagctggg

SEQ ID NO: 10606 - DNA, 20 bp, synthetic construct
  source 1..20: mol_type = other DNA
gcacatcaccagaacagtac

SEQ ID NO: 10607 - DNA, 20 bp, synthetic construct
  source 1..20: mol_type = other DNA
tgttcgagctgactgtgcac

SEQ ID NO: 10608 - DNA, 20 bp, synthetic construct
  source 1..20: mol_type = other DNA
atgttaccgtgtaggtagtt

SEQ ID NO: 10609 - DNA, 20 bp, synthetic construct
  source 1..20: mol_type = other DNA
agtcaaccaacaggacgcat

SEQ ID NO: 10610 - DNA, 20 bp, synthetic construct
  source 1..20: mol_type = other DNA
atatcttccacagagttaga

SEQ ID NO: 10611 - DNA, 20 bp, synthetic construct
  source 1..20: mol_type = other DNA
gggaggaagcctggactctc

SEQ ID NO: 10612 - DNA, 20 bp, synthetic construct
  source 1..20: mol_type = other DNA
ggacgcttgtggtcacgcaa

SEQ ID NO: 10613 - DNA, 20 bp, synthetic construct
  source 1..20: mol_type = other DNA
agcgggagatccacaaattt

SEQ ID NO: 10614 - DNA, 20 bp, synthetic construct
  source 1..20: mol_type = other DNA
gatcagtccgtattataatg

SEQ ID NO: 10615 - DNA, 20 bp, synthetic construct
  source 1..20: mol_type = other DNA
atatctattcgatcggtcgc

SEQ ID NO: 10616 - DNA, 20 bp, synthetic construct
  source 1..20: mol_type = other DNA
cctagcttatacgtacctaa

SEQ ID NO: 10617 - DNA, 20 bp, synthetic construct
  source 1..20: mol_type = other DNA
acgtagcgatcctacccaca

SEQ ID NO: 10618 - DNA, 20 bp, synthetic construct
  source 1..20: mol_type = other DNA
ttcacgaaccatcgagttga

SEQ ID NO: 10619 - DNA, 20 bp, synthetic construct
  source 1..20: mol_type = other DNA
gccctactacatcggtcaac

SEQ ID NO: 10620 - DNA, 20 bp, synthetic construct
  source 1..20: mol_type = other DNA
gtgccgctcggtggcttaaa

SEQ ID NO: 10621 - DNA, 20 bp, synthetic construct
  source 1..20: mol_type = other DNA
tatccactgctacgtgcccg

SEQ ID NO: 10622 - DNA, 20 bp, synthetic construct
  source 1..20: mol_type = other DNA
ccctcctacatggagccatt

SEQ ID NO: 10623 - DNA, 20 bp, synthetic construct
  source 1..20: mol_type = other DNA
ttgattatcctgcagaggca

SEQ ID NO: 10624 - DNA, 20 bp, synthetic construct
  source 1..20: mol_type = other DNA
cttagtgggagtaagacgta

SEQ ID NO: 10625 - DNA, 20 bp, synthetic construct
  source 1..20: mol_type = other DNA
cccggatggacaaaggcaga

SEQ ID NO: 10626 - DNA, 20 bp, synthetic construct
  source 1..20: mol_type = other DNA
tttcctgtccctctttgatg

SEQ ID NO: 10627 - DNA, 20 bp, synthetic construct
  source 1..20: mol_type = other DNA
aaacggcgacttgtggcttc

SEQ ID NO: 10628 - DNA, 20 bp, synthetic construct
  source 1..20: mol_type = other DNA
agcatgagtgtgtatagtgt

SEQ ID NO: 10629 - DNA, 20 bp, synthetic construct
  source 1..20: mol_type = other DNA
agtcacttgttacttagtta

SEQ ID NO: 10630 - DNA, 20 bp, synthetic construct
  source 1..20: mol_type = other DNA
caggctcgatcggacacgtg

SEQ ID NO: 10631 - DNA, 20 bp, synthetic construct
  source 1..20: mol_type = other DNA
ccaaatcaagatctttaacg

SEQ ID NO: 10632 - DNA, 20 bp, synthetic construct
  source 1..20: mol_type = other DNA
cgcacaatggttaataacca

SEQ ID NO: 10633 - DNA, 20 bp, synthetic construct
  source 1..20: mol_type = other DNA
tggattcagcacgtagacgg

SEQ ID NO: 10634 - DNA, 20 bp, synthetic construct
  source 1..20: mol_type = other DNA
aactctaaacgcatgagcct

SEQ ID NO: 10635 - DNA, 20 bp, synthetic construct
  source 1..20: mol_type = other DNA
atttctacaagaatatggtg

SEQ ID NO: 10636 - DNA, 20 bp, synthetic construct
  source 1..20: mol_type = other DNA
tcttaagctaccaaactaga

SEQ ID NO: 10637 - DNA, 20 bp, synthetic construct
  source 1..20: mol_type = other DNA
taagcagtgcataggagcag

SEQ ID NO: 10638 - DNA, 20 bp, synthetic construct
  source 1..20: mol_type = other DNA
gtcatcactggaaaggagca

SEQ ID NO: 10639 - DNA, 20 bp, synthetic construct
  source 1..20: mol_type = other DNA
agctcgatactgttgcgacc

SEQ ID NO: 10640 - DNA, 20 bp, synthetic construct
  source 1..20: mol_type = other DNA
accaactatgtcggtgttcg

SEQ ID NO: 10641 - DNA, 20 bp, synthetic construct
  source 1..20: mol_type = other DNA
tgcgaacctccattgatcct

SEQ ID NO: 10642 - DNA, 20 bp, synthetic construct
  source 1..20: mol_type = other DNA
cggacctctcgatcctatgt

SEQ ID NO: 10643 - DNA, 20 bp, synthetic construct
  source 1..20: mol_type = other DNA
gtactcccacgccatcaaca

SEQ ID NO: 10644 - DNA, 20 bp, synthetic construct
  source 1..20: mol_type = other DNA
acatagaatcgaggacacta

SEQ ID NO: 10645 - DNA, 20 bp, synthetic construct
  source 1..20: mol_type = other DNA
tacgtgtcaatgagttcact

SEQ ID NO: 10646 - DNA, 20 bp, synthetic construct
  source 1..20: mol_type = other DNA
ctgttcaggatctctgttcc

SEQ ID NO: 10647 - DNA, 20 bp, synthetic construct
  source 1..20: mol_type = other DNA
taacgatgctaccaatgtcc

SEQ ID NO: 10648 - DNA, 20 bp, synthetic construct
  source 1..20: mol_type = other DNA
acatcggacaggtgaccgta

SEQ ID NO: 10649 - DNA, 20 bp, synthetic construct
  source 1..20: mol_type = other DNA
aaacttctgagatacagtct

SEQ ID NO: 10650 - DNA, 20 bp, synthetic construct
  source 1..20: mol_type = other DNA
tctaagcagtctgcaaggca

SEQ ID NO: 10651 - DNA, 20 bp, synthetic construct
  source 1..20: mol_type = other DNA
attagggctgcgctgtcctt

SEQ ID NO: 10652 - DNA, 20 bp, synthetic construct
  source 1..20: mol_type = other DNA
atcacactgcgcttatgacc

SEQ ID NO: 10653 - DNA, 20 bp, synthetic construct
  source 1..20: mol_type = other DNA
acatcttattaacgaagcga

SEQ ID NO: 10654 - DNA, 20 bp, synthetic construct
  source 1..20: mol_type = other DNA
ttctttcgcacctaggtgat

SEQ ID NO: 10655 - DNA, 20 bp, synthetic construct
  source 1..20: mol_type = other DNA
gacttagaacctccagaagt

SEQ ID NO: 10656 - DNA, 20 bp, synthetic construct
  source 1..20: mol_type = other DNA
cgccgtggacctcatcttta

SEQ ID NO: 10657 - DNA, 20 bp, synthetic construct
  source 1..20: mol_type = other DNA
ggtaagtaccatgtcttaag

SEQ ID NO: 10658 - DNA, 20 bp, synthetic construct
  source 1..20: mol_type = other DNA
actgcgagcatgggctagcc

SEQ ID NO: 10659 - DNA, 20 bp, synthetic construct
  source 1..20: mol_type = other DNA
tttagacgtactcaattgac

SEQ ID NO: 10660 - DNA, 20 bp, synthetic construct
  source 1..20: mol_type = other DNA
gagcgttctcgatgagctgc

SEQ ID NO: 10661 - DNA, 20 bp, synthetic construct
  source 1..20: mol_type = other DNA
aaatcgtacctaccgacacc

SEQ ID NO: 10662 - DNA, 20 bp, synthetic construct
  source 1..20: mol_type = other DNA
aacgacaaggcagaacccaa

SEQ ID NO: 10663 - DNA, 20 bp, synthetic construct
  source 1..20: mol_type = other DNA
ccacacaaacttgcgatatt

SEQ ID NO: 10664 - DNA, 20 bp, synthetic construct
  source 1..20: mol_type = other DNA
tcatgcgatgccgatttctc

SEQ ID NO: 10665 - DNA, 20 bp, synthetic construct
  source 1..20: mol_type = other DNA
accagtggaatttataggac

SEQ ID NO: 10666 - DNA, 20 bp, synthetic construct
  source 1..20: mol_type = other DNA
tgttggcaatcatgtatagc

SEQ ID NO: 10667 - DNA, 20 bp, synthetic construct
  source 1..20: mol_type = other DNA
cgggtccggtggtggactac

SEQ ID NO: 10668 - DNA, 20 bp, synthetic construct
  source 1..20: mol_type = other DNA
gaatcgagtcatttgtggct

SEQ ID NO: 10669 - DNA, 20 bp, synthetic construct
  source 1..20: mol_type = other DNA
attccgtgtcggactcctac

SEQ ID NO: 10670 - DNA, 20 bp, synthetic construct
  source 1..20: mol_type = other DNA
ctaacgacgcgtatcaagca

SEQ ID NO: 10671 - DNA, 20 bp, synthetic construct
  source 1..20: mol_type = other DNA
ctgaatttaaccggatcgtc

SEQ ID NO: 10672 - DNA, 20 bp, synthetic construct
  source 1..20: mol_type = other DNA
tgtgtaacttcgtgacttaa

SEQ ID NO: 10673 - DNA, 20 bp, synthetic construct
  source 1..20: mol_type = other DNA
tagttgagtaggcttaggcc

SEQ ID NO: 10674 - DNA, 20 bp, synthetic construct
  source 1..20: mol_type = other DNA
ttctgggtaacttgcttctt

SEQ ID NO: 10675 - DNA, 20 bp, synthetic construct
  source 1..20: mol_type = other DNA
acaccctttgcaactgggtt

SEQ ID NO: 10676 - DNA, 20 bp, synthetic construct
  source 1..20: mol_type = other DNA
tatggtggtgtcaacccggc

SEQ ID NO: 10677 - DNA, 20 bp, synthetic construct
  source 1..20: mol_type = other DNA
atggacccttactcgcacgc

SEQ ID NO: 10678 - DNA, 20 bp, synthetic construct
  source 1..20: mol_type = other DNA
catgtagggagcactccaag

SEQ ID NO: 10679 - DNA, 20 bp, synthetic construct
  source 1..20: mol_type = other DNA
atgggtccatggcgtgggaa

SEQ ID NO: 10680 - DNA, 20 bp, synthetic construct
  source 1..20: mol_type = other DNA
accacggacgcatgttacgg

SEQ ID NO: 10681 - DNA, 20 bp, synthetic construct
  source 1..20: mol_type = other DNA
acctagtgtacgctaggtat

SEQ ID NO: 10682 - DNA, 20 bp, synthetic construct
  source 1..20: mol_type = other DNA
tacacaacagccttccaacc

SEQ ID NO: 10683 - DNA, 20 bp, synthetic construct
  source 1..20: mol_type = other DNA
ggcgtctaaccggtatgacc

SEQ ID NO: 10684 - DNA, 20 bp, synthetic construct
  source 1..20: mol_type = other DNA
cacgcacagccaagcatctc

SEQ ID NO: 10685 - DNA, 20 bp, synthetic construct
  source 1..20: mol_type = other DNA
cggcccgaagtcttgctcta

SEQ ID NO: 10686 - DNA, 20 bp, synthetic construct
  source 1..20: mol_type = other DNA
ttcagcagcgtcaatacctg

SEQ ID NO: 10687 - DNA, 20 bp, synthetic construct
  source 1..20: mol_type = other DNA
gaacgaatcgtgaaggcccg

SEQ ID NO: 10688 - DNA, 20 bp, synthetic construct
  source 1..20: mol_type = other DNA
ttaatgttcgtccgacgtga

SEQ ID NO: 10689 - DNA, 20 bp, synthetic construct
  source 1..20: mol_type = other DNA
tctacacaatggaacttgta

SEQ ID NO: 10690 - DNA, 20 bp, synthetic construct
  source 1..20: mol_type = other DNA
tgaattaatagcgtagctat

SEQ ID NO: 10691 - DNA, 20 bp, synthetic construct
  source 1..20: mol_type = other DNA
gcggacccaaggtcatatca

SEQ ID NO: 10692 - DNA, 20 bp, synthetic construct
  source 1..20: mol_type = other DNA
agtgctggctcctaagccgt

SEQ ID NO: 10693 - DNA, 20 bp, synthetic construct
  source 1..20: mol_type = other DNA
ctctaccacgtgcaagcacc

SEQ ID NO: 10694 - DNA, 20 bp, synthetic construct
  source 1..20: mol_type = other DNA
aagctcctatagtaaatgga

SEQ ID NO: 10695 - DNA, 20 bp, synthetic construct
  source 1..20: mol_type = other DNA
acgcggttaaatgccatata

SEQ ID NO: 10696 - DNA, 20 bp, synthetic construct
  source 1..20: mol_type = other DNA
tgcgctattgataagctcgc

SEQ ID NO: 10697 - DNA, 20 bp, synthetic construct
  source 1..20: mol_type = other DNA
acgatggcctcttatctata

SEQ ID NO: 10698 - DNA, 20 bp, synthetic construct
  source 1..20: mol_type = other DNA
gtacgttgtattccgagcta

SEQ ID NO: 10699 - DNA, 20 bp, synthetic construct
  source 1..20: mol_type = other DNA
tccggactgctgtttagtac

SEQ ID NO: 10700 - DNA, 20 bp, synthetic construct
  source 1..20: mol_type = other DNA
gttggacatctgctacgaag

SEQ ID NO: 10701 - DNA, 20 bp, synthetic construct
  source 1..20: mol_type = other DNA
ctcattgacgagacttcttg

SEQ ID NO: 10702 - DNA, 20 bp, synthetic construct
  source 1..20: mol_type = other DNA
tagtcaattgactggcgttt

SEQ ID NO: 10703 - DNA, 20 bp, synthetic construct
  source 1..20: mol_type = other DNA
ggtcctttgagacctagggc

SEQ ID NO: 10704 - DNA, 20 bp, synthetic construct
  source 1..20: mol_type = other DNA
gttgaggaggacgagacatt

SEQ ID NO: 10705 - DNA, 20 bp, synthetic construct
  source 1..20: mol_type = other DNA
tacgctgtgatggcactacg

SEQ ID NO: 10706 - DNA, 20 bp, synthetic construct
  source 1..20: mol_type = other DNA
agtggaaatgtccagactca

SEQ ID NO: 10707 - DNA, 20 bp, synthetic construct
  source 1..20: mol_type = other DNA
cctagacaaacgggtctaca

SEQ ID NO: 10708 - DNA, 20 bp, synthetic construct
  source 1..20: mol_type = other DNA
tgatcttctgtgtgacaggc

SEQ ID NO: 10709 - DNA, 20 bp, synthetic construct
  source 1..20: mol_type = other DNA
gcctcgtatctccatttcct

SEQ ID NO: 10710 - DNA, 20 bp, synthetic construct
  source 1..20: mol_type = other DNA
agcggtttcatacctaaagg

SEQ ID NO: 10711 - DNA, 20 bp, synthetic construct
  source 1..20: mol_type = other DNA
agcttgaccctgtacgaagc

SEQ ID NO: 10712 - DNA, 20 bp, synthetic construct
  source 1..20: mol_type = other DNA
ggaattgtaattagcccgtc

SEQ ID NO: 10713 - DNA, 20 bp, synthetic construct
  source 1..20: mol_type = other DNA
tgaatgctttactgcaagac

SEQ ID NO: 10714 - DNA, 20 bp, synthetic construct
  source 1..20: mol_type = other DNA
tgtggcacgacacctggcaa

SEQ ID NO: 10715 - DNA, 20 bp, synthetic construct
  source 1..20: mol_type = other DNA
gtccaggtcacaatgtgggc

SEQ ID NO: 10716 - DNA, 20 bp, synthetic construct
  source 1..20: mol_type = other DNA
gtaatgtatgggtctagtat

SEQ ID NO: 10717 - DNA, 20 bp, synthetic construct
  source 1..20: mol_type = other DNA
gacatcgttgctctactacg

SEQ ID NO: 10718 - DNA, 20 bp, synthetic construct
  source 1..20: mol_type = other DNA
acgcaaacggttaagaaacc

SEQ ID NO: 10719 - DNA, 20 bp, synthetic construct
  source 1..20: mol_type = other DNA
tacattaccgagccagttca

SEQ ID NO: 10720 - DNA, 20 bp, synthetic construct
  source 1..20: mol_type = other DNA
atggctataacgtaggcgaa

SEQ ID NO: 10721 - DNA, 20 bp, synthetic construct
  source 1..20: mol_type = other DNA
cgatacctcgcgacaagatt

SEQ ID NO: 10722 - DNA, 20 bp, synthetic construct
  source 1..20: mol_type = other DNA
tgagttggagccctcccaac

SEQ ID NO: 10723 - DNA, 20 bp, synthetic construct
  source 1..20: mol_type = other DNA
cgtcctacagacttcttcca

SEQ ID NO: 10724 - DNA, 20 bp, synthetic construct
  source 1..20: mol_type = other DNA
cagccgtatttccaacagcg

SEQ ID NO: 10725 - DNA, 20 bp, synthetic construct
  source 1..20: mol_type = other DNA
ctgaaatattacgccgacta

SEQ ID NO: 10726 - DNA, 20 bp, synthetic construct
  source 1..20: mol_type = other DNA
gccgtctttatttgatatgc

SEQ ID NO: 10727 - DNA, 20 bp, synthetic construct
  source 1..20: mol_type = other DNA
atcatcgggttcccgacctg

SEQ ID NO: 10728 - DNA, 20 bp, synthetic construct
  source 1..20: mol_type = other DNA
tcgcgtgagagcaaccgcag

SEQ ID NO: 10729 - DNA, 20 bp, synthetic construct
  source 1..20: mol_type = other DNA
cacgtgcgcttgaagagttt

SEQ ID NO: 10730 - DNA, 20 bp, synthetic construct
  source 1..20: mol_type = other DNA
tccatagcattgttgggtta

SEQ ID NO: 10731 - DNA, 20 bp, synthetic construct
  source 1..20: mol_type = other DNA
gaagcgtgggcccagttcct

SEQ ID NO: 10732 - DNA, 20 bp, synthetic construct
  source 1..20: mol_type = other DNA
acgtggaagttaatcccaga

SEQ ID NO: 10733 - DNA, 20 bp, synthetic construct
  source 1..20: mol_type = other DNA
atatcacaaggctcactgtc

SEQ ID NO: 10734 - DNA, 20 bp, synthetic construct
  source 1..20: mol_type = other DNA
agaacgcccatgtagttcgt

SEQ ID NO: 10735 - DNA, 20 bp, synthetic construct
  source 1..20: mol_type = other DNA
ccctcctccatttataacag

SEQ ID NO: 10736 - DNA, 20 bp, synthetic construct
  source 1..20: mol_type = other DNA
aaccgcgcccgtcctccaat

SEQ ID NO: 10737 - DNA, 20 bp, synthetic construct
  source 1..20: mol_type = other DNA
tctcaaccacgtcgcctact

SEQ ID NO: 10738 - DNA, 20 bp, synthetic construct
  source 1..20: mol_type = other DNA
catcaggctcgtcagctctt

SEQ ID NO: 10739 - DNA, 20 bp, synthetic construct
  source 1..20: mol_type = other DNA
atgtaaaccgagccaattaa

SEQ ID NO: 10740 - DNA, 20 bp, synthetic construct
  source 1..20: mol_type = other DNA
tcgcgtcttactgaccgatc

SEQ ID NO: 10741 - DNA, 20 bp, synthetic construct
  source 1..20: mol_type = other DNA
gtcttccgaccgggcgagaa

SEQ ID NO: 10742 - DNA, 20 bp, synthetic construct
  source 1..20: mol_type = other DNA
ctgtgacacttctgcgataa

SEQ ID NO: 10743 - DNA, 20 bp, synthetic construct
  source 1..20: mol_type = other DNA
gcagtctaaatcttccgtct

SEQ ID NO: 10744 - DNA, 20 bp, synthetic construct
  source 1..20: mol_type = other DNA
aagcagaagtctcgatgtat

SEQ ID NO: 10745 - DNA, 20 bp, synthetic construct
  source 1..20: mol_type = other DNA
atctagttgatcgcagcttt

SEQ ID NO: 10746 - DNA, 20 bp, synthetic construct
  source 1..20: mol_type = other DNA
ccactttctattgggtggaa

SEQ ID NO: 10747 - DNA, 20 bp, synthetic construct
  source 1..20: mol_type = other DNA
agttgatcacagtggcgata

SEQ ID NO: 10748 - DNA, 20 bp, synthetic construct
  source 1..20: mol_type = other DNA
agaaacccgcaactagagat

SEQ ID NO: 10749 - DNA, 20 bp, synthetic construct
  source 1..20: mol_type = other DNA
gggtaatgcttggccatctg

SEQ ID NO: 10750 - DNA, 20 bp, synthetic construct
  source 1..20: mol_type = other DNA
ctctacatccgacgggtatt

SEQ ID NO: 10751 - DNA, 20 bp, synthetic construct
  source 1..20: mol_type = other DNA
ctaaggacgtcactggagat

SEQ ID NO: 10752 - DNA, 20 bp, synthetic construct
  source 1..20: mol_type = other DNA
aacccggtcaacccacgtga

SEQ ID NO: 10753 - DNA, 20 bp, synthetic construct
  source 1..20: mol_type = other DNA
gtctcatttcagatactgtc

SEQ ID NO: 10754 - DNA, 20 bp, synthetic construct
  source 1..20: mol_type = other DNA
ctcactattgaatgggacga

SEQ ID NO: 10755 - DNA, 20 bp, synthetic construct
  source 1..20: mol_type = other DNA
acttggtccgacgttcaggt

SEQ ID NO: 10756 - DNA, 20 bp, synthetic construct
  source 1..20: mol_type = other DNA
ccatcgcacatctaattgtt

SEQ ID NO: 10757 - DNA, 20 bp, synthetic construct
  source 1..20: mol_type = other DNA
tgtgctagcggaccaatctt

SEQ ID NO: 10758 - DNA, 20 bp, synthetic construct
  source 1..20: mol_type = other DNA
caacagtcagcacgtgactt

SEQ ID NO: 10759 - DNA, 20 bp, synthetic construct
  source 1..20: mol_type = other DNA
tgacgggagtaatgtggtcg

SEQ ID NO: 10760 - DNA, 20 bp, synthetic construct
  source 1..20: mol_type = other DNA
gagccgctaccagatcaaga

SEQ ID NO: 10761 - DNA, 20 bp, synthetic construct
  source 1..20: mol_type = other DNA
actgctcgcactcgggcttt

SEQ ID NO: 10762 - DNA, 20 bp, synthetic construct
  source 1..20: mol_type = other DNA
tttgaaattgtctttctgcg

SEQ ID NO: 10763 - DNA, 20 bp, synthetic construct
  source 1..20: mol_type = other DNA
accaatgccttagaggagtg

SEQ ID NO: 10764 - DNA, 20 bp, synthetic construct
  source 1..20: mol_type = other DNA
gcccttcagcaccttagagt

SEQ ID NO: 10765 - DNA, 20 bp, synthetic construct
  source 1..20: mol_type = other DNA
gtctgggaggataggtttag

SEQ ID NO: 10766 - DNA, 20 bp, synthetic construct
  source 1..20: mol_type = other DNA
tcgccaactctggaagatgc

SEQ ID NO: 10767 - DNA, 20 bp, synthetic construct
  source 1..20: mol_type = other DNA
aaattcctagctccgccttg

SEQ ID NO: 10768 - DNA, 20 bp, synthetic construct
  source 1..20: mol_type = other DNA
atatcacgatagactacagg

SEQ ID NO: 10769 - DNA, 20 bp, synthetic construct
  source 1..20: mol_type = other DNA
gctaagtgcgacttcgttat

SEQ ID NO: 10770 - DNA, 20 bp, synthetic construct
  source 1..20: mol_type = other DNA
aaactcctcagaagcgtaaa

SEQ ID NO: 10771 - DNA, 20 bp, synthetic construct
  source 1..20: mol_type = other DNA
ggttacgactggcttcagga

SEQ ID NO: 10772 - DNA, 20 bp, synthetic construct
  source 1..20: mol_type = other DNA
gacatcgcgatacgagcgtg

SEQ ID NO: 10773 - DNA, 20 bp, synthetic construct
  source 1..20: mol_type = other DNA
atacgagtgcgctacgtcca

SEQ ID NO: 10774 - DNA, 20 bp, synthetic construct
  source 1..20: mol_type = other DNA
cctcggtccgatccttagct

SEQ ID NO: 10775 - DNA, 20 bp, synthetic construct
  source 1..20: mol_type = other DNA
ctcatttcgagatacactgt

SEQ ID NO: 10776 - DNA, 20 bp, synthetic construct
  source 1..20: mol_type = other DNA
aagagtgcaaatcatcaact

SEQ ID NO: 10777 - DNA, 20 bp, synthetic construct
  source 1..20: mol_type = other DNA
caatttctgctaccgattga

SEQ ID NO: 10778 - DNA, 20 bp, synthetic construct
  source 1..20: mol_type = other DNA
gaacgtcgtcgcatgcgctt

SEQ ID NO: 10779 - DNA, 20 bp, synthetic construct
  source 1..20: mol_type = other DNA
actcgttgctcctgttctat

SEQ ID NO: 10780 - DNA, 20 bp, synthetic construct
  source 1..20: mol_type = other DNA
gtctaccatgatcatccgct

SEQ ID NO: 10781 - DNA, 20 bp, synthetic construct
  source 1..20: mol_type = other DNA
gacaatttcgttaacccaga

SEQ ID NO: 10782 - DNA, 20 bp, synthetic construct
  source 1..20: mol_type = other DNA
gatatgtgcacgtctacctt

SEQ ID NO: 10783 - DNA, 20 bp, synthetic construct
  source 1..20: mol_type = other DNA
gtgtgacgtttaacgtgcga

SEQ ID NO: 10784 - DNA, 20 bp, synthetic construct
  source 1..20: mol_type = other DNA
tgcgtattccctcttctagt

SEQ ID NO: 10785 - DNA, 20 bp, synthetic construct
  source 1..20: mol_type = other DNA
cacgaacagcgttcatgccc

SEQ ID NO: 10786 - DNA, 20 bp, synthetic construct
  source 1..20: mol_type = other DNA
tctcatggtccatacagtaa

SEQ ID NO: 10787 - DNA, 20 bp, synthetic construct
  source 1..20: mol_type = other DNA
tctgggcgaccgtcacaact

SEQ ID NO: 10788 - DNA, 20 bp, synthetic construct
  source 1..20: mol_type = other DNA
gccatgtctaacaaggcagg

SEQ ID NO: 10789 - DNA, 20 bp, synthetic construct
  source 1..20: mol_type = other DNA
ttaggcatccgtagaatgtc

SEQ ID NO: 10790 - DNA, 20 bp, synthetic construct
  source 1..20: mol_type = other DNA
agttccgccacgtcactcat

SEQ ID NO: 10791 - DNA, 20 bp, synthetic construct
  source 1..20: mol_type = other DNA
agttgacatgccctccaaga

SEQ ID NO: 10792 - DNA, 20 bp, synthetic construct
  source 1..20: mol_type = other DNA
gcacgcattctgacatgtgt

SEQ ID NO: 10793 - DNA, 20 bp, synthetic construct
  source 1..20: mol_type = other DNA
ctctagtgatccacagtggc

SEQ ID NO: 10794 - DNA, 20 bp, synthetic construct
  source 1..20: mol_type = other DNA
catagccctcaagaggtgac

SEQ ID NO: 10795 - DNA, 20 bp, synthetic construct
  source 1..20: mol_type = other DNA
agcaagccggaagtatcttt

SEQ ID NO: 10796 - DNA, 20 bp, synthetic construct
  source 1..20: mol_type = other DNA
ttgtggcgaacgacttctcc

SEQ ID NO: 10797 - DNA, 20 bp, synthetic construct
  source 1..20: mol_type = other DNA
agaccacgtatgctcgtact

SEQ ID NO: 10798 - DNA, 20 bp, synthetic construct
  source 1..20: mol_type = other DNA
atgaataaagaattgcgcca

SEQ ID NO: 10799 - DNA, 20 bp, synthetic construct
  source 1..20: mol_type = other DNA
atgccatcatgagcagccgt

SEQ ID NO: 10800 - DNA, 20 bp, synthetic construct
  source 1..20: mol_type = other DNA
gcgatcagtcttgtaactgt

SEQ ID NO: 10801 - DNA, 20 bp, synthetic construct
  source 1..20: mol_type = other DNA
ggatgggaccgtatgataca

SEQ ID NO: 10802 - DNA, 20 bp, synthetic construct
  source 1..20: mol_type = other DNA
agcccttctcgcggaacaca

SEQ ID NO: 10803 - DNA, 20 bp, synthetic construct
  source 1..20: mol_type = other DNA
acggctgcatagttatgcct

SEQ ID NO: 10804 - DNA, 20 bp, synthetic construct
  source 1..20: mol_type = other DNA
ggcattattagagtatgatc

SEQ ID NO: 10805 - DNA, 20 bp, synthetic construct
  source 1..20: mol_type = other DNA
gaggttacgtcgttagctta

SEQ ID NO: 10806 - DNA, 20 bp, synthetic construct
  source 1..20: mol_type = other DNA
atgttccctttccgcccgcg

SEQ ID NO: 10807 - DNA, 20 bp, synthetic construct
  source 1..20: mol_type = other DNA
taataacacagtctcactgt

SEQ ID NO: 10808 - DNA, 20 bp, synthetic construct
  source 1..20: mol_type = other DNA
ggagatcccactttaccgta

SEQ ID NO: 10809 - DNA, 20 bp, synthetic construct
  source 1..20: mol_type = other DNA
cgtctcgctagtgctgagta

SEQ ID NO: 10810 - DNA, 20 bp, synthetic construct
  source 1..20: mol_type = other DNA
aagttaggcgctttaagctg

SEQ ID NO: 10811 - DNA, 20 bp, synthetic construct
  source 1..20: mol_type = other DNA
gacttcttgaagaggaatac

SEQ ID NO: 10812 - DNA, 20 bp, synthetic construct
  source 1..20: mol_type = other DNA
gtcgctgcgctatttcgcgc

SEQ ID NO: 10813 - DNA, 20 bp, synthetic construct
  source 1..20: mol_type = other DNA
cagcttaacatacgagaact

SEQ ID NO: 10814 - DNA, 20 bp, synthetic construct
  source 1..20: mol_type = other DNA
ccctggagagatgggccata

SEQ ID NO: 10815 - DNA, 20 bp, synthetic construct
  source 1..20: mol_type = other DNA
ttgtggtgtactattcccgc

SEQ ID NO: 10816 - DNA, 20 bp, synthetic construct
  source 1..20: mol_type = other DNA
tgtatccaatagtaagattc

SEQ ID NO: 10817 - DNA, 20 bp, synthetic construct
  source 1..20: mol_type = other DNA
accggacaggtgtcagtgag

SEQ ID NO: 10818 - DNA, 20 bp, synthetic construct
  source 1..20: mol_type = other DNA
ctccaccagccatatttcca

SEQ ID NO: 10819 - DNA, 20 bp, synthetic construct
  source 1..20: mol_type = other DNA
tggatcaccagtaatcgctc

SEQ ID NO: 10820 - DNA, 20 bp, synthetic construct
  source 1..20: mol_type = other DNA
attgtcggctggcaagtcac

SEQ ID NO: 10821 - DNA, 20 bp, synthetic construct
  source 1..20: mol_type = other DNA
cgtcctaatccctaagtggt

SEQ ID NO: 10822 - DNA, 20 bp, synthetic construct
  source 1..20: mol_type = other DNA
cttatggctgggtccgggac

SEQ ID NO: 10823 - DNA, 20 bp, synthetic construct
  source 1..20: mol_type = other DNA
aaagagctagagtacgttac

SEQ ID NO: 10824 - DNA, 20 bp, synthetic construct
  source 1..20: mol_type = other DNA
ggtattgtctacagggccat

SEQ ID NO: 10825 - DNA, 20 bp, synthetic construct
  source 1..20: mol_type = other DNA
tgcggatagtcttctggtgc

SEQ ID NO: 10826 - DNA, 20 bp, synthetic construct
  source 1..20: mol_type = other DNA
tacgctactgtcgccgactt

SEQ ID NO: 10827 - DNA, 20 bp, synthetic construct
  source 1..20: mol_type = other DNA
cacggcgtcgggatccatgc

SEQ ID NO: 10828 - DNA, 20 bp, synthetic construct
  source 1..20: mol_type = other DNA
tcaacggcagcgtgaggaac

SEQ ID NO: 10829 - DNA, 20 bp, synthetic construct
  source 1..20: mol_type = other DNA
acgcagatgtggaatctatc

SEQ ID NO: 10830 - DNA, 20 bp, synthetic construct
  source 1..20: mol_type = other DNA
ttgcgggagagaagtaatct

SEQ ID NO: 10831 - DNA, 20 bp, synthetic construct
  source 1..20: mol_type = other DNA
cttcttcgcaccatggaacc

SEQ ID NO: 10832 - DNA, 20 bp, synthetic construct
  source 1..20: mol_type = other DNA
gtagccatttcttctcatga

SEQ ID NO: 10833 - DNA, 20 bp, synthetic construct
  source 1..20: mol_type = other DNA
atcgagatgaatggtcgggc

SEQ ID NO: 10834 - DNA, 20 bp, synthetic construct
  source 1..20: mol_type = other DNA
cttctgctgctacttgggcc

SEQ ID NO: 10835 - DNA, 20 bp, synthetic construct
  source 1..20: mol_type = other DNA
gcactagccacactgctaca

SEQ ID NO: 10836 - DNA, 20 bp, synthetic construct
  source 1..20: mol_type = other DNA
tatagaagagtgtgtcgggc

SEQ ID NO: 10837 - DNA, 20 bp, synthetic construct
  source 1..20: mol_type = other DNA
taattccacgactccgagga

SEQ ID NO: 10838 - DNA, 20 bp, synthetic construct
  source 1..20: mol_type = other DNA
cgaagtatcgggtagaatac

SEQ ID NO: 10839 - DNA, 20 bp, synthetic construct
  source 1..20: mol_type = other DNA
cgtcattggtcaccatagtc

SEQ ID NO: 10840 - DNA, 20 bp, synthetic construct
  source 1..20: mol_type = other DNA
ttgccggatgtaggcggtga

SEQ ID NO: 10841 - DNA, 20 bp, synthetic construct
  source 1..20: mol_type = other DNA
caataaacatcgaccggaga

SEQ ID NO: 10842 - DNA, 20 bp, synthetic construct
  source 1..20: mol_type = other DNA
ggtccacggtagttgctgag

SEQ ID NO: 10843 - DNA, 20 bp, synthetic construct
  source 1..20: mol_type = other DNA
gtcaccgaaggaatttatga

SEQ ID NO: 10844 - DNA, 20 bp, synthetic construct
  source 1..20: mol_type = other DNA
ctggtcggtctcaacttctt

SEQ ID NO: 10845 - DNA, 20 bp, synthetic construct
  source 1..20: mol_type = other DNA
agctagttcccagtggtctg

SEQ ID NO: 10846 - DNA, 20 bp, synthetic construct
  source 1..20: mol_type = other DNA
tgatgactgatacggaactt

SEQ ID NO: 10847 - DNA, 20 bp, synthetic construct
  source 1..20: mol_type = other DNA
tgtagtgccgcttagtacat

SEQ ID NO: 10848 - DNA, 20 bp, synthetic construct
  source 1..20: mol_type = other DNA
agcttagtctaaccctcgtc

SEQ ID NO: 10849 - DNA, 20 bp, synthetic construct
  source 1..20: mol_type = other DNA
gctaaagcagtgaagatata

SEQ ID NO: 10850 - DNA, 20 bp, synthetic construct
  source 1..20: mol_type = other DNA
ccctgatcaacatatcggtt

SEQ ID NO: 10851 - DNA, 20 bp, synthetic construct
  source 1..20: mol_type = other DNA
accgtgtctctcctagctag

SEQ ID NO: 10852 - DNA, 20 bp, synthetic construct
  source 1..20: mol_type = other DNA
taggccatctggcggtctgc

SEQ ID NO: 10853 - DNA, 20 bp, synthetic construct
  source 1..20: mol_type = other DNA
gcgctcatgggatccagcga

SEQ ID NO: 10854 - DNA, 20 bp, synthetic construct
  source 1..20: mol_type = other DNA
acaagagagcgaataacggc

SEQ ID NO: 10855 - DNA, 20 bp, synthetic construct
  source 1..20: mol_type = other DNA
actggagtacttcgagtcgc

SEQ ID NO: 10856 - DNA, 20 bp, synthetic construct
  source 1..20: mol_type = other DNA
cgcgtccttccgcctttata

SEQ ID NO: 10857 - DNA, 20 bp, synthetic construct
  source 1..20: mol_type = other DNA
tggcaatcgcgttgtggtct

SEQ ID NO: 10858 - DNA, 20 bp, synthetic construct
  source 1..20: mol_type = other DNA
tccactcagtccgggcctac

SEQ ID NO: 10859 - DNA, 20 bp, synthetic construct
  source 1..20: mol_type = other DNA
ccgttctgctttgaggaccc

SEQ ID NO: 10860 - DNA, 20 bp, synthetic construct
  source 1..20: mol_type = other DNA
cccatctgggagcactagta

SEQ ID NO: 10861 - DNA, 20 bp, synthetic construct
  source 1..20: mol_type = other DNA
gcatttggagggagccgttg

SEQ ID NO: 10862 - DNA, 20 bp, synthetic construct
  source 1..20: mol_type = other DNA
aatgtgataccataggtctt

SEQ ID NO: 10863 - DNA, 20 bp, synthetic construct
  source 1..20: mol_type = other DNA
agatgcgtcttagtcgcgtc

SEQ ID NO: 10864 - DNA, 20 bp, synthetic construct
  source 1..20: mol_type = other DNA
agtgtacatagcgcgccctg

SEQ ID NO: 10865 - DNA, 20 bp, synthetic construct
  source 1..20: mol_type = other DNA
tcgcttctcgcataccgagt

SEQ ID NO: 10866 - DNA, 20 bp, synthetic construct
  source 1..20: mol_type = other DNA
gtggcatcggcgtgtggtgc

SEQ ID NO: 10867 - DNA, 20 bp, synthetic construct
  source 1..20: mol_type = other DNA
cgtgtttgaaagaggagcca

SEQ ID NO: 10868 - DNA, 20 bp, synthetic construct
  source 1..20: mol_type = other DNA
tggcggagctacaacttgct

SEQ ID NO: 10869 - DNA, 20 bp, synthetic construct
  source 1..20: mol_type = other DNA
tatcgtttcgacaggaggcc

SEQ ID NO: 10870 - DNA, 20 bp, synthetic construct
  source 1..20: mol_type = other DNA
caaccgctctgatagcctct

SEQ ID NO: 10871 - DNA, 20 bp, synthetic construct
  source 1..20: mol_type = other DNA
gagcaccaatgagcagggat

SEQ ID NO: 10872 - DNA, 20 bp, synthetic construct
  source 1..20: mol_type = other DNA
cagtgtagtgacgttcataa

SEQ ID NO: 10873 - DNA, 20 bp, synthetic construct
  source 1..20: mol_type = other DNA
gcggaatactgcggacaagg

SEQ ID NO: 10874 - DNA, 20 bp, synthetic construct
  source 1..20: mol_type = other DNA
cctgcatcctcctcaactat

SEQ ID NO: 10875 - DNA, 20 bp, synthetic construct
  source 1..20: mol_type = other DNA
cgtatcggaagtgcttacct

SEQ ID NO: 10876 - DNA, 20 bp, synthetic construct
  source 1..20: mol_type = other DNA
cgggttactgtactggcacg

SEQ ID NO: 10877 - DNA, 20 bp, synthetic construct
  source 1..20: mol_type = other DNA
tggctattcggtgggcaagc

SEQ ID NO: 10878 - DNA, 20 bp, synthetic construct
  source 1..20: mol_type = other DNA
ctgaagaaaggttctacgtt

SEQ ID NO: 10879 - DNA, 20 bp, synthetic construct
  source 1..20: mol_type = other DNA
tcttcttaagggatctagca

SEQ ID NO: 10880 - DNA, 20 bp, synthetic construct
  source 1..20: mol_type = other DNA
gcataaaggcgagggtaaag

SEQ ID NO: 10881 - DNA, 20 bp, synthetic construct
  source 1..20: mol_type = other DNA
aggtcaatcaagaaagcagg

SEQ ID NO: 10882 - DNA, 20 bp, synthetic construct
  source 1..20: mol_type = other DNA
gtcaccgcgtatgaggcact

SEQ ID NO: 10883 - DNA, 20 bp, synthetic construct
  source 1..20: mol_type = other DNA
ggatgggatgtttgagcatt

SEQ ID NO: 10884 - DNA, 20 bp, synthetic construct
  source 1..20: mol_type = other DNA
tgcaaccagtctgttaatta

SEQ ID NO: 10885 - DNA, 20 bp, synthetic construct
  source 1..20: mol_type = other DNA
ctttcggatcgatccatttc

SEQ ID NO: 10886 - DNA, 20 bp, synthetic construct
  source 1..20: mol_type = other DNA
gttggtgtcagagccattta

SEQ ID NO: 10887 - DNA, 20 bp, synthetic construct
  source 1..20: mol_type = other DNA
ttgcgcaagtgtgtttaaga

SEQ ID NO: 10888 - DNA, 20 bp, synthetic construct
  source 1..20: mol_type = other DNA
tcctgtaactagacgatgaa

SEQ ID NO: 10889 - DNA, 20 bp, synthetic construct
  source 1..20: mol_type = other DNA
gggaaatgtgtacaggtaat

SEQ ID NO: 10890 - DNA, 20 bp, synthetic construct
  source 1..20: mol_type = other DNA
cgtggacgttgggtcgttcc

SEQ ID NO: 10891 - DNA, 20 bp, synthetic construct
  source 1..20: mol_type = other DNA
cccaatgatacagacagttg

SEQ ID NO: 10892 - DNA, 20 bp, synthetic construct
  source 1..20: mol_type = other DNA
cgaggtaccggcacggctaa

SEQ ID NO: 10893 - DNA, 20 bp, synthetic construct
  source 1..20: mol_type = other DNA
gcccatatgggttctagtga

SEQ ID NO: 10894 - DNA, 20 bp, synthetic construct
  source 1..20: mol_type = other DNA
acaacttctcgaataaggac

SEQ ID NO: 10895 - DNA, 20 bp, synthetic construct
  source 1..20: mol_type = other DNA
tcagttcttagggataagta

SEQ ID NO: 10896 - DNA, 20 bp, synthetic construct
  source 1..20: mol_type = other DNA
ctaggagacgcctcgatcct

SEQ ID NO: 10897 - DNA, 20 bp, synthetic construct
  source 1..20: mol_type = other DNA
ctcgattacggtctccctag

SEQ ID NO: 10898 - DNA, 20 bp, synthetic construct
  source 1..20: mol_type = other DNA
tcgctaatctaaatgtccaa

SEQ ID NO: 10899 - DNA, 20 bp, synthetic construct
  source 1..20: mol_type = other DNA
gtgtctagggcgagttggtc

SEQ ID NO: 10900 - DNA, 20 bp, synthetic construct
  source 1..20: mol_type = other DNA
gaacatttgtagacaaggta

SEQ ID NO: 10901 - DNA, 20 bp, synthetic construct
  source 1..20: mol_type = other DNA
ctaagagcggcgtaatgggc

SEQ ID NO: 10902 - DNA, 20 bp, synthetic construct
  source 1..20: mol_type = other DNA
gccacagcggtcgctgctta

SEQ ID NO: 10903 - DNA, 20 bp, synthetic construct
  source 1..20: mol_type = other DNA
ccaatagtcgatttgcgaag

SEQ ID NO: 10904 - DNA, 20 bp, synthetic construct
  source 1..20: mol_type = other DNA
gtatgttgagcgtaacgttc

SEQ ID NO: 10905 - DNA, 20 bp, synthetic construct
  source 1..20: mol_type = other DNA
gttgttgcggtctaaacgtt

SEQ ID NO: 10906 - DNA, 20 bp, synthetic construct
  source 1..20: mol_type = other DNA
gggttcgttcgagcggtctt

SEQ ID NO: 10907 - DNA, 20 bp, synthetic construct
  source 1..20: mol_type = other DNA
tactccaacgtggacgacta

SEQ ID NO: 10908 - DNA, 20 bp, synthetic construct
  source 1..20: mol_type = other DNA
tcccacaattcggccatcac

SEQ ID NO: 10909 - DNA, 20 bp, synthetic construct
  source 1..20: mol_type = other DNA
ttcgtaaggtgtcatctcgc

SEQ ID NO: 10910 - DNA, 20 bp, synthetic construct
  source 1..20: mol_type = other DNA
gcaatccagatacctgttgg

SEQ ID NO: 10911 - DNA, 20 bp, synthetic construct
  source 1..20: mol_type = other DNA
ggaacctaggtagtataacc

SEQ ID NO: 10912 - DNA, 20 bp, synthetic construct
  source 1..20: mol_type = other DNA
ccgaccataagtaccgaacg

SEQ ID NO: 10913 - DNA, 20 bp, synthetic construct
  source 1..20: mol_type = other DNA
tccaggtcatcgcgtgacac

SEQ ID NO: 10914 - DNA, 20 bp, synthetic construct
  source 1..20: mol_type = other DNA
gtgtggcggaatcaataact

SEQ ID NO: 10915 - DNA, 20 bp, synthetic construct
  source 1..20: mol_type = other DNA
gtggttctagcttattcgta

SEQ ID NO: 10916 - DNA, 20 bp, synthetic construct
  source 1..20: mol_type = other DNA
gccgggctgtgaactacacg

SEQ ID NO: 10917 - DNA, 20 bp, synthetic construct
  source 1..20: mol_type = other DNA
agggctagttgcagactgta

SEQ ID NO: 10918 - DNA, 20 bp, synthetic construct
  source 1..20: mol_type = other DNA
ttcgggcttcagacacaatt

SEQ ID NO: 10919 - DNA, 20 bp, synthetic construct
  source 1..20: mol_type = other DNA
cggacgatagcacttcaact

SEQ ID NO: 10920 - DNA, 20 bp, synthetic construct
  source 1..20: mol_type = other DNA
tacacaactcatgtccgggt

SEQ ID NO: 10921 - DNA, 20 bp, synthetic construct
  source 1..20: mol_type = other DNA
cacacagttgggaacagaca

SEQ ID NO: 10922 - DNA, 20 bp, synthetic construct
  source 1..20: mol_type = other DNA
cgacgatggaggattgcaaa

SEQ ID NO: 10923 - DNA, 20 bp, synthetic construct
  source 1..20: mol_type = other DNA
actccctggtatagggcccg

SEQ ID NO: 10924 - DNA, 20 bp, synthetic construct
  source 1..20: mol_type = other DNA
gcgcagggttccttagggag

SEQ ID NO: 10925 - DNA, 20 bp, synthetic construct
  source 1..20: mol_type = other DNA
aacacataaataccgaacgg

SEQ ID NO: 10926 - DNA, 20 bp, synthetic construct
  source 1..20: mol_type = other DNA
tagtcccgaggacacaagtg

SEQ ID NO: 10927 - DNA, 20 bp, synthetic construct
  source 1..20: mol_type = other DNA
agactcacaagaccacagag

SEQ ID NO: 10928 - DNA, 20 bp, synthetic construct
  source 1..20: mol_type = other DNA
tacgataaattcgattgtct

SEQ ID NO: 10929 - DNA, 20 bp, synthetic construct
  source 1..20: mol_type = other DNA
tatcagcagtatgcatttga

SEQ ID NO: 10930 - DNA, 20 bp, synthetic construct
  source 1..20: mol_type = other DNA
acaccacgtagccagcttta

SEQ ID NO: 10931 - DNA, 20 bp, synthetic construct
  source 1..20: mol_type = other DNA
atatgctactacacgtctag

SEQ ID NO: 10932 - DNA, 20 bp, synthetic construct
  source 1..20: mol_type = other DNA
taagaactcacacggccctc

SEQ ID NO: 10933 - DNA, 20 bp, synthetic construct
  source 1..20: mol_type = other DNA
acctagtgttgtgcagcatc

SEQ ID NO: 10934 - DNA, 20 bp, synthetic construct
  source 1..20: mol_type = other DNA
cgacaacaaacgccgacgaa

SEQ ID NO: 10935 - DNA, 20 bp, synthetic construct
  source 1..20: mol_type = other DNA
gaggacaattcactgcggcc

SEQ ID NO: 10936 - DNA, 20 bp, synthetic construct
  source 1..20: mol_type = other DNA
ggagtatgcaacatttgtta

SEQ ID NO: 10937 - DNA, 20 bp, synthetic construct
  source 1..20: mol_type = other DNA
ttaaagcctcgggtcgagca

SEQ ID NO: 10938 - DNA, 20 bp, synthetic construct
  source 1..20: mol_type = other DNA
cgtcgcgtctagtgagtaga

SEQ ID NO: 10939 - DNA, 20 bp, synthetic construct
  source 1..20: mol_type = other DNA
atgtaagtatgcgactacag

SEQ ID NO: 10940 - DNA, 20 bp, synthetic construct
  source 1..20: mol_type = other DNA
atacacacccttgtgcaaag

SEQ ID NO: 10941 - DNA, 20 bp, synthetic construct
  source 1..20: mol_type = other DNA
aagtaaattgtgcagttggc

SEQ ID NO: 10942 - DNA, 20 bp, synthetic construct
  source 1..20: mol_type = other DNA
catgtcttagattaggtcca

SEQ ID NO: 10943 - DNA, 20 bp, synthetic construct
  source 1..20: mol_type = other DNA
gccggagcgacgttcctata

SEQ ID NO: 10944 - DNA, 20 bp, synthetic construct
  source 1..20: mol_type = other DNA
cccagtcatcaccgctgcca

SEQ ID NO: 10945 - DNA, 20 bp, synthetic construct
  source 1..20: mol_type = other DNA
agtagcctttcttgtccaga

SEQ ID NO: 10946 - DNA, 20 bp, synthetic construct
  source 1..20: mol_type = other DNA
ttgtcataccgacccgcgtg

SEQ ID NO: 10947 - DNA, 20 bp, synthetic construct
  source 1..20: mol_type = other DNA
gcgtctcgtagcaggatgga

SEQ ID NO: 10948 - DNA, 20 bp, synthetic construct
  source 1..20: mol_type = other DNA
ctagattagcacggctcgtc

SEQ ID NO: 10949 - DNA, 20 bp, synthetic construct
  source 1..20: mol_type = other DNA
atatcccgcggacttcattt

SEQ ID NO: 10950 - DNA, 20 bp, synthetic construct
  source 1..20: mol_type = other DNA
agggaggagggagaaacgac

SEQ ID NO: 10951 - DNA, 20 bp, synthetic construct
  source 1..20: mol_type = other DNA
cccacgcagtggatatgacc

SEQ ID NO: 10952 - DNA, 20 bp, synthetic construct
  source 1..20: mol_type = other DNA
gacagtgatactttcaacgg

SEQ ID NO: 10953 - DNA, 20 bp, synthetic construct
  source 1..20: mol_type = other DNA
actggtctgccatgtagaaa

SEQ ID NO: 10954 - DNA, 20 bp, synthetic construct
  source 1..20: mol_type = other DNA
ctgcgtccgtccaacggata

SEQ ID NO: 10955 - DNA, 20 bp, synthetic construct
  source 1..20: mol_type = other DNA
ttaaagtcctggcaggaagc

SEQ ID NO: 10956 - DNA, 20 bp, synthetic construct
  source 1..20: mol_type = other DNA
agacaaatgccgtcgaggga

SEQ ID NO: 10957 - DNA, 20 bp, synthetic construct
  source 1..20: mol_type = other DNA
aattcgacgcgacctagcta

SEQ ID NO: 10958 - DNA, 20 bp, synthetic construct
  source 1..20: mol_type = other DNA
ttcctctgtcatgctccggt

SEQ ID NO: 10959 - DNA, 20 bp, synthetic construct
  source 1..20: mol_type = other DNA
acggcatacgactgaacaaa

SEQ ID NO: 10960 - DNA, 20 bp, synthetic construct
  source 1..20: mol_type = other DNA
agtactgccgacaagtcgcg

SEQ ID NO: 10961 - DNA, 20 bp, synthetic construct
  source 1..20: mol_type = other DNA
cgtgcttacacatattcgtc

SEQ ID NO: 10962 - DNA, 20 bp, synthetic construct
  source 1..20: mol_type = other DNA
attccgacctatgaagtctg

SEQ ID NO: 10963 - DNA, 20 bp, synthetic construct
  source 1..20: mol_type = other DNA
tccggaacttatgtgctagc

SEQ ID NO: 10964 - DNA, 20 bp, synthetic construct
  source 1..20: mol_type = other DNA
taaagcggacttagcgtctt

SEQ ID NO: 10965 - DNA, 20 bp, synthetic construct
  source 1..20: mol_type = other DNA
ccatgagcgcgctgacggtt

SEQ ID NO: 10966 - DNA, 20 bp, synthetic construct
  source 1..20: mol_type = other DNA
ttatggaagtgaaatcactc

SEQ ID NO: 10967 - DNA, 20 bp, synthetic construct
  source 1..20: mol_type = other DNA
tacaagggaggtctttgagt

SEQ ID NO: 10968 - DNA, 20 bp, synthetic construct
  source 1..20: mol_type = other DNA
ggagactcgttagcaacttg

SEQ ID NO: 10969 - DNA, 20 bp, synthetic construct
  source 1..20: mol_type = other DNA
aagtgcatcatgaaatgagt

SEQ ID NO: 10970 - DNA, 20 bp, synthetic construct
  source 1..20: mol_type = other DNA
ttgaaagctaccttggagcc

SEQ ID NO: 10971 - DNA, 20 bp, synthetic construct
  source 1..20: mol_type = other DNA
gcaacaccagcctacatcat

SEQ ID NO: 10972 - DNA, 20 bp, synthetic construct
  source 1..20: mol_type = other DNA
cccggaagtgacagtcttct

SEQ ID NO: 10973 - DNA, 20 bp, synthetic construct
  source 1..20: mol_type = other DNA
aggacagtactttggacatg

SEQ ID NO: 10974 - DNA, 20 bp, synthetic construct
  source 1..20: mol_type = other DNA
acaatcgttctggcgtagca

SEQ ID NO: 10975 - DNA, 20 bp, synthetic construct
  source 1..20: mol_type = other DNA
agttgcctcctaaagtctca

SEQ ID NO: 10976 - DNA, 20 bp, synthetic construct
  source 1..20: mol_type = other DNA
caccctggaaagacgaatca

SEQ ID NO: 10977 - DNA, 20 bp, synthetic construct
  source 1..20: mol_type = other DNA
gtaaactaacctcaccgacc

SEQ ID NO: 10978 - DNA, 20 bp, synthetic construct
  source 1..20: mol_type = other DNA
gagcacaggtcacctgcaaa

SEQ ID NO: 10979 - DNA, 20 bp, synthetic construct
  source 1..20: mol_type = other DNA
gcttacctcattgctacacc

SEQ ID NO: 10980 - DNA, 20 bp, synthetic construct
  source 1..20: mol_type = other DNA
cgcggacagttccgtttagt

SEQ ID NO: 10981 - DNA, 20 bp, synthetic construct
  source 1..20: mol_type = other DNA
acgacactcttacgctcgat

SEQ ID NO: 10982 - DNA, 20 bp, synthetic construct
  source 1..20: mol_type = other DNA
gagcgtggctgttacctcct

SEQ ID NO: 10983 - DNA, 20 bp, synthetic construct
  source 1..20: mol_type = other DNA
gggccacattccagagggag

SEQ ID NO: 10984 - DNA, 20 bp, synthetic construct
  source 1..20: mol_type = other DNA
gcaataaactccgtcgggta

SEQ ID NO: 10985 - DNA, 20 bp, synthetic construct
  source 1..20: mol_type = other DNA
ggcgacgcacaccatccaac

SEQ ID NO: 10986 - DNA, 20 bp, synthetic construct
  source 1..20: mol_type = other DNA
tctcgtgtggtaaaccctgg

SEQ ID NO: 10987 - DNA, 20 bp, synthetic construct
  source 1..20: mol_type = other DNA
tcttgttcagcgcggtgttt

SEQ ID NO: 10988 - DNA, 20 bp, synthetic construct
  source 1..20: mol_type = other DNA
atcacggctgttgcgctctc

SEQ ID NO: 10989 - DNA, 20 bp, synthetic construct
  source 1..20: mol_type = other DNA
ctttgcttgagcataagcaa

SEQ ID NO: 10990 - DNA, 20 bp, synthetic construct
  source 1..20: mol_type = other DNA
ggacatcatccattcacagt

SEQ ID NO: 10991 - DNA, 20 bp, synthetic construct
  source 1..20: mol_type = other DNA
tacgctctttcgtagagaat

SEQ ID NO: 10992 - DNA, 20 bp, synthetic construct
  source 1..20: mol_type = other DNA
ccacaacgatctgaccttgc

SEQ ID NO: 10993 - DNA, 20 bp, synthetic construct
  source 1..20: mol_type = other DNA
gctcacttctcgttagggag

SEQ ID NO: 10994 - DNA, 20 bp, synthetic construct
  source 1..20: mol_type = other DNA
ctttgtcatccgaaccagct

SEQ ID NO: 10995 - DNA, 20 bp, synthetic construct
  source 1..20: mol_type = other DNA
cgtaatcaattactcgtccc

SEQ ID NO: 10996 - DNA, 20 bp, synthetic construct
  source 1..20: mol_type = other DNA
gcaactagtcaataagattc

SEQ ID NO: 10997 - DNA, 20 bp, synthetic construct
  source 1..20: mol_type = other DNA
tctaactcctttgttgaccc

SEQ ID NO: 10998 - DNA, 20 bp, synthetic construct
  source 1..20: mol_type = other DNA
ttcactacgttagaaaggat

SEQ ID NO: 10999 - DNA, 20 bp, synthetic construct
  source 1..20: mol_type = other DNA
ttgcgttgaatgaactatga

SEQ ID NO: 11000 - DNA, 20 bp, synthetic construct
  source 1..20: mol_type = other DNA
gcccttcgcgactggtatct

SEQ ID NO: 11001 - DNA, 20 bp, synthetic construct
  source 1..20: mol_type = other DNA
tacatggcttgtcatatcag

SEQ ID NO: 11002 - DNA, 20 bp, synthetic construct
  source 1..20: mol_type = other DNA
gattcccacgcctaactaaa

SEQ ID NO: 11003 - DNA, 20 bp, synthetic construct
  source 1..20: mol_type = other DNA
atcccatccaggtctcagac

SEQ ID NO: 11004 - DNA, 20 bp, synthetic construct
  source 1..20: mol_type = other DNA
atcgtgcctagtacccattt

SEQ ID NO: 11005 - DNA, 20 bp, synthetic construct
  source 1..20: mol_type = other DNA
aggccggagtccgtccttgt

SEQ ID NO: 11006 - DNA, 20 bp, synthetic construct
  source 1..20: mol_type = other DNA
ggttcctggctgtcagtgga

SEQ ID NO: 11007 - DNA, 20 bp, synthetic construct
  source 1..20: mol_type = other DNA
atcgctacccagtgtccatg

SEQ ID NO: 11008 - DNA, 20 bp, synthetic construct
  source 1..20: mol_type = other DNA
tcaactttcaatcacgctgc

SEQ ID NO: 11009 - DNA, 20 bp, synthetic construct
  source 1..20: mol_type = other DNA
actctagtatgcccggttaa

SEQ ID NO: 11010 - DNA, 20 bp, synthetic construct
  source 1..20: mol_type = other DNA
gcccttcgctatctatgttt

SEQ ID NO: 11011 - DNA, 20 bp, synthetic construct
  source 1..20: mol_type = other DNA
agtgctaggaagcctcccga

SEQ ID NO: 11012 - DNA, 20 bp, synthetic construct
  source 1..20: mol_type = other DNA
ccgggacgcggtaggttact

SEQ ID NO: 11013 - DNA, 20 bp, synthetic construct
  source 1..20: mol_type = other DNA
cattaacggtgtacggtacc

SEQ ID NO: 11014 - DNA, 20 bp, synthetic construct
  source 1..20: mol_type = other DNA
gcagttggtttcgtctaatt

SEQ ID NO: 11015 - DNA, 20 bp, synthetic construct
  source 1..20: mol_type = other DNA
gaaacaatcatgcacatggg

SEQ ID NO: 11016 - DNA, 20 bp, synthetic construct
  source 1..20: mol_type = other DNA
gcatgcccgagaggagtcga

SEQ ID NO: 11017 - DNA, 20 bp, synthetic construct
  source 1..20: mol_type = other DNA
ataattagcgacgactaggt

SEQ ID NO: 11018 - DNA, 20 bp, synthetic construct
  source 1..20: mol_type = other DNA
gccgataaacgttgcgacag

SEQ ID NO: 11019 - DNA, 20 bp, synthetic construct
  source 1..20: mol_type = other DNA
agaattgatcctatgcgtcc

SEQ ID NO: 11020 - DNA, 20 bp, synthetic construct
  source 1..20: mol_type = other DNA
gtcagtagtggatgtactcg

SEQ ID NO: 11021 - DNA, 20 bp, synthetic construct
  source 1..20: mol_type = other DNA
acgctaccatgtcaaaccgt

SEQ ID NO: 11022 - DNA, 20 bp, synthetic construct
  source 1..20: mol_type = other DNA
ggcgcgaggttaaggtttga

SEQ ID NO: 11023 - DNA, 20 bp, synthetic construct
  source 1..20: mol_type = other DNA
gggaggctaaacgtagtaga

SEQ ID NO: 11024 - DNA, 20 bp, synthetic construct
  source 1..20: mol_type = other DNA
tttagcccatagctggcttt

SEQ ID NO: 11025 - DNA, 20 bp, synthetic construct
  source 1..20: mol_type = other DNA
aacactttcccgtctacgtt

SEQ ID NO: 11026 - DNA, 20 bp, synthetic construct
  source 1..20: mol_type = other DNA
ctcgtcattcgtgaatacag

SEQ ID NO: 11027 - DNA, 20 bp, synthetic construct
  source 1..20: mol_type = other DNA
cgtggtgcaggagcgtcctt

SEQ ID NO: 11028 - DNA, 20 bp, synthetic construct
  source 1..20: mol_type = other DNA
ggcgatcatctagcgagctt

SEQ ID NO: 11029 - DNA, 20 bp, synthetic construct
  source 1..20: mol_type = other DNA
cgggatcgcaagtaagtata

SEQ ID NO: 11030 - DNA, 20 bp, synthetic construct
  source 1..20: mol_type = other DNA
gctcatcgggacagactgtg

SEQ ID NO: 11031 - DNA, 20 bp, synthetic construct
  source 1..20: mol_type = other DNA
ttagcgttcgaggtaacgcc

SEQ ID NO: 11032 - DNA, 20 bp, synthetic construct
  source 1..20: mol_type = other DNA
attcgcatttgttgaggcct

SEQ ID NO: 11033 - DNA, 20 bp, synthetic construct
  source 1..20: mol_type = other DNA
atacgattcacctcatagcg

SEQ ID NO: 11034 - DNA, 20 bp, synthetic construct
  source 1..20: mol_type = other DNA
attgctaatcttatactggc

SEQ ID NO: 11035 - DNA, 20 bp, synthetic construct
  source 1..20: mol_type = other DNA
tctaacttgttgtggacgtc

SEQ ID NO: 11036 - DNA, 20 bp, synthetic construct
  source 1..20: mol_type = other DNA
gggtggtatccgcggttagg

SEQ ID NO: 11037 - DNA, 20 bp, synthetic construct
  source 1..20: mol_type = other DNA
aacatactgcgggtgcttcg

SEQ ID NO: 11038 - DNA, 20 bp, synthetic construct
  source 1..20: mol_type = other DNA
gcagtaatatatgtcctgtt

SEQ ID NO: 11039 - DNA, 20 bp, synthetic construct
  source 1..20: mol_type = other DNA
ttcagacgattgctgcacta

SEQ ID NO: 11040 - DNA, 20 bp, synthetic construct
  source 1..20: mol_type = other DNA
taaagttgaccctcctgttg

SEQ ID NO: 11041 - DNA, 20 bp, synthetic construct
  source 1..20: mol_type = other DNA
cgcatgctgccgtctgccaa

SEQ ID NO: 11042 - DNA, 20 bp, synthetic construct
  source 1..20: mol_type = other DNA
tttccgtgacaatgcaggca

SEQ ID NO: 11043 - DNA, 20 bp, synthetic construct
  source 1..20: mol_type = other DNA
gcggcttgccgtcggtttct

SEQ ID NO: 11044 - DNA, 20 bp, synthetic construct
  source 1..20: mol_type = other DNA
acacactgagaatacggtcc

SEQ ID NO: 11045 - DNA, 20 bp, synthetic construct
  source 1..20: mol_type = other DNA
cgggtaaatctctgctggag

SEQ ID NO: 11046 - DNA, 20 bp, synthetic construct
  source 1..20: mol_type = other DNA
cgatgacataagacacactg

SEQ ID NO: 11047 - DNA, 20 bp, synthetic construct
  source 1..20: mol_type = other DNA
taggacaactggcatatgct

SEQ ID NO: 11048 - DNA, 20 bp, synthetic construct
  source 1..20: mol_type = other DNA
tggtagcattctgagaagca

SEQ ID NO: 11049 - DNA, 20 bp, synthetic construct
  source 1..20: mol_type = other DNA
tagcctggtagctgacgcac

SEQ ID NO: 11050 - DNA, 20 bp, synthetic construct
  source 1..20: mol_type = other DNA
aacctccgtacgcaacccta

SEQ ID NO: 11051 - DNA, 20 bp, synthetic construct
  source 1..20: mol_type = other DNA
tatgacggtgttaataaacc

SEQ ID NO: 11052 - DNA, 20 bp, synthetic construct
  source 1..20: mol_type = other DNA
actccgctcagagcaactcg

SEQ ID NO: 11053 - DNA, 20 bp, synthetic construct
  source 1..20: mol_type = other DNA
tgtggagctatacgcagctg

SEQ ID NO: 11054 - DNA, 20 bp, synthetic construct
  source 1..20: mol_type = other DNA
ccagcagtagaaactaatgt

SEQ ID NO: 11055 - DNA, 20 bp, synthetic construct
  source 1..20: mol_type = other DNA
cgatgctccggtatctgacc

SEQ ID NO: 11056 - DNA, 20 bp, synthetic construct
  source 1..20: mol_type = other DNA
cagggttgtcgggttgcttc

SEQ ID NO: 11057 - DNA, 20 bp, synthetic construct
  source 1..20: mol_type = other DNA
cttcactactggtaggctgt

SEQ ID NO: 11058 - DNA, 20 bp, synthetic construct
  source 1..20: mol_type = other DNA
caagtcggtatagtggcgcc

SEQ ID NO: 11059 - DNA, 20 bp, synthetic construct
  source 1..20: mol_type = other DNA
atacgaggtgcgtttaggag

SEQ ID NO: 11060 - DNA, 20 bp, synthetic construct
  source 1..20: mol_type = other DNA
ctggtagcatgtgaaccggt

SEQ ID NO: 11061 - DNA, 20 bp, synthetic construct
  source 1..20: mol_type = other DNA
gaatgtgcgcgtcggatagg

SEQ ID NO: 11062 - DNA, 20 bp, synthetic construct
  source 1..20: mol_type = other DNA
tttcccatagagtcaagggc

SEQ ID NO: 11063 - DNA, 20 bp, synthetic construct
  source 1..20: mol_type = other DNA
catctgccgtcttcggtgcg

SEQ ID NO: 11064 - DNA, 20 bp, synthetic construct
  source 1..20: mol_type = other DNA
aagccctctctcgttgccag

SEQ ID NO: 11065 - DNA, 20 bp, synthetic construct
  source 1..20: mol_type = other DNA
caggcttggttaatattcgg

SEQ ID NO: 11066 - DNA, 20 bp, synthetic construct
  source 1..20: mol_type = other DNA
acggcgacgtcacataggaa

SEQ ID NO: 11067 - DNA, 20 bp, synthetic construct
  source 1..20: mol_type = other DNA
ccatacacgaaagcgagaac

SEQ ID NO: 11068 - DNA, 20 bp, synthetic construct
  source 1..20: mol_type = other DNA
gtgtagcttcgtctccgacc

SEQ ID NO: 11069 - DNA, 20 bp, synthetic construct
  source 1..20: mol_type = other DNA
tctggtctccatggaactcg

SEQ ID NO: 11070 - DNA, 20 bp, synthetic construct
  source 1..20: mol_type = other DNA
tctatctaaactgtgaggcg

SEQ ID NO: 11071 - DNA, 20 bp, synthetic construct
  source 1..20: mol_type = other DNA
caatcctgacaatcattgcc

SEQ ID NO: 11072 - DNA, 20 bp, synthetic construct
  source 1..20: mol_type = other DNA
tgtgtacgctgtttcgctat

SEQ ID NO: 11073 - DNA, 20 bp, synthetic construct
  source 1..20: mol_type = other DNA
cagcagcaagatattactcg

SEQ ID NO: 11074 - DNA, 20 bp, synthetic construct
  source 1..20: mol_type = other DNA
catcggcacgaggaaatttc

SEQ ID NO: 11075 - DNA, 20 bp, synthetic construct
  source 1..20: mol_type = other DNA
tctcgtggtttgtgctatga

SEQ ID NO: 11076 - DNA, 20 bp, synthetic construct
  source 1..20: mol_type = other DNA
tagatgctgacgtccttctc

SEQ ID NO: 11077 - DNA, 20 bp, synthetic construct
  source 1..20: mol_type = other DNA
tgactacgggaagcagtaaa

SEQ ID NO: 11078 - DNA, 20 bp, synthetic construct
  source 1..20: mol_type = other DNA
catatagatagcacggcatc

SEQ ID NO: 11079 - DNA, 20 bp, synthetic construct
  source 1..20: mol_type = other DNA
tctccttggtcggtttcgga

SEQ ID NO: 11080 - DNA, 20 bp, synthetic construct
  source 1..20: mol_type = other DNA
tccgccatcgaggtgctcta

SEQ ID NO: 11081 - DNA, 20 bp, synthetic construct
  source 1..20: mol_type = other DNA
tttcacgaagattcagtgtg

SEQ ID NO: 11082 - DNA, 20 bp, synthetic construct
  source 1..20: mol_type = other DNA
acgacactgcgccgaacgct

SEQ ID NO: 11083 - DNA, 20 bp, synthetic construct
  source 1..20: mol_type = other DNA
ggaaagttataatacccggc

SEQ ID NO: 11084 - DNA, 20 bp, synthetic construct
  source 1..20: mol_type = other DNA
tctgtgacgtgccatctgaa

SEQ ID NO: 11085 - DNA, 20 bp, synthetic construct
  source 1..20: mol_type = other DNA
agcccgagttacggctaggt

SEQ ID NO: 11086 - DNA, 20 bp, synthetic construct
  source 1..20: mol_type = other DNA
gcaccgagatcgcgctgatg

SEQ ID NO: 11087 - DNA, 20 bp, synthetic construct
  source 1..20: mol_type = other DNA
agtcatatccgacaattagg

SEQ ID NO: 11088 - DNA, 20 bp, synthetic construct
  source 1..20: mol_type = other DNA
gtaacaaggaagcatttcag

SEQ ID NO: 11089 - DNA, 20 bp, synthetic construct
  source 1..20: mol_type = other DNA
ggagcaattagctaggtaac

SEQ ID NO: 11090 - DNA, 20 bp, synthetic construct
  source 1..20: mol_type = other DNA
tgtgtatgtgtaagagctta

SEQ ID NO: 11091 - DNA, 20 bp, synthetic construct
  source 1..20: mol_type = other DNA
taccagaagcgtttggacta

SEQ ID NO: 11092 - DNA, 20 bp, synthetic construct
  source 1..20: mol_type = other DNA
agatagcgagctgcagctat

SEQ ID NO: 11093 - DNA, 20 bp, synthetic construct
  source 1..20: mol_type = other DNA
agggcatcccagttcccaat

SEQ ID NO: 11094 - DNA, 20 bp, synthetic construct
  source 1..20: mol_type = other DNA
gatccggtaaaccctcgacc

SEQ ID NO: 11095 - DNA, 20 bp, synthetic construct
  source 1..20: mol_type = other DNA
tcctcggcgcagtattgagc

SEQ ID NO: 11096 - DNA, 20 bp, synthetic construct
  source 1..20: mol_type = other DNA
ctaccacgttcttgtggttg

SEQ ID NO: 11097 - DNA, 20 bp, synthetic construct
  source 1..20: mol_type = other DNA
cgatgacgaacactgatcct

SEQ ID NO: 11098 - DNA, 20 bp, synthetic construct
  source 1..20: mol_type = other DNA
gattccgaaatatggttgac

SEQ ID NO: 11099 - DNA, 20 bp, synthetic construct
  source 1..20: mol_type = other DNA
ccgcactcgaaacaaaggta

SEQ ID NO: 11100 - DNA, 20 bp, synthetic construct
  source 1..20: mol_type = other DNA
tagtgctatttcgacacttt

SEQ ID NO: 11101 - DNA, 20 bp, synthetic construct
  source 1..20: mol_type = other DNA
ggtagcacttaagataatcg

SEQ ID NO: 11102 - DNA, 20 bp, synthetic construct
  source 1..20: mol_type = other DNA
gcgaatatgttcgctcgcat

SEQ ID NO: 11103 - DNA, 20 bp, synthetic construct
  source 1..20: mol_type = other DNA
attacatcgggcctgctgcc

SEQ ID NO: 11104 - DNA, 20 bp, synthetic construct
  source 1..20: mol_type = other DNA
tacctgctttccgggcggta

SEQ ID NO: 11105 - DNA, 20 bp, synthetic construct
  source 1..20: mol_type = other DNA
ctggatctaaagtacccgga

SEQ ID NO: 11106 - DNA, 20 bp, synthetic construct
  source 1..20: mol_type = other DNA
ctcgtcgttcgttccagctt

SEQ ID NO: 11107 - DNA, 20 bp, synthetic construct
  source 1..20: mol_type = other DNA
ggagattaccgcgctcaatc

SEQ ID NO: 11108 - DNA, 20 bp, synthetic construct
  source 1..20: mol_type = other DNA
cccacaagctgcgtgacttg

SEQ ID NO: 11109 - DNA, 20 bp, synthetic construct
  source 1..20: mol_type = other DNA
tcacaccatggcgtggtatc

SEQ ID NO: 11110 - DNA, 20 bp, synthetic construct
  source 1..20: mol_type = other DNA
ttcaggctgaaagctagcat

SEQ ID NO: 11111 - DNA, 20 bp, synthetic construct
  source 1..20: mol_type = other DNA
tatttaggatttgtcccgcg

SEQ ID NO: 11112 - DNA, 20 bp, synthetic construct
  source 1..20: mol_type = other DNA
tattccacccggtaactctt

SEQ ID NO: 11113 - DNA, 20 bp, synthetic construct
  source 1..20: mol_type = other DNA
cgaccctagaaagtgtgatc

SEQ ID NO: 11114 - DNA, 20 bp, synthetic construct
  source 1..20: mol_type = other DNA
ccgctcggaccttctattaa

SEQ ID NO: 11115 - DNA, 20 bp, synthetic construct
  source 1..20: mol_type = other DNA
gtagggtcggatttgcctga

SEQ ID NO: 11116 - DNA, 20 bp, synthetic construct
  source 1..20: mol_type = other DNA
aacgtattcctaccagcgtc

SEQ ID NO: 11117 - DNA, 20 bp, synthetic construct
  source 1..20: mol_type = other DNA
ctactagttccaagggtttg

SEQ ID NO: 11118 - DNA, 20 bp, synthetic construct
  source 1..20: mol_type = other DNA
cactcaccggtagggtgtac

SEQ ID NO: 11119 - DNA, 20 bp, synthetic construct
  source 1..20: mol_type = other DNA
tctataacgcgggtggtcgt

SEQ ID NO: 11120 - DNA, 20 bp, synthetic construct
  source 1..20: mol_type = other DNA
acccgtgcttgcatagtatt

SEQ ID NO: 11121 - DNA, 20 bp, synthetic construct
  source 1..20: mol_type = other DNA
atgtgtattgagttaggcct

SEQ ID NO: 11122 - DNA, 20 bp, synthetic construct
  source 1..20: mol_type = other DNA
aaacgatttggcttgcctac

SEQ ID NO: 11123 - DNA, 20 bp, synthetic construct
  source 1..20: mol_type = other DNA
acttcgaaggactacataga

SEQ ID NO: 11124 - DNA, 20 bp, synthetic construct
  source 1..20: mol_type = other DNA
tggtctgcataacctccaca

SEQ ID NO: 11125 - DNA, 20 bp, synthetic construct
  source 1..20: mol_type = other DNA
tgatgccctgtatggagtag

SEQ ID NO: 11126 - DNA, 20 bp, synthetic construct
  source 1..20: mol_type = other DNA
caacaagcggtgcgttggta

SEQ ID NO: 11127 - DNA, 20 bp, synthetic construct
  source 1..20: mol_type = other DNA
ctttgatcctattcgcccgc

SEQ ID NO: 11128 - DNA, 20 bp, synthetic construct
  source 1..20: mol_type = other DNA
ggattcatagatagcaagcc

SEQ ID NO: 11129 - DNA, 20 bp, synthetic construct
  source 1..20: mol_type = other DNA
atcgatcttgcggagccgtt

SEQ ID NO: 11130 - DNA, 20 bp, synthetic construct
  source 1..20: mol_type = other DNA
aggcggcctgcaaacgtgct

SEQ ID NO: 11131 - DNA, 20 bp, synthetic construct
  source 1..20: mol_type = other DNA
gttagaccagcaccaaccct

SEQ ID NO: 11132 - DNA, 20 bp, synthetic construct
  source 1..20: mol_type = other DNA
gctagcacggcaaggatgca

SEQ ID NO: 11133 - DNA, 20 bp, synthetic construct
  source 1..20: mol_type = other DNA
tccacggtgcttcctacatt

SEQ ID NO: 11134 - DNA, 20 bp, synthetic construct
  source 1..20: mol_type = other DNA
taattatgagcacctcctct

SEQ ID NO: 11135 - DNA, 20 bp, synthetic construct
  source 1..20: mol_type = other DNA
tagacacagggtccgacctc

SEQ ID NO: 11136 - DNA, 20 bp, synthetic construct
  source 1..20: mol_type = other DNA
cttaacggagctacctttac

SEQ ID NO: 11137 - DNA, 20 bp, synthetic construct
  source 1..20: mol_type = other DNA
atgttcgtggtcaaacctat

SEQ ID NO: 11138 - DNA, 20 bp, synthetic construct
  source 1..20: mol_type = other DNA
gcaaacgccatgactaagtg

SEQ ID NO: 11139 - DNA, 20 bp, synthetic construct
  source 1..20: mol_type = other DNA
cacggacacagattgtccca

SEQ ID NO: 11140 - DNA, 20 bp, synthetic construct
  source 1..20: mol_type = other DNA
acaatgtggacccaattgag

SEQ ID NO: 11141 - DNA, 20 bp, synthetic construct
  source 1..20: mol_type = other DNA
cccagaagttacgcgtacgt

SEQ ID NO: 11142 - DNA, 20 bp, synthetic construct
  source 1..20: mol_type = other DNA
cgaaatgacctaacttgcgg

SEQ ID NO: 11143 - DNA, 20 bp, synthetic construct
  source 1..20: mol_type = other DNA
tcccactaccgccatttaga

SEQ ID NO: 11144 - DNA, 20 bp, synthetic construct
  source 1..20: mol_type = other DNA
ccagaggtggcacttaatgt

SEQ ID NO: 11145 - DNA, 20 bp, synthetic construct
  source 1..20: mol_type = other DNA
acaagtcggcctggtacaag

SEQ ID NO: 11146 - DNA, 20 bp, synthetic construct
  source 1..20: mol_type = other DNA
ggatacgctgagctgtttcc

SEQ ID NO: 11147 - DNA, 20 bp, synthetic construct
  source 1..20: mol_type = other DNA
aatgatgttcgcggcttgac

SEQ ID NO: 11148 - DNA, 20 bp, synthetic construct
  source 1..20: mol_type = other DNA
ctaccgtccagtgagaaagg

SEQ ID NO: 11149 - DNA, 20 bp, synthetic construct
  source 1..20: mol_type = other DNA
atggatttcgcatccttacc

SEQ ID NO: 11150 - DNA, 20 bp, synthetic construct
  source 1..20: mol_type = other DNA
tgcgcagaaggaaacaagga

SEQ ID NO: 11151 - DNA, 20 bp, synthetic construct
  source 1..20: mol_type = other DNA
atcactgacgaccgtttgat

SEQ ID NO: 11152 - DNA, 20 bp, synthetic construct
  source 1..20: mol_type = other DNA
ataccttagtagaggtagtc

SEQ ID NO: 11153 - DNA, 20 bp, synthetic construct
  source 1..20: mol_type = other DNA
tcctttcctggactaaatta

SEQ ID NO: 11154 - DNA, 20 bp, synthetic construct
  source 1..20: mol_type = other DNA
gcgctaagcgaacgctaatc

SEQ ID NO: 11155 - DNA, 20 bp, synthetic construct
  source 1..20: mol_type = other DNA
gtatgaggtcagtctcgccg

SEQ ID NO: 11156 - DNA, 20 bp, synthetic construct
  source 1..20: mol_type = other DNA
ccgtatctcacaacttaagc

SEQ ID NO: 11157 - DNA, 20 bp, synthetic construct
  source 1..20: mol_type = other DNA
tctcctagtgtcctcacgga

SEQ ID NO: 11158 - DNA, 20 bp, synthetic construct
  source 1..20: mol_type = other DNA
gttgaagccgtgtagcaact

SEQ ID NO: 11159 - DNA, 20 bp, synthetic construct
  source 1..20: mol_type = other DNA
tcatccaacgtcagagcatc

SEQ ID NO: 11160 - DNA, 20 bp, synthetic construct
  source 1..20: mol_type = other DNA
agcaatggtttgcgtgccta

SEQ ID NO: 11161 - DNA, 20 bp, synthetic construct
  source 1..20: mol_type = other DNA
gaaggattggtcggacgaaa

SEQ ID NO: 11162 - DNA, 20 bp, synthetic construct
  source 1..20: mol_type = other DNA
ggtctcgtatcgaacgcagc

SEQ ID NO: 11163 - DNA, 20 bp, synthetic construct
  source 1..20: mol_type = other DNA
cccggcgtagctagtatcga

SEQ ID NO: 11164 - DNA, 20 bp, synthetic construct
  source 1..20: mol_type = other DNA
tggtctcgtgcatataatat

SEQ ID NO: 11165 - DNA, 20 bp, synthetic construct
  source 1..20: mol_type = other DNA
ataaacccggaactaggtcg

SEQ ID NO: 11166 - DNA, 20 bp, synthetic construct
  source 1..20: mol_type = other DNA
gcagggacttagcgaaatca

SEQ ID NO: 11167 - DNA, 20 bp, synthetic construct
  source 1..20: mol_type = other DNA
gtaccgctcctcttcgtcta

SEQ ID NO: 11168 - DNA, 20 bp, synthetic construct
  source 1..20: mol_type = other DNA
aacaaccgaaatacgttagc

SEQ ID NO: 11169 - DNA, 20 bp, synthetic construct
  source 1..20: mol_type = other DNA
agtacacattgctctgggca

SEQ ID NO: 11170 - DNA, 20 bp, synthetic construct
  source 1..20: mol_type = other DNA
tgcgcattagtacgccgaac

SEQ ID NO: 11171 - DNA, 20 bp, synthetic construct
  source 1..20: mol_type = other DNA
ttggcctgaggcatctgcgg

SEQ ID NO: 11172 - DNA, 20 bp, synthetic construct
  source 1..20: mol_type = other DNA
gagttcacaaagcacgcatc

SEQ ID NO: 11173 - DNA, 20 bp, synthetic construct
  source 1..20: mol_type = other DNA
ctattaaagaggtctcgtcg

SEQ ID NO: 11174 - DNA, 20 bp, synthetic construct
  source 1..20: mol_type = other DNA
aagccaaggccgtcactgat

SEQ ID NO: 11175 - DNA, 20 bp, synthetic construct
  source 1..20: mol_type = other DNA
ttctgctctctcaaggaaca

SEQ ID NO: 11176 - DNA, 20 bp, synthetic construct
  source 1..20: mol_type = other DNA
ccgaggtctattatctggga

SEQ ID NO: 11177 - DNA, 20 bp, synthetic construct
  source 1..20: mol_type = other DNA
cgtacaagtggccgctaata

SEQ ID NO: 11178 - DNA, 20 bp, synthetic construct
  source 1..20: mol_type = other DNA
atccctattgcttgtacaag

SEQ ID NO: 11179 - DNA, 20 bp, synthetic construct
  source 1..20: mol_type = other DNA
gtcggttgatgcactggtga

SEQ ID NO: 11180 - DNA, 20 bp, synthetic construct
  source 1..20: mol_type = other DNA
gtcatttccacaaaggtcgt

SEQ ID NO: 11181 - DNA, 20 bp, synthetic construct
  source 1..20: mol_type = other DNA
atattaagcccgaggcatgt

SEQ ID NO: 11182 - DNA, 20 bp, synthetic construct
  source 1..20: mol_type = other DNA
ttgtgttcggccggaaccta

SEQ ID NO: 11183 - DNA, 20 bp, synthetic construct
  source 1..20: mol_type = other DNA
aatgtgagtcagaaaggcta

SEQ ID NO: 11184 - DNA, 20 bp, synthetic construct
  source 1..20: mol_type = other DNA
atcatgctaaactgccaata

SEQ ID NO: 11185 - DNA, 20 bp, synthetic construct
  source 1..20: mol_type = other DNA
acccgatgcgttctctaaga

SEQ ID NO: 11186 - DNA, 20 bp, synthetic construct
  source 1..20: mol_type = other DNA
gagaatgggcttaacgtggc

SEQ ID NO: 11187 - DNA, 20 bp, synthetic construct
  source 1..20: mol_type = other DNA
gaccttgtatttattcagag

SEQ ID NO: 11188 - DNA, 20 bp, synthetic construct
  source 1..20: mol_type = other DNA
tccgagtgtatgatgcgctt

SEQ ID NO: 11189 - DNA, 20 bp, synthetic construct
  source 1..20: mol_type = other DNA
gaggtgagggaaatgtacga

SEQ ID NO: 11190 - DNA, 20 bp, synthetic construct
  source 1..20: mol_type = other DNA
tcgtgactatccggacagac

SEQ ID NO: 11191 - DNA, 20 bp, synthetic construct
  source 1..20: mol_type = other DNA
atgcaactgaacttccaaag

SEQ ID NO: 11192 - DNA, 20 bp, synthetic construct
  source 1..20: mol_type = other DNA
gttagctggtcagaaattga

SEQ ID NO: 11193 - DNA, 20 bp, synthetic construct
  source 1..20: mol_type = other DNA
ttgctgtaattccctcgtac

SEQ ID NO: 11194 - DNA, 20 bp, synthetic construct
  source 1..20: mol_type = other DNA
cggcacgagctgacgctaat

SEQ ID NO: 11195 - DNA, 20 bp, synthetic construct
  source 1..20: mol_type = other DNA
gatcccgaggacaagatttg

SEQ ID NO: 11196 - DNA, 20 bp, synthetic construct
  source 1..20: mol_type = other DNA
caatgtcacataaccctatt

SEQ ID NO: 11197 - DNA, 20 bp, synthetic construct
  source 1..20: mol_type = other DNA
tattagcgcgtctcgactac

SEQ ID NO: 11198 - DNA, 20 bp, synthetic construct
  source 1..20: mol_type = other DNA
ataaagacaaggtccgacgg

SEQ ID NO: 11199 - DNA, 20 bp, synthetic construct
  source 1..20: mol_type = other DNA
agattattcctagcccacgg

SEQ ID NO: 11200 - DNA, 20 bp, synthetic construct
  source 1..20: mol_type = other DNA
ccgaatgctatcatgtagac

SEQ ID NO: 11201 - DNA, 20 bp, synthetic construct
  source 1..20: mol_type = other DNA
cagtaaacgactcttcagca

SEQ ID NO: 11202 - DNA, 20 bp, synthetic construct
  source 1..20: mol_type = other DNA
tcggacggataaggtatcga

SEQ ID NO: 11203 - DNA, 20 bp, synthetic construct
  source 1..20: mol_type = other DNA
acccaacgaagggcttgcta

SEQ ID NO: 11204 - DNA, 20 bp, synthetic construct
  source 1..20: mol_type = other DNA
atcgtcgtagtgctatctac

SEQ ID NO: 11205 - DNA, 20 bp, synthetic construct
  source 1..20: mol_type = other DNA
gtataatgacgaaattcagg

SEQ ID NO: 11206 - DNA, 20 bp, synthetic construct
  source 1..20: mol_type = other DNA
gcctaggcgacgcatgtttg

SEQ ID NO: 11207 - DNA, 20 bp, synthetic construct
  source 1..20: mol_type = other DNA
tatgactcttattcagtcac

SEQ ID NO: 11208 - DNA, 20 bp, synthetic construct
  source 1..20: mol_type = other DNA
tgtggtcactctgggagtca

SEQ ID NO: 11209 - DNA, 20 bp, synthetic construct
  source 1..20: mol_type = other DNA
gggataggtcttactttggg

SEQ ID NO: 11210 - DNA, 20 bp, synthetic construct
  source 1..20: mol_type = other DNA
gcttacaggcacggtctact

SEQ ID NO: 11211 - DNA, 20 bp, synthetic construct
  source 1..20: mol_type = other DNA
ccataactgggctggacttg

SEQ ID NO: 11212 - DNA, 20 bp, synthetic construct
  source 1..20: mol_type = other DNA
gaagtaggacctgcatagtt

SEQ ID NO: 11213 - DNA, 20 bp, synthetic construct
  source 1..20: mol_type = other DNA
ggacttccatacgtatatgt

SEQ ID NO: 11214 - DNA, 20 bp, synthetic construct
  source 1..20: mol_type = other DNA
aatcgatggattgatacacc

SEQ ID NO: 11215 - DNA, 20 bp, synthetic construct
  source 1..20: mol_type = other DNA
ttaccatgcataggcctcca

SEQ ID NO: 11216 - DNA, 20 bp, synthetic construct
  source 1..20: mol_type = other DNA
aggcttactacgcgccgctg

SEQ ID NO: 11217 - DNA, 20 bp, synthetic construct
  source 1..20: mol_type = other DNA
atcatcctacatacgtgctc

SEQ ID NO: 11218 - DNA, 20 bp, synthetic construct
  source 1..20: mol_type = other DNA
atgcgtgccatatttatgca

SEQ ID NO: 11219 - DNA, 20 bp, synthetic construct
  source 1..20: mol_type = other DNA
tgaaagtggtcgatcttccc

SEQ ID NO: 11220 - DNA, 20 bp, synthetic construct
  source 1..20: mol_type = other DNA
gcctaattcgatcgtcagat

SEQ ID NO: 11221 - DNA, 20 bp, synthetic construct
  source 1..20: mol_type = other DNA
gtaatggaaccgtgtagcag

SEQ ID NO: 11222 - DNA, 20 bp, synthetic construct
  source 1..20: mol_type = other DNA
tgagacttgaccggactaca

SEQ ID NO: 11223 - DNA, 20 bp, synthetic construct
  source 1..20: mol_type = other DNA
ccacgtccagtcgtacggag

SEQ ID NO: 11224 - DNA, 20 bp, synthetic construct
  source 1..20: mol_type = other DNA
gcatagagttctgaggtcta

SEQ ID NO: 11225 - DNA, 20 bp, synthetic construct
  source 1..20: mol_type = other DNA
gacttgtggtgtcctgtact

SEQ ID NO: 11226 - DNA, 20 bp, synthetic construct
  source 1..20: mol_type = other DNA
cgtgtataaggcgctccatg

SEQ ID NO: 11227 - DNA, 20 bp, synthetic construct
  source 1..20: mol_type = other DNA
ttccgacatgcatactgact

SEQ ID NO: 11228 - DNA, 20 bp, synthetic construct
  source 1..20: mol_type = other DNA
gctgcggaatttaagagtat

SEQ ID NO: 11229 - DNA, 20 bp, synthetic construct
  source 1..20: mol_type = other DNA
tcgttacacctgtgggtaca

SEQ ID NO: 11230 - DNA, 20 bp, synthetic construct
  source 1..20: mol_type = other DNA
ctacttggctgcagagctct

SEQ ID NO: 11231 - DNA, 20 bp, synthetic construct
  source 1..20: mol_type = other DNA
caccacggttaacgaaacta

SEQ ID NO: 11232 - DNA, 20 bp, synthetic construct
  source 1..20: mol_type = other DNA
ttgaagcgtgtgctccaatt

SEQ ID NO: 11233 - DNA, 20 bp, synthetic construct
  source 1..20: mol_type = other DNA
ttgcacctagtccaccttac

SEQ ID NO: 11234 - DNA, 20 bp, synthetic construct
  source 1..20: mol_type = other DNA
ggtcagaaacgggcaaggta

SEQ ID NO: 11235 - DNA, 20 bp, synthetic construct
  source 1..20: mol_type = other DNA
ggctggatattgttgaatgt

SEQ ID NO: 11236 - DNA, 20 bp, synthetic construct
  source 1..20: mol_type = other DNA
cttacgatggaagatatgca

SEQ ID NO: 11237 - DNA, 20 bp, synthetic construct
  source 1..20: mol_type = other DNA
tcggcagtaatcctatcttg

SEQ ID NO: 11238 - DNA, 20 bp, synthetic construct
  source 1..20: mol_type = other DNA
agattacgtcggaatctacg

SEQ ID NO: 11239 - DNA, 20 bp, synthetic construct
  source 1..20: mol_type = other DNA
tgtgaaataaacattggctg

SEQ ID NO: 11240 - DNA, 20 bp, synthetic construct
  source 1..20: mol_type = other DNA
tgagactactgtgtgacatg

SEQ ID NO: 11241 - DNA, 20 bp, synthetic construct
  source 1..20: mol_type = other DNA
cctggtacacgcgtatgttt

SEQ ID NO: 11242 - DNA, 20 bp, synthetic construct
  source 1..20: mol_type = other DNA
tatgtcacgttggtcactaa

SEQ ID NO: 11243 - DNA, 20 bp, synthetic construct
  source 1..20: mol_type = other DNA
tatagttgtcagtggtagca

SEQ ID NO: 11244 - DNA, 20 bp, synthetic construct
  source 1..20: mol_type = other DNA
gcggtcgtagtacacggcaa

SEQ ID NO: 11245 - DNA, 20 bp, synthetic construct
  source 1..20: mol_type = other DNA
ctaaagtctccacttgaaag

SEQ ID NO: 11246 - DNA, 20 bp, synthetic construct
  source 1..20: mol_type = other DNA
cacggttgtcgtttcttaca

SEQ ID NO: 11247 - DNA, 20 bp, synthetic construct
  source 1..20: mol_type = other DNA
tggacggagatttgtcaagc

SEQ ID NO: 11248 - DNA, 20 bp, synthetic construct
  source 1..20: mol_type = other DNA
agtacgtatttgaagtagcc

SEQ ID NO: 11249 - DNA, 20 bp, synthetic construct
  source 1..20: mol_type = other DNA
gcgagcctcattgatcaagc

SEQ ID NO: 11250 - DNA, 20 bp, synthetic construct
  source 1..20: mol_type = other DNA
gaatcgagagaaattgctgg

SEQ ID NO: 11251 - DNA, 20 bp, synthetic construct
  source 1..20: mol_type = other DNA
tcttctaaccatagagacta

SEQ ID NO: 11252 - DNA, 20 bp, synthetic construct
  source 1..20: mol_type = other DNA
ggtacctgaagtggagggtt

SEQ ID NO: 11253 - DNA, 20 bp, synthetic construct
  source 1..20: mol_type = other DNA
gcgagactgactaaattgag

SEQ ID NO: 11254 - DNA, 20 bp, synthetic construct
  source 1..20: mol_type = other DNA
gatgtacttatacctcacca

SEQ ID NO: 11255 - DNA, 20 bp, synthetic construct
  source 1..20: mol_type = other DNA
acgaagattacgcagagtca

SEQ ID NO: 11256 - DNA, 20 bp, synthetic construct
  source 1..20: mol_type = other DNA
acccgtcgcgggatttatac

SEQ ID NO: 11257 - DNA, 20 bp, synthetic construct
  source 1..20: mol_type = other DNA
gacgttggtctgacacatgg

SEQ ID NO: 11258 - DNA, 20 bp, synthetic construct
  source 1..20: mol_type = other DNA
agtcttaacgacgtaaggaa

SEQ ID NO: 11259 - DNA, 20 bp, synthetic construct
  source 1..20: mol_type = other DNA
gacaccatcatatgatagcg

SEQ ID NO: 11260 - DNA, 20 bp, synthetic construct
  source 1..20: mol_type = other DNA
ccatctcccaaatggatcgt

SEQ ID NO: 11261 - DNA, 20 bp, synthetic construct
  source 1..20: mol_type = other DNA
tcagaatcgcggcacgtgtg

SEQ ID NO: 11262 - DNA, 20 bp, synthetic construct
  source 1..20: mol_type = other DNA
cttcggtttctggaatcaaa

SEQ ID NO: 11263 - DNA, 20 bp, synthetic construct
  source 1..20: mol_type = other DNA
atatcgcacacctgtagagg

SEQ ID NO: 11264 - DNA, 20 bp, synthetic construct
  source 1..20: mol_type = other DNA
cttacacaaggtccttagca

SEQ ID NO: 11265 - DNA, 20 bp, synthetic construct
  source 1..20: mol_type = other DNA
acgcgcgcgacgaatgcgtg

SEQ ID NO: 11266 - DNA, 20 bp, synthetic construct
  source 1..20: mol_type = other DNA
gcgctaaacctctaagacct

SEQ ID NO: 11267 - DNA, 20 bp, synthetic construct
  source 1..20: mol_type = other DNA
atcgatcacctggactttcg

SEQ ID NO: 11268 - DNA, 20 bp, synthetic construct
  source 1..20: mol_type = other DNA
tgtactcggacgaaggctca

SEQ ID NO: 11269 - DNA, 20 bp, synthetic construct
  source 1..20: mol_type = other DNA
ctgcggtacgcacatgcact

SEQ ID NO: 11270 - DNA, 20 bp, synthetic construct
  source 1..20: mol_type = other DNA
ctgttatcagctgtttatat

SEQ ID NO: 11271 - DNA, 20 bp, synthetic construct
  source 1..20: mol_type = other DNA
tgctaggattgccgtacaag

SEQ ID NO: 11272 - DNA, 20 bp, synthetic construct
  source 1..20: mol_type = other DNA
taggcttcacttcggcgact

SEQ ID NO: 11273 - DNA, 20 bp, synthetic construct
  source 1..20: mol_type = other DNA
tcacacgaacactgctcttg

SEQ ID NO: 11274 - DNA, 20 bp, synthetic construct
  source 1..20: mol_type = other DNA
ggtggataatatgaggagga

SEQ ID NO: 11275 - DNA, 20 bp, synthetic construct
  source 1..20: mol_type = other DNA
aatcctttgggcagaaggat

SEQ ID NO: 11276 - DNA, 20 bp, synthetic construct
  source 1..20: mol_type = other DNA
ttccacaggacgaccgtata

SEQ ID NO: 11277 - DNA, 20 bp, synthetic construct
  source 1..20: mol_type = other DNA
ggcgcacggtgtgtacttga

SEQ ID NO: 11278 - DNA, 20 bp, synthetic construct
  source 1..20: mol_type = other DNA
ttcggttcagggcaagtgtg

SEQ ID NO: 11279 - DNA, 20 bp, synthetic construct
  source 1..20: mol_type = other DNA
atctatcgtcttaggccgta

SEQ ID NO: 11280 - DNA, 20 bp, synthetic construct
  source 1..20: mol_type = other DNA
agcactgcttaatgtgtcat

SEQ ID NO: 11281 - DNA, 20 bp, synthetic construct
  source 1..20: mol_type = other DNA
taacaatgcgcattcggtcg

SEQ ID NO: 11282 - DNA, 20 bp, synthetic construct
  source 1..20: mol_type = other DNA
cccgtacgcaaggtatccct

SEQ ID NO: 11283 - DNA, 20 bp, synthetic construct
  source 1..20: mol_type = other DNA
ccctaaggaagctcgtccta

SEQ ID NO: 11284 - DNA, 20 bp, synthetic construct
  source 1..20: mol_type = other DNA
tatttgctggtttaacgccg

SEQ ID NO: 11285 - DNA, 20 bp, synthetic construct
  source 1..20: mol_type = other DNA
tgagtcttcccgacatacca

SEQ ID NO: 11286 - DNA, 20 bp, synthetic construct
  source 1..20: mol_type = other DNA
atgcgaccctgtaatcattc

SEQ ID NO: 11287 - DNA, 20 bp, synthetic construct
  source 1..20: mol_type = other DNA
tattgtccgcgggaacacag

SEQ ID NO: 11288 - DNA, 20 bp, synthetic construct
  source 1..20: mol_type = other DNA
cggaaggcgtcttagatacc

SEQ ID NO: 11289 - DNA, 20 bp, synthetic construct
  source 1..20: mol_type = other DNA
atgtaattaggctggcgtaa

SEQ ID NO: 11290 - DNA, 20 bp, synthetic construct
  source 1..20: mol_type = other DNA
gtcgaagcaatggatagaca

SEQ ID NO: 11291 - DNA, 20 bp, synthetic construct
  source 1..20: mol_type = other DNA
atacgatggagtcaggagtt

SEQ ID NO: 11292 - DNA, 20 bp, synthetic construct
  source 1..20: mol_type = other DNA
aacttcggatggagcgggct

SEQ ID NO: 11293 - DNA, 20 bp, synthetic construct
  source 1..20: mol_type = other DNA
agccgatccgggaactcata

SEQ ID NO: 11294 - DNA, 20 bp, synthetic construct
  source 1..20: mol_type = other DNA
actggttgatccagaattac

SEQ ID NO: 11295 - DNA, 20 bp, synthetic construct
  source 1..20: mol_type = other DNA
atttgcgattcctcaggagt

SEQ ID NO: 11296 - DNA, 20 bp, synthetic construct
  source 1..20: mol_type = other DNA
atccaagcatcccgcgtgac

SEQ ID NO: 11297 - DNA, 20 bp, synthetic construct
  source 1..20: mol_type = other DNA
caggcctgcgtacgtttatc

SEQ ID NO: 11298 - DNA, 20 bp, synthetic construct
  source 1..20: mol_type = other DNA
ttagttgaaagtgctccgcg

SEQ ID NO: 11299 - DNA, 20 bp, synthetic construct
  source 1..20: mol_type = other DNA
ccgaaacggtcatttgttat

SEQ ID NO: 11300 - DNA, 20 bp, synthetic construct
  source 1..20: mol_type = other DNA
aggttgacagtttcatgcgt

SEQ ID NO: 11301 - DNA, 20 bp, synthetic construct
  source 1..20: mol_type = other DNA
aacgcgctataaggacgtta

SEQ ID NO: 11302 - DNA, 20 bp, synthetic construct
  source 1..20: mol_type = other DNA
ggaccctagctgttcgacga

SEQ ID NO: 11303 - DNA, 20 bp, synthetic construct
  source 1..20: mol_type = other DNA
ctcaagtacgcctatccggg

SEQ ID NO: 11304 - DNA, 20 bp, synthetic construct
  source 1..20: mol_type = other DNA
ttagtgtataagaggaaagc

SEQ ID NO: 11305 - DNA, 20 bp, synthetic construct
  source 1..20: mol_type = other DNA
gtacttgtaaagactactta

SEQ ID NO: 11306 - DNA, 20 bp, synthetic construct
  source 1..20: mol_type = other DNA
tggctaccgtgattacattg

SEQ ID NO: 11307 - DNA, 20 bp, synthetic construct
  source 1..20: mol_type = other DNA
aagtcggatactaacgtgcc

SEQ ID NO: 11308 - DNA, 20 bp, synthetic construct
  source 1..20: mol_type = other DNA
gtatcaagcgtagcacccgt

SEQ ID NO: 11309 - DNA, 20 bp, synthetic construct
  source 1..20: mol_type = other DNA
cgaagctaccgtgaacctgg

SEQ ID NO: 11310 - DNA, 20 bp, synthetic construct
  source 1..20: mol_type = other DNA
aattcggaccaggcagtccg

SEQ ID NO: 11311 - DNA, 20 bp, synthetic construct
  source 1..20: mol_type = other DNA
aaagcgttctgcgtcacttc

SEQ ID NO: 11312 - DNA, 20 bp, synthetic construct
  source 1..20: mol_type = other DNA
cctcttgaatttccaacagt

SEQ ID NO: 11313 - DNA, 20 bp, synthetic construct
  source 1..20: mol_type = other DNA
ccaccgatcaataaatttgg

SEQ ID NO: 11314 - DNA, 20 bp, synthetic construct
  source 1..20: mol_type = other DNA
tctaagtaatcctgcgcact

SEQ ID NO: 11315 - DNA, 20 bp, synthetic construct
  source 1..20: mol_type = other DNA
ccaccttagctagtaaagta

SEQ ID NO: 11316 - DNA, 20 bp, synthetic construct
  source 1..20: mol_type = other DNA
cacctcatcacagcgtctat

SEQ ID NO: 11317 - DNA, 20 bp, synthetic construct
  source 1..20: mol_type = other DNA
ggatcgacccgtgcatagag

SEQ ID NO: 11318 - DNA, 20 bp, synthetic construct
  source 1..20: mol_type = other DNA
tccttgatactgcagaactt

SEQ ID NO: 11319 - DNA, 20 bp, synthetic construct
  source 1..20: mol_type = other DNA
cccacgccgtccgtagtaca

SEQ ID NO: 11320 - DNA, 20 bp, synthetic construct
  source 1..20: mol_type = other DNA
agacgcataactcagatctg

SEQ ID NO: 11321 - DNA, 20 bp, synthetic construct
  source 1..20: mol_type = other DNA
gttctacctctagcgcggca

SEQ ID NO: 11322 - DNA, 20 bp, synthetic construct
  source 1..20: mol_type = other DNA
gcgactgcttatgccaacac

SEQ ID NO: 11323 - DNA, 20 bp, synthetic construct
  source 1..20: mol_type = other DNA
gtcttaagttgttaatgtgc

SEQ ID NO: 11324 - DNA, 20 bp, synthetic construct
  source 1..20: mol_type = other DNA
gtgttcatgatctctcgaac

SEQ ID NO: 11325 - DNA, 20 bp, synthetic construct
  source 1..20: mol_type = other DNA
tgattctctcgttggcgcgg

SEQ ID NO: 11326 - DNA, 20 bp, synthetic construct
  source 1..20: mol_type = other DNA
cttaaagcgttgggtctaca

SEQ ID NO: 11327 - DNA, 20 bp, synthetic construct
  source 1..20: mol_type = other DNA
ataccaatgtgcggcgattc

SEQ ID NO: 11328 - DNA, 20 bp, synthetic construct
  source 1..20: mol_type = other DNA
tctatgcaaataggctggcg

SEQ ID NO: 11329 - DNA, 20 bp, synthetic construct
  source 1..20: mol_type = other DNA
gcgccttagaacgatggacg

SEQ ID NO: 11330 - DNA, 20 bp, synthetic construct
  source 1..20: mol_type = other DNA
aagtgtaccttgtctctcgt

SEQ ID NO: 11331 - DNA, 20 bp, synthetic construct
  source 1..20: mol_type = other DNA
actcattgttgtaggccaac

SEQ ID NO: 11332 - DNA, 20 bp, synthetic construct
  source 1..20: mol_type = other DNA
tacgtgagggtactcattgg

SEQ ID NO: 11333 - DNA, 20 bp, synthetic construct
  source 1..20: mol_type = other DNA
atgcaatattgacgcatagg

SEQ ID NO: 11334 - DNA, 20 bp, synthetic construct
  source 1..20: mol_type = other DNA
cactcggcgtgcagctattg

SEQ ID NO: 11335 - DNA, 20 bp, synthetic construct
  source 1..20: mol_type = other DNA
ccatggcgcatcctacaata

SEQ ID NO: 11336 - DNA, 20 bp, synthetic construct
  source 1..20: mol_type = other DNA
gttctcattggtctcctcga

SEQ ID NO: 11337 - DNA, 20 bp, synthetic construct
  source 1..20: mol_type = other DNA
gtcatcagagatagcgtgtc

SEQ ID NO: 11338 - DNA, 20 bp, synthetic construct
  source 1..20: mol_type = other DNA
agatccaagaacatacccat

SEQ ID NO: 11339 - DNA, 20 bp, synthetic construct
  source 1..20: mol_type = other DNA
gatgcagtcacccaacgaat

SEQ ID NO: 11340 - DNA, 20 bp, synthetic construct
  source 1..20: mol_type = other DNA
acatggcacgaggcagaggt

SEQ ID NO: 11341 - DNA, 20 bp, synthetic construct
  source 1..20: mol_type = other DNA
tcacgctcgttcacagggtc

SEQ ID NO: 11342 - DNA, 20 bp, synthetic construct
  source 1..20: mol_type = other DNA
taagcaactcgcggtgcgat

SEQ ID NO: 11343 - DNA, 20 bp, synthetic construct
  source 1..20: mol_type = other DNA
ccctcatcccacaaccaggg

SEQ ID NO: 11344 - DNA, 20 bp, synthetic construct
  source 1..20: mol_type = other DNA
ccgaccatagcatttaacgc

SEQ ID NO: 11345 - DNA, 20 bp, synthetic construct
  source 1..20: mol_type = other DNA
ctggtcctagttgctcgtga

SEQ ID NO: 11346 - DNA, 20 bp, synthetic construct
  source 1..20: mol_type = other DNA
aatcatactgacgctgttaa

SEQ ID NO: 11347 - DNA, 20 bp, synthetic construct
  source 1..20: mol_type = other DNA
aacgaactcacattcgatgt

SEQ ID NO: 11348 - DNA, 20 bp, synthetic construct
  source 1..20: mol_type = other DNA
acctagattaaggagattca

SEQ ID NO: 11349 - DNA, 20 bp, synthetic construct
  source 1..20: mol_type = other DNA
cttcggtgtctaccattagc

SEQ ID NO: 11350 - DNA, 20 bp, synthetic construct
  source 1..20: mol_type = other DNA
tgctattgtccgaaggcgtt

SEQ ID NO: 11351 - DNA, 20 bp, synthetic construct
  source 1..20: mol_type = other DNA
aagatacctcgtatgggaaa

SEQ ID NO: 11352 - DNA, 20 bp, synthetic construct
  source 1..20: mol_type = other DNA
tgcggccggttggtagctgt

SEQ ID NO: 11353 - DNA, 20 bp, synthetic construct
  source 1..20: mol_type = other DNA
ggccgggcctgattcatagg

SEQ ID NO: 11354 - DNA, 20 bp, synthetic construct
  source 1..20: mol_type = other DNA
gtacttctatgtcaagagga

SEQ ID NO: 11355 - DNA, 20 bp, synthetic construct
  source 1..20: mol_type = other DNA
aaagtcgcgtgcatcgggtc

SEQ ID NO: 11356 - DNA, 20 bp, synthetic construct
  source 1..20: mol_type = other DNA
ctggccctgatagcgtgtac

SEQ ID NO: 11357 - DNA, 20 bp, synthetic construct
  source 1..20: mol_type = other DNA
gggtgtaaatgtaagcccat

SEQ ID NO: 11358 - DNA, 20 bp, synthetic construct
  source 1..20: mol_type = other DNA
gtttcacatgaaatcctccc

SEQ ID NO: 11359 - DNA, 20 bp, synthetic construct
  source 1..20: mol_type = other DNA
taccaagcgcgctattgcga

SEQ ID NO: 11360 - DNA, 20 bp, synthetic construct
  source 1..20: mol_type = other DNA
gtctagtgtgcttgcttaga

SEQ ID NO: 11361 - DNA, 20 bp, synthetic construct
  source 1..20: mol_type = other DNA
acacaggcaggtaatgcttg

SEQ ID NO: 11362 - DNA, 20 bp, synthetic construct
  source 1..20: mol_type = other DNA
aaattccttggccctacttc

SEQ ID NO: 11363 - DNA, 20 bp, synthetic construct
  source 1..20: mol_type = other DNA
tatgtgcaacgtttaagcaa

SEQ ID NO: 11364 - DNA, 20 bp, synthetic construct
  source 1..20: mol_type = other DNA
gccgatctgacgcctcagta

SEQ ID NO: 11365 - DNA, 20 bp, synthetic construct
  source 1..20: mol_type = other DNA
gcgtgagtgggagggtaacg

SEQ ID NO: 11366 - DNA, 20 bp, synthetic construct
  source 1..20: mol_type = other DNA
tagcaatactgattcctact

SEQ ID NO: 11367 - DNA, 20 bp, synthetic construct
  source 1..20: mol_type = other DNA
ggtccctacttaggcttcgg

SEQ ID NO: 11368 - DNA, 20 bp, synthetic construct
  source 1..20: mol_type = other DNA
ctcacatggtctcggcccga

SEQ ID NO: 11369 - DNA, 20 bp, synthetic construct
  source 1..20: mol_type = other DNA
tgtagtagtacctcctctcg

SEQ ID NO: 11370 - DNA, 20 bp, synthetic construct
  source 1..20: mol_type = other DNA
gatagatctcctagatgcta

SEQ ID NO: 11371 - DNA, 20 bp, synthetic construct
  source 1..20: mol_type = other DNA
acggaccacactacaatagg

SEQ ID NO: 11372 - DNA, 20 bp, synthetic construct
  source 1..20: mol_type = other DNA
ggaatgttgagtaaaccaaa

SEQ ID NO: 11373 - DNA, 20 bp, synthetic construct
  source 1..20: mol_type = other DNA
aacattcaatagacaggcga

SEQ ID NO: 11374 - DNA, 20 bp, synthetic construct
  source 1..20: mol_type = other DNA
aaggttcatgtttagggata

SEQ ID NO: 11375 - DNA, 20 bp, synthetic construct
  source 1..20: mol_type = other DNA
ctcgtggcaactagccacga

SEQ ID NO: 11376 - DNA, 20 bp, synthetic construct
  source 1..20: mol_type = other DNA
atacttagtgtccttatgcc

SEQ ID NO: 11377 - DNA, 20 bp, synthetic construct
  source 1..20: mol_type = other DNA
caattcgactcatccctccc

SEQ ID NO: 11378 - DNA, 20 bp, synthetic construct
  source 1..20: mol_type = other DNA
ctccaagcatctgcggaggc

SEQ ID NO: 11379 - DNA, 20 bp, synthetic construct
  source 1..20: mol_type = other DNA
tcccgtcaccgatggcctga

SEQ ID NO: 11380 - DNA, 20 bp, synthetic construct
  source 1..20: mol_type = other DNA
cagaaagggcagaactgtaa

SEQ ID NO: 11381 - DNA, 20 bp, synthetic construct
  source 1..20: mol_type = other DNA
ggaatcaaggaactttggcg

SEQ ID NO: 11382 - DNA, 20 bp, synthetic construct
  source 1..20: mol_type = other DNA
gaacaactgtgttactgtgt

SEQ ID NO: 11383 - DNA, 20 bp, synthetic construct
  source 1..20: mol_type = other DNA
acctgtctctcaccgtagga

SEQ ID NO: 11384 - DNA, 20 bp, synthetic construct
  source 1..20: mol_type = other DNA
ggccaagatattggtcacac

SEQ ID NO: 11385 - DNA, 20 bp, synthetic construct
  source 1..20: mol_type = other DNA
gaccgcgcaaagctaggacg

SEQ ID NO: 11386 - DNA, 20 bp, synthetic construct
  source 1..20: mol_type = other DNA
tgacaagccctgtttctatg

SEQ ID NO: 11387 - DNA, 20 bp, synthetic construct
  source 1..20: mol_type = other DNA
gattattggcagtgttcgtt

SEQ ID NO: 11388 - DNA, 20 bp, synthetic construct
  source 1..20: mol_type = other DNA
agtgtcaggaacacgctgct

SEQ ID NO: 11389 - DNA, 20 bp, synthetic construct
  source 1..20: mol_type = other DNA
aggataactccgtccgccaa

SEQ ID NO: 11390 - DNA, 20 bp, synthetic construct
  source 1..20: mol_type = other DNA
ctcccgtccgttatccatga

SEQ ID NO: 11391 - DNA, 20 bp, synthetic construct
  source 1..20: mol_type = other DNA
tacgcgggaaataggtgtta

SEQ ID NO: 11392 - DNA, 20 bp, synthetic construct
  source 1..20: mol_type = other DNA
gtgtaacccatagtgttcgt

SEQ ID NO: 11393 - DNA, 20 bp, synthetic construct
  source 1..20: mol_type = other DNA
cctcgctgcgggtctctgaa

SEQ ID NO: 11394 - DNA, 20 bp, synthetic construct
  source 1..20: mol_type = other DNA
cgcgctgagagggttcagga

SEQ ID NO: 11395 - DNA, 20 bp, synthetic construct
  source 1..20: mol_type = other DNA
tctgagctagtcatccggtg

SEQ ID NO: 11396 - DNA, 20 bp, synthetic construct
  source 1..20: mol_type = other DNA
cctctctatgcgttctgcga

SEQ ID NO: 11397 - DNA, 20 bp, synthetic construct
  source 1..20: mol_type = other DNA
gtgtgacttcttggtcaacc

SEQ ID NO: 11398 - DNA, 20 bp, synthetic construct
  source 1..20: mol_type = other DNA
ggctgtactcaggacactga

SEQ ID NO: 11399 - DNA, 20 bp, synthetic construct
  source 1..20: mol_type = other DNA
atagcgctaatattcaagga

SEQ ID NO: 11400 - DNA, 20 bp, synthetic construct
  source 1..20: mol_type = other DNA
cccactgatcacgtatgtta

SEQ ID NO: 11401 - DNA, 20 bp, synthetic construct
  source 1..20: mol_type = other DNA
ccgtaacaagccgagcggat

SEQ ID NO: 11402 - DNA, 20 bp, synthetic construct
  source 1..20: mol_type = other DNA
gcctgccacatctttggttg

SEQ ID NO: 11403 - DNA, 20 bp, synthetic construct
  source 1..20: mol_type = other DNA
cagctattgaacctgtcgtc

SEQ ID NO: 11404 - DNA, 20 bp, synthetic construct
  source 1..20: mol_type = other DNA
attagaacacggtcggattc

SEQ ID NO: 11405 - DNA, 20 bp, synthetic construct
  source 1..20: mol_type = other DNA
aagaggatacctataagcca

SEQ ID NO: 11406 - DNA, 20 bp, synthetic construct
  source 1..20: mol_type = other DNA
atacgggccaggcaagccga

SEQ ID NO: 11407 - DNA, 20 bp, synthetic construct
  source 1..20: mol_type = other DNA
ctgcatgcatacggcgacta

SEQ ID NO: 11408 - DNA, 20 bp, synthetic construct
  source 1..20: mol_type = other DNA
ctaccctagtcgggagacac

SEQ ID NO: 11409 - DNA, 20 bp, synthetic construct
  source 1..20: mol_type = other DNA
cagaccgagacaagagtcat

SEQ ID NO: 11410 - DNA, 20 bp, synthetic construct
  source 1..20: mol_type = other DNA
agggtattaccgacagaatg

SEQ ID NO: 11411 - DNA, 20 bp, synthetic construct
  source 1..20: mol_type = other DNA
aatcaagcataagtctgtcc

SEQ ID NO: 11412 - DNA, 20 bp, synthetic construct
  source 1..20: mol_type = other DNA
agtatatggacaatccggga

SEQ ID NO: 11413 - DNA, 20 bp, synthetic construct
  source 1..20: mol_type = other DNA
cagccatggtatgtctaaag

SEQ ID NO: 11414 - DNA, 20 bp, synthetic construct
  source 1..20: mol_type = other DNA
ggcaattcgcactcttgcca

SEQ ID NO: 11415 - DNA, 20 bp, synthetic construct
  source 1..20: mol_type = other DNA
ccatattatcgcattagtaa

SEQ ID NO: 11416 - DNA, 20 bp, synthetic construct
  source 1..20: mol_type = other DNA
ttattccgtaggattagccg

SEQ ID NO: 11417 - DNA, 20 bp, synthetic construct
  source 1..20: mol_type = other DNA
ctttcgcgactctgaatgca

SEQ ID NO: 11418 - DNA, 20 bp, synthetic construct
  source 1..20: mol_type = other DNA
ttcctcgcaaccttcccacc

SEQ ID NO: 11419 - DNA, 20 bp, synthetic construct
  source 1..20: mol_type = other DNA
agggttacaccggtccctaa

SEQ ID NO: 11420 - DNA, 20 bp, synthetic construct
  source 1..20: mol_type = other DNA
ccgcgttaaatcatgcgctt

SEQ ID NO: 11421 - DNA, 20 bp, synthetic construct
  source 1..20: mol_type = other DNA
atgcaccttagtccttcttt

SEQ ID NO: 11422 - DNA, 20 bp, synthetic construct
  source 1..20: mol_type = other DNA
agacccacgcattcctcacc

SEQ ID NO: 11423 - DNA, 20 bp, synthetic construct
  source 1..20: mol_type = other DNA
gtattgtctagggaatggtg

SEQ ID NO: 11424 - DNA, 20 bp, synthetic construct
  source 1..20: mol_type = other DNA
gcaccaattgagtgcataag

SEQ ID NO: 11425 - DNA, 20 bp, synthetic construct
  source 1..20: mol_type = other DNA
tctgatcagcaaacatgcaa

SEQ ID NO: 11426 - DNA, 20 bp, synthetic construct
  source 1..20: mol_type = other DNA
ctttcacaatttgttcccga

SEQ ID NO: 11427 - DNA, 20 bp, synthetic construct
  source 1..20: mol_type = other DNA
atgcctgggcaattaggtca

SEQ ID NO: 11428 - DNA, 20 bp, synthetic construct
  source 1..20: mol_type = other DNA
tgggtgaaatccatacttta

SEQ ID NO: 11429 - DNA, 20 bp, synthetic construct
  source 1..20: mol_type = other DNA
cccagcctatgtattcgcag

SEQ ID NO: 11430 - DNA, 20 bp, synthetic construct
  source 1..20: mol_type = other DNA
acaacgcacatggacgacct

SEQ ID NO: 11431 - DNA, 20 bp, synthetic construct
  source 1..20: mol_type = other DNA
gcggtactagatccgagttt

SEQ ID NO: 11432 - DNA, 20 bp, synthetic construct
  source 1..20: mol_type = other DNA
attctctatcaggacccaat

SEQ ID NO: 11433 - DNA, 20 bp, synthetic construct
  source 1..20: mol_type = other DNA
tgaggctacagtactcgcga

SEQ ID NO: 11434 - DNA, 20 bp, synthetic construct
  source 1..20: mol_type = other DNA
gtcgatttcagggcgcgagc

SEQ ID NO: 11435 - DNA, 20 bp, synthetic construct
  source 1..20: mol_type = other DNA
gttaaatttgcgacggcata

SEQ ID NO: 11436 - DNA, 20 bp, synthetic construct
  source 1..20: mol_type = other DNA
ggtgagcttattacatcaac

SEQ ID NO: 11437 - DNA, 20 bp, synthetic construct
  source 1..20: mol_type = other DNA
gcagtttccactgaccagga

SEQ ID NO: 11438 - DNA, 20 bp, synthetic construct
  source 1..20: mol_type = other DNA
gtacgatgcgccgcatttgg

SEQ ID NO: 11439 - DNA, 20 bp, synthetic construct
  source 1..20: mol_type = other DNA
cggcagcaaacagagagttg

SEQ ID NO: 11440 - DNA, 20 bp, synthetic construct
  source 1..20: mol_type = other DNA
cggacgcgaccgacgagtaa

SEQ ID NO: 11441 - DNA, 20 bp, synthetic construct
  source 1..20: mol_type = other DNA
gtaagggtgagttaagaagg

SEQ ID NO: 11442 - DNA, 20 bp, synthetic construct
  source 1..20: mol_type = other DNA
ccgcgtttcgaatatcttcc

SEQ ID NO: 11443 - DNA, 20 bp, synthetic construct
  source 1..20: mol_type = other DNA
agtccgtgctgactcctcga

SEQ ID NO: 11444 - DNA, 20 bp, synthetic construct
  source 1..20: mol_type = other DNA
tcggcagtaacccagactcg

SEQ ID NO: 11445 - DNA, 20 bp, synthetic construct
  source 1..20: mol_type = other DNA
agggccgcgtttgttatggc

SEQ ID NO: 11446 - DNA, 20 bp, synthetic construct
  source 1..20: mol_type = other DNA
atcgtacgctccaatggtca

SEQ ID NO: 11447 - DNA, 20 bp, synthetic construct
  source 1..20: mol_type = other DNA
cattatcggtcgtagcttcg

SEQ ID NO: 11448 - DNA, 20 bp, synthetic construct
  source 1..20: mol_type = other DNA
attcagagcctataatacag

SEQ ID NO: 11449 - DNA, 20 bp, synthetic construct
  source 1..20: mol_type = other DNA
tcactcggatgatagtgtac

SEQ ID NO: 11450 - DNA, 20 bp, synthetic construct
  source 1..20: mol_type = other DNA
aattgttgctgttggtgcgc

SEQ ID NO: 11451 - DNA, 20 bp, synthetic construct
  source 1..20: mol_type = other DNA
ccatcgcggtatataaagct

SEQ ID NO: 11452 - DNA, 20 bp, synthetic construct
  source 1..20: mol_type = other DNA
gaactccttacttctttgcg

SEQ ID NO: 11453 - DNA, 20 bp, synthetic construct
  source 1..20: mol_type = other DNA
tatctgaactacgagtgaac

SEQ ID NO: 11454 - DNA, 20 bp, synthetic construct
  source 1..20: mol_type = other DNA
gaactcctatcgtggagaat

SEQ ID NO: 11455 - DNA, 20 bp, synthetic construct
  source 1..20: mol_type = other DNA
ataattcagccaactagtgc

SEQ ID NO: 11456 - DNA, 20 bp, synthetic construct
  source 1..20: mol_type = other DNA
taaataaccgacaatgatga

SEQ ID NO: 11457 - DNA, 20 bp, synthetic construct
  source 1..20: mol_type = other DNA
atagatcacgcgctcaagtc

SEQ ID NO: 11458 - DNA, 20 bp, synthetic construct
  source 1..20: mol_type = other DNA
tggtgggaaatgtagctcgt

SEQ ID NO: 11459 - DNA, 20 bp, synthetic construct
  source 1..20: mol_type = other DNA
aactaagcaggtcaagattg

SEQ ID NO: 11460 - DNA, 20 bp, synthetic construct
  source 1..20: mol_type = other DNA
tgttctcacatggcttatga

SEQ ID NO: 11461 - DNA, 20 bp, synthetic construct
  source 1..20: mol_type = other DNA
gcggctctacaatgctctgc

SEQ ID NO: 11462 - DNA, 20 bp, synthetic construct
  source 1..20: mol_type = other DNA
atcaggcattcaactccttt

SEQ ID NO: 11463 - DNA, 20 bp, synthetic construct
  source 1..20: mol_type = other DNA
tctaactctaggccacggat

SEQ ID NO: 11464 - DNA, 20 bp, synthetic construct
  source 1..20: mol_type = other DNA
gtagactctagcgtgcttac

SEQ ID NO: 11465 - DNA, 20 bp, synthetic construct
  source 1..20: mol_type = other DNA
gccagtcccgaagttataaa

SEQ ID NO: 11466 - DNA, 20 bp, synthetic construct
  source 1..20: mol_type = other DNA
tctagtggctacgcgtagga

SEQ ID NO: 11467 - DNA, 20 bp, synthetic construct
  source 1..20: mol_type = other DNA
tagttgggcctgctaattat

SEQ ID NO: 11468 - DNA, 20 bp, synthetic construct
  source 1..20: mol_type = other DNA
agccgggtgactggattgca

SEQ ID NO: 11469 - DNA, 20 bp, synthetic construct
  source 1..20: mol_type = other DNA
ccctcgcacatgttagatct

SEQ ID NO: 11470 - DNA, 20 bp, synthetic construct
  source 1..20: mol_type = other DNA
ctcaaattgtcccagcggta

SEQ ID NO: 11471 - DNA, 20 bp, synthetic construct
  source 1..20: mol_type = other DNA
catatgcccagctcgtagta

SEQ ID NO: 11472 - DNA, 20 bp, synthetic construct
  source 1..20: mol_type = other DNA
catgtggcaaccctaccaag

SEQ ID NO: 11473 - DNA, 20 bp, synthetic construct
  source 1..20: mol_type = other DNA
ccggccgatggtaaccgtgt

SEQ ID NO: 11474 - DNA, 20 bp, synthetic construct
  source 1..20: mol_type = other DNA
cgtccttcaggctatcatcg

SEQ ID NO: 11475 - DNA, 20 bp, synthetic construct
  source 1..20: mol_type = other DNA
cgccgatcatttgtctcgga

SEQ ID NO: 11476 - DNA, 20 bp, synthetic construct
  source 1..20: mol_type = other DNA
ggaccaacaaggacgaagtt

SEQ ID NO: 11477 - DNA, 20 bp, synthetic construct
  source 1..20: mol_type = other DNA
ttataacaccaacgcgttga

SEQ ID NO: 11478 - DNA, 20 bp, synthetic construct
  source 1..20: mol_type = other DNA
tggtcgtttaggcaccgcac

SEQ ID NO: 11479 - DNA, 20 bp, synthetic construct
  source 1..20: mol_type = other DNA
cctcttcgatgacgaaagcc

SEQ ID NO: 11480 - DNA, 20 bp, synthetic construct
  source 1..20: mol_type = other DNA
atgaacgcagctctataaat

SEQ ID NO: 11481 - DNA, 20 bp, synthetic construct
  source 1..20: mol_type = other DNA
gacgactttcccaaggctta

SEQ ID NO: 11482 - DNA, 20 bp, synthetic construct
  source 1..20: mol_type = other DNA
catgcggttagctcggcgaa

SEQ ID NO: 11483 - DNA, 20 bp, synthetic construct
  source 1..20: mol_type = other DNA
tgtgaatcaccctaccggca

SEQ ID NO: 11484 - DNA, 20 bp, synthetic construct
  source 1..20: mol_type = other DNA
gaagtctcatttaatctacc

SEQ ID NO: 11485 - DNA, 20 bp, synthetic construct
  source 1..20: mol_type = other DNA
tagccacctaatacgggtac

SEQ ID NO: 11486 - DNA, 20 bp, synthetic construct
  source 1..20: mol_type = other DNA
tcccgcttatgcctttcaga

SEQ ID NO: 11487 - DNA, 20 bp, synthetic construct
  source 1..20: mol_type = other DNA
atgctttgagccattatact

SEQ ID NO: 11488 - DNA, 20 bp, synthetic construct
  source 1..20: mol_type = other DNA
gaggccatgatgtgcgtggg

SEQ ID NO: 11489 - DNA, 20 bp, synthetic construct
  source 1..20: mol_type = other DNA
ctgttcgacattaggattgg

SEQ ID NO: 11490 - DNA, 20 bp, synthetic construct
  source 1..20: mol_type = other DNA
cggccttgcggctttggtgt

SEQ ID NO: 11491 - DNA, 20 bp, synthetic construct
  source 1..20: mol_type = other DNA
tggttccgagtgcctcttag

SEQ ID NO: 11492 - DNA, 20 bp, synthetic construct
  source 1..20: mol_type = other DNA
catgccgaaaggtaagagca

SEQ ID NO: 11493 - DNA, 20 bp, synthetic construct
  source 1..20: mol_type = other DNA
acgctgtactgatagtctag

SEQ ID NO: 11494 - DNA, 20 bp, synthetic construct
  source 1..20: mol_type = other DNA
cttgtggtacgccgtatata

SEQ ID NO: 11495 - DNA, 20 bp, synthetic construct
  source 1..20: mol_type = other DNA
gttgcattattcatagggcg

SEQ ID NO: 11496 - DNA, 20 bp, synthetic construct
  source 1..20: mol_type = other DNA
gggcagaactagcaagacat

SEQ ID NO: 11497 - DNA, 20 bp, synthetic construct
  source 1..20: mol_type = other DNA
tattctcaggtcaccgcagc

SEQ ID NO: 11498 - DNA, 20 bp, synthetic construct
  source 1..20: mol_type = other DNA
tgtgcaattgtgtcccaagt

SEQ ID NO: 11499 - DNA, 20 bp, synthetic construct
  source 1..20: mol_type = other DNA
cttctggctcgtggctccgc

SEQ ID NO: 11500 - DNA, 20 bp, synthetic construct
  source 1..20: mol_type = other DNA
ttggcgctcagggctgagta

SEQ ID NO: 11501 - DNA, 20 bp, synthetic construct
  source 1..20: mol_type = other DNA
gcggtcgcctttatactaat

SEQ ID NO: 11502 - DNA, 20 bp, synthetic construct
  source 1..20: mol_type = other DNA
cgattctagtcgcgatcagc

SEQ ID NO: 11503 - DNA, 20 bp, synthetic construct
  source 1..20: mol_type = other DNA
gtccaccaccggctaaccat

SEQ ID NO: 11504 - DNA, 20 bp, synthetic construct
  source 1..20: mol_type = other DNA
ctaacttgagaacctggtgt

SEQ ID NO: 11505 - DNA, 20 bp, synthetic construct
  source 1..20: mol_type = other DNA
gatagattcgcttagattgt

SEQ ID NO: 11506 - DNA, 20 bp, synthetic construct
  source 1..20: mol_type = other DNA
ctcgcacttcgtcataggac

SEQ ID NO: 11507 - DNA, 20 bp, synthetic construct
  source 1..20: mol_type = other DNA
gactgccctactagcaggtg

SEQ ID NO: 11508 - DNA, 20 bp, synthetic construct
  source 1..20: mol_type = other DNA
acatgaatgagagcgcccta

SEQ ID NO: 11509 - DNA, 20 bp, synthetic construct
  source 1..20: mol_type = other DNA
caaatttcgcatttaggccg

SEQ ID NO: 11510 - DNA, 20 bp, synthetic construct
  source 1..20: mol_type = other DNA
cgctctgagctcctgcagag

SEQ ID NO: 11511 - DNA, 20 bp, synthetic construct
  source 1..20: mol_type = other DNA
taggcctcctcacgtcctga

SEQ ID NO: 11512 - DNA, 20 bp, synthetic construct
  source 1..20: mol_type = other DNA
tacaagccacgtacattgcg

SEQ ID NO: 11513 - DNA, 20 bp, synthetic construct
  source 1..20: mol_type = other DNA
ggtttgttcaggcacaccaa

SEQ ID NO: 11514 - DNA, 20 bp, synthetic construct
  source 1..20: mol_type = other DNA
atggcgtaataggagttagg

SEQ ID NO: 11515 - DNA, 20 bp, synthetic construct
  source 1..20: mol_type = other DNA
acggcattcgtcattagtgg

SEQ ID NO: 11516 - DNA, 20 bp, synthetic construct
  source 1..20: mol_type = other DNA
aagggtaatgtacgagttat

SEQ ID NO: 11517 - DNA, 20 bp, synthetic construct
  source 1..20: mol_type = other DNA
agaacgatgtagccaggcgc

SEQ ID NO: 11518 - DNA, 20 bp, synthetic construct
  source 1..20: mol_type = other DNA
acgccacgtcgccggatgct

SEQ ID NO: 11519 - DNA, 20 bp, synthetic construct
  source 1..20: mol_type = other DNA
gcgaacagttgatgctcttt

SEQ ID NO: 11520 - DNA, 20 bp, synthetic construct
  source 1..20: mol_type = other DNA
agcgactcctgagcatagta

SEQ ID NO: 11521 - DNA, 20 bp, synthetic construct
  source 1..20: mol_type = other DNA
tattggtttctgatggcgcc

SEQ ID NO: 11522 - DNA, 20 bp, synthetic construct
  source 1..20: mol_type = other DNA
ttgtctggataaactaggag

SEQ ID NO: 11523 - DNA, 20 bp, synthetic construct
  source 1..20: mol_type = other DNA
cgattctccagaccaacaca

SEQ ID NO: 11524 - DNA, 20 bp, synthetic construct
  source 1..20: mol_type = other DNA
actccgtaaccgaaatccat

SEQ ID NO: 11525 - DNA, 20 bp, synthetic construct
  source 1..20: mol_type = other DNA
atcgccgaggaaactctgac

SEQ ID NO: 11526 - DNA, 20 bp, synthetic construct
  source 1..20: mol_type = other DNA
tggaggatgcctccagtagc

SEQ ID NO: 11527 - DNA, 20 bp, synthetic construct
  source 1..20: mol_type = other DNA
gcagcctagtccctaaaccg

SEQ ID NO: 11528 - DNA, 20 bp, synthetic construct
  source 1..20: mol_type = other DNA
agggacagcttacctataaa

SEQ ID NO: 11529 - DNA, 20 bp, synthetic construct
  source 1..20: mol_type = other DNA
ggacaggacggtggtttatc

SEQ ID NO: 11530 - DNA, 20 bp, synthetic construct
  source 1..20: mol_type = other DNA
tcggccacctttagcatctg

SEQ ID NO: 11531 - DNA, 20 bp, synthetic construct
  source 1..20: mol_type = other DNA
tttgtccaacgaggcctgta

SEQ ID NO: 11532 - DNA, 20 bp, synthetic construct
  source 1..20: mol_type = other DNA
cctcagcgagtacacgcgaa

SEQ ID NO: 11533 - DNA, 20 bp, synthetic construct
  source 1..20: mol_type = other DNA
cgcatcctaccagctcaacc

SEQ ID NO: 11534 - DNA, 20 bp, synthetic construct
  source 1..20: mol_type = other DNA
gtaacatacgaaagcgagtt

SEQ ID NO: 11535 - DNA, 20 bp, synthetic construct
  source 1..20: mol_type = other DNA
gtaagtgcagtgggtattca

SEQ ID NO: 11536 - DNA, 20 bp, synthetic construct
  source 1..20: mol_type = other DNA
gcgcaatgataacacctgca

SEQ ID NO: 11537 - DNA, 20 bp, synthetic construct
  source 1..20: mol_type = other DNA
catgaccggctgattacttt

SEQ ID NO: 11538 - DNA, 20 bp, synthetic construct
  source 1..20: mol_type = other DNA
attggatcacgctacatcat

SEQ ID NO: 11539 - DNA, 20 bp, synthetic construct
  source 1..20: mol_type = other DNA
tggacacccttacatggcgg

SEQ ID NO: 11540 - DNA, 20 bp, synthetic construct
  source 1..20: mol_type = other DNA
gcagggaatttacaaacaaa

SEQ ID NO: 11541 - DNA, 20 bp, synthetic construct
  source 1..20: mol_type = other DNA
atggacatcgtcgtgactgg

SEQ ID NO: 11542 - DNA, 20 bp, synthetic construct
  source 1..20: mol_type = other DNA
ataacgcggcccttctacag

SEQ ID NO: 11543 - DNA, 20 bp, synthetic construct
  source 1..20: mol_type = other DNA
cctccacgaatatgtgcgta

SEQ ID NO: 11544 - DNA, 20 bp, synthetic construct
  source 1..20: mol_type = other DNA
gctacctgcgcagagacaaa

SEQ ID NO: 11545 - DNA, 20 bp, synthetic construct
  source 1..20: mol_type = other DNA
cgccgaaggagcctggtaac

SEQ ID NO: 11546 - DNA, 20 bp, synthetic construct
  source 1..20: mol_type = other DNA
gatcaggtctcggaacttgt

SEQ ID NO: 11547 - DNA, 20 bp, synthetic construct
  source 1..20: mol_type = other DNA
accggtcgattctcctgcaa

SEQ ID NO: 11548 - DNA, 20 bp, synthetic construct
  source 1..20: mol_type = other DNA
gcactgtcctagaactcaac

SEQ ID NO: 11549 - DNA, 20 bp, synthetic construct
  source 1..20: mol_type = other DNA
acatatgaaacgtgcagagc

SEQ ID NO: 11550 - DNA, 20 bp, synthetic construct
  source 1..20: mol_type = other DNA
tataggaaggatgaactagg

SEQ ID NO: 11551 - DNA, 20 bp, synthetic construct
  source 1..20: mol_type = other DNA
agggtacgggtgagagtcga

SEQ ID NO: 11552 - DNA, 20 bp, synthetic construct
  source 1..20: mol_type = other DNA
gcgtacacgtgcgtagcacc

SEQ ID NO: 11553 - DNA, 20 bp, synthetic construct
  source 1..20: mol_type = other DNA
gtcaacacccattccttatt

SEQ ID NO: 11554 - DNA, 20 bp, synthetic construct
  source 1..20: mol_type = other DNA
aagcgcgtaggttcagactg

SEQ ID NO: 11555 - DNA, 20 bp, synthetic construct
  source 1..20: mol_type = other DNA
cgcttagccggtaccagcag

SEQ ID NO: 11556 - DNA, 20 bp, synthetic construct
  source 1..20: mol_type = other DNA
catttcagccacgagaaaga

SEQ ID NO: 11557 - DNA, 20 bp, synthetic construct
  source 1..20: mol_type = other DNA
ttgttcgcactctcccattg

SEQ ID NO: 11558 - DNA, 20 bp, synthetic construct
  source 1..20: mol_type = other DNA
catctcctgtacatggaggc

SEQ ID NO: 11559 - DNA, 20 bp, synthetic construct
  source 1..20: mol_type = other DNA
tctcgttgataagttcacgg

SEQ ID NO: 11560 - DNA, 20 bp, synthetic construct
  source 1..20: mol_type = other DNA
ctaatagaatggcattcgct

SEQ ID NO: 11561 - DNA, 20 bp, synthetic construct
  source 1..20: mol_type = other DNA
actctctggatacttagata

SEQ ID NO: 11562 - DNA, 20 bp, synthetic construct
  source 1..20: mol_type = other DNA
acgtttatcacagccgtgat

SEQ ID NO: 11563 - DNA, 20 bp, synthetic construct
  source 1..20: mol_type = other DNA
gcatggtgtatgtgcagcat

SEQ ID NO: 11564 - DNA, 20 bp, synthetic construct
  source 1..20: mol_type = other DNA
ggcggcttcaccgctactgt

SEQ ID NO: 11565 - DNA, 20 bp, synthetic construct
  source 1..20: mol_type = other DNA
gacaccgtttgctcggacag

SEQ ID NO: 11566 - DNA, 20 bp, synthetic construct
  source 1..20: mol_type = other DNA
attcaacaagccgctaacag

SEQ ID NO: 11567 - DNA, 20 bp, synthetic construct
  source 1..20: mol_type = other DNA
tatcgaatctaaggtcacgc

SEQ ID NO: 11568 - DNA, 20 bp, synthetic construct
  source 1..20: mol_type = other DNA
gtggtagcgtccgaatttgg

SEQ ID NO: 11569 - DNA, 20 bp, synthetic construct
  source 1..20: mol_type = other DNA
gagggagatgtacgagtgac

SEQ ID NO: 11570 - DNA, 20 bp, synthetic construct
  source 1..20: mol_type = other DNA
ctgacggtgcgtactaacag

SEQ ID NO: 11571 - DNA, 20 bp, synthetic construct
  source 1..20: mol_type = other DNA
accggagcatggaaaccaga

SEQ ID NO: 11572 - DNA, 20 bp, synthetic construct
  source 1..20: mol_type = other DNA
ttagctgccagcgcttgcaa

SEQ ID NO: 11573 - DNA, 20 bp, synthetic construct
  source 1..20: mol_type = other DNA
tctgtcgtagaatacgtcac

SEQ ID NO: 11574 - DNA, 20 bp, synthetic construct
  source 1..20: mol_type = other DNA
tgcctttacgaacccgcggg

SEQ ID NO: 11575 - DNA, 20 bp, synthetic construct
  source 1..20: mol_type = other DNA
agcaaagctatggtgcgagg

SEQ ID NO: 11576 - DNA, 20 bp, synthetic construct
  source 1..20: mol_type = other DNA
ataatgcgggtcgcttaccc

SEQ ID NO: 11577 - DNA, 20 bp, synthetic construct
  source 1..20: mol_type = other DNA
tctggaatgactgtcctggt

SEQ ID NO: 11578 - DNA, 20 bp, synthetic construct
  source 1..20: mol_type = other DNA
aggcgaggctatttagaaga

SEQ ID NO: 11579 - DNA, 20 bp, synthetic construct
  source 1..20: mol_type = other DNA
gcgtcccatgctattacgcc

SEQ ID NO: 11580 - DNA, 20 bp, synthetic construct
  source 1..20: mol_type = other DNA
cttctctcacaagtggccga

SEQ ID NO: 11581 - DNA, 20 bp, synthetic construct
  source 1..20: mol_type = other DNA
tatgtacaggcctcaattaa

SEQ ID NO: 11582 - DNA, 20 bp, synthetic construct
  source 1..20: mol_type = other DNA
cgtgaggtgttgagcaagct

SEQ ID NO: 11583 - DNA, 20 bp, synthetic construct
  source 1..20: mol_type = other DNA
acgggtgcgtttgattaggc

SEQ ID NO: 11584 - DNA, 20 bp, synthetic construct
  source 1..20: mol_type = other DNA
cccaggtatgtgtttggttg

SEQ ID NO: 11585 - DNA, 20 bp, synthetic construct
  source 1..20: mol_type = other DNA
gtggagtcgaaggtaggctc

SEQ ID NO: 11586 - DNA, 20 bp, synthetic construct
  source 1..20: mol_type = other DNA
gagcaccggagacaacatcg

SEQ ID NO: 11587 - DNA, 20 bp, synthetic construct
  source 1..20: mol_type = other DNA
gcgtagatagtgacgggcgc

SEQ ID NO: 11588 - DNA, 20 bp, synthetic construct
  source 1..20: mol_type = other DNA
cgctattccagctcagcacc

SEQ ID NO: 11589 - DNA, 20 bp, synthetic construct
  source 1..20: mol_type = other DNA
gaaacgcaatggcgttctgg

SEQ ID NO: 11590 - DNA, 20 bp, synthetic construct
  source 1..20: mol_type = other DNA
ttccaggcggtggaatctaa

SEQ ID NO: 11591 - DNA, 20 bp, synthetic construct
  source 1..20: mol_type = other DNA
ttcccggtagacgatctcca

SEQ ID NO: 11592 - DNA, 20 bp, synthetic construct
  source 1..20: mol_type = other DNA
cacaatgtcctatcaaatac

SEQ ID NO: 11593 - DNA, 20 bp, synthetic construct
  source 1..20: mol_type = other DNA
ctgagtaccggaaggctcgc

SEQ ID NO: 11594 - DNA, 20 bp, synthetic construct
  source 1..20: mol_type = other DNA
atggataaagtgcgtacttc

SEQ ID NO: 11595 - DNA, 20 bp, synthetic construct
  source 1..20: mol_type = other DNA
cctgatgatcggcttagagt

SEQ ID NO: 11596 - DNA, 20 bp, synthetic construct
  source 1..20: mol_type = other DNA
ctgcaaactcgttacatgct

SEQ ID NO: 11597 - DNA, 20 bp, synthetic construct
  source 1..20: mol_type = other DNA
taataagtgtcatcggttac

SEQ ID NO: 11598 - DNA, 20 bp, synthetic construct
  source 1..20: mol_type = other DNA
tttataccgacagggctcac

SEQ ID NO: 11599 - DNA, 20 bp, synthetic construct
  source 1..20: mol_type = other DNA
atataactctatgacggtca

SEQ ID NO: 11600 - DNA, 20 bp, synthetic construct
  source 1..20: mol_type = other DNA
gtacaccaggtctaaacaat

SEQ ID NO: 11601 - DNA, 20 bp, synthetic construct
  source 1..20: mol_type = other DNA
tacggcaaccgtgcataatg

SEQ ID NO: 11602 - DNA, 20 bp, synthetic construct
  source 1..20: mol_type = other DNA
tcgaggcgtttgtatgcagg

SEQ ID NO: 11603 - DNA, 20 bp, synthetic construct
  source 1..20: mol_type = other DNA
ccaatgcccacgtcaaatcc

SEQ ID NO: 11604 - DNA, 20 bp, synthetic construct
  source 1..20: mol_type = other DNA
ttaattcacacgagatgtaa

SEQ ID NO: 11605 - DNA, 20 bp, synthetic construct
  source 1..20: mol_type = other DNA
acgggaaataatccaccata

SEQ ID NO: 11606 - DNA, 20 bp, synthetic construct
  source 1..20: mol_type = other DNA
cgtaggccatcagccggttt

SEQ ID NO: 11607 - DNA, 20 bp, synthetic construct
  source 1..20: mol_type = other DNA
ccaatgtggaggtcaattta

SEQ ID NO: 11608 - DNA, 20 bp, synthetic construct
  source 1..20: mol_type = other DNA
tcaggtaccgatgaatggca

SEQ ID NO: 11609 - DNA, 20 bp, synthetic construct
  source 1..20: mol_type = other DNA
catctcccgtcccgctcagt

SEQ ID NO: 11610 - DNA, 20 bp, synthetic construct
  source 1..20: mol_type = other DNA
tcgcaaataatacaacggtg

SEQ ID NO: 11611 - DNA, 20 bp, synthetic construct
  source 1..20: mol_type = other DNA
aaatggaacttaaaggcgcc

SEQ ID NO: 11612 - DNA, 20 bp, synthetic construct
  source 1..20: mol_type = other DNA
catcgtgctaaagctgaagg

SEQ ID NO: 11613 - DNA, 20 bp, synthetic construct
  source 1..20: mol_type = other DNA
aactgcatcctaatcatcta

SEQ ID NO: 11614 - DNA, 20 bp, synthetic construct
  source 1..20: mol_type = other DNA
actctataagcagcgagacg

SEQ ID NO: 11615 - DNA, 20 bp, synthetic construct
  source 1..20: mol_type = other DNA
cggacccttgctccaatagg

SEQ ID NO: 11616 - DNA, 20 bp, synthetic construct
  source 1..20: mol_type = other DNA
gtgatctaccacaacgcgtg

SEQ ID NO: 11617 - DNA, 20 bp, synthetic construct
  source 1..20: mol_type = other DNA
atagttggtgtggcaataac

SEQ ID NO: 11618 - DNA, 20 bp, synthetic construct
  source 1..20: mol_type = other DNA
ggaagtctttcacttctgca

SEQ ID NO: 11619 - DNA, 20 bp, synthetic construct
  source 1..20: mol_type = other DNA
aatcgtggaaagtgtgcggg

SEQ ID NO: 11620 - DNA, 20 bp, synthetic construct
  source 1..20: mol_type = other DNA
ccggactcgttgagtatgcg

SEQ ID NO: 11621 - DNA, 20 bp, synthetic construct
  source 1..20: mol_type = other DNA
gcatccgagtgcgtgcaagg

SEQ ID NO: 11622 - DNA, 20 bp, synthetic construct
  source 1..20: mol_type = other DNA
gtaagaaagggtgggcacat

SEQ ID NO: 11623 - DNA, 20 bp, synthetic construct
  source 1..20: mol_type = other DNA
aagtagtgcggtatagacaa

SEQ ID NO: 11624 - DNA, 20 bp, synthetic construct
  source 1..20: mol_type = other DNA
ctgctaatttatggaactga

SEQ ID NO: 11625 - DNA, 20 bp, synthetic construct
  source 1..20: mol_type = other DNA
aatgcgcagggtatatacaa

SEQ ID NO: 11626 - DNA, 20 bp, synthetic construct
  source 1..20: mol_type = other DNA
ggtgttgtgtgagaaaccgc

SEQ ID NO: 11627 - DNA, 20 bp, synthetic construct
  source 1..20: mol_type = other DNA
cacttcgcacgagacaagaa

SEQ ID NO: 11628 - DNA, 20 bp, synthetic construct
  source 1..20: mol_type = other DNA
cgcgagtcagatcttaactg

SEQ ID NO: 11629 - DNA, 20 bp, synthetic construct
  source 1..20: mol_type = other DNA
agatggcctgtttattaatc

SEQ ID NO: 11630 - DNA, 20 bp, synthetic construct
  source 1..20: mol_type = other DNA
ttcacggctaggacccgttc

SEQ ID NO: 11631 - DNA, 20 bp, synthetic construct
  source 1..20: mol_type = other DNA
agaacacagaagaatgggtt

SEQ ID NO: 11632 - DNA, 20 bp, synthetic construct
  source 1..20: mol_type = other DNA
ggtccggtattgcgtgctgt

SEQ ID NO: 11633 - DNA, 20 bp, synthetic construct
  source 1..20: mol_type = other DNA
ccgtccgataactcgcgaac

SEQ ID NO: 11634 - DNA, 20 bp, synthetic construct
  source 1..20: mol_type = other DNA
tcagcacagagatattgagc

SEQ ID NO: 11635 - DNA, 20 bp, synthetic construct
  source 1..20: mol_type = other DNA
acggcatggagtgcgtcgaa

SEQ ID NO: 11636 - DNA, 20 bp, synthetic construct
  source 1..20: mol_type = other DNA
gccaacgaagaacactcgcg

SEQ ID NO: 11637 - DNA, 20 bp, synthetic construct
  source 1..20: mol_type = other DNA
tttgacgggcaaccgtctct

SEQ ID NO: 11638 - DNA, 20 bp, synthetic construct
  source 1..20: mol_type = other DNA
aaacgtaatgtacatccaca

SEQ ID NO: 11639 - DNA, 20 bp, synthetic construct
  source 1..20: mol_type = other DNA
aagagatcgcaaggataaat

SEQ ID NO: 11640 - DNA, 20 bp, synthetic construct
  source 1..20: mol_type = other DNA
acccaggttggcaggtttat

SEQ ID NO: 11641 - DNA, 20 bp, synthetic construct
  source 1..20: mol_type = other DNA
gtccctgattagtgattcgt

SEQ ID NO: 11642 - DNA, 20 bp, synthetic construct
  source 1..20: mol_type = other DNA
gagccggtctgacagttatt

SEQ ID NO: 11643 - DNA, 20 bp, synthetic construct
  source 1..20: mol_type = other DNA
ggtgctgttactctctggga

SEQ ID NO: 11644 - DNA, 20 bp, synthetic construct
  source 1..20: mol_type = other DNA
tcattacactgggagccgtc

SEQ ID NO: 11645 - DNA, 20 bp, synthetic construct
  source 1..20: mol_type = other DNA
gtgcggaaccagagttcaca

SEQ ID NO: 11646 - DNA, 20 bp, synthetic construct
  source 1..20: mol_type = other DNA
gtgtctcatccgtcaaatat

SEQ ID NO: 11647 - DNA, 20 bp, synthetic construct
  source 1..20: mol_type = other DNA
ggcaaactgtgatgaggttc

SEQ ID NO: 11648 - DNA, 20 bp, synthetic construct
  source 1..20: mol_type = other DNA
accctgccgtactaggtata

SEQ ID NO: 11649 - DNA, 20 bp, synthetic construct
  source 1..20: mol_type = other DNA
gtcctaattcgtcatctagt

SEQ ID NO: 11650 - DNA, 20 bp, synthetic construct
  source 1..20: mol_type = other DNA
tggagtatagtcagttggtc

SEQ ID NO: 11651 - DNA, 20 bp, synthetic construct
  source 1..20: mol_type = other DNA
gagcaagttggtcctctgct

SEQ ID NO: 11652 - DNA, 20 bp, synthetic construct
  source 1..20: mol_type = other DNA
gaatacgacttgtgctgcca

SEQ ID NO: 11653 - DNA, 20 bp, synthetic construct
  source 1..20: mol_type = other DNA
actactgacaggtccacgga

SEQ ID NO: 11654 - DNA, 20 bp, synthetic construct
  source 1..20: mol_type = other DNA
agctatcatggcaaatgact

SEQ ID NO: 11655 - DNA, 20 bp, synthetic construct
  source 1..20: mol_type = other DNA
acagaaacccttaccacaga

SEQ ID NO: 11656 - DNA, 20 bp, synthetic construct
  source 1..20: mol_type = other DNA
caagagagatgccgcggtac

SEQ ID NO: 11657 - DNA, 20 bp, synthetic construct
  source 1..20: mol_type = other DNA
gatcctgacctgttatcagt

SEQ ID NO: 11658 - DNA, 20 bp, synthetic construct
  source 1..20: mol_type = other DNA
actttaggccaagggtgaca

SEQ ID NO: 11659 - DNA, 20 bp, synthetic construct
  source 1..20: mol_type = other DNA
tgtgtatcatcgagatgggc

SEQ ID NO: 11660 - DNA, 20 bp, synthetic construct
  source 1..20: mol_type = other DNA
acccttcccactggtgcgct

SEQ ID NO: 11661 - DNA, 20 bp, synthetic construct
  source 1..20: mol_type = other DNA
tatatatgaggcatggatgc

SEQ ID NO: 11662 - DNA, 20 bp, synthetic construct
  source 1..20: mol_type = other DNA
tgctgccatgttagtcgaag

SEQ ID NO: 11663 - DNA, 20 bp, synthetic construct
  source 1..20: mol_type = other DNA
attctgtcgagcacaggttc

SEQ ID NO: 11664 - DNA, 20 bp, synthetic construct
  source 1..20: mol_type = other DNA
tatactatagcagctggttg

SEQ ID NO: 11665 - DNA, 20 bp, synthetic construct
  source 1..20: mol_type = other DNA
tcacgaaatgacatgtatca

SEQ ID NO: 11666 - DNA, 20 bp, synthetic construct
  source 1..20: mol_type = other DNA
aagtgctggctcgacgattg

SEQ ID NO: 11667 - DNA, 20 bp, synthetic construct
  source 1..20: mol_type = other DNA
tacgccgatggcttacagag

SEQ ID NO: 11668 - DNA, 20 bp, synthetic construct
  source 1..20: mol_type = other DNA
aagccaggcctagtctaccg

SEQ ID NO: 11669 - DNA, 20 bp, synthetic construct
  source 1..20: mol_type = other DNA
gacccgatgacatcaccaaa

SEQ ID NO: 11670 - DNA, 20 bp, synthetic construct
  source 1..20: mol_type = other DNA
ccgcaatggtcgagagtaac

SEQ ID NO: 11671 - DNA, 20 bp, synthetic construct
  source 1..20: mol_type = other DNA
accgcaaaggcctcatgcta

SEQ ID NO: 11672 - DNA, 20 bp, synthetic construct
  source 1..20: mol_type = other DNA
aggtccatgtcagaatgtac

SEQ ID NO: 11673 - DNA, 20 bp, synthetic construct
  source 1..20: mol_type = other DNA
gtcgtgtcagacaaatgtct

SEQ ID NO: 11674 - DNA, 20 bp, synthetic construct
  source 1..20: mol_type = other DNA
agcattaaactctctaatcg

SEQ ID NO: 11675 - DNA, 20 bp, synthetic construct
  source 1..20: mol_type = other DNA
gcctaagtagcttgataatc

SEQ ID NO: 11676 - DNA, 20 bp, synthetic construct
  source 1..20: mol_type = other DNA
gagacgatctagttgtaccg

SEQ ID NO: 11677 - DNA, 20 bp, synthetic construct
  source 1..20: mol_type = other DNA
tcctcaattgcacctctgac

SEQ ID NO: 11678 - DNA, 20 bp, synthetic construct
  source 1..20: mol_type = other DNA
atgagcaattacctcaggta

SEQ ID NO: 11679 - DNA, 20 bp, synthetic construct
  source 1..20: mol_type = other DNA
actgcactaagaaatacgac

SEQ ID NO: 11680 - DNA, 20 bp, synthetic construct
  source 1..20: mol_type = other DNA
gcattgtgtgagtgtcgaac

SEQ ID NO: 11681 - DNA, 20 bp, synthetic construct
  source 1..20: mol_type = other DNA
gcccacttcatcatcaacgt

SEQ ID NO: 11682 - DNA, 20 bp, synthetic construct
  source 1..20: mol_type = other DNA
gctccgcatcgcgtaaagtc

SEQ ID NO: 11683 - DNA, 20 bp, synthetic construct
  source 1..20: mol_type = other DNA
ccggcaaagtttagtagctc

SEQ ID NO: 11684 - DNA, 20 bp, synthetic construct
  source 1..20: mol_type = other DNA
actcagcggtattccggtgg

SEQ ID NO: 11685 - DNA, 20 bp, synthetic construct
  source 1..20: mol_type = other DNA
cgcccgtcacacccgtctat

SEQ ID NO: 11686 - DNA, 20 bp, synthetic construct
  source 1..20: mol_type = other DNA
gaaatagatcaggccgtggg

SEQ ID NO: 11687 - DNA, 20 bp, synthetic construct
  source 1..20: mol_type = other DNA
aatactagccgatctttgac

SEQ ID NO: 11688 - DNA, 20 bp, synthetic construct
  source 1..20: mol_type = other DNA
tccagccagccgtaggtaat

SEQ ID NO: 11689 - DNA, 20 bp, synthetic construct
  source 1..20: mol_type = other DNA
cttaggacagcaaacaggcg

SEQ ID NO: 11690 - DNA, 20 bp, synthetic construct
  source 1..20: mol_type = other DNA
ataatgcggcccagagcctc

SEQ ID NO: 11691 - DNA, 20 bp, synthetic construct
  source 1..20: mol_type = other DNA
tgcttagtacatgactttac

SEQ ID NO: 11692 - DNA, 20 bp, synthetic construct
  source 1..20: mol_type = other DNA
tagcgagtttctatgtaggg

SEQ ID NO: 11693 - DNA, 20 bp, synthetic construct
  source 1..20: mol_type = other DNA
caaggtactagggtgctaca

SEQ ID NO: 11694 - DNA, 20 bp, synthetic construct
  source 1..20: mol_type = other DNA
acccatcgagcgaagcaact

SEQ ID NO: 11695 - DNA, 20 bp, synthetic construct
  source 1..20: mol_type = other DNA
gggttggtcggccagatcct

SEQ ID NO: 11696 - DNA, 20 bp, synthetic construct
  source 1..20: mol_type = other DNA
ccaaacatattcatccgtaa

SEQ ID NO: 11697 - DNA, 20 bp, synthetic construct
  source 1..20: mol_type = other DNA
agcggatagtcttgtggatt

SEQ ID NO: 11698 - DNA, 20 bp, synthetic construct
  source 1..20: mol_type = other DNA
atatatgtggccttcccttc

SEQ ID NO: 11699 - DNA, 20 bp, synthetic construct
  source 1..20: mol_type = other DNA
ttgcggcagcctttgacgtg

SEQ ID NO: 11700 - DNA, 20 bp, synthetic construct
  source 1..20: mol_type = other DNA
ccatcccttgtacaaatatc

SEQ ID NO: 11701 - DNA, 20 bp, synthetic construct
  source 1..20: mol_type = other DNA
ctcgttgcataaagtccagg

SEQ ID NO: 11702 - DNA, 20 bp, synthetic construct
  source 1..20: mol_type = other DNA
gcgcgcctttcgagcgtgtc

SEQ ID NO: 11703 - DNA, 20 bp, synthetic construct
  source 1..20: mol_type = other DNA
gtgattctacactgggccta

SEQ ID NO: 11704 - DNA, 20 bp, synthetic construct
  source 1..20: mol_type = other DNA
acgagtgttcctgcaagctc

SEQ ID NO: 11705 - DNA, 20 bp, synthetic construct
  source 1..20: mol_type = other DNA
cgcgctcaaatgcatagcaa

SEQ ID NO: 11706 - DNA, 20 bp, synthetic construct
  source 1..20: mol_type = other DNA
cggcgacacaccattaacgc

SEQ ID NO: 11707 - DNA, 20 bp, synthetic construct
  source 1..20: mol_type = other DNA
tcaggcatggcagctttatt

SEQ ID NO: 11708 - DNA, 20 bp, synthetic construct
  source 1..20: mol_type = other DNA
gcgggtatatgtacggactc

SEQ ID NO: 11709 - DNA, 20 bp, synthetic construct
  source 1..20: mol_type = other DNA
cttaggatagacgcagttag

SEQ ID NO: 11710 - DNA, 20 bp, synthetic construct
  source 1..20: mol_type = other DNA
cccataggtcaaggactccc

SEQ ID NO: 11711 - DNA, 20 bp, synthetic construct
  source 1..20: mol_type = other DNA
gtcgaatagagtaatgcttg

SEQ ID NO: 11712 - DNA, 20 bp, synthetic construct
  source 1..20: mol_type = other DNA
tattgacgatgtgtatgcgc

SEQ ID NO: 11713 - DNA, 20 bp, synthetic construct
  source 1..20: mol_type = other DNA
tacggagattgatctattgg

SEQ ID NO: 11714 - DNA, 20 bp, synthetic construct
  source 1..20: mol_type = other DNA
tagaaccttgccctaccaga

SEQ ID NO: 11715 - DNA, 20 bp, synthetic construct
  source 1..20: mol_type = other DNA
cacatcgggaagttgccgga

SEQ ID NO: 11716 - DNA, 20 bp, synthetic construct
  source 1..20: mol_type = other DNA
tataagtcgcacaccagtgg

SEQ ID NO: 11717 - DNA, 20 bp, synthetic construct
  source 1..20: mol_type = other DNA
gagacgaatcttaagagccg

SEQ ID NO: 11718 - DNA, 20 bp, synthetic construct
  source 1..20: mol_type = other DNA
ctaagacgcttgcctcaccg

SEQ ID NO: 11719 - DNA, 20 bp, synthetic construct
  source 1..20: mol_type = other DNA
tcgccgtgagtaacctattg

SEQ ID NO: 11720 - DNA, 20 bp, synthetic construct
  source 1..20: mol_type = other DNA
ggctaaaggctacagggaag

SEQ ID NO: 11721 - DNA, 20 bp, synthetic construct
  source 1..20: mol_type = other DNA
cgcacactttcggtcaccaa

SEQ ID NO: 11722 - DNA, 20 bp, synthetic construct
  source 1..20: mol_type = other DNA
gcgtaggtgtatatgaggag

SEQ ID NO: 11723 - DNA, 20 bp, synthetic construct
  source 1..20: mol_type = other DNA
cttcgggcaccactggcaat

SEQ ID NO: 11724 - DNA, 20 bp, synthetic construct
  source 1..20: mol_type = other DNA
ttaagtctattcattgaggc

SEQ ID NO: 11725 - DNA, 20 bp, synthetic construct
  source 1..20: mol_type = other DNA
gattacgaagttgtatcttg

SEQ ID NO: 11726 - DNA, 20 bp, synthetic construct
  source 1..20: mol_type = other DNA
tgccgcataaagaactacca

SEQ ID NO: 11727 - DNA, 20 bp, synthetic construct
  source 1..20: mol_type = other DNA
aagtatcagcaactgcattc

SEQ ID NO: 11728 - DNA, 20 bp, synthetic construct
  source 1..20: mol_type = other DNA
gctcaacgccgtctgactaa

SEQ ID NO: 11729 - DNA, 20 bp, synthetic construct
  source 1..20: mol_type = other DNA
ctgatacaccgatagtcggt

SEQ ID NO: 11730 - DNA, 20 bp, synthetic construct
  source 1..20: mol_type = other DNA
gttcaccatatagatgtgcg

SEQ ID NO: 11731 - DNA, 20 bp, synthetic construct
  source 1..20: mol_type = other DNA
tcacagcaccactccgcaag

SEQ ID NO: 11732 - DNA, 20 bp, synthetic construct
  source 1..20: mol_type = other DNA
ctttcggtgtaatttccgac

SEQ ID NO: 11733 - DNA, 20 bp, synthetic construct
  source 1..20: mol_type = other DNA
ggtgctttgtgcgagctagg

SEQ ID NO: 11734 - DNA, 20 bp, synthetic construct
  source 1..20: mol_type = other DNA
attgcgaccaccgagacagt

SEQ ID NO: 11735 - DNA, 20 bp, synthetic construct
  source 1..20: mol_type = other DNA
ttctggttgctgagtgcgtg

SEQ ID NO: 11736 - DNA, 20 bp, synthetic construct
  source 1..20: mol_type = other DNA
gcctcacccattcactagct

SEQ ID NO: 11737 - DNA, 20 bp, synthetic construct
  source 1..20: mol_type = other DNA
gcccatgcgctttgggcagt

SEQ ID NO: 11738 - DNA, 20 bp, synthetic construct
  source 1..20: mol_type = other DNA
tggatacactgcctctcctc

SEQ ID NO: 11739 - DNA, 20 bp, synthetic construct
  source 1..20: mol_type = other DNA
gatacctatacagccagttc

SEQ ID NO: 11740 - DNA, 20 bp, synthetic construct
  source 1..20: mol_type = other DNA
tcatccttcaatttaagccg

SEQ ID NO: 11741 - DNA, 20 bp, synthetic construct
  source 1..20: mol_type = other DNA
gtttaatataggcgcgcgcc

SEQ ID NO: 11742 - DNA, 20 bp, synthetic construct
  source 1..20: mol_type = other DNA
gaagtcaggcgtcacagaca

SEQ ID NO: 11743 - DNA, 20 bp, synthetic construct
  source 1..20: mol_type = other DNA
cagaaccataaactttcggt

SEQ ID NO: 11744 - DNA, 20 bp, synthetic construct
  source 1..20: mol_type = other DNA
aataccgacaattaggtacg

SEQ ID NO: 11745 - DNA, 20 bp, synthetic construct
  source 1..20: mol_type = other DNA
tctcattgccgtagaccgac

SEQ ID NO: 11746 - DNA, 20 bp, synthetic construct
  source 1..20: mol_type = other DNA
cattactacgacgggctatt

SEQ ID NO: 11747 - DNA, 20 bp, synthetic construct
  source 1..20: mol_type = other DNA
acatagtagcggctccactc

SEQ ID NO: 11748 - DNA, 20 bp, synthetic construct
  source 1..20: mol_type = other DNA
ctagagcgccctgcattgtt

SEQ ID NO: 11749 - DNA, 20 bp, synthetic construct
  source 1..20: mol_type = other DNA
catcgtcctcaagtggcatt

SEQ ID NO: 11750 - DNA, 20 bp, synthetic construct
  source 1..20: mol_type = other DNA
acattgcgcctgcgtgtcac

SEQ ID NO: 11751 - DNA, 20 bp, synthetic construct
  source 1..20: mol_type = other DNA
gtcgaacacagtcggttctc

SEQ ID NO: 11752 - DNA, 20 bp, synthetic construct
  source 1..20: mol_type = other DNA
tagcccgagctgcgggttaa

SEQ ID NO: 11753 - DNA, 20 bp, synthetic construct
  source 1..20: mol_type = other DNA
gggtcctagggcatccttta

SEQ ID NO: 11754 - DNA, 20 bp, synthetic construct
  source 1..20: mol_type = other DNA
tgggcaagttgcttaagatt

SEQ ID NO: 11755 - DNA, 20 bp, synthetic construct
  source 1..20: mol_type = other DNA
tcacgggtgcaaacacttcg

SEQ ID NO: 11756 - DNA, 20 bp, synthetic construct
  source 1..20: mol_type = other DNA
ctattgtaacgtcgaggtct

SEQ ID NO: 11757 - DNA, 20 bp, synthetic construct
  source 1..20: mol_type = other DNA
gattcctgtcaaccacgtgc

SEQ ID NO: 11758 - DNA, 20 bp, synthetic construct
  source 1..20: mol_type = other DNA
aacactgcaaactatcctac

SEQ ID NO: 11759 - DNA, 20 bp, synthetic construct
  source 1..20: mol_type = other DNA
atcaattaggccctacacaa

SEQ ID NO: 11760 - DNA, 20 bp, synthetic construct
  source 1..20: mol_type = other DNA
acacgttcgttggtaactgg

SEQ ID NO: 11761 - DNA, 20 bp, synthetic construct
  source 1..20: mol_type = other DNA
gctgcggtgagtgtgcgttt

SEQ ID NO: 11762 - DNA, 20 bp, synthetic construct
  source 1..20: mol_type = other DNA
gggtaagtccatattggatc

SEQ ID NO: 11763 - DNA, 20 bp, synthetic construct
  source 1..20: mol_type = other DNA
cgtttagcggtcatgaatta

SEQ ID NO: 11764 - DNA, 20 bp, synthetic construct
  source 1..20: mol_type = other DNA
tcgccttgcgctaatacagc

SEQ ID NO: 11765 - DNA, 20 bp, synthetic construct
  source 1..20: mol_type = other DNA
caggtgtataatcgaggacg

SEQ ID NO: 11766 - DNA, 20 bp, synthetic construct
  source 1..20: mol_type = other DNA
ctttcggtgattgctagaag

SEQ ID NO: 11767 - DNA, 20 bp, synthetic construct
  source 1..20: mol_type = other DNA
ggagagctatcatcgatagt

SEQ ID NO: 11768 - DNA, 20 bp, synthetic construct
  source 1..20: mol_type = other DNA
cgtgaatcgagagagcaggt

SEQ ID NO: 11769 - DNA, 20 bp, synthetic construct
  source 1..20: mol_type = other DNA
tacaaagcacacccacagtt

SEQ ID NO: 11770 - DNA, 20 bp, synthetic construct
  source 1..20: mol_type = other DNA
ccgccgaggtcctgaacagg

SEQ ID NO: 11771 - DNA, 20 bp, synthetic construct
  source 1..20: mol_type = other DNA
tatgagaaatcgcagttacg

SEQ ID NO: 11772 - DNA, 20 bp, synthetic construct
  source 1..20: mol_type = other DNA
ggtagcaatggatcttccac

SEQ ID NO: 11773 - DNA, 20 bp, synthetic construct
  source 1..20: mol_type = other DNA
agttgtgaggtttggcgcga

SEQ ID NO: 11774 - DNA, 20 bp, synthetic construct
  source 1..20: mol_type = other DNA
ccttgtattgaatgcttcgc

SEQ ID NO: 11775 - DNA, 20 bp, synthetic construct
  source 1..20: mol_type = other DNA
tgacggcagttatatccagc

SEQ ID NO: 11776 - DNA, 20 bp, synthetic construct
  source 1..20: mol_type = other DNA
gtgcgatttgcgatgatctt

SEQ ID NO: 11777 - DNA, 20 bp, synthetic construct
  source 1..20: mol_type = other DNA
ttcattcatctattggcgga

SEQ ID NO: 11778 - DNA, 20 bp, synthetic construct
  source 1..20: mol_type = other DNA
tcctcgttaaaccgtttaag

SEQ ID NO: 11779 - DNA, 20 bp, synthetic construct
  source 1..20: mol_type = other DNA
aaagtgcgattgaaaccgat

SEQ ID NO: 11780 - DNA, 20 bp, synthetic construct
  source 1..20: mol_type = other DNA
agagggcagactattggcgc

SEQ ID NO: 11781 - DNA, 20 bp, synthetic construct
  source 1..20: mol_type = other DNA
actatggtcactaagctaga

SEQ ID NO: 11782 - DNA, 20 bp, synthetic construct
  source 1..20: mol_type = other DNA
ggccgtcccaagtgtgtaga

SEQ ID NO: 11783 - DNA, 20 bp, synthetic construct
  source 1..20: mol_type = other DNA
gatgacagttcccggtgtga

SEQ ID NO: 11784 - DNA, 20 bp, synthetic construct
  source 1..20: mol_type = other DNA
tgttggctacaaaggctctc

SEQ ID NO: 11785 - DNA, 20 bp, synthetic construct
  source 1..20: mol_type = other DNA
aagtgatgtgtcgttcccgt

SEQ ID NO: 11786 - DNA, 20 bp, synthetic construct
  source 1..20: mol_type = other DNA
aactctttgcgccgcctagc

SEQ ID NO: 11787 - DNA, 20 bp, synthetic construct
  source 1..20: mol_type = other DNA
acggacattctggcgggagt

SEQ ID NO: 11788 - DNA, 20 bp, synthetic construct
  source 1..20: mol_type = other DNA
ttcgcgctacggactctgac

SEQ ID NO: 11789 - DNA, 20 bp, synthetic construct
  source 1..20: mol_type = other DNA
ctacgagactcccagacata

SEQ ID NO: 11790 - DNA, 20 bp, synthetic construct
  source 1..20: mol_type = other DNA
tttctaggaatcattgcctg

SEQ ID NO: 11791 - DNA, 20 bp, synthetic construct
  source 1..20: mol_type = other DNA
acatttggatgggccattga

SEQ ID NO: 11792 - DNA, 20 bp, synthetic construct
  source 1..20: mol_type = other DNA
gctactcacggtaccaaatc

SEQ ID NO: 11793 - DNA, 20 bp, synthetic construct
  source 1..20: mol_type = other DNA
gactcacacacaaacatatt

SEQ ID NO: 11794 - DNA, 20 bp, synthetic construct
  source 1..20: mol_type = other DNA
ctcgtcacaggagtaacacg

SEQ ID NO: 11795 - DNA, 20 bp, synthetic construct
  source 1..20: mol_type = other DNA
ataacccgctcttagggtct

SEQ ID NO: 11796 - DNA, 20 bp, synthetic construct
  source 1..20: mol_type = other DNA
ggtctacccgagtgcctaac

SEQ ID NO: 11797 - DNA, 20 bp, synthetic construct
  source 1..20: mol_type = other DNA
cacacttacgaagaaagccc

SEQ ID NO: 11798 - DNA, 20 bp, synthetic construct
  source 1..20: mol_type = other DNA
aaacgcgatgtgtcgcttag

SEQ ID NO: 11799 - DNA, 20 bp, synthetic construct
  source 1..20: mol_type = other DNA
ctcctatccagcaaccctaa

SEQ ID NO: 11800 - DNA, 20 bp, synthetic construct
  source 1..20: mol_type = other DNA
ataatgccattgcgtttggt

SEQ ID NO: 11801 - DNA, 20 bp, synthetic construct
  source 1..20: mol_type = other DNA
gggactctacataaggacta

SEQ ID NO: 11802 - DNA, 20 bp, synthetic construct
  source 1..20: mol_type = other DNA
gcagatacataattaactgg

SEQ ID NO: 11803 - DNA, 20 bp, synthetic construct
  source 1..20: mol_type = other DNA
tcccgccgagactgatgtgg

SEQ ID NO: 11804 - DNA, 20 bp, synthetic construct
  source 1..20: mol_type = other DNA
tacgacatagccgtgaagca

SEQ ID NO: 11805 - DNA, 20 bp, synthetic construct
  source 1..20: mol_type = other DNA
tcccatttgctagctctcta

SEQ ID NO: 11806 - DNA, 20 bp, synthetic construct
  source 1..20: mol_type = other DNA
ggagctcggcgtcagatgtg

SEQ ID NO: 11807 - DNA, 20 bp, synthetic construct
  source 1..20: mol_type = other DNA
gccttgttgaatattggtca

SEQ ID NO: 11808 - DNA, 20 bp, synthetic construct
  source 1..20: mol_type = other DNA
atccgacctaggtatgtgag

SEQ ID NO: 11809 - DNA, 20 bp, synthetic construct
  source 1..20: mol_type = other DNA
tcctggtgtggctcttggct

SEQ ID NO: 11810 - DNA, 20 bp, synthetic construct
  source 1..20: mol_type = other DNA
atacttggcgaagcgaacgt

SEQ ID NO: 11811 - DNA, 20 bp, synthetic construct
  source 1..20: mol_type = other DNA
tgaccaacagccctagacta

SEQ ID NO: 11812 - DNA, 20 bp, synthetic construct
  source 1..20: mol_type = other DNA
cgatcggtttcacgtaatag

SEQ ID NO: 11813 - DNA, 20 bp, synthetic construct
  source 1..20: mol_type = other DNA
cataaggaacttggactgat

SEQ ID NO: 11814 - DNA, 20 bp, synthetic construct
  source 1..20: mol_type = other DNA
cggtttcggcttaagctata

SEQ ID NO: 11815 - DNA, 20 bp, synthetic construct
  source 1..20: mol_type = other DNA
taccgcactaattcaagtcc

SEQ ID NO: 11816 - DNA, 20 bp, synthetic construct
  source 1..20: mol_type = other DNA
gcccaaccgtcattcataga

SEQ ID NO: 11817 - DNA, 20 bp, synthetic construct
  source 1..20: mol_type = other DNA
gatctatcaccttgagataa

SEQ ID NO: 11818 - DNA, 20 bp, synthetic construct
  source 1..20: mol_type = other DNA
ccaaactaatctggcgcatc

SEQ ID NO: 11819 - DNA, 20 bp, synthetic construct
  source 1..20: mol_type = other DNA
attcctgtaagcgcgaatta

SEQ ID NO: 11820 - DNA, 20 bp, synthetic construct
  source 1..20: mol_type = other DNA
tcactgctactactgcaact

SEQ ID NO: 11821 - DNA, 20 bp, synthetic construct
  source 1..20: mol_type = other DNA
cgctacgcgatgatcagggt

SEQ ID NO: 11822 - DNA, 20 bp, synthetic construct
  source 1..20: mol_type = other DNA
gcaatcagaccgtagttgcg

SEQ ID NO: 11823 - DNA, 20 bp, synthetic construct
  source 1..20: mol_type = other DNA
gaatgtagttcattgacaca

SEQ ID NO: 11824 - DNA, 20 bp, synthetic construct
  source 1..20: mol_type = other DNA
gttcattcgcgggtcattat

SEQ ID NO: 11825 - DNA, 20 bp, synthetic construct
  source 1..20: mol_type = other DNA
catgctagtaaacttaatgc

SEQ ID NO: 11826 - DNA, 20 bp, synthetic construct
  source 1..20: mol_type = other DNA
tacgggatgccgcttgccgt

SEQ ID NO: 11827 - DNA, 20 bp, synthetic construct
  source 1..20: mol_type = other DNA
tgaacacgggaacacgcttt

SEQ ID NO: 11828 - DNA, 20 bp, synthetic construct
  source 1..20: mol_type = other DNA
attgatccttaaactccagg

SEQ ID NO: 11829 - DNA, 20 bp, synthetic construct
  source 1..20: mol_type = other DNA
gttgggtggccttcataggc

SEQ ID NO: 11830 - DNA, 20 bp, synthetic construct
  source 1..20: mol_type = other DNA
tatggtgtaacagtttaggc

SEQ ID NO: 11831 - DNA, 20 bp, synthetic construct
  source 1..20: mol_type = other DNA
acccagcaagaataggactc

SEQ ID NO: 11832 - DNA, 20 bp, synthetic construct
  source 1..20: mol_type = other DNA
gtacagaatcttcacaccga

SEQ ID NO: 11833 - DNA, 20 bp, synthetic construct
  source 1..20: mol_type = other DNA
atgagaagcagggcactctc

SEQ ID NO: 11834 - DNA, 20 bp, synthetic construct
  source 1..20: mol_type = other DNA
tgtgttcaaatccgcgtcgg

SEQ ID NO: 11835 - DNA, 20 bp, synthetic construct
  source 1..20: mol_type = other DNA
ccgatagtcgcagccacttt

SEQ ID NO: 11836 - DNA, 20 bp, synthetic construct
  source 1..20: mol_type = other DNA
ccgagtccgccgaaagagta

SEQ ID NO: 11837 - DNA, 20 bp, synthetic construct
  source 1..20: mol_type = other DNA
taagacatgagccggaatag

SEQ ID NO: 11838 - DNA, 20 bp, synthetic construct
  source 1..20: mol_type = other DNA
tgttcgagggaatcaacgaa

SEQ ID NO: 11839 - DNA, 20 bp, synthetic construct
  source 1..20: mol_type = other DNA
actccgcccggctaatactg

SEQ ID NO: 11840 - DNA, 20 bp, synthetic construct
  source 1..20: mol_type = other DNA
aaacgctcaggcggtgcaac

SEQ ID NO: 11841 - DNA, 20 bp, synthetic construct
  source 1..20: mol_type = other DNA
agttgtgatgatctaagcgg

SEQ ID NO: 11842 - DNA, 20 bp, synthetic construct
  source 1..20: mol_type = other DNA
gcttgcttaggttacggaac

SEQ ID NO: 11843 - DNA, 20 bp, synthetic construct
  source 1..20: mol_type = other DNA
tctgaacggatccatggtca

SEQ ID NO: 11844 - DNA, 20 bp, synthetic construct
  source 1..20: mol_type = other DNA
tttcttgtgccactcgataa

SEQ ID NO: 11845 - DNA, 20 bp, synthetic construct
  source 1..20: mol_type = other DNA
taacagccgacacagacgac

SEQ ID NO: 11846 - DNA, 20 bp, synthetic construct
  source 1..20: mol_type = other DNA
ttgtcggcaagcaacctcac

SEQ ID NO: 11847 - DNA, 20 bp, synthetic construct
  source 1..20: mol_type = other DNA
agaatatactgagtcctaac

SEQ ID NO: 11848 - DNA, 20 bp, synthetic construct
  source 1..20: mol_type = other DNA
tggcggaggaaagaaaggag

SEQ ID NO: 11849 - DNA, 20 bp, synthetic construct
  source 1..20: mol_type = other DNA
agtggagcgttcatatgagg

SEQ ID NO: 11850 - DNA, 20 bp, synthetic construct
  source 1..20: mol_type = other DNA
taagcatgtttcgaaggtga

SEQ ID NO: 11851 - DNA, 20 bp, synthetic construct
  source 1..20: mol_type = other DNA
cggacgtatgaaagtaagtt

SEQ ID NO: 11852 - DNA, 20 bp, synthetic construct
  source 1..20: mol_type = other DNA
cccgtggaggatgtttcaac

SEQ ID NO: 11853 - DNA, 20 bp, synthetic construct
  source 1..20: mol_type = other DNA
ttcatacaatggcctcccgg

SEQ ID NO: 11854 - DNA, 20 bp, synthetic construct
  source 1..20: mol_type = other DNA
ctcactcaggtcccgtgata

SEQ ID NO: 11855 - DNA, 20 bp, synthetic construct
  source 1..20: mol_type = other DNA
gcagatcacaatcgaccaga

SEQ ID NO: 11856 - DNA, 20 bp, synthetic construct
  source 1..20: mol_type = other DNA
atcggtaagcgaccggtcgt

SEQ ID NO: 11857 - DNA, 20 bp, synthetic construct
  source 1..20: mol_type = other DNA
cattagtcatggtgctgggc

SEQ ID NO: 11858 - DNA, 20 bp, synthetic construct
  source 1..20: mol_type = other DNA
atgtcgagaacagtgagtac

SEQ ID NO: 11859 - DNA, 20 bp, synthetic construct
  source 1..20: mol_type = other DNA
tgataggtgctcggcataag

SEQ ID NO: 11860 - DNA, 20 bp, synthetic construct
  source 1..20: mol_type = other DNA
cccaatgttacgcaatgaaa

SEQ ID NO: 11861 - DNA, 20 bp, synthetic construct
  source 1..20: mol_type = other DNA
gtagtgtctccattctagca

SEQ ID NO: 11862 - DNA, 20 bp, synthetic construct
  source 1..20: mol_type = other DNA
ggtcctcaacgacttacgtg

SEQ ID NO: 11863 - DNA, 20 bp, synthetic construct
  source 1..20: mol_type = other DNA
ggagatatagaggacctctg

SEQ ID NO: 11864 - DNA, 20 bp, synthetic construct
  source 1..20: mol_type = other DNA
cagcttcattagtggagaca

SEQ ID NO: 11865 - DNA, 20 bp, synthetic construct
  source 1..20: mol_type = other DNA
gagctgtgcgatcaacgaag

SEQ ID NO: 11866 - DNA, 20 bp, synthetic construct
  source 1..20: mol_type = other DNA
agattgtacgtaattaggct

SEQ ID NO: 11867 - DNA, 20 bp, synthetic construct
  source 1..20: mol_type = other DNA
cagatttaattcagttactg

SEQ ID NO: 11868 - DNA, 20 bp, synthetic construct
  source 1..20: mol_type = other DNA
cacaccagcttgcgtcatca

SEQ ID NO: 11869 - DNA, 20 bp, synthetic construct
  source 1..20: mol_type = other DNA
gtttatcgttagccacgtat

SEQ ID NO: 11870 - DNA, 20 bp, synthetic construct
  source 1..20: mol_type = other DNA
ctgcctagttccgagacact

SEQ ID NO: 11871 - DNA, 20 bp, synthetic construct
  source 1..20: mol_type = other DNA
tactgacaacccggcctagc

SEQ ID NO: 11872 - DNA, 20 bp, synthetic construct
  source 1..20: mol_type = other DNA
tcgcttggctactgactatc

SEQ ID NO: 11873 - DNA, 20 bp, synthetic construct
  source 1..20: mol_type = other DNA
ttgtgtcataatcgcagtca

SEQ ID NO: 11874 - DNA, 20 bp, synthetic construct
  source 1..20: mol_type = other DNA
cgacatacttcacgtgatat

SEQ ID NO: 11875 - DNA, 20 bp, synthetic construct
  source 1..20: mol_type = other DNA
tccggacagtgtcaccgtcc

SEQ ID NO: 11876 - DNA, 20 bp, synthetic construct
  source 1..20: mol_type = other DNA
agacgtttgactgggactcg

SEQ ID NO: 11877 - DNA, 20 bp, synthetic construct
  source 1..20: mol_type = other DNA
ataggtttcctaccggcctg

SEQ ID NO: 11878 - DNA, 20 bp, synthetic construct
  source 1..20: mol_type = other DNA
accacgactaaaccagtatc

SEQ ID NO: 11879 - DNA, 20 bp, synthetic construct
  source 1..20: mol_type = other DNA
cccagagcgtatgaactgtc

SEQ ID NO: 11880 - DNA, 20 bp, synthetic construct
  source 1..20: mol_type = other DNA
tggaatttcgcgacctacac

SEQ ID NO: 11881 - DNA, 20 bp, synthetic construct
  source 1..20: mol_type = other DNA
ccatgtatcatgatgtcagc

SEQ ID NO: 11882 - DNA, 20 bp, synthetic construct
  source 1..20: mol_type = other DNA
tagagatacctggtacgcac

SEQ ID NO: 11883 - DNA, 20 bp, synthetic construct
  source 1..20: mol_type = other DNA
cgagtcctgaggtagactag

SEQ ID NO: 11884 - DNA, 20 bp, synthetic construct
  source 1..20: mol_type = other DNA
atatagacatcggccgagtc

SEQ ID NO: 11885 - DNA, 20 bp, synthetic construct
  source 1..20: mol_type = other DNA
ctttgcggcggaacagtaaa

SEQ ID NO: 11886 - DNA, 20 bp, synthetic construct
  source 1..20: mol_type = other DNA
cttaagcatctacatcacgg

SEQ ID NO: 11887 - DNA, 20 bp, synthetic construct
  source 1..20: mol_type = other DNA
acgtggtaagttattggctt

SEQ ID NO: 11888 - DNA, 20 bp, synthetic construct
  source 1..20: mol_type = other DNA
gagaaaggaagtatgagaaa

SEQ ID NO: 11889 - DNA, 20 bp, synthetic construct
  source 1..20: mol_type = other DNA
ttcgcctcttgtatcccgct

SEQ ID NO: 11890 - DNA, 20 bp, synthetic construct
  source 1..20: mol_type = other DNA
tattgtgtgtgattgcagta

SEQ ID NO: 11891 - DNA, 20 bp, synthetic construct
  source 1..20: mol_type = other DNA
acactcactagggattcagg

SEQ ID NO: 11892 - DNA, 20 bp, synthetic construct
  source 1..20: mol_type = other DNA
accctataatagtgaccttg

SEQ ID NO: 11893 - DNA, 20 bp, synthetic construct
  source 1..20: mol_type = other DNA
taatattgatagccggcacg

SEQ ID NO: 11894 - DNA, 20 bp, synthetic construct
  source 1..20: mol_type = other DNA
agatcttctgtcggcagcaa

SEQ ID NO: 11895 - DNA, 20 bp, synthetic construct
  source 1..20: mol_type = other DNA
ctactctcgtaggaaatggg

SEQ ID NO: 11896 - DNA, 20 bp, synthetic construct
  source 1..20: mol_type = other DNA
actatacccagttcaagaag

SEQ ID NO: 11897 - DNA, 20 bp, synthetic construct
  source 1..20: mol_type = other DNA
ctatatacaagtacggcata

SEQ ID NO: 11898 - DNA, 20 bp, synthetic construct
  source 1..20: mol_type = other DNA
ggtagcggagatagcacgcg

SEQ ID NO: 11899 - DNA, 20 bp, synthetic construct
  source 1..20: mol_type = other DNA
ataatcaccgttcgtcgaag

SEQ ID NO: 11900 - DNA, 20 bp, synthetic construct
  source 1..20: mol_type = other DNA
ttataagcaggttagtcgcg

SEQ ID NO: 11901 - DNA, 20 bp, synthetic construct
  source 1..20: mol_type = other DNA
gcgatgtacgttgtcttgcc

SEQ ID NO: 11902 - DNA, 20 bp, synthetic construct
  source 1..20: mol_type = other DNA
gttaaggcatatgccagaac

SEQ ID NO: 11903 - DNA, 20 bp, synthetic construct
  source 1..20: mol_type = other DNA
tggacagaggcatcgccggc

SEQ ID NO: 11904 - DNA, 20 bp, synthetic construct
  source 1..20: mol_type = other DNA
taggcgcattaacatctacg

SEQ ID NO: 11905 - DNA, 20 bp, synthetic construct
  source 1..20: mol_type = other DNA
gtctcaatgcaccaagtaga

SEQ ID NO: 11906 - DNA, 20 bp, synthetic construct
  source 1..20: mol_type = other DNA
tcgcccaaggacaatcggtt

SEQ ID NO: 11907 - DNA, 20 bp, synthetic construct
  source 1..20: mol_type = other DNA
cttcttcctgagcccggact

SEQ ID NO: 11908 - DNA, 20 bp, synthetic construct
  source 1..20: mol_type = other DNA
atgtgggatgtagccactca

SEQ ID NO: 11909 - DNA, 20 bp, synthetic construct
  source 1..20: mol_type = other DNA
cggcgtaatacatcacctat

SEQ ID NO: 11910 - DNA, 20 bp, synthetic construct
  source 1..20: mol_type = other DNA
atatcgcatgagatcgacac

SEQ ID NO: 11911 - DNA, 20 bp, synthetic construct
  source 1..20: mol_type = other DNA
tggccgcaccgtaccgtgaa

SEQ ID NO: 11912 - DNA, 20 bp, synthetic construct
  source 1..20: mol_type = other DNA
tttctgcactatatctgatg

SEQ ID NO: 11913 - DNA, 20 bp, synthetic construct
  source 1..20: mol_type = other DNA
tataacagaaggtggcaaat

SEQ ID NO: 11914 - DNA, 20 bp, synthetic construct
  source 1..20: mol_type = other DNA
gatccgaccatatcacttgt

SEQ ID NO: 11915 - DNA, 20 bp, synthetic construct
  source 1..20: mol_type = other DNA
aaggtctgaccacacaagtt

SEQ ID NO: 11916 - DNA, 20 bp, synthetic construct
  source 1..20: mol_type = other DNA
tctactgtggtggccagagc

SEQ ID NO: 11917 - DNA, 20 bp, synthetic construct
  source 1..20: mol_type = other DNA
tacgttaccggctagattgc

SEQ ID NO: 11918 - DNA, 20 bp, synthetic construct
  source 1..20: mol_type = other DNA
gcttattagttcttactgtc

SEQ ID NO: 11919 - DNA, 20 bp, synthetic construct
  source 1..20: mol_type = other DNA
ggatggtaaacagttaccgc

SEQ ID NO: 11920 - DNA, 20 bp, synthetic construct
  source 1..20: mol_type = other DNA
ttcttcgctacgtagccaag

SEQ ID NO: 11921 - DNA, 20 bp, synthetic construct
  source 1..20: mol_type = other DNA
cttgcttcggtgagtgtagc

SEQ ID NO: 11922 - DNA, 20 bp, synthetic construct
  source 1..20: mol_type = other DNA
gtaagtcagccgagccctgg

SEQ ID NO: 11923 - DNA, 20 bp, synthetic construct
  source 1..20: mol_type = other DNA
ttgtgccgtgggcctagtta

SEQ ID NO: 11924 - DNA, 20 bp, synthetic construct
  source 1..20: mol_type = other DNA
tggtgtaatgctaagtcgca

SEQ ID NO: 11925 - DNA, 20 bp, synthetic construct
  source 1..20: mol_type = other DNA
gctgatcttcgtgccgcatc

SEQ ID NO: 11926 - DNA, 20 bp, synthetic construct
  source 1..20: mol_type = other DNA
tatgctaagggtgtaagggt

SEQ ID NO: 11927 - DNA, 20 bp, synthetic construct
  source 1..20: mol_type = other DNA
tgtcgaaatactgttcaagg

SEQ ID NO: 11928 - DNA, 20 bp, synthetic construct
  source 1..20: mol_type = other DNA
atgagacccgcaccgctgcg

SEQ ID NO: 11929 - DNA, 20 bp, synthetic construct
  source 1..20: mol_type = other DNA
tcagcggagttaaagctgtt

SEQ ID NO: 11930 - DNA, 20 bp, synthetic construct
  source 1..20: mol_type = other DNA
agtgacccggtgctagttac

SEQ ID NO: 11931 - DNA, 20 bp, synthetic construct
  source 1..20: mol_type = other DNA
taaggtgcccgcaaatgtac

SEQ ID NO: 11932 - DNA, 20 bp, synthetic construct
  source 1..20: mol_type = other DNA
cgtcgctaattggaactaca

SEQ ID NO: 11933 - DNA, 20 bp, synthetic construct
  source 1..20: mol_type = other DNA
gtgcataatctaattctagg

SEQ ID NO: 11934 - DNA, 20 bp, synthetic construct
  source 1..20: mol_type = other DNA
acctaattcgtaaccacaaa

SEQ ID NO: 11935 - DNA, 20 bp, synthetic construct
  source 1..20: mol_type = other DNA
gacccatcgtcctgcattct

SEQ ID NO: 11936 - DNA, 20 bp, synthetic construct
  source 1..20: mol_type = other DNA
aacaggaccatccaatgatc

SEQ ID NO: 11937 - DNA, 20 bp, synthetic construct
  source 1..20: mol_type = other DNA
caagtctgacagacaataca

SEQ ID NO: 11938 - DNA, 20 bp, synthetic construct
  source 1..20: mol_type = other DNA
tctccgtgggacgagggcat

SEQ ID NO: 11939 - DNA, 20 bp, synthetic construct
  source 1..20: mol_type = other DNA
agcttactataggtcattgg

SEQ ID NO: 11940 - DNA, 20 bp, synthetic construct
  source 1..20: mol_type = other DNA
gcgattataaagtgacctgg

SEQ ID NO: 11941 - DNA, 20 bp, synthetic construct
  source 1..20: mol_type = other DNA
tgatttagggctggacgcat

SEQ ID NO: 11942 - DNA, 20 bp, synthetic construct
  source 1..20: mol_type = other DNA
cagcacatatattaacggga

SEQ ID NO: 11943 - DNA, 20 bp, synthetic construct
  source 1..20: mol_type = other DNA
ttcccggtatgctcggtgca

SEQ ID NO: 11944 - DNA, 20 bp, synthetic construct
  source 1..20: mol_type = other DNA
caccgtctaacctgtgtagg

SEQ ID NO: 11945 - DNA, 20 bp, synthetic construct
  source 1..20: mol_type = other DNA
gtgagtcaatagcattacta

SEQ ID NO: 11946 - DNA, 20 bp, synthetic construct
  source 1..20: mol_type = other DNA
atttatgagcgcggcaagat

SEQ ID NO: 11947 - DNA, 20 bp, synthetic construct
  source 1..20: mol_type = other DNA
aaagcacagcgttaactgac

SEQ ID NO: 11948 - DNA, 20 bp, synthetic construct
  source 1..20: mol_type = other DNA
caccgcggttacataggtcc

SEQ ID NO: 11949 - DNA, 20 bp, synthetic construct
  source 1..20: mol_type = other DNA
ggatgcggctaagctaacca

SEQ ID NO: 11950 - DNA, 20 bp, synthetic construct
  source 1..20: mol_type = other DNA
tcgtacacggcgttgcagtc

SEQ ID NO: 11951 - DNA, 20 bp, synthetic construct
  source 1..20: mol_type = other DNA
gtgaatacaagggcgggata

SEQ ID NO: 11952 - DNA, 20 bp, synthetic construct
  source 1..20: mol_type = other DNA
agatggcaatacctacgtgt

SEQ ID NO: 11953 - DNA, 20 bp, synthetic construct
  source 1..20: mol_type = other DNA
cgttgctgctcagagttgag

SEQ ID NO: 11954 - DNA, 20 bp, synthetic construct
  source 1..20: mol_type = other DNA
cttggagttgtatgcctact

SEQ ID NO: 11955 - DNA, 20 bp, synthetic construct
  source 1..20: mol_type = other DNA
cttaaccacgaaagatgtat

SEQ ID NO: 11956 - DNA, 20 bp, synthetic construct
  source 1..20: mol_type = other DNA
tccgcacagctattccctca

SEQ ID NO: 11957 - DNA, 20 bp, synthetic construct
  source 1..20: mol_type = other DNA
gctcgcgatgtctgacttct

SEQ ID NO: 11958 - DNA, 20 bp, synthetic construct
  source 1..20: mol_type = other DNA
aataaagctctgttggctgt

SEQ ID NO: 11959 - DNA, 20 bp, synthetic construct
  source 1..20: mol_type = other DNA
acctccactgcgacgtatgg

SEQ ID NO: 11960 - DNA, 20 bp, synthetic construct
  source 1..20: mol_type = other DNA
gaccggtataggagcaggtt

SEQ ID NO: 11961 - DNA, 20 bp, synthetic construct
  source 1..20: mol_type = other DNA
cggagcattctctttgctgt

SEQ ID NO: 11962 - DNA, 20 bp, synthetic construct
  source 1..20: mol_type = other DNA
gaggagcgaatcgaaatgtg

SEQ ID NO: 11963 - DNA, 20 bp, synthetic construct
  source 1..20: mol_type = other DNA
acggtagtttagaacgagtg

SEQ ID NO: 11964 - DNA, 20 bp, synthetic construct
  source 1..20: mol_type = other DNA
atgctcacccgctacaatgc

SEQ ID NO: 11965 - DNA, 20 bp, synthetic construct
  source 1..20: mol_type = other DNA
tcgtggactgtatactagat

SEQ ID NO: 11966 - DNA, 20 bp, synthetic construct
  source 1..20: mol_type = other DNA
acatcgcctattgacgcgaa

SEQ ID NO: 11967 - DNA, 20 bp, synthetic construct
  source 1..20: mol_type = other DNA
tgtgcgtggccgttaacaag

SEQ ID NO: 11968 - DNA, 20 bp, synthetic construct
  source 1..20: mol_type = other DNA
ggactgacgaaatagctggg

SEQ ID NO: 11969 - DNA, 20 bp, synthetic construct
  source 1..20: mol_type = other DNA
gccagtagcaggatagccgt

SEQ ID NO: 11970 - DNA, 20 bp, synthetic construct
  source 1..20: mol_type = other DNA
tcgcagtccgaacctcacac

SEQ ID NO: 11971 - DNA, 20 bp, synthetic construct
  source 1..20: mol_type = other DNA
ttgattcatgcaaagagaca

SEQ ID NO: 11972 - DNA, 20 bp, synthetic construct
  source 1..20: mol_type = other DNA
aatgtcgccacaatgcgttt

SEQ ID NO: 11973 - DNA, 20 bp, synthetic construct
  source 1..20: mol_type = other DNA
cttgggttgcgctttagtga

SEQ ID NO: 11974 - DNA, 20 bp, synthetic construct
  source 1..20: mol_type = other DNA
ccagagagttcctccgcacg

SEQ ID NO: 11975 - DNA, 20 bp, synthetic construct
  source 1..20: mol_type = other DNA
caatgagtcagacgttgagg

SEQ ID NO: 11976 - DNA, 20 bp, synthetic construct
  source 1..20: mol_type = other DNA
tatcattccgagcgtcccgg

SEQ ID NO: 11977 - DNA, 20 bp, synthetic construct
  source 1..20: mol_type = other DNA
aggcgggtctgtgccgtaaa

SEQ ID NO: 11978 - DNA, 20 bp, synthetic construct
  source 1..20: mol_type = other DNA
ccgcgagatgctcggtctaa

SEQ ID NO: 11979 - DNA, 20 bp, synthetic construct
  source 1..20: mol_type = other DNA
aaatagtaggtgaggaccgc

SEQ ID NO: 11980 - DNA, 20 bp, synthetic construct
  source 1..20: mol_type = other DNA
cttgttgagctgagaagtcg

SEQ ID NO: 11981 - DNA, 20 bp, synthetic construct
  source 1..20: mol_type = other DNA
ctcccgctagcgtatgttta

SEQ ID NO: 11982 - DNA, 20 bp, synthetic construct
  source 1..20: mol_type = other DNA
gagagcgataattcaatgtg

SEQ ID NO: 11983 - DNA, 20 bp, synthetic construct
  source 1..20: mol_type = other DNA
attagcacgtactgttcatg

SEQ ID NO: 11984 - DNA, 20 bp, synthetic construct
  source 1..20: mol_type = other DNA
gaacgtacgtgggtcgtgta

SEQ ID NO: 11985 - DNA, 20 bp, synthetic construct
  source 1..20: mol_type = other DNA
gttcactatgttggcggtca

SEQ ID NO: 11986 - DNA, 20 bp, synthetic construct
  source 1..20: mol_type = other DNA
ggagtgtatcccacgaggac

SEQ ID NO: 11987 - DNA, 20 bp, synthetic construct
  source 1..20: mol_type = other DNA
ctaagtgaaagtgcaggtag

SEQ ID NO: 11988 - DNA, 20 bp, synthetic construct
  source 1..20: mol_type = other DNA
acggagccgccggagtctct

SEQ ID NO: 11989 - DNA, 20 bp, synthetic construct
  source 1..20: mol_type = other DNA
gtgatttagccgtctgctac

SEQ ID NO: 11990 - DNA, 20 bp, synthetic construct
  source 1..20: mol_type = other DNA
ctcgtaaccggactcaggag

SEQ ID NO: 11991 - DNA, 20 bp, synthetic construct
  source 1..20: mol_type = other DNA
gtaactgcttgagtagtatc

SEQ ID NO: 11992 - DNA, 20 bp, synthetic construct
  source 1..20: mol_type = other DNA
tcgcctatataagctgaaac

SEQ ID NO: 11993 - DNA, 20 bp, synthetic construct
  source 1..20: mol_type = other DNA
tctgacgctgcgagacaggg

SEQ ID NO: 11994 - DNA, 20 bp, synthetic construct
  source 1..20: mol_type = other DNA
ctattgggcaagtaattcat

SEQ ID NO: 11995 - DNA, 20 bp, synthetic construct
  source 1..20: mol_type = other DNA
cacacttagggtcggtgtga

SEQ ID NO: 11996 - DNA, 20 bp, synthetic construct
  source 1..20: mol_type = other DNA
caagacaaggacaatcccgg

SEQ ID NO: 11997 - DNA, 20 bp, synthetic construct
  source 1..20: mol_type = other DNA
agcgttgacggtccctcacc

SEQ ID NO: 11998 - DNA, 20 bp, synthetic construct
  source 1..20: mol_type = other DNA
agcagaactttcgagcattg

SEQ ID NO: 11999 - DNA, 20 bp, synthetic construct
  source 1..20: mol_type = other DNA
attgtctgggtagtcgaacg

SEQ ID NO: 12000 - DNA, 20 bp, synthetic construct
  source 1..20: mol_type = other DNA
cagttccgccaatgtgccgg

SEQ ID NO: 12001 - DNA, 20 bp, synthetic construct
  source 1..20: mol_type = other DNA
ttccgagttaaaccaggcaa

SEQ ID NO: 12002 - DNA, 20 bp, synthetic construct
  source 1..20: mol_type = other DNA
gagggaaaccattgtgggag

SEQ ID NO: 12003 - DNA, 20 bp, synthetic construct
  source 1..20: mol_type = other DNA
gtatgcctactgtccaggag

SEQ ID NO: 12004 - DNA, 20 bp, synthetic construct
  source 1..20: mol_type = other DNA
gcagtattcaagccggttta

SEQ ID NO: 12005 - DNA, 20 bp, synthetic construct
  source 1..20: mol_type = other DNA
tgcatgaagggttcataagc

SEQ ID NO: 12006 - DNA, 20 bp, synthetic construct
  source 1..20: mol_type = other DNA
gctcttgtgtaagttagact

SEQ ID NO: 12007 - DNA, 20 bp, synthetic construct
  source 1..20: mol_type = other DNA
tatggtgcccgcattgaggt

SEQ ID NO: 12008 - DNA, 20 bp, synthetic construct
  source 1..20: mol_type = other DNA
cagccgaaggaaggcagata

SEQ ID NO: 12009 - DNA, 20 bp, synthetic construct
  source 1..20: mol_type = other DNA
attgcttcattgttgcgacg

SEQ ID NO: 12010 - DNA, 20 bp, synthetic construct
  source 1..20: mol_type = other DNA
taggtagagctttatgacct

SEQ ID NO: 12011 - DNA, 20 bp, synthetic construct
  source 1..20: mol_type = other DNA
gatacgcaaccatcctcaca

SEQ ID NO: 12012 - DNA, 20 bp, synthetic construct
  source 1..20: mol_type = other DNA
ctttgactgcacagccaatg

SEQ ID NO: 12013 - DNA, 20 bp, synthetic construct
  source 1..20: mol_type = other DNA
taggatttgcgtgaaggctt

SEQ ID NO: 12014 - DNA, 20 bp, synthetic construct
  source 1..20: mol_type = other DNA
aggactcgttcttacgtcat

SEQ ID NO: 12015 - DNA, 20 bp, synthetic construct
  source 1..20: mol_type = other DNA
cgcccgttatggtcgtacgt

SEQ ID NO: 12016 - DNA, 20 bp, synthetic construct
  source 1..20: mol_type = other DNA
agccacgattcaattcaggg

SEQ ID NO: 12017 - DNA, 20 bp, synthetic construct
  source 1..20: mol_type = other DNA
ggatccttccattattctta

SEQ ID NO: 12018 - DNA, 20 bp, synthetic construct
  source 1..20: mol_type = other DNA
tacgctgaggctgaatttcg

SEQ ID NO: 12019 - DNA, 20 bp, synthetic construct
  source 1..20: mol_type = other DNA
taatccaagattcggtactc

SEQ ID NO: 12020 - DNA, 20 bp, synthetic construct
  source 1..20: mol_type = other DNA
tatctacgacctataacacc

SEQ ID NO: 12021 - DNA, 20 bp, synthetic construct
  source 1..20: mol_type = other DNA
ccactgtgctgacaactaac

SEQ ID NO: 12022 - DNA, 20 bp, synthetic construct
  source 1..20: mol_type = other DNA
cttccgatcgtgcgcaatgc

SEQ ID NO: 12023 - DNA, 20 bp, synthetic construct
  source 1..20: mol_type = other DNA
tcacctggcaaactccttct

SEQ ID NO: 12024 - DNA, 20 bp, synthetic construct
  source 1..20: mol_type = other DNA
agcttccctatgtgatagtt

SEQ ID NO: 12025 - DNA, 20 bp, synthetic construct
  source 1..20: mol_type = other DNA
gaacgtaatgaatatagtcg

SEQ ID NO: 12026 - DNA, 20 bp, synthetic construct
  source 1..20: mol_type = other DNA
gaagtaattgattagtctag

SEQ ID NO: 12027 - DNA, 20 bp, synthetic construct
  source 1..20: mol_type = other DNA
cctggctttaatgtccaaga

SEQ ID NO: 12028 - DNA, 20 bp, synthetic construct
  source 1..20: mol_type = other DNA
cgcggcaatatggcgtctcg

SEQ ID NO: 12029 - DNA, 20 bp, synthetic construct
  source 1..20: mol_type = other DNA
gtgaggcagcaagtgcagcg

SEQ ID NO: 12030 - DNA, 20 bp, synthetic construct
  source 1..20: mol_type = other DNA
actacgatttgtgcgtccac

SEQ ID NO: 12031 - DNA, 20 bp, synthetic construct
  source 1..20: mol_type = other DNA
ttattaggtagtgcggtaac

SEQ ID NO: 12032 - DNA, 20 bp, synthetic construct
  source 1..20: mol_type = other DNA
tgcacgatcaactgtcattc

SEQ ID NO: 12033 - DNA, 20 bp, synthetic construct
  source 1..20: mol_type = other DNA
gggtcgcctagatcctcgct

SEQ ID NO: 12034 - DNA, 20 bp, synthetic construct
  source 1..20: mol_type = other DNA
ctgttggtttctatactggc

SEQ ID NO: 12035 - DNA, 20 bp, synthetic construct
  source 1..20: mol_type = other DNA
cttcattacagggcgatctt

SEQ ID NO: 12036 - DNA, 20 bp, synthetic construct
  source 1..20: mol_type = other DNA
atggagtagaaacctgctga

SEQ ID NO: 12037 - DNA, 20 bp, synthetic construct
  source 1..20: mol_type = other DNA
ctgaagcgcattcgctacat

SEQ ID NO: 12038 - DNA, 20 bp, synthetic construct
  source 1..20: mol_type = other DNA
ccgaatctttacgcaacccg

SEQ ID NO: 12039 - DNA, 20 bp, synthetic construct
  source 1..20: mol_type = other DNA
acatccatgggcaaactgga

SEQ ID NO: 12040 - DNA, 20 bp, synthetic construct
  source 1..20: mol_type = other DNA
aggccgtaacaggtaactgc

SEQ ID NO: 12041 - DNA, 20 bp, synthetic construct
  source 1..20: mol_type = other DNA
tgaagaatagacgtgtcaag

SEQ ID NO: 12042 - DNA, 20 bp, synthetic construct
  source 1..20: mol_type = other DNA
ccaaggattcttctgagatt

SEQ ID NO: 12043 - DNA, 20 bp, synthetic construct
  source 1..20: mol_type = other DNA
agctaagggcccattcaact

SEQ ID NO: 12044 - DNA, 20 bp, synthetic construct
  source 1..20: mol_type = other DNA
ctctcatctcacatcgggct

SEQ ID NO: 12045 - DNA, 20 bp, synthetic construct
  source 1..20: mol_type = other DNA
gggatggcgttaatatatct

SEQ ID NO: 12046 - DNA, 20 bp, synthetic construct
  source 1..20: mol_type = other DNA
ttcgtccgctcagacgttga

SEQ ID NO: 12047 - DNA, 20 bp, synthetic construct
  source 1..20: mol_type = other DNA
gtaccttcaaagtaatcgcc

SEQ ID NO: 12048 - DNA, 20 bp, synthetic construct
  source 1..20: mol_type = other DNA
cctgcatcaggtactgccct

SEQ ID NO: 12049 - DNA, 20 bp, synthetic construct
  source 1..20: mol_type = other DNA
cgaagtgtcgccgtagggtt

SEQ ID NO: 12050 - DNA, 20 bp, synthetic construct
  source 1..20: mol_type = other DNA
tctaggtatatctccatgat

SEQ ID NO: 12051 - DNA, 20 bp, synthetic construct
  source 1..20: mol_type = other DNA
gcaagccggacacgcacaaa

SEQ ID NO: 12052 - DNA, 20 bp, synthetic construct
  source 1..20: mol_type = other DNA
tgttcccgctttcatgttat

SEQ ID NO: 12053 - DNA, 20 bp, synthetic construct
  source 1..20: mol_type = other DNA
catacgagctccgcctgcta

SEQ ID NO: 12054 - DNA, 20 bp, synthetic construct
  source 1..20: mol_type = other DNA
agcgggtggaaaccgaatag

SEQ ID NO: 12055 - DNA, 20 bp, synthetic construct
  source 1..20: mol_type = other DNA
acgcattccatgaaatatca

SEQ ID NO: 12056 - DNA, 20 bp, synthetic construct
  source 1..20: mol_type = other DNA
tgcccactcgtctgagagag

SEQ ID NO: 12057 - DNA, 20 bp, synthetic construct
  source 1..20: mol_type = other DNA
cagaacttgtgtcgtggata

SEQ ID NO: 12058 - DNA, 20 bp, synthetic construct
  source 1..20: mol_type = other DNA
gggagggcgcgatcctttag

SEQ ID NO: 12059 - DNA, 20 bp, synthetic construct
  source 1..20: mol_type = other DNA
tcgtacgattggtgtaaact

SEQ ID NO: 12060 - DNA, 20 bp, synthetic construct
  source 1..20: mol_type = other DNA
tgaaagataagctaccttgc

SEQ ID NO: 12061 - DNA, 20 bp, synthetic construct
  source 1..20: mol_type = other DNA
caaacgccctttcgtaagtg

SEQ ID NO: 12062 - DNA, 20 bp, synthetic construct
  source 1..20: mol_type = other DNA
ggaaacgcgaatgcagattc

SEQ ID NO: 12063 - DNA, 20 bp, synthetic construct
  source 1..20: mol_type = other DNA
ttaccgagaatatcgtttac

SEQ ID NO: 12064 - DNA, 20 bp, synthetic construct
  source 1..20: mol_type = other DNA
taaaggcccggaatggattg

SEQ ID NO: 12065 - DNA, 20 bp, synthetic construct
  source 1..20: mol_type = other DNA
tcggcgctcggtgattgatt

SEQ ID NO: 12066 - DNA, 20 bp, synthetic construct
  source 1..20: mol_type = other DNA
ctgaggatagcgctgccgaa

SEQ ID NO: 12067 - DNA, 20 bp, synthetic construct
  source 1..20: mol_type = other DNA
agcccatcattgctctacca

SEQ ID NO: 12068 - DNA, 20 bp, synthetic construct
  source 1..20: mol_type = other DNA
gacgtgatacaatctttgtt

SEQ ID NO: 12069 - DNA, 20 bp, synthetic construct
  source 1..20: mol_type = other DNA
gcgggttcctcagagagccc

SEQ ID NO: 12070 - DNA, 20 bp, synthetic construct
  source 1..20: mol_type = other DNA
aacgtaacgccaacttgcaa

SEQ ID NO: 12071 - DNA, 20 bp, synthetic construct
  source 1..20: mol_type = other DNA
acttgtttgtatggcctcgg

SEQ ID NO: 12072 - DNA, 20 bp, synthetic construct
  source 1..20: mol_type = other DNA
cggtttgctgtaagaggcgg

SEQ ID NO: 12073 - DNA, 20 bp, synthetic construct
  source 1..20: mol_type = other DNA
gattgcacttaggactcatg

SEQ ID NO: 12074 - DNA, 20 bp, synthetic construct
  source 1..20: mol_type = other DNA
tcaggccacttaccgcggat

SEQ ID NO: 12075 - DNA, 20 bp, synthetic construct
  source 1..20: mol_type = other DNA
cacttacttcgtcctcgcct

SEQ ID NO: 12076 - DNA, 20 bp, synthetic construct
  source 1..20: mol_type = other DNA
tgcggaatcgaacagacatt

SEQ ID NO: 12077 - DNA, 20 bp, synthetic construct
  source 1..20: mol_type = other DNA
ggctactatcgcccgagtaa

SEQ ID NO: 12078 - DNA, 20 bp, synthetic construct
  source 1..20: mol_type = other DNA
gatctatggtccgaataaca

SEQ ID NO: 12079 - DNA, 20 bp, synthetic construct
  source 1..20: mol_type = other DNA
actccatcgcctgtctaggg

SEQ ID NO: 12080 - DNA, 20 bp, synthetic construct
  source 1..20: mol_type = other DNA
agccgcaatgattggatatt

SEQ ID NO: 12081 - DNA, 20 bp, synthetic construct
  source 1..20: mol_type = other DNA
cctaactctgctcacaagga

SEQ ID NO: 12082 - DNA, 20 bp, synthetic construct
  source 1..20: mol_type = other DNA
gatgaaggcactatcaattt

SEQ ID NO: 12083 - DNA, 20 bp, synthetic construct
  source 1..20: mol_type = other DNA
tcacttccatatccaatcgg

SEQ ID NO: 12084 - DNA, 20 bp, synthetic construct
  source 1..20: mol_type = other DNA
cgttactggctgggacgaaa

SEQ ID NO: 12085 - DNA, 20 bp, synthetic construct
  source 1..20: mol_type = other DNA
atacctatgtcacttgagca

SEQ ID NO: 12086 - DNA, 20 bp, synthetic construct
  source 1..20: mol_type = other DNA
ttgtagtatcaagatagagc

SEQ ID NO: 12087 - DNA, 20 bp, synthetic construct
  source 1..20: mol_type = other DNA
gcagagtagcgagttgtatt

SEQ ID NO: 12088 - DNA, 20 bp, synthetic construct
  source 1..20: mol_type = other DNA
taatagagactgagggacct

SEQ ID NO: 12089 - DNA, 20 bp, synthetic construct
  source 1..20: mol_type = other DNA
tatatgatcgggttctggga

SEQ ID NO: 12090 - DNA, 20 bp, synthetic construct
  source 1..20: mol_type = other DNA
ttctccgttgaaagtccagt

SEQ ID NO: 12091 - DNA, 20 bp, synthetic construct
  source 1..20: mol_type = other DNA
atcacagcgatgtaggtgtt

SEQ ID NO: 12092 - DNA, 20 bp, synthetic construct
  source 1..20: mol_type = other DNA
tcgtcactagcctagtctct

SEQ ID NO: 12093 - DNA, 20 bp, synthetic construct
  source 1..20: mol_type = other DNA
ttgcgtaaggaggttgcacc

SEQ ID NO: 12094 - DNA, 20 bp, synthetic construct
  source 1..20: mol_type = other DNA
tttcgatcatccttggctta

SEQ ID NO: 12095 - DNA, 20 bp, synthetic construct
  source 1..20: mol_type = other DNA
acccttctgaggctcgattg

SEQ ID NO: 12096 - DNA, 20 bp, synthetic construct
  source 1..20: mol_type = other DNA
tacctaatgtttaagggcct

SEQ ID NO: 12097 - DNA, 20 bp, synthetic construct
  source 1..20: mol_type = other DNA
ataagtttcgtgctaatgca

SEQ ID NO: 12098 - DNA, 20 bp, synthetic construct
  source 1..20: mol_type = other DNA
agtaaggcgaagatgcactt

SEQ ID NO: 12099 - DNA, 20 bp, synthetic construct
  source 1..20: mol_type = other DNA
gttgcgttacatgtctacct

SEQ ID NO: 12100 - DNA, 20 bp, synthetic construct
  source 1..20: mol_type = other DNA
gtatccttgtcaccttaatc

SEQ ID NO: 12101 - DNA, 20 bp, synthetic construct
  source 1..20: mol_type = other DNA
cgtgattaccagaagcagta

SEQ ID NO: 12102 - DNA, 20 bp, synthetic construct
  source 1..20: mol_type = other DNA
gtcatcttgtaagcgcccgc

SEQ ID NO: 12103 - DNA, 20 bp, synthetic construct
  source 1..20: mol_type = other DNA
agtaaccgacacggactcat

SEQ ID NO: 12104 - DNA, 20 bp, synthetic construct
  source 1..20: mol_type = other DNA
cgtaagatgtggcgacccac

SEQ ID NO: 12105 - DNA, 20 bp, synthetic construct
  source 1..20: mol_type = other DNA
gcaagcaatccagaacacag

SEQ ID NO: 12106 - DNA, 20 bp, synthetic construct
  source 1..20: mol_type = other DNA
tgcaccttatttaacctttc

SEQ ID NO: 12107 - DNA, 20 bp, synthetic construct
  source 1..20: mol_type = other DNA
tggtaaagccaggagccaac

SEQ ID NO: 12108 - DNA, 20 bp, synthetic construct
  source 1..20: mol_type = other DNA
gagttggcgtttgtgccacg

SEQ ID NO: 12109 - DNA, 20 bp, synthetic construct
  source 1..20: mol_type = other DNA
cctgggcatccctgggttac

SEQ ID NO: 12110 - DNA, 20 bp, synthetic construct
  source 1..20: mol_type = other DNA
tgctatgccgcagatgcgga

SEQ ID NO: 12111 - DNA, 20 bp, synthetic construct
  source 1..20: mol_type = other DNA
ctgagaggatttcggttact

SEQ ID NO: 12112 - DNA, 20 bp, synthetic construct
  source 1..20: mol_type = other DNA
gggaacggcagttgctaccg

SEQ ID NO: 12113 - DNA, 20 bp, synthetic construct
  source 1..20: mol_type = other DNA
gatatacaacacacggaagt

SEQ ID NO: 12114 - DNA, 20 bp, synthetic construct
  source 1..20: mol_type = other DNA
tggacaatctatgataatcg

SEQ ID NO: 12115 - DNA, 20 bp, synthetic construct
  source 1..20: mol_type = other DNA
cattctatagtctgagtgca

SEQ ID NO: 12116 - DNA, 20 bp, synthetic construct
  source 1..20: mol_type = other DNA
tagccagaggtatgcactgt

SEQ ID NO: 12117 - DNA, 20 bp, synthetic construct
  source 1..20: mol_type = other DNA
cttagccctaacccgtgatc

SEQ ID NO: 12118 - DNA, 20 bp, synthetic construct
  source 1..20: mol_type = other DNA
actccagttctaggctgaaa

SEQ ID NO: 12119 - DNA, 20 bp, synthetic construct
  source 1..20: mol_type = other DNA
aattgcaagggttccagaat

SEQ ID NO: 12120 - DNA, 20 bp, synthetic construct
  source 1..20: mol_type = other DNA
tccactgattcaacatcgcg

SEQ ID NO: 12121 - DNA, 20 bp, synthetic construct
  source 1..20: mol_type = other DNA
agtctttgagaaagcctgag

SEQ ID NO: 12122 - DNA, 20 bp, synthetic construct
  source 1..20: mol_type = other DNA
ctcacgttgagttcgtagtt

SEQ ID NO: 12123 - DNA, 20 bp, synthetic construct
  source 1..20: mol_type = other DNA
acaaccaccataggagtggc

SEQ ID NO: 12124 - DNA, 20 bp, synthetic construct
  source 1..20: mol_type = other DNA
gattgcactatttctcctgt

SEQ ID NO: 12125 - DNA, 20 bp, synthetic construct
  source 1..20: mol_type = other DNA
ttatctaaggagcaggcgga

SEQ ID NO: 12126 - DNA, 20 bp, synthetic construct
  source 1..20: mol_type = other DNA
tctaagggctggaatgttca

SEQ ID NO: 12127 - DNA, 20 bp, synthetic construct
  source 1..20: mol_type = other DNA
atgcggaaacagggagcagg

SEQ ID NO: 12128 - DNA, 20 bp, synthetic construct
  source 1..20: mol_type = other DNA
gcctacctatgtcggaccgt

SEQ ID NO: 12129 - DNA, 20 bp, synthetic construct
  source 1..20: mol_type = other DNA
ctctttaaggtacacgatta

SEQ ID NO: 12130 - DNA, 20 bp, synthetic construct
  source 1..20: mol_type = other DNA
gaacagcgaactcctgcttt

SEQ ID NO: 12131 - DNA, 20 bp, synthetic construct
  source 1..20: mol_type = other DNA
ggctcggtgatatgagcggt

SEQ ID NO: 12132 - DNA, 20 bp, synthetic construct
  source 1..20: mol_type = other DNA
agcagtgagtatactagaac

SEQ ID NO: 12133 - DNA, 20 bp, synthetic construct
  source 1..20: mol_type = other DNA
gttaatcaaatgggcactcc

SEQ ID NO: 12134 - DNA, 20 bp, synthetic construct
  source 1..20: mol_type = other DNA
gttaggtagcgaaggacgct

SEQ ID NO: 12135 - DNA, 20 bp, synthetic construct
  source 1..20: mol_type = other DNA
cgcccaagatgtctcctgta

SEQ ID NO: 12136 - DNA, 20 bp, synthetic construct
  source 1..20: mol_type = other DNA
cttcttctaaagcctttagc

SEQ ID NO: 12137 - DNA, 20 bp, synthetic construct
  source 1..20: mol_type = other DNA
aatagtcattacttccagga

SEQ ID NO: 12138 - DNA, 20 bp, synthetic construct
  source 1..20: mol_type = other DNA
cgtggcccttgacgtttacc

SEQ ID NO: 12139 - DNA, 20 bp, synthetic construct
  source 1..20: mol_type = other DNA
agactatacaaagatcacag

SEQ ID NO: 12140 - DNA, 20 bp, synthetic construct
  source 1..20: mol_type = other DNA
ttgtactgtccttgtaatgc

SEQ ID NO: 12141 - DNA, 20 bp, synthetic construct
  source 1..20: mol_type = other DNA
tgcttgatctcctgtcaacc

SEQ ID NO: 12142 - DNA, 20 bp, synthetic construct
  source 1..20: mol_type = other DNA
taaggttcagataggcctgt

SEQ ID NO: 12143 - DNA, 20 bp, synthetic construct
  source 1..20: mol_type = other DNA
accgatgggacggcaaatgg

SEQ ID NO: 12144 - DNA, 20 bp, synthetic construct
  source 1..20: mol_type = other DNA
gatgaccctgtgattcgttt

SEQ ID NO: 12145 - DNA, 20 bp, synthetic construct
  source 1..20: mol_type = other DNA
ccatggcacactagcgaatg

SEQ ID NO: 12146 - DNA, 20 bp, synthetic construct
  source 1..20: mol_type = other DNA
tgcgacgtgggcaggaccat

SEQ ID NO: 12147 - DNA, 20 bp, synthetic construct
  source 1..20: mol_type = other DNA
tcactaggtctcgggacagc

SEQ ID NO: 12148 - DNA, 20 bp, synthetic construct
  source 1..20: mol_type = other DNA
gtgaacactatgagcacccg

SEQ ID NO: 12149 - DNA, 20 bp, synthetic construct
  source 1..20: mol_type = other DNA
gctaaacatcgcgatcccgg

SEQ ID NO: 12150 - DNA, 20 bp, synthetic construct
  source 1..20: mol_type = other DNA
ttacaggatccgcgtcgaat

SEQ ID NO: 12151 - DNA, 20 bp, synthetic construct
  source 1..20: mol_type = other DNA
ctatggaacctatgaagtcc

SEQ ID NO: 12152 - DNA, 20 bp, synthetic construct
  source 1..20: mol_type = other DNA
gggctttggagaggtgatct

SEQ ID NO: 12153 - DNA, 20 bp, synthetic construct
  source 1..20: mol_type = other DNA
ccgaactacgaagatatgtc

SEQ ID NO: 12154 - DNA, 20 bp, synthetic construct
  source 1..20: mol_type = other DNA
atttcttgcgaaactgattg

SEQ ID NO: 12155 - DNA, 20 bp, synthetic construct
  source 1..20: mol_type = other DNA
gagagagtgtgcgcaggtca

SEQ ID NO: 12156 - DNA, 20 bp, synthetic construct
  source 1..20: mol_type = other DNA
acgatgccagtgctgcttcg

SEQ ID NO: 12157 - DNA, 20 bp, synthetic construct
  source 1..20: mol_type = other DNA
tatcggtcctccgcctaagc

SEQ ID NO: 12158 - DNA, 20 bp, synthetic construct
  source 1..20: mol_type = other DNA
cagtaagacagaacgtggaa

SEQ ID NO: 12159 - DNA, 20 bp, synthetic construct
  source 1..20: mol_type = other DNA
acccacacggtttagtgtgc

SEQ ID NO: 12160 - DNA, 20 bp, synthetic construct
  source 1..20: mol_type = other DNA
tacaagaataaagcccgcaa

SEQ ID NO: 12161 - DNA, 20 bp, synthetic construct
  source 1..20: mol_type = other DNA
tcggcgacaattgttccata

SEQ ID NO: 12162 - DNA, 20 bp, synthetic construct
  source 1..20: mol_type = other DNA
tagtcccatctcgcgggatg

SEQ ID NO: 12163 - DNA, 20 bp, synthetic construct
  source 1..20: mol_type = other DNA
ataagatctgccgctctccg

SEQ ID NO: 12164 - DNA, 20 bp, synthetic construct
  source 1..20: mol_type = other DNA
ctaatcccatcacatagaag

SEQ ID NO: 12165 - DNA, 20 bp, synthetic construct
  source 1..20: mol_type = other DNA
accagacatgcgtatacatg

SEQ ID NO: 12166 - DNA, 20 bp, synthetic construct
  source 1..20: mol_type = other DNA
gccctgtaccttacttaagt

SEQ ID NO: 12167 - DNA, 20 bp, synthetic construct
  source 1..20: mol_type = other DNA
gcaataatggccacgctttg

SEQ ID NO: 12168 - DNA, 20 bp, synthetic construct
  source 1..20: mol_type = other DNA
tgatactgttgttaccgtat

SEQ ID NO: 12169 - DNA, 20 bp, synthetic construct
  source 1..20: mol_type = other DNA
acatatagcccgcgattccc

SEQ ID NO: 12170 - DNA, 20 bp, synthetic construct
  source 1..20: mol_type = other DNA
cgcgtttgatggcaataacg

SEQ ID NO: 12171 - DNA, 20 bp, synthetic construct
  source 1..20: mol_type = other DNA
aaacaccactcgcaccatca

SEQ ID NO: 12172 - DNA, 20 bp, synthetic construct
  source 1..20: mol_type = other DNA
atatgcgatatgcgtgtaat

SEQ ID NO: 12173 - DNA, 20 bp, synthetic construct
  source 1..20: mol_type = other DNA
gtaccctgacaccggcgatt

SEQ ID NO: 12174 - DNA, 20 bp, synthetic construct
  source 1..20: mol_type = other DNA
tccgtgaccagggccttcat

SEQ ID NO: 12175 - DNA, 20 bp, synthetic construct
  source 1..20: mol_type = other DNA
cggtcgggagaactccgtat

SEQ ID NO: 12176 - DNA, 20 bp, synthetic construct
  source 1..20: mol_type = other DNA
acgtaagacttgagtcccta

SEQ ID NO: 12177 - DNA, 20 bp, synthetic construct
  source 1..20: mol_type = other DNA
cttgtacagatacacctcca

SEQ ID NO: 12178 - DNA, 20 bp, synthetic construct
  source 1..20: mol_type = other DNA
cttaacaacctttgtaaacc

SEQ ID NO: 12179 - DNA, 20 bp, synthetic construct
  source 1..20: mol_type = other DNA
gtatcgtctggatagagaaa

SEQ ID NO: 12180 - DNA, 20 bp, synthetic construct
  source 1..20: mol_type = other DNA
cgactctgtctgacggtctt

SEQ ID NO: 12181 - DNA, 20 bp, synthetic construct
  source 1..20: mol_type = other DNA
tgcccgtaaagcgcatgtaa

SEQ ID NO: 12182 - DNA, 20 bp, synthetic construct
  source 1..20: mol_type = other DNA
gcccgttagaagcatttcga

SEQ ID NO: 12183 - DNA, 20 bp, synthetic construct
  source 1..20: mol_type = other DNA
ggttgtgcttgataagctca

SEQ ID NO: 12184 - DNA, 20 bp, synthetic construct
  source 1..20: mol_type = other DNA
tcggtttcgagggaacacct

SEQ ID NO: 12185 - DNA, 20 bp, synthetic construct
  source 1..20: mol_type = other DNA
accgcacattcgtgcgtgca

SEQ ID NO: 12186 - DNA, 20 bp, synthetic construct
  source 1..20: mol_type = other DNA
gggataacgccacgtgtctt

SEQ ID NO: 12187 - DNA, 20 bp, synthetic construct
  source 1..20: mol_type = other DNA
cccaaccagtcagagctgtg

SEQ ID NO: 12188 - DNA, 20 bp, synthetic construct
  source 1..20: mol_type = other DNA
gacagcgggtaatgaacgga

SEQ ID NO: 12189 - DNA, 20 bp, synthetic construct
  source 1..20: mol_type = other DNA
tgagattgggcgcgctttca

SEQ ID NO: 12190 - DNA, 20 bp, synthetic construct
  source 1..20: mol_type = other DNA
tctcaacaaggtccaataca

SEQ ID NO: 12191 - DNA, 20 bp, synthetic construct
  source 1..20: mol_type = other DNA
tatcgaagtgacgcacccgg

SEQ ID NO: 12192 - DNA, 20 bp, synthetic construct
  source 1..20: mol_type = other DNA
taccggacagatgttagtat

SEQ ID NO: 12193 - DNA, 20 bp, synthetic construct
  source 1..20: mol_type = other DNA
tcgaatctggtgcatacctt

SEQ ID NO: 12194 - DNA, 20 bp, synthetic construct
  source 1..20: mol_type = other DNA
atttctccgcagataaatgt

SEQ ID NO: 12195 - DNA, 20 bp, synthetic construct
  source 1..20: mol_type = other DNA
tagtcggagcttaagtgatt

SEQ ID NO: 12196 - DNA, 20 bp, synthetic construct
  source 1..20: mol_type = other DNA
taatgacctacgaaaggagg

SEQ ID NO: 12197 - DNA, 20 bp, synthetic construct
  source 1..20: mol_type = other DNA
tgttaagggatccagtgctt

SEQ ID NO: 12198 - DNA, 20 bp, synthetic construct
  source 1..20: mol_type = other DNA
gatgtccgttcgcgatcgag

SEQ ID NO: 12199 - DNA, 20 bp, synthetic construct
  source 1..20: mol_type = other DNA
agcccaagctcgcctcttcc

SEQ ID NO: 12200 - DNA, 20 bp, synthetic construct
  source 1..20: mol_type = other DNA
ccttcttggagccggtcaaa

SEQ ID NO: 12201 - DNA, 20 bp, synthetic construct
  source 1..20: mol_type = other DNA
tcgtagagcgacccaagaat

SEQ ID NO: 12202 - DNA, 20 bp, synthetic construct
  source 1..20: mol_type = other DNA
gacatcgtaaccagcctggg

SEQ ID NO: 12203 - DNA, 20 bp, synthetic construct
  source 1..20: mol_type = other DNA
tcctaggcaacgagttctat

SEQ ID NO: 12204 - DNA, 20 bp, synthetic construct
  source 1..20: mol_type = other DNA
tcactgcgcttcgacttctg

SEQ ID NO: 12205 - DNA, 20 bp, synthetic construct
  source 1..20: mol_type = other DNA
gatgatcaggcgctattaga

SEQ ID NO: 12206 - DNA, 20 bp, synthetic construct
  source 1..20: mol_type = other DNA
ctcatgtgatatatgcgatg

SEQ ID NO: 12207 - DNA, 20 bp, synthetic construct
  source 1..20: mol_type = other DNA
gctaacgcatagtattccta

SEQ ID NO: 12208 - DNA, 20 bp, synthetic construct
  source 1..20: mol_type = other DNA
ctagaacagcttcttcgcca

SEQ ID NO: 12209 - DNA, 20 bp, synthetic construct
  source 1..20: mol_type = other DNA
ctgtgtcgcgtcaatctccc

SEQ ID NO: 12210 - DNA, 20 bp, synthetic construct
  source 1..20: mol_type = other DNA
cattatcagtgggcttgaga

SEQ ID NO: 12211 - DNA, 20 bp, synthetic construct
  source 1..20: mol_type = other DNA
tgggtaaattgtgactaccg

SEQ ID NO: 12212 - DNA, 20 bp, synthetic construct
  source 1..20: mol_type = other DNA
gctgtgatggtctaacatgg

SEQ ID NO: 12213 - DNA, 20 bp, synthetic construct
  source 1..20: mol_type = other DNA
gtcttacgcacttcaggttg

SEQ ID NO: 12214 - DNA, 20 bp, synthetic construct
  source 1..20: mol_type = other DNA
cgaacaatataagaacacga

SEQ ID NO: 12215 - DNA, 20 bp, synthetic construct
  source 1..20: mol_type = other DNA
gatcagtgttccgcaaatgc

SEQ ID NO: 12216 - DNA, 20 bp, synthetic construct
  source 1..20: mol_type = other DNA
tggttacaattgaagagagc

SEQ ID NO: 12217 - DNA, 20 bp, synthetic construct
  source 1..20: mol_type = other DNA
gggtcataccacataggtcg

SEQ ID NO: 12218 - DNA, 20 bp, synthetic construct
  source 1..20: mol_type = other DNA
actcctgctcgtaagcgtgg

SEQ ID NO: 12219 - DNA, 20 bp, synthetic construct
  source 1..20: mol_type = other DNA
agaaggttgtgcacgtctcc

SEQ ID NO: 12220 - DNA, 20 bp, synthetic construct
  source 1..20: mol_type = other DNA
gtctactttcgaagcaatat

SEQ ID NO: 12221 - DNA, 20 bp, synthetic construct
  source 1..20: mol_type = other DNA
actcggcagccaacgtaccg

SEQ ID NO: 12222 - DNA, 20 bp, synthetic construct
  source 1..20: mol_type = other DNA
catggctgcttgtggagtac

SEQ ID NO: 12223 - DNA, 20 bp, synthetic construct
  source 1..20: mol_type = other DNA
ggtcaaatgccatttaagag

SEQ ID NO: 12224 - DNA, 20 bp, synthetic construct
  source 1..20: mol_type = other DNA
ataatcttcccaacatcgca

SEQ ID NO: 12225 - DNA, 20 bp, synthetic construct
  source 1..20: mol_type = other DNA
accttccataccgatgttca

SEQ ID NO: 12226 - DNA, 20 bp, synthetic construct
  source 1..20: mol_type = other DNA
aattatggtcggcggagcct

SEQ ID NO: 12227 - DNA, 20 bp, synthetic construct
  source 1..20: mol_type = other DNA
gaatgaatgccttgttgtat

SEQ ID NO: 12228 - DNA, 20 bp, synthetic construct
  source 1..20: mol_type = other DNA
ctaagaaggagcgcttcgcg

SEQ ID NO: 12229 - DNA, 20 bp, synthetic construct
  source 1..20: mol_type = other DNA
ctattcttccaacgtgtatt

SEQ ID NO: 12230 - DNA, 20 bp, synthetic construct
  source 1..20: mol_type = other DNA
cggtcattggtcatatggcg

SEQ ID NO: 12231 - DNA, 20 bp, synthetic construct
  source 1..20: mol_type = other DNA
tcgaggttacgacgccagac

SEQ ID NO: 12232 - DNA, 20 bp, synthetic construct
  source 1..20: mol_type = other DNA
tgagcatgaactggaaacgg

SEQ ID NO: 12233 - DNA, 20 bp, synthetic construct
  source 1..20: mol_type = other DNA
cggtgtcaaggagcacaccg

SEQ ID NO: 12234 - DNA, 20 bp, synthetic construct
  source 1..20: mol_type = other DNA
cagtaagctgaaagcattga

SEQ ID NO: 12235 - DNA, 20 bp, synthetic construct
  source 1..20: mol_type = other DNA
gatagatctaggctaaggac

SEQ ID NO: 12236 - DNA, 20 bp, synthetic construct
  source 1..20: mol_type = other DNA
attcagaaacgtacagcagt

SEQ ID NO: 12237 - DNA, 20 bp, synthetic construct
  source 1..20: mol_type = other DNA
cgacatcgctcaggacatta

SEQ ID NO: 12238 - DNA, 20 bp, synthetic construct
  source 1..20: mol_type = other DNA
ggtgctaccgcatccgtgtg

SEQ ID NO: 12239 - DNA, 20 bp, synthetic construct
  source 1..20: mol_type = other DNA
acgcgaattagttcggcttc

SEQ ID NO: 12240 - DNA, 20 bp, synthetic construct
  source 1..20: mol_type = other DNA
cctttgaattacacaaccaa

SEQ ID NO: 12241 - DNA, 20 bp, synthetic construct
  source 1..20: mol_type = other DNA
atcgagcccttaatgaacag

SEQ ID NO: 12242 - DNA, 20 bp, synthetic construct
  source 1..20: mol_type = other DNA
cacccatcatggacagtagt

SEQ ID NO: 12243 - DNA, 20 bp, synthetic construct
  source 1..20: mol_type = other DNA
gttgaccacctatgttacca

SEQ ID NO: 12244 - DNA, 20 bp, synthetic construct
  source 1..20: mol_type = other DNA
tggaagctagagggtctcaa

SEQ ID NO: 12245 - DNA, 20 bp, synthetic construct
  source 1..20: mol_type = other DNA
gctggtaggtgcgcccaagt

SEQ ID NO: 12246 - DNA, 20 bp, synthetic construct
  source 1..20: mol_type = other DNA
tcgtgttcacaatataccga

SEQ ID NO: 12247 - DNA, 20 bp, synthetic construct
  source 1..20: mol_type = other DNA
tctcattccgcataagactt

SEQ ID NO: 12248 - DNA, 20 bp, synthetic construct
  source 1..20: mol_type = other DNA
tcgttccttctaagaagcgg

SEQ ID NO: 12249 - DNA, 20 bp, synthetic construct
  source 1..20: mol_type = other DNA
tagggatgatcatgtatgat

SEQ ID NO: 12250 - DNA, 20 bp, synthetic construct
  source 1..20: mol_type = other DNA
gataagtcgccagcgccagt

SEQ ID NO: 12251 - DNA, 20 bp, synthetic construct
  source 1..20: mol_type = other DNA
atgacaagggagtagacggt

SEQ ID NO: 12252 - DNA, 20 bp, synthetic construct
  source 1..20: mol_type = other DNA
gacaaattcgcctaactagg

SEQ ID NO: 12253 - DNA, 20 bp, synthetic construct
  source 1..20: mol_type = other DNA
cctacaggatacgtggcgga

SEQ ID NO: 12254 - DNA, 20 bp, synthetic construct
  source 1..20: mol_type = other DNA
ttagcgagggtcatgggatc

SEQ ID NO: 12255 - DNA, 20 bp, synthetic construct
  source 1..20: mol_type = other DNA
agattgtcccataaccgaca

SEQ ID NO: 12256 - DNA, 20 bp, synthetic construct
  source 1..20: mol_type = other DNA
acaggcgtgcaattctcgac

SEQ ID NO: 12257 - DNA, 20 bp, synthetic construct
  source 1..20: mol_type = other DNA
agcacacgatcctgccatcg

SEQ ID NO: 12258 - DNA, 20 bp, synthetic construct
  source 1..20: mol_type = other DNA
ttatgctcacggcaagactc

SEQ ID NO: 12259 - DNA, 20 bp, synthetic construct
  source 1..20: mol_type = other DNA
cgggcaaatcgaaatggaat

SEQ ID NO: 12260 - DNA, 20 bp, synthetic construct
  source 1..20: mol_type = other DNA
accttgtatctggagagtac

SEQ ID NO: 12261 - DNA, 20 bp, synthetic construct
  source 1..20: mol_type = other DNA
cgttgagtctgcggaatcca

SEQ ID NO: 12262 - DNA, 20 bp, synthetic construct
  source 1..20: mol_type = other DNA
ccatttactggtcgcggcta

SEQ ID NO: 12263 - DNA, 20 bp, synthetic construct
  source 1..20: mol_type = other DNA
tgcgagcatagtcccgatca

SEQ ID NO: 12264 - DNA, 20 bp, synthetic construct
  source 1..20: mol_type = other DNA
aggtaaacggatcctttgtc

SEQ ID NO: 12265 - DNA, 20 bp, synthetic construct
  source 1..20: mol_type = other DNA
cctcgttgcggcacctcatt

SEQ ID NO: 12266 - DNA, 20 bp, synthetic construct
  source 1..20: mol_type = other DNA
gtttcattcatcccggatat

SEQ ID NO: 12267 - DNA, 20 bp, synthetic construct
  source 1..20: mol_type = other DNA
gccggtcttaattctactta

SEQ ID NO: 12268 - DNA, 20 bp, synthetic construct
  source 1..20: mol_type = other DNA
gctacactcccgtctaggat

SEQ ID NO: 12269 - DNA, 20 bp, synthetic construct
  source 1..20: mol_type = other DNA
gtcggtggaagtatgcaatc

SEQ ID NO: 12270 - DNA, 20 bp, synthetic construct
  source 1..20: mol_type = other DNA
cgcgctgtatatacagcacc

SEQ ID NO: 12271 - DNA, 20 bp, synthetic construct
  source 1..20: mol_type = other DNA
taaccgtcatagtctgcgat

SEQ ID NO: 12272 - DNA, 20 bp, synthetic construct
  source 1..20: mol_type = other DNA
ccgacgcatggaatccagta

SEQ ID NO: 12273 - DNA, 20 bp, synthetic construct
  source 1..20: mol_type = other DNA
gcttcagacgggaatcacag

SEQ ID NO: 12274 - DNA, 20 bp, synthetic construct
  source 1..20: mol_type = other DNA
ccttgtaatcctgaagtgaa

SEQ ID NO: 12275 - DNA, 20 bp, synthetic construct
  source 1..20: mol_type = other DNA
gtggtatgtgcccaactcat

SEQ ID NO: 12276 - DNA, 20 bp, synthetic construct
  source 1..20: mol_type = other DNA
acatgatgcttcccatagtc

SEQ ID NO: 12277 - DNA, 20 bp, synthetic construct
  source 1..20: mol_type = other DNA
aaacacggctaattcaatgt

SEQ ID NO: 12278 - DNA, 20 bp, synthetic construct
  source 1..20: mol_type = other DNA
acccagtgaacacgtcgttc

SEQ ID NO: 12279 - DNA, 20 bp, synthetic construct
  source 1..20: mol_type = other DNA
ggaacgatgcaagcgggcaa

SEQ ID NO: 12280 - DNA, 20 bp, synthetic construct
  source 1..20: mol_type = other DNA
cagccgcccaacaagtgttt

SEQ ID NO: 12281 - DNA, 20 bp, synthetic construct
  source 1..20: mol_type = other DNA
gctgcggtgtacaggctagt

SEQ ID NO: 12282 - DNA, 20 bp, synthetic construct
  source 1..20: mol_type = other DNA
ctcgactcgtctccatatcc

SEQ ID NO: 12283 - DNA, 20 bp, synthetic construct
  source 1..20: mol_type = other DNA
gcatgcacaattaccggcga

SEQ ID NO: 12284 - DNA, 20 bp, synthetic construct
  source 1..20: mol_type = other DNA
gggattctcagtacgaggaa

SEQ ID NO: 12285 - DNA, 20 bp, synthetic construct
  source 1..20: mol_type = other DNA
gtagtgataaccttcacggt

SEQ ID NO: 12286 - DNA, 20 bp, synthetic construct
  source 1..20: mol_type = other DNA
cccattctactaaccctgag

SEQ ID NO: 12287 - DNA, 20 bp, synthetic construct
  source 1..20: mol_type = other DNA
ctttacagcaagctgatgtg

SEQ ID NO: 12288 - DNA, 20 bp, synthetic construct
  source 1..20: mol_type = other DNA
tttacggtttgtctactagc

SEQ ID NO: 12289 - DNA, 20 bp, synthetic construct
  source 1..20: mol_type = other DNA
tgtggaaggattaaccgact

SEQ ID NO: 12290 - DNA, 20 bp, synthetic construct
  source 1..20: mol_type = other DNA
aaagtcgcaaccacgacttt

SEQ ID NO: 12291 - DNA, 20 bp, synthetic construct
  source 1..20: mol_type = other DNA
tgcgtagaacgcggtcttca

SEQ ID NO: 12292 - DNA, 20 bp, synthetic construct
  source 1..20: mol_type = other DNA
ctgcagcacactcctggttc

SEQ ID NO: 12293 - DNA, 20 bp, synthetic construct
  source 1..20: mol_type = other DNA
aggcctggttgaaacgacag

SEQ ID NO: 12294 - DNA, 20 bp, synthetic construct
  source 1..20: mol_type = other DNA
gaacgcgggcggtcgtatca

SEQ ID NO: 12295 - DNA, 20 bp, synthetic construct
  source 1..20: mol_type = other DNA
tgttgttaaagagccacgag

SEQ ID NO: 12296 - DNA, 20 bp, synthetic construct
  source 1..20: mol_type = other DNA
actggacgggacgttagcgc

SEQ ID NO: 12297 - DNA, 20 bp, synthetic construct
  source 1..20: mol_type = other DNA
attagcatttgggtggatct

SEQ ID NO: 12298 - DNA, 20 bp, synthetic construct
  source 1..20: mol_type = other DNA
ctaacgccggttctgacagg

SEQ ID NO: 12299 - DNA, 20 bp, synthetic construct
  source 1..20: mol_type = other DNA
gaccaaataacaaccgatag

SEQ ID NO: 12300 - DNA, 20 bp, synthetic construct
  source 1..20: mol_type = other DNA
ggatagaggtttactatact

SEQ ID NO: 12301 - DNA, 20 bp, synthetic construct
  source 1..20: mol_type = other DNA
cggcatagccgtataagagt

SEQ ID NO: 12302 - DNA, 20 bp, synthetic construct
  source 1..20: mol_type = other DNA
tgtggacggaaagccttaat

SEQ ID NO: 12303 - DNA, 20 bp, synthetic construct
  source 1..20: mol_type = other DNA
gcacgtaatccaccaggtgg

SEQ ID NO: 12304 - DNA, 20 bp, synthetic construct
  source 1..20: mol_type = other DNA
acgagacatcgttagaaagc

SEQ ID NO: 12305 - DNA, 20 bp, synthetic construct
  source 1..20: mol_type = other DNA
aaatagggagccgctaaact

SEQ ID NO: 12306 - DNA, 20 bp, synthetic construct
  source 1..20: mol_type = other DNA
aggccatcctcattgtcgtt

SEQ ID NO: 12307 - DNA, 20 bp, synthetic construct
  source 1..20: mol_type = other DNA
ttcgacagttccatgcactt

SEQ ID NO: 12308 - DNA, 20 bp, synthetic construct
  source 1..20: mol_type = other DNA
aaatatagcaagcgccgagc

SEQ ID NO: 12309 - DNA, 20 bp, synthetic construct
  source 1..20: mol_type = other DNA
aaatatgatcagtcaggata

SEQ ID NO: 12310 - DNA, 20 bp, synthetic construct
  source 1..20: mol_type = other DNA
cctagcgggatattagtcgg

SEQ ID NO: 12311 - DNA, 20 bp, synthetic construct
  source 1..20: mol_type = other DNA
gtattgctgtcgggtatctc

SEQ ID NO: 12312 - DNA, 20 bp, synthetic construct
  source 1..20: mol_type = other DNA
gcaacatcggaagctaaccc

SEQ ID NO: 12313 - DNA, 20 bp, synthetic construct
  source 1..20: mol_type = other DNA
gcgacagaccaaacactctg

SEQ ID NO: 12314 - DNA, 20 bp, synthetic construct
  source 1..20: mol_type = other DNA
ggtgataatcccacagtatt

SEQ ID NO: 12315 - DNA, 20 bp, synthetic construct
  source 1..20: mol_type = other DNA
cgcagggagcacaatgcact

SEQ ID NO: 12316 - DNA, 20 bp, synthetic construct
  source 1..20: mol_type = other DNA
ggatccgtttcagccgacgg

SEQ ID NO: 12317 - DNA, 20 bp, synthetic construct
  source 1..20: mol_type = other DNA
gcttattcgagcttgtgata

SEQ ID NO: 12318 - DNA, 20 bp, synthetic construct
  source 1..20: mol_type = other DNA
ccgctaaagaatttattcgc

SEQ ID NO: 12319 - DNA, 20 bp, synthetic construct
  source 1..20: mol_type = other DNA
ctatgaaccatatttcctgt

SEQ ID NO: 12320 - DNA, 20 bp, synthetic construct
  source 1..20: mol_type = other DNA
accggtattagcgagatgga

SEQ ID NO: 12321 - DNA, 20 bp, synthetic construct
  source 1..20: mol_type = other DNA
taggtgaacggcgcagttgt

SEQ ID NO: 12322 - DNA, 20 bp, synthetic construct
  source 1..20: mol_type = other DNA
ttaagggtgcacataggact

SEQ ID NO: 12323 - DNA, 20 bp, synthetic construct
  source 1..20: mol_type = other DNA
agtttgagcgccgggcatgt

SEQ ID NO: 12324 - DNA, 20 bp, synthetic construct
  source 1..20: mol_type = other DNA
cattaacgtatgtcttgata

SEQ ID NO: 12325 - DNA, 20 bp, synthetic construct
  source 1..20: mol_type = other DNA
ggtgaagcgttggcaccact

SEQ ID NO: 12326 - DNA, 20 bp, synthetic construct
  source 1..20: mol_type = other DNA
tgatttccaactcttccaac

SEQ ID NO: 12327 - DNA, 20 bp, synthetic construct
  source 1..20: mol_type = other DNA
ttctgatgcctagggtgaaa

SEQ ID NO: 12328 - DNA, 20 bp, synthetic construct
  source 1..20: mol_type = other DNA
gtgcgtcgaataggcatccc

SEQ ID NO: 12329 - DNA, 20 bp, synthetic construct
  source 1..20: mol_type = other DNA
agtggtggcgtaggcaagtg

SEQ ID NO: 12330 - DNA, 20 bp, synthetic construct
  source 1..20: mol_type = other DNA
ctaacgaacctgcgcgtagt

SEQ ID NO: 12331 - DNA, 20 bp, synthetic construct
  source 1..20: mol_type = other DNA
cctctctatgccagcttggg

SEQ ID NO: 12332 - DNA, 20 bp, synthetic construct
  source 1..20: mol_type = other DNA
ggacccggattagacataac

SEQ ID NO: 12333 - DNA, 20 bp, synthetic construct
  source 1..20: mol_type = other DNA
caggataggcatggcctcgg

SEQ ID NO: 12334 - DNA, 20 bp, synthetic construct
  source 1..20: mol_type = other DNA
taagtctctcagaggttgct

SEQ ID NO: 12335 - DNA, 20 bp, synthetic construct
  source 1..20: mol_type = other DNA
acggtgtcggtgcgattaga

SEQ ID NO: 12336 - DNA, 20 bp, synthetic construct
  source 1..20: mol_type = other DNA
cccgccctttcgagtatgtt

SEQ ID NO: 12337 - DNA, 20 bp, synthetic construct
  source 1..20: mol_type = other DNA
ttccaatgctgttcggttta

SEQ ID NO: 12338 - DNA, 20 bp, synthetic construct
  source 1..20: mol_type = other DNA
tgatcgggcgttccgatggc

SEQ ID NO: 12339 - DNA, 20 bp, synthetic construct
  source 1..20: mol_type = other DNA
gcctacctagtaaatcggtc

SEQ ID NO: 12340 - DNA, 20 bp, synthetic construct
  source 1..20: mol_type = other DNA
gagtcgctcttgccaggtgg

SEQ ID NO: 12341 - DNA, 20 bp, synthetic construct
  source 1..20: mol_type = other DNA
gcacaacggtcaccggtgac

SEQ ID NO: 12342 - DNA, 20 bp, synthetic construct
  source 1..20: mol_type = other DNA
gtattaaccaggccaggacc

SEQ ID NO: 12343 - DNA, 20 bp, synthetic construct
  source 1..20: mol_type = other DNA
aaatgaggaaccagcggtat

SEQ ID NO: 12344 - DNA, 20 bp, synthetic construct
  source 1..20: mol_type = other DNA
atgcctcatccacacgacgc

SEQ ID NO: 12345 - DNA, 20 bp, synthetic construct
  source 1..20: mol_type = other DNA
atgcgtccatagagttctac

SEQ ID NO: 12346 - DNA, 20 bp, synthetic construct
  source 1..20: mol_type = other DNA
gaaactagtgcgcgtaaggc

SEQ ID NO: 12347 - DNA, 20 bp, synthetic construct
  source 1..20: mol_type = other DNA
acttgcttagtcaaagaccg

SEQ ID NO: 12348 - DNA, 20 bp, synthetic construct
  source 1..20: mol_type = other DNA
acctcacaaacgcctgcggg

SEQ ID NO: 12349 - DNA, 20 bp, synthetic construct
  source 1..20: mol_type = other DNA
cacacttgaaatgccgaccc

SEQ ID NO: 12350 - DNA, 20 bp, synthetic construct
  source 1..20: mol_type = other DNA
caaccgctcgcgctaaggaa

SEQ ID NO: 12351 - DNA, 20 bp, synthetic construct
  source 1..20: mol_type = other DNA
actattgccatcttagtacg

SEQ ID NO: 12352 - DNA, 20 bp, synthetic construct
  source 1..20: mol_type = other DNA
tttgtagtgatctatgctga

SEQ ID NO: 12353 - DNA, 20 bp, synthetic construct
  source 1..20: mol_type = other DNA
cgcagtgtagtatcaatgca

SEQ ID NO: 12354 - DNA, 20 bp, synthetic construct
  source 1..20: mol_type = other DNA
cttcctcatgacagcgcgaa

SEQ ID NO: 12355 - DNA, 20 bp, synthetic construct
  source 1..20: mol_type = other DNA
cggcaatgggatcggagcct

SEQ ID NO: 12356 - DNA, 20 bp, synthetic construct
  source 1..20: mol_type = other DNA
gcccggcgctttatccagta

SEQ ID NO: 12357 - DNA, 20 bp, synthetic construct
  source 1..20: mol_type = other DNA
aaagcgaacaggcgcaccgg

SEQ ID NO: 12358 - DNA, 20 bp, synthetic construct
  source 1..20: mol_type = other DNA
cgtcaagctgtgacggcatt

SEQ ID NO: 12359 - DNA, 20 bp, synthetic construct
  source 1..20: mol_type = other DNA
cgtgaatctcggcatcccat

SEQ ID NO: 12360 - DNA, 20 bp, synthetic construct
  source 1..20: mol_type = other DNA
gctactactcttatcccacg

SEQ ID NO: 12361 - DNA, 20 bp, synthetic construct
  source 1..20: mol_type = other DNA
gcgacctaccgcctacatta

SEQ ID NO: 12362 - DNA, 20 bp, synthetic construct
  source 1..20: mol_type = other DNA
tgtatcaatatatctctggt

SEQ ID NO: 12363 - DNA, 20 bp, synthetic construct
  source 1..20: mol_type = other DNA
gctcattggtagaattgcaa

SEQ ID NO: 12364 - DNA, 20 bp, synthetic construct
  source 1..20: mol_type = other DNA
ctctacgtgatacaatcctc

SEQ ID NO: 12365 - DNA, 20 bp, synthetic construct
  source 1..20: mol_type = other DNA
acagatacagacgaaacgca

SEQ ID NO: 12366 - DNA, 20 bp, synthetic construct
  source 1..20: mol_type = other DNA
ctgcgctataccttgtaatg

SEQ ID NO: 12367 - DNA, 20 bp, synthetic construct
  source 1..20: mol_type = other DNA
gaatagaccaagacgggagg

SEQ ID NO: 12368 - DNA, 20 bp, synthetic construct
  source 1..20: mol_type = other DNA
tgaatacccagggtccttgg

SEQ ID NO: 12369 - DNA, 20 bp, synthetic construct
  source 1..20: mol_type = other DNA
cgtaacctgtcgctattcgg

SEQ ID NO: 12370 - DNA, 20 bp, synthetic construct
  source 1..20: mol_type = other DNA
actctgaactctgcgtccta

SEQ ID NO: 12371 - DNA, 20 bp, synthetic construct
  source 1..20: mol_type = other DNA
ctaaacatcctcgactggac

SEQ ID NO: 12372 - DNA, 20 bp, synthetic construct
  source 1..20: mol_type = other DNA
ttgagatcttggcacaaatc

SEQ ID NO: 12373 - DNA, 20 bp, synthetic construct
  source 1..20: mol_type = other DNA
ttggatcattagaaagggtg

SEQ ID NO: 12374 - DNA, 20 bp, synthetic construct
  source 1..20: mol_type = other DNA
cgggtgtgagtatgctcatg

SEQ ID NO: 12375 - DNA, 20 bp, synthetic construct
  source 1..20: mol_type = other DNA
gctcctccagttactggtag

SEQ ID NO: 12376 - DNA, 20 bp, synthetic construct
  source 1..20: mol_type = other DNA
ggtagtttcccatcagcatt

SEQ ID NO: 12377 - DNA, 20 bp, synthetic construct
  source 1..20: mol_type = other DNA
agatcccggtgtgggttcac

SEQ ID NO: 12378 - DNA, 20 bp, synthetic construct
  source 1..20: mol_type = other DNA
gagttctgaggccgagggat

SEQ ID NO: 12379 - DNA, 20 bp, synthetic construct
  source 1..20: mol_type = other DNA
agtgatgtgtgcctagattt

SEQ ID NO: 12380 - DNA, 20 bp, synthetic construct
  source 1..20: mol_type = other DNA
taccttatgacggtacgacc

SEQ ID NO: 12381 - DNA, 20 bp, synthetic construct
  source 1..20: mol_type = other DNA
tcgtgggccaagttcaaaga

SEQ ID NO: 12382 - DNA, 20 bp, synthetic construct
  source 1..20: mol_type = other DNA
ttgcacggtcgcggcattaa

SEQ ID NO: 12383 - DNA, 20 bp, synthetic construct
  source 1..20: mol_type = other DNA
gctgcccgctacaggatgtt

SEQ ID NO: 12384 - DNA, 20 bp, synthetic construct
  source 1..20: mol_type = other DNA
actcgatggcaggaggttcc

SEQ ID NO: 12385 - DNA, 20 bp, synthetic construct
  source 1..20: mol_type = other DNA
tattagcagccgcctccatt

SEQ ID NO: 12386 - DNA, 20 bp, synthetic construct
  source 1..20: mol_type = other DNA
cactaagttggctgaaacca

SEQ ID NO: 12387 - DNA, 20 bp, synthetic construct
  source 1..20: mol_type = other DNA
ttgttactcagtgggatttg

SEQ ID NO: 12388 - DNA, 20 bp, synthetic construct
  source 1..20: mol_type = other DNA
ttccgacgggcccactacga

SEQ ID NO: 12389 - DNA, 20 bp, synthetic construct
  source 1..20: mol_type = other DNA
gggtcttagcttgtaagaca

SEQ ID NO: 12390 - DNA, 20 bp, synthetic construct
  source 1..20: mol_type = other DNA
gtgcctctaataatatccgg

SEQ ID NO: 12391 - DNA, 20 bp, synthetic construct
  source 1..20: mol_type = other DNA
tgtctgtcatgccgttgcca

SEQ ID NO: 12392 - DNA, 20 bp, synthetic construct
  source 1..20: mol_type = other DNA
ttggttgcgtgaggttggtg

SEQ ID NO: 12393 - DNA, 20 bp, synthetic construct
  source 1..20: mol_type = other DNA
ttgagcgtagattaccttga

SEQ ID NO: 12394 - DNA, 20 bp, synthetic construct
  source 1..20: mol_type = other DNA
aatacaattgcgcacactcg

SEQ ID NO: 12395 - DNA, 20 bp, synthetic construct
  source 1..20: mol_type = other DNA
agctcagagatgtctacctt

SEQ ID NO: 12396 - DNA, 20 bp, synthetic construct
  source 1..20: mol_type = other DNA
acttacaatccaccaagcga

SEQ ID NO: 12397 - DNA, 20 bp, synthetic construct
  source 1..20: mol_type = other DNA
ttcttcgttgggcctttaga

SEQ ID NO: 12398 - DNA, 20 bp, synthetic construct
  source 1..20: mol_type = other DNA
tcatcacgtagcttggacta

SEQ ID NO: 12399 - DNA, 20 bp, synthetic construct
  source 1..20: mol_type = other DNA
gctgacaatgccatataacc

SEQ ID NO: 12400 - DNA, 20 bp, synthetic construct
  source 1..20: mol_type = other DNA
gaaacaagctacgaattatg

SEQ ID NO: 12401 - DNA, 20 bp, synthetic construct
  source 1..20: mol_type = other DNA
ctcgtatctcaccaaatctt

SEQ ID NO: 12402 - DNA, 20 bp, synthetic construct
  source 1..20: mol_type = other DNA
tctgcgtgtgaagcaaggtt

SEQ ID NO: 12403 - DNA, 20 bp, synthetic construct
  source 1..20: mol_type = other DNA
ggaatggagcaatccttgtg

SEQ ID NO: 12404 - DNA, 20 bp, synthetic construct
  source 1..20: mol_type = other DNA
cacctactctttatgatgca

SEQ ID NO: 12405 - DNA, 20 bp, synthetic construct
  source 1..20: mol_type = other DNA
ggaatctgagtttgcactat

SEQ ID NO: 12406 - DNA, 20 bp, synthetic construct
  source 1..20: mol_type = other DNA
caagaacaaagaacgccggc

SEQ ID NO: 12407 - DNA, 20 bp, synthetic construct
  source 1..20: mol_type = other DNA
cgcaacggttagtataaatc

SEQ ID NO: 12408 - DNA, 20 bp, synthetic construct
  source 1..20: mol_type = other DNA
ggttcgattccatgagtgat

SEQ ID NO: 12409 - DNA, 20 bp, synthetic construct
  source 1..20: mol_type = other DNA
ggtctgctgtcaaccctgac

SEQ ID NO: 12410 - DNA, 20 bp, synthetic construct
  source 1..20: mol_type = other DNA
tgtatttctagcggaatcta

SEQ ID NO: 12411 - DNA, 20 bp, synthetic construct
  source 1..20: mol_type = other DNA
gttcgtcatgccgcacgcta

SEQ ID NO: 12412 - DNA, 20 bp, synthetic construct
  source 1..20: mol_type = other DNA
ccgggaatgaaggccgagcg

SEQ ID NO: 12413 - DNA, 20 bp, synthetic construct
  source 1..20: mol_type = other DNA
caaagagggcaacacaacaa

SEQ ID NO: 12414 - DNA, 20 bp, synthetic construct
  source 1..20: mol_type = other DNA
cagtcccaaacgactagcgg

SEQ ID NO: 12415 - DNA, 20 bp, synthetic construct
  source 1..20: mol_type = other DNA
cgacacatcagtcttctagt

SEQ ID NO: 12416 - DNA, 20 bp, synthetic construct
  source 1..20: mol_type = other DNA
cttctaagagcagacacgtg

SEQ ID NO: 12417 - DNA, 20 bp, synthetic construct
  source 1..20: mol_type = other DNA
ttgggtacgcgtcagtcgct

SEQ ID NO: 12418 - DNA, 20 bp, synthetic construct
  source 1..20: mol_type = other DNA
ccagagaaagcggtactagc

SEQ ID NO: 12419 - DNA, 20 bp, synthetic construct
  source 1..20: mol_type = other DNA
ttcgcagacccatttactcg

SEQ ID NO: 12420 - DNA, 20 bp, synthetic construct
  source 1..20: mol_type = other DNA
caaaggtacagcggtacgcg

SEQ ID NO: 12421 - DNA, 20 bp, synthetic construct
  source 1..20: mol_type = other DNA
ccttgacttgaccttaacta

SEQ ID NO: 12422 - DNA, 20 bp, synthetic construct
  source 1..20: mol_type = other DNA
ctctcctcgcgaccactgag

SEQ ID NO: 12423 - DNA, 20 bp, synthetic construct
  source 1..20: mol_type = other DNA
ccgggtctcgatagagtgtt

SEQ ID NO: 12424 - DNA, 20 bp, synthetic construct
  source 1..20: mol_type = other DNA
ctactagacaatgttagctt

SEQ ID NO: 12425 - DNA, 20 bp, synthetic construct
  source 1..20: mol_type = other DNA
cttgatcatcgaaccatact

SEQ ID NO: 12426 - DNA, 20 bp, synthetic construct
  source 1..20: mol_type = other DNA
aggcagttgggtaccgtgtt

SEQ ID NO: 12427 - DNA, 20 bp, synthetic construct
  source 1..20: mol_type = other DNA
ttcccttgaagctgattcga

SEQ ID NO: 12428 - DNA, 20 bp, synthetic construct
  source 1..20: mol_type = other DNA
cggagtaggcatataggaac

SEQ ID NO: 12429 - DNA, 20 bp, synthetic construct
  source 1..20: mol_type = other DNA
cgtgatgaggacactgtatt

SEQ ID NO: 12430 - DNA, 20 bp, synthetic construct
  source 1..20: mol_type = other DNA
ttgggctgggaataaacata

SEQ ID NO: 12431 - DNA, 20 bp, synthetic construct
  source 1..20: mol_type = other DNA
tgaaatagacgtaacactcg

SEQ ID NO: 12432 - DNA, 20 bp, synthetic construct
  source 1..20: mol_type = other DNA
tcaaacatttcgcaagcatc

SEQ ID NO: 12433 - DNA, 20 bp, synthetic construct
  source 1..20: mol_type = other DNA
ctaccatggacaagtgaata

SEQ ID NO: 12434 - DNA, 20 bp, synthetic construct
  source 1..20: mol_type = other DNA
ctcgactgcacccgtgcaaa

SEQ ID NO: 12435 - DNA, 20 bp, synthetic construct
  source 1..20: mol_type = other DNA
gggagttaatggacaagttt

SEQ ID NO: 12436 - DNA, 20 bp, synthetic construct
  source 1..20: mol_type = other DNA
cacatcggctgacgttagtc

SEQ ID NO: 12437 - DNA, 20 bp, synthetic construct
  source 1..20: mol_type = other DNA
ttcctttctagcgactttac

SEQ ID NO: 12438 - DNA, 20 bp, synthetic construct
  source 1..20: mol_type = other DNA
gattggaatactttagcggg

SEQ ID NO: 12439 - DNA, 20 bp, synthetic construct
  source 1..20: mol_type = other DNA
gtcggaggttctgcagtcat

SEQ ID NO: 12440 - DNA, 20 bp, synthetic construct
  source 1..20: mol_type = other DNA
cggtttgaggataggatctt

SEQ ID NO: 12441 - DNA, 20 bp, synthetic construct
  source 1..20: mol_type = other DNA
tatttgcatgtatgggctgg

SEQ ID NO: 12442 - DNA, 20 bp, synthetic construct
  source 1..20: mol_type = other DNA
atccaactgtcagaacccga

SEQ ID NO: 12443 - DNA, 20 bp, synthetic construct
  source 1..20: mol_type = other DNA
ccacgtttcgaagctagact

SEQ ID NO: 12444 - DNA, 20 bp, synthetic construct
  source 1..20: mol_type = other DNA
acagccttagtcccaatagg

SEQ ID NO: 12445 - DNA, 20 bp, synthetic construct
  source 1..20: mol_type = other DNA
aggtgcgattccctccattt

SEQ ID NO: 12446 - DNA, 20 bp, synthetic construct
  source 1..20: mol_type = other DNA
agcgccttgaagcatgagga

SEQ ID NO: 12447 - DNA, 20 bp, synthetic construct
  source 1..20: mol_type = other DNA
cgtcgtatttcggagcgctt

SEQ ID NO: 12448 - DNA, 20 bp, synthetic construct
  source 1..20: mol_type = other DNA
cctggtaggaatacggaccg

SEQ ID NO: 12449 - DNA, 20 bp, synthetic construct
  source 1..20: mol_type = other DNA
gctgtaataatctccctcac

SEQ ID NO: 12450 - DNA, 20 bp, synthetic construct
  source 1..20: mol_type = other DNA
atctctgacggcaaggttcc

SEQ ID NO: 12451 - DNA, 20 bp, synthetic construct
  source 1..20: mol_type = other DNA
gtgtgttggtttccatcgga

SEQ ID NO: 12452 - DNA, 20 bp, synthetic construct
  source 1..20: mol_type = other DNA
gcgtcagcgtatcacgaagt

SEQ ID NO: 12453 - DNA, 20 bp, synthetic construct
  source 1..20: mol_type = other DNA
tttcacaatctagttatccg

SEQ ID NO: 12454 - DNA, 20 bp, synthetic construct
  source 1..20: mol_type = other DNA
ctacgcccgccgataaggat

SEQ ID NO: 12455 - DNA, 20 bp, synthetic construct
  source 1..20: mol_type = other DNA
ctgacactattaaccgtcgt

SEQ ID NO: 12456 - DNA, 20 bp, synthetic construct
  source 1..20: mol_type = other DNA
tacgtagtacatactacgag

SEQ ID NO: 12457 - DNA, 20 bp, synthetic construct
  source 1..20: mol_type = other DNA
cccagctcttcagtacaaga

SEQ ID NO: 12458 - DNA, 20 bp, synthetic construct
  source 1..20: mol_type = other DNA
gcgtaagtccctcagcgtga

SEQ ID NO: 12459 - DNA, 20 bp, synthetic construct
  source 1..20: mol_type = other DNA
tcgcagtgtcggagttatct

SEQ ID NO: 12460 - DNA, 20 bp, synthetic construct
  source 1..20: mol_type = other DNA
tatgcgtgtaacattcaaac

SEQ ID NO: 12461 - DNA, 20 bp, synthetic construct
  source 1..20: mol_type = other DNA
atcggtttccttctcaaagc

SEQ ID NO: 12462 - DNA, 20 bp, synthetic construct
  source 1..20: mol_type = other DNA
tggagccatcaaacatagcg

SEQ ID NO: 12463 - DNA, 20 bp, synthetic construct
  source 1..20: mol_type = other DNA
tcgcagaaacggtcgcgagg

SEQ ID NO: 12464 - DNA, 20 bp, synthetic construct
  source 1..20: mol_type = other DNA
tggaggtgctctgatgcgga

SEQ ID NO: 12465 - DNA, 20 bp, synthetic construct
  source 1..20: mol_type = other DNA
ggtgacggatagatcaggac

SEQ ID NO: 12466 - DNA, 20 bp, synthetic construct
  source 1..20: mol_type = other DNA
tgtaggccgtggactgggtt

SEQ ID NO: 12467 - DNA, 20 bp, synthetic construct
  source 1..20: mol_type = other DNA
ttgcaatttcgggcggataa

SEQ ID NO: 12468 - DNA, 20 bp, synthetic construct
  source 1..20: mol_type = other DNA
cgaacggacttatccgtccc

SEQ ID NO: 12469 - DNA, 20 bp, synthetic construct
  source 1..20: mol_type = other DNA
tgagctgagaatttcgaagc

SEQ ID NO: 12470 - DNA, 20 bp, synthetic construct
  source 1..20: mol_type = other DNA
gtgttgtatgtgctttcgtc

SEQ ID NO: 12471 - DNA, 20 bp, synthetic construct
  source 1..20: mol_type = other DNA
tgtatctggaacatgaagcg

SEQ ID NO: 12472 - DNA, 20 bp, synthetic construct
  source 1..20: mol_type = other DNA
catgcaatcaagcgtcagcg

SEQ ID NO: 12473 - DNA, 20 bp, synthetic construct
  source 1..20: mol_type = other DNA
cacaagggctgggttccaaa

SEQ ID NO: 12474 - DNA, 20 bp, synthetic construct
  source 1..20: mol_type = other DNA
ccctacccagatctcgtcac

SEQ ID NO: 12475 - DNA, 20 bp, synthetic construct
  source 1..20: mol_type = other DNA
ttacgacaaggctacatgtg

SEQ ID NO: 12476 - DNA, 20 bp, synthetic construct
  source 1..20: mol_type = other DNA
tctctctgcaatcatgtccg

SEQ ID NO: 12477 - DNA, 20 bp, synthetic construct
  source 1..20: mol_type = other DNA
aagattggtcgtctatgctt

SEQ ID NO: 12478 - DNA, 20 bp, synthetic construct
  source 1..20: mol_type = other DNA
agttggattagtccgtaatc

SEQ ID NO: 12479 - DNA, 20 bp, synthetic construct
  source 1..20: mol_type = other DNA
ttaacaagtattcaacggca

SEQ ID NO: 12480 - DNA, 20 bp, synthetic construct
  source 1..20: mol_type = other DNA
gaccagcaataacgcaagtc

SEQ ID NO: 12481 - DNA, 20 bp, synthetic construct
  source 1..20: mol_type = other DNA
cggccacatacgaatttgaa

SEQ ID NO: 12482 - DNA, 20 bp, synthetic construct
  source 1..20: mol_type = other DNA
ccgaatgcttggtccctgga

SEQ ID NO: 12483 - DNA, 20 bp, synthetic construct
  source 1..20: mol_type = other DNA
gtgggcaactaaacgaacgc

SEQ ID NO: 12484 - DNA, 20 bp, synthetic construct
  source 1..20: mol_type = other DNA
gccaaggaaagtggcgacat

SEQ ID NO: 12485 - DNA, 20 bp, synthetic construct
  source 1..20: mol_type = other DNA
tcaacaggcaaccgacatca

SEQ ID NO: 12486 - DNA, 20 bp, synthetic construct
  source 1..20: mol_type = other DNA
gagggcttgaccctggcttg

SEQ ID NO: 12487 - DNA, 20 bp, synthetic construct
  source 1..20: mol_type = other DNA
cactcgtctaccttgtgaaa

SEQ ID NO: 12488 - DNA, 20 bp, synthetic construct
  source 1..20: mol_type = other DNA
taggcgcacgctgggaatga

SEQ ID NO: 12489 - DNA, 20 bp, synthetic construct
  source 1..20: mol_type = other DNA
agataccaagcggtgctagt

SEQ ID NO: 12490 - DNA, 20 bp, synthetic construct
  source 1..20: mol_type = other DNA
tgacgcgtgggtgtgacatg

SEQ ID NO: 12491 - DNA, 20 bp, synthetic construct
  source 1..20: mol_type = other DNA
agtaaatgagttaggatcgt

SEQ ID NO: 12492 - DNA, 20 bp, synthetic construct
  source 1..20: mol_type = other DNA
cggccacggaatacggcgaa

SEQ ID NO: 12493 - DNA, 20 bp, synthetic construct
  source 1..20: mol_type = other DNA
cgcccggaactcaatactct

SEQ ID NO: 12494 - DNA, 20 bp, synthetic construct
  source 1..20: mol_type = other DNA
cgttacgaaagtacgaacta

SEQ ID NO: 12495 - DNA, 20 bp, synthetic construct
  source 1..20: mol_type = other DNA
ttgaattgcggttggatagc

SEQ ID NO: 12496 - DNA, 20 bp, synthetic construct
  source 1..20: mol_type = other DNA
gttattcccgtgtggaatac

SEQ ID NO: 12497 - DNA, 20 bp, synthetic construct
  source 1..20: mol_type = other DNA
acggtaaagattacaaccgg

SEQ ID NO: 12498 - DNA, 20 bp, synthetic construct
  source 1..20: mol_type = other DNA
gtctacgggaataactgcac

SEQ ID NO: 12499 - DNA, 20 bp, synthetic construct
  source 1..20: mol_type = other DNA
caattagttcagtgactgat

SEQ ID NO: 12500 - DNA, 20 bp, synthetic construct
  source 1..20: mol_type = other DNA
aaacgcagttgtcagtcagg

SEQ ID NO: 12501 - DNA, 20 bp, synthetic construct
  source 1..20: mol_type = other DNA
ttgtgtgtgatataggcgtc

SEQ ID NO: 12502 - DNA, 20 bp, synthetic construct
  source 1..20: mol_type = other DNA
ggtaggccttgctctgctgc

SEQ ID NO: 12503 - DNA, 20 bp, synthetic construct
  source 1..20: mol_type = other DNA
gtccgtccaggccaacttga

SEQ ID NO: 12504 - DNA, 20 bp, synthetic construct
  source 1..20: mol_type = other DNA
gtagcaagcacaagtggtct

SEQ ID NO: 12505 - DNA, 20 bp, synthetic construct
  source 1..20: mol_type = other DNA
gtaagcacatcacaggcacc

SEQ ID NO: 12506 - DNA, 20 bp, synthetic construct
  source 1..20: mol_type = other DNA
taccgcctcagcgcgattgc

SEQ ID NO: 12507 - DNA, 20 bp, synthetic construct
  source 1..20: mol_type = other DNA
ggtaaccgtcctaaggacca

SEQ ID NO: 12508 - DNA, 20 bp, synthetic construct
  source 1..20: mol_type = other DNA
aaacaagctgtgctctctgt

SEQ ID NO: 12509 - DNA, 20 bp, synthetic construct
  source 1..20: mol_type = other DNA
attgcacacttctgcggcga

SEQ ID NO: 12510 - DNA, 20 bp, synthetic construct
  source 1..20: mol_type = other DNA
gaatgatcgggtgatgatca

SEQ ID NO: 12511 - DNA, 20 bp, synthetic construct
  source 1..20: mol_type = other DNA
ccaaatcgcgtccggttgcc

SEQ ID NO: 12512 - DNA, 20 bp, synthetic construct
  source 1..20: mol_type = other DNA
tttgcacaaagccgtctgca

SEQ ID NO: 12513 - DNA, 20 bp, synthetic construct
  source 1..20: mol_type = other DNA
gctgcacttggagataagca

SEQ ID NO: 12514 - DNA, 20 bp, synthetic construct
  source 1..20: mol_type = other DNA
tatagtgtaccctcaagcgc

SEQ ID NO: 12515 - DNA, 20 bp, synthetic construct
  source 1..20: mol_type = other DNA
caggaatgctattccttgct

SEQ ID NO: 12516 - DNA, 20 bp, synthetic construct
  source 1..20: mol_type = other DNA
cataaggatgccctctgttc

SEQ ID NO: 12517 - DNA, 20 bp, synthetic construct
  source 1..20: mol_type = other DNA
accgcggccggtataaatga

SEQ ID NO: 12518 - DNA, 20 bp, synthetic construct
  source 1..20: mol_type = other DNA
ttagggaactcaacaacgac

SEQ ID NO: 12519 - DNA, 20 bp, synthetic construct
  source 1..20: mol_type = other DNA
acgttgttaatggttgtacg

SEQ ID NO: 12520 - DNA, 20 bp, synthetic construct
  source 1..20: mol_type = other DNA
ttcctttgtgactcgtaggg

SEQ ID NO: 12521 - DNA, 20 bp, synthetic construct
  source 1..20: mol_type = other DNA
accaccgtgaatgcgacaat

SEQ ID NO: 12522 - DNA, 20 bp, synthetic construct
  source 1..20: mol_type = other DNA
gatagaatgagacctggcag

SEQ ID NO: 12523 - DNA, 20 bp, synthetic construct
  source 1..20: mol_type = other DNA
tagtgagaggagagtccgat

SEQ ID NO: 12524 - DNA, 20 bp, synthetic construct
  source 1..20: mol_type = other DNA
tgagggagatactaaccctg

SEQ ID NO: 12525 - DNA, 20 bp, synthetic construct
  source 1..20: mol_type = other DNA
atatgtgcgggagtagggcc

SEQ ID NO: 12526 - DNA, 20 bp, synthetic construct
  source 1..20: mol_type = other DNA
cactaagctactgaactaca

SEQ ID NO: 12527 - DNA, 20 bp, synthetic construct
  source 1..20: mol_type = other DNA
ctataagtcccaatgaggtt

SEQ ID NO: 12528 - DNA, 20 bp, synthetic construct
  source 1..20: mol_type = other DNA
tctttaaacaggaagtcgat

SEQ ID NO: 12529 - DNA, 20 bp, synthetic construct
  source 1..20: mol_type = other DNA
ccaaagcgcgtgagaagtac

SEQ ID NO: 12530 - DNA, 20 bp, synthetic construct
  source 1..20: mol_type = other DNA
aagcggaaaggcatcacggg

SEQ ID NO: 12531 - DNA, 20 bp, synthetic construct
  source 1..20: mol_type = other DNA
cgtagagaagcagtttcagg

SEQ ID NO: 12532 - DNA, 20 bp, synthetic construct
  source 1..20: mol_type = other DNA
ccatcaccagaagcataatt

SEQ ID NO: 12533 - DNA, 20 bp, synthetic construct
  source 1..20: mol_type = other DNA
caacccaccaacggtacacc

SEQ ID NO: 12534 - DNA, 20 bp, synthetic construct
  source 1..20: mol_type = other DNA
ctgttaccctaaagtcttgt

SEQ ID NO: 12535 - DNA, 20 bp, synthetic construct
  source 1..20: mol_type = other DNA
tggccgggaaacatggttga

SEQ ID NO: 12536 - DNA, 20 bp, synthetic construct
  source 1..20: mol_type = other DNA
gttatatacgagtttcgggc

SEQ ID NO: 12537 - DNA, 20 bp, synthetic construct
  source 1..20: mol_type = other DNA
ttccgtcgagtatcttacaa

SEQ ID NO: 12538 - DNA, 20 bp, synthetic construct
  source 1..20: mol_type = other DNA
agcattgttgtaacctaacc

SEQ ID NO: 12539 - DNA, 20 bp, synthetic construct
  source 1..20: mol_type = other DNA
aggttaccgctacatttgcg

SEQ ID NO: 12540 - DNA, 20 bp, synthetic construct
  source 1..20: mol_type = other DNA
ccatgacatgctatcataag

SEQ ID NO: 12541 - DNA, 20 bp, synthetic construct
  source 1..20: mol_type = other DNA
tatcagcaacgggcacctcc

SEQ ID NO: 12542 - DNA, 20 bp, synthetic construct
  source 1..20: mol_type = other DNA
cgtaattccgaaaccacaga

SEQ ID NO: 12543 - DNA, 20 bp, synthetic construct
  source 1..20: mol_type = other DNA
ataaaggtcgtgaggtaatg

SEQ ID NO: 12544 - DNA, 20 bp, synthetic construct
  source 1..20: mol_type = other DNA
cctcctgcctattgaaagtc

SEQ ID NO: 12545 - DNA, 20 bp, synthetic construct
  source 1..20: mol_type = other DNA
gttggaggctaactacgaca

SEQ ID NO: 12546 - DNA, 20 bp, synthetic construct
  source 1..20: mol_type = other DNA
gaagattaccagtgcaatca

SEQ ID NO: 12547 - DNA, 20 bp, synthetic construct
  source 1..20: mol_type = other DNA
agatgtggagataagtcgca

SEQ ID NO: 12548 - DNA, 20 bp, synthetic construct
  source 1..20: mol_type = other DNA
atacctaatccgcaagacgt

SEQ ID NO: 12549 - DNA, 20 bp, synthetic construct
  source 1..20: mol_type = other DNA
tctccgttaactgaacaagg

SEQ ID NO: 12550 - DNA, 20 bp, synthetic construct
  source 1..20: mol_type = other DNA
agcgcagatgctggagtcgg

SEQ ID NO: 12551 - DNA, 20 bp, synthetic construct
  source 1..20: mol_type = other DNA
gcatcgaagtgcgatcgggt

SEQ ID NO: 12552 - DNA, 20 bp, synthetic construct
  source 1..20: mol_type = other DNA
cctataatttgaccagacga

SEQ ID NO: 12553 - DNA, 20 bp, synthetic construct
  source 1..20: mol_type = other DNA
gtcgccactacaccgtttgt

SEQ ID NO: 12554 - DNA, 20 bp, synthetic construct
  source 1..20: mol_type = other DNA
ggctttgattatcatcgggc

SEQ ID NO: 12555 - DNA, 20 bp, synthetic construct
  source 1..20: mol_type = other DNA
cgcatgatgaatggaagcgc

SEQ ID NO: 12556 - DNA, 20 bp, synthetic construct
  source 1..20: mol_type = other DNA
tccatgcaccaatttctaat

SEQ ID NO: 12557 - DNA, 20 bp, synthetic construct
  source 1..20: mol_type = other DNA
tagtctgcaccctgggtgag

SEQ ID NO: 12558 - DNA, 20 bp, synthetic construct
  source 1..20: mol_type = other DNA
aggtacatttaggtcgtgag

SEQ ID NO: 12559 - DNA, 20 bp, synthetic construct
  source 1..20: mol_type = other DNA
ccgaccacaaagttgtccga

SEQ ID NO: 12560 - DNA, 20 bp, synthetic construct
  source 1..20: mol_type = other DNA
cagtctcggtagtgactagg

SEQ ID NO: 12561 - DNA, 20 bp, synthetic construct
  source 1..20: mol_type = other DNA
aggcataaagcaaatccaaa

SEQ ID NO: 12562 - DNA, 20 bp, synthetic construct
  source 1..20: mol_type = other DNA
gattcaggtcgttgtggaca

SEQ ID NO: 12563 - DNA, 20 bp, synthetic construct
  source 1..20: mol_type = other DNA
cactgtagccgaccggacaa

SEQ ID NO: 12564 - DNA, 20 bp, synthetic construct
  source 1..20: mol_type = other DNA
catcagcaactacgatgagt

SEQ ID NO: 12565 - DNA, 20 bp, synthetic construct
  source 1..20: mol_type = other DNA
agatcggagccggttcgcta

SEQ ID NO: 12566 - DNA, 20 bp, synthetic construct
  source 1..20: mol_type = other DNA
gagagcggatcgcgatagtt

SEQ ID NO: 12567 - DNA, 20 bp, synthetic construct
  source 1..20: mol_type = other DNA
gcggcttaagctgggagcta

SEQ ID NO: 12568 - DNA, 20 bp, synthetic construct
  source 1..20: mol_type = other DNA
cttgaatcattacgtgaggc

SEQ ID NO: 12569 - DNA, 20 bp, synthetic construct
  source 1..20: mol_type = other DNA
cccaagtcatccgaggcgag

SEQ ID NO: 12570 - DNA, 20 bp, synthetic construct
  source 1..20: mol_type = other DNA
cggtgagatcatgacacata

SEQ ID NO: 12571 - DNA, 20 bp, synthetic construct
  source 1..20: mol_type = other DNA
cgcaaggatgaagtcagcat

SEQ ID NO: 12572 - DNA, 20 bp, synthetic construct
  source 1..20: mol_type = other DNA
gtcggttcccatcacgtgct

SEQ ID NO: 12573 - DNA, 20 bp, synthetic construct
  source 1..20: mol_type = other DNA
tcagccgacgaatcgttctg

SEQ ID NO: 12574 - DNA, 20 bp, synthetic construct
  source 1..20: mol_type = other DNA
tatcaggatcaaccacacag

SEQ ID NO: 12575 - DNA, 20 bp, synthetic construct
  source 1..20: mol_type = other DNA
ttacactaaacttcacatct

SEQ ID NO: 12576 - DNA, 20 bp, synthetic construct
  source 1..20: mol_type = other DNA
cagcacggcagaataattgc

SEQ ID NO: 12577 - DNA, 20 bp, synthetic construct
  source 1..20: mol_type = other DNA
accacagcatccgtcccatt

SEQ ID NO: 12578 - DNA, 20 bp, synthetic construct
  source 1..20: mol_type = other DNA
aaagcgttcggtaaatcgta

SEQ ID NO: 12579 - DNA, 20 bp, synthetic construct
  source 1..20: mol_type = other DNA
gtagcgtgctgctgctagtg

SEQ ID NO: 12580 - DNA, 20 bp, synthetic construct
  source 1..20: mol_type = other DNA
ctcagctgtacggaacatac

SEQ ID NO: 12581 - DNA, 20 bp, synthetic construct
  source 1..20: mol_type = other DNA
agaagcattcttcactcggt

SEQ ID NO: 12582 - DNA, 20 bp, synthetic construct
  source 1..20: mol_type = other DNA
tgctgcgagtgaaattgata

SEQ ID NO: 12583 - DNA, 20 bp, synthetic construct
  source 1..20: mol_type = other DNA
gtggcttcagattattctac

SEQ ID NO: 12584 - DNA, 20 bp, synthetic construct
  source 1..20: mol_type = other DNA
cttatgaggacagggcaacg

SEQ ID NO: 12585 - DNA, 20 bp, synthetic construct
  source 1..20: mol_type = other DNA
atcaatctgggacttagcat

SEQ ID NO: 12586 - DNA, 20 bp, synthetic construct
  source 1..20: mol_type = other DNA
agttaccatactatcacatg

SEQ ID NO: 12587 - DNA, 20 bp, synthetic construct
  source 1..20: mol_type = other DNA
gcatctaccgatagtcggct

SEQ ID NO: 12588 - DNA, 20 bp, synthetic construct
  source 1..20: mol_type = other DNA
ccctcaagatggctccctcg

SEQ ID NO: 12589 - DNA, 20 bp, synthetic construct
  source 1..20: mol_type = other DNA
gatcgaccaactgtagatgc

SEQ ID NO: 12590 - DNA, 20 bp, synthetic construct
  source 1..20: mol_type = other DNA
ttacacccagtatccatcag

SEQ ID NO: 12591 - DNA, 20 bp, synthetic construct
  source 1..20: mol_type = other DNA
gtcgagtaattctcggtcct

SEQ ID NO: 12592 - DNA, 20 bp, synthetic construct
  source 1..20: mol_type = other DNA
tctatgaaagggtccggttt

SEQ ID NO: 12593 - DNA, 20 bp, synthetic construct
  source 1..20: mol_type = other DNA
ccagtcaatacgcttattga

SEQ ID NO: 12594 - DNA, 20 bp, synthetic construct
  source 1..20: mol_type = other DNA
taagaggcagtatgtggctg

SEQ ID NO: 12595 - DNA, 20 bp, synthetic construct
  source 1..20: mol_type = other DNA
ggtcgataagttgatgcaga

SEQ ID NO: 12596 - DNA, 20 bp, synthetic construct
  source 1..20: mol_type = other DNA
cggacttcgactctacccga

SEQ ID NO: 12597 - DNA, 20 bp, synthetic construct
  source 1..20: mol_type = other DNA
tgctcacacacgagttcgtc

SEQ ID NO: 12598 - DNA, 20 bp, synthetic construct
  source 1..20: mol_type = other DNA
aactcgcccagcacaaagag

SEQ ID NO: 12599 - DNA, 20 bp, synthetic construct
  source 1..20: mol_type = other DNA
tgaagcgaaagtaggtaacc

SEQ ID NO: 12600 - DNA, 20 bp, synthetic construct
  source 1..20: mol_type = other DNA
cgtgggcacagaatacttaa

SEQ ID NO: 12601 - DNA, 20 bp, synthetic construct
  source 1..20: mol_type = other DNA
aaggacctaagagcaaaggc

SEQ ID NO: 12602 - DNA, 20 bp, synthetic construct
  source 1..20: mol_type = other DNA
ctagcgctgaagaaacgaga

SEQ ID NO: 12603 - DNA, 20 bp, synthetic construct
  source 1..20: mol_type = other DNA
cgcccgttctatacgaatgc

SEQ ID NO: 12604 - DNA, 20 bp, synthetic construct
  source 1..20: mol_type = other DNA
ataacggtgccttgatgaga

SEQ ID NO: 12605 - DNA, 20 bp, synthetic construct
  source 1..20: mol_type = other DNA
ggaggccatagtatttgccc

SEQ ID NO: 12606 - DNA, 20 bp, synthetic construct
  source 1..20: mol_type = other DNA
agccatgtcgatgttgtagg

SEQ ID NO: 12607 - DNA, 20 bp, synthetic construct
  source 1..20: mol_type = other DNA
gagaaattccgcagctgaac

SEQ ID NO: 12608 - DNA, 20 bp, synthetic construct
  source 1..20: mol_type = other DNA
acgacatcacggtgattctt

SEQ ID NO: 12609 - DNA, 20 bp, synthetic construct
  source 1..20: mol_type = other DNA
tagcagttacttgcccgaaa

SEQ ID NO: 12610 - DNA, 20 bp, synthetic construct
  source 1..20: mol_type = other DNA
gacaagatcaagatccctcg

SEQ ID NO: 12611 - DNA, 20 bp, synthetic construct
  source 1..20: mol_type = other DNA
caatatccgatctgtaccgt

SEQ ID NO: 12612 - DNA, 20 bp, synthetic construct
  source 1..20: mol_type = other DNA
actctgcaaagcgctgctac

SEQ ID NO: 12613 - DNA, 20 bp, synthetic construct
  source 1..20: mol_type = other DNA
gtgtcacttgttatccgagt

SEQ ID NO: 12614 - DNA, 20 bp, synthetic construct
  source 1..20: mol_type = other DNA
gacgatcttacaactagcgg

SEQ ID NO: 12615 - DNA, 20 bp, synthetic construct
  source 1..20: mol_type = other DNA
ggcgaaggaaacggaacgac

SEQ ID NO: 12616 - DNA, 20 bp, synthetic construct
  source 1..20: mol_type = other DNA
tctggtgagatcccatcaca

SEQ ID NO: 12617 - DNA, 20 bp, synthetic construct
  source 1..20: mol_type = other DNA
cgtggtggcaaggtccagtg

SEQ ID NO: 12618 - DNA, 20 bp, synthetic construct
  source 1..20: mol_type = other DNA
aatcactaaaggaagagggt

SEQ ID NO: 12619 - DNA, 20 bp, synthetic construct
  source 1..20: mol_type = other DNA
ataggcgccgactctaatgg

SEQ ID NO: 12620 - DNA, 20 bp, synthetic construct
  source 1..20: mol_type = other DNA
taggcggataccatggcgta

SEQ ID NO: 12621 - DNA, 20 bp, synthetic construct
  source 1..20: mol_type = other DNA
gcggtgactgccatcatggg

SEQ ID NO: 12622 - DNA, 20 bp, synthetic construct
  source 1..20: mol_type = other DNA
tctatcaccagcattagaag

SEQ ID NO: 12623 - DNA, 20 bp, synthetic construct
  source 1..20: mol_type = other DNA
gggcaagcagagatcgttca

SEQ ID NO: 12624 - DNA, 20 bp, synthetic construct
  source 1..20: mol_type = other DNA
ggaccggcccggacttaatt

SEQ ID NO: 12625 - DNA, 20 bp, synthetic construct
  source 1..20: mol_type = other DNA
acaccaacttcggtgataac

SEQ ID NO: 12626 - DNA, 20 bp, synthetic construct
  source 1..20: mol_type = other DNA
gcgataatcctctacgcccg

SEQ ID NO: 12627 - DNA, 20 bp, synthetic construct
  source 1..20: mol_type = other DNA
gacaatcgtgattacatagc

SEQ ID NO: 12628 - DNA, 20 bp, synthetic construct
  source 1..20: mol_type = other DNA
accttgtattgcacctgctt

SEQ ID NO: 12629 - DNA, 20 bp, synthetic construct
  source 1..20: mol_type = other DNA
gaactgccaagcgcactcat

SEQ ID NO: 12630 - DNA, 20 bp, synthetic construct
  source 1..20: mol_type = other DNA
tgagcactgtcgtcgctaca

SEQ ID NO: 12631 - DNA, 20 bp, synthetic construct
  source 1..20: mol_type = other DNA
ggacggcggtctataggtta

SEQ ID NO: 12632 - DNA, 20 bp, synthetic construct
  source 1..20: mol_type = other DNA
gagcacctggtatggcacgt

SEQ ID NO: 12633 - DNA, 20 bp, synthetic construct
  source 1..20: mol_type = other DNA
aatgggtcccttgactagcg

SEQ ID NO: 12634 - DNA, 20 bp, synthetic construct
  source 1..20: mol_type = other DNA
ggttgagtacggtcctaggc

SEQ ID NO: 12635 - DNA, 20 bp, synthetic construct
  source 1..20: mol_type = other DNA
caacacctcgggataaagga

SEQ ID NO: 12636 - DNA, 20 bp, synthetic construct
  source 1..20: mol_type = other DNA
ccctgaccagttgcgggttt

SEQ ID NO: 12637 - DNA, 20 bp, synthetic construct
  source 1..20: mol_type = other DNA
tatcaccgctgcgggactag

SEQ ID NO: 12638 - DNA, 20 bp, synthetic construct
  source 1..20: mol_type = other DNA
ttggcaagcacgtgaatcga

SEQ ID NO: 12639 - DNA, 20 bp, synthetic construct
  source 1..20: mol_type = other DNA
atcgcaagtttcttaatcgc

SEQ ID NO: 12640 - DNA, 20 bp, synthetic construct
  source 1..20: mol_type = other DNA
tgacttgtggtgtggtgact

SEQ ID NO: 12641 - DNA, 20 bp, synthetic construct
  source 1..20: mol_type = other DNA
gactgtctatacgccttatc

SEQ ID NO: 12642 - DNA, 20 bp, synthetic construct
  source 1..20: mol_type = other DNA
ggagacattcgtcgtataat

SEQ ID NO: 12643 - DNA, 20 bp, synthetic construct
  source 1..20: mol_type = other DNA
taaatgagtcccacgggatc

SEQ ID NO: 12644 - DNA, 20 bp, synthetic construct
  source 1..20: mol_type = other DNA
accggccgatgcatgtaacg

SEQ ID NO: 12645 - DNA, 20 bp, synthetic construct
  source 1..20: mol_type = other DNA
ttgccgtcgggtgaatttcc

SEQ ID NO: 12646 - DNA, 20 bp, synthetic construct
  source 1..20: mol_type = other DNA
attggagatggacgtccgca

SEQ ID NO: 12647 - DNA, 20 bp, synthetic construct
  source 1..20: mol_type = other DNA
ttagtttcccagatccttcc

SEQ ID NO: 12648 - DNA, 20 bp, synthetic construct
  source 1..20: mol_type = other DNA
gttctctgatgaaggtacag

SEQ ID NO: 12649 - DNA, 20 bp, synthetic construct
  source 1..20: mol_type = other DNA
ggacagctagcgcgcaagga

SEQ ID NO: 12650 - DNA, 20 bp, synthetic construct
  source 1..20: mol_type = other DNA
ttgttgggagcttggcttcc

SEQ ID NO: 12651 - DNA, 20 bp, synthetic construct
  source 1..20: mol_type = other DNA
aaaggctgacgtcgtaattt

SEQ ID NO: 12652 - DNA, 20 bp, synthetic construct
  source 1..20: mol_type = other DNA
gtttagaaagcactggactg

SEQ ID NO: 12653 - DNA, 20 bp, synthetic construct
  source 1..20: mol_type = other DNA
cttagaactccacggttacg

SEQ ID NO: 12654 - DNA, 20 bp, synthetic construct
  source 1..20: mol_type = other DNA
agatgtcggccttcactgtg

SEQ ID NO: 12655 - DNA, 20 bp, synthetic construct
  source 1..20: mol_type = other DNA
tccggtaagggcgcggctat

SEQ ID NO: 12656 - DNA, 20 bp, synthetic construct
  source 1..20: mol_type = other DNA
cacctgtacaacacattgcc

SEQ ID NO: 12657 - DNA, 20 bp, synthetic construct
  source 1..20: mol_type = other DNA
gcgtttcccgaaagctccat

SEQ ID NO: 12658 - DNA, 20 bp, synthetic construct
  source 1..20: mol_type = other DNA
aaacaaggataggcgtgagg

SEQ ID NO: 12659 - DNA, 20 bp, synthetic construct
  source 1..20: mol_type = other DNA
ccgtggttatctaagtatat

SEQ ID NO: 12660 - DNA, 20 bp, synthetic construct
  source 1..20: mol_type = other DNA
aagctggcgccttcgcctaa

SEQ ID NO: 12661 - DNA, 20 bp, synthetic construct
  source 1..20: mol_type = other DNA
accggatctagcttgtttaa

SEQ ID NO: 12662 - DNA, 20 bp, synthetic construct
  source 1..20: mol_type = other DNA
atgtcgcttatggtgaacac

SEQ ID NO: 12663 - DNA, 20 bp, synthetic construct
  source 1..20: mol_type = other DNA
gctgaaacgggaccacggca

SEQ ID NO: 12664 - DNA, 20 bp, synthetic construct
  source 1..20: mol_type = other DNA
ggctgagccaacgtcctcag

SEQ ID NO: 12665 - DNA, 20 bp, synthetic construct
  source 1..20: mol_type = other DNA
cttgtggcattgcgcaataa

SEQ ID NO: 12666 - DNA, 20 bp, synthetic construct
  source 1..20: mol_type = other DNA
tctactcagattgagcggga

SEQ ID NO: 12667 - DNA, 20 bp, synthetic construct
  source 1..20: mol_type = other DNA
gtttgcactttgcattgaga

SEQ ID NO: 12668 - DNA, 20 bp, synthetic construct
  source 1..20: mol_type = other DNA
atctgaagtgccaactttct

SEQ ID NO: 12669 - DNA, 20 bp, synthetic construct
  source 1..20: mol_type = other DNA
catcaccctgcccgactttg

SEQ ID NO: 12670 - DNA, 20 bp, synthetic construct
  source 1..20: mol_type = other DNA
aaaggtggagtcttccaatt

SEQ ID NO: 12671 - DNA, 20 bp, synthetic construct
  source 1..20: mol_type = other DNA
cctatcagagcggttctcac

SEQ ID NO: 12672 - DNA, 20 bp, synthetic construct
  source 1..20: mol_type = other DNA
ctactataacgagtcaggag

SEQ ID NO: 12673 - DNA, 20 bp, synthetic construct
  source 1..20: mol_type = other DNA
ggcttctgaatataaggaca

SEQ ID NO: 12674 - DNA, 20 bp, synthetic construct
  source 1..20: mol_type = other DNA
ctgccaaacctcgcgtgcag

SEQ ID NO: 12675 - DNA, 20 bp, synthetic construct
  source 1..20: mol_type = other DNA
cagctgtacctattctaccc

SEQ ID NO: 12676 - DNA, 20 bp, synthetic construct
  source 1..20: mol_type = other DNA
catcacgctatcgggcttcc

SEQ ID NO: 12677 - DNA, 20 bp, synthetic construct
  source 1..20: mol_type = other DNA
cctacattacacaactaaca

SEQ ID NO: 12678 - DNA, 20 bp, synthetic construct
  source 1..20: mol_type = other DNA
acctctacgtggaacgagtg

SEQ ID NO: 12679 - DNA, 20 bp, synthetic construct
  source 1..20: mol_type = other DNA
cttattctcagtagcccaga

SEQ ID NO: 12680 - DNA, 20 bp, synthetic construct
  source 1..20: mol_type = other DNA
tcagtcgtaagtcagcatgt

SEQ ID NO: 12681 - DNA, 20 bp, synthetic construct
  source 1..20: mol_type = other DNA
cctaacagcaccatccttcc

SEQ ID NO: 12682 - DNA, 20 bp, synthetic construct
  source 1..20: mol_type = other DNA
agtcagctggtcagggagac

SEQ ID NO: 12683 - DNA, 20 bp, synthetic construct
  source 1..20: mol_type = other DNA
tacgccgtgcgagggatgtt

SEQ ID NO: 12684 - DNA, 20 bp, synthetic construct
  source 1..20: mol_type = other DNA
tctatcatagttactacacc

SEQ ID NO: 12685 - DNA, 20 bp, synthetic construct
  source 1..20: mol_type = other DNA
gcagtttcacctatccgtat

SEQ ID NO: 12686 - DNA, 20 bp, synthetic construct
  source 1..20: mol_type = other DNA
cctcctgtaggaataatgga

SEQ ID NO: 12687 - DNA, 20 bp, synthetic construct
  source 1..20: mol_type = other DNA
aacagcccgtcgattatgtc

SEQ ID NO: 12688 - DNA, 20 bp, synthetic construct
  source 1..20: mol_type = other DNA
gacagctagcaaataactgc

SEQ ID NO: 12689 - DNA, 20 bp, synthetic construct
  source 1..20: mol_type = other DNA
cggaggttccgagtacccac

SEQ ID NO: 12690 - DNA, 20 bp, synthetic construct
  source 1..20: mol_type = other DNA
ctgtccgttgcaagagccat

SEQ ID NO: 12691 - DNA, 20 bp, synthetic construct
  source 1..20: mol_type = other DNA
ctgaggctctataactcgcg

SEQ ID NO: 12692 - DNA, 20 bp, synthetic construct
  source 1..20: mol_type = other DNA
gtgccctctactggacatcg

SEQ ID NO: 12693 - DNA, 20 bp, synthetic construct
  source 1..20: mol_type = other DNA
tctactcgcagcagccaggt

SEQ ID NO: 12694 - DNA, 20 bp, synthetic construct
  source 1..20: mol_type = other DNA
gtcgtagcgatatatcgtaa

SEQ ID NO: 12695 - DNA, 20 bp, synthetic construct
  source 1..20: mol_type = other DNA
caaggtcgattgaacagtac

SEQ ID NO: 12696 - DNA, 20 bp, synthetic construct
  source 1..20: mol_type = other DNA
tgagtttccctatatgagga

SEQ ID NO: 12697 - DNA, 20 bp, synthetic construct
  source 1..20: mol_type = other DNA
gaatgctggaaacacttgca

SEQ ID NO: 12698 - DNA, 20 bp, synthetic construct
  source 1..20: mol_type = other DNA
gagggacatagtgtctacag

SEQ ID NO: 12699 - DNA, 20 bp, synthetic construct
  source 1..20: mol_type = other DNA
tatccctatcacgttgcact

SEQ ID NO: 12700 - DNA, 20 bp, synthetic construct
  source 1..20: mol_type = other DNA
acacgagcgcgaatggagaa

SEQ ID NO: 12701 - DNA, 20 bp, synthetic construct
  source 1..20: mol_type = other DNA
tctcactcggcttcagcagc

SEQ ID NO: 12702 - DNA, 20 bp, synthetic construct
  source 1..20: mol_type = other DNA
cgaagccatgagggtctagg

SEQ ID NO: 12703 - DNA, 20 bp, synthetic construct
  source 1..20: mol_type = other DNA
gaccgcactgatagatgtgg

SEQ ID NO: 12704 - DNA, 20 bp, synthetic construct
  source 1..20: mol_type = other DNA
cgacactctaccagctagct

SEQ ID NO: 12705 - DNA, 20 bp, synthetic construct
  source 1..20: mol_type = other DNA
cgcaagcgtgcctccttcag

SEQ ID NO: 12706 - DNA, 20 bp, synthetic construct
  source 1..20: mol_type = other DNA
ggtttgtctaacagtgttgt

SEQ ID NO: 12707 - DNA, 20 bp, synthetic construct
  source 1..20: mol_type = other DNA
accgggcattccatggacga

SEQ ID NO: 12708 - DNA, 20 bp, synthetic construct
  source 1..20: mol_type = other DNA
ttaacgcagcccgcgtgaaa

SEQ ID NO: 12709 - DNA, 20 bp, synthetic construct
  source 1..20: mol_type = other DNA
tcagaacagtcacagctacc

SEQ ID NO: 12710 - DNA, 20 bp, synthetic construct
  source 1..20: mol_type = other DNA
ccactcctggtaccgttggg

SEQ ID NO: 12711 - DNA, 20 bp, synthetic construct
  source 1..20: mol_type = other DNA
aatatcatcgcgggtgtccg

SEQ ID NO: 12712 - DNA, 20 bp, synthetic construct
  source 1..20: mol_type = other DNA
cagctgggaaccggcgtatc

SEQ ID NO: 12713 - DNA, 20 bp, synthetic construct
  source 1..20: mol_type = other DNA
taacgtaacgctcaagcagt

SEQ ID NO: 12714 - DNA, 20 bp, synthetic construct
  source 1..20: mol_type = other DNA
ctgccataacaattccactc

SEQ ID NO: 12715 - DNA, 20 bp, synthetic construct
  source 1..20: mol_type = other DNA
taagcggtattctagcttgc

SEQ ID NO: 12716 - DNA, 20 bp, synthetic construct
  source 1..20: mol_type = other DNA
ttaagatctcgtgagcgtta

SEQ ID NO: 12717 - DNA, 20 bp, synthetic construct
  source 1..20: mol_type = other DNA
gcgcaatacagatgtgtgag

SEQ ID NO: 12718 - DNA, 20 bp, synthetic construct
  source 1..20: mol_type = other DNA
aaacctgcggattatcggag

SEQ ID NO: 12719 - DNA, 20 bp, synthetic construct
  source 1..20: mol_type = other DNA
tgaagctggcaacgctgtta

SEQ ID NO: 12720 - DNA, 20 bp, synthetic construct
  source 1..20: mol_type = other DNA
atccatagggcgtggtcaaa

SEQ ID NO: 12721 - DNA, 20 bp, synthetic construct
  source 1..20: mol_type = other DNA
gcgtttaccagcctcttcgt

SEQ ID NO: 12722 - DNA, 20 bp, synthetic construct
  source 1..20: mol_type = other DNA
ccctacgtttcgttgcctac

SEQ ID NO: 12723 - DNA, 20 bp, synthetic construct
  source 1..20: mol_type = other DNA
atacgcagtagtagctatag

SEQ ID NO: 12724 - DNA, 20 bp, synthetic construct
  source 1..20: mol_type = other DNA
cagacttgttagatatagcc

SEQ ID NO: 12725 - DNA, 20 bp, synthetic construct
  source 1..20: mol_type = other DNA
ttggcttcgcttatggcgag

SEQ ID NO: 12726 - DNA, 20 bp, synthetic construct
  source 1..20: mol_type = other DNA
gccagtatttaactctacaa

SEQ ID NO: 12727 - DNA, 20 bp, synthetic construct
  source 1..20: mol_type = other DNA
ttgccaaaggaaacttcgag

SEQ ID NO: 12728 - DNA, 20 bp, synthetic construct
  source 1..20: mol_type = other DNA
gacgtgagacctagaccggc

SEQ ID NO: 12729 - DNA, 20 bp, synthetic construct
  source 1..20: mol_type = other DNA
gtcctgtaagcccattacaa

SEQ ID NO: 12730 - DNA, 20 bp, synthetic construct
  source 1..20: mol_type = other DNA
tcctccgcagtctctaagaa

SEQ ID NO: 12731 - DNA, 20 bp, synthetic construct
  source 1..20: mol_type = other DNA
cactggtacagatgtgtcta

SEQ ID NO: 12732 - DNA, 20 bp, synthetic construct
  source 1..20: mol_type = other DNA
gttagccggtgataggcaat

SEQ ID NO: 12733 - DNA, 20 bp, synthetic construct
  source 1..20: mol_type = other DNA
ccgcaatgagtaccgtcggt

SEQ ID NO: 12734 - DNA, 20 bp, synthetic construct
  source 1..20: mol_type = other DNA
cagttacttagggtcttatc

SEQ ID NO: 12735 - DNA, 20 bp, synthetic construct
  source 1..20: mol_type = other DNA
tgatgtatctcatcgtttgc

SEQ ID NO: 12736 - DNA, 20 bp, synthetic construct
  source 1..20: mol_type = other DNA
actcacggacacatgggccc

SEQ ID NO: 12737 - DNA, 20 bp, synthetic construct
  source 1..20: mol_type = other DNA
ggtggtagcctaaagagaag

SEQ ID NO: 12738 - DNA, 20 bp, synthetic construct
  source 1..20: mol_type = other DNA
tagtccaccttcgcatcgga

SEQ ID NO: 12739 - DNA, 20 bp, synthetic construct
  source 1..20: mol_type = other DNA
gtccatctgtttctgcgata

SEQ ID NO: 12740 - DNA, 20 bp, synthetic construct
  source 1..20: mol_type = other DNA
atattccactacggaaccgt

SEQ ID NO: 12741 - DNA, 20 bp, synthetic construct
  source 1..20: mol_type = other DNA
tcccgaagcatgagatttgt

SEQ ID NO: 12742 - DNA, 20 bp, synthetic construct
  source 1..20: mol_type = other DNA
aagtggatttcgtacgcggc

SEQ ID NO: 12743 - DNA, 20 bp, synthetic construct
  source 1..20: mol_type = other DNA
cggatgggtcaatcgagcgc

SEQ ID NO: 12744 - DNA, 20 bp, synthetic construct
  source 1..20: mol_type = other DNA
gcaaagtccagtatgatcag

SEQ ID NO: 12745 - DNA, 20 bp, synthetic construct
  source 1..20: mol_type = other DNA
taccacgccagaggaccctt

SEQ ID NO: 12746 - DNA, 20 bp, synthetic construct
  source 1..20: mol_type = other DNA
aactattgtgcccaaccaat

SEQ ID NO: 12747 - DNA, 20 bp, synthetic construct
  source 1..20: mol_type = other DNA
caagatctcgacccgtgtgt

SEQ ID NO: 12748 - DNA, 20 bp, synthetic construct
  source 1..20: mol_type = other DNA
gaggcacactaaagatttca

SEQ ID NO: 12749 - DNA, 20 bp, synthetic construct
  source 1..20: mol_type = other DNA
attctgggtagtggacgtgg

SEQ ID NO: 12750 - DNA, 20 bp, synthetic construct
  source 1..20: mol_type = other DNA
cctgtgcaagtgcagttgat

SEQ ID NO: 12751 - DNA, 20 bp, synthetic construct
  source 1..20: mol_type = other DNA
accgaatactactgaggctc

SEQ ID NO: 12752 - DNA, 20 bp, synthetic construct
  source 1..20: mol_type = other DNA
gaaggcaaactttaacgaaa

SEQ ID NO: 12753 - DNA, 20 bp, synthetic construct
  source 1..20: mol_type = other DNA
tgacgcgataatctggtact

SEQ ID NO: 12754 - DNA, 20 bp, synthetic construct
  source 1..20: mol_type = other DNA
atgcaaatgtcacaagcggc

SEQ ID NO: 12755 - DNA, 20 bp, synthetic construct
  source 1..20: mol_type = other DNA
tgaggattagggttcacagc

SEQ ID NO: 12756 - DNA, 20 bp, synthetic construct
  source 1..20: mol_type = other DNA
cttcttccagtcagcacacg

SEQ ID NO: 12757 - DNA, 20 bp, synthetic construct
  source 1..20: mol_type = other DNA
atactggtcaacgctattgc

SEQ ID NO: 12758 - DNA, 20 bp, synthetic construct
  source 1..20: mol_type = other DNA
tgctgaagttgcaccgaatc

SEQ ID NO: 12759 - DNA, 20 bp, synthetic construct
  source 1..20: mol_type = other DNA
ggagatataattagccgaac

SEQ ID NO: 12760 - DNA, 20 bp, synthetic construct
  source 1..20: mol_type = other DNA
acaaacgtagacaggccctg

SEQ ID NO: 12761 - DNA, 20 bp, synthetic construct
  source 1..20: mol_type = other DNA
tctcccgaacaatcatatac

SEQ ID NO: 12762 - DNA, 20 bp, synthetic construct
  source 1..20: mol_type = other DNA
tgatcctaacttcaatgagg

SEQ ID NO: 12763 - DNA, 20 bp, synthetic construct
  source 1..20: mol_type = other DNA
acagtaacaatatgtagccc

SEQ ID NO: 12764 - DNA, 20 bp, synthetic construct
  source 1..20: mol_type = other DNA
ctggagcaatccgcgagcaa

SEQ ID NO: 12765 - DNA, 20 bp, synthetic construct
  source 1..20: mol_type = other DNA
gggagcagtctaccactaat

SEQ ID NO: 12766 - DNA, 20 bp, synthetic construct
  source 1..20: mol_type = other DNA
ccaatgagcatttgccgtac

SEQ ID NO: 12767 - DNA, 20 bp, synthetic construct
  source 1..20: mol_type = other DNA
ttaacggtttgatcagccat

SEQ ID NO: 12768 - DNA, 20 bp, synthetic construct
  source 1..20: mol_type = other DNA
tccacgactagaagtggcta

SEQ ID NO: 12769 - DNA, 20 bp, synthetic construct
  source 1..20: mol_type = other DNA
taggtttaatccaactacct

SEQ ID NO: 12770 - DNA, 20 bp, synthetic construct
  source 1..20: mol_type = other DNA
tgtctctcgcgctaactagc

SEQ ID NO: 12771 - DNA, 20 bp, synthetic construct
  source 1..20: mol_type = other DNA
agcataagaagagctgcccg

SEQ ID NO: 12772 - DNA, 20 bp, synthetic construct
  source 1..20: mol_type = other DNA
cgccgtgctagccaaacctg

SEQ ID NO: 12773 - DNA, 20 bp, synthetic construct
  source 1..20: mol_type = other DNA
gttgatgggtgtgtaatgta

SEQ ID NO: 12774 - DNA, 20 bp, synthetic construct
  source 1..20: mol_type = other DNA
cctacagttgaacccatgaa

SEQ ID NO: 12775 - DNA, 20 bp, synthetic construct
  source 1..20: mol_type = other DNA
aaatcgctcgcccgacacct

SEQ ID NO: 12776 - DNA, 20 bp, synthetic construct
  source 1..20: mol_type = other DNA
cggagggtcgaatgagcttt

SEQ ID NO: 12777 - DNA, 20 bp, synthetic construct
  source 1..20: mol_type = other DNA
agctgccaaacaacgttaat

SEQ ID NO: 12778 - DNA, 20 bp, synthetic construct
  source 1..20: mol_type = other DNA
tgagctacttctcggcccgt

SEQ ID NO: 12779 - DNA, 20 bp, synthetic construct
  source 1..20: mol_type = other DNA
ttctatccgtgagcttcgtc

SEQ ID NO: 12780 - DNA, 20 bp, synthetic construct
  source 1..20: mol_type = other DNA
agaattggcgctctgcttgt

SEQ ID NO: 12781 - DNA, 20 bp, synthetic construct
  source 1..20: mol_type = other DNA
actggtaaacgtacactgcg

SEQ ID NO: 12782 - DNA, 20 bp, synthetic construct
  source 1..20: mol_type = other DNA
agctggctttctgagtaggt

SEQ ID NO: 12783 - DNA, 20 bp, synthetic construct
  source 1..20: mol_type = other DNA
agtggccaagcgtccatgga

SEQ ID NO: 12784 - DNA, 20 bp, synthetic construct
  source 1..20: mol_type = other DNA
tctatcctagagtagggtat

SEQ ID NO: 12785 - DNA, 20 bp, synthetic construct
  source 1..20: mol_type = other DNA
aagaggtggtctaggcatga

SEQ ID NO: 12786 - DNA, 20 bp, synthetic construct
  source 1..20: mol_type = other DNA
cgtgcagatattcctcccga

SEQ ID NO: 12787 - DNA, 20 bp, synthetic construct
  source 1..20: mol_type = other DNA
cttgcacaatcgagagtagc

SEQ ID NO: 12788 - DNA, 20 bp, synthetic construct
  source 1..20: mol_type = other DNA
cctggcaatgctagcagacc

SEQ ID NO: 12789 - DNA, 20 bp, synthetic construct
  source 1..20: mol_type = other DNA
tgaggagcatctctacctag

SEQ ID NO: 12790 - DNA, 20 bp, synthetic construct
  source 1..20: mol_type = other DNA
tattgtcggtggtgccattg

SEQ ID NO: 12791 - DNA, 20 bp, synthetic construct
  source 1..20: mol_type = other DNA
tagcgggccgtcggattgat

SEQ ID NO: 12792 - DNA, 20 bp, synthetic construct
  source 1..20: mol_type = other DNA
ggttgaactgagacttccat

SEQ ID NO: 12793 - DNA, 20 bp, synthetic construct
  source 1..20: mol_type = other DNA
tacaactgtaattctgggat

SEQ ID NO: 12794 - DNA, 20 bp, synthetic construct
  source 1..20: mol_type = other DNA
gtgggactgtctttctatcg

SEQ ID NO: 12795 - DNA, 20 bp, synthetic construct
  source 1..20: mol_type = other DNA
catttcaccaccgacaccac

SEQ ID NO: 12796 - DNA, 20 bp, synthetic construct
  source 1..20: mol_type = other DNA
gataacgtcagactaacgaa

SEQ ID NO: 12797 - DNA, 20 bp, synthetic construct
  source 1..20: mol_type = other DNA
ccaacctgctcctttagtga

SEQ ID NO: 12798 - DNA, 20 bp, synthetic construct
  source 1..20: mol_type = other DNA
gcacccggtagtacagttgc

SEQ ID NO: 12799 - DNA, 20 bp, synthetic construct
  source 1..20: mol_type = other DNA
gtgaccatgtcccgattaga

SEQ ID NO: 12800 - DNA, 20 bp, synthetic construct
  source 1..20: mol_type = other DNA
ctaactcctttggcggttca

SEQ ID NO: 12801 - DNA, 20 bp, synthetic construct
  source 1..20: mol_type = other DNA
aggagtacgaccgtcagcta

SEQ ID NO: 12802 - DNA, 20 bp, synthetic construct
  source 1..20: mol_type = other DNA
tccttcgggtgctgcacgta

SEQ ID NO: 12803 - DNA, 20 bp, synthetic construct
  source 1..20: mol_type = other DNA
ctcacctggacgcaacggcc

SEQ ID NO: 12804 - DNA, 20 bp, synthetic construct
  source 1..20: mol_type = other DNA
atttaccatgtgacccgtgt

SEQ ID NO: 12805 - DNA, 20 bp, synthetic construct
  source 1..20: mol_type = other DNA
cttcccaattgcacaagtgt

SEQ ID NO: 12806 - DNA, 20 bp, synthetic construct
  source 1..20: mol_type = other DNA
agattatagagggacgggca

SEQ ID NO: 12807 - DNA, 20 bp, synthetic construct
  source 1..20: mol_type = other DNA
gtacctgctagaccctaagt

SEQ ID NO: 12808 - DNA, 20 bp, synthetic construct
  source 1..20: mol_type = other DNA
gtgctctcgattgatcccga

SEQ ID NO: 12809 - DNA, 20 bp, synthetic construct
  source 1..20: mol_type = other DNA
ttgtgccagatatgtagggt

SEQ ID NO: 12810 - DNA, 20 bp, synthetic construct
  source 1..20: mol_type = other DNA
ctactgctggcatcattact

SEQ ID NO: 12811 - DNA, 20 bp, synthetic construct
  source 1..20: mol_type = other DNA
ttctctgaatctagcggcct

SEQ ID NO: 12812 - DNA, 20 bp, synthetic construct
  source 1..20: mol_type = other DNA
tgcgattgagctttaagacc

SEQ ID NO: 12813 - DNA, 20 bp, synthetic construct
  source 1..20: mol_type = other DNA
tgtattctgcccgccaccaa

SEQ ID NO: 12814 - DNA, 20 bp, synthetic construct
  source 1..20: mol_type = other DNA
aaggctgataaactacgggt

SEQ ID NO: 12815 - DNA, 20 bp, synthetic construct
  source 1..20: mol_type = other DNA
ctctgccgcaagccaatgga

SEQ ID NO: 12816 - DNA, 20 bp, synthetic construct
  source 1..20: mol_type = other DNA
gccacgagatattaactact

SEQ ID NO: 12817 - DNA, 20 bp, synthetic construct
  source 1..20: mol_type = other DNA
tgcgacgcgggtccagatta

SEQ ID NO: 12818 - DNA, 20 bp, synthetic construct
  source 1..20: mol_type = other DNA
gcgagtgggctgttctactt

SEQ ID NO: 12819 - DNA, 20 bp, synthetic construct
  source 1..20: mol_type = other DNA
ttaaagaccaggtttcactc

SEQ ID NO: 12820 - DNA, 20 bp, synthetic construct
  source 1..20: mol_type = other DNA
gtaccagtttccgtgcttat

SEQ ID NO: 12821 - DNA, 20 bp, synthetic construct
  source 1..20: mol_type = other DNA
gagcggaactcctgttcgtg

SEQ ID NO: 12822 - DNA, 20 bp, synthetic construct
  source 1..20: mol_type = other DNA
actcgggcgtcctgctgatg

SEQ ID NO: 12823 - DNA, 20 bp, synthetic construct
  source 1..20: mol_type = other DNA
catgcaagtcactcctcctt

SEQ ID NO: 12824 - DNA, 20 bp, synthetic construct
  source 1..20: mol_type = other DNA
tcccgtgtcaggccttacgc

SEQ ID NO: 12825 - DNA, 20 bp, synthetic construct
  source 1..20: mol_type = other DNA
ttacgacactattgtggctc

SEQ ID NO: 12826 - DNA, 20 bp, synthetic construct
  source 1..20: mol_type = other DNA
gtgttaatggcggctgatag

SEQ ID NO: 12827 - DNA, 20 bp, synthetic construct
  source 1..20: mol_type = other DNA
gttgggcggatactgacaac

SEQ ID NO: 12828 - DNA, 20 bp, synthetic construct
  source 1..20: mol_type = other DNA
gggcccagactgattggtaa

SEQ ID NO: 12829 - DNA, 20 bp, synthetic construct
  source 1..20: mol_type = other DNA
cgggcaacagatagagtaca

SEQ ID NO: 12830 - DNA, 20 bp, synthetic construct
  source 1..20: mol_type = other DNA
tgctacttaaagcgtatgag

SEQ ID NO: 12831 - DNA, 20 bp, synthetic construct
  source 1..20: mol_type = other DNA
ttccgaatcctaacgtgata

SEQ ID NO: 12832 - DNA, 20 bp, synthetic construct
  source 1..20: mol_type = other DNA
tgcaggtagaagtgaactcc

SEQ ID NO: 12833 - DNA, 20 bp, synthetic construct
  source 1..20: mol_type = other DNA
gtttgccgggtgtgcttcca

SEQ ID NO: 12834 - DNA, 20 bp, synthetic construct
  source 1..20: mol_type = other DNA
tatgccggtaatttcggtca

SEQ ID NO: 12835 - DNA, 20 bp, synthetic construct
  source 1..20: mol_type = other DNA
caccctggtgagtatgttct

SEQ ID NO: 12836 - DNA, 20 bp, synthetic construct
  source 1..20: mol_type = other DNA
tctatcaattaaaggtatcc

SEQ ID NO: 12837 - DNA, 20 bp, synthetic construct
  source 1..20: mol_type = other DNA
ataaaggtacccactagact

SEQ ID NO: 12838 - DNA, 20 bp, synthetic construct
  source 1..20: mol_type = other DNA
tggtcgcatggagtagaaga

SEQ ID NO: 12839 - DNA, 20 bp, synthetic construct
  source 1..20: mol_type = other DNA
tcgtaatttccttcggttga

SEQ ID NO: 12840 - DNA, 20 bp, synthetic construct
  source 1..20: mol_type = other DNA
caagaactttacgtgaagga

SEQ ID NO: 12841 - DNA, 20 bp, synthetic construct
  source 1..20: mol_type = other DNA
cacctgaaacgctggaaacg

SEQ ID NO: 12842 - DNA, 20 bp, synthetic construct
  source 1..20: mol_type = other DNA
aataaactgcttcatcgtct

SEQ ID NO: 12843 - DNA, 20 bp, synthetic construct
  source 1..20: mol_type = other DNA
cgagctccgtgaataaactc

SEQ ID NO: 12844 - DNA, 20 bp, synthetic construct
  source 1..20: mol_type = other DNA
ctgcagctgtgagcatggga

SEQ ID NO: 12845 - DNA, 20 bp, synthetic construct
  source 1..20: mol_type = other DNA
tagtgacctcatttacgact

SEQ ID NO: 12846 - DNA, 20 bp, synthetic construct
  source 1..20: mol_type = other DNA
cgtatcagtccgatccgtcc

SEQ ID NO: 12847 - DNA, 20 bp, synthetic construct
  source 1..20: mol_type = other DNA
gatagacaccagtttctgcg

SEQ ID NO: 12848 - DNA, 20 bp, synthetic construct
  source 1..20: mol_type = other DNA
cgtaggtccacatattgttg

SEQ ID NO: 12849 - DNA, 20 bp, synthetic construct
  source 1..20: mol_type = other DNA
gcgcgtcgatccaatggact

SEQ ID NO: 12850 - DNA, 20 bp, synthetic construct
  source 1..20: mol_type = other DNA
gatgctaagataccaatcgc

SEQ ID NO: 12851 - DNA, 20 bp, synthetic construct
  source 1..20: mol_type = other DNA
tgccggaattggcagagatg

SEQ ID NO: 12852 - DNA, 20 bp, synthetic construct
  source 1..20: mol_type = other DNA
agataacggtcgcgtgtccg

SEQ ID NO: 12853 - DNA, 20 bp, synthetic construct
  source 1..20: mol_type = other DNA
tatagagtcgcatacacatg

SEQ ID NO: 12854 - DNA, 20 bp, synthetic construct
  source 1..20: mol_type = other DNA
gtcaacctagtgctaaatca

SEQ ID NO: 12855 - DNA, 20 bp, synthetic construct
  source 1..20: mol_type = other DNA
actcttacgctgtcccaatt

SEQ ID NO: 12856 - DNA, 20 bp, synthetic construct
  source 1..20: mol_type = other DNA
gatagtatagaaacagggta

SEQ ID NO: 12857 - DNA, 20 bp, synthetic construct
  source 1..20: mol_type = other DNA
cactatttagagaaagtagg

SEQ ID NO: 12858 - DNA, 20 bp, synthetic construct
  source 1..20: mol_type = other DNA
ataggagcagtcgagaaact

SEQ ID NO: 12859 - DNA, 20 bp, synthetic construct
  source 1..20: mol_type = other DNA
gtcgcgttactgaccagcct

SEQ ID NO: 12860 - DNA, 20 bp, synthetic construct
  source 1..20: mol_type = other DNA
ggagttcatctgaatctacg

SEQ ID NO: 12861 - DNA, 20 bp, synthetic construct
  source 1..20: mol_type = other DNA
tagaccgaatggcagtgaat

SEQ ID NO: 12862 - DNA, 20 bp, synthetic construct
  source 1..20: mol_type = other DNA
gcacgatacattccactgga

SEQ ID NO: 12863 - DNA, 20 bp, synthetic construct
  source 1..20: mol_type = other DNA
catcggcgaacgcttgattt

SEQ ID NO: 12864 - DNA, 20 bp, synthetic construct
  source 1..20: mol_type = other DNA
ttcgacatcgcccacactcg

SEQ ID NO: 12865 - DNA, 20 bp, synthetic construct
  source 1..20: mol_type = other DNA
gccttatctaatgttgatgt

SEQ ID NO: 12866 - DNA, 20 bp, synthetic construct
  source 1..20: mol_type = other DNA
aaaggcaacagcaccaagtg

SEQ ID NO: 12867 - DNA, 20 bp, synthetic construct
  source 1..20: mol_type = other DNA
tcgtctcatgcgtcattaga

SEQ ID NO: 12868 - DNA, 20 bp, synthetic construct
  source 1..20: mol_type = other DNA
attagcccatctgacctgga

SEQ ID NO: 12869 - DNA, 20 bp, synthetic construct
  source 1..20: mol_type = other DNA
ttgagtggcctcaccggaat

SEQ ID NO: 12870 - DNA, 20 bp, synthetic construct
  source 1..20: mol_type = other DNA
attcagcaggcattcaggta

SEQ ID NO: 12871 - DNA, 20 bp, synthetic construct
  source 1..20: mol_type = other DNA
agcatatctctcgcagcgac

SEQ ID NO: 12872 - DNA, 20 bp, synthetic construct
  source 1..20: mol_type = other DNA
tgttgttaggtaatgctgtg

SEQ ID NO: 12873 - DNA, 20 bp, synthetic construct
  source 1..20: mol_type = other DNA
gggtaacctgtggccaaatc

SEQ ID NO: 12874 - DNA, 20 bp, synthetic construct
  source 1..20: mol_type = other DNA
cagcgggaaagtcgtcgcgt

SEQ ID NO: 12875 - DNA, 20 bp, synthetic construct
  source 1..20: mol_type = other DNA
gcgaagcgacttagggcaaa

SEQ ID NO: 12876 - DNA, 20 bp, synthetic construct
  source 1..20: mol_type = other DNA
attcagtggagtaggtgtaa

SEQ ID NO: 12877 - DNA, 20 bp, synthetic construct
  source 1..20: mol_type = other DNA
catcactgggatttagaagt

SEQ ID NO: 12878 - DNA, 20 bp, synthetic construct
  source 1..20: mol_type = other DNA
ccggacagttaccgtcgtac

SEQ ID NO: 12879 - DNA, 20 bp, synthetic construct
  source 1..20: mol_type = other DNA
tcatttcgtgcagatgcttc

SEQ ID NO: 12880 - DNA, 20 bp, synthetic construct
  source 1..20: mol_type = other DNA
agagtgagctctactagact

SEQ ID NO: 12881 - DNA, 20 bp, synthetic construct
  source 1..20: mol_type = other DNA
atgggcgcttattcagtcta

SEQ ID NO: 12882 - DNA, 20 bp, synthetic construct
  source 1..20: mol_type = other DNA
gcgtaaggacctctcctcag

SEQ ID NO: 12883 - DNA, 20 bp, synthetic construct
  source 1..20: mol_type = other DNA
cctcgaattggctcaaagaa

SEQ ID NO: 12884 - DNA, 20 bp, synthetic construct
  source 1..20: mol_type = other DNA
ggcgtgcgaccaccgtgaat

SEQ ID NO: 12885 - DNA, 20 bp, synthetic construct
  source 1..20: mol_type = other DNA
catctcaagtttgaggcaca

SEQ ID NO: 12886 - DNA, 20 bp, synthetic construct
  source 1..20: mol_type = other DNA
gccgtttatacacgccgagc

SEQ ID NO: 12887 - DNA, 20 bp, synthetic construct
  source 1..20: mol_type = other DNA
tggccatcttgtagccatga

SEQ ID NO: 12888 - DNA, 20 bp, synthetic construct
  source 1..20: mol_type = other DNA
gtaaacgtctagcgatacaa

SEQ ID NO: 12889 - DNA, 20 bp, synthetic construct
  source 1..20: mol_type = other DNA
atgccactgtgtagcatcct

SEQ ID NO: 12890 - DNA, 20 bp, synthetic construct
  source 1..20: mol_type = other DNA
tacgggagagggagatcggg

SEQ ID NO: 12891 - DNA, 20 bp, synthetic construct
  source 1..20: mol_type = other DNA
atttgacgagcccgcggagc

SEQ ID NO: 12892 - DNA, 20 bp, synthetic construct
  source 1..20: mol_type = other DNA
aggatgtccaatattaccgg

SEQ ID NO: 12893 - DNA, 20 bp, synthetic construct
  source 1..20: mol_type = other DNA
ttctatacgtggacgtacgc

SEQ ID NO: 12894 - DNA, 20 bp, synthetic construct
  source 1..20: mol_type = other DNA
tactggccgctcaggacaac

SEQ ID NO: 12895 - DNA, 20 bp, synthetic construct
  source 1..20: mol_type = other DNA
gtacttacctggtgacgtac

SEQ ID NO: 12896 - DNA, 20 bp, synthetic construct
  source 1..20: mol_type = other DNA
cggtaattcagccattgcta

SEQ ID NO: 12897 - DNA, 20 bp, synthetic construct
  source 1..20: mol_type = other DNA
ggctatagacgacccagagt

SEQ ID NO: 12898 - DNA, 20 bp, synthetic construct
  source 1..20: mol_type = other DNA
acccttcaagattgccaacc

SEQ ID NO: 12899 - DNA, 20 bp, synthetic construct
  source 1..20: mol_type = other DNA
gcaaggctatatcatttcat

SEQ ID NO: 12900 - DNA, 20 bp, synthetic construct
  source 1..20: mol_type = other DNA
tccacaacgaacagctatat

SEQ ID NO: 12901 - DNA, 20 bp, synthetic construct
  source 1..20: mol_type = other DNA
aactcgctttgaagtccgtt

SEQ ID NO: 12902 - DNA, 20 bp, synthetic construct
  source 1..20: mol_type = other DNA
tgtttgagcgtcaatctgct

SEQ ID NO: 12903 - DNA, 20 bp, synthetic construct
  source 1..20: mol_type = other DNA
gtccttgccatttattctgc

SEQ ID NO: 12904 - DNA, 20 bp, synthetic construct
  source 1..20: mol_type = other DNA
gccgtgggattaccctcctt

SEQ ID NO: 12905 - DNA, 20 bp, synthetic construct
  source 1..20: mol_type = other DNA
tcatccgtctctaaacggtc

SEQ ID NO: 12906 - DNA, 20 bp, synthetic construct
  source 1..20: mol_type = other DNA
ttggtcaagcggacctaggg

SEQ ID NO: 12907 - DNA, 20 bp, synthetic construct
  source 1..20: mol_type = other DNA
tagtacttcgcctcacatgg

SEQ ID NO: 12908 - DNA, 20 bp, synthetic construct
  source 1..20: mol_type = other DNA
acaccgtcctcgtccgtcat

SEQ ID NO: 12909 - DNA, 20 bp, synthetic construct
  source 1..20: mol_type = other DNA
cgcggcacgctgttgttcgt

SEQ ID NO: 12910 - DNA, 20 bp, synthetic construct
  source 1..20: mol_type = other DNA
tcttagacggtgagtgtaaa

SEQ ID NO: 12911 - DNA, 20 bp, synthetic construct
  source 1..20: mol_type = other DNA
taagaatacctgtggacatc

SEQ ID NO: 12912 - DNA, 20 bp, synthetic construct
  source 1..20: mol_type = other DNA
tgtcatcgttctaaaccata

SEQ ID NO: 12913 - DNA, 20 bp, synthetic construct
  source 1..20: mol_type = other DNA
aacaactataggacgtaagc

SEQ ID NO: 12914 - DNA, 20 bp, synthetic construct
  source 1..20: mol_type = other DNA
tatttgtcgagggccaatat

SEQ ID NO: 12915 - DNA, 20 bp, synthetic construct
  source 1..20: mol_type = other DNA
gacggtttgacttcctcctg

SEQ ID NO: 12916 - DNA, 20 bp, synthetic construct
  source 1..20: mol_type = other DNA
taggttgagtcaaacggtcc

SEQ ID NO: 12917 - DNA, 20 bp, synthetic construct
  source 1..20: mol_type = other DNA
gggtgtggttacgtatgaag

SEQ ID NO: 12918 - DNA, 20 bp, synthetic construct
  source 1..20: mol_type = other DNA
cttgccgcctaagatcagta

SEQ ID NO: 12919 - DNA, 20 bp, synthetic construct
  source 1..20: mol_type = other DNA
cgtggataacccggtgagtg

SEQ ID NO: 12920 - DNA, 20 bp, synthetic construct
  source 1..20: mol_type = other DNA
tcggatgtgcatgcgacccg

SEQ ID NO: 12921 - DNA, 20 bp, synthetic construct
  source 1..20: mol_type = other DNA
agtcgccagatttacactta

SEQ ID NO: 12922 - DNA, 20 bp, synthetic construct
  source 1..20: mol_type = other DNA
cataaacgcaataggtgaca

SEQ ID NO: 12923 - DNA, 20 bp, synthetic construct
  source 1..20: mol_type = other DNA
ccctatttagttatagggag

SEQ ID NO: 12924 - DNA, 20 bp, synthetic construct
  source 1..20: mol_type = other DNA
agcgacgaccaacagtattg

SEQ ID NO: 12925 - DNA, 20 bp, synthetic construct
  source 1..20: mol_type = other DNA
acgttcttcagccaaataga

SEQ ID NO: 12926 - DNA, 20 bp, synthetic construct
  source 1..20: mol_type = other DNA
gagctggtcttacccggcta

SEQ ID NO: 12927 - DNA, 20 bp, synthetic construct
  source 1..20: mol_type = other DNA
acgtctaacgattcatcact

SEQ ID NO: 12928 - DNA, 20 bp, synthetic construct
  source 1..20: mol_type = other DNA
aaagcgacaccgggtttaat

SEQ ID NO: 12929 - DNA, 20 bp, synthetic construct
  source 1..20: mol_type = other DNA
tcagtgataccttacgcggc

SEQ ID NO: 12930 - DNA, 20 bp, synthetic construct
  source 1..20: mol_type = other DNA
ccttggcgtttgctccgtaa

SEQ ID NO: 12931 - DNA, 20 bp, synthetic construct
  source 1..20: mol_type = other DNA
atgaatcgacagttaagttg

SEQ ID NO: 12932 - DNA, 20 bp, synthetic construct
  source 1..20: mol_type = other DNA
tgtgcatacacatcgcggtg

SEQ ID NO: 12933 - DNA, 20 bp, synthetic construct
  source 1..20: mol_type = other DNA
aacccttgagtgtttatgaa

SEQ ID NO: 12934 - DNA, 20 bp, synthetic construct
  source 1..20: mol_type = other DNA
ccgggatgtgcctctaggac

SEQ ID NO: 12935 - DNA, 20 bp, synthetic construct
  source 1..20: mol_type = other DNA
atacaggtaaccctgtagtt

SEQ ID NO: 12936 - DNA, 20 bp, synthetic construct
  source 1..20: mol_type = other DNA
tcaagcagccgtgcacggag

SEQ ID NO: 12937 - DNA, 20 bp, synthetic construct
  source 1..20: mol_type = other DNA
acgaatttcgtcgataccca

SEQ ID NO: 12938 - DNA, 20 bp, synthetic construct
  source 1..20: mol_type = other DNA
ctatgtgcgcacgtgggaag

SEQ ID NO: 12939 - DNA, 20 bp, synthetic construct
  source 1..20: mol_type = other DNA
tgatcgttaacaagctctac

SEQ ID NO: 12940 - DNA, 20 bp, synthetic construct
  source 1..20: mol_type = other DNA
aagaagcagttgagagactg

SEQ ID NO: 12941 - DNA, 20 bp, synthetic construct
  source 1..20: mol_type = other DNA
actgttcaagttggcataac

SEQ ID NO: 12942 - DNA, 20 bp, synthetic construct
  source 1..20: mol_type = other DNA
agaggcatgcatcgaaagtg

SEQ ID NO: 12943 - DNA, 20 bp, synthetic construct
  source 1..20: mol_type = other DNA
ttgactacccggtaaggaca

SEQ ID NO: 12944 - DNA, 20 bp, synthetic construct
  source 1..20: mol_type = other DNA
tgacaactggtcagcctcgg

SEQ ID NO: 12945 - DNA, 20 bp, synthetic construct
  source 1..20: mol_type = other DNA
gtgcacactagcaaaccgcg

SEQ ID NO: 12946 - DNA, 20 bp, synthetic construct
  source 1..20: mol_type = other DNA
cacatactatagtcaccgac

SEQ ID NO: 12947 - DNA, 20 bp, synthetic construct
  source 1..20: mol_type = other DNA
aggttagagtttcatccgct

SEQ ID NO: 12948 - DNA, 20 bp, synthetic construct
  source 1..20: mol_type = other DNA
tcgcgcttataaacagtcat

SEQ ID NO: 12949 - DNA, 20 bp, synthetic construct
  source 1..20: mol_type = other DNA
cctccggattctgcacgagg

SEQ ID NO: 12950 - DNA, 20 bp, synthetic construct
  source 1..20: mol_type = other DNA
accaacgaacaccctgctgt

SEQ ID NO: 12951 - DNA, 20 bp, synthetic construct
  source 1..20: mol_type = other DNA
cgtgactcgaaggcagtgct

SEQ ID NO: 12952 - DNA, 20 bp, synthetic construct
  source 1..20: mol_type = other DNA
tttctagccgggatgatgcc

SEQ ID NO: 12953 - DNA, 20 bp, synthetic construct
  source 1..20: mol_type = other DNA
ctgaaaggctgtgcaagatg

SEQ ID NO: 12954 - DNA, 20 bp, synthetic construct
  source 1..20: mol_type = other DNA
ttgggcatcacgaagaatct

SEQ ID NO: 12955 - DNA, 20 bp, synthetic construct
  source 1..20: mol_type = other DNA
cgggagagtctcagaagctc

SEQ ID NO: 12956 - DNA, 20 bp, synthetic construct
  source 1..20: mol_type = other DNA
cataggcgaggagactccgg

SEQ ID NO: 12957 - DNA, 20 bp, synthetic construct
  source 1..20: mol_type = other DNA
ttcggcctggagcttctctg

SEQ ID NO: 12958 - DNA, 20 bp, synthetic construct
  source 1..20: mol_type = other DNA
tgcctaggtgacctcaatcg

SEQ ID NO: 12959 - DNA, 20 bp, synthetic construct
  source 1..20: mol_type = other DNA
gcgggtggattagctacacc

SEQ ID NO: 12960 - DNA, 20 bp, synthetic construct
  source 1..20: mol_type = other DNA
gaatatgtccacgaacctgg

SEQ ID NO: 12961 - DNA, 20 bp, synthetic construct
  source 1..20: mol_type = other DNA
agcccatcccagttctattg

SEQ ID NO: 12962 - DNA, 20 bp, synthetic construct
  source 1..20: mol_type = other DNA
gtcttggttccaggagatcc

SEQ ID NO: 12963 - DNA, 20 bp, synthetic construct
  source 1..20: mol_type = other DNA
aaggatcatgcgtgcagaga

SEQ ID NO: 12964 - DNA, 20 bp, synthetic construct
  source 1..20: mol_type = other DNA
tgtactgagtttaagaacac

SEQ ID NO: 12965 - DNA, 20 bp, synthetic construct
  source 1..20: mol_type = other DNA
gaggtatattgtgatgacac

SEQ ID NO: 12966 - DNA, 20 bp, synthetic construct
  source 1..20: mol_type = other DNA
gatttacgttagtcatcctg

SEQ ID NO: 12967 - DNA, 20 bp, synthetic construct
  source 1..20: mol_type = other DNA
aactgagcttatccggttta

SEQ ID NO: 12968 - DNA, 20 bp, synthetic construct
  source 1..20: mol_type = other DNA
ggatgtagggtgatggccgt

SEQ ID NO: 12969 - DNA, 20 bp, synthetic construct
  source 1..20: mol_type = other DNA
ggcgattataagatcagacc

SEQ ID NO: 12970 - DNA, 20 bp, synthetic construct
  source 1..20: mol_type = other DNA
tctgttccattatcgatgac

SEQ ID NO: 12971 - DNA, 20 bp, synthetic construct
  source 1..20: mol_type = other DNA
gccgcttgaggagtcacaag

SEQ ID NO: 12972 - DNA, 20 bp, synthetic construct
  source 1..20: mol_type = other DNA
tttctctctaggccattgtg

SEQ ID NO: 12973 - DNA, 20 bp, synthetic construct
  source 1..20: mol_type = other DNA
gttcgccgcagtcaaatcgg

SEQ ID NO: 12974 - DNA, 20 bp, synthetic construct
  source 1..20: mol_type = other DNA
cgggtaattggtggataaga

SEQ ID NO: 12975 - DNA, 20 bp, synthetic construct
  source 1..20: mol_type = other DNA
attagcttaggactcccgtt

SEQ ID NO: 12976 - DNA, 20 bp, synthetic construct
  source 1..20: mol_type = other DNA
ctcggcctgtctcaaggtca

SEQ ID NO: 12977 - DNA, 20 bp, synthetic construct
  source 1..20: mol_type = other DNA
aatggtgcagttatctgtcg

SEQ ID NO: 12978 - DNA, 20 bp, synthetic construct
  source 1..20: mol_type = other DNA
ccgaggtagcatactagctt

SEQ ID NO: 12979 - DNA, 20 bp, synthetic construct
  source 1..20: mol_type = other DNA
gatagcgcggtggcgatact

SEQ ID NO: 12980 - DNA, 20 bp, synthetic construct
  source 1..20: mol_type = other DNA
ggacactataacgcaattgt

SEQ ID NO: 12981 - DNA, 20 bp, synthetic construct
  source 1..20: mol_type = other DNA
ctgcctgcaatgtatacata

SEQ ID NO: 12982 - DNA, 20 bp, synthetic construct
  source 1..20: mol_type = other DNA
agcacaaagtagcccttcct

SEQ ID NO: 12983 - DNA, 20 bp, synthetic construct
  source 1..20: mol_type = other DNA
ttacccacgagttaatactg

SEQ ID NO: 12984 - DNA, 20 bp, synthetic construct
  source 1..20: mol_type = other DNA
ccgacgagcaggccattgtt

SEQ ID NO: 12985 - DNA, 20 bp, synthetic construct
  source 1..20: mol_type = other DNA
cctgtgcgtttacgattaat

SEQ ID NO: 12986 - DNA, 20 bp, synthetic construct
  source 1..20: mol_type = other DNA
cacccatttagaatctccgc

SEQ ID NO: 12987 - DNA, 20 bp, synthetic construct
  source 1..20: mol_type = other DNA
gtacggtttcgtgcagaggt

SEQ ID NO: 12988 - DNA, 20 bp, synthetic construct
  source 1..20: mol_type = other DNA
tctaccgcatggaacgctac

SEQ ID NO: 12989 - DNA, 20 bp, synthetic construct
  source 1..20: mol_type = other DNA
gatgttacgagggtgtccct

SEQ ID NO: 12990 - DNA, 20 bp, synthetic construct
  source 1..20: mol_type = other DNA
aattcgcaacttcataaccc

SEQ ID NO: 12991 - DNA, 20 bp, synthetic construct
  source 1..20: mol_type = other DNA
caaagcgagggactactagc

SEQ ID NO: 12992 - DNA, 20 bp, synthetic construct
  source 1..20: mol_type = other DNA
ccatgagaagtcgtcctcct

SEQ ID NO: 12993 - DNA, 20 bp, synthetic construct
  source 1..20: mol_type = other DNA
tagcgttgatcctactacca

SEQ ID NO: 12994 - DNA, 20 bp, synthetic construct
  source 1..20: mol_type = other DNA
agtcctaggccgtccatcat

SEQ ID NO: 12995 - DNA, 20 bp, synthetic construct
  source 1..20: mol_type = other DNA
ccaagtatccgcggttattt

SEQ ID NO: 12996 - DNA, 20 bp, synthetic construct
  source 1..20: mol_type = other DNA
gcgagtgatgaatatcagct

SEQ ID NO: 12997 - DNA, 20 bp, synthetic construct
  source 1..20: mol_type = other DNA
aagagctccgagtgaaattc

SEQ ID NO: 12998 - DNA, 20 bp, synthetic construct
  source 1..20: mol_type = other DNA
gagagcgacgcagatgcaat

SEQ ID NO: 12999 - DNA, 20 bp, synthetic construct
  source 1..20: mol_type = other DNA
taagtacgacgtcccagacc

SEQ ID NO: 13000 - DNA, 20 bp, synthetic construct
  source 1..20: mol_type = other DNA
ttagtcggagggcctcgcac

SEQ ID NO: 13001 - DNA, 20 bp, synthetic construct
  source 1..20: mol_type = other DNA
gggtgtacgaaacggagcat

SEQ ID NO: 13002 - DNA, 20 bp, synthetic construct
  source 1..20: mol_type = other DNA
tgtcttcaggattcagacat

SEQ ID NO: 13003 - DNA, 20 bp, synthetic construct
  source 1..20: mol_type = other DNA
agcttattgatacgttggat

SEQ ID NO: 13004 - DNA, 20 bp, synthetic construct
  source 1..20: mol_type = other DNA
cggacttccttagtcctcca

SEQ ID NO: 13005 - DNA, 20 bp, synthetic construct
  source 1..20: mol_type = other DNA
tacgtctgtccatgtatcca

SEQ ID NO: 13006 - DNA, 20 bp, synthetic construct
  source 1..20: mol_type = other DNA
cacacagagagtcagctctt

SEQ ID NO: 13007 - DNA, 20 bp, synthetic construct
  source 1..20: mol_type = other DNA
aactccacaacaggcaactt

SEQ ID NO: 13008 - DNA, 20 bp, synthetic construct
  source 1..20: mol_type = other DNA
ggtcacgaaccacctatcgg

SEQ ID NO: 13009 - DNA, 20 bp, synthetic construct
  source 1..20: mol_type = other DNA
cgtgtagaaacttagagcag

SEQ ID NO: 13010 - DNA, 20 bp, synthetic construct
  source 1..20: mol_type = other DNA
cagtatcgcgtagtgaagcc

SEQ ID NO: 13011 - DNA, 20 bp, synthetic construct
  source 1..20: mol_type = other DNA
gacattaagctctggtactg

SEQ ID NO: 13012 - DNA, 20 bp, synthetic construct
  source 1..20: mol_type = other DNA
atacagctagaggaatatcc

SEQ ID NO: 13013 - DNA, 20 bp, synthetic construct
  source 1..20: mol_type = other DNA
ccgcattcagcgcagcaagt

SEQ ID NO: 13014 - DNA, 20 bp, synthetic construct
  source 1..20: mol_type = other DNA
ggatagtccttatgtgtccc

SEQ ID NO: 13015 - DNA, 20 bp, synthetic construct
  source 1..20: mol_type = other DNA
aagacagagcctcgtaatcg

SEQ ID NO: 13016 - DNA, 20 bp, synthetic construct
  source 1..20: mol_type = other DNA
cccgtgaggctaagcgagcc

SEQ ID NO: 13017 - DNA, 20 bp, synthetic construct
  source 1..20: mol_type = other DNA
gggtaatttgctgcagttcg

SEQ ID NO: 13018 - DNA, 20 bp, synthetic construct
  source 1..20: mol_type = other DNA
cccgtagctataatcaggac

SEQ ID NO: 13019 - DNA, 20 bp, synthetic construct
  source 1..20: mol_type = other DNA
gtcaatgtgcagcttgcgtt

SEQ ID NO: 13020 - DNA, 20 bp, synthetic construct
  source 1..20: mol_type = other DNA
ctcacaacctcaacagcctt

SEQ ID NO: 13021 - DNA, 20 bp, synthetic construct
  source 1..20: mol_type = other DNA
atggagtacacgtcaccgct

SEQ ID NO: 13022 - DNA, 20 bp, synthetic construct
  source 1..20: mol_type = other DNA
gggtgggacgattagccggt

SEQ ID NO: 13023 - DNA, 20 bp, synthetic construct
  source 1..20: mol_type = other DNA
gtccggcaactgatttcttg

SEQ ID NO: 13024 - DNA, 20 bp, synthetic construct
  source 1..20: mol_type = other DNA
atggaagagacatgttgggc

SEQ ID NO: 13025 - DNA, 20 bp, synthetic construct
  source 1..20: mol_type = other DNA
actatgatcctaactcctcc

SEQ ID NO: 13026 - DNA, 20 bp, synthetic construct
  source 1..20: mol_type = other DNA
ttgattcgtacgaggagttc

SEQ ID NO: 13027 - DNA, 20 bp, synthetic construct
  source 1..20: mol_type = other DNA
ttcaatgcgaatatgccgct

SEQ ID NO: 13028 - DNA, 20 bp, synthetic construct
  source 1..20: mol_type = other DNA
aaacgtcgctaaggagcata

SEQ ID NO: 13029 - DNA, 20 bp, synthetic construct
  source 1..20: mol_type = other DNA
taccgggcagaggcgtgagt

SEQ ID NO: 13030 - DNA, 20 bp, synthetic construct
  source 1..20: mol_type = other DNA
gtccgtggtgactaagaagg

SEQ ID NO: 13031 - DNA, 20 bp, synthetic construct
  source 1..20: mol_type = other DNA
atcaaaggcgtagtaacctg

SEQ ID NO: 13032 - DNA, 20 bp, synthetic construct
  source 1..20: mol_type = other DNA
agggcttgactccacttgcc

SEQ ID NO: 13033 - DNA, 20 bp, synthetic construct
  source 1..20: mol_type = other DNA
gtgataggtagttgatcaag

SEQ ID NO: 13034 - DNA, 20 bp, synthetic construct
  source 1..20: mol_type = other DNA
gtactcgacatagcgacccg

SEQ ID NO: 13035 - DNA, 20 bp, synthetic construct
  source 1..20: mol_type = other DNA
tttgttcagctgaaatctac

SEQ ID NO: 13036 - DNA, 20 bp, synthetic construct
  source 1..20: mol_type = other DNA
tcacgtcaatagaggaagcc

SEQ ID NO: 13037 - DNA, 20 bp, synthetic construct
  source 1..20: mol_type = other DNA
tgtagcggtgtcgtgttagc

SEQ ID NO: 13038 - DNA, 20 bp, synthetic construct
  source 1..20: mol_type = other DNA
actcctccgggcttccactt

SEQ ID NO: 13039 - DNA, 20 bp, synthetic construct
  source 1..20: mol_type = other DNA
acaagacatgccaagaaatg

SEQ ID NO: 13040 - DNA, 20 bp, synthetic construct
  source 1..20: mol_type = other DNA
gtatcaccaaccctgccagt

SEQ ID NO: 13041 - DNA, 20 bp, synthetic construct
  source 1..20: mol_type = other DNA
tcgttagccagtgtatcgca

SEQ ID NO: 13042 - DNA, 20 bp, synthetic construct
  source 1..20: mol_type = other DNA
cgttcatgaaggtatgagtc

SEQ ID NO: 13043 - DNA, 20 bp, synthetic construct
  source 1..20: mol_type = other DNA
atcggaggaggaggaaatga

SEQ ID NO: 13044 - DNA, 20 bp, synthetic construct
  source 1..20: mol_type = other DNA
gacgcgtttaatcagaggca

SEQ ID NO: 13045 - DNA, 20 bp, synthetic construct
  source 1..20: mol_type = other DNA
cggtttaacatttcccatgt

SEQ ID NO: 13046 - DNA, 20 bp, synthetic construct
  source 1..20: mol_type = other DNA
gtggttgcgcgaccttcctt

SEQ ID NO: 13047 - DNA, 20 bp, synthetic construct
  source 1..20: mol_type = other DNA
gtgaagcacgaactaataaa

SEQ ID NO: 13048 - DNA, 20 bp, synthetic construct
  source 1..20: mol_type = other DNA
ggtaacggtgcgtcggacgt

SEQ ID NO: 13049 - DNA, 20 bp, synthetic construct
  source 1..20: mol_type = other DNA
ccggcagagttgttggtcct

SEQ ID NO: 13050 - DNA, 20 bp, synthetic construct
  source 1..20: mol_type = other DNA
gtggaaggctcccgaggaca

SEQ ID NO: 13051 - DNA, 20 bp, synthetic construct
  source 1..20: mol_type = other DNA
cagtggtgccgagtcacgtt

SEQ ID NO: 13052 - DNA, 20 bp, synthetic construct
  source 1..20: mol_type = other DNA
cagtcggttctgcgttctgt

SEQ ID NO: 13053 - DNA, 20 bp, synthetic construct
  source 1..20: mol_type = other DNA
cgccactttgcgtactggct

SEQ ID NO: 13054 - DNA, 20 bp, synthetic construct
  source 1..20: mol_type = other DNA
aagtctgttgtcattcaagg

SEQ ID NO: 13055 - DNA, 20 bp, synthetic construct
  source 1..20: mol_type = other DNA
ttagggactggctacaagga

SEQ ID NO: 13056 - DNA, 20 bp, synthetic construct
  source 1..20: mol_type = other DNA
tagtgagttgaaatatgtct

SEQ ID NO: 13057 - DNA, 20 bp, synthetic construct
  source 1..20: mol_type = other DNA
tggtgtaatgccaggtggta

SEQ ID NO: 13058 - DNA, 20 bp, synthetic construct
  source 1..20: mol_type = other DNA
gaaatctggtcctcactcgc

SEQ ID NO: 13059 - DNA, 20 bp, synthetic construct
  source 1..20: mol_type = other DNA
tagacctccgttgatattcc

SEQ ID NO: 13060 - DNA, 20 bp, synthetic construct
  source 1..20: mol_type = other DNA
cgtcggttgaacacccgcct

SEQ ID NO: 13061 - DNA, 20 bp, synthetic construct
  source 1..20: mol_type = other DNA
attacgacgtgatgcagttt

SEQ ID NO: 13062 - DNA, 20 bp, synthetic construct
  source 1..20: mol_type = other DNA
tcgaatctcttgatccagag

SEQ ID NO: 13063 - DNA, 20 bp, synthetic construct
  source 1..20: mol_type = other DNA
ctccgccatagtgtcatgga

SEQ ID NO: 13064 - DNA, 20 bp, synthetic construct
  source 1..20: mol_type = other DNA
tctgatagatcgggttgccg

SEQ ID NO: 13065 - DNA, 20 bp, synthetic construct
  source 1..20: mol_type = other DNA
ccgaacaaagcactcgccgg

SEQ ID NO: 13066 - DNA, 20 bp, synthetic construct
  source 1..20: mol_type = other DNA
tagaggacccgacccaagac

SEQ ID NO: 13067 - DNA, 20 bp, synthetic construct
  source 1..20: mol_type = other DNA
cgaacatgtcgtcctccggg

SEQ ID NO: 13068 - DNA, 20 bp, synthetic construct
  source 1..20: mol_type = other DNA
cgggccaaatgcggctgttg

SEQ ID NO: 13069 - DNA, 20 bp, synthetic construct
  source 1..20: mol_type = other DNA
gcttagagcgtccgcgatgt

SEQ ID NO: 13070 - DNA, 20 bp, synthetic construct
  source 1..20: mol_type = other DNA
ctgcgtcccataacccggta

SEQ ID NO: 13071 - DNA, 20 bp, synthetic construct
  source 1..20: mol_type = other DNA
tatgtttcccgtctaatggt

SEQ ID NO: 13072 - DNA, 20 bp, synthetic construct
  source 1..20: mol_type = other DNA
ggttatcaatgagtatgata

SEQ ID NO: 13073 - DNA, 20 bp, synthetic construct
  source 1..20: mol_type = other DNA
gcgtctgatataaagggtca

SEQ ID NO: 13074 - DNA, 20 bp, synthetic construct
  source 1..20: mol_type = other DNA
cggaaagctcgcgctaaagc

SEQ ID NO: 13075 - DNA, 20 bp, synthetic construct
  source 1..20: mol_type = other DNA
gcatacacgttagcgtatag

SEQ ID NO: 13076 - DNA, 20 bp, synthetic construct
  source 1..20: mol_type = other DNA
ggcgcagacagattcattca

SEQ ID NO: 13077 - DNA, 20 bp, synthetic construct
  source 1..20: mol_type = other DNA
tgggacgcgactgttaccac

SEQ ID NO: 13078 - DNA, 20 bp, synthetic construct
  source 1..20: mol_type = other DNA
tctactcaattctgtctggc

SEQ ID NO: 13079 - DNA, 20 bp, synthetic construct
  source 1..20: mol_type = other DNA
actcaagactattagcagtt

SEQ ID NO: 13080 - DNA, 20 bp, synthetic construct
  source 1..20: mol_type = other DNA
ctgcttatgttgtgcccatc

SEQ ID NO: 13081 - DNA, 20 bp, synthetic construct
  source 1..20: mol_type = other DNA
tgagaaacctgaccgagtcc

SEQ ID NO: 13082 - DNA, 20 bp, synthetic construct
  source 1..20: mol_type = other DNA
tgctacttcaccgtatgcga

SEQ ID NO: 13083 - DNA, 20 bp, synthetic construct
  source 1..20: mol_type = other DNA
taggacgggctgtcactcgg

SEQ ID NO: 13084 - DNA, 20 bp, synthetic construct
  source 1..20: mol_type = other DNA
gttgaaccatcccttgcgcg

SEQ ID NO: 13085 - DNA, 20 bp, synthetic construct
  source 1..20: mol_type = other DNA
ctagttctgagaatcgtagc

SEQ ID NO: 13086 - DNA, 20 bp, synthetic construct
  source 1..20: mol_type = other DNA
cgcatgataaggcgttgcac

SEQ ID NO: 13087 - DNA, 20 bp, synthetic construct
  source 1..20: mol_type = other DNA
tagaatggaacgagcatagt

SEQ ID NO: 13088 - DNA, 20 bp, synthetic construct
  source 1..20: mol_type = other DNA
taactagcgactttcgagtt

SEQ ID NO: 13089 - DNA, 20 bp, synthetic construct
  source 1..20: mol_type = other DNA
tcctagtgcgcagaacaagg

SEQ ID NO: 13090 - DNA, 20 bp, synthetic construct
  source 1..20: mol_type = other DNA
tactcaactctggagcaggt

SEQ ID NO: 13091 - DNA, 20 bp, synthetic construct
  source 1..20: mol_type = other DNA
ttccaaagcagcactgacca

SEQ ID NO: 13092 - DNA, 20 bp, synthetic construct
  source 1..20: mol_type = other DNA
cgttagggtgtaactaagcg

SEQ ID NO: 13093 - DNA, 20 bp, synthetic construct
  source 1..20: mol_type = other DNA
cggcagactactcttggcgc

SEQ ID NO: 13094 - DNA, 20 bp, synthetic construct
  source 1..20: mol_type = other DNA
ggtcatccagctatttatcg

SEQ ID NO: 13095 - DNA, 20 bp, synthetic construct
  source 1..20: mol_type = other DNA
acatgtttaggacacgttta

SEQ ID NO: 13096 - DNA, 20 bp, synthetic construct
  source 1..20: mol_type = other DNA
ttcgcgggtgtggatcatac

SEQ ID NO: 13097 - DNA, 20 bp, synthetic construct
  source 1..20: mol_type = other DNA
ccggtgacacgagtagaaac

SEQ ID NO: 13098 - DNA, 20 bp, synthetic construct
  source 1..20: mol_type = other DNA
atcaaataatacggttcggg

SEQ ID NO: 13099 - DNA, 20 bp, synthetic construct
  source 1..20: mol_type = other DNA
tagacgtcaacttaaaccgg

SEQ ID NO: 13100 - DNA, 20 bp, synthetic construct
  source 1..20: mol_type = other DNA
ggataacccagggttactct

SEQ ID NO: 13101 - DNA, 20 bp, synthetic construct
  source 1..20: mol_type = other DNA
ctagttaagaaccaccgccc

SEQ ID NO: 13102 - DNA, 20 bp, synthetic construct
  source 1..20: mol_type = other DNA
accatagtccttatacgatc

SEQ ID NO: 13103 - DNA, 20 bp, synthetic construct
  source 1..20: mol_type = other DNA
aacgatcaccgcctattgtc

SEQ ID NO: 13104 - DNA, 20 bp, synthetic construct
  source 1..20: mol_type = other DNA
caatgccgattgaatccgcc

SEQ ID NO: 13105 - DNA, 20 bp, synthetic construct
  source 1..20: mol_type = other DNA
gcattggctactttatgaat

SEQ ID NO: 13106 - DNA, 20 bp, synthetic construct
  source 1..20: mol_type = other DNA
gtttgcgcggacagatccct

SEQ ID NO: 13107 - DNA, 20 bp, synthetic construct
  source 1..20: mol_type = other DNA
atgcgtaccagaactatcct

SEQ ID NO: 13108 - DNA, 20 bp, synthetic construct
  source 1..20: mol_type = other DNA
cgatcgtaccaaactaattg

SEQ ID NO: 13109 - DNA, 20 bp, synthetic construct
  source 1..20: mol_type = other DNA
catctatcaatgctccagga

SEQ ID NO: 13110 - DNA, 20 bp, synthetic construct
  source 1..20: mol_type = other DNA
atcgagtaggttagttgccc

SEQ ID NO: 13111 - DNA, 20 bp, synthetic construct
  source 1..20: mol_type = other DNA
gaactttcgattcgggatcc

SEQ ID NO: 13112 - DNA, 20 bp, synthetic construct
  source 1..20: mol_type = other DNA
gcagctcaaggtcctagacg

SEQ ID NO: 13113 - DNA, 20 bp, synthetic construct
  source 1..20: mol_type = other DNA
cgatcgattgctctaacctt

SEQ ID NO: 13114 - DNA, 20 bp, synthetic construct
  source 1..20: mol_type = other DNA
atcgcacgttaatcttgcag

SEQ ID NO: 13115 - DNA, 20 bp, synthetic construct
  source 1..20: mol_type = other DNA
gttcgcccgatttactgagc

SEQ ID NO: 13116 - DNA, 20 bp, synthetic construct
  source 1..20: mol_type = other DNA
gttgcaatgttaagggatac

SEQ ID NO: 13117 - DNA, 20 bp, synthetic construct
  source 1..20: mol_type = other DNA
ttgacctggaatcatcaact

SEQ ID NO: 13118 - DNA, 20 bp, synthetic construct
  source 1..20: mol_type = other DNA
ggttcatctcgtgtaggcgt

SEQ ID NO: 13119 - DNA, 20 bp, synthetic construct
  source 1..20: mol_type = other DNA
caaacggctactgccagacc

SEQ ID NO: 13120 - DNA, 20 bp, synthetic construct
  source 1..20: mol_type = other DNA
gcagcctgttggtcaacgct

SEQ ID NO: 13121 - DNA, 20 bp, synthetic construct
  source 1..20: mol_type = other DNA
tcatccagtgcagtagcggg

SEQ ID NO: 13122 - DNA, 20 bp, synthetic construct
  source 1..20: mol_type = other DNA
ggaagatgtctctggttaag

SEQ ID NO: 13123 - DNA, 20 bp, synthetic construct
  source 1..20: mol_type = other DNA
gaaaccgttcagagcgatac

SEQ ID NO: 13124 - DNA, 20 bp, synthetic construct
  source 1..20: mol_type = other DNA
accactagggtctggaaatt

SEQ ID NO: 13125 - DNA, 20 bp, synthetic construct
  source 1..20: mol_type = other DNA
ctcaggcttcatcccgactc

SEQ ID NO: 13126 - DNA, 20 bp, synthetic construct
  source 1..20: mol_type = other DNA
tgagaaacagtatccgcgag

SEQ ID NO: 13127 - DNA, 20 bp, synthetic construct
  source 1..20: mol_type = other DNA
gcatcactaagcgagatcgc

SEQ ID NO: 13128 - DNA, 20 bp, synthetic construct
  source 1..20: mol_type = other DNA
tcctcttgctgtatatacgt

SEQ ID NO: 13129 - DNA, 20 bp, synthetic construct
  source 1..20: mol_type = other DNA
aacctttaattgccggaatg

SEQ ID NO: 13130 - DNA, 20 bp, synthetic construct
  source 1..20: mol_type = other DNA
atacggtatgtgaggttcta

SEQ ID NO: 13131 - DNA, 20 bp, synthetic construct
  source 1..20: mol_type = other DNA
cgatgagagtccttgaactt

SEQ ID NO: 13132 - DNA, 20 bp, synthetic construct
  source 1..20: mol_type = other DNA
tttgcgcaacttgttcataa

SEQ ID NO: 13133 - DNA, 20 bp, synthetic construct
  source 1..20: mol_type = other DNA
gatatacatgccgtaaccct

SEQ ID NO: 13134 - DNA, 20 bp, synthetic construct
  source 1..20: mol_type = other DNA
ccgatgcagaacagccaggt

SEQ ID NO: 13135 - DNA, 20 bp, synthetic construct
  source 1..20: mol_type = other DNA
gtacccaccctctctgggcg

SEQ ID NO: 13136 - DNA, 20 bp, synthetic construct
  source 1..20: mol_type = other DNA
cttatccattctggtcaaag

SEQ ID NO: 13137 - DNA, 20 bp, synthetic construct
  source 1..20: mol_type = other DNA
gaaacggtcgttccaacatg

SEQ ID NO: 13138 - DNA, 20 bp, synthetic construct
  source 1..20: mol_type = other DNA
tatggagatgattcgagtga

SEQ ID NO: 13139 - DNA, 20 bp, synthetic construct
  source 1..20: mol_type = other DNA
gctccaccctcgtcctgtac

SEQ ID NO: 13140 - DNA, 20 bp, synthetic construct
  source 1..20: mol_type = other DNA
gccgtacgaggattagtcaa

SEQ ID NO: 13141 - DNA, 20 bp, synthetic construct
  source 1..20: mol_type = other DNA
ggaacagtagcgtagctgca

SEQ ID NO: 13142 - DNA, 20 bp, synthetic construct
  source 1..20: mol_type = other DNA
tctcgtggtacctctacaca

SEQ ID NO: 13143 - DNA, 20 bp, synthetic construct
  source 1..20: mol_type = other DNA
ggatcgtgtattagggcctt

SEQ ID NO: 13144 - DNA, 20 bp, synthetic construct
  source 1..20: mol_type = other DNA
ttggtacttccatgcctatg

SEQ ID NO: 13145 - DNA, 20 bp, synthetic construct
  source 1..20: mol_type = other DNA
cccttagtaggactggtcag

SEQ ID NO: 13146 - DNA, 20 bp, synthetic construct
  source 1..20: mol_type = other DNA
cctgaaacaccggctagcct

SEQ ID NO: 13147 - DNA, 20 bp, synthetic construct
  source 1..20: mol_type = other DNA
cctatgatcattctcgctga

SEQ ID NO: 13148 - DNA, 20 bp, synthetic construct
  source 1..20: mol_type = other DNA
ggttcaatgcagcgttgcac

SEQ ID NO: 13149 - DNA, 20 bp, synthetic construct
  source 1..20: mol_type = other DNA
gcatgacatacttaatttga

SEQ ID NO: 13150 - DNA, 20 bp, synthetic construct
  source 1..20: mol_type = other DNA
atcatcaccaaagcggttta

SEQ ID NO: 13151 - DNA, 20 bp, synthetic construct
  source 1..20: mol_type = other DNA
gctgcgtatgcggttctagg

SEQ ID NO: 13152 - DNA, 20 bp, synthetic construct
  source 1..20: mol_type = other DNA
ggtttcagctggtgtgtact

SEQ ID NO: 13153 - DNA, 20 bp, synthetic construct
  source 1..20: mol_type = other DNA
tcaatagtggatacaagcga

SEQ ID NO: 13154 - DNA, 20 bp, synthetic construct
  source 1..20: mol_type = other DNA
attgcctgaggaacccggat

SEQ ID NO: 13155 - DNA, 20 bp, synthetic construct
  source 1..20: mol_type = other DNA
ccgataatgacgacggacct

SEQ ID NO: 13156 - DNA, 20 bp, synthetic construct
  source 1..20: mol_type = other DNA
tgagcggcggctccctttct

SEQ ID NO: 13157 - DNA, 20 bp, synthetic construct
  source 1..20: mol_type = other DNA
caaagcagaccgcaacgtcc

SEQ ID NO: 13158 - DNA, 20 bp, synthetic construct
  source 1..20: mol_type = other DNA
tgcagctatgtatccagccg

SEQ ID NO: 13159 - DNA, 20 bp, synthetic construct
  source 1..20: mol_type = other DNA
cggactcgcgactaatcttc

SEQ ID NO: 13160 - DNA, 20 bp, synthetic construct
  source 1..20: mol_type = other DNA
atagcaggctgttacagggt

SEQ ID NO: 13161 - DNA, 20 bp, synthetic construct
  source 1..20: mol_type = other DNA
ctgattacgtggaaggcaga

SEQ ID NO: 13162 - DNA, 20 bp, synthetic construct
  source 1..20: mol_type = other DNA
ataacttcacttatcaccgc

SEQ ID NO: 13163 - DNA, 20 bp, synthetic construct
  source 1..20: mol_type = other DNA
actgtagactctgggaaata

SEQ ID NO: 13164 - DNA, 20 bp, synthetic construct
  source 1..20: mol_type = other DNA
ccagccgatctgcctagtcc

SEQ ID NO: 13165 - DNA, 20 bp, synthetic construct
  source 1..20: mol_type = other DNA
taccgtgcgttcggcgtgtt

SEQ ID NO: 13166 - DNA, 20 bp, synthetic construct
  source 1..20: mol_type = other DNA
acggcattgaaacctatgta

SEQ ID NO: 13167 - DNA, 20 bp, synthetic construct
  source 1..20: mol_type = other DNA
ccgcggaagcggagtgttca

SEQ ID NO: 13168 - DNA, 20 bp, synthetic construct
  source 1..20: mol_type = other DNA
tgtgtaagcgtggcacgact

SEQ ID NO: 13169 - DNA, 20 bp, synthetic construct
  source 1..20: mol_type = other DNA
tgggaacaccctagtggaag

SEQ ID NO: 13170 - DNA, 20 bp, synthetic construct
  source 1..20: mol_type = other DNA
catggtccgtttcagaggca

SEQ ID NO: 13171 - DNA, 20 bp, synthetic construct
  source 1..20: mol_type = other DNA
cagaggtatgagctggccct

SEQ ID NO: 13172 - DNA, 20 bp, synthetic construct
  source 1..20: mol_type = other DNA
ctaccatttaaaccacgcgg

SEQ ID NO: 13173 - DNA, 20 bp, synthetic construct
  source 1..20: mol_type = other DNA
agtgattggcccagtattga

SEQ ID NO: 13174 - DNA, 20 bp, synthetic construct
  source 1..20: mol_type = other DNA
tgctggatatattctcacct

SEQ ID NO: 13175 - DNA, 20 bp, synthetic construct
  source 1..20: mol_type = other DNA
aaggagatggccgcttccta

SEQ ID NO: 13176 - DNA, 20 bp, synthetic construct
  source 1..20: mol_type = other DNA
ggtggagctctatttaagtt

SEQ ID NO: 13177 - DNA, 20 bp, synthetic construct
  source 1..20: mol_type = other DNA
gaatcgtgtttcgtgtgact

SEQ ID NO: 13178 - DNA, 20 bp, synthetic construct
  source 1..20: mol_type = other DNA
gggtttatgtcattcaccta

SEQ ID NO: 13179 - DNA, 20 bp, synthetic construct
  source 1..20: mol_type = other DNA
ggtcgcgtcgaagagttgtc

SEQ ID NO: 13180 - DNA, 20 bp, synthetic construct
  source 1..20: mol_type = other DNA
ggacgagcatcgcaatgggt

SEQ ID NO: 13181 - DNA, 20 bp, synthetic construct
  source 1..20: mol_type = other DNA
cctaaattggtgtgaggcat

SEQ ID NO: 13182 - DNA, 20 bp, synthetic construct
  source 1..20: mol_type = other DNA
cctcgaaagcgcgatcccag

SEQ ID NO: 13183 - DNA, 20 bp, synthetic construct
  source 1..20: mol_type = other DNA
catattgttatgccctagca

SEQ ID NO: 13184 - DNA, 20 bp, synthetic construct
  source 1..20: mol_type = other DNA
gtcctaagccaggagcccac

SEQ ID NO: 13185 - DNA, 20 bp, synthetic construct
  source 1..20: mol_type = other DNA
aactcccgatactcccagcc

SEQ ID NO: 13186 - DNA, 20 bp, synthetic construct
  source 1..20: mol_type = other DNA
aaggactggcaacgatttcc

SEQ ID NO: 13187 - DNA, 20 bp, synthetic construct
  source 1..20: mol_type = other DNA
ctctgcacagcttctataca

SEQ ID NO: 13188 - DNA, 20 bp, synthetic construct
  source 1..20: mol_type = other DNA
ctttcccaaggtgctgcggg

SEQ ID NO: 13189 - DNA, 20 bp, synthetic construct
  source 1..20: mol_type = other DNA
ggtatgtgcatgcgaccctt

SEQ ID NO: 13190 - DNA, 20 bp, synthetic construct
  source 1..20: mol_type = other DNA
ggaggcctgtaggatagttc

SEQ ID NO: 13191 - DNA, 20 bp, synthetic construct
  source 1..20: mol_type = other DNA
gtgggagcacaacctcgaca

SEQ ID NO: 13192 - DNA, 20 bp, synthetic construct
  source 1..20: mol_type = other DNA
cctacattaggccagacagt

SEQ ID NO: 13193 - DNA, 20 bp, synthetic construct
  source 1..20: mol_type = other DNA
atcataatcagggccaccag

SEQ ID NO: 13194 - DNA, 20 bp, synthetic construct
  source 1..20: mol_type = other DNA
ccgaaatggatagccctgca

SEQ ID NO: 13195 - DNA, 20 bp, synthetic construct
  source 1..20: mol_type = other DNA
tcgagtaaaggccgcctgac

SEQ ID NO: 13196 - DNA, 20 bp, synthetic construct
  source 1..20: mol_type = other DNA
gttaccctgtacaactcttg

SEQ ID NO: 13197 - DNA, 20 bp, synthetic construct
  source 1..20: mol_type = other DNA
gagtcgtaaaccgccgacat

SEQ ID NO: 13198 - DNA, 20 bp, synthetic construct
  source 1..20: mol_type = other DNA
ggaaagtcaccggctttggg

SEQ ID NO: 13199 - DNA, 20 bp, synthetic construct
  source 1..20: mol_type = other DNA
gtagcaaacgcgtgtgtgaa

SEQ ID NO: 13200 - DNA, 20 bp, synthetic construct
  source 1..20: mol_type = other DNA
ggttcaatacacaaaccggt

SEQ ID NO: 13201 - DNA, 20 bp, synthetic construct
  source 1..20: mol_type = other DNA
cctttcctgtggacacggga

SEQ ID NO: 13202 - DNA, 20 bp, synthetic construct
  source 1..20: mol_type = other DNA
tacggaacgcgcctcctggt

SEQ ID NO: 13203 - DNA, 20 bp, synthetic construct
  source 1..20: mol_type = other DNA
catagtattctgcgatagct

SEQ ID NO: 13204 - DNA, 20 bp, synthetic construct
  source 1..20: mol_type = other DNA
gcctgaaagccctaggccaa

SEQ ID NO: 13205 - DNA, 20 bp, synthetic construct
  source 1..20: mol_type = other DNA
aggcacttctgctctcgcag

SEQ ID NO: 13206 - DNA, 20 bp, synthetic construct
  source 1..20: mol_type = other DNA
cttaccattaacgcgtttaa

SEQ ID NO: 13207 - DNA, 20 bp, synthetic construct
  source 1..20: mol_type = other DNA
accgggcatgacgggcaaga

SEQ ID NO: 13208 - DNA, 20 bp, synthetic construct
  source 1..20: mol_type = other DNA
taaccctagtgagtagacat

SEQ ID NO: 13209 - DNA, 20 bp, synthetic construct
  source 1..20: mol_type = other DNA
aagctcatcggaattgcatt

SEQ ID NO: 13210 - DNA, 20 bp, synthetic construct
  source 1..20: mol_type = other DNA
gaatatctttgagctttgct

SEQ ID NO: 13211 - DNA, 20 bp, synthetic construct
  source 1..20: mol_type = other DNA
tagatacttgcataagcgtc

SEQ ID NO: 13212 - DNA, 20 bp, synthetic construct
  source 1..20: mol_type = other DNA
cccgcgtgagtatccatctc

SEQ ID NO: 13213 - DNA, 20 bp, synthetic construct
  source 1..20: mol_type = other DNA
cgaccgcccactccctacaa

SEQ ID NO: 13214 - DNA, 20 bp, synthetic construct
  source 1..20: mol_type = other DNA
tccaagtgatttaagcagcc

SEQ ID NO: 13215 - DNA, 20 bp, synthetic construct
  source 1..20: mol_type = other DNA
ctcgtggagccgtagtcttg

SEQ ID NO: 13216 - DNA, 20 bp, synthetic construct
  source 1..20: mol_type = other DNA
aggagtgggattagaaaggc

SEQ ID NO: 13217 - DNA, 20 bp, synthetic construct
  source 1..20: mol_type = other DNA
aaacgctcctgatctatcgc

SEQ ID NO: 13218 - DNA, 20 bp, synthetic construct
  source 1..20: mol_type = other DNA
ggacagatgtgtctgcatcg

SEQ ID NO: 13219 - DNA, 20 bp, synthetic construct
  source 1..20: mol_type = other DNA
gcggaagaagaacgtttaat

SEQ ID NO: 13220 - DNA, 20 bp, synthetic construct
  source 1..20: mol_type = other DNA
ctgaatattgggcctaaccg

SEQ ID NO: 13221 - DNA, 20 bp, synthetic construct
  source 1..20: mol_type = other DNA
gtcctgcttcattgccgaat

SEQ ID NO: 13222 - DNA, 20 bp, synthetic construct
  source 1..20: mol_type = other DNA
tgtaaccggatacagggagg

SEQ ID NO: 13223 - DNA, 20 bp, synthetic construct
  source 1..20: mol_type = other DNA
ctccactacctggccgcctg

SEQ ID NO: 13224 - DNA, 20 bp, synthetic construct
  source 1..20: mol_type = other DNA
aacaatggtgcttcacccat

SEQ ID NO: 13225 - DNA, 20 bp, synthetic construct
  source 1..20: mol_type = other DNA
cggaccaaagtcatcgggag

SEQ ID NO: 13226 - DNA, 20 bp, synthetic construct
  source 1..20: mol_type = other DNA
aaccgcatcgccatgatgga

SEQ ID NO: 13227 - DNA, 20 bp, synthetic construct
  source 1..20: mol_type = other DNA
atgacttacgtgattcactc

SEQ ID NO: 13228 - DNA, 20 bp, synthetic construct
  source 1..20: mol_type = other DNA
aatcgtcaccgcaatggtga

SEQ ID NO: 13229 - DNA, 20 bp, synthetic construct
  source 1..20: mol_type = other DNA
tgtatgcgggtgctatagac

SEQ ID NO: 13230 - DNA, 20 bp, synthetic construct
  source 1..20: mol_type = other DNA
ataatgccaccgtagactca

SEQ ID NO: 13231 - DNA, 20 bp, synthetic construct
  source 1..20: mol_type = other DNA
gagctctttctgcgagaagc

SEQ ID NO: 13232 - DNA, 20 bp, synthetic construct
  source 1..20: mol_type = other DNA
ttacacagaaggccctcagc

SEQ ID NO: 13233 - DNA, 20 bp, synthetic construct
  source 1..20: mol_type = other DNA
cctgattgcgggtttgaaga

SEQ ID NO: 13234 - DNA, 20 bp, synthetic construct
  source 1..20: mol_type = other DNA
atgtggatcgaatgcgtcat

SEQ ID NO: 13235 - DNA, 20 bp, synthetic construct
  source 1..20: mol_type = other DNA
cgggtatgcatctatagcaa

SEQ ID NO: 13236 - DNA, 20 bp, synthetic construct
  source 1..20: mol_type = other DNA
tatcatcccattgtagtgat

SEQ ID NO: 13237 - DNA, 20 bp, synthetic construct
  source 1..20: mol_type = other DNA
agatgtgattcctcttgatc

SEQ ID NO: 13238 - DNA, 20 bp, synthetic construct
  source 1..20: mol_type = other DNA
gtcctcagcataagcaacgc

SEQ ID NO: 13239 - DNA, 20 bp, synthetic construct
  source 1..20: mol_type = other DNA
ccttatgcgctcaaattgaa

SEQ ID NO: 13240 - DNA, 20 bp, synthetic construct
  source 1..20: mol_type = other DNA
cattgtatttgtatctgagc

SEQ ID NO: 13241 - DNA, 20 bp, synthetic construct
  source 1..20: mol_type = other DNA
tgtcgatgggatagtgcaca

SEQ ID NO: 13242 - DNA, 20 bp, synthetic construct
  source 1..20: mol_type = other DNA
tgctaccgcttacaattcac

SEQ ID NO: 13243 - DNA, 20 bp, synthetic construct
  source 1..20: mol_type = other DNA
tgctaccagtcatgtactat

SEQ ID NO: 13244 - DNA, 20 bp, synthetic construct
  source 1..20: mol_type = other DNA
cgaagcagccgtaggaccac

SEQ ID NO: 13245 - DNA, 20 bp, synthetic construct
  source 1..20: mol_type = other DNA
gttacaaacgtgcggtcttg

SEQ ID NO: 13246 - DNA, 20 bp, synthetic construct
  source 1..20: mol_type = other DNA
cgctcacttatgtcaaacac

SEQ ID NO: 13247 - DNA, 20 bp, synthetic construct
  source 1..20: mol_type = other DNA
cttggctgttatcagttctt

SEQ ID NO: 13248 - DNA, 20 bp, synthetic construct
  source 1..20: mol_type = other DNA
catccagggaatggtgtagt

SEQ ID NO: 13249 - DNA, 20 bp, synthetic construct
  source 1..20: mol_type = other DNA
agattcattatgacggacat

SEQ ID NO: 13250 - DNA, 20 bp, synthetic construct
  source 1..20: mol_type = other DNA
ttagtatgcgcctagtttgg

SEQ ID NO: 13251 - DNA, 20 bp, synthetic construct
  source 1..20: mol_type = other DNA
gttgatgaacctgataccca

SEQ ID NO: 13252 - DNA, 20 bp, synthetic construct
  source 1..20: mol_type = other DNA
cgggcggactgataggcaaa

SEQ ID NO: 13253 - DNA, 20 bp, synthetic construct
  source 1..20: mol_type = other DNA
aattgtcccggttctgcctc

SEQ ID NO: 13254 - DNA, 20 bp, synthetic construct
  source 1..20: mol_type = other DNA
gatccgcttattccagatag

SEQ ID NO: 13255 - DNA, 20 bp, synthetic construct
  source 1..20: mol_type = other DNA
ctcgtgttcgacatgaatgt

SEQ ID NO: 13256 - DNA, 20 bp, synthetic construct
  source 1..20: mol_type = other DNA
gcagcagttcgagataggtg

SEQ ID NO: 13257 - DNA, 20 bp, synthetic construct
  source 1..20: mol_type = other DNA
tgacagcatagggcgggtcg

SEQ ID NO: 13258 - DNA, 20 bp, synthetic construct
  source 1..20: mol_type = other DNA
aatcgtggtatgcaccgatg

SEQ ID NO: 13259 - DNA, 20 bp, synthetic construct
  source 1..20: mol_type = other DNA
taggaaatcagtaccagcgg

SEQ ID NO: 13260 - DNA, 20 bp, synthetic construct
  source 1..20: mol_type = other DNA
aacatgttgcatgccttcag

SEQ ID NO: 13261 - DNA, 20 bp, synthetic construct
  source 1..20: mol_type = other DNA
attactcagtgagttgctgc

SEQ ID NO: 13262 - DNA, 20 bp, synthetic construct
  source 1..20: mol_type = other DNA
aaagtggaaatgcacgtatg

SEQ ID NO: 13263 - DNA, 20 bp, synthetic construct
  source 1..20: mol_type = other DNA
tcacttactatcaaactcca

SEQ ID NO: 13264 - DNA, 20 bp, synthetic construct
  source 1..20: mol_type = other DNA
tagtcgcatcaggcacgttt

SEQ ID NO: 13265 - DNA, 20 bp, synthetic construct
  source 1..20: mol_type = other DNA
aactcgaacaactgtaccaa

SEQ ID NO: 13266 - DNA, 20 bp, synthetic construct
  source 1..20: mol_type = other DNA
agttgaagccaggtttcgcc

SEQ ID NO: 13267 - DNA, 20 bp, synthetic construct
  source 1..20: mol_type = other DNA
aaaccggctttaagatccat

SEQ ID NO: 13268 - DNA, 20 bp, synthetic construct
  source 1..20: mol_type = other DNA
agtcatgagacgtccgctag

SEQ ID NO: 13269 - DNA, 20 bp, synthetic construct
  source 1..20: mol_type = other DNA
aagatagtaagctctcgggt

SEQ ID NO: 13270 - DNA, 20 bp, synthetic construct
  source 1..20: mol_type = other DNA
gagcgcgattgaaccaactg

SEQ ID NO: 13271 - DNA, 20 bp, synthetic construct
  source 1..20: mol_type = other DNA
tgctggtggatggttgcggt

SEQ ID NO: 13272 - DNA, 20 bp, synthetic construct
  source 1..20: mol_type = other DNA
cggcggtcggaagcaatcac

SEQ ID NO: 13273 - DNA, 20 bp, synthetic construct
  source 1..20: mol_type = other DNA
tcgtgtcctcttcccatggc

SEQ ID NO: 13274 - DNA, 20 bp, synthetic construct
  source 1..20: mol_type = other DNA
ctgactagttgcgaacaagt

SEQ ID NO: 13275 - DNA, 20 bp, synthetic construct
  source 1..20: mol_type = other DNA
cggagtgacgcgagcttcag

SEQ ID NO: 13276 - DNA, 20 bp, synthetic construct
  source 1..20: mol_type = other DNA
tggctaatcagtttgttctt

SEQ ID NO: 13277 - DNA, 20 bp, synthetic construct
  source 1..20: mol_type = other DNA
tagaagctgaaggtacacca

SEQ ID NO: 13278 - DNA, 20 bp, synthetic construct
  source 1..20: mol_type = other DNA
ggcgatgtcttggacgtacg

SEQ ID NO: 13279 - DNA, 20 bp, synthetic construct
  source 1..20: mol_type = other DNA
ccgtaactcgacaactctga

SEQ ID NO: 13280 - DNA, 20 bp, synthetic construct
  source 1..20: mol_type = other DNA
tatactttcagatgagctgc

SEQ ID NO: 13281 - DNA, 20 bp, synthetic construct
  source 1..20: mol_type = other DNA
gaggcttgccatgacatgag

SEQ ID NO: 13282 - DNA, 20 bp, synthetic construct
  source 1..20: mol_type = other DNA
ggtggaggatattcttgata

SEQ ID NO: 13283 - DNA, 20 bp, synthetic construct
  source 1..20: mol_type = other DNA
gaggatccggacgctgagaa

SEQ ID NO: 13284 - DNA, 20 bp, synthetic construct
  source 1..20: mol_type = other DNA
ttgcgacaatccctatacgg

SEQ ID NO: 13285 - DNA, 20 bp, synthetic construct
  source 1..20: mol_type = other DNA
atgcgctggtggcagaatag

SEQ ID NO: 13286 - DNA, 20 bp, synthetic construct
  source 1..20: mol_type = other DNA
atgagccatgcagctaagtc

SEQ ID NO: 13287 - DNA, 20 bp, synthetic construct
  source 1..20: mol_type = other DNA
tttggacgccaaataagggt

SEQ ID NO: 13288 - DNA, 20 bp, synthetic construct
  source 1..20: mol_type = other DNA
gattgcggacagggattata

SEQ ID NO: 13289 - DNA, 20 bp, synthetic construct
  source 1..20: mol_type = other DNA
tgaaggcagcgatgttcgag

SEQ ID NO: 13290 - DNA, 20 bp, synthetic construct
  source 1..20: mol_type = other DNA
tgtaactccttattcttgct

SEQ ID NO: 13291 - DNA, 20 bp, synthetic construct
  source 1..20: mol_type = other DNA
gttgaacaagcgtccaattt

SEQ ID NO: 13292 - DNA, 20 bp, synthetic construct
  source 1..20: mol_type = other DNA
atgaagtcgctgcggaacga

SEQ ID NO: 13293 - DNA, 20 bp, synthetic construct
  source 1..20: mol_type = other DNA
cactcacaaaggcttaagac

SEQ ID NO: 13294 - DNA, 20 bp, synthetic construct
  source 1..20: mol_type = other DNA
gatgatcggttgcagataat

SEQ ID NO: 13295 - DNA, 20 bp, synthetic construct
  source 1..20: mol_type = other DNA
aggaaacgccatgttgggaa

SEQ ID NO: 13296 - DNA, 20 bp, synthetic construct
  source 1..20: mol_type = other DNA
cggttggcaagagatacggt

SEQ ID NO: 13297 - DNA, 20 bp, synthetic construct
  source 1..20: mol_type = other DNA
tcactcgctcagcggaacga

SEQ ID NO: 13298 - DNA, 20 bp, synthetic construct
  source 1..20: mol_type = other DNA
gttcgtatcgaacttcttgg

SEQ ID NO: 13299 - DNA, 20 bp, synthetic construct
  source 1..20: mol_type = other DNA
ttgtcgtcagttccacgcag

SEQ ID NO: 13300 - DNA, 20 bp, synthetic construct
  source 1..20: mol_type = other DNA
gaacagaaggtacgcgatta

SEQ ID NO: 13301 - DNA, 20 bp, synthetic construct
  source 1..20: mol_type = other DNA
cttgcatgtacacatcctga

SEQ ID NO: 13302 - DNA, 20 bp, synthetic construct
  source 1..20: mol_type = other DNA
atttgtccttaagcaggact

SEQ ID NO: 13303 - DNA, 20 bp, synthetic construct
  source 1..20: mol_type = other DNA
tcgtaatgtagttaagtacc

SEQ ID NO: 13304 - DNA, 20 bp, synthetic construct
  source 1..20: mol_type = other DNA
aacggatcgatggcagaggg

SEQ ID NO: 13305 - DNA, 20 bp, synthetic construct
  source 1..20: mol_type = other DNA
gcagattgtatcctttgacg

SEQ ID NO: 13306 - DNA, 20 bp, synthetic construct
  source 1..20: mol_type = other DNA
tatgtccagcctcagcactt

SEQ ID NO: 13307 - DNA, 20 bp, synthetic construct
  source 1..20: mol_type = other DNA
gcgtatggccactctacagg

SEQ ID NO: 13308 - DNA, 20 bp, synthetic construct
  source 1..20: mol_type = other DNA
catagacagagatggtactc

SEQ ID NO: 13309 - DNA, 20 bp, synthetic construct
  source 1..20: mol_type = other DNA
acgttagtatacaatcctcc

SEQ ID NO: 13310 - DNA, 20 bp, synthetic construct
  source 1..20: mol_type = other DNA
cttcgcattcgatcaacact

SEQ ID NO: 13311 - DNA, 20 bp, synthetic construct
  source 1..20: mol_type = other DNA
cagtccgcacaattgttgat

SEQ ID NO: 13312 - DNA, 20 bp, synthetic construct
  source 1..20: mol_type = other DNA
atccgcgtccaataaatgcg

SEQ ID NO: 13313 - DNA, 20 bp, synthetic construct
  source 1..20: mol_type = other DNA
ctatcacgcgcccggttggt

SEQ ID NO: 13314 - DNA, 20 bp, synthetic construct
  source 1..20: mol_type = other DNA
tgcattcccgagtatgatcc

SEQ ID NO: 13315 - DNA, 20 bp, synthetic construct
  source 1..20: mol_type = other DNA
gaaccaccctgtctggcaag

SEQ ID NO: 13316 - DNA, 20 bp, synthetic construct
  source 1..20: mol_type = other DNA
tgtcgagttacaattgtcaa

SEQ ID NO: 13317 - DNA, 20 bp, synthetic construct
  source 1..20: mol_type = other DNA
gtatactaccgtagtggaag

SEQ ID NO: 13318 - DNA, 20 bp, synthetic construct
  source 1..20: mol_type = other DNA
tcgaacgattcctgccacgt

SEQ ID NO: 13319 - DNA, 20 bp, synthetic construct
  source 1..20: mol_type = other DNA
caaactcccaacctcaacgg

SEQ ID NO: 13320 - DNA, 20 bp, synthetic construct
  source 1..20: mol_type = other DNA
taaaggcctttcatagcgga

SEQ ID NO: 13321 - DNA, 20 bp, synthetic construct
  source 1..20: mol_type = other DNA
gaggctgatggaataaattc

SEQ ID NO: 13322 - DNA, 20 bp, synthetic construct
  source 1..20: mol_type = other DNA
catcccactgtttccgcaat

SEQ ID NO: 13323 - DNA, 20 bp, synthetic construct
  source 1..20: mol_type = other DNA
cagtcatcacgatgtgcaaa

SEQ ID NO: 13324 - DNA, 20 bp, synthetic construct
  source 1..20: mol_type = other DNA
ttatgcgagcaacgtgggtc

SEQ ID NO: 13325 - DNA, 20 bp, synthetic construct
  source 1..20: mol_type = other DNA
ttcctcaccacgtatttatt

SEQ ID NO: 13326 - DNA, 20 bp, synthetic construct
  source 1..20: mol_type = other DNA
ggaataattaccaagggcgg

SEQ ID NO: 13327 - DNA, 20 bp, synthetic construct
  source 1..20: mol_type = other DNA
tccctaggtgggcaatgggc

SEQ ID NO: 13328 - DNA, 20 bp, synthetic construct
  source 1..20: mol_type = other DNA
caagcctgtaaatggcatgc

SEQ ID NO: 13329 - DNA, 20 bp, synthetic construct
  source 1..20: mol_type = other DNA
caagtgactacatcaaacat

SEQ ID NO: 13330 - DNA, 20 bp, synthetic construct
  source 1..20: mol_type = other DNA
ggaagtgtagcgtccaaacc

SEQ ID NO: 13331 - DNA, 20 bp, synthetic construct
  source 1..20: mol_type = other DNA
tggcttgatttcgctagccc

SEQ ID NO: 13332 - DNA, 20 bp, synthetic construct
  source 1..20: mol_type = other DNA
ccagatatttcttaattggg

SEQ ID NO: 13333 - DNA, 20 bp, synthetic construct
  source 1..20: mol_type = other DNA
aacttgccaccataccaggg

SEQ ID NO: 13334 - DNA, 20 bp, synthetic construct
  source 1..20: mol_type = other DNA
gcctaatgtaacatcccgag

SEQ ID NO: 13335 - DNA, 20 bp, synthetic construct
  source 1..20: mol_type = other DNA
ggatctgggttgcgctgtcc

SEQ ID NO: 13336 - DNA, 20 bp, synthetic construct
  source 1..20: mol_type = other DNA
gcactgtaatactcagcggc

SEQ ID NO: 13337 - DNA, 20 bp, synthetic construct
  source 1..20: mol_type = other DNA
cactttcggagggaccgaga

SEQ ID NO: 13338 - DNA, 20 bp, synthetic construct
  source 1..20: mol_type = other DNA
gcgcttggatttaaggtcca

SEQ ID NO: 13339 - DNA, 20 bp, synthetic construct
  source 1..20: mol_type = other DNA
gtgctccgcagagatacatt

SEQ ID NO: 13340 - DNA, 20 bp, synthetic construct
  source 1..20: mol_type = other DNA
agatatgcgaacatgacgct

SEQ ID NO: 13341 - DNA, 20 bp, synthetic construct
  source 1..20: mol_type = other DNA
cagttacttaggtctgattg

SEQ ID NO: 13342 - DNA, 20 bp, synthetic construct
  source 1..20: mol_type = other DNA
cgccatagtctctatcaatc

SEQ ID NO: 13343 - DNA, 20 bp, synthetic construct
  source 1..20: mol_type = other DNA
cttccactttatcaagaaac

SEQ ID NO: 13344 - DNA, 20 bp, synthetic construct
  source 1..20: mol_type = other DNA
tgacggttgctaatctgcct

SEQ ID NO: 13345 - DNA, 20 bp, synthetic construct
  source 1..20: mol_type = other DNA
gcctcgcccacgtaggtctc

SEQ ID NO: 13346 - DNA, 20 bp, synthetic construct
  source 1..20: mol_type = other DNA
atagtctgtctgtaataaac

SEQ ID NO: 13347 - DNA, 20 bp, synthetic construct
  source 1..20: mol_type = other DNA
aagcacccggtcgtcaccct

SEQ ID NO: 13348 - DNA, 20 bp, synthetic construct
  source 1..20: mol_type = other DNA
tggccgatcagctttccgcc

SEQ ID NO: 13349 - DNA, 20 bp, synthetic construct
  source 1..20: mol_type = other DNA
gatctgtccacccatcacgt

SEQ ID NO: 13350 - DNA, 20 bp, synthetic construct
  source 1..20: mol_type = other DNA
gcgcttaggtctgtctactc

SEQ ID NO: 13351 - DNA, 20 bp, synthetic construct
  source 1..20: mol_type = other DNA
tgtgaaccaggaatgagtgt

SEQ ID NO: 13352 - DNA, 20 bp, synthetic construct
  source 1..20: mol_type = other DNA
gatcgtgtgcgaatttacta

SEQ ID NO: 13353 - DNA, 20 bp, synthetic construct
  source 1..20: mol_type = other DNA
ccatgaaatatctgcatccg

SEQ ID NO: 13354 - DNA, 20 bp, synthetic construct
  source 1..20: mol_type = other DNA
aggtgcgctgtgataacgcg

SEQ ID NO: 13355 - DNA, 20 bp, synthetic construct
  source 1..20: mol_type = other DNA
tttaatatgcgccacaggta

SEQ ID NO: 13356 - DNA, 20 bp, synthetic construct
  source 1..20: mol_type = other DNA
aatgggttcgctggcgcaag

SEQ ID NO: 13357 - DNA, 20 bp, synthetic construct
  source 1..20: mol_type = other DNA
ctccgccgaagcaattcgtc

SEQ ID NO: 13358 - DNA, 20 bp, synthetic construct
  source 1..20: mol_type = other DNA
gtcaggcagtcgataccagg

SEQ ID NO: 13359 - DNA, 20 bp, synthetic construct
  source 1..20: mol_type = other DNA
attcgggcgtaggagaaggg

SEQ ID NO: 13360 - DNA, 20 bp, synthetic construct
  source 1..20: mol_type = other DNA
ctgctacggaccggtaatcg

SEQ ID NO: 13361 - DNA, 20 bp, synthetic construct
  source 1..20: mol_type = other DNA
gtaagccacaatcttcggga

SEQ ID NO: 13362 - DNA, 20 bp, synthetic construct
  source 1..20: mol_type = other DNA
tatatagctacagtctgtac

SEQ ID NO: 13363 - DNA, 20 bp, synthetic construct
  source 1..20: mol_type = other DNA
gcaagatggaatcctcaatt

SEQ ID NO: 13364 - DNA, 20 bp, synthetic construct
  source 1..20: mol_type = other DNA
accgcgcgactccactgcat

SEQ ID NO: 13365 - DNA, 20 bp, synthetic construct
  source 1..20: mol_type = other DNA
gttaccaggccgttcgatta

SEQ ID NO: 13366 - DNA, 20 bp, synthetic construct
  source 1..20: mol_type = other DNA
ccttgtcactaaaggaaagc

SEQ ID NO: 13367 - DNA, 20 bp, synthetic construct
  source 1..20: mol_type = other DNA
catgtgaactgcgacccagg

SEQ ID NO: 13368 - DNA, 20 bp, synthetic construct
  source 1..20: mol_type = other DNA
atacaccaagcgtatgtccg

SEQ ID NO: 13369 - DNA, 20 bp, synthetic construct
  source 1..20: mol_type = other DNA
tttgccaatgagcaacaata

SEQ ID NO: 13370 - DNA, 20 bp, synthetic construct
  source 1..20: mol_type = other DNA
gtatcaccttatatctgctc

SEQ ID NO: 13371 - DNA, 20 bp, synthetic construct
  source 1..20: mol_type = other DNA
tccgtgcaccgcgaactgtt

SEQ ID NO: 13372 - DNA, 20 bp, synthetic construct
  source 1..20: mol_type = other DNA
gttccagaaaggctggccac

SEQ ID NO: 13373 - DNA, 20 bp, synthetic construct
  source 1..20: mol_type = other DNA
ttgcctacgtacacgatgtg

SEQ ID NO: 13374 - DNA, 20 bp, synthetic construct
  source 1..20: mol_type = other DNA
cccagacggcgttggcatgt

SEQ ID NO: 13375 - DNA, 20 bp, synthetic construct
  source 1..20: mol_type = other DNA
ccagcggttaccggttgaga

SEQ ID NO: 13376 - DNA, 20 bp, synthetic construct
  source 1..20: mol_type = other DNA
tacaccgctgtaagccacct

SEQ ID NO: 13377 - DNA, 20 bp, synthetic construct
  source 1..20: mol_type = other DNA
caccatcgctgcagtgtcgt

SEQ ID NO: 13378 - DNA, 20 bp, synthetic construct
  source 1..20: mol_type = other DNA
atagtacgtaccgaccattc

SEQ ID NO: 13379 - DNA, 20 bp, synthetic construct
  source 1..20: mol_type = other DNA
agacttcgcttgatggtttc

SEQ ID NO: 13380 - DNA, 20 bp, synthetic construct
  source 1..20: mol_type = other DNA
tggatcgaggctgtcacaac

SEQ ID NO: 13381 - DNA, 20 bp, synthetic construct
  source 1..20: mol_type = other DNA
aacaacagcccaacttggtc

SEQ ID NO: 13382 - DNA, 20 bp, synthetic construct
  source 1..20: mol_type = other DNA
ctaggcttctcatggttggc

SEQ ID NO: 13383 - DNA, 20 bp, synthetic construct
  source 1..20: mol_type = other DNA
tctgagacaatctgggtcgc

SEQ ID NO: 13384 - DNA, 20 bp, synthetic construct
  source 1..20: mol_type = other DNA
ggtctttgcgacatcccatg

SEQ ID NO: 13385 - DNA, 20 bp, synthetic construct
  source 1..20: mol_type = other DNA
gtccctacttaaactcgaat

SEQ ID NO: 13386 - DNA, 20 bp, synthetic construct
  source 1..20: mol_type = other DNA
acagacttgagaagatgtgt

SEQ ID NO: 13387 - DNA, 20 bp, synthetic construct
  source 1..20: mol_type = other DNA
gtgacgatataacgtcccgt

SEQ ID NO: 13388 - DNA, 20 bp, synthetic construct
  source 1..20: mol_type = other DNA
ccgcgcctccacgtatttgg

SEQ ID NO: 13389 - DNA, 20 bp, synthetic construct
  source 1..20: mol_type = other DNA
aagttacgtcacagtagctg

SEQ ID NO: 13390 - DNA, 20 bp, synthetic construct
  source 1..20: mol_type = other DNA
caggaatcgatgtctgtatg

SEQ ID NO: 13391 - DNA, 20 bp, synthetic construct
  source 1..20: mol_type = other DNA
gcatgtcaccagattcttcc

SEQ ID NO: 13392 - DNA, 20 bp, synthetic construct
  source 1..20: mol_type = other DNA
ggtcgctccgtacgtttgca

SEQ ID NO: 13393 - DNA, 20 bp, synthetic construct
  source 1..20: mol_type = other DNA
agaatgctaccaattgcaag

SEQ ID NO: 13394 - DNA, 20 bp, synthetic construct
  source 1..20: mol_type = other DNA
agtcccttcccgtgttgtga

SEQ ID NO: 13395 - DNA, 20 bp, synthetic construct
  source 1..20: mol_type = other DNA
ctacgttagctattcactga

SEQ ID NO: 13396 - DNA, 20 bp, synthetic construct
  source 1..20: mol_type = other DNA
aaattcacctcgctctgtgg

SEQ ID NO: 13397 - DNA, 20 bp, synthetic construct
  source 1..20: mol_type = other DNA
tggacaattgctggatgttg

SEQ ID NO: 13398 - DNA, 20 bp, synthetic construct
  source 1..20: mol_type = other DNA
agcctgggttctggtaaaga

SEQ ID NO: 13399 - DNA, 20 bp, synthetic construct
  source 1..20: mol_type = other DNA
gcgcagaaagacccgttaat

SEQ ID NO: 13400 - DNA, 20 bp, synthetic construct
  source 1..20: mol_type = other DNA
gatgagtgaatggcgtagta

SEQ ID NO: 13401 - DNA, 20 bp, synthetic construct
  source 1..20: mol_type = other DNA
acctcgacccttgcatcggt

SEQ ID NO: 13402 - DNA, 20 bp, synthetic construct
  source 1..20: mol_type = other DNA
accggccttcgagacattcg

SEQ ID NO: 13403 - DNA, 20 bp, synthetic construct
  source 1..20: mol_type = other DNA
attataccgtcctccgtgct

SEQ ID NO: 13404 - DNA, 20 bp, synthetic construct
  source 1..20: mol_type = other DNA
tatgtcgtacgtcatggtgt

SEQ ID NO: 13405 - DNA, 20 bp, synthetic construct
  source 1..20: mol_type = other DNA
ctcctcataagggatctgca

SEQ ID NO: 13406 - DNA, 20 bp, synthetic construct
  source 1..20: mol_type = other DNA
aagctgctctgtctaacggc

SEQ ID NO: 13407 - DNA, 20 bp, synthetic construct
  source 1..20: mol_type = other DNA
tacgttgaactatcggactt

SEQ ID NO: 13408 - DNA, 20 bp, synthetic construct
  source 1..20: mol_type = other DNA
cctgatccgaacttgcaacg

SEQ ID NO: 13409 - DNA, 20 bp, synthetic construct
  source 1..20: mol_type = other DNA
ggcagactcgacgaatcaca

SEQ ID NO: 13410 - DNA, 20 bp, synthetic construct
  source 1..20: mol_type = other DNA
catgaggatttccgggcttg

SEQ ID NO: 13411 - DNA, 20 bp, synthetic construct
  source 1..20: mol_type = other DNA
gcctcgctacagatacctag

SEQ ID NO: 13412 - DNA, 20 bp, synthetic construct
  source 1..20: mol_type = other DNA
ctgggacgtccctctctggt

SEQ ID NO: 13413 - DNA, 20 bp, synthetic construct
  source 1..20: mol_type = other DNA
ctaaacggatcgctccgatc

SEQ ID NO: 13414 - DNA, 20 bp, synthetic construct
  source 1..20: mol_type = other DNA
tgatgcgaactgttgtataa

SEQ ID NO: 13415 - DNA, 20 bp, synthetic construct
  source 1..20: mol_type = other DNA
ctcctgctatcagccaccaa

SEQ ID NO: 13416 - DNA, 20 bp, synthetic construct
  source 1..20: mol_type = other DNA
cttgagtgtcacctttagtg

SEQ ID NO: 13417 - DNA, 20 bp, synthetic construct
  source 1..20: mol_type = other DNA
aaggccgggcaaagcggcat

SEQ ID NO: 13418 - DNA, 20 bp, synthetic construct
  source 1..20: mol_type = other DNA
aacacacatgctggacatga

SEQ ID NO: 13419 - DNA, 20 bp, synthetic construct
  source 1..20: mol_type = other DNA
acaatcaccttagcaatcga

SEQ ID NO: 13420 - DNA, 20 bp, synthetic construct
  source 1..20: mol_type = other DNA
tcgatgatcgtcacacgcac

SEQ ID NO: 13421 - DNA, 20 bp, synthetic construct
  source 1..20: mol_type = other DNA
ccctctaatactatccgtca

SEQ ID NO: 13422 - DNA, 20 bp, synthetic construct
  source 1..20: mol_type = other DNA
taaccggagtgcatgcggag

SEQ ID NO: 13423 - DNA, 20 bp, synthetic construct
  source 1..20: mol_type = other DNA
acaggcccacctcaaccata

SEQ ID NO: 13424 - DNA, 20 bp, synthetic construct
  source 1..20: mol_type = other DNA
aatagccggttggaatccag

SEQ ID NO: 13425 - DNA, 20 bp, synthetic construct
  source 1..20: mol_type = other DNA
acgttagcgccatcatccgt

SEQ ID NO: 13426 - DNA, 20 bp, synthetic construct
  source 1..20: mol_type = other DNA
acgcatatttagtgtcgcct

SEQ ID NO: 13427 - DNA, 20 bp, synthetic construct
  source 1..20: mol_type = other DNA
agagggtgcggaacttccag

SEQ ID NO: 13428 - DNA, 20 bp, synthetic construct
  source 1..20: mol_type = other DNA
tggcggtaccgttatatact

SEQ ID NO: 13429 - DNA, 20 bp, synthetic construct
  source 1..20: mol_type = other DNA
aaacacgccgcctggcaagg

SEQ ID NO: 13430 - DNA, 20 bp, synthetic construct
  source 1..20: mol_type = other DNA
aaccgggcaacatgttgcga

SEQ ID NO: 13431 - DNA, 20 bp, synthetic construct
  source 1..20: mol_type = other DNA
atgcggagctcgccttgttc

SEQ ID NO: 13432 - DNA, 20 bp, synthetic construct
  source 1..20: mol_type = other DNA
agcaccctcttaatagttgg

SEQ ID NO: 13433 - DNA, 20 bp, synthetic construct
  source 1..20: mol_type = other DNA
gcaaacaagattgaagggat

SEQ ID NO: 13434 - DNA, 20 bp, synthetic construct
  source 1..20: mol_type = other DNA
ctgcctggaccgtactcgac

SEQ ID NO: 13435 - DNA, 20 bp, synthetic construct
  source 1..20: mol_type = other DNA
agtttacccgtcaatcctaa

SEQ ID NO: 13436 - DNA, 20 bp, synthetic construct
  source 1..20: mol_type = other DNA
aatcggacagtgtggactgc

SEQ ID NO: 13437 - DNA, 20 bp, synthetic construct
  source 1..20: mol_type = other DNA
ccggccaggtgtaaaggcat

SEQ ID NO: 13438 - DNA, 20 bp, synthetic construct
  source 1..20: mol_type = other DNA
cgcagtccgtgtgttattat

SEQ ID NO: 13439 - DNA, 20 bp, synthetic construct
  source 1..20: mol_type = other DNA
agttgacggatggatcgtaa

SEQ ID NO: 13440 - DNA, 20 bp, synthetic construct
  source 1..20: mol_type = other DNA
ccatggatcacaaagtgatt

SEQ ID NO: 13441 - DNA, 20 bp, synthetic construct
  source 1..20: mol_type = other DNA
aaatcaggaactcgatggca

SEQ ID NO: 13442 - DNA, 20 bp, synthetic construct
  source 1..20: mol_type = other DNA
gaatggtcacacgtctcaca

SEQ ID NO: 13443 - DNA, 20 bp, synthetic construct
  source 1..20: mol_type = other DNA
ggttcatacctccgaaactt

SEQ ID NO: 13444 - DNA, 20 bp, synthetic construct
  source 1..20: mol_type = other DNA
gtcccaccatttaacgcgtt

SEQ ID NO: 13445 - DNA, 20 bp, synthetic construct
  source 1..20: mol_type = other DNA
gttgtcctagtgctatcacc

SEQ ID NO: 13446 - DNA, 20 bp, synthetic construct
  source 1..20: mol_type = other DNA
gccgactgattctcctgtgc

SEQ ID NO: 13447 - DNA, 20 bp, synthetic construct
  source 1..20: mol_type = other DNA
taacaccgtgtggcgtgcgg

SEQ ID NO: 13448 - DNA, 20 bp, synthetic construct
  source 1..20: mol_type = other DNA
ctctagtctctctatatgcg

SEQ ID NO: 13449 - DNA, 20 bp, synthetic construct
  source 1..20: mol_type = other DNA
gacggaatgcctaaagcata

SEQ ID NO: 13450 - DNA, 20 bp, synthetic construct
  source 1..20: mol_type = other DNA
attgccgcgagtgcaattgg

SEQ ID NO: 13451 - DNA, 20 bp, synthetic construct
  source 1..20: mol_type = other DNA
ttgcgcctcgattatttacc

SEQ ID NO: 13452 - DNA, 20 bp, synthetic construct
  source 1..20: mol_type = other DNA
agtattaagtctcgtttctc

SEQ ID NO: 13453 - DNA, 20 bp, synthetic construct
  source 1..20: mol_type = other DNA
aagggtcgggacctagttag

SEQ ID NO: 13454 - DNA, 20 bp, synthetic construct
  source 1..20: mol_type = other DNA
aatccctcactaggcgcttc

SEQ ID NO: 13455 - DNA, 20 bp, synthetic construct
  source 1..20: mol_type = other DNA
cggtgttacattataaacgt

SEQ ID NO: 13456 - DNA, 20 bp, synthetic construct
  source 1..20: mol_type = other DNA
cctgtgcgacttacattcaa

SEQ ID NO: 13457 - DNA, 20 bp, synthetic construct
  source 1..20: mol_type = other DNA
tttaccggaggactaccacg

SEQ ID NO: 13458 - DNA, 20 bp, synthetic construct
  source 1..20: mol_type = other DNA
gctatgtcctcctaagagtc

SEQ ID NO: 13459 - DNA, 20 bp, synthetic construct
  source 1..20: mol_type = other DNA
aaccaactctgaatttccat

SEQ ID NO: 13460 - DNA, 20 bp, synthetic construct
  source 1..20: mol_type = other DNA
aacatgcgccagtggcatcc

SEQ ID NO: 13461 - DNA, 20 bp, synthetic construct
  source 1..20: mol_type = other DNA
taggcgcatgggtcgagaag

SEQ ID NO: 13462 - DNA, 20 bp, synthetic construct
  source 1..20: mol_type = other DNA
gatcgctgacacgatataga

SEQ ID NO: 13463 - DNA, 20 bp, synthetic construct
  source 1..20: mol_type = other DNA
ggaatacaattgcccgaatc

SEQ ID NO: 13464 - DNA, 20 bp, synthetic construct
  source 1..20: mol_type = other DNA
tgatagtattgacctgcgta

SEQ ID NO: 13465 - DNA, 20 bp, synthetic construct
  source 1..20: mol_type = other DNA
aactctctcaacgacctcct

SEQ ID NO: 13466 - DNA, 20 bp, synthetic construct
  source 1..20: mol_type = other DNA
tgttagcgtgaagcgcacta

SEQ ID NO: 13467 - DNA, 20 bp, synthetic construct
  source 1..20: mol_type = other DNA
cgattggtgaggctaacttt

SEQ ID NO: 13468 - DNA, 20 bp, synthetic construct
  source 1..20: mol_type = other DNA
gcctctccgtctaatccgtg

SEQ ID NO: 13469 - DNA, 20 bp, synthetic construct
  source 1..20: mol_type = other DNA
tccttgaatcgttgagcgat

SEQ ID NO: 13470 - DNA, 20 bp, synthetic construct
  source 1..20: mol_type = other DNA
cggtttggccagagttattc

SEQ ID NO: 13471 - DNA, 20 bp, synthetic construct
  source 1..20: mol_type = other DNA
tactgactcgctattgaact

SEQ ID NO: 13472 - DNA, 20 bp, synthetic construct
  source 1..20: mol_type = other DNA
ctcaaagacgctatatccga

SEQ ID NO: 13473 - DNA, 20 bp, synthetic construct
  source 1..20: mol_type = other DNA
ggagctgcgactacgcaagt

SEQ ID NO: 13474 - DNA, 20 bp, synthetic construct
  source 1..20: mol_type = other DNA
ccgtttgcggctgcgttcat

SEQ ID NO: 13475 - DNA, 20 bp, synthetic construct
  source 1..20: mol_type = other DNA
acagcccaatcaccgtcgca

SEQ ID NO: 13476 - DNA, 20 bp, synthetic construct
  source 1..20: mol_type = other DNA
gtccaccaaattattccagg

SEQ ID NO: 13477 - DNA, 20 bp, synthetic construct
  source 1..20: mol_type = other DNA
gagtagtctatggtagacga

SEQ ID NO: 13478 - DNA, 20 bp, synthetic construct
  source 1..20: mol_type = other DNA
gctaatggtacatgcttcct

SEQ ID NO: 13479 - DNA, 20 bp, synthetic construct
  source 1..20: mol_type = other DNA
ggccataataggactcccat

SEQ ID NO: 13480 - DNA, 20 bp, synthetic construct
  source 1..20: mol_type = other DNA
acccactggatccggtatat

SEQ ID NO: 13481 - DNA, 20 bp, synthetic construct
  source 1..20: mol_type = other DNA
tgctcttgggtcttaaacga

SEQ ID NO: 13482 - DNA, 20 bp, synthetic construct
  source 1..20: mol_type = other DNA
gtgcttgaactggtgtgtta

SEQ ID NO: 13483 - DNA, 20 bp, synthetic construct
  source 1..20: mol_type = other DNA
accaaccctcggaggaggga

SEQ ID NO: 13484 - DNA, 20 bp, synthetic construct
  source 1..20: mol_type = other DNA
ccttatcaggagaagtgtca

SEQ ID NO: 13485 - DNA, 20 bp, synthetic construct
  source 1..20: mol_type = other DNA
tggtcgggtggagggtacag

SEQ ID NO: 13486 - DNA, 20 bp, synthetic construct
  source 1..20: mol_type = other DNA
ggactatcgttatctgccct

SEQ ID NO: 13487 - DNA, 20 bp, synthetic construct
  source 1..20: mol_type = other DNA
tcatgagccaccaatcggat

SEQ ID NO: 13488 - DNA, 20 bp, synthetic construct
  source 1..20: mol_type = other DNA
ttacgaagcaaagaactacg

SEQ ID NO: 13489 - DNA, 20 bp, synthetic construct
  source 1..20: mol_type = other DNA
ctcaccgggtcaagcctact

SEQ ID NO: 13490 - DNA, 20 bp, synthetic construct
  source 1..20: mol_type = other DNA
ctcagcccaatggaagccta

SEQ ID NO: 13491 - DNA, 20 bp, synthetic construct
  source 1..20: mol_type = other DNA
gaattggtgtcgccacgaat

SEQ ID NO: 13492 - DNA, 20 bp, synthetic construct
  source 1..20: mol_type = other DNA
taggtttgcatgattaccac

SEQ ID NO: 13493 - DNA, 20 bp, synthetic construct
  source 1..20: mol_type = other DNA
tcagcaactgcgctggttac

SEQ ID NO: 13494 - DNA, 20 bp, synthetic construct
  source 1..20: mol_type = other DNA
ccaagctctacctgcttggt

SEQ ID NO: 13495 - DNA, 20 bp, synthetic construct
  source 1..20: mol_type = other DNA
atggcaactaaccgttcccg

SEQ ID NO: 13496 - DNA, 20 bp, synthetic construct
  source 1..20: mol_type = other DNA
gtgatatatagggtaaccaa

SEQ ID NO: 13497 - DNA, 20 bp, synthetic construct
  source 1..20: mol_type = other DNA
tctctctgcaccgggtagat

SEQ ID NO: 13498 - DNA, 20 bp, synthetic construct
  source 1..20: mol_type = other DNA
cagaactgtttccgggtagt

SEQ ID NO: 13499 - DNA, 20 bp, synthetic construct
  source 1..20: mol_type = other DNA
agttgcatggtcctcttggc

SEQ ID NO: 13500 - DNA, 20 bp, synthetic construct
  source 1..20: mol_type = other DNA
tttgtccctagaggcagtag

SEQ ID NO: 13501 - DNA, 20 bp, synthetic construct
  source 1..20: mol_type = other DNA
gatcactgtcatatcaagcc

SEQ ID NO: 13502 - DNA, 20 bp, synthetic construct
  source 1..20: mol_type = other DNA
gagagttgagatatttcctc

SEQ ID NO: 13503 - DNA, 20 bp, synthetic construct
  source 1..20: mol_type = other DNA
gaggaccatgaagctgagga

SEQ ID NO: 13504 - DNA, 20 bp, synthetic construct
  source 1..20: mol_type = other DNA
tacctggtgtggagcctgcc

SEQ ID NO: 13505 - DNA, 20 bp, synthetic construct
  source 1..20: mol_type = other DNA
cttgtctacgataggtgttc

SEQ ID NO: 13506 - DNA, 20 bp, synthetic construct
  source 1..20: mol_type = other DNA
ctttcaagtgggagcttgta

SEQ ID NO: 13507 - DNA, 20 bp, synthetic construct
  source 1..20: mol_type = other DNA
actatgagaacatgctctct

SEQ ID NO: 13508 - DNA, 20 bp, synthetic construct
  source 1..20: mol_type = other DNA
tttaacgtttagcatcgctg

SEQ ID NO: 13509 - DNA, 20 bp, synthetic construct
  source 1..20: mol_type = other DNA
ttcagagcacatacttcggt

SEQ ID NO: 13510 - DNA, 20 bp, synthetic construct
  source 1..20: mol_type = other DNA
gtcacataatgcaagtgcgc

SEQ ID NO: 13511 - DNA, 20 bp, synthetic construct
  source 1..20: mol_type = other DNA
ggcgacataaaccgtccacc

SEQ ID NO: 13512 - DNA, 20 bp, synthetic construct
  source 1..20: mol_type = other DNA
cttgtgagaggagctggcga

SEQ ID NO: 13513 - DNA, 20 bp, synthetic construct
  source 1..20: mol_type = other DNA
ctccgtgtctttctttgcta

SEQ ID NO: 13514 - DNA, 20 bp, synthetic construct
  source 1..20: mol_type = other DNA
cgatctcaacagatagttga

SEQ ID NO: 13515 - DNA, 20 bp, synthetic construct
  source 1..20: mol_type = other DNA
cctttgaataggcgattccc

SEQ ID NO: 13516 - DNA, 20 bp, synthetic construct
  source 1..20: mol_type = other DNA
caatttgcgcgcagtcagtc

SEQ ID NO: 13517 - DNA, 20 bp, synthetic construct
  source 1..20: mol_type = other DNA
gtaacagcgaggttcttaat

SEQ ID NO: 13518 - DNA, 20 bp, synthetic construct
  source 1..20: mol_type = other DNA
tgctacgttagtagcagcgc

SEQ ID NO: 13519 - DNA, 20 bp, synthetic construct
  source 1..20: mol_type = other DNA
gcgatccgttggagatttcc

SEQ ID NO: 13520 - DNA, 20 bp, synthetic construct
  source 1..20: mol_type = other DNA
tcaacaataagagtcttgct

SEQ ID NO: 13521 - DNA, 20 bp, synthetic construct
  source 1..20: mol_type = other DNA
ccctatcaactgaaagccaa

SEQ ID NO: 13522 - DNA, 20 bp, synthetic construct
  source 1..20: mol_type = other DNA
aacttggtatcggagatatt

SEQ ID NO: 13523 - DNA, 20 bp, synthetic construct
  source 1..20: mol_type = other DNA
gactagccctttataggtta

SEQ ID NO: 13524 - DNA, 20 bp, synthetic construct
  source 1..20: mol_type = other DNA
atattctaccggacccgctc

SEQ ID NO: 13525 - DNA, 20 bp, synthetic construct
  source 1..20: mol_type = other DNA
cggccttgaagcgttattca

SEQ ID NO: 13526 - DNA, 20 bp, synthetic construct
  source 1..20: mol_type = other DNA
tgggttcagctccttcctgt

SEQ ID NO: 13527 - DNA, 20 bp, synthetic construct
  source 1..20: mol_type = other DNA
agatcccagggatgcaccaa

SEQ ID NO: 13528 - DNA, 20 bp, synthetic construct
  source 1..20: mol_type = other DNA
acgagctcaagcgcagacga

SEQ ID NO: 13529 - DNA, 20 bp, synthetic construct
  source 1..20: mol_type = other DNA
tcattgtcctcacttgggct

SEQ ID NO: 13530 - DNA, 20 bp, synthetic construct
  source 1..20: mol_type = other DNA
tttattggcgcggtctccac

SEQ ID NO: 13531 - DNA, 20 bp, synthetic construct
  source 1..20: mol_type = other DNA
ggctgactgtacacaccaca

SEQ ID NO: 13532 - DNA, 20 bp, synthetic construct
  source 1..20: mol_type = other DNA
gaggcagtccgccgtagagt

SEQ ID NO: 13533 - DNA, 20 bp, synthetic construct
  source 1..20: mol_type = other DNA
tatcactggaacggaacggt

SEQ ID NO: 13534 - DNA, 20 bp, synthetic construct
  source 1..20: mol_type = other DNA
tgttccgaagttgcggaacg

SEQ ID NO: 13535 - DNA, 20 bp, synthetic construct
  source 1..20: mol_type = other DNA
ctatctgtacgcaccggcga

SEQ ID NO: 13536 - DNA, 20 bp, synthetic construct
  source 1..20: mol_type = other DNA
gctccatacactatggccag

SEQ ID NO: 13537 - DNA, 20 bp, synthetic construct
  source 1..20: mol_type = other DNA
cctaatgtccctttatagcc

SEQ ID NO: 13538 - DNA, 20 bp, synthetic construct
  source 1..20: mol_type = other DNA
gatccgcgagtccgtgccaa

SEQ ID NO: 13539 - DNA, 20 bp, synthetic construct
  source 1..20: mol_type = other DNA
ttgatttactggcttcccat

SEQ ID NO: 13540 - DNA, 20 bp, synthetic construct
  source 1..20: mol_type = other DNA
aaagcatctcacatccagtc

SEQ ID NO: 13541 - DNA, 20 bp, synthetic construct
  source 1..20: mol_type = other DNA
acatatgaccaaaggaaggc

SEQ ID NO: 13542 - DNA, 20 bp, synthetic construct
  source 1..20: mol_type = other DNA
tagggtactcgggttacaac

SEQ ID NO: 13543 - DNA, 20 bp, synthetic construct
  source 1..20: mol_type = other DNA
agctgatgatcgcgcgctag

SEQ ID NO: 13544 - DNA, 20 bp, synthetic construct
  source 1..20: mol_type = other DNA
ctgcacgatcaatgggtcaa

SEQ ID NO: 13545 - DNA, 20 bp, synthetic construct
  source 1..20: mol_type = other DNA
cgtattgttcaaaccagctg

SEQ ID NO: 13546 - DNA, 20 bp, synthetic construct
  source 1..20: mol_type = other DNA
cagtactttaacgcgggcgt

SEQ ID NO: 13547 - DNA, 20 bp, synthetic construct
  source 1..20: mol_type = other DNA
actttatatgtgggaatggg

SEQ ID NO: 13548 - DNA, 20 bp, synthetic construct
  source 1..20: mol_type = other DNA
tttcgggcgtatacataaga

SEQ ID NO: 13549 - DNA, 20 bp, synthetic construct
  source 1..20: mol_type = other DNA
ctcacacagtcggtgtattg

SEQ ID NO: 13550 - DNA, 20 bp, synthetic construct
  source 1..20: mol_type = other DNA
taccgggctgctaatgaacc

SEQ ID NO: 13551 - DNA, 20 bp, synthetic construct
  source 1..20: mol_type = other DNA
cacccttgtgcgctcattca

SEQ ID NO: 13552 - DNA, 20 bp, synthetic construct
  source 1..20: mol_type = other DNA
aatgtagccaaatataggtc

SEQ ID NO: 13553 - DNA, 20 bp, synthetic construct
  source 1..20: mol_type = other DNA
accttcaacggattatttct

SEQ ID NO: 13554 - DNA, 20 bp, synthetic construct
  source 1..20: mol_type = other DNA
cctgtgtctttgaatgagcc

SEQ ID NO: 13555 - DNA, 20 bp, synthetic construct
  source 1..20: mol_type = other DNA
tctttgtcttactgtgaagc

SEQ ID NO: 13556 - DNA, 20 bp, synthetic construct
  source 1..20: mol_type = other DNA
taactggtcgagtttactcg

SEQ ID NO: 13557 - DNA, 20 bp, synthetic construct
  source 1..20: mol_type = other DNA
gaaactgagctaggccacac

SEQ ID NO: 13558 - DNA, 20 bp, synthetic construct
  source 1..20: mol_type = other DNA
gagcgggtctggtttattat

SEQ ID NO: 13559 - DNA, 20 bp, synthetic construct
  source 1..20: mol_type = other DNA
ccctacagtattcttgggat

SEQ ID NO: 13560 - DNA, 20 bp, synthetic construct
  source 1..20: mol_type = other DNA
ttgctaccagtaaatggctc

SEQ ID NO: 13561 - DNA, 20 bp, synthetic construct
  source 1..20: mol_type = other DNA
cacttcctatctctacgagt

SEQ ID NO: 13562 - DNA, 20 bp, synthetic construct
  source 1..20: mol_type = other DNA
accacatgacgttataactg

SEQ ID NO: 13563 - DNA, 20 bp, synthetic construct
  source 1..20: mol_type = other DNA
ccacagacgtccagcgaagc

SEQ ID NO: 13564 - DNA, 20 bp, synthetic construct
  source 1..20: mol_type = other DNA
tttgttcgagcaactgctta

SEQ ID NO: 13565 - DNA, 20 bp, synthetic construct
  source 1..20: mol_type = other DNA
agcttacgagggtcttaatc

SEQ ID NO: 13566 - DNA, 20 bp, synthetic construct
  source 1..20: mol_type = other DNA
gtcgcaccagactgctcgtc

SEQ ID NO: 13567 - DNA, 20 bp, synthetic construct
  source 1..20: mol_type = other DNA
gggccggtcattgtggttgc

SEQ ID NO: 13568 - DNA, 20 bp, synthetic construct
  source 1..20: mol_type = other DNA
tctgctctcctgtgtccttc

SEQ ID NO: 13569 - DNA, 20 bp, synthetic construct
  source 1..20: mol_type = other DNA
cttacaacgtaggcttggta

SEQ ID NO: 13570 - DNA, 20 bp, synthetic construct
  source 1..20: mol_type = other DNA
cggagtttatacaaacggta

SEQ ID NO: 13571 - DNA, 20 bp, synthetic construct
  source 1..20: mol_type = other DNA
tggcacctattgtagtcgat

SEQ ID NO: 13572 - DNA, 20 bp, synthetic construct
  source 1..20: mol_type = other DNA
tctgtagtggtaattcctag

SEQ ID NO: 13573 - DNA, 20 bp, synthetic construct
  source 1..20: mol_type = other DNA
ttcgactatcaagctgacat

SEQ ID NO: 13574 - DNA, 20 bp, synthetic construct
  source 1..20: mol_type = other DNA
gttcgatcctaattattgct

SEQ ID NO: 13575 - DNA, 20 bp, synthetic construct
  source 1..20: mol_type = other DNA
cggaatccaaatcttgtgcg

SEQ ID NO: 13576 - DNA, 20 bp, synthetic construct
  source 1..20: mol_type = other DNA
cctgaaggtatctaagcgca

SEQ ID NO: 13577 - DNA, 20 bp, synthetic construct
  source 1..20: mol_type = other DNA
gtctggactatacttgctga

SEQ ID NO: 13578 - DNA, 20 bp, synthetic construct
  source 1..20: mol_type = other DNA
atataactctgggcccgcat

SEQ ID NO: 13579 - DNA, 20 bp, synthetic construct
  source 1..20: mol_type = other DNA
aggtgtatgtttggacttgc

SEQ ID NO: 13580 - DNA, 20 bp, synthetic construct
  source 1..20: mol_type = other DNA
caatccgtgtttgttgagcg

SEQ ID NO: 13581 - DNA, 20 bp, synthetic construct
  source 1..20: mol_type = other DNA
ctaatcgatatgtgcatatc

SEQ ID NO: 13582 - DNA, 20 bp, synthetic construct
  source 1..20: mol_type = other DNA
ggctgttcaagggactttgt

SEQ ID NO: 13583 - DNA, 20 bp, synthetic construct
  source 1..20: mol_type = other DNA
ttcggcgaccaaggaaataa

SEQ ID NO: 13584 - DNA, 20 bp, synthetic construct
  source 1..20: mol_type = other DNA
ccagcctcatccaaacgttc

SEQ ID NO: 13585 - DNA, 20 bp, synthetic construct
  source 1..20: mol_type = other DNA
tgaaattacattctccgtgg

SEQ ID NO: 13586 - DNA, 20 bp, synthetic construct
  source 1..20: mol_type = other DNA
tgagggcaacacactggtca

SEQ ID NO: 13587 - DNA, 20 bp, synthetic construct
  source 1..20: mol_type = other DNA
actgtgcgacctgggataaa

SEQ ID NO: 13588 - DNA, 20 bp, synthetic construct
  source 1..20: mol_type = other DNA
gcacgtcctccactcaattc

SEQ ID NO: 13589 - DNA, 20 bp, synthetic construct
  source 1..20: mol_type = other DNA
tcacggaggtcgaaccagtt

SEQ ID NO: 13590 - DNA, 20 bp, synthetic construct
  source 1..20: mol_type = other DNA
cccgatttaatgttctccat

SEQ ID NO: 13591 - DNA, 20 bp, synthetic construct
  source 1..20: mol_type = other DNA
acgtgcaggccaaattacgt

SEQ ID NO: 13592 - DNA, 20 bp, synthetic construct
  source 1..20: mol_type = other DNA
aatgcgcctgggagccggta

SEQ ID NO: 13593 - DNA, 20 bp, synthetic construct
  source 1..20: mol_type = other DNA
atccaactaatcctagactt

SEQ ID NO: 13594 - DNA, 20 bp, synthetic construct
  source 1..20: mol_type = other DNA
ctggcgggtcctcggatcat

SEQ ID NO: 13595 - DNA, 20 bp, synthetic construct
  source 1..20: mol_type = other DNA
atctgaccacccacaacttg

SEQ ID NO: 13596 - DNA, 20 bp, synthetic construct
  source 1..20: mol_type = other DNA
gagccgaccaatccgcgtca

SEQ ID NO: 13597 - DNA, 20 bp, synthetic construct
  source 1..20: mol_type = other DNA
tcagtttggcagaggagtat

SEQ ID NO: 13598 - DNA, 20 bp, synthetic construct
  source 1..20: mol_type = other DNA
ccgcatttgctatcccttct

SEQ ID NO: 13599 - DNA, 20 bp, synthetic construct
  source 1..20: mol_type = other DNA
gtagaaatatcattgagcca

SEQ ID NO: 13600 - DNA, 20 bp, synthetic construct
  source 1..20: mol_type = other DNA
gtggtctcgctcaaggagcc

SEQ ID NO: 13601 - DNA, 20 bp, synthetic construct
  source 1..20: mol_type = other DNA
cgcatctttgcttatggtgg

SEQ ID NO: 13602 - DNA, 20 bp, synthetic construct
  source 1..20: mol_type = other DNA
ggaacaagtcttggttatga

SEQ ID NO: 13603 - DNA, 20 bp, synthetic construct
  source 1..20: mol_type = other DNA
acaaggatgtctcaccttgg

SEQ ID NO: 13604 - DNA, 20 bp, synthetic construct
  source 1..20: mol_type = other DNA
tagcttctcctttcaattcg

SEQ ID NO: 13605 - DNA, 20 bp, synthetic construct
  source 1..20: mol_type = other DNA
ggttagataggtatttgtcc

SEQ ID NO: 13606 - DNA, 20 bp, synthetic construct
  source 1..20: mol_type = other DNA
gatcgcctactgaagcgctt

SEQ ID NO: 13607 - DNA, 20 bp, synthetic construct
  source 1..20: mol_type = other DNA
aagatacagggcgacaatag

SEQ ID NO: 13608 - DNA, 20 bp, synthetic construct
  source 1..20: mol_type = other DNA
caccgtatgggttccgggaa

SEQ ID NO: 13609 - DNA, 20 bp, synthetic construct
  source 1..20: mol_type = other DNA
gcctgtgttattggcatagc

SEQ ID NO: 13610 - DNA, 20 bp, synthetic construct
  source 1..20: mol_type = other DNA
tccgtgtcaaggctgctcag

SEQ ID NO: 13611 - DNA, 20 bp, synthetic construct
  source 1..20: mol_type = other DNA
cgatgggtctgggaatgatg

SEQ ID NO: 13612 - DNA, 20 bp, synthetic construct
  source 1..20: mol_type = other DNA
aattgagcttaacttcgaga

SEQ ID NO: 13613 - DNA, 20 bp, synthetic construct
  source 1..20: mol_type = other DNA
gacttacaccgtggcctttg

SEQ ID NO: 13614 - DNA, 20 bp, synthetic construct
  source 1..20: mol_type = other DNA
cgcagactatgatcctcggt

SEQ ID NO: 13615 - DNA, 20 bp, synthetic construct
  source 1..20: mol_type = other DNA
gtacctagatgcctaattga

SEQ ID NO: 13616 - DNA, 20 bp, synthetic construct
  source 1..20: mol_type = other DNA
gccgtgctgacctcggagtg

SEQ ID NO: 13617 - DNA, 20 bp, synthetic construct
  source 1..20: mol_type = other DNA
ttggtatatggaccgaacat

SEQ ID NO: 13618 - DNA, 20 bp, synthetic construct
  source 1..20: mol_type = other DNA
agatcgatccgtaggtttat

SEQ ID NO: 13619 - DNA, 20 bp, synthetic construct
  source 1..20: mol_type = other DNA
gtgctgcctcgcaccgtgaa

SEQ ID NO: 13620 - DNA, 20 bp, synthetic construct
  source 1..20: mol_type = other DNA
accactccatatttatggac

SEQ ID NO: 13621 - DNA, 20 bp, synthetic construct
  source 1..20: mol_type = other DNA
gacgaatgggtcaaagccct

SEQ ID NO: 13622 - DNA, 20 bp, synthetic construct
  source 1..20: mol_type = other DNA
cgtcttgatacacctggcgg

SEQ ID NO: 13623 - DNA, 20 bp, synthetic construct
  source 1..20: mol_type = other DNA
ggcctctattcccggaagtg

SEQ ID NO: 13624 - DNA, 20 bp, synthetic construct
  source 1..20: mol_type = other DNA
gcaccctgagagtcgaacta

SEQ ID NO: 13625 - DNA, 20 bp, synthetic construct
  source 1..20: mol_type = other DNA
cctttgcgttctgggtaagc

SEQ ID NO: 13626 - DNA, 20 bp, synthetic construct
  source 1..20: mol_type = other DNA
gctaacctctccaccagcca

SEQ ID NO: 13627 - DNA, 20 bp, synthetic construct
  source 1..20: mol_type = other DNA
cttaaaggattcgccgaacc

SEQ ID NO: 13628 - DNA, 20 bp, synthetic construct
  source 1..20: mol_type = other DNA
acggcaaagtgcgcaggaga

SEQ ID NO: 13629 - DNA, 20 bp, synthetic construct
  source 1..20: mol_type = other DNA
tagagtagcggcacccacgg

SEQ ID NO: 13630 - DNA, 20 bp, synthetic construct
  source 1..20: mol_type = other DNA
acgctcaaggatagcggatg

SEQ ID NO: 13631 - DNA, 20 bp, synthetic construct
  source 1..20: mol_type = other DNA
tcacaccgacgtggcttagg

SEQ ID NO: 13632 - DNA, 20 bp, synthetic construct
  source 1..20: mol_type = other DNA
cttatgagtcaaggcggaca

SEQ ID NO: 13633 - DNA, 20 bp, synthetic construct
  source 1..20: mol_type = other DNA
tccagatacctgtttgtgta

SEQ ID NO: 13634 - DNA, 20 bp, synthetic construct
  source 1..20: mol_type = other DNA
tatcgtgggatccataacgt

SEQ ID NO: 13635 - DNA, 20 bp, synthetic construct
  source 1..20: mol_type = other DNA
tctgccgaaatacagacttt

SEQ ID NO: 13636 - DNA, 20 bp, synthetic construct
  source 1..20: mol_type = other DNA
tttgacctatcttagctacg

SEQ ID NO: 13637 - DNA, 20 bp, synthetic construct
  source 1..20: mol_type = other DNA
aatgtcactcgtttgcggta

SEQ ID NO: 13638 - DNA, 20 bp, synthetic construct
  source 1..20: mol_type = other DNA
gggtcggtttcctcttcagt

SEQ ID NO: 13639 - DNA, 20 bp, synthetic construct
  source 1..20: mol_type = other DNA
ctacaagtagacaagcgtgt

SEQ ID NO: 13640 - DNA, 20 bp, synthetic construct
  source 1..20: mol_type = other DNA
tcataagcagggctgacgtt

SEQ ID NO: 13641 - DNA, 20 bp, synthetic construct
  source 1..20: mol_type = other DNA
gtagcagcgggcgcgaaatg

SEQ ID NO: 13642 - DNA, 20 bp, synthetic construct
  source 1..20: mol_type = other DNA
aaacctaccttctatggcga

SEQ ID NO: 13643 - DNA, 20 bp, synthetic construct
  source 1..20: mol_type = other DNA
atctaagctccgccgctcgt

SEQ ID NO: 13644 - DNA, 20 bp, synthetic construct
  source 1..20: mol_type = other DNA
gctcggttaaggtacaatgc

SEQ ID NO: 13645 - DNA, 20 bp, synthetic construct
  source 1..20: mol_type = other DNA
tctagcgtctccaaagggcg

SEQ ID NO: 13646 - DNA, 20 bp, synthetic construct
  source 1..20: mol_type = other DNA
caccgtggctccttcgtaaa

SEQ ID NO: 13647 - DNA, 20 bp, synthetic construct
  source 1..20: mol_type = other DNA
tccgaggccgttatagtaca

SEQ ID NO: 13648 - DNA, 20 bp, synthetic construct
  source 1..20: mol_type = other DNA
gctacgcagctgcacttagt

SEQ ID NO: 13649 - DNA, 20 bp, synthetic construct
  source 1..20: mol_type = other DNA
tagtctgctgtaaatgaatc

SEQ ID NO: 13650 - DNA, 20 bp, synthetic construct
  source 1..20: mol_type = other DNA
cctcgcaccatgttcggcat

SEQ ID NO: 13651 - DNA, 20 bp, synthetic construct
  source 1..20: mol_type = other DNA
cttctacggtgtgcatcact

SEQ ID NO: 13652 - DNA, 20 bp, synthetic construct
  source 1..20: mol_type = other DNA
gggcgcatatcgtaacgcgc

SEQ ID NO: 13653 - DNA, 20 bp, synthetic construct
  source 1..20: mol_type = other DNA
ttgcgtcaagtgcgctgact

SEQ ID NO: 13654 - DNA, 20 bp, synthetic construct
  source 1..20: mol_type = other DNA
atgtagtgggtaaaccgcgg

SEQ ID NO: 13655 - DNA, 20 bp, synthetic construct
  source 1..20: mol_type = other DNA
agtgctccacttacattcca

SEQ ID NO: 13656 - DNA, 20 bp, synthetic construct
  source 1..20: mol_type = other DNA
tgccgttgggtgcgtttaaa

SEQ ID NO: 13657 - DNA, 20 bp, synthetic construct
  source 1..20: mol_type = other DNA
aacgcccgtagagggctgat

SEQ ID NO: 13658 - DNA, 20 bp, synthetic construct
  source 1..20: mol_type = other DNA
gttcaggctttactaggacc

SEQ ID NO: 13659 - DNA, 20 bp, synthetic construct
  source 1..20: mol_type = other DNA
gtcctctatcgatagaaagc

SEQ ID NO: 13660 - DNA, 20 bp, synthetic construct
  source 1..20: mol_type = other DNA
atcggttctactagtatacg

SEQ ID NO: 13661 - DNA, 20 bp, synthetic construct
  source 1..20: mol_type = other DNA
ggttgactcgctatgtggga

SEQ ID NO: 13662 - DNA, 20 bp, synthetic construct
  source 1..20: mol_type = other DNA
atcagatcgctgcccggagg

SEQ ID NO: 13663 - DNA, 20 bp, synthetic construct
  source 1..20: mol_type = other DNA
agcggtcggttcgtgacttt

SEQ ID NO: 13664 - DNA, 20 bp, synthetic construct
  source 1..20: mol_type = other DNA
gcgtgtgagtcatctacggc

SEQ ID NO: 13665 - DNA, 20 bp, synthetic construct
  source 1..20: mol_type = other DNA
gtctgcagctgactaaagtg

SEQ ID NO: 13666 - DNA, 20 bp, synthetic construct
  source 1..20: mol_type = other DNA
tgtcgaagcagacgatgtat

SEQ ID NO: 13667 - DNA, 20 bp, synthetic construct
  source 1..20: mol_type = other DNA
gctacaaacacgaatctcac

SEQ ID NO: 13668 - DNA, 20 bp, synthetic construct
  source 1..20: mol_type = other DNA
ttaatgcttgggacgtgctg

SEQ ID NO: 13669 - DNA, 20 bp, synthetic construct
  source 1..20: mol_type = other DNA
gaccgttgtgcttcccactt

SEQ ID NO: 13670 - DNA, 20 bp, synthetic construct
  source 1..20: mol_type = other DNA
cacagtcgcggagtacacag

SEQ ID NO: 13671 - DNA, 20 bp, synthetic construct
  source 1..20: mol_type = other DNA
gactcctggccagtcaaagg

SEQ ID NO: 13672 - DNA, 20 bp, synthetic construct
  source 1..20: mol_type = other DNA
cgtgcttaacggtcctcaat

SEQ ID NO: 13673 - DNA, 20 bp, synthetic construct
  source 1..20: mol_type = other DNA
gttaggtgagggtagaaata

SEQ ID NO: 13674 - DNA, 20 bp, synthetic construct
  source 1..20: mol_type = other DNA
gctccatacatatcacaact

SEQ ID NO: 13675 - DNA, 20 bp, synthetic construct
  source 1..20: mol_type = other DNA
tgattgtcactcaatgcagt

SEQ ID NO: 13676 - DNA, 20 bp, synthetic construct
  source 1..20: mol_type = other DNA
ggacattcgatgtccgacgc

SEQ ID NO: 13677 - DNA, 20 bp, synthetic construct
  source 1..20: mol_type = other DNA
catactgacagagagcggga

SEQ ID NO: 13678 - DNA, 20 bp, synthetic construct
  source 1..20: mol_type = other DNA
acactatttgcccaggtaac

SEQ ID NO: 13679 - DNA, 20 bp, synthetic construct
  source 1..20: mol_type = other DNA
tacagctgttgacgaatcac

SEQ ID NO: 13680 - DNA, 20 bp, synthetic construct
  source 1..20: mol_type = other DNA
gctacccaaactaagacgat

SEQ ID NO: 13681 - DNA, 20 bp, synthetic construct
  source 1..20: mol_type = other DNA
gcactcagaggcctgctatg

SEQ ID NO: 13682 - DNA, 20 bp, synthetic construct
  source 1..20: mol_type = other DNA
agtatcagccagcgggcaac

SEQ ID NO: 13683 - DNA, 20 bp, synthetic construct
  source 1..20: mol_type = other DNA
ggcaactttatgatccgtag

SEQ ID NO: 13684 - DNA, 20 bp, synthetic construct
  source 1..20: mol_type = other DNA
agcgctccgtgcaactgtat

SEQ ID NO: 13685 - DNA, 20 bp, synthetic construct
  source 1..20: mol_type = other DNA
cgcatctagtccgattccgc

SEQ ID NO: 13686 - DNA, 20 bp, synthetic construct
  source 1..20: mol_type = other DNA
tttgatattatgaatggcgt

SEQ ID NO: 13687 - DNA, 20 bp, synthetic construct
  source 1..20: mol_type = other DNA
gcagtaatcagaggaaagcg

SEQ ID NO: 13688 - DNA, 20 bp, synthetic construct
  source 1..20: mol_type = other DNA
attgagctcacgaggctaca

SEQ ID NO: 13689 - DNA, 20 bp, synthetic construct
  source 1..20: mol_type = other DNA
cacacttgtgtcagctttgt

SEQ ID NO: 13690 - DNA, 20 bp, synthetic construct
  source 1..20: mol_type = other DNA
caacgaactacccactactc

SEQ ID NO: 13691 - DNA, 20 bp, synthetic construct
  source 1..20: mol_type = other DNA
gtgacggcccttctgcgatg

SEQ ID NO: 13692 - DNA, 20 bp, synthetic construct
  source 1..20: mol_type = other DNA
cgacgtaaacatcgatcaag

SEQ ID NO: 13693 - DNA, 20 bp, synthetic construct
  source 1..20: mol_type = other DNA
agaaaggaggatatgactag

SEQ ID NO: 13694 - DNA, 20 bp, synthetic construct
  source 1..20: mol_type = other DNA
cacggtcatttccactcctc

SEQ ID NO: 13695 - DNA, 20 bp, synthetic construct
  source 1..20: mol_type = other DNA
gctcgtttatctgcgtccgg

SEQ ID NO: 13696 - DNA, 20 bp, synthetic construct
  source 1..20: mol_type = other DNA
tccagcgtaaacatacgagc

SEQ ID NO: 13697 - DNA, 20 bp, synthetic construct
  source 1..20: mol_type = other DNA
agtttcctcggaagcgcggc

SEQ ID NO: 13698 - DNA, 20 bp, synthetic construct
  source 1..20: mol_type = other DNA
atagctcaatgcggctcttc

SEQ ID NO: 13699 - DNA, 20 bp, synthetic construct
  source 1..20: mol_type = other DNA
tcctactcgtttggaaactg

SEQ ID NO: 13700 - DNA, 20 bp, synthetic construct
  source 1..20: mol_type = other DNA
gctagtgttgcgactcaatc

SEQ ID NO: 13701 - DNA, 20 bp, synthetic construct
  source 1..20: mol_type = other DNA
gtttgccgttctttcacttc

SEQ ID NO: 13702 - DNA, 20 bp, synthetic construct
  source 1..20: mol_type = other DNA
cctatccagattactatagc

SEQ ID NO: 13703 - DNA, 20 bp, synthetic construct
  source 1..20: mol_type = other DNA
ctcagtggcagaaagctaat

SEQ ID NO: 13704 - DNA, 20 bp, synthetic construct
  source 1..20: mol_type = other DNA
tgaggaagatactccaccca

SEQ ID NO: 13705 - DNA, 20 bp, synthetic construct
  source 1..20: mol_type = other DNA
ccctaactatgtagtgactg

SEQ ID NO: 13706 - DNA, 20 bp, synthetic construct
  source 1..20: mol_type = other DNA
ttgggcgtagtcattgctcc

SEQ ID NO: 13707 - DNA, 20 bp, synthetic construct
  source 1..20: mol_type = other DNA
tcaggcaattgcacactgta

SEQ ID NO: 13708 - DNA, 20 bp, synthetic construct
  source 1..20: mol_type = other DNA
gtcaaatgcgacaattacgt

SEQ ID NO: 13709 - DNA, 20 bp, synthetic construct
  source 1..20: mol_type = other DNA
gaggttaccacgtgtcctat

SEQ ID NO: 13710 - DNA, 20 bp, synthetic construct
  source 1..20: mol_type = other DNA
cgcctgtctaagcaagcagt

SEQ ID NO: 13711 - DNA, 20 bp, synthetic construct
  source 1..20: mol_type = other DNA
gtcgaatcgcagccagggaa

SEQ ID NO: 13712 - DNA, 20 bp, synthetic construct
  source 1..20: mol_type = other DNA
aaacaatcatgggcaagtag

SEQ ID NO: 13713 - DNA, 20 bp, synthetic construct
  source 1..20: mol_type = other DNA
aaactttggataagattggc

SEQ ID NO: 13714 - DNA, 20 bp, synthetic construct
  source 1..20: mol_type = other DNA
tatacgggtctggacttacc

SEQ ID NO: 13715 - DNA, 20 bp, synthetic construct
  source 1..20: mol_type = other DNA
tcataaattcgaagcagaga

SEQ ID NO: 13716 - DNA, 20 bp, synthetic construct
  source 1..20: mol_type = other DNA
tccgtgttaggaggacgatg

SEQ ID NO: 13717 - DNA, 20 bp, synthetic construct
  source 1..20: mol_type = other DNA
gagccattgtggttgggtgt

SEQ ID NO: 13718 - DNA, 20 bp, synthetic construct
  source 1..20: mol_type = other DNA
gcagaaattgtcagaaggtg

SEQ ID NO: 13719 - DNA, 20 bp, synthetic construct
  source 1..20: mol_type = other DNA
taagggtatttcaccggaat

SEQ ID NO: 13720 - DNA, 20 bp, synthetic construct
  source 1..20: mol_type = other DNA
ctgggtgctactgtgagatc

SEQ ID NO: 13721 - DNA, 20 bp, synthetic construct
  source 1..20: mol_type = other DNA
gtggtatagggtgttccaaa

SEQ ID NO: 13722 - DNA, 20 bp, synthetic construct
  source 1..20: mol_type = other DNA
tgctgtgcacacgaggtaat

SEQ ID NO: 13723 - DNA, 20 bp, synthetic construct
  source 1..20: mol_type = other DNA
gcgaagtaggcgcacaaaga

SEQ ID NO: 13724 - DNA, 20 bp, synthetic construct
  source 1..20: mol_type = other DNA
tcaacagcaaactaagccgg

SEQ ID NO: 13725 - DNA, 20 bp, synthetic construct
  source 1..20: mol_type = other DNA
atttatccggttggtcattt

SEQ ID NO: 13726 - DNA, 20 bp, synthetic construct
  source 1..20: mol_type = other DNA
ggtcgtctgtgaagcagaaa

SEQ ID NO: 13727 - DNA, 20 bp, synthetic construct
  source 1..20: mol_type = other DNA
gagacactccgctccagctg

SEQ ID NO: 13728 - DNA, 20 bp, synthetic construct
  source 1..20: mol_type = other DNA
acgttcgctgcggtgccaat

SEQ ID NO: 13729 - DNA, 20 bp, synthetic construct
  source 1..20: mol_type = other DNA
gaaactactggccatactac

SEQ ID NO: 13730 - DNA, 20 bp, synthetic construct
  source 1..20: mol_type = other DNA
cttcccaccgcccataaggg

SEQ ID NO: 13731 - DNA, 20 bp, synthetic construct
  source 1..20: mol_type = other DNA
acaatgggagccgaactccc

SEQ ID NO: 13732 - DNA, 20 bp, synthetic construct
  source 1..20: mol_type = other DNA
cgctcatagttgtgtaaggt

SEQ ID NO: 13733 - DNA, 20 bp, synthetic construct
  source 1..20: mol_type = other DNA
accgccttgcgtggcatcct

SEQ ID NO: 13734 - DNA, 20 bp, synthetic construct
  source 1..20: mol_type = other DNA
caaatgcatgatagctacaa

SEQ ID NO: 13735 - DNA, 20 bp, synthetic construct
  source 1..20: mol_type = other DNA
aaatcgtgcgacatttagaa

SEQ ID NO: 13736 - DNA, 20 bp, synthetic construct
  source 1..20: mol_type = other DNA
tgcggagcaatttatagcta

SEQ ID NO: 13737 - DNA, 20 bp, synthetic construct
  source 1..20: mol_type = other DNA
ggatggcagaaggtatccta

SEQ ID NO: 13738 - DNA, 20 bp, synthetic construct
  source 1..20: mol_type = other DNA
tgttaactaccgtcgtaatt

SEQ ID NO: 13739 - DNA, 20 bp, synthetic construct
  source 1..20: mol_type = other DNA
tgcatcatacgtagtactgc

SEQ ID NO: 13740 - DNA, 20 bp, synthetic construct
  source 1..20: mol_type = other DNA
gaagataacctcaacctccc

SEQ ID NO: 13741 - DNA, 20 bp, synthetic construct
  source 1..20: mol_type = other DNA
agttaccctctcgattaatt

SEQ ID NO: 13742 - DNA, 20 bp, synthetic construct
  source 1..20: mol_type = other DNA
agtcagatccacgatgttgc

SEQ ID NO: 13743 - DNA, 20 bp, synthetic construct
  source 1..20: mol_type = other DNA
tttcccgaaagccggagctg

SEQ ID NO: 13744 - DNA, 20 bp, synthetic construct
  source 1..20: mol_type = other DNA
gttgatttgactgaccctcc

SEQ ID NO: 13745 - DNA, 20 bp, synthetic construct
  source 1..20: mol_type = other DNA
gacacatctccgattggaga

SEQ ID NO: 13746 - DNA, 20 bp, synthetic construct
  source 1..20: mol_type = other DNA
gacgccatagagtagacata

SEQ ID NO: 13747 - DNA, 20 bp, synthetic construct
  source 1..20: mol_type = other DNA
aggatcgtccggcagctcag

SEQ ID NO: 13748 - DNA, 20 bp, synthetic construct
  source 1..20: mol_type = other DNA
aactgatgagtaccgccagc

SEQ ID NO: 13749 - DNA, 20 bp, synthetic construct
  source 1..20: mol_type = other DNA
tgatagcccagaaactttac

SEQ ID NO: 13750 - DNA, 20 bp, synthetic construct
  source 1..20: mol_type = other DNA
ggagccagaaatttcgccgc

SEQ ID NO: 13751 - DNA, 20 bp, synthetic construct
  source 1..20: mol_type = other DNA
aacgccctgacgttcaccca

SEQ ID NO: 13752 - DNA, 20 bp, synthetic construct
  source 1..20: mol_type = other DNA
ctttggaaatgcaatatagc

SEQ ID NO: 13753 - DNA, 20 bp, synthetic construct
  source 1..20: mol_type = other DNA
tatcacagcgcaccaggtta

SEQ ID NO: 13754 - DNA, 20 bp, synthetic construct
  source 1..20: mol_type = other DNA
gacagatagggcaaatgagt

SEQ ID NO: 13755 - DNA, 20 bp, synthetic construct
  source 1..20: mol_type = other DNA
acattagacgggctggacac

SEQ ID NO: 13756 - DNA, 20 bp, synthetic construct
  source 1..20: mol_type = other DNA
gacctcgccattataaccaa

SEQ ID NO: 13757 - DNA, 20 bp, synthetic construct
  source 1..20: mol_type = other DNA
tcttaaaggccaagggtcgt

SEQ ID NO: 13758 - DNA, 20 bp, synthetic construct
  source 1..20: mol_type = other DNA
ctcacacagcgattaaccac

SEQ ID NO: 13759 - DNA, 20 bp, synthetic construct
  source 1..20: mol_type = other DNA
agtgtctggtgatcacgccg

SEQ ID NO: 13760 - DNA, 20 bp, synthetic construct
  source 1..20: mol_type = other DNA
taagtacctcacttgaaatg

SEQ ID NO: 13761 - DNA, 20 bp, synthetic construct
  source 1..20: mol_type = other DNA
agttacatttgtctagcagc

SEQ ID NO: 13762 - DNA, 20 bp, synthetic construct
  source 1..20: mol_type = other DNA
ccgtttagccctccgtgagt

SEQ ID NO: 13763 - DNA, 20 bp, synthetic construct
  source 1..20: mol_type = other DNA
gaaccggtagcgcgtcgtta

SEQ ID NO: 13764 - DNA, 20 bp, synthetic construct
  source 1..20: mol_type = other DNA
ttgtggaggtcctgcgttgc

SEQ ID NO: 13765 - DNA, 20 bp, synthetic construct
  source 1..20: mol_type = other DNA
cgctacttagacactcccgc

SEQ ID NO: 13766 - DNA, 20 bp, synthetic construct
  source 1..20: mol_type = other DNA
aagcggttatcatcgaatct

SEQ ID NO: 13767 - DNA, 20 bp, synthetic construct
  source 1..20: mol_type = other DNA
gagcagaggctcacgtctac

SEQ ID NO: 13768 - DNA, 20 bp, synthetic construct
  source 1..20: mol_type = other DNA
aagtgcgcatatagagccag

SEQ ID NO: 13769 - DNA, 20 bp, synthetic construct
  source 1..20: mol_type = other DNA
caccagaggccatttggagt

SEQ ID NO: 13770 - DNA, 20 bp, synthetic construct
  source 1..20: mol_type = other DNA
acgtaagggcctctatgaac

SEQ ID NO: 13771 - DNA, 20 bp, synthetic construct
  source 1..20: mol_type = other DNA
ctccctctgctatctgctag

SEQ ID NO: 13772 - DNA, 20 bp, synthetic construct
  source 1..20: mol_type = other DNA
aaatatgagctatgatgcgg

SEQ ID NO: 13773 - DNA, 20 bp, synthetic construct
  source 1..20: mol_type = other DNA
aagttgaaggctcccgcatc

SEQ ID NO: 13774 - DNA, 20 bp, synthetic construct
  source 1..20: mol_type = other DNA
cccagcccaaagtgattcca

SEQ ID NO: 13775 - DNA, 20 bp, synthetic construct
  source 1..20: mol_type = other DNA
cgattgattcgcttaataac

SEQ ID NO: 13776 - DNA, 20 bp, synthetic construct
  source 1..20: mol_type = other DNA
aagtgattccgatggctctc

SEQ ID NO: 13777 - DNA, 20 bp, synthetic construct
  source 1..20: mol_type = other DNA
gttgactacgaacagtcatt

SEQ ID NO: 13778 - DNA, 20 bp, synthetic construct
  source 1..20: mol_type = other DNA
tggtattccaccattgtgga

SEQ ID NO: 13779 - DNA, 20 bp, synthetic construct
  source 1..20: mol_type = other DNA
taagtaatggtctttaaggc

SEQ ID NO: 13780 - DNA, 20 bp, synthetic construct
  source 1..20: mol_type = other DNA
ccggccgctgcgacgtataa

SEQ ID NO: 13781 - DNA, 20 bp, synthetic construct
  source 1..20: mol_type = other DNA
tcctctcgggatggacaacc

SEQ ID NO: 13782 - DNA, 20 bp, synthetic construct
  source 1..20: mol_type = other DNA
ctgagcaactgatacttgcg

SEQ ID NO: 13783 - DNA, 20 bp, synthetic construct
  source 1..20: mol_type = other DNA
tgagaagtcaccaacgttaa

SEQ ID NO: 13784 - DNA, 20 bp, synthetic construct
  source 1..20: mol_type = other DNA
cccgaccatttatactccgt

SEQ ID NO: 13785 - DNA, 20 bp, synthetic construct
  source 1..20: mol_type = other DNA
ctttgatccttgaagtggac

SEQ ID NO: 13786 - DNA, 20 bp, synthetic construct
  source 1..20: mol_type = other DNA
tggagcttgtgacgacatgg

SEQ ID NO: 13787 - DNA, 20 bp, synthetic construct
  source 1..20: mol_type = other DNA
cctaccttagtgccgggttt

SEQ ID NO: 13788 - DNA, 20 bp, synthetic construct
  source 1..20: mol_type = other DNA
taggataactctaagctggg

SEQ ID NO: 13789 - DNA, 20 bp, synthetic construct
  source 1..20: mol_type = other DNA
atactagggctgttacacgc

SEQ ID NO: 13790 - DNA, 20 bp, synthetic construct
  source 1..20: mol_type = other DNA
cgcgcgtgttaggcgattcg

SEQ ID NO: 13791 - DNA, 20 bp, synthetic construct
  source 1..20: mol_type = other DNA
tacgccagtgagggagtggt

SEQ ID NO: 13792 - DNA, 20 bp, synthetic construct
  source 1..20: mol_type = other DNA
ctcgtaaagcgcgtcctaac

SEQ ID NO: 13793 - DNA, 20 bp, synthetic construct
  source 1..20: mol_type = other DNA
acactttcatctgatcatgg

SEQ ID NO: 13794 - DNA, 20 bp, synthetic construct
  source 1..20: mol_type = other DNA
gttgacaagagctgcccgtc

SEQ ID NO: 13795 - DNA, 20 bp, synthetic construct
  source 1..20: mol_type = other DNA
atcgaaaggcttatacgatc

SEQ ID NO: 13796 - DNA, 20 bp, synthetic construct
  source 1..20: mol_type = other DNA
catcgttctgggtcatgatc

SEQ ID NO: 13797 - DNA, 20 bp, synthetic construct
  source 1..20: mol_type = other DNA
catcacaaatgcacctttcc

SEQ ID NO: 13798 - DNA, 20 bp, synthetic construct
  source 1..20: mol_type = other DNA
tcaccaaatttgtactacga

SEQ ID NO: 13799 - DNA, 20 bp, synthetic construct
  source 1..20: mol_type = other DNA
gccgaggtgtgcacaaagga

SEQ ID NO: 13800 - DNA, 20 bp, synthetic construct
  source 1..20: mol_type = other DNA
gtttgatcgacaagaactgc

SEQ ID NO: 13801 - DNA, 20 bp, synthetic construct
  source 1..20: mol_type = other DNA
catatggaactaggcacatt

SEQ ID NO: 13802 - DNA, 20 bp, synthetic construct
  source 1..20: mol_type = other DNA
ggatggcatcgcgtcactta

SEQ ID NO: 13803 - DNA, 20 bp, synthetic construct
  source 1..20: mol_type = other DNA
ccaaagtgaggctccagaac

SEQ ID NO: 13804 - DNA, 20 bp, synthetic construct
  source 1..20: mol_type = other DNA
gaaccaccgttgacattatc

SEQ ID NO: 13805 - DNA, 20 bp, synthetic construct
  source 1..20: mol_type = other DNA
ttgggcgctgcagtgtggag

SEQ ID NO: 13806 - DNA, 20 bp, synthetic construct
  source 1..20: mol_type = other DNA
cgaaatgaggacgatgtagc

SEQ ID NO: 13807 - DNA, 20 bp, synthetic construct
  source 1..20: mol_type = other DNA
tgctcacaggcggcaattac

SEQ ID NO: 13808 - DNA, 20 bp, synthetic construct
  source 1..20: mol_type = other DNA
aacgcctgaaaccatccatt

SEQ ID NO: 13809 - DNA, 20 bp, synthetic construct
  source 1..20: mol_type = other DNA
acccatcaccagcaagcaca

SEQ ID NO: 13810 - DNA, 20 bp, synthetic construct
  source 1..20: mol_type = other DNA
acgctgacagatgatgggcg

SEQ ID NO: 13811 - DNA, 20 bp, synthetic construct
  source 1..20: mol_type = other DNA
agatgacgcatggagtatta

SEQ ID NO: 13812 - DNA, 20 bp, synthetic construct
  source 1..20: mol_type = other DNA
gcgtccaccttatattaggc

SEQ ID NO: 13813 - DNA, 20 bp, synthetic construct
  source 1..20: mol_type = other DNA
ctctaccgcctagagtaagg

SEQ ID NO: 13814 - DNA, 20 bp, synthetic construct
  source 1..20: mol_type = other DNA
tggtgtataaggcttatcag

SEQ ID NO: 13815 - DNA, 20 bp, synthetic construct
  source 1..20: mol_type = other DNA
ctgctacatgtgcaatgtcg

SEQ ID NO: 13816 - DNA, 20 bp, synthetic construct
  source 1..20: mol_type = other DNA
cagtgtctggtcataaacag

SEQ ID NO: 13817 - DNA, 20 bp, synthetic construct
  source 1..20: mol_type = other DNA
gagggtagtgttctgttaga

SEQ ID NO: 13818 - DNA, 20 bp, synthetic construct
  source 1..20: mol_type = other DNA
aggccatttccatcgctagg

SEQ ID NO: 13819 - DNA, 20 bp, synthetic construct
  source 1..20: mol_type = other DNA
tgacctgcttgacacccggt

SEQ ID NO: 13820 - DNA, 20 bp, synthetic construct
  source 1..20: mol_type = other DNA
agatactatagatggatcca

SEQ ID NO: 13821 - DNA, 20 bp, synthetic construct
  source 1..20: mol_type = other DNA
tattggattcccaacacggt

SEQ ID NO: 13822 - DNA, 20 bp, synthetic construct
  source 1..20: mol_type = other DNA
tattcatcaacaaatcgagc

SEQ ID NO: 13823 - DNA, 20 bp, synthetic construct
  source 1..20: mol_type = other DNA
cgactaaacctactctcaca

SEQ ID NO: 13824 - DNA, 20 bp, synthetic construct
  source 1..20: mol_type = other DNA
ctcggcacaagcgtggttcg

SEQ ID NO: 13825 - DNA, 20 bp, synthetic construct
  source 1..20: mol_type = other DNA
cctagccactacttatagac

SEQ ID NO: 13826 - DNA, 20 bp, synthetic construct
  source 1..20: mol_type = other DNA
ccatggtcatatattgagag

SEQ ID NO: 13827 - DNA, 20 bp, synthetic construct
  source 1..20: mol_type = other DNA
gcgaacatttcttcagttcc

SEQ ID NO: 13828 - DNA, 20 bp, synthetic construct
  source 1..20: mol_type = other DNA
cgagtagtaactggatcgaa

SEQ ID NO: 13829 - DNA, 20 bp, synthetic construct
  source 1..20: mol_type = other DNA
tcttgtagcgattccggact

SEQ ID NO: 13830 - DNA, 20 bp, synthetic construct
  source 1..20: mol_type = other DNA
tcttagcaattccagccctg

SEQ ID NO: 13831 - DNA, 20 bp, synthetic construct
  source 1..20: mol_type = other DNA
tgtcggctgggaccgcaata

SEQ ID NO: 13832 - DNA, 20 bp, synthetic construct
  source 1..20: mol_type = other DNA
tgcaatgcaaatgcaccttt

SEQ ID NO: 13833 - DNA, 20 bp, synthetic construct
  source 1..20: mol_type = other DNA
cttaggaaacgagagcccgt

SEQ ID NO: 13834 - DNA, 20 bp, synthetic construct
  source 1..20: mol_type = other DNA
acggctccttacgggtagtg

SEQ ID NO: 13835 - DNA, 20 bp, synthetic construct
  source 1..20: mol_type = other DNA
cttcacccaaacagaatggc

SEQ ID NO: 13836 - DNA, 20 bp, synthetic construct
  source 1..20: mol_type = other DNA
acggttccgtctctgaccgc

SEQ ID NO: 13837 - DNA, 20 bp, synthetic construct
  source 1..20: mol_type = other DNA
ttaacagggccgataccgcc

SEQ ID NO: 13838 - DNA, 20 bp, synthetic construct
  source 1..20: mol_type = other DNA
tgttgcctggtagaatcgat

SEQ ID NO: 13839 - DNA, 20 bp, synthetic construct
  source 1..20: mol_type = other DNA
agcgtggtctgcttctccaa

SEQ ID NO: 13840 - DNA, 20 bp, synthetic construct
  source 1..20: mol_type = other DNA
aatgcaaggtcttgttgcat

SEQ ID NO: 13841 - DNA, 20 bp, synthetic construct
  source 1..20: mol_type = other DNA
ttgaaagggcacgttagcta

SEQ ID NO: 13842 - DNA, 20 bp, synthetic construct
  source 1..20: mol_type = other DNA
tagaccgacctgaggcaata

SEQ ID NO: 13843 - DNA, 20 bp, synthetic construct
  source 1..20: mol_type = other DNA
gctgtactaccgagagtcat

SEQ ID NO: 13844 - DNA, 20 bp, synthetic construct
  source 1..20: mol_type = other DNA
tcccaggctgtatccgtgta

SEQ ID NO: 13845 - DNA, 20 bp, synthetic construct
  source 1..20: mol_type = other DNA
cacagtgtttgatgtatgcc

SEQ ID NO: 13846 - DNA, 20 bp, synthetic construct
  source 1..20: mol_type = other DNA
cttcaataactgatccagag

SEQ ID NO: 13847 - DNA, 20 bp, synthetic construct
  source 1..20: mol_type = other DNA
cgaccatatctgaacgaggg

SEQ ID NO: 13848 - DNA, 20 bp, synthetic construct
  source 1..20: mol_type = other DNA
cgtagatgctctaggtgtgg

SEQ ID NO: 13849 - DNA, 20 bp, synthetic construct
  source 1..20: mol_type = other DNA
aaccctgtctcctcactgac

SEQ ID NO: 13850 - DNA, 20 bp, synthetic construct
  source 1..20: mol_type = other DNA
gtaggttaccgatggaaacc

SEQ ID NO: 13851 - DNA, 20 bp, synthetic construct
  source 1..20: mol_type = other DNA
gaagatagccggcagaatag

SEQ ID NO: 13852 - DNA, 20 bp, synthetic construct
  source 1..20: mol_type = other DNA
agtcacctatagtgcaaagt

SEQ ID NO: 13853 - DNA, 20 bp, synthetic construct
  source 1..20: mol_type = other DNA
tattcatagttgccctcgct

SEQ ID NO: 13854 - DNA, 20 bp, synthetic construct
  source 1..20: mol_type = other DNA
taccagcgaaacactatgag

SEQ ID NO: 13855 - DNA, 20 bp, synthetic construct
  source 1..20: mol_type = other DNA
cggagttgcttcaattgtta

SEQ ID NO: 13856 - DNA, 20 bp, synthetic construct
  source 1..20: mol_type = other DNA
acgtcgcggacagctacaga

SEQ ID NO: 13857 - DNA, 20 bp, synthetic construct
  source 1..20: mol_type = other DNA
atgtgtgtcgcgtccgttcg

SEQ ID NO: 13858 - DNA, 20 bp, synthetic construct
  source 1..20: mol_type = other DNA
acactttgctctggtgccca

SEQ ID NO: 13859 - DNA, 20 bp, synthetic construct
  source 1..20: mol_type = other DNA
acgcgatcgagccactacct

SEQ ID NO: 13860 - DNA, 20 bp, synthetic construct
  source 1..20: mol_type = other DNA
atcctggaaggcccagctgt

SEQ ID NO: 13861 - DNA, 20 bp, synthetic construct
  source 1..20: mol_type = other DNA
agatcgtcattaaactcctc

SEQ ID NO: 13862 - DNA, 20 bp, synthetic construct
  source 1..20: mol_type = other DNA
gcagagttatccgcgttctg

SEQ ID NO: 13863 - DNA, 20 bp, synthetic construct
  source 1..20: mol_type = other DNA
atgcccgtttgaggatactg

SEQ ID NO: 13864 - DNA, 20 bp, synthetic construct
  source 1..20: mol_type = other DNA
gtcactaaagacgccctggc

SEQ ID NO: 13865 - DNA, 20 bp, synthetic construct
  source 1..20: mol_type = other DNA
cagccgcatagattctctct

SEQ ID NO: 13866 - DNA, 20 bp, synthetic construct
  source 1..20: mol_type = other DNA
atcaggacctcgcatgtcct

SEQ ID NO: 13867 - DNA, 20 bp, synthetic construct
  source 1..20: mol_type = other DNA
atacctgccagctaatcttt

SEQ ID NO: 13868 - DNA, 20 bp, synthetic construct
  source 1..20: mol_type = other DNA
tcacgcgttaatttgacggc

SEQ ID NO: 13869 - DNA, 20 bp, synthetic construct
  source 1..20: mol_type = other DNA
tagatctggaggtccttaca

SEQ ID NO: 13870 - DNA, 20 bp, synthetic construct
  source 1..20: mol_type = other DNA
ttccgtacgggacagatcgc

SEQ ID NO: 13871 - DNA, 20 bp, synthetic construct
  source 1..20: mol_type = other DNA
atttaagtacctgtatacct

SEQ ID NO: 13872 - DNA, 20 bp, synthetic construct
  source 1..20: mol_type = other DNA
cccaacccactgaccactat

SEQ ID NO: 13873 - DNA, 20 bp, synthetic construct
  source 1..20: mol_type = other DNA
catctgttatgtggttgcaa

SEQ ID NO: 13874 - DNA, 20 bp, synthetic construct
  source 1..20: mol_type = other DNA
gcgacgacttatgcactcga

SEQ ID NO: 13875 - DNA, 20 bp, synthetic construct
  source 1..20: mol_type = other DNA
tccgtccactcgaactaatt

SEQ ID NO: 13876 - DNA, 20 bp, synthetic construct
  source 1..20: mol_type = other DNA
tgccgcagctcaacacatgt

SEQ ID NO: 13877 - DNA, 20 bp, synthetic construct
  source 1..20: mol_type = other DNA
cttcactagtgcacttcgag

SEQ ID NO: 13878 - DNA, 20 bp, synthetic construct
  source 1..20: mol_type = other DNA
atggcagcacagatgggtgt

SEQ ID NO: 13879 - DNA, 20 bp, synthetic construct
  source 1..20: mol_type = other DNA
gccctcgcatttaatcttcc

SEQ ID NO: 13880 - DNA, 20 bp, synthetic construct
  source 1..20: mol_type = other DNA
ctagcaccttatcagttcgc

SEQ ID NO: 13881 - DNA, 20 bp, synthetic construct
  source 1..20: mol_type = other DNA
ccctcgcatgtgttatggac

SEQ ID NO: 13882 - DNA, 20 bp, synthetic construct
  source 1..20: mol_type = other DNA
cagacagtggagtcaagctc

SEQ ID NO: 13883 - DNA, 20 bp, synthetic construct
  source 1..20: mol_type = other DNA
ctgttggaacttcgccctga

SEQ ID NO: 13884 - DNA, 20 bp, synthetic construct
  source 1..20: mol_type = other DNA
ttagtccgtaccgcgcgtcg

SEQ ID NO: 13885 - DNA, 20 bp, synthetic construct
  source 1..20: mol_type = other DNA
gagcatctttatggccagaa

SEQ ID NO: 13886 - DNA, 20 bp, synthetic construct
  source 1..20: mol_type = other DNA
tgcaccctgtttgtctaaat

SEQ ID NO: 13887 - DNA, 20 bp, synthetic construct
  source 1..20: mol_type = other DNA
tacggatttcgagtgcgacc

SEQ ID NO: 13888 - DNA, 20 bp, synthetic construct
  source 1..20: mol_type = other DNA
accaatatatcagtgcttca

SEQ ID NO: 13889 - DNA, 20 bp, synthetic construct
  source 1..20: mol_type = other DNA
ttgctttcgcaagttgcgta

SEQ ID NO: 13890 - DNA, 20 bp, synthetic construct
  source 1..20: mol_type = other DNA
tcagcggtgacgtcaacagg

SEQ ID NO: 13891 - DNA, 20 bp, synthetic construct
  source 1..20: mol_type = other DNA
gttgttcttgagaagatgat

SEQ ID NO: 13892 - DNA, 20 bp, synthetic construct
  source 1..20: mol_type = other DNA
gttcgtgaacatagtgcctc

SEQ ID NO: 13893 - DNA, 20 bp, synthetic construct
  source 1..20: mol_type = other DNA
agccaactcatttaatcttc

SEQ ID NO: 13894 - DNA, 20 bp, synthetic construct
  source 1..20: mol_type = other DNA
gacggaggtgtgcgctgtgt

SEQ ID NO: 13895 - DNA, 20 bp, synthetic construct
  source 1..20: mol_type = other DNA
gacttacgttgtcatctccc

SEQ ID NO: 13896 - DNA, 20 bp, synthetic construct
  source 1..20: mol_type = other DNA
aacgattcaacctctggcga

SEQ ID NO: 13897 - DNA, 20 bp, synthetic construct
  source 1..20: mol_type = other DNA
gcatccagcccataacgctt

SEQ ID NO: 13898 - DNA, 20 bp, synthetic construct
  source 1..20: mol_type = other DNA
cggagctaacaacgtgccgt

SEQ ID NO: 13899 - DNA, 20 bp, synthetic construct
  source 1..20: mol_type = other DNA
gaggagtcataagcgtgagt

SEQ ID NO: 13900 - DNA, 20 bp, synthetic construct
  source 1..20: mol_type = other DNA
tctcgtacacctgttggcaa

SEQ ID NO: 13901 - DNA, 20 bp, synthetic construct
  source 1..20: mol_type = other DNA
agaccactagtgtattaccc

SEQ ID NO: 13902 - DNA, 20 bp, synthetic construct
  source 1..20: mol_type = other DNA
aacgggattggcagagcact

SEQ ID NO: 13903 - DNA, 20 bp, synthetic construct
  source 1..20: mol_type = other DNA
tctacgggcgttacaaactt

SEQ ID NO: 13904 - DNA, 20 bp, synthetic construct
  source 1..20: mol_type = other DNA
agcctgacagtagtttcgtt

SEQ ID NO: 13905 - DNA, 20 bp, synthetic construct
  source 1..20: mol_type = other DNA
cacgcacaatctaagccgat

SEQ ID NO: 13906 - DNA, 20 bp, synthetic construct
  source 1..20: mol_type = other DNA
taaggatgagagtaacgcat

SEQ ID NO: 13907 - DNA, 20 bp, synthetic construct
  source 1..20: mol_type = other DNA
gctggtgctacaacgattgt

SEQ ID NO: 13908 - DNA, 20 bp, synthetic construct
  source 1..20: mol_type = other DNA
aaattcctcctttgaggcga

SEQ ID NO: 13909 - DNA, 20 bp, synthetic construct
  source 1..20: mol_type = other DNA
cctactgctcctggccaagg

SEQ ID NO: 13910 - DNA, 20 bp, synthetic construct
  source 1..20: mol_type = other DNA
tgttgagtggtattactctc

SEQ ID NO: 13911 - DNA, 20 bp, synthetic construct
  source 1..20: mol_type = other DNA
tatcaatcctaacgccacac

SEQ ID NO: 13912 - DNA, 20 bp, synthetic construct
  source 1..20: mol_type = other DNA
ctaagaagctggagcgatag

SEQ ID NO: 13913 - DNA, 20 bp, synthetic construct
  source 1..20: mol_type = other DNA
ctagtaaccaccctccacga

SEQ ID NO: 13914 - DNA, 20 bp, synthetic construct
  source 1..20: mol_type = other DNA
gctggtctccttcactcctc

SEQ ID NO: 13915 - DNA, 20 bp, synthetic construct
  source 1..20: mol_type = other DNA
cccgattctataggcgctct

SEQ ID NO: 13916 - DNA, 20 bp, synthetic construct
  source 1..20: mol_type = other DNA
ccagagctacagagttagtt

SEQ ID NO: 13917 - DNA, 20 bp, synthetic construct
  source 1..20: mol_type = other DNA
ggatagatcacaagactcta

SEQ ID NO: 13918 - DNA, 20 bp, synthetic construct
  source 1..20: mol_type = other DNA
aatacagtgttgctttcgat

SEQ ID NO: 13919 - DNA, 20 bp, synthetic construct
  source 1..20: mol_type = other DNA
gttcctaacgacccagggct

SEQ ID NO: 13920 - DNA, 20 bp, synthetic construct
  source 1..20: mol_type = other DNA
aggcaatcgatacgaacagg

SEQ ID NO: 13921 - DNA, 20 bp, synthetic construct
  source 1..20: mol_type = other DNA
tcctttagcacaggagctca

SEQ ID NO: 13922 - DNA, 20 bp, synthetic construct
  source 1..20: mol_type = other DNA
tcgtcaacttcccagaagat

SEQ ID NO: 13923 - DNA, 20 bp, synthetic construct
  source 1..20: mol_type = other DNA
ttggtagccaggctagcact

SEQ ID NO: 13924 - DNA, 20 bp, synthetic construct
  source 1..20: mol_type = other DNA
gtcatgtgctctcattcatt

SEQ ID NO: 13925 - DNA, 20 bp, synthetic construct
  source 1..20: mol_type = other DNA
acggcatcctggatagtatc

SEQ ID NO: 13926 - DNA, 20 bp, synthetic construct
  source 1..20: mol_type = other DNA
gcgtcagtcacattcctacc

SEQ ID NO: 13927 - DNA, 20 bp, synthetic construct
  source 1..20: mol_type = other DNA
atagtccgacttgagttgat

SEQ ID NO: 13928 - DNA, 20 bp, synthetic construct
  source 1..20: mol_type = other DNA
tccactgcgcgccaacaacg

SEQ ID NO: 13929 - DNA, 20 bp, synthetic construct
  source 1..20: mol_type = other DNA
tgatacggatagtctggtga

SEQ ID NO: 13930 - DNA, 20 bp, synthetic construct
  source 1..20: mol_type = other DNA
cctatcttcgttgccctgcc

SEQ ID NO: 13931 - DNA, 20 bp, synthetic construct
  source 1..20: mol_type = other DNA
tctattacctcgtaccgtgc

SEQ ID NO: 13932 - DNA, 20 bp, synthetic construct
  source 1..20: mol_type = other DNA
caaaccaactactccgagat

SEQ ID NO: 13933 - DNA, 20 bp, synthetic construct
  source 1..20: mol_type = other DNA
ttataggaaagatcagtatc

SEQ ID NO: 13934 - DNA, 20 bp, synthetic construct
  source 1..20: mol_type = other DNA
tgtgcctcacttgctcagac

SEQ ID NO: 13935 - DNA, 20 bp, synthetic construct
  source 1..20: mol_type = other DNA
aggactagtcgctgtccgat

SEQ ID NO: 13936 - DNA, 20 bp, synthetic construct
  source 1..20: mol_type = other DNA
ccgttctttatctgcagatg

SEQ ID NO: 13937 - DNA, 20 bp, synthetic construct
  source 1..20: mol_type = other DNA
tctggtgggtcctaggctcg

SEQ ID NO: 13938 - DNA, 20 bp, synthetic construct
  source 1..20: mol_type = other DNA
aagggtgggcggtgttgata

SEQ ID NO: 13939 - DNA, 20 bp, synthetic construct
  source 1..20: mol_type = other DNA
gataatgggaacgagtaatc

SEQ ID NO: 13940 - DNA, 20 bp, synthetic construct
  source 1..20: mol_type = other DNA
acggacttggcggcttaata

SEQ ID NO: 13941 - DNA, 20 bp, synthetic construct
  source 1..20: mol_type = other DNA
cgtgaacttcagatttaaag

SEQ ID NO: 13942 - DNA, 20 bp, synthetic construct
  source 1..20: mol_type = other DNA
gtagatgattacaggctagt

SEQ ID NO: 13943 - DNA, 20 bp, synthetic construct
  source 1..20: mol_type = other DNA
cctgaagccaagcagagaag

SEQ ID NO: 13944 - DNA, 20 bp, synthetic construct
  source 1..20: mol_type = other DNA
atgtagaagtttgctacttc

SEQ ID NO: 13945 - DNA, 20 bp, synthetic construct
  source 1..20: mol_type = other DNA
agtttaggccggaatgtcaa

SEQ ID NO: 13946 - DNA, 20 bp, synthetic construct
  source 1..20: mol_type = other DNA
gactgattccgccagaggta

SEQ ID NO: 13947 - DNA, 20 bp, synthetic construct
  source 1..20: mol_type = other DNA
ttgttatagaaagttcggcc

SEQ ID NO: 13948 - DNA, 20 bp, synthetic construct
  source 1..20: mol_type = other DNA
gaacgaggcgtctgtatgaa

SEQ ID NO: 13949 - DNA, 20 bp, synthetic construct
  source 1..20: mol_type = other DNA
tactaggaactacaagtccc

SEQ ID NO: 13950 - DNA, 20 bp, synthetic construct
  source 1..20: mol_type = other DNA
gtacgtataggttcctgctg

SEQ ID NO: 13951 - DNA, 20 bp, synthetic construct
  source 1..20: mol_type = other DNA
ctcttacgtctagggcaaat

SEQ ID NO: 13952 - DNA, 20 bp, synthetic construct
  source 1..20: mol_type = other DNA
aaccaatcagtgagacccag

SEQ ID NO: 13953 - DNA, 20 bp, synthetic construct
  source 1..20: mol_type = other DNA
ttgatagatcacactgggac

SEQ ID NO: 13954 - DNA, 20 bp, synthetic construct
  source 1..20: mol_type = other DNA
tcggcgctgcgagaatcttc

SEQ ID NO: 13955 - DNA, 20 bp, synthetic construct
  source 1..20: mol_type = other DNA
gcagaagcctcacggtttct

SEQ ID NO: 13956 - DNA, 20 bp, synthetic construct
  source 1..20: mol_type = other DNA
acggccttctcctagtgaca

SEQ ID NO: 13957 - DNA, 20 bp, synthetic construct
  source 1..20: mol_type = other DNA
ccaagttggcacagacgaag

SEQ ID NO: 13958 - DNA, 20 bp, synthetic construct
  source 1..20: mol_type = other DNA
ttctcatcgcataacctagc

SEQ ID NO: 13959 - DNA, 20 bp, synthetic construct
  source 1..20: mol_type = other DNA
atcacatccgtcgtaagcat

SEQ ID NO: 13960 - DNA, 20 bp, synthetic construct
  source 1..20: mol_type = other DNA
gagagctgattgatccagcc

SEQ ID NO: 13961 - DNA, 20 bp, synthetic construct
  source 1..20: mol_type = other DNA
gggcgacctctttgaaggcc

SEQ ID NO: 13962 - DNA, 20 bp, synthetic construct
  source 1..20: mol_type = other DNA
cacactgcctcagagtcctc

SEQ ID NO: 13963 - DNA, 20 bp, synthetic construct
  source 1..20: mol_type = other DNA
cataagattcgcatctcatc

SEQ ID NO: 13964 - DNA, 20 bp, synthetic construct
  source 1..20: mol_type = other DNA
ggtgtacaggtaatcgtctt

SEQ ID NO: 13965 - DNA, 20 bp, synthetic construct
  source 1..20: mol_type = other DNA
cattgcgaaggcatgaagcc

SEQ ID NO: 13966 - DNA, 20 bp, synthetic construct
  source 1..20: mol_type = other DNA
gcccaaagtgcggtagaccg

SEQ ID NO: 13967 - DNA, 20 bp, synthetic construct
  source 1..20: mol_type = other DNA
agtacgcgatcgtgggagtt

SEQ ID NO: 13968 - DNA, 20 bp, synthetic construct
  source 1..20: mol_type = other DNA
ccatggtctctcgtacctta

SEQ ID NO: 13969 - DNA, 20 bp, synthetic construct
  source 1..20: mol_type = other DNA
gcaggtcagtcaagtaacag

SEQ ID NO: 13970 - DNA, 20 bp, synthetic construct
  source 1..20: mol_type = other DNA
gctggtatgtacggtcggtc

SEQ ID NO: 13971 - DNA, 20 bp, synthetic construct
  source 1..20: mol_type = other DNA
gaccttgctagcctgtattg

SEQ ID NO: 13972 - DNA, 20 bp, synthetic construct
  source 1..20: mol_type = other DNA
acgtcaaaggcgctggaagg

SEQ ID NO: 13973 - DNA, 20 bp, synthetic construct
  source 1..20: mol_type = other DNA
gcgtgagcttgcattgaaac

SEQ ID NO: 13974 - DNA, 20 bp, synthetic construct
  source 1..20: mol_type = other DNA
tcgaaccaatgcattctctc

SEQ ID NO: 13975 - DNA, 20 bp, synthetic construct
  source 1..20: mol_type = other DNA
tagattgtggttcccattac

SEQ ID NO: 13976 - DNA, 20 bp, synthetic construct
  source 1..20: mol_type = other DNA
agtacgtaagcgatcctgtt

SEQ ID NO: 13977 - DNA, 20 bp, synthetic construct
  source 1..20: mol_type = other DNA
ctatcacacgcataacggcc

SEQ ID NO: 13978 - DNA, 20 bp, synthetic construct
  source 1..20: mol_type = other DNA
gaataatgcgcggacccaga

SEQ ID NO: 13979 - DNA, 20 bp, synthetic construct
  source 1..20: mol_type = other DNA
gcgattcccgatgagctgta

SEQ ID NO: 13980 - DNA, 20 bp, synthetic construct
  source 1..20: mol_type = other DNA
tcgaagtctgacgtgatatt

SEQ ID NO: 13981 - DNA, 20 bp, synthetic construct
  source 1..20: mol_type = other DNA
agagtggtccacccgctaag

SEQ ID NO: 13982 - DNA, 20 bp, synthetic construct
  source 1..20: mol_type = other DNA
ataatcagcttgtaccgaac

SEQ ID NO: 13983 - DNA, 20 bp, synthetic construct
  source 1..20: mol_type = other DNA
tagtgatgcgttgtggagaa

SEQ ID NO: 13984 - DNA, 20 bp, synthetic construct
  source 1..20: mol_type = other DNA
attgctaagatccgagtata

SEQ ID NO: 13985 - DNA, 20 bp, synthetic construct
  source 1..20: mol_type = other DNA
tggaaatttaccggctctcc

SEQ ID NO: 13986 - DNA, 20 bp, synthetic construct
  source 1..20: mol_type = other DNA
tcagataaatactagtgagg

SEQ ID NO: 13987 - DNA, 20 bp, synthetic construct
  source 1..20: mol_type = other DNA
catcgataaggcagggagtg

SEQ ID NO: 13988 - DNA, 20 bp, synthetic construct
  source 1..20: mol_type = other DNA
tagagcggaacacaagtgat

SEQ ID NO: 13989 - DNA, 20 bp, synthetic construct
  source 1..20: mol_type = other DNA
tagtcctcgacgcgggttcg

SEQ ID NO: 13990 - DNA, 20 bp, synthetic construct
  source 1..20: mol_type = other DNA
gctgtgactgagtaggtcgg

SEQ ID NO: 13991 - DNA, 20 bp, synthetic construct
  source 1..20: mol_type = other DNA
gtgcacgactcagcaaacgg

SEQ ID NO: 13992 - DNA, 20 bp, synthetic construct
  source 1..20: mol_type = other DNA
atgaaccatggaaggcgctg

SEQ ID NO: 13993 - DNA, 20 bp, synthetic construct
  source 1..20: mol_type = other DNA
tatgatccacctcaccacca

SEQ ID NO: 13994 - DNA, 20 bp, synthetic construct
  source 1..20: mol_type = other DNA
caacaggacatacgatgccg

SEQ ID NO: 13995 - DNA, 20 bp, synthetic construct
  source 1..20: mol_type = other DNA
cagtaaatatgtctacactg

SEQ ID NO: 13996 - DNA, 20 bp, synthetic construct
  source 1..20: mol_type = other DNA
aatttggacgatggaagcaa

SEQ ID NO: 13997 - DNA, 20 bp, synthetic construct
  source 1..20: mol_type = other DNA
agccgactggtgttgcaaat

SEQ ID NO: 13998 - DNA, 20 bp, synthetic construct
  source 1..20: mol_type = other DNA
cgtactaggctagtcttata

SEQ ID NO: 13999 - DNA, 20 bp, synthetic construct
  source 1..20: mol_type = other DNA
gctgttcttccgagtaccgg

SEQ ID NO: 14000 - DNA, 20 bp, synthetic construct
  source 1..20: mol_type = other DNA
agaggctctgaatgtaggtc

SEQ ID NO: 14001 - DNA, 20 bp, synthetic construct
  source 1..20: mol_type = other DNA
gactgaccgagatcgaaccg

SEQ ID NO: 14002 - DNA, 20 bp, synthetic construct
  source 1..20: mol_type = other DNA
caccagcgttactaacgttt

SEQ ID NO: 14003 - DNA, 20 bp, synthetic construct
  source 1..20: mol_type = other DNA
acacccagtgtatgtccagg

SEQ ID NO: 14004 - DNA, 20 bp, synthetic construct
  source 1..20: mol_type = other DNA
tttcacgacaatgcgccttg

SEQ ID NO: 14005 - DNA, 20 bp, synthetic construct
  source 1..20: mol_type = other DNA
gcggcgacgcgttctgcaaa

SEQ ID NO: 14006 - DNA, 20 bp, synthetic construct
  source 1..20: mol_type = other DNA
gaagaaacggcgacgtgaag

SEQ ID NO: 14007 - DNA, 20 bp, synthetic construct
  source 1..20: mol_type = other DNA
tgcagtacgctaggaggacg

SEQ ID NO: 14008 - DNA, 20 bp, synthetic construct
  source 1..20: mol_type = other DNA
ctgagctccgctgttcttca

SEQ ID NO: 14009 - DNA, 20 bp, synthetic construct
  source 1..20: mol_type = other DNA
atgatcgaatggtactagcg

SEQ ID NO: 14010 - DNA, 20 bp, synthetic construct
  source 1..20: mol_type = other DNA
tcgaatattccgtggtttgg

SEQ ID NO: 14011 - DNA, 20 bp, synthetic construct
  source 1..20: mol_type = other DNA
tgggctcgtcgtctacctca

SEQ ID NO: 14012 - DNA, 20 bp, synthetic construct
  source 1..20: mol_type = other DNA
cgtgaactggctagcgcggt

SEQ ID NO: 14013 - DNA, 20 bp, synthetic construct
  source 1..20: mol_type = other DNA
ttctgctctacatgacgatc

SEQ ID NO: 14014 - DNA, 20 bp, synthetic construct
  source 1..20: mol_type = other DNA
ctttaggcttggtgcccata

SEQ ID NO: 14015 - DNA, 20 bp, synthetic construct
  source 1..20: mol_type = other DNA
tggatataaggcatccttcg

SEQ ID NO: 14016 - DNA, 20 bp, synthetic construct
  source 1..20: mol_type = other DNA
gttaatcggtatcctgggag

SEQ ID NO: 14017 - DNA, 20 bp, synthetic construct
  source 1..20: mol_type = other DNA
gagttcgagaggcgcagcca

SEQ ID NO: 14018 - DNA, 20 bp, synthetic construct
  source 1..20: mol_type = other DNA
gtgtactcacgcgcgctata

SEQ ID NO: 14019 - DNA, 20 bp, synthetic construct
  source 1..20: mol_type = other DNA
taactattacgtacacgcgc

SEQ ID NO: 14020 - DNA, 20 bp, synthetic construct
  source 1..20: mol_type = other DNA
gctcaaacaggtgcttcggg

SEQ ID NO: 14021 - DNA, 20 bp, synthetic construct
  source 1..20: mol_type = other DNA
acatgctagttcgacgccag

SEQ ID NO: 14022 - DNA, 20 bp, synthetic construct
  source 1..20: mol_type = other DNA
tcttacgccgatctttcgtc

SEQ ID NO: 14023 - DNA, 20 bp, synthetic construct
  source 1..20: mol_type = other DNA
cttagtagcctacattacga

SEQ ID NO: 14024 - DNA, 20 bp, synthetic construct
  source 1..20: mol_type = other DNA
ctatggtagtgtgcttagag

SEQ ID NO: 14025 - DNA, 20 bp, synthetic construct
  source 1..20: mol_type = other DNA
cactctctggatgtactccc

SEQ ID NO: 14026 - DNA, 20 bp, synthetic construct
  source 1..20: mol_type = other DNA
ataagcaaggccactcgctc

SEQ ID NO: 14027 - DNA, 20 bp, synthetic construct
  source 1..20: mol_type = other DNA
ttccggccagactaggaaat

SEQ ID NO: 14028 - DNA, 20 bp, synthetic construct
  source 1..20: mol_type = other DNA
ccattaaggatctcggacct

SEQ ID NO: 14029 - DNA, 20 bp, synthetic construct
  source 1..20: mol_type = other DNA
atgatcataaacgcagctaa

SEQ ID NO: 14030 - DNA, 20 bp, synthetic construct
  source 1..20: mol_type = other DNA
ttcttcatgctcctccgggc

SEQ ID NO: 14031 - DNA, 20 bp, synthetic construct
  source 1..20: mol_type = other DNA
tgatctaacttcctgagcgt

SEQ ID NO: 14032 - DNA, 20 bp, synthetic construct
  source 1..20: mol_type = other DNA
acatttgtccagtgattctt

SEQ ID NO: 14033 - DNA, 20 bp, synthetic construct
  source 1..20: mol_type = other DNA
catccgcaaccctggcggag

SEQ ID NO: 14034 - DNA, 20 bp, synthetic construct
  source 1..20: mol_type = other DNA
caacatccggtcagcagcac

SEQ ID NO: 14035 - DNA, 20 bp, synthetic construct
  source 1..20: mol_type = other DNA
cctcacgtgtgtgctaaaca

SEQ ID NO: 14036 - DNA, 20 bp, synthetic construct
  source 1..20: mol_type = other DNA
cgatacgggcatgctgctga

SEQ ID NO: 14037 - DNA, 20 bp, synthetic construct
  source 1..20: mol_type = other DNA
ttcgccacccgtggcgtgct

SEQ ID NO: 14038 - DNA, 20 bp, synthetic construct
  source 1..20: mol_type = other DNA
agtccagtttaccggcgtat

SEQ ID NO: 14039 - DNA, 20 bp, synthetic construct
  source 1..20: mol_type = other DNA
tatcaactaagcacttcaga

SEQ ID NO: 14040 - DNA, 20 bp, synthetic construct
  source 1..20: mol_type = other DNA
ttggtataattgtacgcgac

SEQ ID NO: 14041 - DNA, 20 bp, synthetic construct
  source 1..20: mol_type = other DNA
acatgttgggtccattctgg

SEQ ID NO: 14042 - DNA, 20 bp, synthetic construct
  source 1..20: mol_type = other DNA
tagggcttaaaggtcagccg

SEQ ID NO: 14043 - DNA, 20 bp, synthetic construct
  source 1..20: mol_type = other DNA
tgtaccgcttcgagttcggt

SEQ ID NO: 14044 - DNA, 20 bp, synthetic construct
  source 1..20: mol_type = other DNA
ttacgtattctctaggcttt

SEQ ID NO: 14045 - DNA, 20 bp, synthetic construct
  source 1..20: mol_type = other DNA
tttccgtcactgctgttcac

SEQ ID NO: 14046 - DNA, 20 bp, synthetic construct
  source 1..20: mol_type = other DNA
atgtttaccatactgctact

SEQ ID NO: 14047 - DNA, 20 bp, synthetic construct
  source 1..20: mol_type = other DNA
cctgtttgatctgggcggct

SEQ ID NO: 14048 - DNA, 20 bp, synthetic construct
  source 1..20: mol_type = other DNA
ggtctcggaagtcactagac

SEQ ID NO: 14049 - DNA, 20 bp, synthetic construct
  source 1..20: mol_type = other DNA
acttctctcccactgaatat

SEQ ID NO: 14050 - DNA, 20 bp, synthetic construct
  source 1..20: mol_type = other DNA
cgtcgtcagtttgttaatcc

SEQ ID NO: 14051 - DNA, 20 bp, synthetic construct
  source 1..20: mol_type = other DNA
tggtttagtttccatcttct

SEQ ID NO: 14052 - DNA, 20 bp, synthetic construct
  source 1..20: mol_type = other DNA
gcagtagcgacaaaggtttg

SEQ ID NO: 14053 - DNA, 20 bp, synthetic construct
  source 1..20: mol_type = other DNA
ctttgggtaggaatcggtcg

SEQ ID NO: 14054 - DNA, 20 bp, synthetic construct
  source 1..20: mol_type = other DNA
gcctgctccgtggaattaga

SEQ ID NO: 14055 - DNA, 20 bp, synthetic construct
  source 1..20: mol_type = other DNA
acactccgcgaatttctgct

SEQ ID NO: 14056 - DNA, 20 bp, synthetic construct
  source 1..20: mol_type = other DNA
tggcgcatcacgttgtgata

SEQ ID NO: 14057 - DNA, 20 bp, synthetic construct
  source 1..20: mol_type = other DNA
tctatcacaaatcaacatgc

SEQ ID NO: 14058 - DNA, 20 bp, synthetic construct
  source 1..20: mol_type = other DNA
tgtataaacgacctcgaatc

SEQ ID NO: 14059 - DNA, 20 bp, synthetic construct
  source 1..20: mol_type = other DNA
ctaccatgaaagcactccga

SEQ ID NO: 14060 - DNA, 20 bp, synthetic construct
  source 1..20: mol_type = other DNA
gcttctgtccctagtgattc

SEQ ID NO: 14061 - DNA, 20 bp, synthetic construct
  source 1..20: mol_type = other DNA
ggtcccgaactcgattgagg

SEQ ID NO: 14062 - DNA, 20 bp, synthetic construct
  source 1..20: mol_type = other DNA
cgggatagttacagtggaat

SEQ ID NO: 14063 - DNA, 20 bp, synthetic construct
  source 1..20: mol_type = other DNA
tcactcgtccgaagcggctc

SEQ ID NO: 14064 - DNA, 20 bp, synthetic construct
  source 1..20: mol_type = other DNA
aactgtgataggcgaacgga

SEQ ID NO: 14065 - DNA, 20 bp, synthetic construct
  source 1..20: mol_type = other DNA
gatggtcgcttgttgatgca

SEQ ID NO: 14066 - DNA, 20 bp, synthetic construct
  source 1..20: mol_type = other DNA
gcattcactaggctagagtg

SEQ ID NO: 14067 - DNA, 1000 bp, synthetic construct; identical to SEQ ID NO: 2573
  source 1..1000: mol_type = other DNA

SEQ ID NO: 14068 - DNA, 1000 bp, synthetic construct; identical to SEQ ID NO: 2574
  source 1..1000: mol_type = other DNA

SEQ ID NO: 14069 - DNA, 1000 bp, synthetic construct; identical to SEQ ID NO: 2575
  source 1..1000: mol_type = other DNA

SEQ ID NO: 14070 - DNA, 501 bp, synthetic construct
  source 1..501: mol_type = other DNA
ctgcgctggtctgcttctagtttctccctgagagagttaatctgtggaacccgggatttcctgaggcgtgcacacgacagtgttgtgcagcttacatcttgcataagatgctgtcgtgcttattttgagcgaatgaaactcctcaattctgcagaagaagaagggggatcctaggtttcaacttgttactctctcagaggaatagtttgttttatttttttagtttcattgtttttatatacatgtttatatgtgtgtttgtttgttacatatattttattttatatatatgcacatgtttttttgatgttggtcaggtttgtttggcaattcggagctctatacactcatcttccatgattctaaattctctgtagaaattcacaatacgtgtgtatatatgtatatatttgatactgaactgctctacaaggagtttatcacaaattgagaagtggtatccttttttagaaaaacccgctagttactattcaaatcaaa

SEQ ID NO: 14071 - DNA, 447 bp, synthetic construct
  source 1..447: mol_type = other DNA
acaagaactttcgactgtatatatatttttagaaaaacccgttagttacccatcaaagtcattgctatcttcttaacccggttgctgtgttagctttgtacaaattgtaacgagctctcgaatactgtacagaacacaggtacataaatatatatatacacccatacataaatatttttccagcacacttcgaacctaattacttctttcactttcaacttttaattttgattttaatttttgatttttaattttaagcttaattttaactttaactttaattttagctttaattccaattttaatttcaatcttccaccttaactctagctctgatcactatatctctgtcgtgcttttgttgtctgcttccagcctcactgtccttctaggaaagatttctcccgggctataaacaaatcaatcaccccatttccaatctcctag

SEQ ID NO: 14072 - DNA, 304 bp, synthetic construct
  source 1..304: mol_type = other DNA
ttgtaagggtaaaaaaggtaaccggcactcctgttataaaaacccgatagtaacgctcaactcaaatcgctgaaccaatctcagagaggacaaagagtgagattttcctcaaggagagagaagaggagaaaaggtcaaaagaaagaaaaaatagaaagggtaaacagggaacaagagggtgaagagagagagaactagtagtaccaaaaatgacagattacgtcacatgcaccctctgtgggaccaaaatccctgtgattgttgtccccctcggcacactcgaaagagcggttcagtgtaacgt

SEQ ID NO: 14073 - DNA, 493 bp, synthetic construct
  source 1..493: mol_type = other DNA
ctgcgctggtctgcttctagtttctccctgagagagttaatctgtggaacccgggatttcctgaggcgtgcacacgacagtgttgtgcagcttacatcttgcataagatgctgtcgtgcttattttgagcgaatgaaactcctcaattctgccgaagaagggggatcctaggtttcaactagttactctctcagaggaatagtttggtttatttgttagtttcattgtttttatatacatgtttatatgtgtgtttgtttgttacatatattttattttatatatatgcacatgtttttttgatgttggtcaggtttggcaattcggagctctatacactcatcttccatgattctaaattctctgtagaaattcacatatacgtgtgtatatatgcatattttgatactgaactgctctacaaggagtttatcacaaattgagaagtggtatctttttttagaaaaacccgctagttactattcaaatcaaa

SEQ ID NO: 14074 - DNA, 445 bp, synthetic construct
  source 1..445: mol_type = other DNA
acaagaactttcgactgtatatatatttagaaaaacccgttagttacccatcaaagtcattgctatcttcttaacccggttgctgtgttagctttgtacaaattgtaacgagctctcgaatactgtacagaacacaggtacataaatatatatatacacccatacataaatatttttccagcacacttcgaacctaattacttctttcactttcaacttttaattttgattttaatttttgatttttaattttaagcttaattttaactttaactttaattttagctttaattccaattttaatttcaatcttccaccttaactctagctctgatcactatatctctgtcgtgcttttgttgtctgcttccagcctcactgtccttctaggaaagatttctcccgggctataaacaaatcaatcaccccatttccaatctcctag

SEQ ID NO: 14075 - DNA, 400 bp, synthetic construct
  source 1..400: mol_type = other DNA
ttgtaaggggaaaaaaataaccggcactcctgttataaaaacccgatagtaacgctcaactcaaatcgctgaaccaatctcagagaggacaaagagtgagattttcctcaaggagagagaagaggagaaaaggtcaaaagaaagaaaaaatagaaagggtaaacagggaacaagagggtgaagagagagagaactagtagtaccaaaaatgacagattacgtcacatgcaccctctgtgggaccaaaatccctgtgattgttgtccccctcggcacactcgaaagagcggttcagtgtaacgtatgtgggcaaaactattcggtctctccaaagtgaactggtgcattgtagaagccactttagacatgcacatatgtatacatatgtgtatgtgtttat

SEQ ID NO: 14076 - DNA, 675 bp, synthetic construct; identical to SEQ ID NO: 2280
  source 1..675: mol_type = other DNA

SEQ ID NO: 14077 - DNA, 482 bp, synthetic construct
  source 1..482: mol_type = other DNA
ctgcgctggtctgcttctagtttctccctgagagagttaatcagtggaacccgggatctcctgaggcggacacacgacagcattgtgcagcttacatcttgcataagatgctgtcgtgcttattttgagcgaattaaactcctcaattctgccgaagcagggggatcctagatttcaactagttattctctcagaggaatagtttggtttattttgttagtttcattgtttttttatgcatagttctatgtgtgtttgtttgttatatatatacacatgtatttttgatgttggtcatggttgtctagcaattcggagccctatacactcatcttccctgattctaaattctctgtagaaattcacatatatgtgtatatgtatatatattttgatactgacctgctctacaaggagcttataacaaattgagaagtggcatatcttcttagaaaaacccgctagttactattcaaatcaaa

SEQ ID NO: 14078 - DNA, 438 bp, synthetic construct
  source 1..438: mol_type = other DNA
acaagaactttcgactgtatatatatttttagaaaaacccgttagttacccatcaaagttattattatcttctgaacccgattgctgtgttagctttgttatcgtaaagagccctcgcatactgtccagaacacaggtacataaatgtacacgcccatacatagatatttttccagcacactttgatcctaattacttcttttactttcaatttttgatttttatttttattttaatttttaattttaatcttaattttaacttgtaactttaattttagctttaattctaattttaatttgtcttccaccctaactctagctctgattactatatctctgtcgttctttcgttgtctgcttccatcctcactgcccttccaggaaagatttctcccgggtcatcaacaaatcaatcaccccatttacaatctcccag

SEQ ID NO: 14079 - DNA, 392 bp, synthetic construct
  source 1..392: mol_type = other DNA
ttgtaaaagaaaaaggataaccggcactcctgttataaaaacccgatagtaacgctcaactcaaatcgctgaaccaatctcagagaggacaaggagtgagattttcctcaaggagagagcagaggagaaaaggtcaaggggaagaagaaagaaacaaggaacaaagagggtgaaaagagagagaaccagtggtaccaaaaatgacagattacgtcacatgcaccctctgtgggaccaaaatccctgtgattgttgtccccctcggcacactcgaaagagcggttcagtgtaacgtatgcgggcaaaactattcggtctctccaaagtgaactggtgtattgtagaagccaccttagacatgtacatatgtatacacatgtgtatgtgtctat

SEQ ID NO: 14080 - DNA, 781 bp, synthetic construct; identical to SEQ ID NO: 2410
  source 1..781: mol_type = other DNA

SEQ ID NO: 14081 - DNA, 1000 bp, synthetic construct; identical to SEQ ID NO: 2576
  source 1..1000: mol_type = other DNA

SEQ ID NO: 14082 - DNA, 379 bp, synthetic construct
  source 1..379: mol_type = other DNA
tttgttcttggttagggaacagtctctccggcatacccgggggtgatagcatgcttgtgggtcttaattggctcgctgcttgtaggttaagtaaccttcttttcctccttttccactacactagtagtgacgataaaggttgctccttcctttcacttcagttattcttccgccgtcagcgaggaaacagttggttgcaataatcttggacttaagtgtttaagatctattgactgctgcgtacaacgttgaggtatcgtttgattgatttggattcttcccgcgctaaacggttaattttagtatcttgaagtggtagccccacaaatttcaaactagcgtgatttgagacgccctgagtggttaatcgcgtttaaaa

SEQ ID NO: 14083 - DNA, 505 bp, synthetic construct; identical to SEQ ID NO: 2033
  source 1..505: mol_type = other DNA

SEQ ID NO: 14084 - DNA, 603 bp, synthetic construct; identical to SEQ ID NO: 2171
  source 1..603: mol_type = other DNA

SEQ ID NO: 14085 - DNA, 917 bp, synthetic construct
  source 1..917: mol_type = other DNA
gtgtaaacactgatcggttataaaaggaggaaggctctatacctccttttaaaaccgatcagtgtttacaccttttctccggaattgtcgagaggcgagatggtatttatatcattagcaaaaattaggttctacaaaatttaatttaagaaagtggaagtagaatttttctagtcaattattatttgaaatgatttaattcaagaaattattttgggaataattttgttcaattaataatctaattttaagtaaaagaaggtttaacatccacctgatccctagttcgagccgtgaaacgccatagtaagcgcagtagaacgaaggagttaacgttcaccttgagcgacctagagggtgcgtaagtgaagattaaaatagatttaaattacaatttaacatttagtcttgtgggaaaattcttaaaggaagatataatatttatttaaaaacataaaaccgaaaatgctggattaatctaaagtctgattatacccaacagaggggacgacaagctagtattgattaagttcaatgcgccaaattagtgcccattttatgaataacaatgaatagagtgaatttctcaaagaaaatgtacctaagtaaatctaaatttgaattatattgtagtttttatcagcaaagtgtgcttatcagcgggtagtaactgatcttcggaagattgaaagccacaatcccactttgtattttaattaggattattccgtggtgcaagaagcgtactagacttgtttgatcgaaagatccaccatagcttatgacatttaatggagagcaacataggtaaaaacttttagaaatcccaatcaaaatttaaatatggcagaacctcaaaattgaacgttctgctttcaaataatagtacacaacaaattaaaagaaaatataacaag

SEQ ID NO: 14086 - DNA, 367 bp, synthetic construct; identical to SEQ ID NO: 1692
  source 1..367: mol_type = other DNA

SEQ ID NO: 14087 - DNA, 301 bp, synthetic construct; identical to SEQ ID NO: 147
  source 1..301: mol_type = other DNA

SEQ ID NO: 14088 - DNA, 431 bp, synthetic construct; identical to SEQ ID NO: 1869
  source 1..431: mol_type = other DNA

SEQ ID NO: 14089 - DNA, 275 bp, synthetic construct
  source 1..275: mol_type = other DNA
gtttcccactggaggataacgataccataaacaaaattcacatcacatcacatcccctcaacaaaaccgcattcaacccaacacaactcacatcacatcacatgtattaaacacaacacaacacaactgtcatgtcatgtcataaatacaacacaacacacctcggatcccatccactaaacaccacatcacaaccctaaacatcccaaaacccaaaaacgggtagtgccacctgatcttatactaagtcgtcaggttccaagcacgtagtcaac

SEQ ID NO: 14090 - DNA, 308 bp, synthetic construct; identical to SEQ ID NO: 1506
  source 1..308: mol_type = other DNA

SEQ ID NO: 14091 - DNA, 307 bp, synthetic construct
  source 1..307: mol_type = other DNA
ataaattcattataaaaaccaagtcgtgcaatcaatttgtacgatcataccaggtacagtttcaatagctgtactcagcaatctgctataaatcaattttataacaacatcacgtgcttacggtcaattcgtaagcataataatcagttctaaataattgtttagaaccatcacgccgatacaagaactttgtatccccataacttgaacgctgtcaatcaacgctcaaaatatccacctacagacacttctgtaagtctcgcgcaatttttcaatattttgaaaaactattccccgtttacccgca

SEQ ID NO: 14092 - DNA, 295 bp, synthetic construct
  source 1..295: mol_type = other DNA
taaaaaccaagtcgtgcaatcaatttgtacgatcataccaggtacagtttcaatagctgtactcagcaatctgctataaatcaattttataacaacatcacgtgcttacggtcaattcgtaagcataataatcagttctaaataattgtttagaaccatcacgccgatacaagaactttgtatccccataacttgaacgctgtcaatcaacgctcaaaatatccacctacagacacttctgtaagtctcgcgcaatttttcaatattttgaaaaactattccccgtttacccgca

SEQ ID NO: 14093 - DNA, 367 bp, synthetic construct; identical to SEQ ID NO: 1693
  source 1..367: mol_type = other DNA

SEQ ID NO: 14094 - DNA, 500 bp, synthetic construct
  source 1..500: mol_type = other DNA
ctacaacatacacactcagtttaacggatctatccgttaaatagtttgcccacttctagtggtcgcttttcaccaggacttgatcctgtcgctttttaaacaacaaaccaatactgttttataatgacgatttgatattgtgttttagttagacctgcgtggttcattagtactgccttgcgaggaactggaaaatgaattactagtcggaccttttattaaccgctgcatgcaagttatagatcctaacacacaatatgcgagaaggaccaatctttggattatgacactgattagactgctggaacgcgtttcaggctctccgaaagatatagtacggagctagtgaaacaagtctttgtggagcgaaattatctctcactgggattggcactctcagaagcgtgagttcctttcacataagacgtatatctgggaagaaaagagcatcgataattggctctgagtttattaccagacgaaacactttttctgctatc

SEQ ID NO: 14095 - DNA, 331 bp, synthetic construct; identical to SEQ ID NO: 1582
  source 1..331: mol_type = other DNA

SEQ ID NO: 14096 - DNA, 1000 bp, synthetic construct; identical to SEQ ID NO: 247
  source 1..1000: mol_type = other DNA

SEQ ID NO: 14097 - DNA, 295 bp, synthetic construct
  source 1..295: mol_type = other DNA
gagctacgctcgtttttctgtattttgcttatgatgtgtacctcttgtgaggcgcgactatttatagtttcacattttatgaattggtgacaattcacataagcatattttacggattttcgtgtagtgtgcggggagccgtagacctatggtgtatgttgatttgaagagcttgctctagtcagtgcatcgaaagcccttgtggtgtagtagaacataggtcgtcttgtgaactagaaaccccccccttggggctttctgttcgcatggctctggtacttttaagaaaccagag

SEQ ID NO: 14098 - DNA, 285 bp, synthetic construct
  source 1..285: mol_type = other DNA
atggttaaattcttcaccccgaagtccatcggggttcctgtgtatagttaaaacggactgtgtatatatgaattaccaattttgtttatgttttgtgtcatgtgcatttatagaattaggctttgtacatattggcatggtgctcggccatacccttagttaggggagtagttagccactacatcatcatcgcaccaccctgcagtttgagtcaactgtagggattgtaaatactgacttactaacaattttgattatttatttgtaaatttatattgtgagaag

SEQ ID NO: 14099 - DNA, 417 bp, synthetic construct; identical to SEQ ID NO: 1825
  source 1..417: mol_type = other DNA

SEQ ID NO: 14100 - DNA, 474 bp, synthetic construct; identical to SEQ ID NO: 1972
  source 1..474: mol_type = other DNA

SEQ ID NO: 14101 - DNA, 352 bp, synthetic construct
  source 1..352: mol_type = other DNA
caggggatatccgcacttctgcaaacttctggcaacttctggcctgtgatttaatcgtatttatacgaacttctggcctgtgatttaatgcctgtgatttttgctgtgatttgcggtagtccccacaattatctcatgagaactttatccctttccatctagcgtgtaggttaacacgctaaacccccaagtctacctcatagacttagcattccccctttcgggggattatataatgctgcattgctagttagcgagacaactagaacgtccgtggatcgaatgccatcgtttattatgccgaaaggtactgctggagagctagacgtaaatacttaattaataacctaat

SEQ ID NO: 14102 - DNA, 565 bp, synthetic construct; identical to SEQ ID NO: 2132
  source 1..565: mol_type = other DNA

SEQ ID NO: 14103 - DNA, 402 bp, synthetic construct; identical to SEQ ID NO: 1785
  source 1..402: mol_type = other DNA

SEQ ID NO: 14104 - DNA, 263 bp, synthetic construct
  source 1..263: mol_type = other DNA
tcacaaactttccggaatggggcttcattcttatggaggataatggaatggagcagcaaatcctgaatccggaattttacaagacgagggctatttagctcgattgccaccggcgcgtctttaaataaaagctctggcaacctcccgtggagttccacttgaacgggctatcaggaacaacacgttaaatcaaccagcctgccaccaacgaaaaagtatttcaaaccgacaaccaccttacggacaagccctcgctcgacact

SEQ ID NO: 14105 - DNA, 474 bp, synthetic construct
  source 1..474: mol_type = other DNA
gaatttcattttataggaacattttcacctcatagcaacactcccattgttatgttgtacccctcccctttcataattgccttcctagtttatcttgtgcagtttttatcccagaagattgcattgacctgctgtgtaacgggtgttgcatggtaatgactactaggtgtccatattcacggctcgagggccacagggtgaaaatccctacattctagtgtgaagcgaaagataagctggaaattgagagaaagctattcaaggatagtgtcgtgcagctcttaggagtaaaggtgagtaacgtaatatgccttatgagctctcgacttctcaacacatttctttgcccaggtagtggatcacaacgtgaatggtcccataattaggggtattgtaggtaaaggtgcttcgacatatgtataaatgatcgaatagcgataaccggccgtgactacagggaccccctttacaaaa

SEQ ID NO: 14106 - DNA, 253 bp, synthetic construct
  source 1..253: mol_type = other DNA
tagcgagctgtaaagcagcggcgacacgcaaatctgcgattattggtgcgagggcaccccacttctctctactgcccttacgtaaacgccatagcaagtggggtgccctcgcaccaataatcgcagatttgcgtgtcgccgctgctttacagctcgctaagacacttgtctattgtaaaagccttgtgataacctaagcaagtgctgctggcaacaacctcttcaggaatctttttgaaccccctttatttta

SEQ ID NO: 14107 - DNA, 332 bp, synthetic construct
  source 1..332: mol_type = other DNA
gtctggattgacttttcataataataatgactacagtcgtaaattgtgggcaaggatactttggtccagtaagtcattaaaagaaagtgctatagtcgaagctatagcactttcataagcagccttcgcgcggtaaccccgcggaacgctattctcctcgtcatggtatccccatgcgacgagataaaagcttgtgtctgtgttgtgtttcacaaacgcactttcttttaatgacttactggatcaaagtatccttgcccacaatttacgactgtggtgttattttgagtaactagtctctccttagtctggattgacttttcataataata

SEQ ID NO: 14108 - DNA, 472 bp, synthetic construct; identical to SEQ ID NO: 1967
  source 1..472: mol_type = other DNA

SEQ ID NO: 14109 - DNA, 440 bp, synthetic construct; identical to SEQ ID NO: 1890
  source 1..440: mol_type = other DNA

SEQ ID NO: 14110 - DNA, 578 bp, synthetic construct; identical to SEQ ID NO: 2144
  source 1..578: mol_type = other DNA

SEQ ID NO: 14111 - DNA, 585 bp, synthetic construct
  source 1..585: mol_type = other DNA
tatatattagacctaatttgttttgttaatattactttcatggtctttaaatgaggcgaaaagtaaatttaaccatcctaattgtttgttagtatatttcatggatgtaaaatgaggcgaatcaaactaacaactattttaatcaattccgaatactatgacgaaaccatttgaatactattcttgacctgattatgatataacgacaaacagcaattattataaactgtataaacttttaataacaacacggactacgaacctatatgtaaccaagatatcgatgagcaatctcgatcccaatataagagtgaaatctttgagggccgttttggcaatgtatatagacgtggggttttaatggctagtaaccacattacttgtgatgaaactcaataactagtactaattcttaaataatttaatcatgatataaatgctgaagacaagtatttcgatttatatcctctgaatttattaaagaatatgtaattactcggtggtgattacattttagtcgcagttaacctgcagttgtagagcatcctgtgtcggagcagtagtaatgcaacctatcaacgaaac

SEQ ID NO: 14112 - DNA, 440 bp, synthetic construct; identical to SEQ ID NO: 1891
  source 1..440: mol_type = other DNA

SEQ ID NO: 14113 - DNA, 425 bp, synthetic construct; identical to SEQ ID NO: 1845
  source 1..425: mol_type = other DNA

SEQ ID NO: 14114 - DNA, 327 bp, synthetic construct; identical to SEQ ID NO: 1571
  source 1..327: mol_type = other DNA

SEQ ID NO: 14115 - DNA, 834 bp, synthetic construct; identical to SEQ ID NO: 2468
  source 1..834: mol_type = other DNA

SEQ ID NO: 14116 - DNA, 429 bp, synthetic construct; identical to SEQ ID NO: 1857
  source 1..429: mol_type = other DNA

SEQ ID NO: 14117 - DNA, 277 bp, synthetic construct
  source 1..277: mol_type = other DNA
ggtttatgaagcgcgtcgaagaaaccgcaaggcccatcagttggcttctcaagcttttggctttgtccgtgagcctgatcattcgcaccggtcgatctatcagagatatgcggctaagagagctgcgaagacggaggtgtatcaagtgcacgaaggtcctactggggattctcacgtggctattgagtttaaaagtattccgcttgttagaagaaaataccacttcggtaagaaaatgaacaaaatatatgtgaaataaggaggtaggaggcgtaaa

SEQ ID NO: 14118 - DNA, 508 bp, synthetic construct; identical to SEQ ID NO: 2040
  source 1..508: mol_type = other DNA

SEQ ID NO: 14119 - DNA, 429 bp, synthetic construct; identical to SEQ ID NO: 1858
  source 1..429: mol_type = other DNA

SEQ ID NO: 14120 - DNA, 301 bp, synthetic construct; identical to SEQ ID NO: 1487
  source 1..301: mol_type = other DNA

SEQ ID NO: 14121 - DNA, 538 bp, synthetic construct; identical to SEQ ID NO: 2094
  source 1..538: mol_type = other DNA

SEQ ID NO: 14122 - DNA, 509 bp, synthetic construct; identical to SEQ ID NO: 2045
  source 1..509: mol_type = other DNA

SEQ ID NO: 14123 - DNA, 641 bp, synthetic construct; identical to SEQ ID NO: 2230
  source 1..641: mol_type = other DNA

SEQ ID NO: 14124 - DNA, 507 bp, synthetic construct; identical to SEQ ID NO: 2037
  source 1..507: mol_type = other DNA

SEQ ID NO: 14125 - DNA, 386 bp, synthetic construct; identical to SEQ ID NO: 1744
  source 1..386: mol_type = other DNA

SEQ ID NO: 14126 - DNA, 338 bp, synthetic construct; identical to SEQ ID NO: 1616
  source 1..338: mol_type = other DNA

SEQ ID NO: 14127 - DNA, 316 bp, synthetic construct; identical to SEQ ID NO: 1537
  source 1..316: mol_type = other DNA

SEQ ID NO: 14128 - DNA, 1000 bp, synthetic construct; identical to SEQ ID NO: 2577
  source 1..1000: mol_type = other DNA

SEQ ID NO: 14129 - DNA, 269 bp, synthetic construct
  source 1..269: mol_type = other DNA
gatgggacgggttggactttaagcgtcgggatgtctatgaggcacttgtctctgcggtggagtatcgacttgggcaactcacacaaggaaaactagtctatgatcccatcaagcttttcatcaagcaggagccgcacaaacgggctaagctggaggaaggccggttgcgacttatttctgccatctctttggtggatcaggtcgttgaccgagtgttgtttggccgattggtggagagggttctctccactgttggccgaacaccttgc

SEQ ID NO: 14130 - DNA, 1000 bp, synthetic construct; identical to SEQ ID NO: 2578
  source 1..1000: mol_type = other DNA

SEQ ID NO: 14131 - DNA, 326 bp, synthetic construct; identical to SEQ ID NO: 1569
  source 1..326: mol_type = other DNA

SEQ ID NO: 14132 - DNA, 486 bp, synthetic construct; identical to SEQ ID NO: 1996
  source 1..486: mol_type = other DNA

SEQ ID NO: 14133 - DNA, 411 bp, synthetic construct; identical to SEQ ID NO: 1803
  source 1..411: mol_type = other DNA

SEQ ID NO: 14134 - DNA, 436 bp, synthetic construct; identical to SEQ ID NO: 1877
  source 1..436: mol_type = other DNA

SEQ ID NO: 14135 - DNA, 349 bp, synthetic construct; identical to SEQ ID NO: 1641
  source 1..349: mol_type = other DNA

SEQ ID NO: 14136 - DNA, 495 bp, synthetic construct; identical to SEQ ID NO: 2016
  source 1..495: mol_type = other DNA

SEQ ID NO: 14137 - DNA, 412 bp, synthetic construct; identical to SEQ ID NO: 168
  source 1..412: mol_type = other DNA

SEQ ID NO: 14138 - DNA, 741 bp, synthetic construct; identical to SEQ ID NO: 2361
  source 1..741: mol_type = other DNA

SEQ ID NO: 14139 - DNA, 433 bp, synthetic construct
  source 1..433: mol_type = other DNA
ggggtgatgggaaacttacgtttcgccaacgttaaggtactgtgattttgtacttacgactcagggtcgaccttaactggtttatactctgtcgagtttgggcaaatagcgagactatcccccgggtttggtgaaccttattgcaaggccagcatgtcacctttcttttgttttagaaaagctagcaactcactgcaaaatgaaataaaaatttgaatagctaacaacttactgtaaaatgaaataaaaatttgataaagctagcatcttactgcaacatgaaataaaataaactctcgcttcacctgcgccaaaagtgaaaccgccgactggtttagtcgaagaagggcagccttgctaaccttagcactccgtgatgctcggttcttacttagtagtatagggcttccctccgaaaaagggacgaattaaa

SEQ ID NO: 14140 - DNA, 279 bp, synthetic construct
  source 1..279: mol_type = other DNA
aaagaaaaaactctctgtcggcacatcttcacgggtgtgccgccactatcttaacaacaactttttctgtttgattactttttcgcttctactttcgttgatacaatttcttgaacccttcttttatttaaaaataactcttttcgttgatttgatttttctttgttttggtaaaaacatatagcactaactcaatatacacggttataacgctaattgtttaaatttgtttagctaggttcaagcttttcgccgttcgattgttactttgcgggcacc

SEQ ID NO: 14141 - DNA, 160 bp, synthetic construct
  source 1..160: mol_type = other DNA
gatatttctgctagaaagactcttaatcgttctgaacactttcttgaaagttgcggctgaccaccgtacaggaattctctcgcactagtcgggtttgaagcgcgggtgtatctaggagggtaagcctagagcataaattgtaactaccgcgaataaggtc

SEQ ID NO: 14142 - DNA, 793 bp, synthetic construct; identical to SEQ ID NO: 2426
  source 1..793: mol_type = other DNA

SEQ ID NO: 14143 - DNA, 425 bp, synthetic construct; identical to SEQ ID NO: 1846
  source 1..425: mol_type = other DNA

SEQ ID NO: 14144 - DNA, 392 bp, synthetic construct; identical to SEQ ID NO: 1757
  source 1..392: mol_type = other DNA

SEQ ID NO: 14145 - DNA, 898 bp, synthetic construct; identical to SEQ ID NO: 2524
  source 1..898: mol_type = other DNA

SEQ ID NO: 14146 - DNA, 1000 bp, synthetic construct; identical to SEQ ID NO: 248
  source 1..1000: mol_type = other DNA

SEQ ID NO: 14147 - DNA, 989 bp, synthetic construct; identical to SEQ ID NO: 2570
  source 1..989: mol_type = other DNA

SEQ ID NO: 14148 - DNA, 1000 bp, synthetic construct; identical to SEQ ID NO: 2579
  source 1..1000: mol_type = other DNA

SEQ ID NO: 14149 - DNA, 461 bp, synthetic construct
  source 1..461: mol_type = other DNA
tttggaactcagctaatacactggtggctgagctgaggttccaccatttaatcaaactactcaaatatactttcactaggaataataaattatatatatcccttgtggacgtgattaacgaagtagcaggccacacttttaaattgagctatttgaataatgaacagaatttgaataaaccgacgtttttctttgattacgatactattgcacgtaaacacaattttaacaatgaacctactgaaataaatggtgcaatactacgctggatcttcttacaccccactcctccaagcgtatatgactacttaccaaactttagtgaagatcttaaactagaagaatctatacaggtcctcccagcacgatcgtatcttaatttagcaagtgtaccatacataccaccagaacgcttaggtgatactgactctaaaagtgagtacgtggaacttgacccccac

SEQ ID NO: 14150 - DNA, 1000 bp, synthetic construct; identical to SEQ ID NO: 2580
  source 1..1000: mol_type = other DNA

SEQ ID NO: 14151 - DNA, 1000 bp, synthetic construct; identical to SEQ ID NO: 2581
  source 1..1000: mol_type = other DNA

SEQ ID NO: 14152 - DNA, 1000 bp, synthetic construct; identical to SEQ ID NO: 2582
  source 1..1000: mol_type = other DNA

SEQ ID NO: 14153 - DNA, 284 bp, synthetic construct
  source 1..284: mol_type = other DNA
tttggaactcttccttcgccacccatacagtggaaaagttccgtaatatattaatcacttatggttatggtgtatcaagacaaccaaaccttgcggccatttgtgccgaagtgattcaattggtggcagatgttgcttttaaattgagcgattactcggctgaacagttggctgatcctttaggctgtttaactggaaagttggctaccaacttgattttcgattacgttaaggccaactcccaatttcgcttagatgatgagccgacagactcacgtaatgcg

SEQ ID NO: 14154 - DNA, 1000 bp, synthetic construct; identical to SEQ ID NO: 249
  source 1..1000: mol_type = other DNA

SEQ ID NO: 14155 - DNA, 1000 bp, synthetic construct; identical to SEQ ID NO: 250
  source 1..1000: mol_type = other DNA

SEQ ID NO: 14156 - DNA, 1000 bp, synthetic construct; identical to SEQ ID NO: 2583
  source 1..1000: mol_type = other DNA

SEQ ID NO: 14157 - DNA, 945 bp, synthetic construct; identical to SEQ ID NO: 2548
  source 1..945: mol_type = other DNA

SEQ ID NO: 14158 - DNA, 1000 bp, synthetic construct; identical to SEQ ID NO: 251
  source 1..1000: mol_type = other DNA

SEQ ID NO: 14159 - DNA, 1000 bp, synthetic construct; identical to SEQ ID NO: 252
  source 1..1000: mol_type = other DNA

SEQ ID NO: 14160 - DNA, 1000 bp, synthetic construct; identical to SEQ ID NO: 2584
  source 1..1000: mol_type = other DNA

SEQ ID NO: 14161 - DNA, 865 bp, synthetic construct; identical to SEQ ID NO: 2502
  source 1..865: mol_type = other DNA

SEQ ID NO: 14162 - DNA, 878 bp, synthetic construct; identical to SEQ ID NO: 2514
  source 1..878: mol_type = other DNA

SEQ ID NO: 14163 - DNA, 1000 bp, synthetic construct
  source 1..1000: mol_type = other DNA
acgcgtacgcgggcatgtctttagtaccagtggacttctcaccagttagcatggcggattacaagccagctagtaatctcacttttccatctttaacgcgtccgagtgccgtagatagtagtgatgtagcaaaaaatcctcgagttgctagttctaaacgtgcaccgcgagcagctgcctctgacatactaaataggtttaaggaattcaacgctcctccgccgcgcgaacctgcgccctcgcaattcatcaatgagccaccagctgctcagttaagttacgaggctaaatatcccgtcgaagagacccaagttccaggtgatttcaagtattaccagcccgtggtcgataacgatcgggtacatgtggaaccggccgatgcaccagacgcgtatgatcgcttgtcgaagcaacagctaaagcttgctattgaaaacaatatgcaactcttagctaagattcaaaactcacctattttaggtgagctagatttagatgccgagcgcaagcgccaagatgaattccgtcagctcgagactgcccgtaatgctcggatccaacgcagagctagttacgtacctttcggcccttcccgcccacgccctgttctcagcccgcgatctgtgcctaataaacctccactcgtgcacggcaagctttctgaaaaagaaatcgagcatacgccagtggaagtaaatgatgctgcagctgagcaggtgcaacgtgaggtccgctcactcggtaaaccagttccttcgcctagcacaattaatccttttgccactctcgctgctgacaaacgccgcccaggcacgtattatcagaagagtggcgttcctctcgattatgatgatctagtaaaagagcagctcccaacaaccaattttggacatactggcgcggacgttagcgtgcaagacgggatagcaactgattcactagcgaaaaactagtgtggaacgttgcttattaccgctctgcgcgtaacgttctcgccagt

SEQ ID NO: 14164 - DNA, 855 bp, synthetic construct
  source 1..855: mol_type = other DNA
gatttctggggatttctctggtgtccagctaccttttatgttacccgcttaattagctagcggttaacctcaggtcgggaggcaatccggccagtgtagtagggggcaggaaagaacgaagcatgtgcttatcggtttggctcatccaacttgggcgaaatcgtagcgtgtggatactcaaagtgtcaaagtatagtcaacatgccaacaagactgataccggaaactctcacaaactttgaggcctactacagagtgtacaagtgttagggtagaaagagctggggctataacccccggatctcttatcaggccagcaccgctcagcccctctttttatgtaaatcccacccggtctagcggagtgggccgcatataaaatgagcgagtgaaatcgctctacccgtccaagcacatgacactaaactgtactcgcccaggatatggcgttaaactgtaccgtccgcgtttgccagcggttaaaacaatggcttttcataacagccgcgtgtgagtccgcgggataataagtgttctaacagactcaaaaagacatcctatttccaagttctcgtcgctacgtcaaacgtcggcatttcttggatctggtggggtaacatacacgtcaagtatggtgtgaaccggggctacacaactaccgggaagctaacgtaactacgctagtgctctactttcaacgtgcttcaggaccgaaaccgtccgtaaaccaatgggttgcacagaaagtaaaggcgtagggaacgtgcctaggacaagaactaggtggacagactgacactcaccagtgccttctcgattgaaggcagtagcaaacagtcggtgcgggaactccgc

SEQ ID NO: 14165 - DNA, 511 bp, synthetic construct; identical to SEQ ID NO: 2048
  source 1..511: mol_type = other DNA

SEQ ID NO: 14166 - DNA, 312 bp, synthetic construct; identical to SEQ ID NO: 1523
  source 1..312: mol_type = other DNA

SEQ ID NO: 14167 - DNA, 502 bp, synthetic construct; identical to SEQ ID NO: 2028
  source 1..502: mol_type = other DNA

SEQ ID NO: 14168 - DNA, 303 bp, synthetic construct; identical to SEQ ID NO: 1491
  source 1..303: mol_type = other DNA

SEQ ID NO: 14169 - DNA, 527 bp, synthetic construct; identical to SEQ ID NO: 2081
  source 1..527: mol_type = other DNA

SEQ ID NO: 14170 - DNA, 642 bp, synthetic construct; identical to SEQ ID NO: 2232
  source 1..642: mol_type = other DNA

SEQ ID NO: 14171 - DNA, 572 bp, synthetic construct; identical to SEQ ID NO: 190
  source 1..572: mol_type = other DNA

SEQ ID NO: 14172 - DNA, 254 bp, synthetic construct
  source 1..254: mol_type = other DNA
aatacttacatgaccaaacctccgccaaatctcaccgtgctataaccgacctgactgacgggttggttcggtacggtcatctgactgacgctaaagttttaaatttcataattgataacctggaacccgaatcacccatctgcacttctggaaacattttggagacagaataccgagtcaaatctgatcttgctgtgactaggctgagactaaaagacatcattcacaaattggatcctgaaattattgcgttc

SEQ ID NO: 14173 - DNA, 817 bp, synthetic construct; identical to SEQ ID NO: 2451
  source 1..817: mol_type = other DNA

SEQ ID NO: 14174 - DNA, 808 bp, synthetic construct
  source 1..808: mol_type = other DNA
gcctatacagcgtcacagatcttcctaccgaaggttggtgggttactatgcggagtcgcctgtcgagggccaaccacaggagtgggtaaccctcgggagatgaaccggtgaccctttatcgctccgcttgggtcccggccctacctattttctcgttcacctggcgaggaagtaggggggtgggcgtatgcctgccgtacgagtaattgtacggcgtgatttcggtggggtacttagccttcctgctaggttcctcatcagaatttccccactagatctatccaatagttgtgggcagggtctatttttgcccagtgtatatggaaacactggagtctcttatagggtctgctcatgagagcactaactaagtcgatagcttactgatagtgagtaagtatttcttatataacaccttatatgaccactcctgcgaaatgcaggggtacctgaagtcttacagcgccgagacaatgagattctcggtggccaaaacgtcggtttggtatgaccagggcgtgctaagtgatctggcgctcgtttaggcggcggttccatatgaaccctaccggctaaacttgcttccttcattggataagatctaaatgccgagagactgcaacggccacaatgttgtaggggaacagtccctccttacgttagggtaagggggcagttggtgccttcactgttataccgaaagatttatgacaagcgatttccaagtgattttttagattgagaaccgagcgagcaaatttgaaagccagcgttaagttgagaaaactattcgagcctattgggcgtt

SEQ ID NO: 14175 - DNA, 333 bp, synthetic construct; identical to SEQ ID NO: 151
  source 1..333: mol_type = other DNA

SEQ ID NO: 14176 - DNA, 832 bp, synthetic construct; identical to SEQ ID NO: 2463
  source 1..832: mol_type = other DNA

SEQ ID NO: 14177 - DNA, 715 bp, synthetic construct; identical to SEQ ID NO: 2327
  source 1..715: mol_type = other DNA

SEQ ID NO: 14178 - DNA, 751 bp, synthetic construct; identical to SEQ ID NO: 2375
  source 1..751: mol_type = other DNA

SEQ ID NO: 14179 - DNA, 292 bp, synthetic construct
  source 1..292: mol_type = other DNA
ctggaccgaagctgatccattcactgatgagatcaatccggatgctgtaccacccgctaatgtcgggacggttgccgccgtgcctcacgccttcgaagtcatccatttatcagctgtctcgcaccagttggccaacgtttaccaggaccctgaaagtccgttatggagtaatcaagctgcagcagtcgatgagattgcgaatgctcaggctacattcgtggatgctgacggtctctcggaggatgagattgctttggtcattaaggcctttgcaccccaggctaaggaatac

SEQ ID NO: 14180 - DNA, 796 bp, synthetic construct; identical to SEQ ID NO: 2428
  source 1..796: mol_type = other DNA

SEQ ID NO: 14181 - DNA, 1000 bp, synthetic construct
  source 1..1000: mol_type = other DNA
catgggcctgatgggggtaggtttcgcggtctggatcacagtgggggttaggaccgccttgtagaagcctgccgacgccgtttagtcgtgctccgcctcctggtggtttgtatgatcttctcggctcaacctcgtccggcgtcagtacggatcggaggcggtagcgaccacactcgtaatggtcgatcctatggatcgggagtgggttgtagccgtcttcgtacctgaacctcgtcctacgtgtctgcccggtctcagtagggatcttctgtggtaggctaacactcgtaacgttcggaactttttccgggagtgtgcgctagctattgaagtacccgaacctgatcctgtagtttgctgagcagagttggatcgggcccacgccagcttaccattcttaaagggaggtcgtgcctcgagcacatgggaccggcgggacccgcaggtcccggccggagttgggcaaaatataccaagagtcaagccgctcaagtcgttctactcctccctgattacgtaaccaaccagttgaggtgtcgaagactgagtcgattcgagcgtagaggatacaggcgacgtcgcatagacggagggttgtcccaactcgctctcagacctacgggtctcgggtcgaagaagagcagccggactctgcactaactctgatactgtggccgaggtttatcggacagcaaggtgaccagcgtgtgtgccgttttacaggatgacaaaggggcgatccccctatagcatccgggaccggcacgacttccgtttagtctttggaactttcgggatagcaggaaggagtggtgtagagtagggctgggatgcttcgacctcgctccagggggttgccacggccccaggggtgcgtccgaggtccctgcgttcgaatcggtgatgtttgcgatacttcgattataccgcaattaattatttgtaaattatagatagtggttaggttggttaggttaggttaggcacaacattaatcata

SEQ ID NO: 14182 - DNA, 1000 bp, synthetic construct
  source 1..1000: mol_type = other DNA
atgggcctgatgggggtaggtttcgcggtctggatcacagtgggggttaggaccgccttgtagaagcctgccgacgccgtttagtcgtgctccgcctcccggtggtttgtatgatcttctcggctcaacctcgtccggcgtcagtacggatcggaggcggtagcgaccacactcgtaatggtcgatcctatggatcgggagtgggttgtagccgtcttcgtacctgaacctcgtcctacgtgtctgcccggtctcagtagggatcttccgtggtaggctaacactcgtaacgttcggaactttttccgggagtgtgcgctagctattgaagtacccgaacctgatcctgtagtttgctgagcagagttggatcgggcccacgccagcttaccattcttaaagggaggtcgtgcctcgagcacatgttgaccggagggacccgcaggtcccggccggaggtgggcaaaatataccaagagtcaagccgttcaagtcgttctactcctccctgattacgtaaccaaccagttgaggtgtcgaagactgagtcgattcgagcgtagaggatacaggcgacgtcgcatagacggagggttgtcccaactcgctctcagacctacgggtctcgggtcgaagaagagcagccggactctgcactaactctgatactgtggccgaggtttatcggacagcaaggtgaccagcgtgtgtgccgttttacaggatgacaaaggggcgatccccctatagcatccgggaccggcacgacttccgtttagtctttggaactttcgggatagcaggaaggagtggtgtagagtagggctgggatgcttcgacctcgctccagggggttgccacggccccaggggtgcgtccgaggtccctgcgttcgaatcggtgatgtttgcgatacttcgattataccgcaattaattatttgtaaattatagacagtggttaggttggttaggttaggttaggcacaatagtaatcata

SEQ ID NO: 14183 - DNA, 682 bp, synthetic construct; identical to SEQ ID NO: 2287
  source 1..682: mol_type = other DNA

SEQ ID NO: 14184 - DNA, 623 bp, synthetic construct
  source 1..623: mol_type = other DNA
atgatggccacgctaggggctgcactcaaggctggcgctgctgtcccgcgacctgtcaccccggtctcagaacctgaggaagtgccggtggaggtgattgctccagcgcccaagccacgccaaacatcgcgtgtggagcgtgacctactaacaccggcgaaggcaggggcacacgcaccattcgcgccctttgcccgggcgaaggtaatgtcactggctggcaatgccgttcgccggaaggccaagagcaatgaggaaataatggctcagtggagcgatgacggcagttcaacgtcgtcaaaaggcaacgcccagtagacaactggcgtgatgggctcttggagcacatctcctcatgccatctatgcattcctttcacttcatctatcttagggtccatcagggaatttgatcaattggaaaaaatatacaaaaacaaaaaccgactgcccgatagtattaagaagaataagtattaccaaaataatcaaccaaaaatttcatctttatattcggcgtgtaatgaggagttgttagaggcgttggactgttatgctgagcatgaacctgagctggctcgaactttctacgaagactggttctataacttcgcccctgactcg

SEQ ID NO: 14185 - DNA, 828 bp, synthetic construct
  source 1..828: mol_type = other DNA
tgccctcgggcaaccctccacttcggtggagggctcgctggttaaccactagtgtggttatactgagttcaaatctcagcttgggtaggggaaggcctccctaggatttcctaaattggtcagttgatctgctttggcggcagtataatctagtcatctttcgtatacttatttacacctatttatggaactgaatcgcttcgcatatagactcgggcaaagaactgctgatattataatagctggaataatggtagctccagctccaaaagtttatagaaaaattaaaaagattgcaaaactaagaaaaattagatcacatgttccagctgaagtaactgagaatgtatttgaatgtcttcaatatttagattaatttcaaattttacttataaaattaaattaattaataatgaggtttttaatatgtccgattctttaactggcgcgtgtaaagctttcatttgttcatttgctgctggaatgaccgataggcttgcttccagggcaacaggagttgaggtgagaattttgaagaattgctttactgatcctgctgaatgtgaaccttgggacgaacaatttcaggatggtgtttttgacgtaattttagaaactgcaaagaaggggaggtatcttgatgcagctgcaatggctctcgaaggtcccagtcccgatgcagactcattttgtattaattacgttgttgatgaatttctaaatatgcataaacacctggatgacgagtaatgatctgtgtagtaaagtttataacactttactacgctgtaagtttcttaaattatatatcttttttataaaataatt

SEQ ID NO: 14186 - DNA, 261 bp, synthetic construct
  source 1..261: mol_type = other DNA
acaacctttattggatatatcaagaaagaaaaagaaaaacaaaaaaataaaaaaaataaaaatccccccgacgtactgcgaccttgccgaggtggccatggggcttgtcacataacgaacagcagtaccacaagtatctatgaatttttattatcactgggtctcgattttgaggacgttgatgacctctatgacttcgaagttatacgcacctatgtcgcagacagaaactgggagcctgcaaaccgtgagaaattccgg

SEQ ID NO: 14187 - DNA, 320 bp, synthetic construct; identical to SEQ ID NO: 1546
  source 1..320: mol_type = other DNA

SEQ ID NO: 14188 - DNA, 283 bp, synthetic construct
  source 1..283: mol_type = other DNA
tatttttccccggggcggcgggactagaaggttgctagggctccgggcggtggtggtcgtcgaccttgcggggtcaacggcgttttcatttgttctctttcatacctgctttgtttcctatccattcgagttattgatttttacagtcagcacctgtaacttgctggctcgcctctcccatgggcgagcaatacaaatacatgagacgtgagagaaccgtgctagatacctcacgtatacccaaagtcggtacggggatcgtaaccattacgctttttcctta

SEQ ID NO: 14189 - DNA, 1000 bp, synthetic construct; identical to SEQ ID NO: 2585
  source 1..1000: mol_type = other DNA

SEQ ID NO: 14190 - DNA, 275 bp, synthetic construct
  source 1..275: mol_type = other DNA
tctctggcgcatcgctgcacgggggggcggacgtggattggtccgacgtctaggtcgtcttagactggattaaggaacatccgacgaccgtttccgatgtagctggagagccagctaggcactggcaattttctctcgagcgatcgcgctcgtttacgttcattaaaggcgtgaggcaccttggatacgcctcgttctgtcgttaccggtatgtacaaccgcagacctcgaattccgagtactatgcgaggttcctcgatgatcgtgccaacgag

SEQ ID NO: 14191 - DNA, 254 bp, synthetic construct
  source 1..254: mol_type = other DNA
aagccgcagaaccccacggtgcaccacgatcccctccggggcccggcaatgccacggcccctagccgggggcgggggcggtgctgtcgggcgtgggccgggagaacccccacggccggccgcagatccggttctcccaccaccagtcgcgcctgccggtggcgatgacccggcgcccttaccagcaggcccccttccccctgccctggcccccgagccacacggcgctgccccgcctgaacgggccgcagaaga

SEQ ID NO: 14192 - DNA, 515 bp, synthetic construct; identical to SEQ ID NO: 2062
  source 1..515: mol_type = other DNA

SEQ ID NO: 14193 - DNA, 1000 bp, synthetic construct
  source 1..1000: mol_type = other DNA
agttcggaaagccgctcttcttgcacagcggcttcaacggcggagtgagctgggtggatggtgaatccagcgctctttgtttcagatgtgctgggtggatggtgaatccagtgctcttcggtgacggactttggtgtggtgacggcctgtacaaccgtgttcgagggtgtccgcgtggtggtggcgcgggtaacggaatcaatcggcggggataataaacctgtcggtagggcgtgccctcctccttgatactgagttctgctctcctccgagcctaggagcgatccaggcgaaatctgatacagggcctaggagcgatccaggcaacattccaaccccactgtcattacagattctttggccatccttccggccgtcctgtctttacaacctctccttcctatcgtggtatatttccactcgctgaacgctgcgaccactgcagaggtaggaatcgacctgcgggtctctggcgttgatcagagaccttagacggtcgtgcacgatcctatgagttaggggctattaagctatgggggggtgaaaaacccctgccgagatgtgcccgcctctctatctgaaagcaaaccctaaaagtgaacaaagcgacttactaccggaggattacactgctgtaggcctttcgaggccgtgtgttggggctaggcatccgcgagccgaaccctattaatcaatcagcaaacggacctttgtcagggatgcgttaaccctgacccgagactatccgcttgaggcccattttagagaggaccggcggaccgagacgccacactggacgtatttcttgctgaccggccggattgcctgcgaatcccgcttcaacagtgaggggaacagtcctgctcagcctctgctgacaataccctgccgacgtgaaacatagtcgcgacatggtgcgctgcatacttttgtgggatcacgcccgagctcttcgatacctcaacgtgaaccggccgcgggtgttttaaaaacatttctt

SEQ ID NO: 14194 - DNA, 794 bp, synthetic construct
  source 1..794: mol_type = other DNA
ggagagagaaccccctacgctttcgcgtagcaaccctctcgggctggacacacacacactcctcaaaataagtgtggtgtcaggattcgacaagtttatttaccccacaagggggccctgcaagcatgcttgcagagttcgacgtcttgttaacgtcgggtaatccgaattttctctcgactccctctcatcaccgtagggtgagagttgtaagaatttaaaattttgaatttcgaatttcgaattttgaattttgaattttgaatttcgaattgagattttagactttctaatttcgatttccgattttcgatttgcgaatttcgacttacgattttcgattaatgattttcgagctcgttctgatagataacctgattctatcaacatccttatagatgatttgactctatatcttcttcgccgagggaagttcacctctcggcgtcgtaagcctgctgttgcacagcttctctgcgaagggaaaggctacacaaatctcagtatctcgctgagcctaaatgagatcggtggtaacgtagatagcccattttggctgcactagccggaagccggttgatgaccaagtaggaaggactgctagtaatcaagcatagtcgtgggggccgaaagcctgcaaccgtctatgcgccgatgaaagtagtagtacccaaatgcggaactcttctggcggatcgtaaagtgagtcgtgggctgaccccacgctaaataaccaagtctctgagagaacgggctacaccctatgatacctcaggctaaacaaagtcgtgaat

SEQ ID NO: 14195 - DNA, 380 bp, synthetic construct
  source 1..380: mol_type = other DNA
ggggatggtgctcctaggtttgatcttattagatcctaactaagaggaaacattgccctgtttcgtgatgatttcattgttcaatcactgaagcttctcttcaccaaaaaggagagagcttcgagagcttagctgtttcagctattttgaaccccgaaggattcgtgtcgtaaacatttgactttcttttgaaagtcgttcattcgttggcccgaaggcctcaaactactgcgtagtaacgtgatatgtctgaacactggaggtagtacggcatgagtggttgttctgtggagtagtgccctagaagaacaaatccccactcagacctttcagtctgactattggcactccgtgaggcccggaaccctggcatttcagcc

SEQ ID NO: 14196 - DNA, 469 bp, synthetic construct; identical to SEQ ID NO: 1959
  source 1..469: mol_type = other DNA

SEQ ID NO: 14197 - DNA, 945 bp, synthetic construct; identical to SEQ ID NO: 242
  source 1..945: mol_type = other DNA

SEQ ID NO: 14198 - DNA, 934 bp, synthetic construct
  source 1..934: mol_type = other DNA
gccgcctttgagatcttcctaggaaggccacctaaggaacttgccatagcccgtgtgagtgcttttatgcattctcatcacagttttctctcttggagaactatggttaagtttaggatttcattggtgaggccagtgggtctcggtcagggcacagtgagggtctgtgcgtggttgtctcccttctttcccgcaggggaagtaaaatatacttgcaccaggacgcgatgacgtccgttatgtggataaactatttctttaattaaaactcatcaaccgggggttgcatccgattgcaaaccaccactagaaatgacaacgaaagtagaagggtggcagagaagatgaaaaggtcggcggctaagatggtgtcttcttagtttgctttaagcgcggcaattcaacattgtcccgtcagattggctgcaatgcctcaaccttcaatcgcttcgggtactgagctcgcggtaaaccattgtaaacggtaacgcgtaggagtatagcactcttgcgtagtccctagtcattaaggaattactgtctctttacactacaccaagtggtcggatccgtgggatctgatctttagcctctccggctatcgctgcgtatactgcagtctattagtaggagtcatttcgaatggtggtcccattcatacgaccgtgacaaactgaagtcactgatgtctctaaaagctaactaaaatttagtctgcggggtcgcagtacggctccctcatcgatctttttctggatgtaaaactccgcgtctcatcgctcaagagtataaaaggaaattgaatggtgacagaccggaaagacggtcaaccccatcttatacgcagacaccagacagctccaactaagacctgttattctgcgttctcaagagacaatttcgtttagcaatatcgtaaattgcaaccatcgat

SEQ ID NO: 14199 - DNA, 420 bp, synthetic construct
  source 1..420: mol_type = other DNA
tggggatggtgctcctaggtttgatcctttcagatcctaactaggaggaaacattgccctgtttcgtgatgatttcaatgttcaatcactaaagcttctcttcaccaaaaaggagagagctttgagagcttagctgtttcagctatttgaaccccgaaggattcatgtctaagacatatgatttctttcagaaatcgttcgttctttcacccgaaggtgtaaaactactgcgttggcacgtgatggtcctgaatctcataagaagaacggcaggaatgattattctgtggagtagtgccctagaaggataaatcctcattcccacttattgaattggcccaaggcagtccgtgatgcccggttcgtcctctggacgtaaaaggttagagaccacgagagactgtggtagcttctgtcgaa

SEQ ID NO: 14200 - DNA, 313 bp, synthetic construct
  source 1..313: mol_type = other DNA
tttttggggatggtactctcaggtttgatctttgtagatcctaactaagaggaaacattgccctgtttcgtgatgatttctatgttcaatcactgaagcttctcttcaccaaaaaggagagagcttcgagagcttagctgtttcagctatttgaaccccgaaggattcatgtctaagacatttggtttctattcagaaactgttcattctttcatccgaagatgtaaaactacttcgtagtaacgagatggtcctgaaccctgacatgtagaacggcgacgacaggcattctgtggagtagtgtcctagaaga

SEQ ID NO: 14201 - DNA, 453 bp, synthetic construct; identical to SEQ ID NO: 1923
  source 1..453: mol_type = other DNA

SEQ ID NO: 14202 - DNA, 919 bp, synthetic construct
  source 1..919: mol_type = other DNA
gatcttcctaggaaggccacctaaggaacttgccatagcccgtgtgagtgcttttatgcattctcatcacagttttctctcttggagaactatggttaagtttaggatttcattggtgaggccagtgggtctcggtcagggcacagtgagggtctgtgcgtggttgtctccctcctctcccgcaggggaagcaaaatatacttgcaccgggacgcgatgacgtccgttatgtggataaactatctctctaattaaaactcatcgaccgggggttgcatccgattgcaagtcaccactagaaatgacgacgaaagtagaagggtggcagagaagatgaaaaggtcggcggctaagatggtgtcttcttagtttgctttaagcgcggcaattcaacattgtcccgtcagattggctgcaatgcctcaaccttcaatcgcttcgggtactgagctcgcggtaaaccatggtaaacggtaacgcgtaggagtatagcactcttgcgtagtccctagtcattaaggaattactgtctctttacactacaccaagtggtcgggtccgtagggcctgatctttagcctctccggctatcgctgcgtatactgcagtctattagtaggagtcatttcgaaatggtgatcccattcatacgaccgtgacgaactgaagtcactgatgtctctaaaagctaactaaaatttagtctgcggggtcgcagtacggctccctcatcgatctttttctggatgtaaaactccgcgtctcatcgctcaagagtataaaaggaaattgaatggtgacagctggaaagacagcaccccaattcttcaagtggtcacaaacatcgagcttcagtttgcagccactatcgccttaagaatatcgccgtttcgcaataccgtaaattgcattttccaac

SEQ ID NO: 14203 - DNA, 786 bp, synthetic construct; identical to SEQ ID NO: 2418
  source 1..786: mol_type = other DNA

SEQ ID NO: 14204 - DNA, 491 bp, synthetic construct; identical to SEQ ID NO: 2011
  source 1..491: mol_type = other DNA

SEQ ID NO: 14205 - DNA, 729 bp, synthetic construct; identical to SEQ ID NO: 2345
  source 1..729: mol_type = other DNA

SEQ ID NO: 14206 - DNA, 426 bp, synthetic construct; identical to SEQ ID NO: 1849
  source 1..426: mol_type = other DNA

SEQ ID NO: 14207 - DNA, 514 bp, synthetic construct; identical to SEQ ID NO: 2060
  source 1..514: mol_type = other DNA

SEQ ID NO: 14208 - DNA, 384 bp, synthetic construct; identical to SEQ ID NO: 1740
  source 1..384: mol_type = other DNA

SEQ ID NO: 14209 - DNA, 475 bp, synthetic construct; identical to SEQ ID NO: 177
  source 1..475: mol_type = other DNA

SEQ ID NO: 14210 - DNA, 457 bp, synthetic construct
  source 1..457: mol_type = other DNA
ggggtgtgaaaacctacacctatccacaatgttttcattgtgaatcgcaggtttgcttcgttgcacagggttaaaatcccgcgctattttgtccgttacagacgcatagcagtgcaagcatacttagtcttaggagtatgcatcctggaagtccgatcactcctcgtggagtgatcctttaaaatctcgggggagatcttcgtggatcctagcgagcatcaatcgtggtaagacaataaatcattgatgcgtgttaagacacacttgttagaaatttctttcagaaaccgtttgcagttggcgcacaactgtgatttgactgaaccccattatccgaacggcaggaaaggtgaacctgtggagtagtgccctagaaggttcaatcccctttctcgttaatggtttgtcactcaggatctggccgcaaaaccagtaactaagtaatcccagtttgagg

SEQ ID NO: 14211 - DNA, 461 bp, synthetic construct
  source 1..461: mol_type = other DNA
tggggggtgtgaaaacctacacctattcacaatgttttcattatgaatcgtaggttcgcttcgttgcacagggttaaaatcccgcgctattttgtccgttacagacgcatagcagtgcaagcatacttagtcttaggagtatgcatcctggaagtttgatcgaccctcacggggcgatcctctaaaatctcgagagagatcttcgtggatcctagcgagcatcaatcgtggtaagacaatttaatattgatgcgtgttaagacacacttgttagaaatttctttcagaaaccgtttgcagttagcgaataactgtgatttgactgaaacccattatcagaacggcaagaaaggtgaatctgtggagtagtgccctagaagattcaatcctctttctcgttaatggcttgtcacccaggatctggccgctaaaccagtaactatccaatcctaattcctagg

SEQ ID NO: 14212 - DNA, 994 bp, synthetic construct; identical to SEQ ID NO: 2572
  source 1..994: mol_type = other DNA

SEQ ID NO: 14213 - DNA, 353 bp, synthetic construct
  source 1..353: mol_type = other DNA
ttaataagtttggtcgctgcacgaccggggctcacgcccggggatttggtcccgttcaaggtgaggcccttgtagtaacctctcgccgctgcgcggacgaatacataagtccgtccagtactgacagagtcagcgccgcacatgcgtgaaatgtgtgaatcgcaaactgaagcgacctatggtgataacggatgtaccatctagctgtggagtagtgaccctagaagctaatccgatggttccaccagtcgttgtttgccggcaattgccacaaacggtttcgtgttttgcgtgaagaaacacggtctctaacgagtacatgtccggttggccccgaacgaggcccgataaac

SEQ ID NO: 14214 - DNA, 437 bp, synthetic construct; identical to SEQ ID NO: 1878
  source 1..437: mol_type = other DNA

SEQ ID NO: 14215 - DNA, 353 bp, synthetic construct
  source 1..353: mol_type = other DNA
ttaataattttggttgctgcacaaccggggcttttgcccggggatttcatcccgttcaaggtgaggcccttgtagtaacctctccccgctgcgtgagcgaatacataagttcacccagtactgacagtgtcagcgccgcacgtgcgtgaaacgtgtgactcgcagactgaagcgacctatggtgataacggatgtaccatctagctgtggagtagtgaccctagaagctaatccgatggttccaccagtcgttgtttgccggcaaacgccacaaacggtttcgtgctttgcgtgaagaagcacggtctcttaagagttcatgtacggttgaccccgaacgaggtccgaacata

SEQ ID NO: 14216 - DNA, 520 bp, synthetic construct; identical to SEQ ID NO: 2067
  source 1..520: mol_type = other DNA

SEQ ID NO: 14217 - DNA, 338 bp, synthetic construct; identical to SEQ ID NO: 1617
  source 1..338: mol_type = other DNA

SEQ ID NO: 14218 - DNA, 959 bp, synthetic construct; identical to SEQ ID NO: 245
  source 1..959: mol_type = other DNA

SEQ ID NO: 14219 - DNA, 541 bp, synthetic construct
  source 1..541: mol_type = other DNA
ggggtgatgggaaacttacgtttcgccaacgttaaggtactgtgattttgtacttacgactcagggtcgaccttaactggtttatactctgtcgagtttgggcagatagcagagccatcaccctaggtgtggaaacatctataatgcctggcaggcatattttctgacgttcctttctttcgtgttgtttcaaacctgacaagtcactgtcaaacttaaattccaacttaaacttaaatttaaatttatattcagactaaaactttaattcaaactaacacaaaattatttaaaactttaaacttaaaatgagatttagatttagcttgcatcttactgcgaaacacgcttagagcgaaatggcggcggctgtacgcaaaatatataaaacatatatcttacgtctcacttacggcaaatgtgaaaccgcctactggtttagtggaagagtgtcggaccgtgctcccacactggcaaccgtgatgcccggcacatctcttgattgagtagggcttccctccgaatacgggacgaaataatc

SEQ ID NO: 14220 - DNA, 395 bp, synthetic construct
  source 1..395: mol_type = other DNA
ggggtgatgggaaacttgcgtttcgccaacgttaaggtactgtgattttgtacttacgactctgggtcgaccttaactggtttatactctgtcgagtttgtgcaaatagcgagactatctccccgggttacggtggatcctagtgcatggctagcacatcaccatttcatttgtcatatgaaatagctagcaactcactgcaaaataaaataaaaacttgaacagctaacatcttactgtgaaatgaaataaaaatttgataaagctagcatctcactgcaacacttaataaaataaaatgaaatgaaatatctcacgtcccactcacgtcaaatgtggaaccgccgactggtttagtcgaagagcaacagccatgctaatgctggcactccgtg

SEQ ID NO: 14221 - DNA, 369 bp, synthetic construct
  source 1..369: mol_type = other DNA
ctttctttcgtgttgtttcaagcctgacaagtcactgtcaaacttaaattctaacttaaacttaaatttaaatttatattcagactaaaactttaattcaaactaacataaaattatctaaaaccttaaactaaaaatgaaatttagatttagcttgcatcttactgcgaaacacgcttagagcgaaatggcggcggctgtacgcaaaatatataaaacatatatcttacgtctcacttacggcaaatgtgaaaccgcctactggtttagtggaagagtgtcggaccgtgctcccacactggcaaccgtgatgcccggcacatctcttgattgagtagggcttccctccgaatacgggacgaaacaatc

SEQ ID NO: 14222 - DNA, 408 bp, synthetic construct; identical to SEQ ID NO: 1799
  source 1..408: mol_type = other DNA

SEQ ID NO: 14223 - DNA, 369 bp, synthetic construct; identical to SEQ ID NO: 1697
  source 1..369: mol_type = other DNA

SEQ ID NO: 14224 - DNA, 309 bp, synthetic construct; identical to SEQ ID NO: 1511
  source 1..309: mol_type = other DNA

SEQ ID NO: 14225 - DNA, 378 bp, synthetic construct; identical to SEQ ID NO: 1722
  source 1..378: mol_type = other DNA

SEQ ID NO: 14226 - DNA, 309 bp, synthetic construct; identical to SEQ ID NO: 1512
  source 1..309: mol_type = other DNA

SEQ ID NO: 14227 - DNA, 588 bp, synthetic construct; identical to SEQ ID NO: 2156
  source 1..588: mol_type = other DNA

SEQ ID NO: 14228 - DNA, 1000 bp, synthetic construct; identical to SEQ ID NO: 253
  source 1..1000: mol_type = other DNA

SEQ ID NO: 14229 - DNA, 1000 bp, synthetic construct; identical to SEQ ID NO: 2586
  source 1..1000: mol_type = other DNA

SEQ ID NO: 14230 - DNA, 280 bp, synthetic construct
  source 1..280: mol_type = other DNA
ggttgaggactgagatgtagatttctttacaattcatttatttctattttaaatgtatgggtatatacatttaaatcatttatttaacttattatgcatacattttcacatctgtgctagtaagttagtaatctttggagaacatttcagttctctaattcatcaacgttcagttgaaatactttaataaatgaatgaaatttacaactcagtttcaatggttgaggactgagatgtagattacattcattaacaaaaacatccagaaaggagctgattt

SEQ ID NO: 14231 - DNA, 827 bp, synthetic construct; identical to SEQ ID NO: 2460
  source 1..827: mol_type = other DNA

SEQ ID NO: 14232 - DNA, 374 bp, synthetic construct; identical to SEQ ID NO: 1714
  source 1..374: mol_type = other DNA

SEQ ID NO: 14233 - DNA, 457 bp, synthetic construct; identical to SEQ ID NO: 1932
  source 1..457: mol_type = other DNA

SEQ ID NO: 14234 - DNA, 375 bp, synthetic construct; identical to SEQ ID NO: 1717
  source 1..375: mol_type = other DNA

SEQ ID NO: 14235 - DNA, 741 bp, synthetic construct; identical to SEQ ID NO: 2362
  source 1..741: mol_type = other DNA

SEQ ID NO: 14236 - DNA, 317 bp, synthetic construct; identical to SEQ ID NO: 1541
  source 1..317: mol_type = other DNA

SEQ ID NO: 14237 - DNA, 368 bp, synthetic construct
  source 1..368: mol_type = other DNA
ggggttagagaaatcttgggagatttctatcgtcatagacatgtgtgatgtacttacgtctctaggacgcctatgactggtttatactctgtcgagttgaacgtctggtggttcctacgtataagaactgcagtcttatgtgtgaaaccctacccctcgctaaccgagaacggttgtgtgatttgaggaacgttcgttgtttaaacttctttggaggaactttaaattgtattaattttgcatttgcaagagttagcccatctctaaaatgaggctatcgctgtgaacagccttaaagaccctctgggcaaactgattatgaattgagagttagacttctcggaaaaagtctggtcttgtcctagatt

SEQ ID NO: 14238 - DNA, 538 bp, synthetic construct; identical to SEQ ID NO: 2095
  source 1..538: mol_type = other DNA

SEQ ID NO: 14239 - DNA, 383 bp, synthetic construct; identical to SEQ ID NO: 1736
  source 1..383: mol_type = other DNA

SEQ ID NO: 14240 - DNA, 1000 bp, synthetic construct; identical to SEQ ID NO: 2587
  source 1..1000: mol_type = other DNA

SEQ ID NO: 14241 - DNA, 392 bp, synthetic construct; identical to SEQ ID NO: 1758
  source 1..392: mol_type = other DNA

SEQ ID NO: 14242 - DNA, 746 bp, synthetic construct; identical to SEQ ID NO: 2367
  source 1..746: mol_type = other DNA

SEQ ID NO: 14243 - DNA, 328 bp, synthetic construct; identical to SEQ ID NO: 1574
  source 1..328: mol_type = other DNA

SEQ ID NO: 14244 - DNA, 254 bp, synthetic construct
  source 1..254: mol_type = other DNA
tgcattctgattatcttacatcttttatcaaatcttttaatctttgagacattcgtctcattcaaattccaattcacagaggaattaatgttaaaacatcaactcactctcttttgtaagataacaggaagtacctgtttcattagggagaagtaagtgttttacaaagatgcagaattctcaagctcctgcatttacttctgaaacatgaagggaaacagcttgaacaaagtcactcacagaaagggggagat

SEQ ID NO: 14245 - DNA, 530 bp, synthetic construct; identical to SEQ ID NO: 185
  source 1..530: mol_type = other DNA

SEQ ID NO: 14246 - DNA, 503 bp, synthetic construct
  source 1..503: mol_type = other DNA
cagaaaggaggaatctattgtggtttgtaaaatcattaattcaaaaccacatagtcactcattaatcgccaaatcacagtggatgctgtgtactttagcgattgagtgcagaaaggaggtatatcttgacagatatacagattaagtactggggtctcaaagaaaccggtcgtcacaatctcgctggagaaagacaagcggctaatgaactgaaagagactcacaggcacaatgtcactggtgagaaagaaaccaaacgacataatcaaacctttgagggtgagacaaagagacataatgttgtaggcgaaagagaaacgcacaggcatagtgtcgtgctcgaaggtattgagaaaggtaaactcaaagaggttactcgacataacgtagcttctgagaaaattgattctggtaagttgtctgaatccaaaagacataataaggttactgaatcaatccagcagcaagatgcaaatacaaggcttcaagttgcttatacccaa

SEQ ID NO: 14247 - DNA, 323 bp, synthetic construct; identical to SEQ ID NO: 1557
  source 1..323: mol_type = other DNA

SEQ ID NO: 14248 - DNA, 259 bp, synthetic construct
  source 1..259: mol_type = other DNA
atttaaacagaaaggagggatcatctaatgagagatggatccggaaaatcaaatttacaagaacaacacgaggtaatatttcgaaactactttatcagtagcgtagaacaacttctgaatggatttcacttagtgaaattatcattaggtgatatctgtttagaggattcagattacctgaaagaagaacgtgagctatttggtcatcttgctcactatctcgtaaatgtaaaacatccagaagaaaggagatgatggc

SEQ ID NO: 14249 - DNA, 580 bp, synthetic construct; identical to SEQ ID NO: 192
  source 1..580: mol_type = other DNA

SEQ ID NO: 14250 - DNA, 480 bp, synthetic construct; identical to SEQ ID NO: 1984
  source 1..480: mol_type = other DNA

SEQ ID NO: 14251 - DNA, 803 bp, synthetic construct; identical to SEQ ID NO: 2438
  source 1..803: mol_type = other DNA

SEQ ID NO: 14252 - DNA, 445 bp, synthetic construct; identical to SEQ ID NO: 1902
  source 1..445: mol_type = other DNA

SEQ ID NO: 14253 - DNA, 613 bp, synthetic construct; identical to SEQ ID NO: 2191
  source 1..613: mol_type = other DNA

SEQ ID NO: 14254 - DNA, 486 bp, synthetic construct; identical to SEQ ID NO: 1997
  source 1..486: mol_type = other DNA

SEQ ID NO: 14255 - DNA, 433 bp, synthetic construct; identical to SEQ ID NO: 1871
  source 1..433: mol_type = other DNA

SEQ ID NO: 14256 - DNA, 388 bp, synthetic construct; identical to SEQ ID NO: 1746
  source 1..388: mol_type = other DNA

SEQ ID NO: 14257 - DNA, 458 bp, synthetic construct; identical to SEQ ID NO: 1935
  source 1..458: mol_type = other DNA

SEQ ID NO: 14258 - DNA, 494 bp, synthetic construct
  source 1..494: mol_type = other DNA
gcctatgggtggtctacataggcgagcatgcgttgctcgatatagaccgccattattggtaacacgctaaaagtgttctcatctggagaaggtgatttgccttcttccatgaggctccctggagggattgcccaataatggttgataattttggtcgctgcacgaccggggccttcgcccggggatttcatcccgttcaaggtgaggcccttgtaataacctctcgccgctgcgcggacgaatacataagctcgcccagtactgacagagtcagcgccgcccatgcgtgaaatgagtgactcgcaaactgaagcgacctatggtgataacggatgtaccatctagctgtggagtagtgaccctagaagctaatccgatggttccaccagtcgttgtttgccggcaatggccacacacggtttcgtgctttgcgtgaagaagcacggtctctaacgagtacatgtccggttggccccgaacgaagcccgattaac

SEQ ID NO: 14259 - DNA, 832 bp, synthetic construct; identical to SEQ ID NO: 2464
  source 1..832: mol_type = other DNA

SEQ ID NO: 14260 - DNA, 431 bp, synthetic construct
  source 1..431: mol_type = other DNA
cttgtatagtttacaagtattctacgaagggaggtgtagcatgttgctataccaatcgcaattttatcaagcgattaacaaaaacatcctgacgttactgactagctacatgctggcatgcacagtaggtacagtcattgtaacggatctgtggaaaggaggtaatttatatcacagatattcaggttaagtactggacattgaacgaaagtaaacgtcacaatgttagtactgagacacaagcagccaatgaattggctgaaactaggcgacacaatgtgtcgactgaaactttgggacgtgacaccctaaatgaagataaacgtcacaatgtcacaactgaaacggagagtagacgccataatgtacaaactgaacgtgaggcgaagcgtcataatgttgctggtgaagtcgaaaccaaacgacataat

SEQ ID NO: 14261 - DNA, 522 bp, synthetic construct; identical to SEQ ID NO: 2072
  source 1..522: mol_type = other DNA

SEQ ID NO: 14262 - DNA, 316 bp, synthetic construct; identical to SEQ ID NO: 1538
  source 1..316: mol_type = other DNA

SEQ ID NO: 14263 - DNA, 346 bp, synthetic construct; identical to SEQ ID NO: 1634
  source 1..346: mol_type = other DNA

SEQ ID NO: 14264 - DNA, 274 bp, synthetic construct
  source 1..274: mol_type = other DNA
taggagtaagggctataagccatcctacaaaggtaaacagagtgggaaagactctaggtcccagagagtcaacctggataatgaacgcgttagtaagtatgacagaagtgttgaggatgatatcgagaaaggttcaaaagggaaagggaagaatgatatctcagacttcaaccgcaatcctgaattattaaaatcagctggttcgctgccctttgcgactattttgggcgacaggaacttgggtgatattgatccaagttcagctccgggtatc

SEQ ID NO: 14265 - DNA, 473 bp, synthetic construct; identical to SEQ ID NO: 1969
  source 1..473: mol_type = other DNA

SEQ ID NO: 14266 - DNA, 618 bp, synthetic construct; identical to SEQ ID NO: 2197
  source 1..618: mol_type = other DNA

SEQ ID NO: 14267 - DNA, 384 bp, synthetic construct; identical to SEQ ID NO: 1741
  source 1..384: mol_type = other DNA

SEQ ID NO: 14268 - DNA, 319 bp, synthetic construct; identical to SEQ ID NO: 1543
  source 1..319: mol_type = other DNA

SEQ ID NO: 14269 - DNA, 333 bp, synthetic construct; identical to SEQ ID NO: 1591
  source 1..333: mol_type = other DNA

SEQ ID NO: 14270 - DNA, 320 bp, synthetic construct; identical to SEQ ID NO: 1547
  source 1..320: mol_type = other DNA

SEQ ID NO: 14271 - DNA, 546 bp, synthetic construct; identical to SEQ ID NO: 2108
  source 1..546: mol_type = other DNA

SEQ ID NO: 14272 - DNA, 504 bp, synthetic construct
  source 1..504: mol_type = other DNA
agccgcggaatgcgggataataagcaaaccatctgctatggagctggtctagcagacacgacaaatccagtgatggagctagtactgagaggggccggtggtgtggtaacacccaccttttgtgcctaccttcggtggaacgggttgggaattccgtaaggaccccagtaatgtccgtgcgacggggaaaagctacaacagcctgcctgtaacctgtaagggccaagggactacccagagtgtaacgactgcgaatcgtttactcagtatctaggaacagtctacttcccacaactcaattgagtttctggtcgtcgaaagccagagttaaaatcgtgggcggtgttcgaccttcacaattcttgaaaccccgtttttgcaatagatcaactattgaatattgcccggcagagtgagttaatccaacagccaccaagatactacgaacacttcacaaacttcatctattcagagagagcgagctaatccagcactctgaacatc

SEQ ID NO: 14273 - DNA, 673 bp, synthetic construct; identical to SEQ ID NO: 2277
  source 1..673: mol_type = other DNA

SEQ ID NO: 14274 - DNA, 764 bp, synthetic construct; identical to SEQ ID NO: 2391
  source 1..764: mol_type = other DNA

SEQ ID NO: 14275 - DNA, 336 bp, synthetic construct; identical to SEQ ID NO: 1607
  source 1..336: mol_type = other DNA

SEQ ID NO: 14276 - DNA, 1000 bp, synthetic construct; identical to SEQ ID NO: 254
  source 1..1000: mol_type = other DNA

SEQ ID NO: 14277 - DNA, 298 bp, synthetic construct
  source 1..298: mol_type = other DNA
ggcaataaaatctatagttggattacggacaacttgggtgttaaaagctgcgtgccttatgttatctgcatttaagttgttgtatgcatagtaaccggccattgtcgctgctaaacctccaatgatgaatttggtttgtccacttgtaatagtacgtttcgtgaactgtccagcacctcgctggaacaccgatccaacacctcgtcggatcatatagagcctgtgcattattgctacacgctcttctaccgacacttacgaggtgtaagcgtttaacgaaatttattacgaggtgtaa

SEQ ID NO: 14278 - DNA, 608 bp, synthetic construct; identical to SEQ ID NO: 197
  source 1..608: mol_type = other DNA

SEQ ID NO: 14279 - DNA, 533 bp, synthetic construct; identical to SEQ ID NO: 2090
  source 1..533: mol_type = other DNA

SEQ ID NO: 14280 - DNA, 471 bp, synthetic construct; identical to SEQ ID NO: 175
  source 1..471: mol_type = other DNA

SEQ ID NO: 14281 - DNA, 500 bp, synthetic construct; identical to SEQ ID NO: 2025
  source 1..500: mol_type = other DNA

SEQ ID NO: 14282 - DNA, 373 bp, synthetic construct; identical to SEQ ID NO: 1712
  source 1..373: mol_type = other DNA

SEQ ID NO: 14283 - DNA, 278 bp, synthetic construct
  source 1..278: mol_type = other DNA
gacctgatgtccgagctatccgctcttcgtaaagagataagtaacatcagcgtaaaaatgaataaagggacagcaccagcttccggagcaccgagggctgagcctacaggagggagagtccactcaggcagacaggtggtacaggccacacctgcgcaagaaccaaagcaagacgattctgtggtggctggacaacctgcctggaaacgacctatccaattctagttcgatgacaaccaaggttgagtgaggggactaaggagttaacagattgcgaa

SEQ ID NO: 14284 - DNA, 263 bp, synthetic construct
  source 1..263: mol_type = other DNA
cgccgcaaggcgacgaggccggggtctagcccaccccggtcaccccgacggaatcatccgtcgggggcccccccgcagctctcaagaagaactgcaagggagtccgaggtcgtctggaaacagaccccttgggcgcaaccctagcatggcttcggagggccgcccggctgcctgccttcataggccagcagccggacaacttccggattgccaggcgtgggccgaggtctggtggctccacccgagcggtttcccgctcggtt

SEQ ID NO: 14285 - DNA, 928 bp, synthetic construct
  source 1..928: mol_type = other DNA
aggatcctatacccccttgtttgggtggtatgtgattccccatgcatgctggttacatgcatgtagagtgtatggttttattgcgctccatacggaagcaatcatggacgggctttcgcctctaaccattatcttccttatgcgccgcctttgaagaaggtgagcataacaggttggttagtcgcagacgtcacagtacccatgtcctctatacgttagaagttatagagggagaactatcggaacacctacaaatgatgtggaaaggcaatgttgacccaaagtggcgcatcctttacgtatcattaaaatataacagtgttatatgttatacaattattactaattgtataatatataataatctatatattaataaccaaaactagttaatatctatcagaatgacagatatcaacaccgttttgcagaacgtacaatctgctcaatcacctaaagcactagccgaggcccttggtattcgccctgggacaaaaggactcgatgacctatacgaacaccgtgaggtgtggtataagttcatcgaggctgttgtccaggcggataacgaaggctcggttagcgctttaggccgcagcatgcaccctattcaggctcttgtttcgaagaccatcgctggtcacaaaacaagcgcccagatagggagcatgactgcagatcaaatcagggcaatattggctaagattgagaaggaagagggaaaataatgtggtgacacattatttcctttcttctctctcaacttagtcagtatggccttgaaatggtccatcttttacgctgggtacggcatgcccagtatcatataaaggtcactttaaaagtggtctttatatgaagctgcattttccacatcattcggttaccgagtatccttacattatacagtttgatttattaattagtc

SEQ ID NO: 14286 - DNA, 433 bp, synthetic construct; identical to SEQ ID NO: 1872
  source 1..433: mol_type = other DNA

SEQ ID NO: 14287 - DNA, 268 bp, synthetic construct
  source 1..268: mol_type = other DNA
cttggttttcggtcctgtgcggatgttcaacaggtcagtacgtgaataatgggccagtaccacctcgctattttttatgcgcagcgtgacctaccggatttcttgtaaaaattttttcttttctaaaaaaaaattatagtatatccagcggttgtttgtctttgatttcttctcgcagttctccgtcaaaaaagaactgaaaagaataccaggtacaatagcataattaggttaatgggtctaaaaccgagtatgcgttgatttacgt

SEQ ID NO: 14288 - DNA, 624 bp, synthetic construct; identical to SEQ ID NO: 2205
  source 1..624: mol_type = other DNA

SEQ ID NO: 14289 - DNA, 321 bp, synthetic construct; identical to SEQ ID NO: 1550
  source 1..321: mol_type = other DNA

SEQ ID NO: 14290 - DNA, 635 bp, synthetic construct; identical to SEQ ID NO: 2220
  source 1..635: mol_type = other DNA

SEQ ID NO: 14291 - DNA, 510 bp, synthetic construct; identical to SEQ ID NO: 2046
  source 1..510: mol_type = other DNA

SEQ ID NO: 14292 - DNA, 559 bp, synthetic construct; identical to SEQ ID NO: 2124
  source 1..559: mol_type = other DNA

SEQ ID NO: 14293 - DNA, 394 bp, synthetic construct; identical to SEQ ID NO: 1763
  source 1..394: mol_type = other DNA

SEQ ID NO: 14294 - DNA, 468 bp, synthetic construct; identical to SEQ ID NO: 1958
  source 1..468: mol_type = other DNA

SEQ ID NO: 14295 - DNA, 388 bp, synthetic construct; identical to SEQ ID NO: 1747
  source 1..388: mol_type = other DNA

SEQ ID NO: 14296 - DNA, 263 bp, synthetic construct
  source 1..263: mol_type = other DNA
tggacgagccacgacggacgcatgcgggtaggtactacctaccgcagcgcgcgtacgggtgtggagccgtggcccccctgagggggtccaggcatccaaagaggaagcttgcgcccccccttgtaacccggagaaaggagatagaggtacggaggaatgaggcagctgcagagcagcgcctgaccaacctcgcggccgttgcgatcgtgcctggtgaacgagaggtctcgcttagcgcagaagacgtgcgcgccattgaccgg

SEQ ID NO: 14297 - DNA, 716 bp, synthetic construct; identical to SEQ ID NO: 2328
  source 1..716: mol_type = other DNA

SEQ ID NO: 14298 - DNA, 779 bp, synthetic construct; identical to SEQ ID NO: 220
  source 1..779: mol_type = other DNA

SEQ ID NO: 14299 - DNA, 801 bp, synthetic construct; identical to SEQ ID NO: 2434
  source 1..801: mol_type = other DNA

SEQ ID NO: 14300 - DNA, 705 bp, synthetic construct; identical to SEQ ID NO: 2311
  source 1..705: mol_type = other DNA

SEQ ID NO: 14301 - DNA, 724 bp, synthetic construct; identical to SEQ ID NO: 211
  source 1..724: mol_type = other DNA

SEQ ID NO: 14302 - DNA, 515 bp, synthetic construct; identical to SEQ ID NO: 182
  source 1..515: mol_type = other DNA

SEQ ID NO: 14303 - DNA, 743 bp, synthetic construct; identical to SEQ ID NO: 213
  source 1..743: mol_type = other DNA

SEQ ID NO: 14304 - DNA, 891 bp, synthetic construct; identical to SEQ ID NO: 2522
  source 1..891: mol_type = other DNA

SEQ ID NO: 14305 - DNA, 664 bp, synthetic construct; identical to SEQ ID NO: 2262
  source 1..664: mol_type = other DNA

SEQ ID NO: 14306 - DNA, 864 bp, synthetic construct; identical to SEQ ID NO: 2500
  source 1..864: mol_type = other DNA

SEQ ID NO: 14307 - DNA, 736 bp, synthetic construct; identical to SEQ ID NO: 2356
  source 1..736: mol_type = other DNA

SEQ ID NO: 14308 - DNA, 877 bp, synthetic construct; identical to SEQ ID NO: 2509
  source 1..877: mol_type = other DNA

SEQ ID NO: 14309 - DNA, 506 bp, synthetic construct; identical to SEQ ID NO: 2035
  source 1..506: mol_type = other DNA

SEQ ID NO: 14310 - DNA, 251 bp, synthetic construct
  source 1..251: mol_type = other DNA
cctccctaaaaggagggtatccggtagaaccgcggcattaaattctgtggattctatctgtaaaaagcgcaacgctgtactttctaccctttatgggtgatccgtactaatctttaagctgatatatcttaaaggatatttgcgattactatggtattgaaatttaaataccacttacaatcataataagggctactccgtaacagaagtagactctcattggggtttgcaccctctctaaaactgctttg

SEQ ID NO: 14311 - DNA, 781 bp, synthetic construct; identical to SEQ ID NO: 221
  source 1..781: mol_type = other DNA

SEQ ID NO: 14312 - DNA, 322 bp, synthetic construct
  source 1..322: mol_type = other DNA
ggcaattctaggatgtatcctccggttgaaaacgcttgggaaaggtgggagtgtaggacaagaaggcgtgatgtagggctaggaaactggttaaaggagtgtgttgggtttgaggggggcatgcggtcaccggcagagataaagaattgccgcgctgcgatcaccgtgagatgccttgttcctcgaaatggtagagtaaggaaaggatcctgcccgatctgcagtatttagctacagttctcaccgtgagatgccttgttcctcgaaataggtaggaatccgaaaggaccctgcccgatctgcagtatttagctacagttct

SEQ ID NO: 14313 - DNA, 280 bp, synthetic construct
  source 1..280: mol_type = other DNA
gtcaacggacaatttttctcccctacgggagtaaaaaatgcacgatccagagttcgctccggttcggtgatgtttacgtacatcacatacggccaattctcgtatggcaatccgtcctggttatccacaccaggcagtggtggtctgactccactcgagagtaaactcgatgaaatcacgttaggagacgttctcaaaccagattggtggtttgtaaaaaatcctcggcgaaggcgactgcagctagaaacggcagaagaaaaccttgaattaactcacg

SEQ ID NO: 14314 - DNA, 674 bp, synthetic construct; identical to SEQ ID NO: 207
  source 1..674: mol_type = other DNA

SEQ ID NO: 14315 - DNA, 335 bp, synthetic construct; identical to SEQ ID NO: 1601
  source 1..335: mol_type = other DNA

SEQ ID NO: 14316 - DNA, 262 bp, synthetic construct
  source 1..262: mol_type = other DNA
tcagcgtcgccgctgtcccggttttagagacttgtaacctgtctatgtctcgaaagactggagcggatggtaaacgctacgcaagtggcacctggcccctggtggatttagcgcttacacaccctgaacaaaaggaaaacgcacccgtcgaccacttcgaaagtggtaccctacaggtggggcggagaacatactccgtaaagaaagtcactgtccgtgggagacaacccgtgggacataaaataacaaaaacaagacaaaa

SEQ ID NO: 14317 - DNA, 481 bp, synthetic construct; identical to SEQ ID NO: 1986
  source 1..481: mol_type = other DNA

SEQ ID NO: 14318 - DNA, 308 bp, synthetic construct; identical to SEQ ID NO: 1507
  source 1..308: mol_type = other DNA

SEQ ID NO: 14319 - DNA, 504 bp, synthetic construct; identical to SEQ ID NO: 2032
  source 1..504: mol_type = other DNA

SEQ ID NO: 14320 - DNA, 611 bp, synthetic construct; identical to SEQ ID NO: 2189
  source 1..611: mol_type = other DNA

SEQ ID NO: 14321 - DNA, 256 bp, synthetic construct
  source 1..256: mol_type = other DNA
ggacgaaacgtgctggcacgtcgataaaaaaacaaaaatgccaaaaccagcaccgtcgggagtgggatttaataagtgcgatctataagttggaaaaactgcatattaaatcaaccaccctgaggagtaccttgaaataggacgaaacgtgctggcacgtcggtggaaaagatttacagatacaagaattcacaccagcaaggcagataaacgtagttgagtcaattgataatatactacgaacaaactaaacacg

SEQ ID NO: 14322 - DNA, 343 bp, synthetic construct; identical to SEQ ID NO: 1628
  source 1..343: mol_type = other DNA

SEQ ID NO: 14323 - DNA, 393 bp, synthetic construct
  source 1..393: mol_type = other DNA
cttgaattactctgaaacactaagtctattgtctttgcactagtattcaaggcgttgtaaccctcaccagggattgtaacttctatgcacctaactgtttggttatcgacttaatctgttgtctgtgttcttagccacttgagtgtatgcgttttaaccctcgccagggatatttcctactgctaaccaaattgtttgctcttacttgttactcttggcttaagctcgtgtctatattcttaagctcttgggagtatgcgttttaaccctcgccagggatatcctttcagggatattttctatttctaactagattgccttatctcgtttgtactgcacttgttagtaacttagaataagaaactaatcggattcccaatttcgttcttattc

SEQ ID NO: 14324 - DNA, 293 bp, synthetic construct
  source 1..293: mol_type = other DNA
gataaaaacaaaaaatccctaggcatggcaagaaaactaagaacaatgcagtttgaatagatttaaaaacaattaatttgtttaatttaatttaacatttgaactgtctggcacagttagactgtcgagccgtctgatgagtagcacctcagggtcacgaaacgctggacgtaacggcggaacagattattgaggttagtagaacactttcagaacacaacaacacaacaaacaaatacaacacaacaacacaacacaacaacacaacacaacaacactgtcaaacaaacaag

SEQ ID NO: 14325 - DNA, 807 bp, synthetic construct; identical to SEQ ID NO: 222
  source 1..807: mol_type = other DNA

SEQ ID NO: 14326 - DNA, 778 bp, synthetic construct; identical to SEQ ID NO: 2404
  source 1..778: mol_type = other DNA

SEQ ID NO: 14327 - DNA, 307 bp, synthetic construct; identical to SEQ ID NO: 1501
  source 1..307: mol_type = other DNA

SEQ ID NO: 14328 - DNA, 635 bp, synthetic construct; identical to SEQ ID NO: 2221
  source 1..635: mol_type = other DNA

SEQ ID NO: 14329 - DNA, 387 bp, synthetic construct
  source 1..387: mol_type = other DNA
aaaaaagaagaaaaggggaaagcgtcttgacacggaggcctttcttccttggggcttcttttttggcaatggtaatgtccatgccttctcgcagcttgctgcgagcggacatgggttcgagagggttttatagttacatgcgtctttgacaattgtagctttctaaaatatccatctcggccattgtgtttattactccagcaacgatcactaaacttgcacgctctctcctccagcgtatcctggtcgcaccttcgcttctagcaacggtgtgttcttttctgcgcttgttttcaggtagagtgttcactagcagcggtaagtgcgtgcgcgattgtttagtttctgcccgtagccctagtttctaacgacggcagcgtagcggtg

SEQ ID NO: 14330 - DNA, 765 bp, synthetic construct
  source 1..765: mol_type = other DNA
ccagtgtagtagggggcaggaaagaacgaagcacgtgcttatcggtttggctcacccaacttgggcgaaatcgtagcgtgtggatactcaaagtgtcaaggtacagtcaacatgcaaacacgactagtaccgaaaactcccacaaactttgaggcctactacagagcgtacaagtgctagggtagaaagagctggggctataacccccggatctcttatcaggccagcaccgctcagcccctctttttgtgtaaatcccacccggtctagcggagtgggacgcatataaaatgagcgtgtaacatcgctcaacccgtccaagcacatgacactaaactgtactcgcccaggatatggcgttaaactgtaccgtccgcgtttgccagcggttaaaacaacggcttttcatcacagccgcgtgcgagtccgcgggataataaatgttctaacagactcgaaaagacatcctattttcaagttctcgtcgctacgttaaacgtcggcatttcttggatctggtggggtaacatacaagtcaagtatggtgtgaaccggggctacacaactaccgggaagctaacgtaactgcgctggtgctctactttcaacgtgcttcaggaccgaaaccgtccgtaaaccaatgggttgcacagaaagtaaaggcgtagggaacgtgcctaggacaagaactaggtggacagactgacactcatcagtgctttctcgattgaaagcagtagcaaacagtcggtgcgggaactccgc

SEQ ID NO: 14331 - DNA, 539 bp, synthetic construct; identical to SEQ ID NO: 2100
  source 1..539: mol_type = other DNA

SEQ ID NO: 14332 - DNA, 619 bp, synthetic construct; identical to SEQ ID NO: 198
  source 1..619: mol_type = other DNA

SEQ ID NO: 14333 - DNA, 452 bp, synthetic construct; identical to SEQ ID NO: 1920
  source 1..452: mol_type = other DNA

SEQ ID NO: 14334 - DNA, 729 bp, synthetic construct
  source 1..729: mol_type = other DNA
gtcaaaaaagcccccctccgtcaggagggtgcgtgctttttctgactcgactgcactgtcgatcaacgagtgcgctagaacgatcagaacggttcaactgaacctagtaggacgttcggctgatacacttttacccctccatatctgggggggtgatgtgtattgcggacgaaggaggggccaccatcagtctgcgcggccgaaagcgcgctcatgttcgtatgtgtttgtatgcgttcgtctcttgtctcacagcttttcttgaaatatgttaaattatatatgccacaaaaaacataaattatgaaaaattgtctacccgcactggagcctcctcgaggcgtcagatggtaacgctcgttttagacgagtggcgaatgccagtgcacggcggcctagtccactccccccagtccacgatgattcgaaattgtcgcgtgtgctggcgggctaggtgttaatcctcagggtccgcgaccggccattccagcgtaccaattttacgggagctccgtgcctccacctcccagtggaggagcgaggagacctgtttttgcgatcggttggaggctagcctagtaactccgcgcacgagtagtagttcgccttttcgcgacgtggcttggtaccccgtgcctcatctttagggatgaggagcgaggggtgctgggcctaggtcccaagaggttcgagcgagtccacagactgcacaggtttccagggtcgcgg

SEQ ID NO: 14335 - DNA, 455 bp, synthetic construct; identical to SEQ ID NO: 1926
  source 1..455: mol_type = other DNA

SEQ ID NO: 14336 - DNA, 391 bp, synthetic construct
  source 1..391: mol_type = other DNA
tacatagtgactactttacaatcaaagcctaaacaggcattactataaaagaaccgtcgtgttagcattgtgtttggctaacatcccaacgatagttggcgacattgaactgagagcaacatacgttaccaattcgattatcgttcaaaaagctctgggcaggaatttgaaaaatcaaacttcctgctaaagttaaacacacaaaccttatttttattttcctaatttaacgtttacgttattttatgtcagttgttcgtttgatagaagaagttgaagaaaacagtgaagaaatacatccgtttcaacaacgattacaagaagcaagtacaaattttcaattacgtcgatcaaattacccaataggcactacaagattatacaatcaaca

SEQ ID NO: 14337 - DNA, 559 bp, synthetic construct; identical to SEQ ID NO: 2125
  source 1..559: mol_type = other DNA

SEQ ID NO: 14338 - DNA, 924 bp, synthetic construct
  source 1..924: mol_type = other DNA
tttccattttaaatacatcttcggtactttagggctctcctttaatgttcttgccttgttaactcaccaccattactgcacccctatcttatcagagtgactcggttacttagatgttctacttaaccttgccccttatggcaacaggaaaagttccaaaactgctcgttccgggagattcccatccggtaaaaacccaagaccacactcaacatccggagtgtctaaacccaaggacgaccattgataatatttgtaaaattcatttcaacgtacttattttaaagcatcaagcgtcattatgtcagttgattaattagtttcactgattaattgagataacaaacaacttcctaaatttattttaagtgttttgagttgaagttcacaaatattatgcgatcatattactaatcaccgcctatttccatatcttccgatgaattccgtacaggaatgtaataatttttgttatttgtatttaatttataactttgatctatgctcatcccaccgtttagccattattaggttctgttatgaaactagtaattattgtttgaaaaccagtagttccagcgcgtcgtggcctattgacccccaaacaaagtctttgtctttccccaaaggtttggtcacctataagtctggctctaacatcgagtacagcaagtctgcccaacatttgttgcatctgactctgggggcaacaaatgtggcgggataaagttacaaacctgataacacaggtagctttagcacaaaaccccacattcccacccgagtaatgtcaattttattattttatgcactttataactatgttatggcaaatttattataaaaatgtattttaactatccaccttcttctttcacctttactgtcgaaactcttttccagtcaagaaaatcttaatgaaaa

SEQ ID NO: 14339 - DNA, 410 bp, synthetic construct; identical to SEQ ID NO: 1800
  source 1..410: mol_type = other DNA

SEQ ID NO: 14340 - DNA, 843 bp, synthetic construct
  source 1..843: mol_type = other DNA
ccctatcttatcagagtgactcggttacttagatgttctacttaaccttgccccttatggcaacaggaaaagttccaaaactgctcgttccgggagattcccatccggtaaaaacccaagaccacactcaacatccggagtgtctaaacccaaggacgaccattgataatatttgtaaaattcatttcaacgtacttattttaaagcatcaagcgtcattatgtcagttgattaattagtttcactgattaattgagataacaaacaacttcctaaatttattttaagtgttttgagttgaagttcacaaatattatgcgatcatattactaatcaccgcctatttccatatcttccgatgaattccgtacaggaatgtaataatttttgttatttgtatttaatttataactttgatctatgctcatcccaccgtttagccattattaggttctgttatgaaactagtaattattgtttgaaaaccagtagttccagcgcgtcgtggcctattgacccccaaacaaagtctttgtctttccccaaaggtttggtcacctataagtctggctctaacatcgagtacagcaagtctgcccaacatttgttgcatctgactctgggggcaacaaatgtggcgggataaagttacaaacctgataacacaggtagctttagcacaaaaccccacattcccacccgagtaatgtcaattttattattttatgcactttataactatgttatggcaaatttattataaaaatgtattttaactatccaccttcttctttcacctttactgtcgaaactcttttccagtcaagaaaatcttaatgaaaa

SEQ ID NO: 14341 - DNA, 748 bp, synthetic construct; identical to SEQ ID NO: 2371
  source 1..748: mol_type = other DNA

SEQ ID NO: 14342 - DNA, 352 bp, synthetic construct
  source 1..352: mol_type = other DNA
cgtcgcaactcgcaattcgcgccccacgtagcgggctacgtggttccgctttcgtcaagcgtttagtataaaagctaaaatacgtcagacctctcgactcgtgacacagtctagctcgtcagccgccgcgtttcggcgttcctggggtgaaaaagcggttatactagtctggggagggttccgttgatccagctttagtatagtcgatggtctttcgtcaatactttcgtcgccgatacctccaatttgtcaacaacggattcacttaaattacaaactaaataaaatataaaacatattaaaataggaaaacaaaaaaaacacatacacgtctacgtagtgagtgatcaac

SEQ ID NO: 14343 - DNA, 685 bp, synthetic construct; identical to SEQ ID NO: 2291
  source 1..685: mol_type = other DNA

SEQ ID NO: 14344 - DNA, 762 bp, synthetic construct; identical to SEQ ID NO: 2389
  source 1..762: mol_type = other DNA

SEQ ID NO: 14345 - DNA, 459 bp, synthetic construct; identical to SEQ ID NO: 1938
  source 1..459: mol_type = other DNA

SEQ ID NO: 14346 - DNA, 357 bp, synthetic construct; identical to SEQ ID NO: 1659
  source 1..357: mol_type = other DNA

SEQ ID NO: 14347 - DNA, 504 bp, synthetic construct; identical to SEQ ID NO: 180
  source 1..504: mol_type = other DNA

SEQ ID NO: 14348 - DNA, 411 bp, synthetic construct; identical to SEQ ID NO: 166
  source 1..411: mol_type = other DNA

SEQ ID NO: 14349 - DNA, 348 bp, synthetic construct; identical to SEQ ID NO: 1640
  source 1..348: mol_type = other DNA

SEQ ID NO: 14350 - DNA, 460 bp, synthetic construct; identical to SEQ ID NO: 1939
  source 1..460: mol_type = other DNA

SEQ ID NO: 14351 - DNA, 486 bp, synthetic construct; identical to SEQ ID NO: 1998
  source 1..486: mol_type = other DNA

SEQ ID NO: 14352 - DNA, 393 bp, synthetic construct; identical to SEQ ID NO: 164
  source 1..393: mol_type = other DNA

SEQ ID NO: 14353 - DNA, 339 bp, synthetic construct; identical to SEQ ID NO: 1618
  source 1..339: mol_type = other DNA

SEQ ID NO: 14354 - DNA, 288 bp, synthetic construct
  source 1..288: mol_type = other DNA
gttatttttattcaaagactgtttgagctacaacctgaacctgcttgactagattgcgcgacgatttattcaacacaagcatttatcagtacttagtttctttcaaccgcaattcaaaatagtaaaataagtattttgatttattccattataccatttagttataataccgtgactttgggacaattattagttattaagcgtaaacatagtatttgaggatcattcaacttaatatatacattacttaaaacattctacttaatctacatatttactgttctcgaa

SEQ ID NO: 14355 - DNA, 956 bp, synthetic construct; identical to SEQ ID NO: 244
  source 1..956: mol_type = other DNA

SEQ ID NO: 14356 - DNA, 1000 bp, synthetic construct; identical to SEQ ID NO: 2588
  source 1..1000: mol_type = other DNA

SEQ ID NO: 14357 - DNA, 774 bp, synthetic construct; identical to SEQ ID NO: 2399
  source 1..774: mol_type = other DNA

SEQ ID NO: 14358 - DNA, 323 bp, synthetic construct; identical to SEQ ID NO: 1558
  source 1..323: mol_type = other DNA

SEQ ID NO: 14359 - DNA, 534 bp, synthetic construct; identical to SEQ ID NO: 2092
  source 1..534: mol_type = other DNA

SEQ ID NO: 14360 - DNA, 608 bp, synthetic construct; identical to SEQ ID NO: 2187
  source 1..608: mol_type = other DNA

SEQ ID NO: 14361 - DNA, 378 bp, synthetic construct
  source 1..378: mol_type = other DNA
ggaatttgaaagaaatcaatactcatgaattcattctgagtaaactgagcctcaaggcaaaagtcaatagaacaaaagtgccgatgttttgcggatggaggttgtgttgtgacggcctcatcaaggaaccttgtttgatatacgagaggttgcaagttgcaattgagaatgggagactgatggatgtgatagactcatattttctggaattttcattcgcctacaaattaggtgagaggctctattcacatcttgaaattgaacagctgaattatcatcaagttttaacaaggttctttataaggaacaagcatctgttgagaggtgattcaaggcataacatctcagagctcgagtggctttcagacgaggatggcg

SEQ ID NO: 14362 - DNA, 401 bp, synthetic construct; identical to SEQ ID NO: 1782
  source 1..401: mol_type = other DNA

SEQ ID NO: 14363 - DNA, 435 bp, synthetic construct; identical to SEQ ID NO: 1875
  source 1..435: mol_type = other DNA

SEQ ID NO: 14364 - DNA, 1000 bp, synthetic construct; identical to SEQ ID NO: 255
  source 1..1000: mol_type = other DNA

SEQ ID NO: 14365 - DNA, 298 bp, synthetic construct
  source 1..298: mol_type = other DNA
aaacatcaacttctatactatccaatactttacattgtcgaggattggacagatggcccaactcacctacaggagtccattagaagttgatgtttcgttttacgatgctagtgctcaagctgcaatagctactacttcagctaatcactatgccaatagcgagagggagaatttcaaatacttttcctatcacttgcggcctgaggctaagaagaagctatctacagctggattatatttaagtcctttttcttttaccccacattcacacccagtttgtaagactttagaaaattat

SEQ ID NO: 14366 - DNA, 936 bp, synthetic construct; identical to SEQ ID NO: 239
  source 1..936: mol_type = other DNA

SEQ ID NO: 14367 - DNA, 705 bp, synthetic construct; identical to SEQ ID NO: 2312
  source 1..705: mol_type = other DNA

SEQ ID NO: 14368 - DNA, 922 bp, synthetic construct; identical to SEQ ID NO: 2539
  source 1..922: mol_type = other DNA

SEQ ID NO: 14369 - DNA, 531 bp, synthetic construct; identical to SEQ ID NO: 2088
  source 1..531: mol_type = other DNA

SEQ ID NO: 14370 - DNA, 269 bp, synthetic construct
  source 1..269: mol_type = other DNA
agtcagcaaaagaagaggacacagagttgatttttggtaaggtgtttggtgggacaatcagaggtgaaatcatttgttttgagaaggaagtggaggagcttttaaggagtcattcagccaactttcatcacccttgtgatcttcgtggtgctgagtttgacgacgtgactttcatctctgctcgcaccgaccttcaagagatagttggacctgatttgtatgtggtactaaccagggctaagaaaagcctcacaatactgcagccataa

SEQ ID NO: 14371 - DNA, 848 bp, synthetic construct; identical to SEQ ID NO: 2478
  source 1..848: mol_type = other DNA

SEQ ID NO: 14372 - DNA, 411 bp, synthetic construct; identical to SEQ ID NO: 1804
  source 1..411: mol_type = other DNA

SEQ ID NO: 14373 - DNA, 483 bp, synthetic construct; identical to SEQ ID NO: 1989
  source 1..483: mol_type = other DNA

SEQ ID NO: 14374 - DNA, 466 bp, synthetic construct; identical to SEQ ID NO: 1952
  source 1..466: mol_type = other DNA

SEQ ID NO: 14375 - DNA, 640 bp, synthetic construct; identical to SEQ ID NO: 2228
  source 1..640: mol_type = other DNA

SEQ ID NO: 14376 - DNA, 862 bp, synthetic construct; identical to SEQ ID NO: 2496
  source 1..862: mol_type = other DNA

SEQ ID NO: 14377 - DNA, 748 bp, synthetic construct; identical to SEQ ID NO: 2372
  source 1..748: mol_type = other DNA

SEQ ID NO: 14378 - DNA, 295 bp, synthetic construct
  source 1..295: mol_type = other DNA
gtggctttttcccttgtctttagtctgatcagctaaagagagtatcttgtcatctcgttgccaagactttgatcaaacctccttcctctagttcatcaccttccttctctcagtctgagaggaatattgccgtcacttggtgtcgcggccgacaacctatctgcaagagagagctcagtgtgtaatcctgtggctcgtcgccctctcgctctcatccccttattcttgttgtctcctcaccctccagcatcatcaccatcatcattcgcttcactggcccctccagtctcccacc

SEQ ID NO: 14379 - DNA, 413 bp, synthetic construct; identical to SEQ ID NO: 1809
  source 1..413: mol_type = other DNA

SEQ ID NO: 14380 - DNA, 1000 bp, synthetic construct; identical to SEQ ID NO: 2589
  source 1..1000: mol_type = other DNA

SEQ ID NO: 14381 - DNA, 389 bp, synthetic construct; identical to SEQ ID NO: 162
  source 1..389: mol_type = other DNA

SEQ ID NO: 14382 - DNA, 278 bp, synthetic construct
  source 1..278: mol_type = other DNA
aacatctgcgacgacaaaacaaagtaaagaaaccaggcgcatctcgtgcgccttacacaccccattccgtgaccacccgattttagcagtcgcaggctattgcgtgtttgcaaagacacattcggaccactttgggacgtctaagcgctgcatcccgttgtgtttcaactctcggtcagaaaccgactccgttgacacagtctcgggctccaccgctttttcacatacggttcacacaccgtcttagcgagacctaaactcgccttcatagacggctc

SEQ ID NO: 14383 - DNA, 366 bp, synthetic construct; identical to SEQ ID NO: 1688
  source 1..366: mol_type = other DNA

SEQ ID NO: 14384 - DNA, 622 bp, synthetic construct; identical to SEQ ID NO: 2201
  source 1..622: mol_type = other DNA

SEQ ID NO: 14385 - DNA, 1000 bp, synthetic construct; identical to SEQ ID NO: 2590
  source 1..1000: mol_type = other DNA

SEQ ID NO: 14386 - DNA, 445 bp, synthetic construct; identical to SEQ ID NO: 1903
  source 1..445: mol_type = other DNA

SEQ ID NO: 14387 - DNA, 348 bp, synthetic construct; identical to SEQ ID NO: 154
  source 1..348: mol_type = other DNA

SEQ ID NO: 14388 - DNA, 381 bp, synthetic construct; identical to SEQ ID NO: 1732
  source 1..381: mol_type = other DNA

SEQ ID NO: 14389 - DNA, 975 bp, synthetic construct; identical to SEQ ID NO: 2562
  source 1..975: mol_type = other DNA

SEQ ID NO: 14390 - DNA, 662 bp, synthetic construct
  source 1..662: mol_type = other DNA
ttatgttaacggccattcagaattaatgtatgaacttgtattaaatggattaggacaggatttgaaaatggaaacgaacaacctccttccacagtcagcgtacaacccaacttgtccgctaactgtcgaagaaaataatgtacaattgagtgattcagaatcgaatatgagcaagcatgaatttgtgattattatgagtgaaatgattgacaccctgaaagacgaaaagaaaactagcaacgcatatgatcgtttggctagtaagattattgattcacttttatggaaattgttcaaaatatttactatactcgtattgattgtatgtgtgattgttagtgcctatggcacatattactattttataagggaagatgtcgacaacgtatatactagatttgtcggttatcttgatcattttgtgacattgattacgaaacttgttgaattgattgaaaagctttacactctgctagttgattttggagaaggtgcagagaaggtcgttcatgacatgaaaacacaggttcttagtagtgatgatgccatggatgctatattcctagccatcaattgattgatagtgtacttaaattaatatttgtatgtgtaatgtaattatttgattgattaattatttgattgtttattaaatatttgat

SEQ ID NO: 14391 - DNA, 291 bp, synthetic construct
  source 1..291: mol_type = other DNA
ctttcggcagcacgtgcatcttcgacgttttgaataatcttgttctccatctccacctcggtgaggattaggggcaagatatattaaaacgtcgaagatgcacgtgctgccgaaaggcataaccaacgtcttaaaaacgctatcgctcttgattttgatctcaccgagactgacttacagttcttggaaagtatctacaaaccgataagatttagacctggtaaaaaaccatgcactgcacatcccatagccgccgcgcatcagcggtttgcttacaatcaatttaagcaa

SEQ ID NO: 14392 - DNA, 826 bp, synthetic construct; identical to SEQ ID NO: 2458
  source 1..826: mol_type = other DNA

SEQ ID NO: 14393 - DNA, 946 bp, synthetic construct; identical to SEQ ID NO: 2550
  source 1..946: mol_type = other DNA

SEQ ID NO: 14394 - DNA, 445 bp, synthetic construct; identical to SEQ ID NO: 1904
  source 1..445: mol_type = other DNA

SEQ ID NO: 14395 - DNA, 522 bp, synthetic construct; identical to SEQ ID NO: 2073
  source 1..522: mol_type = other DNA

SEQ ID NO: 14396 - DNA, 357 bp, synthetic construct; identical to SEQ ID NO: 1660
  source 1..357: mol_type = other DNA

SEQ ID NO: 14397 - DNA, 1000 bp, synthetic construct; identical to SEQ ID NO: 2591
  source 1..1000: mol_type = other DNA

SEQ ID NO: 14398 - DNA, 1000 bp, synthetic construct; identical to SEQ ID NO: 2592
  source 1..1000: mol_type = other DNA

SEQ ID NO: 14399 - DNA, 623 bp, synthetic construct
  source 1..623: mol_type = other DNA
cgcaaagtgtaccttggtgcatagtatagccatttggcgacgggatttcccggaaaatcgaggcatttgcctctggccatttggccctaagtgtttagtgtgtgtaggaaagtttgtcgcttatttccgagcacatgtatgagttgtatataataggtctcgtaactggggcggcccttgttggactagcgtggtttataacgacgcgcgtgcagcattggctcattgtgcgaggactaccggcccacgtcggggatcttgagttacctagcgaatccggcatcggatattcgctgagttctttcgatctcgactcggttgatgattaggttgtaagccttttggcgtcttagttttcggcctttcggcgtttagttgtaagtctgacccgtttgggcctttagttataagttgcctcttttggcttattgtaagtttccctttcgggttagttttaagccttttcaggtcttaggttctaggtccattggattttctattgtagctttttagcttttgttttgtgcccccttttggggccgacccacgtttggcgtggcttatctttatgtttgcttaattgtaggttgcgccgacttaagtcggcgcgttgtagatttaag

SEQ ID NO: 14400 - DNA, 374 bp, synthetic construct; identical to SEQ ID NO: 1715
  source 1..374: mol_type = other DNA

SEQ ID NO: 14401 - DNA, 781 bp, synthetic construct
  source 1..781: mol_type = other DNA
ctggcaacaaatgtcacgggtgcgttcgtggaagacgtaaaatctctaatagactattatatcgctagggctaattttactaacactaccatagattacgataagttgagcgaagttctatcgaatgtaaaaattaacgtaaccactacgcagtctaaaccgtcgttttcttactaccgccggcttatagattactatattgaccacgactacaatatcacacaccatatttttggtggcggttctatagttggtgataggactaaaaggtttacgttcgctggattgttcgagagctccattcttgccatagttagaccgattttacatataatacacgaatttttcttggaatttattgaacccttattagaacgtttgatagatatattcgcaaaaataacattaccattagttaaaacaatatttacattttcaaaaactttgttcgaacacatatacaattacataatcgaaaacgtacctgaacagacattgatagactttttcgaaagatttttaaaatttttatacagaatattgcatgttgttgttgaaaaatttgtagacattctaataaacactaacactacacataaaatttttgagtttgttgcactatatttaattctgttttactattttaaagcatatttcttatcattaattatcacaatagtaacttttgtaatcattggcatagaacgcaccgacgaacataccataatggttatattaatttttacttttctattgattcgctgctacactaacccacgaa

SEQ ID NO: 14402 - DNA, 290 bp, synthetic construct
  source 1..290: mol_type = other DNA
aaagaacggtacgaagcactcaactcattcttttatttataaagatacatctttgcattttgccttttctgctcgtttcatgaatgatcatgtcgttaatgttgatttgcttggcaaagaaattcattcgttgctcaaggggttacttgctattgagattttgattgaaggggcacccaacaagtgtgtcaatctctttgactataaacacagagtgccacgtgagcatctgtggtttagtcaacatgttgggcggacatagtctgttttgattcttcagttttatcaca

SEQ ID NO: 14403 - DNA, 1000 bp, synthetic construct; identical to SEQ ID NO: 2593
  source 1..1000: mol_type = other DNA

SEQ ID NO: 14404 - DNA, 514 bp, synthetic construct
  source 1..514: mol_type = other DNA
tgaacttacctggatcccagcgcgagctatacaggtgttgcatgatctccttctggacgtaaatgcatttagtggatactgggatgtaccacgcttgtattggttcgtactgtgatatggtatgttcttctggggatttgttatttgaatttaccattttgacatagacttaaatggttctcaaccttcatcggcagttacagctacgcttcggcccagactgtatttggtggtacctggaatgcccacacctttgaagacagtacctgagagtcatatgtttcgattgtgtatattcattttacaattctcattacttgaactgtgccatattttacgtgtatgggatggtccttaaccttcatcggcagttacagctacgcttcggcccagactgtatttggtggtacctggaatgcccacacctttgaagacagtaccatgattctcgtgttttgttggcattagttcattttataacattagcactttgaatttaccatggtttatatag

SEQ ID NO: 14405 - DNA, 291 bp, synthetic construct
  source 1..291: mol_type = other DNA
gcagctgagaccagttaattcaagttgtgtcatttcaaacatatttgagatgacttgaatcacgtccatctcaatattgttatcctattgagatgaacctgtatcggtcacattttgtatttatgtaaataggtaagggttcttgcgtgccaagagtcttctgtattgatgtagtggactgctgtttcgatggagttacagcagtacttgcattgatatgtaaatgcacagagatacgtatcgatgttccacaccttaatacaatgacaaatcaaggtatgagttcacacg

SEQ ID NO: 14406 - DNA, 644 bp, synthetic construct; identical to SEQ ID NO: 2234
  source 1..644: mol_type = other DNA

SEQ ID NO: 14407 - DNA, 1000 bp, synthetic construct
  source 1..1000: mol_type = other DNA
atgcggggacttgtgtttgtcatttgccatacttcacaaacatgtgctagcaagtgaatacatatgtttgtacactgtatcatttgtttcatgagctgtttcagtcgggcatagtataaataagagcgcaagggaagggactgcgcatactaatacagctgttcgagctcatgttgcttgtgaatcataggtagtcaacgcaggatttgtctgcaatatctacggatcaagggaaattgcgtggagatcatgtacggagacggcactacgctgtataggatcttgagggatcaaaccagccttaatccgcttgccccaatgcggggacgtgtatgtattgaagcgcggtttcctacgagaagcagattgcgttgacatattcttgactatcatgattgatggagcttttgtttaaccacgtagtacttggacggaacggtgcatcgccttgaggtaaggtcataaagccgattgccccaatgcggggacgtccattgtacgaagcggggcgacaaagttttcacttacagtttacatcacttgtatttcactttaagtatattggtcatttgattgctatttgacttgtcatatagttatcacttgacctttgaactaatacagcgagtattgaacgctggtacgtatactactagggtttagtcctaatagtattcattttcaaccactttcaatattctttgttttcattgaatattgataattgttagatttattgctagggcttagccctagcagtattcatcttcaaccaccttcaatattctttgcttatgccacgagtcacatatgatttgagatgaattgtagttgtgactacatgtaaccataattgatttgggagcgttggcttccaggttgatgccgaccggtttgtatatattgtaaatgttgtaaatacagtttcatacgtacgtgcggaacagtttgctgtaaatacgagagcctacagcaaattaagctaaaatagtattgtcaa

SEQ ID NO: 14408 - DNA, 464 bp, synthetic construct; identical to SEQ ID NO: 1948
  source 1..464: mol_type = other DNA

SEQ ID NO: 14409 - DNA, 359 bp, synthetic construct; identical to SEQ ID NO: 1670
  source 1..359: mol_type = other DNA

SEQ ID NO: 14410 - DNA, 711 bp, synthetic construct; identical to SEQ ID NO: 2322
  source 1..711: mol_type = other DNA

SEQ ID NO: 14411 - DNA, 278 bp, synthetic construct
  source 1..278: mol_type = other DNA
tgaatcaggaaataacaccaacccactcattcttcaacgaagaattaaacacacacacacacacacaaaccgcaccagtgaattctggtgcggttacgcgtgtagcgggtttactaaatggtaacttgactacacgcgatggatccttttcccttacgggcactggatccacaaaacaaattactcaatttaacgagcacggaccttctattaataaaggtaaaggctccttacaaattggtaatgcacttgttgctaattcgacaagttccacatct

SEQ ID NO: 14412 - DNA, 475 bp, synthetic construct; identical to SEQ ID NO: 1976
  source 1..475: mol_type = other DNA

SEQ ID NO: 14413 - DNA, 501 bp, synthetic construct
  source 1..501: mol_type = other DNA
tatatatatattacaaataccattaccaccatgtctaactacaccaaaaccaacaccagcaccatgaaccaaccaccacgaaacaaaataacaaacattattgattctgttgctctcgaggctagcaacagaatcatgactctcgaaaaagcctcggaaaagaaaagaaaacaacaaacaaaatcacaagatgttgacgatcttgatgacaacaattataacagcaaatctttaacccacactggtagccaagtggcactaccacaacttaaccatggtagcgccgctgacaacagcgttaaccacaaccgctacaaaggaccatttgcaactttagtcagcgatgttcaaatgccgcccaaacatgctgaacgtagtgtggtgactgacttcgctgactaaagttgcaaatgccgcccaaacatgctgaacgtagtgtggtgactgacttcgctgaatgacaagagtgacttcaatgaagcacccaccaccttcacagag

SEQ ID NO: 14414 - DNA, 590 bp, synthetic construct; identical to SEQ ID NO: 2159
  source 1..590: mol_type = other DNA

SEQ ID NO: 14415 - DNA, 468 bp, synthetic construct; identical to SEQ ID NO: 174
  source 1..468: mol_type = other DNA

SEQ ID NO: 14416 - DNA, 922 bp, synthetic construct; identical to SEQ ID NO: 2540
  source 1..922: mol_type = other DNA

SEQ ID NO: 14417 - DNA, 929 bp, synthetic construct
  source 1..929: mol_type = other DNA
gttcagagttttatggtctcgtataccagggaatacggctcaattctcgaccacctttaacaggggagaaaagaacaggaatcgggtgtctactatcctgaagtagaagtaacggctatttgagctaggtcgttacattgtaaaatagtgtggttttctttttactcttagtttgtttttctttttgtaaaatattgtgtgttaggtaggcggctcgacggttttgggagttattggtgagattttggtcttgggaaaaactcgatgcgtaaggttatgcgttgagttctgtatagaatggtctcgtataccagggaatacggctcaattctcgaccacccgtaaatggggagaaaagaacaggaatcgggtgtctactatcctgaagtagaagtaacgactatttgagctaggtcgttgcactgtaaaatagtgtgtatatttatagttttctttgtttctaggttttttgtttgttttagtgtatagtgtagtttctcctttttcgttatttttaagtttagtatttctaggggaggtatggtaagatcgcggcgtacgctacgttgccgagccgtatgcctagaaggcttacgccgcgaacgagaggggaactggccgtgttgtgctgtgatggcactaggggggtaggcatgcggcttggcttcttggggaggttctggtaagattattattatatacagtaatatatataatgtaaatatatagtatgatgctatagcgcaaaaatatgtagtggtaatactagggtcatcccgggttttatcacgtatgcctataaggtagtagtgttgtgctgcgcgtatttagcgttttaatcgtcagtatataaccgtgttattgccatgtttgtattatactctcagtacagcgatgtgttatgggtttgaataatatactttttcttt

SEQ ID NO: 14418 - DNA, 339 bp, synthetic construct; identical to SEQ ID NO: 1619
  source 1..339: mol_type = other DNA

SEQ ID NO: 14419 - DNA, 644 bp, synthetic construct; identical to SEQ ID NO: 2235
  source 1..644: mol_type = other DNA

SEQ ID NO: 14420 - DNA, 1000 bp, synthetic construct
  source 1..1000: mol_type = other DNA
ttccttattttcgcgctctttatttagttttactgtgttttctactacccctacgttaagcttcgttccgtatattaccgctagtagtgtttaacgtcttgtgtatagatatattaacaccacttcgtgtttccttggttatcctttgtttttgtgcgtgctccccttttttaaaaaagaaaaaatatttgctcgttccttggtcgctaggttatatataatacatcgtctctatcctatttagcagtaaattatctctgttccttacagttgtgcgtcgtcgtttgtatttttcaatatataattaacaaaaagatttaacgttttccttttacttgtagcttgctggtttttaatttcaactttaaagatttaacgttttccttttacttgtagcttgctggtttttaatttcaactttaaaatccaaaaaataattttatttttccttttacctgttgcttgttatttccgagttttattttaaaaaatacaaaaagattttaagtttttctttcacctgtcgcttgttttaaataatttttacgtctaaaaacacaaaaagatttaaagctttcctttcgcattttacgctctgttagtttgatctgtatagaaatattataaaattatcgtttgtttcctttgagcgttttgtttagtttaaaccgtcttttctgtttaggtttatttggtttcgttagtttcccttcgtcttcttcgtattatattctcataaggtacgaaaaccccaaaaatattttaaagttttccttggtcttgtttttagatcttttgaactcttgtttaaaatcaccaaaccctcttgttacgttatccactagcttttctcttatatctgttatcttttgttcttggtttttactccccttttttagtttccgccatctgttgttgctgatttacgatttaatttggtgtgtgttttagggttttgttatccggttttttgcccttttcgatcattttttctgtaact

SEQ ID NO: 14421 - DNA, 640 bp, synthetic construct
  source 1..640: mol_type = other DNA
gcgagtgtcatttttaaatatttttatttggtttaagccgatgtgtagctatttttagagccaatactttattcgtttctttgcgtaattacctgatttgttacaatgcgcaattttgtttagcgtattgtcattttttgattctttattgcttgtaccgtcatgtgaatattagttgagcttggtatttttgttttaggttgtttctaattaatgttcgttttgttttgtacagcttcatacagaccctccgattatatcgcttgcaaggcggttagtgcggggacacggggggggtcttagtggtgatgttggcctgacacagtaggtctcctcacagcatcaccacttttggttgggagaggagtcctcgctttctttgcgagtgaggcgcatctccttttgtatatatacgcgttattttgttgttttaattatagcgttgatattactattataacatattctcagggttttttagtttatgttagtttataattaggttttcttacagtttaatataattctattttttcacgattaggtattggctctatcttgcgtagagtggtagtattgtatattatcgattgtagattgtcaggtaacacgagattgatatgagtgtatacattaacag

SEQ ID NO: 14422 - DNA, 415 bp, synthetic construct; identical to SEQ ID NO: 1812
  source 1..415: mol_type = other DNA

SEQ ID NO: 14423 - DNA, 421 bp, synthetic construct; identical to SEQ ID NO: 1833
  source 1..421: mol_type = other DNA

SEQ ID NO: 14424 - DNA, 532 bp, synthetic construct; identical to SEQ ID NO: 2089
  source 1..532: mol_type = other DNA

SEQ ID NO: 14425 - DNA, 648 bp, synthetic construct; identical to SEQ ID NO: 2240
  source 1..648: mol_type = other DNA

SEQ ID NO: 14426 - DNA, 520 bp, synthetic construct
  source 1..520: mol_type = other DNA
gatttgtgaatttttattcaaacccggcttgaacattgataacgcaggttcaaaagagaaagtcagaaagagcttttgtgatgttaatggggagtgtgtgacagcacttacactttttcaggtgacccggtccaacggaccccggttgagttcacaaccggtttgcgaaggtccgacccaatctcagtgggtagcgtgttaggagaggtaatgacgatgagatagaggtatctcatatctcagcacaacgttgcttcgtccgagacgaccgtcgacccgggttaggggtgctgagataagaagggatgatagtggtgcctagttaaaccactattgcgtggtgtttagaccgggcgacgggggaccgtccgaacgcagcacactagggttctgtgggattattaatgtaaataaatggagtagttttgttttgcagattttgtttgtacagagtatttttattcttttaatataacaatctataatttgtttaaaacctgtactgttgatagacatcact

SEQ ID NO: 14427 - DNA, 264 bp, synthetic construct
  source 1..264: mol_type = other DNA
taacagagtatataaatcaggtgtattgctgtcgttgagagaaaaggtcgattgaaaaaatttttcttgcttattcactggcgtattgtaactgtcgcgaggaaaggttgattttaatcgttctatccgcttattcgctgattctagttgttacaaatataatcgttccaaaattgtgcggtaagaaaactgaaatagttgttttaaaaataatttacatttttgttctaatacactgcgtgaaatactatacccgttgtcata

SEQ ID NO: 14428 - DNA, 315 bp, synthetic construct; identical to SEQ ID NO: 1531
  source 1..315: mol_type = other DNA

SEQ ID NO: 14429 - DNA, 606 bp, synthetic construct; identical to SEQ ID NO: 2177
  source 1..606: mol_type = other DNA

SEQ ID NO: 14430 - DNA, 283 bp, synthetic construct
  source 1..283: mol_type = other DNA
gattctaccaaatttcttaaactcgttttcaaggtcggactccgtgacagatgggggaacatttcccacgtaaaccttgattggttatagaccactcaggagccaaaatataacaaaacttcaaaacatcacgactttccagtcacatcaacaaaacatttcccaatcactttggttgctttatttttctcaatccctaatcgctttccagtaagttcatatatttctatatgttctaaacaaattttaaagaaaaaaccaaaaatattttatttttccactc

SEQ ID NO: 14431 - DNA, 446 bp, synthetic construct; identical to SEQ ID NO: 1908
  source 1..446: mol_type = other DNA

SEQ ID NO: 14432 - DNA, 268 bp, synthetic construct
  source 1..268: mol_type = other DNA
gaaatttccacggtttccccgaggtaatgggaagtcccaatcccctcgaaccaaccccctcgctttctcagcgtggaaactgagagagagccgcggtgatgcgtgggcgcccaatgggtatacgcgcacaacgctgtctcgaactcagagtctgagatggctcagcttggcagcacacagctgtcaacctgtactacactacaataataataattaacaaaacaaaacaacacacgcctgccactaaactgaactggtgtcaacgatc

SEQ ID NO: 14433 - DNA, 662 bp, synthetic construct
  source 1..662: mol_type = other DNA
gctggaaaggagacgtgtgtttaaaaatattatattattattattagtgaataaggtgtcagtcaaattcgatttctcaggtcagcagtcataaaaactttaaactgtgtcgccgttcgtacatagcgtcgacattaactcaacaagttggtattgagtatttgattgatgttttgaggatgagaatttgattaactttaaagttgataaaccgtgattttgcggaatggtagtctataatgttatagatcgctaaaccgttcaatcatgatgttaatcacttgtaataaagtaggcattaagttgtctacctttttcttaaactaaaaaagagtaaaaacaattttgtaaatgaactctttttctttcatttctttgtccttttatttttaagattactcgaggatcgatataaaaataaaaatttttatcactttatttaataaatttcagtataaaaaccttatttctcctttttcgtagtcaataaattgacgatcttgcgagttgtccataaaacaagtaaattttaaaccattcaaaaaatcaaaaatatttatcagttcttaattttttatgtattagatcgattttagacttaatcattttatcttcatttgtagtaaattctttctcttcagttatcacttatcgatgcgtcg

SEQ ID NO: 14434 - DNA, 412 bp, synthetic construct; identical to SEQ ID NO: 1807
  source 1..412: mol_type = other DNA

SEQ ID NO: 14435 - DNA, 391 bp, synthetic construct; identical to SEQ ID NO: 1756
  source 1..391: mol_type = other DNA

SEQ ID NO: 14436 - DNA, 259 bp, synthetic construct
  source 1..259: mol_type = other DNA
gtctgtagtctggtttctcctttctgtcagcattttagttagagcatgtaggtaggtgaaggtggagaggtagaaaccaattgggccttgcaaccattcaaagggttgaggtctagtagaaggttggtgaaaaataagggttgatgtttgcgattgagataacttcatggttatccaagttcgtgttcaactacttagcttcaaagcctgaaccttgcatttagaatagtttgcattcattgtatattcttgtgtcagc

SEQ ID NO: 14437 - DNA, 583 bp, synthetic construct; identical to SEQ ID NO: 2150
  source 1..583: mol_type = other DNA

SEQ ID NO: 14438 - DNA, 428 bp, synthetic construct; identical to SEQ ID NO: 1854
  source 1..428: mol_type = other DNA

SEQ ID NO: 14439 - DNA, 427 bp, synthetic construct; identical to SEQ ID NO: 1852
  source 1..427: mol_type = other DNA

SEQ ID NO: 14440 - DNA, 260 bp, synthetic construct
  source 1..260: mol_type = other DNA
tcaatttcaagcagtgattggtgacttggaccacaagaaagacgtgtacttgttctttggacgcgcagacaacgctgtggttctcaagtttctaacaaacgcagcccaagctcagtgggtgcgtgacaaccgtgctgatctgattccaacacatccacctggtattccgccttctgatcacagaatcgcttctgtgtttgaggagaactacgttctgccattgttcaggtttcaatacttgttctggctgaagacgcaag

SEQ ID NO: 14441 - DNA, 528 bp, synthetic construct; identical to SEQ ID NO: 2082
  source 1..528: mol_type = other DNA

SEQ ID NO: 14442 - DNA, 1000 bp, synthetic construct; identical to SEQ ID NO: 2594
  source 1..1000: mol_type = other DNA

SEQ ID NO: 14443 - DNA, 314 bp, synthetic construct; identical to SEQ ID NO: 1528
  source 1..314: mol_type = other DNA

SEQ ID NO: 14444 - DNA, 1000 bp, synthetic construct; identical to SEQ ID NO: 2595
  source 1..1000: mol_type = other DNA

SEQ ID NO: 14445 - DNA, 291 bp, synthetic construct
  source 1..291: mol_type = other DNA
gaagttgggggtggctctggtgccgtgccaggtaccaccccctccccaggggaacaggagacaccaactccaactgttcccggtgagaaccctccagccaaggccactggcttcgcgaaaggcattgggcttgttgacagcaccaattggcttggtgttgctgcatcaaaactaacagagcatgtcagttataaatactattcggattcattttcgtatctgctgtacaatccgtaccagcaggctgtctatgtacagcttgttatctggacttctcgggatgtgcacacg

SEQ ID NO: 14446 - DNA, 495 bp, synthetic construct; identical to SEQ ID NO: 2017
  source 1..495: mol_type = other DNA

SEQ ID NO: 14447 - DNA, 1000 bp, synthetic construct; identical to SEQ ID NO: 2596
  source 1..1000: mol_type = other DNA

SEQ ID NO: 14448 - DNA, 711 bp, synthetic construct; identical to SEQ ID NO: 2323
  source 1..711: mol_type = other DNA

SEQ ID NO: 14449 - DNA, 585 bp, synthetic construct; identical to SEQ ID NO: 2152
  source 1..585: mol_type = other DNA

SEQ ID NO: 14450 - DNA, 477 bp, synthetic construct; identical to SEQ ID NO: 1979
  source 1..477: mol_type = other DNA

SEQ ID NO: 14451 - DNA, 351 bp, synthetic construct; identical to SEQ ID NO: 1648
  source 1..351: mol_type = other DNA

SEQ ID NO: 14452 - DNA, 299 bp, synthetic construct
  source 1..299: mol_type = other DNA
aggggctagccttattggtcatccaataggatcggatcagtctgtaacctccatatccgagaccaaaagcgatcacggtaacggcagtagcggtatcgggcttgatgttgaaactatcaagacccttatcccgatgtaactcttcgagaatcctggaggaggagatatttgtatccaggagcgcttcttcgccaatggctttggcgactgctttagtttctaaggaacgaatccggccagggattttgcacgcaaatttcaaagcaacattaaagctgtaagcaagagcatcggtagcc

SEQ ID NO: 14453 - DNA, 637 bp, synthetic construct; identical to SEQ ID NO: 2224
  source 1..637: mol_type = other DNA

SEQ ID NO: 14454 - DNA, 562 bp, synthetic construct; identical to SEQ ID NO: 2126
  source 1..562: mol_type = other DNA

SEQ ID NO: 14455 - DNA, 926 bp, synthetic construct; identical to SEQ ID NO: 2542
  source 1..926: mol_type = other DNA

SEQ ID NO: 14456 - DNA, 670 bp, synthetic construct; identical to SEQ ID NO: 2272
  source 1..670: mol_type = other DNA

SEQ ID NO: 14457 - DNA, 762 bp, synthetic construct; identical to SEQ ID NO: 217
  source 1..762: mol_type = other DNA

SEQ ID NO: 14458 - DNA, 281 bp, synthetic construct
  source 1..281: mol_type = other DNA
ctcagaatcccaaataggtagacggagaaccggggccgaaaccaggtccggaccccacacccccaccagcaccaccacctgaaccgacgccagccaaacatgaaagattcattgtttacaccgggacactgtcaacactcatcagtgctcgacagaactcagacagtatatcactctactcaattcgagaccagagggttagatatattgaagatgagaatgcaaactggacgtacatcaaagcgcaatggtatacacagaattctgtggaagcagtacca

SEQ ID NO: 14459 - DNA, 1000 bp, synthetic construct; identical to SEQ ID NO: 256
  source 1..1000: mol_type = other DNA

SEQ ID NO: 14460 - DNA, 1000 bp, synthetic construct; identical to SEQ ID NO: 2597
  source 1..1000: mol_type = other DNA

SEQ ID NO: 14461 - DNA, 1000 bp, synthetic construct; identical to SEQ ID NO: 2598
  source 1..1000: mol_type = other DNA

SEQ ID NO: 14462 - DNA, 825 bp, synthetic construct; identical to SEQ ID NO: 2457
  source 1..825: mol_type = other DNA

SEQ ID NO: 14463 - DNA, 640 bp, synthetic construct; identical to SEQ ID NO: 2229
  source 1..640: mol_type = other DNA

SEQ ID NO: 14464 - DNA, 772 bp, synthetic construct; identical to SEQ ID NO: 2397
  source 1..772: mol_type = other DNA

SEQ ID NO: 14465 - DNA, 323 bp, synthetic construct; identical to SEQ ID NO: 1559
  source 1..323: mol_type = other DNA

SEQ ID NO: 14466 - DNA, 281 bp, synthetic construct
  source 1..281: mol_type = other DNA
atttccaaggaccatgctaggtagacgcagctcctcagccaagccctactcctgacccaactccacccccaccatctccagaacccacaccagtaaaacacgaacgatttatctgttacgctggtgtaccaaaagctacaattcaaactcgagagaatgatgaatccattgcgctcaagaggttagaagatcagaattttcggttcctggaagacgactaccagtccacaacaagcatcgcttcgtgttggtatagccagaacaatgttcaggctactcca

SEQ ID NO: 14467 - DNA, 500 bp, synthetic construct; identical to SEQ ID NO: 2026
  source 1..500: mol_type = other DNA

SEQ ID NO: 14468 - DNA, 1000 bp, synthetic construct; identical to SEQ ID NO: 2599
  source 1..1000: mol_type = other DNA

SEQ ID NO: 14469 - DNA, 1000 bp, synthetic construct; identical to SEQ ID NO: 2600
  source 1..1000: mol_type = other DNA

SEQ ID NO: 14470 - DNA, 316 bp, synthetic construct; identical to SEQ ID NO: 1539
  source 1..316: mol_type = other DNA

SEQ ID NO: 14471 - DNA, 1000 bp, synthetic construct; identical to SEQ ID NO: 2601
  source 1..1000: mol_type = other DNA

SEQ ID NO: 14472 - DNA, 281 bp, synthetic construct
  source 1..281: mol_type = other DNA
ctcagaatcccaaataggtagacggagaaccggggccgaaaccaggtccggaccccacacccccaccagcaccaccacctgaaccgacgccagccaaacatgaaagattcattgtttacaccggtacactgtcaacactcatcagtgctcgacagaactcagacagtatatcactctactcaattcgagaccagagggtcagatatattgaagatgagaatgcaaactggacgtacatcaaagcgcaatggtattcacagaattctgtggaagcagtacca

SEQ ID NO: 14473 - DNA, 290 bp, synthetic construct
  source 1..290: mol_type = other DNA
taaacggtgtagaatggcacccctccgatgaagatcaattcaggattctctacaaagggaacggagggtcgacgattgccggatcctttcggattcgaatttcagttgccgttcaaaacccgaaataggtaagcgccgagccgggcccgcgtccagggcccactccctcccccactcccacacctcagaaacatgagcgatttatcgcgattgttggaatcccttccgtcattattactgcaaaggaaaatgacgatgccatctccgttggcgcccttggcagccagcga

SEQ ID NO: 14474 - DNA, 281 bp, synthetic construct
  source 1..281: mol_type = other DNA
ctcagaatcccaaataggtagacggagaaccggggccgaaaccaggtccggaccccacacccccaccagcaccaccacctgaaccgacgccagccaaacatgaaagattcattgtttacaccggtacactgtcaacactcatcagtgctcgacagaactcagacagtatatcactctactcaattcgagatcagagggtcagatatattgaagatgagaatgcaaactgggcgtatatcaaagcgcaatggtattcacagaattctgtggaagcaatacca

SEQ ID NO: 14475 - DNA, 782 bp, synthetic construct; identical to SEQ ID NO: 2412
  source 1..782: mol_type = other DNA

SEQ ID NO: 14476 - DNA, 444 bp, synthetic construct; identical to SEQ ID NO: 1900
  source 1..444: mol_type = other DNA

SEQ ID NO: 14477 - DNA, 332 bp, synthetic construct; identical to SEQ ID NO: 1586
  source 1..332: mol_type = other DNA

SEQ ID NO: 14478 - DNA, 338 bp, synthetic construct
  source 1..338: mol_type = other DNA
ctattagtttcaattattgcagtctacttggtttatttagtatatattaaccgaattattattacagaatacatatccattttattaacattgttccagaaacctgagctatatgtctctgaggtaggagaagatggttatatgatccctaacccacaataaatgactacaatactcaatatatttgatactcaatccttattaaataaaataaaattaattcattaaaaatgaattaaaatataagaaaacccactttaagaaaacccgttttaataaaatattgagttcagtcatcatagaatttatatttaaaagaacatttaaaactatacaat

SEQ ID NO: 14479 - DNA, 533 bp, synthetic construct; identical to SEQ ID NO: 2091
  source 1..533: mol_type = other DNA

SEQ ID NO: 14480 - DNA, 627 bp, synthetic construct; identical to SEQ ID NO: 2210
  source 1..627: mol_type = other DNA

SEQ ID NO: 14481 - DNA, 598 bp, synthetic construct; identical to SEQ ID NO: 2165
  source 1..598: mol_type = other DNA

SEQ ID NO: 14482 - DNA, 707 bp, synthetic construct; identical to SEQ ID NO: 2316
  source 1..707: mol_type = other DNA

SEQ ID NO: 14483 - DNA, 496 bp, synthetic construct; identical to SEQ ID NO: 2020
  source 1..496: mol_type = other DNA

SEQ ID NO: 14484 - DNA, 406 bp, synthetic construct; identical to SEQ ID NO: 1796
  source 1..406: mol_type = other DNA

SEQ ID NO: 14485 - DNA, 255 bp, synthetic construct
  source 1..255: mol_type = other DNA
catgggtaggtagaaccgccacaccaagtttatatttatcttttgctcaagcacaatgcaacctagcaaatgcattaatatatctatatattttgaagattatacatattgtgcagctacattatcatcactgtgaggcttcttttctttatttatatttggctaatttattcaatgcataggttctcttgcttataaaaaacccgccagttacagatcacttatcgtgtatttggaacattgaaaatcgaaaat

SEQ ID NO: 14486 - DNA, 284 bp, synthetic construct
  source 1..284: mol_type = other DNA
aaaaaaggcaaaaagtcagagaagcagagcaacaaaagattatgaatcagaataaacaataatatgagtgaacaatagcaattgatcttgtatttgttttaatttaacaaaaccttagtaaaagtcattattataatatcatattatagattttatatactctgacttaactataattaagcgtaatccaaacaaatatattatactaaattaagtatttcaaataaaaatactgttaaaaattaatagaatacattctttgaagagattatattaattacaga

SEQ ID NO: 14487 - DNA, 511 bp, synthetic construct
  source 1..511: mol_type = other DNA
tcctgtatacaaggagtatgcctttaacattcataacagatatatatattaacaaacccgtagtaaaagtcatgatattatcagtgatttttaaaacatttattttactttttatatccattatttttataaacaattttttagagtaccgagattgtcatcccgagttttattggttcgggatttcaaaattctactgtagatggaatatactagcagagactagtaattctgtagctttattggctattttatctttgttacgtttatggggttcttacctttattataggtttcgttttattcggatattttatgataatattttccattaataaataaataaactttcaaattcaaaattctttgtattaaattttaattaaacaaaaccgtagtaaaagtcacataatttaaattgactctcatatatactatatatttgaaataaatcctttcgaaaaaacacctcaaatataataatctctacggtaaatacaaaaataacata

SEQ ID NO: 14488 - DNA, 320 bp, synthetic construct; identical to SEQ ID NO: 1548
  source 1..320: mol_type = other DNA

SEQ ID NO: 14489 - DNA, 434 bp, synthetic construct; identical to SEQ ID NO: 1873
  source 1..434: mol_type = other DNA

SEQ ID NO: 14490 - DNA, 597 bp, synthetic construct; identical to SEQ ID NO: 2162
  source 1..597: mol_type = other DNA

SEQ ID NO: 14491 - DNA, 258 bp, synthetic construct
  source 1..258: mol_type = other DNA
ttatcccctccttgactcttaataccagctcggttatactcgagctgagaaagtgttctcatttagatataagcatacaccatatacctcattaagctagtgggcgttacttaatggcatggttttttaaccagtaggatatagggttggcattacttgtaaccacaccactatacaggattgaactttatttagaaaaagatagtaaaggaaatttactccacgcatagcgccagggatagaaactgccaggacaac

SEQ ID NO: 14492 - DNA, 371 bp, synthetic construct; identical to SEQ ID NO: 1704
  source 1..371: mol_type = other DNA

SEQ ID NO: 14493 - DNA, 439 bp, synthetic construct; identical to SEQ ID NO: 1884
  source 1..439: mol_type = other DNA

SEQ ID NO: 14494 - DNA, 583 bp, synthetic construct
  source 1..583: mol_type = other DNA
tcgtctgtaggaactgtatcttagtaagattaatcataatagtataacagtattaatctaatccttttgggtgagttataaccatcacctatctgcctaaacgtatctagtgcgatccatatgtaagttagcctttagaagctttataataataataataagcatcggaagcaagtgtggtatcattataaaaacccgccagttacaaatcatgcctgtttcaatagcttgtgcacattgccactatcccattgacatccagtcagtgggtgctcccagtgatattgggataaactgcaagatgtgtgggaaaacatcatacgtaatcaatgccccatcttagcatgggtaggtagaaccgccacaccaagtttatatttatcttttgctcaagcacaatgcaacctagcaaatgcattaatatatctatatattttgaagattatacatattgtgcagctacattatcatcactgtgaggcttcttttctttatttatatttggctaatttattccatgtataggttctcttgcttataaaaaacccgccagttacagatcacttatcgtgtgtttggtgat

SEQ ID NO: 14495 - DNA, 377 bp, synthetic construct
  source 1..377: mol_type = other DNA
aaaaaaatatatgaattgatacgtattttattaaataaacatcttattattttataatgtatatcatttgagtattaatttttctaatttcttacattatcatttttatatattattatattattatattattatattttttcatgtttatatatctctatttttataattttatacattaagactttataaaaacccgtgagaaaagtcataatggacacacactacattattttaatttgtcaaaattgtggttgtaatattacattctcaagaattattacctatattagaattagtatctctgatgatactctaatcatagagtgtcctcgttgtttttctcttgtttactaccaatttactaacacataaaa

SEQ ID NO: 14496 - DNA, 768 bp, synthetic construct
  source 1..768: mol_type = other DNA
tatcacgtcggggtcaccaatttgccgtattgattacgcgtatattatcacgtcggggtcaccaatttgccgtagggtcggaaaatataccacacttggttaaccattacgatcgaattcaccaacttttaatcagactcaggaggaaatacaaaaatatttttttcgaaataatgaagaactgggatgcttactgcataggatgtacagtgtctgatgagattgaggaccttggatttcgaaccctcaaggagtctatagaagaggatctaaccgccaagtttggacgaagcgatgcaagagagatgctagatttgatgtcctgctctggactctctcacgaaagggatatcacggtccctatttctttatacttctcaaacttgagctagaactatgggcacccaatactacaccctactgaaggcatcgaaaaacttaggataaactcgaaaaaaccaatcatggtagatgaccagattgcgagaaaagcactttggatgttccggaaaacctacttcatgaactactttagaaagaaaggaaactaccctcatcacaaatgtcttggggacctgcacccagtgctcgaagaatgtctccgggatgaacgtacgctgactcgcaatgagtcaaagactctccccttatcagcttggagcaacatcaaactagagaaaaaccacgacatgagtcttgagatagacgaaaaggaactcctcaaagacaccgcgtgttcccccccgagggaagagtggttccgccctt

SEQ ID NO: 14497 - DNA, 819 bp, synthetic construct
  source 1..819: mol_type = other DNA
atttattctctctatatacgttcgaatattgcatttaaaaatagcaaaacatatactatgagttgacatctatatattcaatatattattctttaaaaccaacagttataaaaatataataatatgactgatctaatcaattttctcatcagcatcttaaacaatattgtacgtttcggagaatcttatatagctatacattactacattattggcatattatcattttcctcattactagtaatttcctgtaaattaataatgtcgagtcaatctccaaaaaacctcacagatatgaggaaaaaagttcttcaggagaaaattaaggaaataggtgcccctcctgatgatttatggagggaagttcgagaaatgcgtttaaggatggaaatactcaccgatgagatcagatctctgcgtcgagatttaaaaggaccacctgcatatgcacaagatgttaccccgtccactcgccgagcattggcgcctcctccaatgccgaatacaagctacgcaattctgagtgcagattatgagtagaatgattgtataacaccaatctttatactctactaattgattttgcttattcggctttacctcttgacatgatttttctcttactcataataaatcctcttaagaaaagaaaatctcaatatgatatttaaaaaatgactgataagtttaaaaaaacatctttctttaactacatctagttgttttcttacgtttgcagtagtttatagctaatattagctacaaccgcatttgacgtattcgcagcatttgattgaatttcatcataccatcttcatt

SEQ ID NO: 14498 - DNA, 430 bp, synthetic construct; identical to SEQ ID NO: 1864
  source 1..430: mol_type = other DNA

SEQ ID NO: 14499 - DNA, 863 bp, synthetic construct; identical to SEQ ID NO: 231
  source 1..863: mol_type = other DNA

SEQ ID NO: 14500 - DNA, 438 bp, synthetic construct
  source 1..438: mol_type = other DNA
acaagaactttcgactgtatatatatttttagaaaaacccgttagttacccatcaaagttattattatcttctgaacccgattgctgtgttagctttgttatcgtaaagagccctcgcatactgtccagaacacaggtacataaatgtatacgcccatacatagatatttttccagcacactttgatcctaattacttcttttactttcaatttttgatttttatttttattttaatttttaattttaatcttaattttaacttgtaactttaattttagctttaattctaattttaatttgtcttccaccctaactctagctctgattactatatctctgtcgttctttcgttgtctgcttccagcctcactgcccttccaggaaagatttctcccgggtcatcaacaaatcaatcaccccatttacaatctcccag

SEQ ID NO: 14501 - DNA, 674 bp, synthetic construct; identical to SEQ ID NO: 2279
  source 1..674: mol_type = other DNA

SEQ ID NO: 14502 - DNA, 385 bp, synthetic construct; identical to SEQ ID NO: 1743
  source 1..385: mol_type = other DNA

SEQ ID NO: 14503 - DNA, 513 bp, synthetic construct; identical to SEQ ID NO: 2056
  source 1..513: mol_type = other DNA

SEQ ID NO: 14504 - DNA, 679 bp, synthetic construct
  source 1..679: mol_type = other DNA
attaaccttacgttaaaatataagagaaaaatgtttataaaaacccgcaggatcaatcatgaataatccaattaagaaagacgccacctgtcccagatgtggaactaaattctccgtacatttctttaaaatgcaagaagaaagactcattgacaaagataagataattcaacaacaacaacaagagatagataaaatgatgaaagatcttgccataaaaaatggtaagtaatcatataagtctgtagataaattgaactgttcattttgaacatatcatccgtcctaataagatatttgaatataaattaatgatatcaattaattctatttagtaataattttcaagtattgttaaaatttccaattgaaaataaaaattaaaatgtaaatcaaaaacaaaaaataccataatatatttcatttagaaaaaaccgttaggatttatcccaatagaagttattgatcattttaaattaattttgagaatacaatttacttggaaatcaaaatatacccggactatcaacagatgattttaaatataatacaatcaaaacataataaaattaaaaaacaaaaataaaaataaaaactagacaaaatacttggaaagaaaagaaaaaatactcaaaacacttgtcaaccctatcttagaaataacattatatctactatt

SEQ ID NO: 14505 - DNA, 627 bp, synthetic construct; identical to SEQ ID NO: 2211
  source 1..627: mol_type = other DNA

SEQ ID NO: 14506 - DNA, 381 bp, synthetic construct; identical to SEQ ID NO: 1733
  source 1..381: mol_type = other DNA

SEQ ID NO: 14507 - DNA, 290 bp, synthetic construct
  source 1..290: mol_type = other DNA
aaggaatcaaccacgaatcaactctacttcggaaattgcaagtattcacaatacagtttccagccatcttagaaaggagactacattttaggaaatttcttgctagggaaaagcacatactaagccttctgattgatcaccaaattaaaatgcctaatgattaaattaaaaaaatgatcttgagagtgaaatccaatcatttatataagacataactaagaattccctttcttgcatgctttcctaggacatataagttgtttaactgatatatcttattaaatcagatt

SEQ ID NO: 14508 - DNA, 1000 bp, synthetic construct; identical to SEQ ID NO: 2602
  source 1..1000: mol_type = other DNA

SEQ ID NO: 14509 - DNA, 456 bp, synthetic construct; identical to SEQ ID NO: 1929
  source 1..456: mol_type = other DNA

SEQ ID NO: 14510 - DNA, 264 bp, synthetic construct
  source 1..264: mol_type = other DNA
ggcaccaatgttaatgatcacttttgtattttcttattcaactctctaatcattgatataatctctcatatatgcacgttatcacaaatttatgcaaactaattatattatcatgaaaaaggttctttgtagattatcagccaaacttgggctcatgccacctgttttaaaacttagtttgttgttgaatttgttgtattaacgatactaagtttaacacattatagataattatttttgcatttgtgtggaaaatttcttgaa

SEQ ID NO: 14511 - DNA, 344 bp, synthetic construct; identical to SEQ ID NO: 1631
  source 1..344: mol_type = other DNA

SEQ ID NO: 14512 - DNA, 381 bp, synthetic construct; identical to SEQ ID NO: 1734
  source 1..381: mol_type = other DNA

SEQ ID NO: 14513 - DNA, 464 bp, synthetic construct; identical to SEQ ID NO: 173
  source 1..464: mol_type = other DNA

SEQ ID NO: 14514 - DNA, 429 bp, synthetic construct; identical to SEQ ID NO: 1859
  source 1..429: mol_type = other DNA

SEQ ID NO: 14515 - DNA, 507 bp, synthetic construct; identical to SEQ ID NO: 2038
  source 1..507: mol_type = other DNA

SEQ ID NO: 14516 - DNA, 374 bp, synthetic construct; identical to SEQ ID NO: 1716
  source 1..374: mol_type = other DNA

SEQ ID NO: 14517 - DNA, 260 bp, synthetic construct
  source 1..260: mol_type = other DNA
agatcctgggcatcttagagtccctgcgtgtcatgaccgatgctccaactcatcgggtgaccacatactcaaagtatgttcctcgtcaacccccaactgaatgagacccctttacaggcacgtgtttgcttaacactcagttgggtggtaggcgttttagctggattaaaactcctagatgctttgcacgtagtatggattatacaatacttccgctatccttatgaatttagtcaaaaaactaatgagcatgagacaat

SEQ ID NO: 14518 - DNA, 413 bp, synthetic construct; identical to SEQ ID NO: 169
  source 1..413: mol_type = other DNA

SEQ ID NO: 14519 - DNA, 671 bp, synthetic construct; identical to SEQ ID NO: 2273
  source 1..671: mol_type = other DNA

SEQ ID NO: 14520 - DNA, 557 bp, synthetic construct; identical to SEQ ID NO: 2121
  source 1..557: mol_type = other DNA

SEQ ID NO: 14521 - DNA, 470 bp, synthetic construct
  source 1..470: mol_type = other DNA
aaaaaaacaaacaaatctagcccagcaatcccaacccacccttctagccttagggtttcacttaattcttttttatttctgagttcgctgttgtcgcttccctttctccttaacccgttctcccaactccggtctaaatctgaacttcctacggatgaactaattaatttcccagctcctactccccgtctttagagattatgtcgtcgtcaaaaactccaggcgtaacccccgataatcatctgccggagcctaattcacagtccaccgagtccaatcttccagatcaagctatcacttctccaaaacccgatgttttaccgcccggtcctccgtcgataaacttggcgaatctccggaaattaattggcaagggtggaacggcacctgctttgggtttttgagcacaaacaaccccggtttcgaccaccaatcagtctaacttctttaaaactctttcgtttgattcg

SEQ ID NO: 14522 - DNA, 400 bp, synthetic construct; identical to SEQ ID NO: 1778
  source 1..400: mol_type = other DNA

SEQ ID NO: 14523 - DNA, 526 bp, synthetic construct; identical to SEQ ID NO: 2078
  source 1..526: mol_type = other DNA

SEQ ID NO: 14524 - DNA, 276 bp, synthetic construct
  source 1..276: mol_type = other DNA
aagccccaaacgcatccgtgaaactccaagacacagcactcaggtactctagcaaatgcacctcagcaccagtcttgtcattttataacgcattcatgcactcgcagatatgccatctcggagcataaccattggatgaagtaatcctatgcgctcccccgagcaagccctgcaatgtgagatgtgcttctctcctgtatatacactttcctgcattatcattgacttaagaaaaaaataccccgtgagacaacagtcaaatatcttcctagcatc

SEQ ID NO: 14525 - DNA, 440 bp, synthetic construct; identical to SEQ ID NO: 1892
  source 1..440: mol_type = other DNA

SEQ ID NO: 14526 - DNA, 398 bp, synthetic construct; identical to SEQ ID NO: 1772
  source 1..398: mol_type = other DNA

SEQ ID NO: 14527 - DNA, 303 bp, synthetic construct; identical to SEQ ID NO: 1492
  source 1..303: mol_type = other DNA

SEQ ID NO: 14528 - DNA, 421 bp, synthetic construct; identical to SEQ ID NO: 1834
  source 1..421: mol_type = other DNA

SEQ ID NO: 14529 - DNA, 447 bp, synthetic construct; identical to SEQ ID NO: 1911
  source 1..447: mol_type = other DNA

SEQ ID NO: 14530 - DNA, 677 bp, synthetic construct; identical to SEQ ID NO: 2283
  source 1..677: mol_type = other DNA

SEQ ID NO: 14531 - DNA, 617 bp, synthetic construct
  source 1..617: mol_type = other DNA
tgtacaaaataatattaatacttcatataaaagatcatattcagtcctatttatacttaggacgaatattgttaggagaaatggctattcccctgcctaaaatggaattgatgaagatgatctcgtcaatagaattaaagttagaggaatgctggtacattcatataaaacttgatcctgtattctcccaacgatacggagttgtctcacatcatagttttatcaacatctcagtcagtgaggtactaggacttgccaatcatatgttgaatgttatggatctggatattaccgatcaggatatagagtacaccgagatataacatatctataacatcaattttatgtagttgcttcacatgagttgcgtgtgcttcccattgtaagctcttggttgtgggttgtttggcagcatataatagtatttatatatctgtatctatatacattaatcctcaacatatattatgcttgcgcatcatttacacctactagcacttatacgtatacgtcttcaagaaagttaaatagttttaaaaactttctaaattacttcacaagattgtatttagttatttacattaacaatagacactaattgttgtttataccaccag

SEQ ID NO: 14532 - DNA, 418 bp, synthetic construct
  source 1..418: mol_type = other DNA
aagacactgggaaaaatcctgcgtccccgatatggtgtttacaattgatatatctaagaaaggtaaaggcttctgggataaaattaatgactaagaaaataataacaatatataatagaagagatacgagtagacatactaacagtatacttccaataacacgatccatttgaatgggtgtggatataaaatttatacacaacaaaaatactaatataagaaattaagattgaaatatagatcaaacttaattaatactactatagaaaaagcaagtctgcaagagaagtgcggactgacaaatccgtaaacggataaattgatgactaaataaataaatagataaataaataaatacataaataagtaagtaaataaataaacatataacaaaaataaaaataaaaatcttaataat

SEQ ID NO: 14533 - DNA, 763 bp, synthetic construct; identical to SEQ ID NO: 2390
  source 1..763: mol_type = other DNA

SEQ ID NO: 14534 - DNA, 723 bp, synthetic construct; identical to SEQ ID NO: 2339
  source 1..723: mol_type = other DNA

SEQ ID NO: 14535 - DNA, 657 bp, synthetic construct; identical to SEQ ID NO: 2252
  source 1..657: mol_type = other DNA

SEQ ID NO: 14536 - DNA, 423 bp, synthetic construct
  source 1..423: mol_type = other DNA
aaaaactataacatacaacacattaccatgctatacaccataggactacccagtgtactgcagtgggtccaggacggaaaccaccggtccactcaggctactctgtatttgggcacaaccaggaacaagacaatacctaaagctgaatacatagaactcttagaaacatctgtcagtgtgagcccctccaccggcctggccattgtattcaaaagaccggagtcaaatgatctacttcccatgtggagacggcattggccaaacaccagcgaaatcactgtgaatttagctggatacatgggtatcactcctcaacaatcgctaggagttgaagtggagatcgcattttgggaccctatagttatgtaatttctgttctgttgcactaataatgtaaaaaaaccaacatcttaaccagctata

SEQ ID NO: 14537 - DNA, 261 bp, synthetic construct
  source 1..261: mol_type = other DNA
gaaaataagacaataaccaaaacttataatcttctcttaacatccccataccctggcaaccaaacgtgaaacacatatgctcaaaaacgcgcaatctctcagagcatttcactctccacaaaacgaatcctatactctctaccatggcacgaacgccagcccagataatcacgattctaaccaatctcgtagcatgggggttcaaattccgagacactgaggtaaatttaattctaatattaaagagtgttatgcaacatc

SEQ ID NO: 14538 - DNA, 511 bp, synthetic construct; identical to SEQ ID NO: 2049
  source 1..511: mol_type = other DNA

SEQ ID NO: 14539 - DNA, 1000 bp, synthetic construct
  source 1..1000: mol_type = other DNA
gccgcccgggccaagtaccagaggcaagagaaatattgtcactgtggctgtggaccccaatgcaaaaagaaagaaacttgtcacaaagcagtctgcaggcacagctcaggcaaatgctctccagaaacaccacgaagacatgctaacacaaagcaagaacatcatgaatcagctagcagcccataacaagttgcttcttgaaataagagcacttgtggggtcttatgaggctcggatagtggagcttgagagaacagtctctggcttaactctcgcacaaggagcacatgcagcacccgcccccattgtaagaggctcagccaatatagcaggccttcccagagggagaatgccggcccctgctcctcggcaggtgggatctgctacgattagagggttgggggtcagaggcagaggcagaacccctagttacaggccagtttctcctccaggtcacggcagtgacagtgatgatgcaaatacctcagctatgtcagggatacaggatgagaagtctttccttgatgcactcttgtaaacctgttttatacaatgtacaatataaatttataaaaactgacatcaggaaaatgacaagaattgtagggctagatgttttagtgacatacaccagggaccatgagaagacaacatccggcctcatggtcttaggggcctgcaaagagaagccccgagactttacagtggatgagctatcatctattgagatggagcttgtcctacttcagtcccagcccagactctacatccatgcagggggctctaatattccgtgcctcacaaaaggggtctactatgatttagcaggatttttggagatacctgctgctgcactgttctcataccagatagagatcattattgtaggtggaggagtctttccataactgtgattgtcagtgatggggtctattatttaacctatactactttaagaccttaaattaaccaactaataaaaactgacaacaaggagaaa

SEQ ID NO: 14540 - DNA, 337 bp, synthetic construct; identical to SEQ ID NO: 1612
  source 1..337: mol_type = other DNA

SEQ ID NO: 14541 - DNA, 339 bp, synthetic construct; identical to SEQ ID NO: 1620
  source 1..339: mol_type = other DNA

SEQ ID NO: 14542 - DNA, 733 bp, synthetic construct; identical to SEQ ID NO: 2351
  source 1..733: mol_type = other DNA

SEQ ID NO: 14543 - DNA, 289 bp, synthetic construct
  source 1..289: mol_type = other DNA
gacgctacaacagaccaaaaatagtatcaaaccatcttttgtctggggttcttactggggggaacggtcaagccgttaggaaatgttttttcgtggattgatgtaccgtccggacgctttgcttcttcatgcctttggaagattgagcaagaaactttagaaccagtattaactcttatttaaaaaggtctattcattgagattaatctgtttagtctttttataacttttatacttaatattgagaacatttagcacattgacaccagtcagtatctttaaagcaata

SEQ ID NO: 14544 - DNA, 357 bp, synthetic construct; identical to SEQ ID NO: 1661
  source 1..357: mol_type = other DNA

SEQ ID NO: 14545 - DNA, 955 bp, synthetic construct; identical to SEQ ID NO: 2555
  source 1..955: mol_type = other DNA

SEQ ID NO: 14546 - DNA, 260 bp, synthetic construct
  source 1..260: mol_type = other DNA
accaagaacccctctaaatgtaaggagatcagattcaaatcctaaaataaaaaaatcacaaaccttaaagaaaataaaattccatacttgtgaagttatatttctttttattagtattttttgttttttaatcccttttaccatttaatcactccaccatcccacccaatttattacatctattttgttatctcatccgtcatattcgactgtcattccaattttttgttcatatcctctgcttttcatttaattatatc

SEQ ID NO: 14547 - DNA, 531 bp, synthetic construct
  source 1..531: mol_type = other DNA
aaattgttaacaataacaacaaatataatattttaattttttaccataaaaatcagattacagcgaatcactgtaaaaccatattccaattcacaacatacatctccactaaaaaatcctctctgtatgcaatcattgaaccctaatttgtttgataattgcgacattgcatctgtattcattaataaaactcaacattgtccttcctattcctattgtatcagtgacttaaaccaaaccaaaagtgccatataattccaaagatttatcttttcagtaattaaaaaaatcacttaaagaaaataaaatcttcaccggttttcttaaaaattattgtctcatttgatacacactctcatactccaataaaaatcttttgtttttatccttatgtagcgatctaaaattgaaaattccatttaattatttaaattacctctataacaaattgttcaatccttttttattaattaagattatattcatcagagctggtcaaatttaaccgaaaacaagacatttgtgtttctc

SEQ ID NO: 14548 - DNA, 269 bp, synthetic construct
  source 1..269: mol_type = other DNA
attaatataagaagcattaaaaaaaccacgtaaagaaaataaacacagttaatccttaaaccaatcaaaagtaataatccttgtttatcaaaatcaacatataaataacaaagtcaattttggcttaaaaaaaccttaatttatatttaaccagtcataacagttcattaatttcttttgcctaactgtgcaactaacctccaaactctataactactatcattttccaaataaataaaaaagttgttttaaaaattaaaaatcaagct

SEQ ID NO: 14549 - DNA, 606 bp, synthetic construct
  source 1..606: mol_type = other DNA
aaaaatcaccgtcttctccaaacaattttcttacactttttatagcttttatcttgtcaatggaaattccccttgacgactttattcaatattcagatcaatccttttttgatcccctgtacaatccattattaaatcaaaatcattcttcttattcccactcttctaaagcagtaactcacataattttaatcatctttcttattgtgtttcacttgattcaaatttcaaataccttaattcagtcatcatgcacaactatcatggacactctgagcctcttaacaaaccaaacgctcagaatactgcacaatcttatttaaaaatcctccatattatatggatcataattaaattttgttttcaactaataatagttttctgtgtagttgggtcatttgttattgattgtttagtatttaaagttgtggctcctgaagattggagagatctgatcaaaaacaagtctttatttacttggcaaaatatgacagtataaaaatcacaaagaaaataaaatcctttattctcttaatcagaactaataattttattagtaatcataacaaattaaaaaaatcacatcgtatcattccaattgttata

SEQ ID NO: 14550 - DNA, 270 bp, synthetic construct
  source 1..270: mol_type = other DNA
cctttttcttctacatcagtgagttgattcatacaaactttctacctacattcttcacttcacaatcataatcaccaaccctctgtggttcaactaatcaaacaaaacccatctggagcctcagatcatcccaagtcattgttcatcagatctagtactcaaataagttaataaaaatatccacatggggcaaataatcattggaggaaatccaactaatcacaatatctgtcaacatagacaagtcaacacgccagacaaaatcaacca

SEQ ID NO: 14551 - DNA, 307 bp, synthetic construct; identical to SEQ ID NO: 1502
  source 1..307: mol_type = other DNA

SEQ ID NO: 14552 - DNA, 654 bp, synthetic construct; identical to SEQ ID NO: 2248
  source 1..654: mol_type = other DNA

SEQ ID NO: 14553 - DNA, 1000 bp, synthetic construct; identical to SEQ ID NO: 2603
  source 1..1000: mol_type = other DNA

SEQ ID NO: 14554 - DNA, 783 bp, synthetic construct
  source 1..783: mol_type = other DNA
taaaaacacatcagagtgggataaatgacaatgataacattagatgtcattaaaaatgatgggtcttcaaaaacatgtactcacctcaaaaaaaataattaaagaccactctggtaaagtgcttattgtacttaagttaatattagctttactaacatttctcacagtgacaatcaccatcaattatataaaagtagaaaacaatctgcaaatatggcagtcaaaaactgaatcagacaataaggactcatcatcaaataccacatcagtcacaaccaagactactctaaatcatgatataacacagtattttaaaagtttgattcaaaggtatacaaactctgcaataaacagagacacatgctggaaaataagcagaaatcaatgcacaaacataacaacatacaaatttttatgttttaaatctgaagacacaaaaaccaacaattgtgataaactgacagatttatgcagaaacaaaccaaaaccagctgttgaagtgtatcacatagtagaatgccattgtatatacacagttaaatggaagtgctatcattactcaatagatgaaacccaatcctaaatgttaacactaggttaggatccatccaagtctgttagttcaacaatttagttatttaaaaatattttgaaaacaagtaagtttctataatacttcataataataagtaataattaattgcttaatcatcatcacaacattattcaaaaccataactattcaatttaagaagtaaaaacaataatatgggacaagtagtt

SEQ ID NO: 14555 - DNA, 1000 bp, synthetic construct
  source 1..1000: mol_type = other DNA
aataggttataatcaatagcttaatcataattaaaacattatttaaaaccataaccattcaattcacaaagcaaaaacaaaaacatgggacaagtagctatggaggtgaaagtagagaacactcgagcaacagacatgctcaaagcaagagcgaaaaatcgtgtggcacgcagcaaatgctccaaaaatgcctcttcaatcctcataggaataactactctgagtatagccctcaatatttatctgatcataaactacacaatacaaaaaactacatctgaatcagaacaccacactagctcaccacccacagaatccaacaaagaaacttcaacaatccctatagacaacccagacatcaatccaaactcacagcatccaacccaacagtccacagaaagcctcacactccaccccgcatcctcggtgagcccatcagaaacagaaccagcatcaacaccaggcataacaaaccgcctgtcctccgcagacagatccacaacacaaccaagcgaaagcagaacaaagacaaactcgacagtccacaaaaaaaccatctcaaacacaacttccagaacacagtccccaccacgaacaacagcgaaggcggtccccagaaccaccgcccttcgcacaagcagcacaggagaaagaccaaccacaacatcagtccagtccgacagcagcaccacagctcaaaatcatgaggaaacaggctcagcgaacccacaggcatctgcaagcacaatgcaaacccagcacaccaacactgcaagaccaaatcagtcaacaaaaaacatgaaacagctctaaagtaaaacatgtaggtgctaacaatcaagaaatcaaaagataactaataatctctctaaaacagcaacaacatcatgtcaactttgctcaaatctccctgggagaaactttcgcccccatactgacaacatcacaattatctcaagaaaagaaactgggcaaaacatcaccaaagagacaaataaca

SEQ ID NO: 14556 - DNA, 1000 bp, synthetic construct
  source 1..1000: mol_type = other DNA
agctgcattaaatgaggataatggtaaaacccataagagactcagaggaataagtaattttgaagtaaaggatcaatatcaagaagagactgacaaacctgttaaaaaaggcatagacgggaatactgcatcgatgtctttgaagggaaaacgtacatcagggaatggtgcaacccagtctgttctccaatcacccctcaaccaaaattcgccccatgcatatgtggagaatgcccaaggacctgcgagagatgcagagaggatgaattccaacctagacagggataaaagtaattctgaacaagacgaaatacaatccaagttggataaaattttagagaatcaaaatatgatactaaaaaaattagatatcgtttatgaggttagagaagagattaatagtattcagaaagtacttagaaatcaaggactatcactctcagtaattgatagttgtttaaatgatctcatgatagcgataccatcacaaggaaaagatcagtctagcaaaaatgtagatactaatcctgatttaaagttagtgattggaagagataatagaagaggcttaagtgatcttacagacagaaagcaatcaatcaaagatgtcaaatttggagaagacatttacaaatgttaccccattgacaaacgatatatgcaagaacctttaaactttaatactaacaatgcagcaaattttgtaccgcaagatgataacatatctttatctgttgtaatggcaatgatagatagaaaagtaaaagacaaatccaaggttgaaagattgaagaaattaataatggagggatatggaaagataccactaaaagaaatttactcacaaataatcaagctcatgaattaatctcaaatgttaaacttactaaatgtagttaggattaacattatataaaattaacaattcaactaatcttaaatttatatattgaatcattattattacaaaaaacttaggatcaaaggattcaaaacagca

SEQ ID NO: 14557 - DNA, 522 bp, synthetic construct
  source 1..522: mol_type = other DNA
agaaatatttaattcagatataagagattttgaatgttgttgtaactgtaaattacatagccactttgattttataattaataatatcttagccttgattaataaatgttataaataaataaaaaactaaggattaaatgttaggtcttaagaaactgtttcaatttgccttagattttaaagtttaaaaaacaagtaatcattttgttttatagagtaatttgataagttaaaagatgtttctttatagtttacacaattaattatttatattagttattggaatatgtaaataatttgtattgtaattaagtaaatgaacttaacagttcatatatcaagaaataagccgatatttaaggtgctgctatagtaaattctttaggatattagttttaaagatattctttttatataaaagatcaataattgcaataaatcaatttatactcattttattaatttagtactaacattaaaacttattgaaattaataaaattattaaatattaacttaaata

SEQ ID NO: 14558 - DNA, 687 bp, synthetic construct
  source 1..687: mol_type = other DNA
ttaagatagcttagattggattgtagatcatgctatagaaaataatataatattaccattaatcattatttgaattactgatgtaatactgtgaatatattaataatagtaatttataatttaaactattatattgattctaaattatttataaataaatgtttaaatgttattatatatgaataataaatttagtagttgttaacaattatataataataatagtattagtattccgattgtttaggaattcttttaaacttataattatacataaattatttaatttaataaatcactaagttaataataaaaatgttatttatcatgatatatagtaaaatcaagattaggttcaaaatctttaaatactaataattattataatatatccatcataaaataatgtagttggtatcattaatagttgtgagttatttaaaataaatgtttaatatagattacaaaaaacttaggatgaatgatcacttcaatgatcattatctttattattactgtcttgttaaatcaatagaaattaaaattaacattaaaatttacatttaattgcaaaaaccatatataaattgtgtttaagctcactattctacttaagatagattgatatatagttttaacaacagttagatataagtattatattgaatactttaaaatacaataaca

SEQ ID NO: 14559 - DNA, 273 bp, synthetic construct
  source 1..273: mol_type = other DNA
cattaacaaaagtaagcttactacaagttataacgcttgaattatcaatataaacaatgcataaataatttcaaaaattaattcttgatattacaacttattctgagtcaatcatgattcgtttaagtcaattatatatagtcaatgttcttgtgattttaaatatactatagttaataaatttagtaactaatgtgaaaattataaaaaacttaggattaatgttgacacattctgtaagaagatagtgtctacatttatccttgacacgat

SEQ ID NO: 14560 - DNA, 892 bp, synthetic construct; identical to SEQ ID NO: 233
  source 1..892: mol_type = other DNA

SEQ ID NO: 14561 - DNA, 262 bp, synthetic construct
  source 1..262: mol_type = other DNA
cgaactggcaattttccatctactgaataagctgttctcacttaattttaccctatcaactctactaggagctttgcttgtagtttgctattagttgttaagaagtattttaaagaaaacttagaaaaaagacagatgagcccgaacagggtaaaagcgtgggcatttccctagttcgggtagtctagtgctctacaccagattataaaagttgtttctattgctcctgcatctgcacgtctatctaaaaaccttaaaagct

SEQ ID NO: 14562 - DNA, 654 bp, synthetic construct; identical to SEQ ID NO: 2249
  source 1..654: mol_type = other DNA

SEQ ID NO: 14563 - DNA, 372 bp, synthetic construct; identical to SEQ ID NO: 1707
  source 1..372: mol_type = other DNA

SEQ ID NO: 14564 - DNA, 285 bp, synthetic construct
  source 1..285: mol_type = other DNA
cacatcaacaacccagtcatagctacacaacaatcacaaaccgaaaaaatctcaaagatacacaatcgcacacatacaatgaaagcaatcactcccgttctacatcacaacccagaaatcccaccaagcgcaacaccacgaccaatcaactgataacacatagtagaatacaagaacacaactgcattgatttaagaaaaaactaagataggcctgaacggttgcattcaggattctcaatcgttcaggccaatacaattctcagcttcaaacgaaaacaacaag

SEQ ID NO: 14565 - DNA, 803 bp, synthetic construct; identical to SEQ ID NO: 2439
  source 1..803: mol_type = other DNA

SEQ ID NO: 14566 - DNA, 494 bp, synthetic construct; identical to SEQ ID NO: 2014
  source 1..494: mol_type = other DNA

SEQ ID NO: 14567 - DNA, 722 bp, synthetic construct
  source 1..722: mol_type = other DNA
tcaataggattgctctgtaacacaaactgattttataaggtgaaatatgctcatataaaatggttaatagacaaataataataataatcattataacaaaattaaaaggataaaataattataagaacactacgaactaatcaagaaacaaacataacattaactaacaacagctaacatgaccaatgatactccatgaagcatcatccattaataacaaaaagtataatctatcaattagaaccaaacttgatctattctaagtaatctaccaagcaaaaacatacaccaagaatcaccagccatcgaatctgattaatctgacacaaaaatccgaacaaccgccggaacaggcctggtcctaataaacaacccacccggccaccagcccactcaaaatcaagacacaatcaatctcaccccaatcaccagttcaatccgcgagccagacaagtccttccacatgcccagagattcaattgatctgatacattgctatattttttaagaaaaaagaaaaatgagtgggtgagacattctagttctcatacacagaataaacttcgaacattggatgtagtatggatcaaaattgaagattgaagaactagtatgattccgcacactagcagacaagcaatgaggaataaaaagaatagacaattgcccaggaggaatgacacaaagcatccaacactaggggggaagagaccacctctaag

SEQ ID NO: 14568 - DNA, 273 bp, synthetic construct
  source 1..273: mol_type = other DNA
accattaacagcccactcgtaatcacacagcaatcataatccaaaaaaatccctgatacccgcaatctcacacacacaacaggcaaaatcaactccacaccacaatacaaatcaaaactcccaccaaacacgccatcacaaatgatcaatacagcatgcaagaacctaatcactatgatttaagaaaaaactacgataggcctgaacggttgcattcaggtcactcaatcgttcaggctactataatttctaattccgaacaaaattgacaaa

SEQ ID NO: 14569 - DNA, 494 bp, synthetic construct; identical to SEQ ID NO: 2015
  source 1..494: mol_type = other DNA

SEQ ID NO: 14570 - DNA, 722 bp, synthetic construct; identical to SEQ ID NO: 2337
  source 1..722: mol_type = other DNA

SEQ ID NO: 14571 - DNA, 610 bp, synthetic construct
  source 1..610: mol_type = other DNA
agggatggatgctcgcctgcaacatcttgaacaaaaggtggacaaggtgcttgcacagggcagcatggtgacccaaataaagaatgaattatcaacagtaaagacaacactagctacaattgaaggaatgatggcgacagtaaagatcatggatcctggaaacccgacaggggtcccagttgatgagcttagaaggagttttagtgatcatgtaactattgttagtggaccaggagatgtgtcattcagctccagtgaagaacccacactgtatttggatgaactggcgaggcctatccccaagcctcgtcctgcaaagcagccaaaaccccaaccagtaaaggatttagcaggaaggaaggtgatgataaccaaaatgatcactgactgtgtggccaatcctcaaatgaagcaggcgttcgagcaacgattggcaaaggccagcaccgaggatgccctgaatgatatcaagcgagacatcatacgaagcgccatatgaacctacaaagaacaccagactcacgggaaaatccatgaactgagagccgcaataattccttattaaataaaaaataagcacgaacacaagtccaatccagccatagcagca

SEQ ID NO: 14572 - DNA, 595 bp, synthetic construct
  source 1..595: mol_type = other DNA
agggatggatgctcgcctgcagcatcttgaacaaaaggtggacaaggtgcttgcacagggcagcatggtgacccaaataaagaatgaattatcaacagtaaagacaacactagctacaattgaaggaatgatggcgacagtaaagatcatggatcctggaaacccgacaggggtcccggttgataagcttagaagaagttttagtgatcatgtaacaattgttagtggaccaggagatgtgtcgttcagctccggtgaagaacccacactgtatttggatgaactcgcgaggcctgtccccaagccccgtcctgcaaagcagccaaaaccccaaccagtaaaggatttagcaggacggaaagtgatgataaccaaaatgatcactgactgtgtggccaatcctcaaatgaagcaggtgtttgagcaacgattagcaaaggccagcaccgaggatgctctgaatgatatcaagcgagacatcataagaagcgccatatgaattcaccaggactaccagactcacggggaaatccataaactgaaagccacaatgattctctgttaaataaaaaataagcacgaacacaagtccaat

SEQ ID NO: 14573 - DNA, 808 bp, synthetic construct; identical to SEQ ID NO: 223
  source 1..808: mol_type = other DNA

SEQ ID NO: 14574 - DNA, 372 bp, synthetic construct; identical to SEQ ID NO: 1708
  source 1..372: mol_type = other DNA

SEQ ID NO: 14575 - DNA, 260 bp, synthetic construct
  source 1..260: mol_type = other DNA
tactattgaatgaagactccagattcaataataattgaaaggctctctatcttatgcaatagttatacgttttggctgtattagaatgttatagattctgctgtttttcccatatgaagcaatccttcaacaccgacttaggttcaattttctcatcatttactgttgtaattcaatcttactaaagttattccgatatttaagaaaaaataacctttatataatgtaacaatactattaagattatgatataggccaga

SEQ ID NO: 14576 - DNA, 1000 bp, synthetic construct; identical to SEQ ID NO: 2604
  source 1..1000: mol_type = other DNA

SEQ ID NO: 14577 - DNA, 358 bp, synthetic construct; identical to SEQ ID NO: 1668
  source 1..358: mol_type = other DNA

SEQ ID NO: 14578 - DNA, 254 bp, synthetic construct
  source 1..254: mol_type = other DNA
gttgggtgtcttctcaaacgaatcagcctgcatgtctaacactactgttataccgatctacctctacctggtgttgggtctataaacactgtactaccttctgtaatgtagggaatgcattactcaaaactggaatctccccagtagtttaataaaaaaccggttgaacatgacagtatattatttagcttatggctaatactccatacagctaagtaggcccgactcaggtgctacccaacccccagccagcc

SEQ ID NO: 14579 - DNA, 742 bp, synthetic construct; identical to SEQ ID NO: 2363
  source 1..742: mol_type = other DNA

SEQ ID NO: 14580 - DNA, 255 bp, synthetic construct
  source 1..255: mol_type = other DNA
ttctaattacagtataagtaagctgttaactacccattaatatacatgtttcttgaactaatcattcctatatatttaatttaagaaaaaatgataggcacgaacccttatggtgccgtaacgtctcgtggcactgggttcaacaaaaccctcgctttagacactacatccaatttcctttccctatccaatcaattacctcacagttggtaacccactacaagaagtcatatacactacactggtgccgccacc

SEQ ID NO: 14581 - DNA, 773 bp, synthetic construct; identical to SEQ ID NO: 218
  source 1..773: mol_type = other DNA

SEQ ID NO: 14582 - DNA, 255 bp, synthetic construct
  source 1..255: mol_type = other DNA
attaagatctctaacgatccgatatcagatgagttcggataacatacagatgattaacacctataaccttcttaatattgcatttgaacaaaaagaaattgatatcaatctgagtttaacaatactgtaagagatcatatactatgattttggataattaagaaaaacttaggattacacattatatacatcattctgtgtgacaacattcatcaaactagcttcaaaggcgttagcctctcaaaaagtgtcagt

SEQ ID NO: 14583 - DNA, 262 bp, synthetic construct
  source 1..262: mol_type = other DNA
aggccaagaaccctgacctggaagtaactatatccgtgatcgagtaatgcttcagaaaattgcgaccacccgagcaatcccggaatacatccgactcgaatctaccccaaatgacaactcacaatttgactctctttgacctagcactgagcattaatacatttttaaatatccaattatttaataaaaaactgaatgggggagaacacccgattatcactcaacagccaacctttgtctcgtgttgcttcgtggaacccaa

SEQ ID NO: 14584 - DNA, 506 bp, synthetic construct; identical to SEQ ID NO: 2036
  source 1..506: mol_type = other DNA

SEQ ID NO: 14585 - DNA, 549 bp, synthetic construct; identical to SEQ ID NO: 2113
  source 1..549: mol_type = other DNA

SEQ ID NO: 14586 - DNA, 441 bp, synthetic construct; identical to SEQ ID NO: 1894
  source 1..441: mol_type = other DNA

SEQ ID NO: 14587 - DNA, 1000 bp, synthetic construct; identical to SEQ ID NO: 257
  source 1..1000: mol_type = other DNA

SEQ ID NO: 14588 - DNA, 273 bp, synthetic construct
  source 1..273: mol_type = other DNA
agagaagtataaaaattattaataaagatatgatttgcaataggatgttagagtcagataatataatgatgaggggcagatattcagggggaatttcgaaataatggttgtataaataatgcgaaaattaagaaaaaaccataacatgggggcgacccttcacattgagaatcacacaaatacccatagcaatctataacccactcatcttgatcagaactttcaacaagccctcctgtagttctctatcactgctgaatcatgagtacatct

SEQ ID NO: 14589 - DNA, 336 bp, synthetic construct; identical to SEQ ID NO: 1608
  source 1..336: mol_type = other DNA

SEQ ID NO: 14590 - DNA, 334 bp, synthetic construct; identical to SEQ ID NO: 1595
  source 1..334: mol_type = other DNA

SEQ ID NO: 14591 - DNA, 1000 bp, synthetic construct; identical to SEQ ID NO: 258
  source 1..1000: mol_type = other DNA

SEQ ID NO: 14592 - DNA, 587 bp, synthetic construct; identical to SEQ ID NO: 2155
  source 1..587: mol_type = other DNA

SEQ ID NO: 14593 - DNA, 390 bp, synthetic construct; identical to SEQ ID NO: 163
  source 1..390: mol_type = other DNA

SEQ ID NO: 14594 - DNA, 411 bp, synthetic construct; identical to SEQ ID NO: 167
  source 1..411: mol_type = other DNA

SEQ ID NO: 14595 - DNA, 394 bp, synthetic construct; identical to SEQ ID NO: 1764
  source 1..394: mol_type = other DNA

SEQ ID NO: 14596 - DNA, 267 bp, synthetic construct
  source 1..267: mol_type = other DNA
tcatttaattatgctgttattattttagcatattgtatcagcattatctgcttgcatgcagctcctaagagaaacccagatacaacaatggtaattattgagggataatgtctaggatggattaaaagcatcaatgtggttactacactcagacctatatactatatcaattaatctacacaataaatctgtatactagattttattatccaattaagaaaaacttaggatcaaagaaagttgcacatcactgacagcattgtagca

SEQ ID NO: 14597 - DNA, 363 bp, synthetic construct; identical to SEQ ID NO: 1681
  source 1..363: mol_type = other DNA

SEQ ID NO: 14598 - DNA, 423 bp, synthetic construct; identical to SEQ ID NO: 1838
  source 1..423: mol_type = other DNA

SEQ ID NO: 14599 - DNA, 1000 bp, synthetic construct; identical to SEQ ID NO: 2605
  source 1..1000: mol_type = other DNA

SEQ ID NO: 14600 - DNA, 708 bp, synthetic construct; identical to SEQ ID NO: 2318
  source 1..708: mol_type = other DNA

SEQ ID NO: 14601 - DNA, 647 bp, synthetic construct; identical to SEQ ID NO: 201
  source 1..647: mol_type = other DNA

SEQ ID NO: 14602 - DNA, 748 bp, synthetic construct; identical to SEQ ID NO: 214
  source 1..748: mol_type = other DNA

SEQ ID NO: 14603 - DNA, 294 bp, synthetic construct
  source 1..294: mol_type = other DNA
tcaaaggatcccggtgtacggacatatgagagaaacactacatagttttaaactaattatacttcagcaacctagctggagaataaatgtacctcaatcaacttaattacaacttggcttgatgattctctttaagcttaccacggcctgaattaattcctcactgtaactattaagatttataatggcatgatctatgttaggttaacgtaattgtaaaataaaaaacttaggagcaaagctctttaagacctctccgagcgtttttgaaaggagatataatacgtgactaag

SEQ ID NO: 14604 - DNA, 1000 bp, synthetic construct; identical to SEQ ID NO: 259
  source 1..1000: mol_type = other DNA

SEQ ID NO: 14605 - DNA, 1000 bp, synthetic construct
  source 1..1000: mol_type = other DNA
atcactccacccccgccgcaccgtcccgcagagacccacagcagggcagaacgcccgacaccagcctcaacccagccgaacaacaaggcctagacccccacagcgcagccccccaccccgaactcaacacacggagcacccagctctgggcagcacccgcaccccacctgccctgcacccccacctggtccggacctccccacggctccgcccaccgccgcagccgaccaaggcccgaccaacacgcggccgctgcacatccagagcgcacacccgacaacaaccccgacagtcccctaccgaaaggacaaccccagacacccaaccagggccaacagaggaaggaaaccacaggaaccagacacccccgagacgaggcaacctacccaccatgaataccaaacaaaacttagggtcaaagaatcacatcaacccgaatcgccggaagagacaacatcaccgacacacaaccaaaccgggaaccaaggggcaaccacccgcagggcccagggcccgggcccaccacccagagcagcgcagaaccgaaggacaggcccgccccacgcacagcagcagagcacctccagaccccccacccagagccaccccgacgccggaccgagcccaagagcacccagggggaccctccggtcccagatccccaacagcagcaccccccacgcaccccccccaccaccgcccccgggactccacctccacaccacgccagatgggaacagagggccccactcccccgcccccctccgcccgagcactcccatcgagaccacccccgcaccccaacacagcggaccctggtcacccatcgccgccggagagccggccaggcggagcaccaagggcaagccactgggtcccgcggcagatctccccagccgggcagcccaaggccaccaaatccatccgagcatcaaaccacggcatagcgaccgagacactgcccaataaacacacccagatcacccacataatctctagc

SEQ ID NO: 14606 - DNA, 551 bp, synthetic construct; identical to SEQ ID NO: 2115
  source 1..551: mol_type = other DNA

SEQ ID NO: 14607 - DNA, 377 bp, synthetic construct; identical to SEQ ID NO: 1720
  source 1..377: mol_type = other DNA

SEQ ID NO: 14608 - DNA, 1000 bp, synthetic construct
  source 1..1000: mol_type = other DNA
gaaacagcgccgacacagccacccctctggcggaacgaggccgaaccccccaacaaactcgctccaggggggggccccccccacgacccgccgggcgccgaccgcgcgagccggcgagacacccccaagaggccccgacgaagaccgggcaaccctcccccagaaaacggcccaccaacacacccgaggccaggcgccgggcacccccagccccgccaccggcgggacaggaggacaagacggggtccccccaaccaaagggaccaccagggaagggtccgccgacccagcacagacccggcccaaacaaagcagacccccaagacgaaatcgcccagcacaccccattcatcatcaaacaaaacttaggggtcaagtccagacgacagaccccggtccgccaggcagcaagccgcagaaaggaaggagacaagaccggcccggaaggaggacacccaaccacagaaacccccaacaccaggggaggagccccccctccacacggcggaggaacgggcgagggacaccgaggagaacccgatcgggagccaggagccggagacgccagcggtaaacaggccgggcacacatccgacaccaccggaggaccagagaagggcccgaccccgcgtggacccgacggcaggggatctaaccccgccacaaagagaggcgagaaccctcccccccgcacacaaccggcagacagaccgagggaggaccacctcccaaccagacaggcggctctcccgcagccgagccgcaggtcccaagaagaggacacccccgaaacctcccagaacccctccgctcccggccgccgggacaggagctccgccgccaaaaaccagagtcaccgagagccaaccaggggtcccccccaatccctcccggcgccctcccacagaggctccagcaaagtccctcggcccgacgacccctgcatgcgccgaaagagaaacccaccaaaggacgtccagtacatccatgtataaacatc

SEQ ID NO: 14609 - DNA, 1000 bp, synthetic construct; identical to SEQ ID NO: 260
  source 1..1000: mol_type = other DNA

SEQ ID NO: 14610 - DNA, 1000 bp, synthetic construct; identical to SEQ ID NO: 2606
  source 1..1000: mol_type = other DNA

SEQ ID NO: 14611 - DNA, 1000 bp, synthetic construct; identical to SEQ ID NO: 2607
  source 1..1000: mol_type = other DNA

SEQ ID NO: 14612 - DNA, 372 bp, synthetic construct; identical to SEQ ID NO: 1709
  source 1..372: mol_type = other DNA

SEQ ID NO: 14613 - DNA, 469 bp, synthetic construct; identical to SEQ ID NO: 1960
  source 1..469: mol_type = other DNA

SEQ ID NO: 14614 - DNA, 251 bp, synthetic construct
  source 1..251: mol_type = other DNA
atgagcatggaacaatgggatgattcaaccgacaaatagctaacattaagtagtcaaggaacgaaaacaggaagaatttttgatgtctaaggtgtgaattattatcacaataaaagtgattcttatttttgaatttaaagctaccttattattactagccgtacgtgcccttctaattaagaaaaaatcggcgatgaagattaagccgacagtgagcgtaatcttcatctctcttagattatttgttttcc

SEQ ID NO: 14615 - DNA, 283 bp, synthetic construct
  source 1..283: mol_type = other DNA
cgtacgttttcaaagttcaatttgagtcttaatgcaaataggcgttaagccacagttatagccataattgtaactcaatattctaactagcgatttatctaaattaaattacattatgcttttataacttacctactagcctgcccaacatttacacgatcgttttataattaagaaaaaactaatgatgaagattaaaaccttcatcatccttacgtcaattgaattctctagcactcgaagcttattgtcttcaatgtaaaagaaaagctggtctaacaag

SEQ ID NO: 14616 - DNA, 327 bp, synthetic construct; identical to SEQ ID NO: 1572
  source 1..327: mol_type = other DNA

SEQ ID NO: 14617 - DNA, 580 bp, synthetic construct; identical to SEQ ID NO: 2148
  source 1..580: mol_type = other DNA

SEQ ID NO: 14618 - DNA, 440 bp, synthetic construct; identical to SEQ ID NO: 1893
  source 1..440: mol_type = other DNA

SEQ ID NO: 14619 - DNA, 480 bp, synthetic construct; identical to SEQ ID NO: 1985
  source 1..480: mol_type = other DNA

SEQ ID NO: 14620 - DNA, 753 bp, synthetic construct; identical to SEQ ID NO: 2377
  source 1..753: mol_type = other DNA

SEQ ID NO: 14621 - DNA, 461 bp, synthetic construct; identical to SEQ ID NO: 1940
  source 1..461: mol_type = other DNA

SEQ ID NO: 14622 - DNA, 882 bp, synthetic construct; identical to SEQ ID NO: 2517
  source 1..882: mol_type = other DNA

SEQ ID NO: 14623 - DNA, 492 bp, synthetic construct; identical to SEQ ID NO: 2013
  source 1..492: mol_type = other DNA

SEQ ID NO: 14624 - DNA, 512 bp, synthetic construct; identical to SEQ ID NO: 2052
  source 1..512: mol_type = other DNA

SEQ ID NO: 14625 - DNA, 299 bp, synthetic construct
  source 1..299: mol_type = other DNA
ctaggtctccggagggggcaagggcatcagtgtgctcagttgaaaatcccttgtcaacatctaggccttatcacatcacaagttccgccttaaactctgcagggtgatccaacaaccttaatagcaacattattgttaaaggacagcattagttcacagtcaaacaagcaagattgagaattaactttgattttgaacctgaacacccagaggactggagactcaacaaccctaaagcctggggtaaaacattagaaatagtttaaagacaaattgctcggaatcacaaaattccgagt

SEQ ID NO: 14626 - DNA, 439 bp, synthetic construct; identical to SEQ ID NO: 1885
  source 1..439: mol_type = other DNA

SEQ ID NO: 14627 - DNA, 327 bp, synthetic construct
  source 1..327: mol_type = other DNA
gccaatctcttttccctccgaaagaggcaactaatagcagaggcttcaactgctgaactatagggtatgttacattaatgatacacttgtgagtatcagccctagataatataagtcaatcaaacaaccaagataaaattgttcatatcccgccagcagccttaaagataaatgtaataggagctatacctctgacagcattataattaattgttattaagtaacccaaaccaaaaatgatgaagattaagaaaaacctacctcgactgagagagtgttttttcattaaccttcatcttgtaaacgttgagcaaaattgttaaaaat

SEQ ID NO: 14628 - DNA, 579 bp, synthetic construct
  source 1..579: mol_type = other DNA
ttgcaataattgactcagatccagttttacagaatcttctcagggatagtgataacatctttttaataatccgtctactagaagagatacttctaattgatcaatatactaaaggtgctttacaccattgtctcttttctctcctaaatgtagagcttaacaaaagactcataatatacctgtttttaaaagattgattgatgaaagatcatgactaataacattacaaacaatcctactataatcaatacggtgattcaaatgtcaatctttctcattgcacatactctttgtccttatcctcaaattgcctacatgcttacatctgaggacagccagtgtgacttggattggagatgtggaggaaaaatcggggcccatttctaagttgttcacaatctaagtacagacattgctcttctaattaagaaaaaatcggcgatgaagattaagccgacagtgagcgtaatcttcatctctcttagattatttgtcttccagagtaggggtcatcaggtccttttcaattggataaccaaaataagcttcactagaaggatattgtgaggcgacaacaca

SEQ ID NO: 14629 - DNA, 480 bp, synthetic construct
  source 1..480: mol_type = other DNA
ctaagatggaatacttcatattgggctaactcatatatgctgactcaatagttaacttgacatctctgccttcataatcagatatataagcataataaataaatactcatatttcttgatagtttgtttaaccacagataaatcctcactgtaagccagcttccaagttgacacccttacaaaaaccaggactcagaatccctcaaataagagattccaagacaacatcatagaattgctttattatattaataagcattttatcactagaaatccaatatacgaaatggttaattgtaactaaacccgcaggtcatgtgtgttaggtttcacaaattatatatattactaactccatactcgtaactaacattagataagtaggttaagaaaaaagcttgaggaagattaagaaaaactgcttattgggtctttccgtgttttagatgaagcagttgacattcttcctcttgatattaa

SEQ ID NO: 14630 - DNA, 1000 bp, synthetic construct
  source 1..1000: mol_type = other DNA
ccctcttcgagggacgcgcgcgtggccccgagagaacccccccgggcccgacggcgcgacccgcccggggcgcactggggacagtccgccccgcccccacccgcgcgggcccccgtcgccgggggtgcggggagggggtgggagagcggtcgcgccgtgggaggggtggcccggccccccacgaggaacgccggcgcgcccccgcgggggggaccccctcgcggggggcccccgcgggggtgggcgccgggaggggggagagcgcggcgacgggtctcgctccctcggccccgggattcggcgagtgctgctgccggggggctgtaacactcggggggtggtcccgccgccaccgccgccgccgccccgccccgcgccccccggggggaggacgggggcggggggaagacggggcgggacggggccccccgagccaccttccccgccgggccttcccagccgtcccggagccggtcgcggcgcaccgccgcggtggaaatgcgcccggcggcggccggtcgccggtcgggggacggtcccccgccgaccccacccccggccccgcccgcccacccccgcacccgccggagcccgccccctccggggaggaggaggaggggcggcgggggagggagggcgggtggaggggtcgggaggaacggggggcgggaaagatccgccgggccgccgacacggccggacccgccgccgggttgaatcctccgggcggactgcgcggaccccacccgtttacctcttaacggtttcacgccctcttgaactctctcttcaaagttcttttcaactttcccttacggtacttgttgactatcggtctcgtgccggtatttagccttagatggagtttaccacccgctttgggctgcattcccaagcaacccgactccgggaagacccgggcccggcgcgccgggggccgctaccggcctcacaccgtccacgggctgggcctcgatcagaaggacttgggccccccacg

SEQ ID NO: 14631 - DNA, 346 bp, synthetic construct; identical to SEQ ID NO: 153
  source 1..346: mol_type = other DNA

SEQ ID NO: 14632 - DNA, 440 bp, synthetic construct; identical to SEQ ID NO: 172
  source 1..440: mol_type = other DNA

SEQ ID NO: 14633 - DNA, 296 bp, synthetic construct
  source 1..296: mol_type = other DNA
ttacaatgaacagataccgattgggtgaatgacaaactcagggacacttattcactctgttaaaatattacaagaaagtaatgcactgttcgaagagtcgagtactcaagactttgtgaatctttagccttaacatctgggaggctctcaggaattgaaagcatcaatgttctaactgataagcgtgcaaaacactttgaggaaataatttctagttgtcatcagggtattaataataagcacttccacgaagtcaagagtttaatgaggaggagtatcaaatcttcagaaacaaa

SEQ ID NO: 14634 - DNA, 646 bp, synthetic construct
  source 1..646: mol_type = other DNA
tatgtcaggtcacacccaacaatagtgtggacaaattattgcgtgagtaaaaacgcctaggatcccccgtgcgctcgctccgccgtccccctcttcgagggacgcgcgcgtggccccgagagaacccccccgggcccgacggcgcgacccgcccggggcgcactggggacagtccgccccgcccccacccgcgcgggcccccgtcgccgggggtgcggggagggggtgggagagcggtcgcgccgtgggaggggtggcccggccccccacgaggaacgccggcgcgcccccgcgggggggaccccctcgcggggggcccccgcgggggtgggcgccgggaggggggagagcgcggcgacgggtctcgctccctcggccccgggattcggcgagtgctgctgccggggggctgtaacactcggggggtggtcccgccgccaccgccgccgccgccccgacccgcgccctcccgggggaggacgcgggcggggggaagacggggcgggacggggccccccgagccaccttccccgccgggccttcccagccgtcccggagccggtcgcggcgcaccgccgcggtggaaatgcgcccggcggcggccggtcgccggtcgggggacggtcccccgccgaccccacccccg

SEQ ID NO: 14635 - DNA, 257 bp, synthetic construct
  source 1..257: mol_type = other DNA
ccccgtgacccaccgccttttggcggtgggtcacgggggcgtccatttacaggacgacttttggtgttgatgttctaaacaccatgtccctgggcaatacagccctgagaaccgatgcatttagtcctcctgacacagcagcatcgaacatgatgcaatccattagcgcacagtggatcctaggctattggattgcgctttgcattaatcaccttagtggtttctcacagctttgaacaacatctatcagctcaata

SEQ ID NO: 14636 - DNA, 355 bp, synthetic construct; identical to SEQ ID NO: 1656
  source 1..355: mol_type = other DNA

SEQ ID NO: 14637 - DNA, 632 bp, synthetic construct; identical to SEQ ID NO: 2217
  source 1..632: mol_type = other DNA

SEQ ID NO: 14638 - DNA, 734 bp, synthetic construct; identical to SEQ ID NO: 2352
  source 1..734: mol_type = other DNA

SEQ ID NO: 14639 - DNA, 311 bp, synthetic construct; identical to SEQ ID NO: 1517
  source 1..311: mol_type = other DNA

SEQ ID NO: 14640 - DNA, 345 bp, synthetic construct
  source 1..345: mol_type = other DNA
gcagcacgctgtgcctatattttgataaggagtataataataactgttaagtggtatatatatttatgtttaagcttttcttatttgtaactgtaacatatacaagtatcataactacaatattactaattaagacatcttataatattccagcattagaaggtagaaagggttgtttggtttatcagggtgaggagtattgtcgtagatcaactcctaattgtactgacacatcttgtgttgtcatatatatctattatactatatatttaactgttagattattaaccccaattttcttaactaaattaatagttagtcttatagtatcaattaaccaacaaa

SEQ ID NO: 14641 - DNA, 445 bp, synthetic construct; identical to SEQ ID NO: 1905
  source 1..445: mol_type = other DNA

SEQ ID NO: 14642 - DNA, 859 bp, synthetic construct; identical to SEQ ID NO: 229
  source 1..859: mol_type = other DNA

SEQ ID NO: 14643 - DNA, 390 bp, synthetic construct; identical to SEQ ID NO: 1753
  source 1..390: mol_type = other DNA

SEQ ID NO: 14644 - DNA, 522 bp, synthetic construct; identical to SEQ ID NO: 2074
  source 1..522: mol_type = other DNA

SEQ ID NO: 14645 - DNA, 316 bp, synthetic construct
  source 1..316: mol_type = other DNA
ctcacattgtcgtagggatttatataaaaagtgaaaagtgacattaccagtttaattaagattttcgagtttgaaactaaataaaaagagatttaaactctatatcatatttgaagatttaagactagtgcattataatttaaattccatctgacattaattgcttgcattcaaaatattaattttatgataaaattggaaaaattgtggtatattttatcattaatatatttaagttctaatatagtttatagaatttttataatttttgttatattattaataaagaatttattatataatatttatagacaaa

SEQ ID NO: 14646 - DNA, 547 bp, synthetic construct
  source 1..547: mol_type = other DNA
aaacaaacaataaatttttatcaaagaagaaaatataaaaagagatgattatatcttaaaattaaaacataaacttatgtgattattagtatgtgaaatacctttgatttcattgtgaatagtgagaaaaaactcaagataaagcttaaaagtaaaagaaaatatataacagatttgatcctttaagatgaggcaagcctaaatgacaacaatagaaatagaatgagacaaagctagctagatgtcaaatcttaacctaacttaaaataagtgctgtatgtacaaagcttatgtagtaataaaacttaaagtattgattgattaaactaaggattacatataatataaaacattaaattataaactaaaataaccaataattatagataaacttaacataatgtgtgttttaacaaaataatggcttaagataaattataactaacttaaatttatgaattatgattaaaggaagaatatatgattttaaaattaaataaaactaaaatattaaaattacttataaaaatagcaatacttactatta

SEQ ID NO: 14647 - DNA, 898 bp, synthetic construct; identical to SEQ ID NO: 234
  source 1..898: mol_type = other DNA

SEQ ID NO: 14648 - DNA, 435 bp, synthetic construct; identical to SEQ ID NO: 1876
  source 1..435: mol_type = other DNA

SEQ ID NO: 14649 - DNA, 717 bp, synthetic construct; identical to SEQ ID NO: 2331
  source 1..717: mol_type = other DNA

SEQ ID NO: 14650 - DNA, 549 bp, synthetic construct; identical to SEQ ID NO: 2114
  source 1..549: mol_type = other DNA

SEQ ID NO: 14651 - DNA, 690 bp, synthetic construct; identical to SEQ ID NO: 2297
  source 1..690: mol_type = other DNA

SEQ ID NO: 14652 - DNA, 607 bp, synthetic construct; identical to SEQ ID NO: 2183
  source 1..607: mol_type = other DNA

SEQ ID NO: 14653 - DNA, 378 bp, synthetic construct; identical to SEQ ID NO: 1723
  source 1..378: mol_type = other DNA

SEQ ID NO: 14654 - DNA, 307 bp, synthetic construct; identical to SEQ ID NO: 1503
  source 1..307: mol_type = other DNA

SEQ ID NO: 14655 - DNA, 350 bp, synthetic construct; identical to SEQ ID NO: 1644
  source 1..350: mol_type = other DNA

SEQ ID NO: 14656 - DNA, 271 bp, synthetic construct
  source 1..271: mol_type = other DNA
tctcgtacgccagctttcttagcccgcttttatttaacacgtttaattgttttcaagattatttcccgtagggtagtgaccttggttaattgacagtaagaatattattcttgcaattatatatatatatatatagtttaactttatctttaatttaataggtattttatatcacatagttagtttttagaatttggtagtaaaataatatatatattataataaaataaaatataatagaaataaaaataaatataaataaacattgaca

SEQ ID NO: 14657 - DNA, 448 bp, synthetic construct; identical to SEQ ID NO: 1913
  source 1..448: mol_type = other DNA

SEQ ID NO: 14658 - DNA, 415 bp, synthetic construct; identical to SEQ ID NO: 1813
  source 1..415: mol_type = other DNA

SEQ ID NO: 14659 - DNA, 276 bp, synthetic construct
  source 1..276: mol_type = other DNA
aatttacattctgacacgccaatttagtcgctaccaacatttaggtcgctacacagtttaaccactggttcaacgtttcagaatattgttaaattacaccaattcagaattgaacaacacccaatattgaatggtattataaaacaaacacaatataacataatataataaattataataaacaaaaaacacacacataaaacaaacaaacaaaaaacaaaacactcaaacaacatacttagaagaataacccggctgggtccacttctcaagaca

SEQ ID NO: 14660 - DNA, 323 bp, synthetic construct; identical to SEQ ID NO: 1560
  source 1..323: mol_type = other DNA

SEQ ID NO: 14661 - DNA, 424 bp, synthetic construct
  source 1..424: mol_type = other DNA
tacactccgctaggaatgctcctggagcaccccccctagcagggcgtgggggatttcccctgcccgtctgcagaagggtggagccaaccaccttagtatgtaggcggcgggactcatgacgctcgcgtgatgacaagcgccaagcttgacttggatggccctgatgggcgttcatgggttcggtggtggtggcgctttaggcagcctccacgcccaccacctcccagatagagcggcggcactgtagggaagaccggggaccggtcactaccaaggacgcagacctctttttgagtatcacgcctccggaagtagttgggcaagcccacctatatgtgttgggatggttggggttagccatccataccgtactgcctgatagggtccttgcgaggggatctgggagtctcgtagaccgtagcac

SEQ ID NO: 14662 - DNA, 366 bp, synthetic construct
  source 1..366: mol_type = other DNA
ctgcgttgtcagcgttttgcgcttgcatgcgctacacgcgtcgtccaacgcggagggaacttcacatcaccatgtgtcactccccctatggagggttccaccccgcttacacggaaatgggttaaccatacccaaagtacgggtatgcgggtcctcctagggcccccccggcaggtcgagggagctggaattcgtgaattcgtgagtacacgaaaatcgcggcttgaacgtctttgaccttcggagccgaaatttgggcgtgccccacgaaggaaggcgggggcggtgttgggccgccgccccctttatcccacggtctgataggatgcttgcgagggcacctgccggtctcgtagaccataggac

SEQ ID NO: 14663 - DNA, 916 bp, synthetic construct; identical to SEQ ID NO: 2536
  source 1..916: mol_type = other DNA

SEQ ID NO: 14664 - DNA, 360 bp, synthetic construct; identical to SEQ ID NO: 1674
  source 1..360: mol_type = other DNA

SEQ ID NO: 14665 - DNA, 334 bp, synthetic construct; identical to SEQ ID NO: 1596
  source 1..334: mol_type = other DNA

SEQ ID NO: 14666 - DNA, 311 bp, synthetic construct; identical to SEQ ID NO: 1518
  source 1..311: mol_type = other DNA

SEQ ID NO: 14667 - DNA, 488 bp, synthetic construct; identical to SEQ ID NO: 2000
  source 1..488: mol_type = other DNA

SEQ ID NO: 14668 - DNA, 270 bp, synthetic construct
  source 1..270: mol_type = other DNA
cactcaatactacactccgcatttggggagaagcgctggcgttcgcggaaccgcgttaaccatacgcgtagtacgagtgcgacagaccccggtgctactggtggtagcgagacacgagccgaagtctgtggggggaactccacttagagggcatgcccgggcgtaggcttctgagttgggatgggccccaacttggcccctgagtgggggggtgttacgacctgatagggtgcgggctggcgcctaccactttccagtcgtacatgagtc

SEQ ID NO: 14669 - DNA, 400 bp, synthetic construct; identical to SEQ ID NO: 1779
  source 1..400: mol_type = other DNA

SEQ ID NO: 14670 - DNA, 393 bp, synthetic construct
  source 1..393: mol_type = other DNA
gctggcctctcggccggggtacgccccacgtaggtcacgttgtgaccacagcgcggaagcgcacgtcaccttagcctattggtaaggcgattcactaccctctagcagctagctgcattcggaccagattctgtatccgacactacgtaagactagcgtacctagagctaacgtctaacgtctcaggtaccgggccagtcagccggttagctcacgcgccggctgatcatgcccttaatcctgctctgccagggttagaggtgaaatacattatgcaagtgaagctatgaaaccatccgtcgtcgggtgggtttgggaccccaccttaacggacgatgctacagcctgatagggcgttgccactaccttgcattcttaagtggttgtaacaca

SEQ ID NO: 14671 - DNA, 557 bp, synthetic construct; identical to SEQ ID NO: 2122
  source 1..557: mol_type = other DNA

SEQ ID NO: 14672 - DNA, 280 bp, synthetic construct
  source 1..280: mol_type = other DNA
gggaacaatggtccgtccgcggaacgactctagccatgagtctagtacgagtgcgtgccacccattagcacaaaaaccactgactgagccacacccctcccggaatcctgagtacaggacattcgctcggacgacgcatgagcctccatgccgagaaaattgggtatacccacgggtaaggggtggccacccagcgggaatctgggggctggtcactgactatggtacagcctgatagggtgctgccgcagcgtcagtggtatgcggctgttcatggaac

SEQ ID NO: 14673 - DNA, 384 bp, synthetic construct
  source 1..384: mol_type = other DNA
acctccgtgctaggcacggtgcgttgtcagcgttttgcgcttgcatgcgctacacgcgtcgtccaacgcggagggaacttcacatcaccatgtgtcactccccctatggagggttccaccccgcttacacggaaatgggttaaccatacccaaagtacgggtatgcgggtcctcctagggcccccccggcaggtcgagggagctggaattcgtgaattcgtgagtacacgaaaatcgcggcttgaacgtctttgaccttcggagccgaaatttgggcgtgccccacgaaggaaggcgggggcggtgttgggccgccgccccctttatcccacggtctgataggatgcttgcgagggcacctgccggtctcgtagaccataggac

SEQ ID NO: 14674 - DNA, 503 bp, synthetic construct; identical to SEQ ID NO: 2031
  source 1..503: mol_type = other DNA

SEQ ID NO: 14675 - DNA, 445 bp, synthetic construct; identical to SEQ ID NO: 488
  source 1..445: mol_type = other DNA

SEQ ID NO: 14676 - DNA, 389 bp, synthetic construct; identical to SEQ ID NO: 1750
  source 1..389: mol_type = other DNA

SEQ ID NO: 14677 - DNA, 422 bp, synthetic construct; identical to SEQ ID NO: 1835
  source 1..422: mol_type = other DNA

SEQ ID NO: 14678 - DNA, 386 bp, synthetic construct
  source 1..386: mol_type = other DNA
acctccgtgctttgcacggtgcgttgtcagcgttttgcgcttgcatgcgctccacgcgtcgtccaacgcggagggaatttcacattaccatgtgtcactccccctgtggagggacccacccgtttacacggaaatgagttaaccatactcagagtacgggtactcgggtcctcccagggcccccccggcaggtcgagggagctggaattcgtgaatccgtgagtacacggaaatcgcggcttgaacgtctgttatgaccttcggagccgaaagttgggcgtgccccacgaaggaaggcgggggcggtgttgggccgccgccccctttatcccacggtctgataggatgcttgcgagggcacctgccggtctcgtagaccataggac

SEQ ID NO: 14679 - DNA, 381 bp, synthetic construct
  source 1..381: mol_type = other DNA
acctccgtgctgagcacggcgtcgttagcgttttgcgctacacgcgctacacgcgtcgtccgacgcggagggaatttcacattaccatgtgtcactccccctatggagggttccaccccgcttacacggaaatgggttaaccatacccagagtacgggtatgcgggtcctcctagggcccccccggcaggtcgagggagctggaattcgtgaattcgtgagtacacgaaaatcgcggcttggacgtcattgacctccggagccgaaatttgggcgtgccccacgaaggaaggcgggggcggtgttgggccgccgccccctttatcccacggtctgataggatgcttgcgagggcacctgccggtctcgtagaccataggac

SEQ ID NO: 14680 - DNA, 385 bp, synthetic construct
  source 1..385: mol_type = other DNA
acctccgtgctgcgcacgggggcgttgtcagcgtattgcgcttgcatgcgctccacgcgtcgtccaacgcggagggaacttcacattaccatgtgtcactccccctatggagggatccacccgtctacacggaaatgggttaaccacacccatagtacgggtattcgggtcctcctagggcccccccggcaggtcgagggagctggaattcgtgaatccgtgagtacacggaaatcgcggcttgaacgtcttaggaccttcggagccgaaatttgggcgtgccccacgaaggaaggcgggggcggtgttgggccgccgccccccttgtcccacggtctgataggatgcttgcgagggcacctgccggtctcgtagaccataggac

SEQ ID NO: 14681 - DNA, 376 bp, synthetic construct
  source 1..376: mol_type = other DNA
acctccgtgcttaccacggaaacgggttaaccattttgcgctacacgcgtcgtccaacgcggagggaatttcaccttaccatgatgtcactccccctatggagggatccacccgtctacacggaaatgggttaaccacacccatagtacgggtattcgggtcctcctagggcccccccggcaggtcgagggagctggaattcgtgaatccgtgagtacacggaaatcgcggcttgaacgtcttaggaccttcggagccgaaatttgggcgtgccccacgaaggaaggcgggggcggtgttgggccgccgccccccttgtcccacggtctgataggatgcttgcgagggcacctgccggtctcgtagaccataggac

SEQ ID NO: 14682 - DNA, 334 bp, synthetic construct
  source 1..334: mol_type = other DNA
tccacgcgtcgtccaacgcggagggaacttcacattaccatgtgtcactccccctgtggagggacccacccgtttacacggaaatgggttaaccatacccagagtacgggtactcgggtcctcccagggcccccccggcaggtcgagggagctggaattcgtgaatccgtgagtacacggaaatcgcggcttgaacgtcttttgaccttcggagccgaaatttgggcgtgccccacgaaggaaggcgggggcggtgttgggccgccgccccctttatcccacggtctgataggatgcttgcgagggcacctgccggtctcgtagaccataggac

SEQ ID NO: 14683 - DNA, 367 bp, synthetic construct
  source 1..367: mol_type = other DNA
gtgcgttgtcaggttttgcgcttgcatgcgctccacgcgtcgtccaacgcggaggaggaactccacatcaccatgtgtcactccccctatggaggaacccacccgtctacacggaaatgggttaaccatacccagagtacgggtattcgggtcctcctagggcccccccggcaggtcgagggagctggaattcgtgaatccgtgagtacacggaaatcgcggcttgaacgtctttggaccttcggagccgaaatttgggcgtgccccacgaaggaaggcgggggcggtgttgggccgccgccccccttgtcccacggtctgataggatgcttgcgagggcacctgccggtctcgtagaccataggac

SEQ ID NO: 14684 - DNA, 354 bp, synthetic construct
  source 1..354: mol_type = other DNA
gtattgcgcttgcatgcgctccacgcgtcgtccaacgcggagggaatttcacattaccatgtgtcactccccctgtggagggacccacccgtttacacggaaatgggttaaccatacccagagtacgggtattcgggtcctcccagggcccccccggcaggtcgagggagctggaattcgtgaatccgtgagtacacggaaatcgcggcttgaacgtctatgtgaccttcggagccgaaatttgggcgcgccccacgaaggaaggcgggggcggtgttgggccgccgccccctttatcccacggtctgataggatgcttgcgagggcacctgccggtctcgtagaccataggac

SEQ ID NO: 14685 - DNA, 533 bp, synthetic construct
  source 1..533: mol_type = other DNA
ccggcgcgcaccgcccccccgagggggggcgctgcgtccccgtaagccggggaacacgaagcctaagggcatcctcattttagaatgagcttatggcttcacttaatcggccggaaagtcctgggttcccatgacagggttccgcaggtgggtaaatcccggtggggttccactcaggatatacggtgggttggtgacgtccggcggctcggacgacgtgaggctagcctatggtggactgatcacaggatgggcactccggtgtgaataggccccgtcagggtgcgctgacgtaaaactcaggccttgcgcggttgccgggaaggagtaagggtcacgccgcctctaagggccgtatggcacaatacttctccgggcgggttgtcaagaccctccaacgcggcaccgttgccacggcaggcatggggccacccagctcggcgccccgcacacaggcggcgtaggggaaaatcggaaacgtgaccccgggtggcattctttctttctattcaagcatgatcaataccgcaatc

SEQ ID NO: 14686 - DNA, 374 bp, synthetic construct
  source 1..374: mol_type = other DNA
ggcacggtgcgttgtcagcgtattgcgcttgcatgcgctccacgcgtcgtccaacgcggagggaacttcacattaccatgtgtcactccccctgtggagggaccaaacccgtttacacggaaatgggttaaccatactcagagtacgggtactcgggtcctcccagggcccccccggtaggtcgagggagctggaattcgtgaatccgtgagtacacggaaatcgcggcttgaacgtctttatgaccttcggagccgaaatttgggcgtgccccacgaaggaaggcgggggcggtgttgggccgccgccccctttatcccacggtctgataggatgcttgcgagggcacctaccggtctcgtagaccataggac

SEQ ID NO: 14687 - DNA, 324 bp, synthetic construct
  source 1..324: mol_type = other DNA
ccaacgcggagggaacttcacattaccatgtgtcactccccctatggagggttccaccccgcttacacggaaatgggttaaccatactcaaagtacgggtatgcgggtcctcctagggcccccccggcaggtcgagggagctggaattcgtgaattcgtgagtacacgaaaatcgcggcttgaacgtcttttgaccttcggagccgaaatttgggcgtgccccacgaaggaaggcgggggcggtgttgggccgccgcccccttttatcccacggtctgataggatgcttgcgagggcacctgccggtctcgtagaccataggac

SEQ ID NO: 14688 - DNA, 325 bp, synthetic construct
  source 1..325: mol_type = other DNA
ccaacgcggagggaacttcacattaccatgtgtcactccccctgtggaggaacccacccgtttacacggaaatgggttaaccatacccaaagtacgggtactcgggtcctcccagggcccccccggcaggtcgagggagctggaattcgtgaatccgtgagtacacggaaatcgcggcttgaacgtcttgtaatgaccttcggagccgaaatttgggcgtgccccacgaaggaaggcgggggcggtgttgggccgccgccccctttatcccacggtctgataggatgcttgcgagggcacctgccggtctcgtagaccataggac

SEQ ID NO: 14689 - DNA, 329 bp, synthetic construct
  source 1..329: mol_type = other DNA
cgtcgtccaacgcggagggaatttcacattaccatgtgtcactccccctgtggagggacccacccgtttacacggaaatgggttaaccatacccagagtacgggtattcgggtcctcccagggcccccccggcaggtcgagggagctggaattcgtgaatccgtgagtacacggaaatcgcggcttgaacgtctatgtgaccttcggagccgaaatttgggcgcgccccacgaaggaaggcgggggcggtgttgggccgccgccccctttatcccacggtctgataggatgcttgcgagggcacctgccggtctcgtagaccataggac

SEQ ID NO: 14690 - DNA, 330 bp, synthetic construct
  source 1..330: mol_type = other DNA
gcgtcgtccaacgcggagggaacttcacattaccatgtgtcactccccctgtggaggaacccacccgtttacacggaaatgggttaaccatacccagagtacgggtactcgggtcctcccagggcccccccggcaggtcgagggagctggaattcgtgaatccgtgagtacacggaaatcgcggcttgaacgtctgtacgaccttcggagccgaaatttgggcgcgccccacgaaggaaggcgggggcggtgttgggccgccgccccctttatcccacggtctgataggatgcttgcgagggcacctgccggtctcgtagaccataggac

SEQ ID NO: 14691 - DNA, 329 bp, synthetic construct
  source 1..329: mol_type = other DNA
cgtcgtccaacgcggagggaacttcacattaccatgtgtcactccccctgtggaggaacccacccgtttacacggaaatgggttaaccatacccagagtacgggtactcgggtcctcccagggcccccccggcaggtcgagggagctggaattcgtgaatccgtgagtacacggaaatcgcggcttgaacgtctgtacgaccttcggagccgaaatttgggcgcgccccacgaaggaaggcgggggcggtgttgggccgccgccccctttatcccacggtctgataggatgcttgcgagggcacctgccggtctcgtagaccataggac

SEQ ID NO: 14692 - DNA, 328 bp, synthetic construct
  source 1..328: mol_type = other DNA
gtcgtccaacgcggagggaacttcacattaccatgtgtcactccccctgtggaggaacccacccgtttacacggaaatgggttaaccatacccagagtacgggtactcgggtcctcccagggcccccccggcaggtcgagggagctggaattcgtgaatccgtgagtacacggaaatcgcggcttgaacgtctgtacgaccttcggagccgaaatttgggcgcgccccacgaaggaaggcgggggcggtgttgggccgccgccccctttatcccacggtctgataggatgcttgcgagggcacctgccggtctcgtagaccataggac

SEQ ID NO: 14693 - DNA, 319 bp, synthetic construct
  source 1..319: mol_type = other DNA
cgcggagggaatttcacattaccatgtgtcactccccctgtggaggaacccacccgtttacacggaaatgggttaaccataccctgagtacgggtactcgggtcctcccagggcccccccggcaggtcgagggagctggaattcgtgaatccgtgagtacacggaaatcgcggcttgaacgtctttatgaccttcggagccgaaatttgggcgtgccccacgaaggaaggcgggggcggtgttgggccgccgccccctttatcccacggtctgataggatgcttgcgagggcacctgccggtctcgtagaccataggac

SEQ ID NO: 14694 - DNA, 300 bp, synthetic construct
  source 1..300: mol_type = other DNA
taccatgtgtcactccccctgtggagggacccacccgtctacacggaaatgggttaaccatacccagagtacgggtattcgggtcctcccagggcccccccggcaggtcgagggagctggaattcgtgaatccgtgagtacacggaaatcgcggcttgaacgtctttgtgaccttcggagccgaaatttgggcgtgccccacgaaggaaggcgggggcggtgttgggccgctgccccctttatcccacggtctgataggatgcttgcgagggcacctgccggtctcgtagaccataggac

SEQ ID NO: 14695 - DNA, 301 bp, synthetic construct
  source 1..301: mol_type = other DNA
accatgtgtcaccccccctgtagaggaacccacccgtttacacggaaatgggttaaccatacccaaagtacgggtactcgggtcctcccagggcccccccggcaggtcgagggagctggaattcgtgaatccgtgagtacacggaaatcgcggcttgaacgtcttttaatgaccttcggagccgaaatttgggcgtgccccacgaaggaaggcgggggcggtgttgggccgccgccccctttatcccacggtctgataggatgcttgcgagggcacctgccggtctcgtagaccataggac

SEQ ID NO: 14696 - DNA, 299 bp, synthetic construct
  source 1..299: mol_type = other DNA
accatgtgtcactccccctgtggagggacccacccgtttacacggaaatgggttaaccatacccagagtacgggtactcgggtcctcccagggcccccccggcaggtcgagggagctggaattcgtgaatccgtgagtacacggaaatcgcggcttgaacgtctttgtgaccttcggagccgaaatttgggcgtgccccacgaaggaaggcgggggcggtgttgggccgccgccccctttatcccacggtctgataggatgcttgcgagggcacctgccggtctcgtagaccataggac

SEQ ID NO: 14697 - DNA, 298 bp, synthetic construct
  source 1..298: mol_type = other DNA
ccatgtgtcactccccctgtggagggacccacccgtttacacggaaatgggttaaccatacccagagtacgggtactcgggtcctcccagggcccccccggcaggtcgagggagctggaattcgtgaatccgtgagtacacggaaatcgcggcttgaacgtctttgtgaccttcggagccgaaatttgggcgtgccccacgaaggaaggcgggggcggtgttgggccgccgccccctttatcccacggtctgataggatgcttgcgagggcacctgccggtctcgtagaccataggac

SEQ ID NO: 14698 - DNA, 445 bp, synthetic construct
  source 1..445: mol_type = other DNA
accacaaacactccagtttgttacactccgctaggaatgctcctggagcaccccccctagcagggcgtgggggatttcccctgcccgtctgcagaagggtggagccagccaccttagtatgtaggcggcgggactcatgacgctcacgtgatgacaagcgccaagcttgacttggatggccctgatgggcgttcatgggttcggtggtggtggcgcattaggcagcctccacgcccaccacctcccagatagagcggcggcactgtagggaagaccggggaccggtcactaccaaggacgcagacctctttttgagtatcacgcctccggaagtagttgggcaagcccacctatatgtgttgggatggttggggttagccatccataccgtactgcctgatagggtccttgcgaggggatctgggagtctcgtagaccgtagcac

SEQ ID NO: 14699 - DNA, 399 bp, synthetic construct
  source 1..399: mol_type = other DNA
cactccccgaggggaatgcgccagccctggccgtgtcggacagggtagcgagagggtcactccattttctttacctctcgccactgggctggtcaatggcacagacgtgggacgctttagcctccgtggtctggttggtcgtagtctggccggtctagtgggcccccttggactgataacctggaagagggctaacgtgaactacccggacggaactccggggcttgggattgagcgcaccagtagacgcttcggcctctgatgctgggttggtagccgcctttatggtacccaagctgggcatgcccataggaatcggggaaggcgttgggttgcctcctgcctactgcctgatagggtcgtgccgtgcgtccaggttcttacggctgtataacactt

SEQ ID NO: 14700 - DNA, 294 bp, synthetic construct
  source 1..294: mol_type = other DNA
accatcgacactccaggctcatggatcaagttaggttccgccgaagcgggctaaccaggcccctagtaggaggcgcctatcccatgagccctttccccacagattgagtggagctggagctgggaaggaccgagtacggtccaatcgagaagaaccctgatgaacattccaggcctcttcggtagatttgggtatacccaccagtgaaggcggggtcgtgggcacaggccccctagtccacacagcctgatagggtcctgccgcaggatctgtgggtgcggctgtacatgtaat

SEQ ID NO: 14701 - DNA, 386 bp, synthetic construct
  source 1..386: mol_type = other DNA
aatgcgccagccctggccttgtcggacagggtagcgagagggtcactccatttttctttacctctcgccactgggctggtcaatggcacagacgtgggacgcttatgcctccgtggtctggttggctgtagtctggtcggtccagtgggcccccttggattgataacctggaagagggctaacgtgaactacccggacggaactccggggcttaggattgagcgcaccagtagacgcttcggcctctgatgctgggttggtagccgcctttatggtacctaagctgggcatgcccatagggatcggggaaggtgttgggtcgcctcctgcctactgcctgatagggtcgtgctgcgcgtccaggtccttgcagctgtataacactt

SEQ ID NO: 14702 - DNA, 401 bp, synthetic construct; identical to SEQ ID NO: 1783
  source 1..401: mol_type = other DNA

SEQ ID NO: 14703 - DNA, 400 bp, synthetic construct
  source 1..400: mol_type = other DNA
cactccccaaggggaatgtgccagccctggccttgttggacagggtagcgagagggtcactccatttttctatacctctcgccactgggctggtcaatggcacagacgtgggacgcttatgcctccgtggtctggttggctgtagtctggtcggtccagtgggcccccttggattgataacctggaagagggctaacgtgaactacccggacggaactccggggcttaggattgagcgcaccagtagacgcttcggcctctgatgctgggttggtagccgcctttatggtacctaagctgggcatgcccataggaatcggggaaggtgttgggtcgcctcctgcctactgcctgatagggtcgtgctgcgcgtccaggtccttgcagctgtataacactt

SEQ ID NO: 14704 - DNA, 379 bp, synthetic construct; identical to SEQ ID NO: 1729
  source 1..379: mol_type = other DNA

SEQ ID NO: 14705 - DNA, 294 bp, synthetic construct
  source 1..294: mol_type = other DNA
accatcaacactccaggctcatggattaagttaggttccgccgaagcgggctaaccaggcccctagtaggaggcgcctatcccatgagccctttccccacagattgagtggagctggagctgggaaggaccgagtacggtccaatcgagaagaaccctgatgaacattccaggcctcttcggtagatttgggtatacccaccagtgaaggcggggtcgtgggtacaggccccctagtccacacagcctgatagggtcctgccgcaggatctgtgggtgcggctgtacatgtaac

SEQ ID NO: 14706 - DNA, 388 bp, synthetic construct; identical to SEQ ID NO: 1748
  source 1..388: mol_type = other DNA

SEQ ID NO: 14707 - DNA, 294 bp, synthetic construct
  source 1..294: mol_type = other DNA
accatcaacactccaggctcatggattaagttaggttccgccgaagcgggctaaccaggcccctagtaggaggcgcctatcccatgagccctttccccacagattgagtggagctggagctgggaaggaccgagtacggtccaatcgagaagaaccctgatgaacattccaggcctcttcggtagatttgggtatacccaccagtgaaggcggggtcgtgggcacaggccccctagtccacacagcctgatagggtcctgccgcaggatctgtgggtgcggctgtacatgtaac

SEQ ID NO: 14708 - DNA, 402 bp, synthetic construct; identical to SEQ ID NO: 1786
  source 1..402: mol_type = other DNA

SEQ ID NO: 14709 - DNA, 293 bp, synthetic construct
  source 1..293: mol_type = other DNA
ccatcgacactccaggctcacggattaagttaggttccgccgaagcgggctaaccaggcccctagtaggaggcgcctatcccgtgagccctttccccacggattgagtggagctggagctgggaaggaccgagtacggtccaatcgagaagaaccctgatgaacattccaggcctcttcggtagatttggatatatccaccagtgaaggcggggtcgtgggtacaggccccctagtccacacagcctgatagggtcctgccgcaggatccgtgggtgcggctgtacatgtacc

SEQ ID NO: 14710 - DNA, 292 bp, synthetic construct
  source 1..292: mol_type = other DNA
ccatcgacactccagtgatgggataccgccaggttccgccgaagcgggctagccacgcccctagtaggaggcgcctggtcccatcacacaaaccccacggattgagtggagctggagctaggaagtcccgagtacgggacaatcgagaggaactccgatgcacattccggacctcctcggtagatttgggtatacccactagtgaaggcggggtcgtgggttcagaccccctcgtccacacagcctgatagggtcctgccgcaggatccgtgggtgcggctgtacatggaac

SEQ ID NO: 14711 - DNA, 294 bp, synthetic construct
  source 1..294: mol_type = other DNA
accatcaacactccaggctcatggattaagttaggttccgccgaagcgggctaaccaggcccctagtaggaggcgcctatcccatgagccctttccccacagattgagtggagctggagctgggaaggaccgagtacggtccaatcgagaagaaccctgatgaacattccaggcctcttcggtagatttgggtatacccaccagtgaaggcggggtcgtgggcacaggccccctagtccacacagcctgatagggtcctgccgcgggatctgtgggtgcggctgtacatgtaac

SEQ ID NO: 14712 - DNA, 293 bp, synthetic construct
  source 1..293: mol_type = other DNA
ccatcgacactccaggctcacggattcagttaggttccgccgaagcgggctaaccaggcccctagtaggaggcgcctatcccgtaagccctttccccacagattgagtggagctggagctgggaaggaccgagtacggtccaatcgagaagaaccctgatgaacattccaggcctcttcggtagatttggatgtatccaccagtgaaggcggggtcgtgggtacaggccccctagtccacacagcctgatagggtcctgccgcaggatctgtgggtgcggctgtacatgtacc

SEQ ID NO: 14713 - DNA, 332 bp, synthetic construct
  source 1..332: mol_type = other DNA
agggtctgcgcctgtacactcccccacgggattaacaccagctccgagaaagtctgacgagtatcggtgttataaaggtggtgtgccctaccaacgtcataatgggtcgtgccaatgttcgaaggcaaggactaccactgggtgcccgtgggaaaaagggggcggatagggagctggggtgaaccgaacgaccgtagacggtcgaggtcacaggcatgggacgcttcggcctccgtagcctggttgggccttggattcccggtgtagctaccagcttactgcctgatagggtgtgggccagcacatccgcccttctggttgttgataacgcc

SEQ ID NO: 14714 - DNA, 300 bp, synthetic construct
  source 1..300: mol_type = other DNA
taacaccagctccgagaaagtctgacgagtatcggtgttataaaggtggtgtgccctaccaacgtcataatgggtcgtgccaatgttcgaaggcaaggactaccactgggtgcccgtgggaaaaaaggggcggatagggagctggggtgaaccgaacgaccgtagacggtcgaggtcacaggcatgggacgcttcggcctccgtagcctggttgggccttggattcccggtgtagctaccagcttactgcctgatagggtgtgggccagcacatccgcccttctggttgttcataacgcc

SEQ ID NO: 14715 - DNA, 329 bp, synthetic construct
  source 1..329: mol_type = other DNA
tctgcgcctgtacactcccccacgggaataacaccagctccgagaaagtctgacgagtatcggtgttaaaaaggtggtgtgccctaccaacgtcataacgggtcgtgccgatgttccgaggcaaggactaccactgggtgcccgtgggaaaaaaggggcggatagggagctggggtgaaccgaacggccgtagacggccgaggccacaggcatgggacgcttatagcctccgtagcctggttgggccttggactcccggtgtagctaccagcttactgcctgatagggtgcgggccagcgcatccgcccttctggttgttcatgacgcc

SEQ ID NO: 14716 - DNA, 283 bp, synthetic construct
  source 1..283: mol_type = other DNA
aagtctgacgagtatcggtgttataaaggtggtgtgccctaccaacgtcataatgggtcgtgccaatgttcgaaggcaaggactaccactgggtgcccgtgggaaaaaaggggcggatagggagctggggtgaaccgaacgaccgtagacggtcgaggtcacaggcatgggacgcttcggcctccgtagcctggttgggccttggattcccggtgtagctaccagcttactgcctgatagggtgtgggccagcacatccgcccttctggttgttcataacgcc

SEQ ID NO: 14717 - DNA, 333 bp, synthetic construct; identical to SEQ ID NO: 1592
  source 1..333: mol_type = other DNA

SEQ ID NO: 14718 - DNA, 358 bp, synthetic construct
  source 1..358: mol_type = other DNA
ggcacgtatctgctccgtttacattatttgagcagggctggggaactgaatggcaccggtgtggcaccgctgttgcgctgcgtgaccgggttggctggagtctcagtctctccatgcgggcctggacggaccacaggggaggggagagagcaactgaaggtgtatccatgagtacatggagcgctgcagtgagcgcacatctaccacgcttcggcctggctaagatggttggtagccgcctatatggtactgcagtagggtatacccgcactggaggggggatagcgttgggtcgctccctgcttactgcctgatagggtcctgccaggggcccctcccttctggctgtaaaccactt

SEQ ID NO: 14719 - DNA, 341 bp, synthetic construct
  source 1..341: mol_type = other DNA
acctgctctctatgagagcaacactccaccatgaaccgctcccctgtgaggaactactgtcttcacgcagaaagcgtctagccatggcgttagtatgagtgttgtacagcctccaggatcccccctcccgggagagccatagtggtctgcggaaccggtgagtacaccggaatcgccgggatgaccgggtcctttcttggattaaacccgctcaatgcccggaaatttgggcgtgcccccgcgagactgctagccgagtagtgttgggtcgcgaaaggccttgtggtactgcctgatagggtgcttgcgagtgccccgggaggtctcgtagaccgtgcacc

SEQ ID NO: 14720 - DNA, 340 bp, synthetic construct
  source 1..340: mol_type = other DNA
acctgcccctaataggggcgacactccgccatgaatcactcccctgtgaggaactactgtcttcacgcagaaagcgcctagccatggcgttagtatgagtgtcgtacagcctccaggcccccccctcccgggagagccatagtggtctgcggaaccggtgagtacaccggaattgccgggaagactgggtcctttcttggataaacccactctatgcccggccatttgggcgtgcccccgcaagactgctagccgagtagcgttgggttgcgaaaggccttgtggtactgcctgatagggcgcttgcgagtgccccgggaggtctcgtagaccgtgcacc

SEQ ID NO: 14721 - DNA, 268 bp, synthetic construct
  source 1..268: mol_type = other DNA
agcgtctagccatggcgttagtatgagtgtcgtacagcctccaggaccccccctcccgggagagccatagtggtctgcggaaccggtgagtacaccggaattgccaggacgaccgggtcctttcttggataaacccgctcaatgcctggagatttgggcgtgcccccgcaagaccgctagccgagtagtgttgggtcgcgaaaggccttgtggtactgcctgatagggtgcttgcgagtgccccgggaggtctcgtagaccgtgcacc

SEQ ID NO: 14722 - DNA, 322 bp, synthetic construct
  source 1..322: mol_type = other DNA
cgacactccaccatggatcactcccctgtgaggaacttctgtcttcacgcggaaagcgcctagccatggcgttagtacgagtgtcgtgcagcctccaggaccccccctcccgggagagccatagtggtctgcggaaccggtgagtacaccggaatcgctggggtgaccgggtcctttcttggaacaacccgctcaatacccagaaatttgggcgtgcccccgcaagatcactagccgagtagtgttgggtcgcgaaaggccttgtggtactgcctgatagggtgcttgcgagtgccccgggaggtctcgtagaccgtgcaac

SEQ ID NO: 14723 - DNA, 314 bp, synthetic construct
  source 1..314: mol_type = other DNA
caccatgaatcactcccctgtgaggaacttctgtcttcacgcggaaagcgtctagccatggcgttagtacgagtgtcgtgcagcctccaggcccccccctcccgggagagccatagtggtctgcggaaccggtgagtacaccggaatcgccgggacgaccgggtcctttcttggaacaacccgctcaatgcccggaaatttgggcgtgcccccgcgagatcactagccgagtagtgttgggtcgcgaaaggccttgtggtactgcctgatagggtgcttgcgagtgccccgggaggtctcgtagaccgtgcatc

SEQ ID NO: 14724 - DNA, 289 bp, synthetic construct
  source 1..289: mol_type = other DNA
aactactgtcttcacgcagaaagcgtctagccatggcgttagtatgagtgtcgtgcagcctccaggaccccccctcccgggagagccatagtggtctgcggaaccggtgagtacaccggaattgccaggacgaccgggtcctttcttggatcaacccgctcaatgcctggagatttgggcgtgcccccgcgagactgctagccgagtagtgttgggtcgcgaaaggccttgtggtactgcctgatagggtgcttgcgagtgccccgggaggtctcgtagaccgtgcacc

SEQ ID NO: 14725 - DNA, 472 bp, synthetic construct; identical to SEQ ID NO: 1968
  source 1..472: mol_type = other DNA

SEQ ID NO: 14726 - DNA, 296 bp, synthetic construct
  source 1..296: mol_type = other DNA
ccctgcttgctccccgatgagcaggggccgttgcagtatcgcagcggcgcggcacttgccctccgtttaatgggtaagatcaaccgggcgtcgtcgtgttcacacgacgccccagacacaggcattgcctgaggacaacgcggcgtacctgtacgagtatccactacaaggtcagcgactattgtgtctgccgacacacgcacgcgctctggagagcgctgacaacacggggcaggttctacaagcactgtctgtcgggccgttcatcaaagtagactcagtttgtgtttgctgcg

SEQ ID NO: 14727 - DNA, 1000 bp, synthetic construct; identical to SEQ ID NO: 2608
  source 1..1000: mol_type = other DNA

SEQ ID NO: 14728 - DNA, 977 bp, synthetic construct
  source 1..977: mol_type = other DNA
ttccaacggtgaggtacgagggcttgcgagagatttggtatgtttagctgtggtggagcgtttgaatgccttagcctcggttgacccccgccagcataactggacacccagggagctggtagagaaaggtctttgtgaccctgtgcgtttgttcgttaagaacgagccacacccacggaggaaattgcttgaacgccgattcaggctgatttcctccgtttctctagttgaccagctggtggagcggatgcttttcgggcctcagaacaacactgagatttcaacttggtggcagtggccttcgaagccgggcatgggtcttttgacccctgaacaaatccgtttggtgtgggacgatgtgttccagaagcaccaggcccaccctgcggctgaggcagacatatcggggtttgactggtccgttcaggactgggagttgtggtcagacctcgcgatccgaattaacagggggaattttcagggaaacctcaggagggcggctatcagccgctactactgctttatgaactctgttttccagctctcagatggaacccttatccagcaggagttgcccggattgatgaaatccggctcctactgcacctcatccactaactcgcgcatacgctgcttaatggctgagctcatcggctcgccgtggtgcatagctatgggcgatgactctgtggaggggtggattgagggggcccaatccaagtacgccgcgctaggtcacacctgcaaggagtactacccatgtaagaccaggggccgggaactcctggaattcaacttctgttcacatctgatcaggaggggtcatgctgagctcacttcttggccgaaagcgttgtttcgctttctgtcgagcaagcatgaggattttgaagatctgtgggttgagctccacacgtgcggggtgtggagccggatcgaacgatatctgcgtgggataggccgagtctcccacaaag

SEQ ID NO: 14729 - DNA, 1000 bp, synthetic construct
  source 1..1000: mol_type = other DNA
gtgccgctcgcgggccttgccaactccaacggtgaggtccgagggctagcgagagatttggtatgtttagctgtggtagagcgtttaaatgccttagcctcggttgacccccgccagcataactggacacccagggagctggtagagaaaggtctttgtgacccggtgcgcttgttcgtgaagaatgagccgcacccacggaagaaattgcttgaacgtcgattcaggctgatctcttccgtttctctagttgaccagctggtggagcggatgcttttcgggcctcagaacaacaccgagatttccacttggtggcagtggccttcgaagccgggcatgggtcttttgacccctgaacaaatccgtttggtgtgggacgatgtgttccagaagcaccaggcccaccctgcggctgaggcagacatatcggggtttgactggtccgttcaggactgggagttgtggtcagacctcgcgattcgtataaacagagggaattttacgggaaacgttaggaaagcggccataagtcgctattactgttttatgaactctgttttccaactctcagatggaacccttatccagcaggagttgcccgggctgatgaagtctggctcctattgcacgtggtccaccaactcacgcatacgatgcctaatgggtgagctcatcggctcgccatggtgcatagcgatgggtgatgattcagaggaggggtggatcgagggggcccagtccaagtacgccgcgataggtcatacctgcaaggagtactacccatgtaagaccagagggcgcgagctcctggaattcaacttctgttcacatttgatcaggaggggtcatgctgagctcacttcatggccgaaggcgttgtttcgctttctgtcgagcaagcatgaggactttgaagatctgtgggttgagcttcacacgtgcggggtgtggagccgaatcgaacgatatctgcgtgggatagggcgtgtctcccacaaag

SEQ ID NO: 14730 - DNA, 930 bp, synthetic construct; identical to SEQ ID NO: 238
  source 1..930: mol_type = other DNA

SEQ ID NO: 14731 - DNA, 972 bp, synthetic construct; identical to SEQ ID NO: 2560
  source 1..972: mol_type = other DNA

SEQ ID NO: 14732 - DNA, 854 bp, synthetic construct
  source 1..854: mol_type = other DNA
tcctgtgagattgtttgtaaagaatgagccccaccctgccaacaaggtgcgggaagggcgctttagactaatctcatcggtatcgctggttgaccaactagttgaaaggctgctattcgggccccaaaacaaggcagagattgccttgtggcagtcggtgccttcaaaacctggtatgggattgtcacagaagtggcagttcgaggcgctgtggaaggatttgcaaatcaaacacgccagtgcccccgccgctgaggcggatatatcgggttttgattggtctgtgcagaaatgggagttagaagctgatgtgtgcatgagaatagaaaggggaaacttccctgcaagaatgaggaaagccgccttgaaccgcttcaagtgtttcgccaacgctgtgttccagctaagcaacggcgagttaatagagcaaggcttaccgggtctaatgaagtctggtagttactgtacctcgagtactaacagccggataagatgcctcatggctgaaataatacaagccccgtggtgcatcgccatgggagacgactcggtagaaggatatgttgagggggcccgagagctctacgaagaactgggtcacacatgtaaagactacatcccgtgtgctgctgagggagagatcctcaaggaagtgaacttttgctcacacagcatagctgcggatcgttgctatctccaatcctgggctaaaaccttatttagatatctggaacaccctgacgactttgaggagttggcagtggaattgcagggttgtcagtggccgcggatatacaagtacttacgtcggattggaagagtctccgacaaaattcccgaaccaagagaagaaa

SEQ ID NO: 14733 - DNA, 629 bp, synthetic construct; identical to SEQ ID NO: 2213
  source 1..629: mol_type = other DNA

SEQ ID NO: 14734 - DNA, 881 bp, synthetic construct; identical to SEQ ID NO: 2516
  source 1..881: mol_type = other DNA

SEQ ID NO: 14735 - DNA, 1000 bp, synthetic construct; identical to SEQ ID NO: 2609
  source 1..1000: mol_type = other DNA

SEQ ID NO: 14736 - DNA, 833 bp, synthetic construct; identical to SEQ ID NO: 2467
  source 1..833: mol_type = other DNA

SEQ ID NO: 14737 - DNA, 501 bp, synthetic construct; identical to SEQ ID NO: 2027
  source 1..501: mol_type = other DNA

SEQ ID NO: 14738 - DNA, 667 bp, synthetic construct; identical to SEQ ID NO: 2268
  source 1..667: mol_type = other DNA

SEQ ID NO: 14739 - DNA, 265 bp, synthetic construct
  source 1..265: mol_type = other DNA
gactaacatgctagtgtcgtctgttgggtccaggagtctttcaaaatagccactagtgcgatttctaattatctcccttgtgctgatcgtcatatcatgtgcgctcaccaatctactcaccaaccaactattcgctttctcgtaatcaatatctctcatgactaaataaatagccactacagtcattataccactataaaaaacgtgtaatttgtttatatcattatcacattttttgtaaatcacaattacatcaattgacaac

SEQ ID NO: 14740 - DNA, 343 bp, synthetic construct; identical to SEQ ID NO: 1629
  source 1..343: mol_type = other DNA

SEQ ID NO: 14741 - DNA, 308 bp, synthetic construct; identical to SEQ ID NO: 148
  source 1..308: mol_type = other DNA

SEQ ID NO: 14742 - DNA, 984 bp, synthetic construct; identical to SEQ ID NO: 2566
  source 1..984: mol_type = other DNA

SEQ ID NO: 14743 - DNA, 1000 bp, synthetic construct; identical to SEQ ID NO: 261
  source 1..1000: mol_type = other DNA

SEQ ID NO: 14744 - DNA, 853 bp, synthetic construct; identical to SEQ ID NO: 2484
  source 1..853: mol_type = other DNA

SEQ ID NO: 14745 - DNA, 875 bp, synthetic construct
  source 1..875: mol_type = other DNA
atacaaccctgacgtatctttagttgattttgaagccttgaaataaagcttttaaaaaccccttttggtttgcccaccatacgggcagttttcagaccgcagagtcttgtcaaggaggttcagccttgaccttacttctctgtgaggaatctactcagaaaaactgcttgcgcactagtagttacaagggttgtcacttagtacttacaagcgggttaaaccgccctccggaacggttacaaccccctcccgaacgtgcgcttgacgtgactggttctcagtctggctttctgagaaatactccagggttgtatcccaccatcttgacctctggtcattttggtaacaccataaccaaacaaactctacacacctaacccacctccagcttgctgcaggccttttggactaaacgggtttaggtgttttgtgaccaactcgtctacccacctccagttttactgcaggcctttttggactaaacgggtttagacttttgtggttagtttttaactacccactgtttagccgccaacctgattttcattgttgtaaaattttgtgtttatacactattttcatacggttggcagtttgtttggttgtttgcacagtttttgttgataccaatttttactgtgcttttagtgtattctgctaaggctgtattttacatacttagtttggttgaagcaatttttacaacatttatattgtttttgatttctaaggtaaagagtcttaggaaacaccatagacgccattcttgtggtgtctagttccaactaatctggcaaacaagtaccaagtcattgactcactttggagtgagacttacgagtaccaatttgcctatttcggacatccatataaag

SEQ ID NO: 14746 - DNA, 419 bp, synthetic construct; identical to SEQ ID NO: 1828
  source 1..419: mol_type = other DNA

SEQ ID NO: 14747 - DNA, 788 bp, synthetic construct; identical to SEQ ID NO: 2420
  source 1..788: mol_type = other DNA

SEQ ID NO: 14748 - DNA, 711 bp, synthetic construct
  source 1..711: mol_type = other DNA
gacattgttcagaccgcagtgtctcgtcaaggaggtccagccttgactttactaccctgtgaggaatctactcagaaatactgcttgcgtactagtagttacaagagttgacacctagtacttacaagcgggtcaaaccgccctccggaacggtggaaactccctcccgaacgtgcgcttgacgtgaccaactttggtctagctttctgagaaacactccagggctgtatctaaccacttttgttcaattgtggttattttcaaccaaacatcgtgtgactcacctccagctttgctgcaggccttcgggactaaacgagttcatacgctttgtggttagttttaggacttatcatttttttcatcgccaacctgattctttttattcttaaattttgcgtctatacgctattttcttatggttggcagtttgtttggttgtttgcacagtttcttttaataccaatttttactgtgcttttagtttttacagctaaggctgttttttacttacttaagttgctcgaagcagcttttacaacattagttttaattttgattgaaaagttaaagggtgtcaggaaacaacatagacgcccttcttgtggtgtctagtttgctttaatctggcaaacaaataccaggttattgactccttgtggagtgagacatacgagtatcaatttgcttattttggacacccatataaaa

SEQ ID NO: 14749 - DNA, 363 bp, synthetic construct; identical to SEQ ID NO: 1682
  source 1..363: mol_type = other DNA

SEQ ID NO: 14750 - DNA, 370 bp, synthetic construct; identical to SEQ ID NO: 1700
  source 1..370: mol_type = other DNA

SEQ ID NO: 14751 - DNA, 821 bp, synthetic construct; identical to SEQ ID NO: 2456
  source 1..821: mol_type = other DNA

SEQ ID NO: 14752 - DNA, 315 bp, synthetic construct; identical to SEQ ID NO: 1532
  source 1..315: mol_type = other DNA

SEQ ID NO: 14753 - DNA, 992 bp, synthetic construct; identical to SEQ ID NO: 2571
  source 1..992: mol_type = other DNA

SEQ ID NO: 14754 - DNA, 473 bp, synthetic construct
  source 1..473: mol_type = other DNA
gtggaggcacagatccagatcctgatcctaacccggatccggatccagagcctgggcccgaccccgaacctggggtcgatcaactcgatcttagcaaattcattccaaatcaacttattgatttgcttatttgtggtagttatgttccaaataatgtaagcgatgattttataagtacttatccaaatttaaacttttctgttcataatattactgatgttgtggtttcttcaaaaccatatacacttgctctttttgaaactgaaagccaaattaattctgctagtgtttggagaggtgatataactcaattaagtgtttatatccaatataaattttatactcgcgtagaagcttataatcaagttactacagttcattcggaaaaatggactccaaattttcaaggaaccatttataaacctgtggatgttaaaattgaacatgcatatggaacttatgaattaacaact

SEQ ID NO: 14755 - DNA, 441 bp, synthetic construct; identical to SEQ ID NO: 1895
  source 1..441: mol_type = other DNA

SEQ ID NO: 14756 - DNA, 928 bp, synthetic construct; identical to SEQ ID NO: 2543
  source 1..928: mol_type = other DNA

SEQ ID NO: 14757 - DNA, 807 bp, synthetic construct; identical to SEQ ID NO: 2443
  source 1..807: mol_type = other DNA

SEQ ID NO: 14758 - DNA, 768 bp, synthetic construct; identical to SEQ ID NO: 2392
  source 1..768: mol_type = other DNA

SEQ ID NO: 14759 - DNA, 456 bp, synthetic construct; identical to SEQ ID NO: 1930
  source 1..456: mol_type = other DNA

SEQ ID NO: 14760 - DNA, 734 bp, synthetic construct; identical to SEQ ID NO: 2353
  source 1..734: mol_type = other DNA

SEQ ID NO: 14761 - DNA, 513 bp, synthetic construct
  source 1..513: mol_type = other DNA
ctattcataaaataaaaacataaaaatagtaaaataaataaaataaaataaaaatgtaacttgatcgcttttatgatgacgactgcgcgataatgctaaatagagatgtatttattagtatttactcatcgagagacccctggcaaagtcccggatttatggggccagagtcggtatagaaactcctcaattttaccatctattttctatacttgggttagggtaagtggcttagctcgttcttggatgatgcctaataagactctcttaagcttgtgtgtagcgattagtatgagtgtatccggtaggtgagggctgaaaacccggctagtatgatagatatacttagcttgcctactgccgtgcttgtgcgtttggttgctctgtccaggcttgtgctgttcaaataatcaatattctcttataacgaatctgcaatttaattcgcatggaaaaacgacgcgttcaagaggtttagtcagccggaattgactaccaggattcacttttatt

SEQ ID NO: 14762 - DNA, 487 bp, synthetic construct; identical to SEQ ID NO: 1999
  source 1..487: mol_type = other DNA

SEQ ID NO: 14763 - DNA, 438 bp, synthetic construct; identical to SEQ ID NO: 1879
  source 1..438: mol_type = other DNA

SEQ ID NO: 14764 - DNA, 291 bp, synthetic construct
  source 1..291: mol_type = other DNA
ttttcttttaaaaccttttttaaaagattctcccctatgtttctatatgggaactatgggaggcttgatgccattcgaaatatactgttacataatgggtaacgaggtaggtggggtccgcagtggcctgatcccattcgaaaaatagtaggtggggtccgtcacttttcttttaaaaccttattttaatgtaacttagttttagtattttagtttagtttagtatggcataacactcgcccgaattatgtttagactgttattgtcatctatccatcaagttattttact

SEQ ID NO: 14765 - DNA, 861 bp, synthetic construct; identical to SEQ ID NO: 230
  source 1..861: mol_type = other DNA

SEQ ID NO: 14766 - DNA, 520 bp, synthetic construct; identical to SEQ ID NO: 2068
  source 1..520: mol_type = other DNA

SEQ ID NO: 14767 - DNA, 336 bp, synthetic construct; identical to SEQ ID NO: 1609
  source 1..336: mol_type = other DNA

SEQ ID NO: 14768 - DNA, 775 bp, synthetic construct
  source 1..775: mol_type = other DNA
gttagttattttgttttatattttggaccaaattggaaatttaagttttatgtatattttggaggtgggagataagcagccacttccattttaattccggtatgtgcttttgttgaccgaagaatactatatatgacccgtgagccagtccagacaagcgcagtaatatatactattgaagtttgccttgaagtcttagcgttagtgcggcactgaagcaccgttgtgtatggttgcagaaggatcatgtgtgaactcggagcagtgaattggcatagttaggctgctagcatgtagcagggatcttaatgtacccctgtagtgttctgagtagtatgcttgaccatgtgctgtgaatttagtaactatacgaattctgtaattgtccatggtattggagaaataatagatcccggttcccaaaggatgtcgtagtgggctatgaggagaaaagccgattgggctccaatattaaggtgtggaatttattcgacagacccaaagtgtgcaagttgggatcccatctgttaggtgttgacattgaactttgatggatgtaggttattaattcggaatgctttcaaaattgctctgggcaagaactttgtgaaaaaccaaacttcttgctaaataattgcacatcccaattctgtacgtttacctgcagttttatgttctatttgctattgcaaatattttacttaatagatttgatattgctttcatttttatccttgttatttttgaaacattatatatatataaataatttaaa

SEQ ID NO: 14769 - DNA, 312 bp, synthetic construct; identical to SEQ ID NO: 1524
  source 1..312: mol_type = other DNA

SEQ ID NO: 14770 - DNA, 279 bp, synthetic construct
  source 1..279: mol_type = other DNA
caccctcatttcaaagcttgctactttcatccccattaagatttgcaacactggtgacgggagataccgaagtatagtaggtcccgaaggtgataatacgtaacgcatctagggccgtctccatgtagccaaatgttgtagagccgataagaatgatcaactccttacttgtgtgggatatctagccattagatcagaagagaatcaagtgtaatgctgacctagtttcacgtcttaggacgcgctgcttgaactctctatccatgttctcggtggagc

SEQ ID NO: 14771 - DNA, 438 bp, synthetic construct
  source 1..438: mol_type = other DNA
tgagatacccaaagaagtgagttatacgactttgcacacaaatatatataagttcataactagttattttgcaagaagaactctacggatgccagtgagttatttaacatcaagcacgccttgcaggatatgcatattatattttacgcgagttacatgctctttgatatcttagagtggccggttagaaattgtctcctgtagcgcccaattgataaaggtactattttagtccctggcaagcagattcaataacgaccccccgtcctatactctttgactcataacatggttaatcagcgagagctaatatgtgtgtgaccttacgcagaaatgcacagggtaatgacctccaagtagaactagtatgtatttgtacccctggacacgatttgaaacaatgatggatgattaaggcgaagatttattcaatgaaat

SEQ ID NO: 14772 - DNA, 301 bp, synthetic construct
  source 1..301: mol_type = other DNA
ttttaaatagatcgcatatacagactcctgtatagggagggcatcattggtcggcatggtaaagcatgggctgtggtgtcttatcagcggagggcagtattggtcggcatggtaaagcatgggctgtattgtcttatcgttgcgaaatgacgtttaaataggctgatatacccgaatgtatatccctcctttctttttctatcttgtagttttaagttagttttagttagcatgaggcggtgctccggcggaattatgtagaggaccatcgtttattgcacaactgtacctgattatttta

SEQ ID NO: 14773 - DNA, 750 bp, synthetic construct; identical to SEQ ID NO: 2373
  source 1..750: mol_type = other DNA

SEQ ID NO: 14774 - DNA, 662 bp, synthetic construct
  source 1..662: mol_type = other DNA
ccttttgatgtttaaattttaattccgttctcgccggagatgagtaccggtttgagtttaattcccaggtagcgcgagccgtgagtcagcccagacaagcgcagtagccctacttggagaggttctccttgagcgaccagaagctggcattgaatcgagtcacataatgctgagagtagagggatttgcattctattgtgaaagcaataatttgagagttaagcccatcacattgtgcactcggaatattgtgcagcgcgaaaggttagtaacattaagttggcgaaaggttagcgcagcaatgattggtggtaacgctggatcttattgtggaagcaatggatgaatatgaagttgaaatcaggatcaccacacccccgcagcatagcggtaccgtactgaatgtcacaatccagtgatgattcgaagcctataacgggcggacgtgtttaaatggtgttttatgtggatgttagttcgccggaatgtgcagctccggatatcgagtcgaagattcagtgaccagtggagcaagcaacataggtaactatttcgtatgattttactcacaaaattgcactgggcaggagcttccaaaggaaccttctgcttctcgtaactgcacacaaactagatttcttattttcggagagcatatcaaa

SEQ ID NO: 14775 - DNA, 290 bp, synthetic construct
  source 1..290: mol_type = other DNA
tcgcatatacagactcctgtatagggagggcatcattggtcggcatggtaaagcatgggctgtggtgtcttatcagcggagggcagtattggtcggcatggtaaagcatgggctgtactgtcttatcgttgcgaaatgacgtttaaataggctgatatacccgaatgtatatccctcctttctttttctatcttgtagttttaagttagttttagtcagcatgaggcggtgctccggcggaattatgtagaggaccatcgtttattgcacaactgtacctgattatttta

SEQ ID NO: 14776 - DNA, 561 bp, synthetic construct
  source 1..561: mol_type = other DNA
aggactcgccaattattgatgatgacgaacgtgttcaatctaatttggaaactgagacagaaataccgaatgaagctgaggaagggttatcagagactgttgaggcagttggtgaggttacgactggagttgaggcagctgaggcgaccgctgcggtgtccactccttggaccttgctggctatagccaatcaacaactaggccaagcagttagtacagcacatgtgtcagggttgcaacagcaatcctcggcggattacacggccaatatgcagtctcacggcttgaatgtaggtcttaatgcagatctcattcgagaacagcagagccagaccatttcgaggcagcaggcaggaggttctattgggtctttgcttgggccccttggaacgttgatcggacaggctattgccggatataactctgtgaaccaggaggatttgaaaacagccgcttctttcaacggttatattaatccccaaatgagtaacatcgttgcttcacagacaacatctggtgatgcaggacaagcaacccaggttgataatgtcgacacaacaa

SEQ ID NO: 14777 - DNA, 663 bp, synthetic construct; identical to SEQ ID NO: 2259
  source 1..663: mol_type = other DNA

SEQ ID NO: 14778 - DNA, 272 bp, synthetic construct
  source 1..272: mol_type = other DNA
tataggtaacctttcatggaacctatatgtgagtaactattctcgttatagaggtagttaccttgtgcagtaatacttcgttacgacgtcttattacaaaacactcgagtattttaaatgacagctggaaagacagcaccccccttaaaatcccttttatcctcgcaatttaattgcaaatctagtttaacttagatttaagtcaatccgatctgttaacacaaagaaattatgttgagtcttaacagaaaagattatttgaaccaaaaaca

SEQ ID NO: 14779 - DNA, 1000 bp, synthetic construct; identical to SEQ ID NO: 2610
  source 1..1000: mol_type = other DNA

SEQ ID NO: 14780 - DNA, 537 bp, synthetic construct; identical to SEQ ID NO: 2093
  source 1..537: mol_type = other DNA

SEQ ID NO: 14781 - DNA, 687 bp, synthetic construct; identical to SEQ ID NO: 210
  source 1..687: mol_type = other DNA

SEQ ID NO: 14782 - DNA, 279 bp, synthetic construct
  source 1..279: mol_type = other DNA
ccgatctggcctccctatattgggagacccatagccaggttattctaaggtttaaaccgcaaccttagtattttgcgtgtagaactttgcccctcaagtgttagcaatttttaagtttttatataggtgtatgcacaacatgcacttctttctagcttaatttgttgcaaccttgataggcatttgttttatcagtttaatttagtttttattcaattagaattaattttatgttagtaacgaaacattcccccagcagttagtaatatttctttagtt

SEQ ID NO: 14783 - DNA, 442 bp, synthetic construct; identical to SEQ ID NO: 1898
  source 1..442: mol_type = other DNA

SEQ ID NO: 14784 - DNA, 561 bp, synthetic construct
  source 1..561: mol_type = other DNA
aggactcgccaattattgatgatgacgaacgtgttcaatctaatttggaaactgagacagaaataccgaatgaagctgaggaagggttatcagagactgttgaggcagttggtgaggttacgactggagttgaggcagctgaggcgaccgctgcggtgtccactccttggaccttgctggctatagccaatcaacaactaggtcaagcagttagtacagcacatgtgtcaggattgcaacagcaatcctcggcggattatacggccaatatgcagtctcacggcttgaatgtaggtcttaatgcagatcttattcgtgaacagcagagccagaccatttcgaggcagcaggcaggaggttctattgggtctttgcttgggccccttggaacgttgatcggacaggccattgccggatataactctgtgaaccaagaggatttgaaaacagccgcttctttcaacggctatgttaatccccaaatgagtaacatcgttgcttcgcagacaacatctggtgatgcaggacaagcaactcaggttgataatgtcgacacaacaa

SEQ ID NO: 14785 - DNA, 662 bp, synthetic construct
  source 1..662: mol_type = other DNA
ccttttgatgtttaaattctaattccgttctcgccggagatgagtaccggtttgagtttaattcccaggtagcgcgagccgtgagtcagcccagacaagcgcagtagccctacttggagaggttctccttgagcgaccagaagctggcattgaatcgagccacataatgctgagagtagagggatttgcattctattgtgaaagcaataatttgagagctgagcccatcacattgtgcactcggaatattgtgcagcgcgaaaggttagtaacattaagttggcgaaaggttagcgcagcaatgattggtggtaacgctggatcttattgtggaagtaatggatgaatatgaagttgaaatcaggatcaccacacccccgcagcatagcggtaccgtactgaatgtcacaatccagtgatgattcgaagcctataacgggcggacgtgtttaaatggtgttttatgtggatgttagttcgccggaatgtgcagctccggatatcgagtcgaagattcagtgaccagtggagcaagcaacataggtaactatttcgtatgattttactcacaaaattgcactgggcaggagcttccaaaggaaccttctgcttctcgtaactgcacacaaactagatttcttattttcgaagagcatattaaa

SEQ ID NO: 14786 - DNA, 1000 bp, synthetic construct; identical to SEQ ID NO: 2611
  source 1..1000: mol_type = other DNA

SEQ ID NO: 14787 - DNA, 555 bp, synthetic construct
  source 1..555: mol_type = other DNA
atattctagttgttagtttataaaatttataaaaatacaaaaacattataaaataaaaacccaaaaatatttagatttaaggaaaattacttctaggtacctatttaactaagtgcagtagatagcaaaatgtagacttggtttttaccatttcttctgagcgttgatgccattttgtgtttcaagccacttagagcgatgtgggaacgaggtgtctctgatatggagttggcgaatcatattattgagaataaaagccccccgactacttccacactccagggattaaacatttttattaaattattatgactgagaccctagcgggatcgaaccggatcgtctagcgaccactagagatgagaaactggctaatcatagatttaataaaacttgttggagagtaggtaatcaaacccccctttttacattggtcacaagcattatatattgagtttttacagcattttaaataacgttctaaagatatcaaataaaatattttacattttcacgactataatttttattttcgcatacatttgtatattaaac

SEQ ID NO: 14788 - DNA, 357 bp, synthetic construct; identical to SEQ ID NO: 1662
  source 1..357: mol_type = other DNA

SEQ ID NO: 14789 - DNA, 779 bp, synthetic construct; identical to SEQ ID NO: 2405
  source 1..779: mol_type = other DNA

SEQ ID NO: 14790 - DNA, 946 bp, synthetic construct; identical to SEQ ID NO: 243
  source 1..946: mol_type = other DNA

SEQ ID NO: 14791 - DNA, 390 bp, synthetic construct; identical to SEQ ID NO: 1754
  source 1..390: mol_type = other DNA

SEQ ID NO: 14792 - DNA, 589 bp, synthetic construct; identical to SEQ ID NO: 2158
  source 1..589: mol_type = other DNA

SEQ ID NO: 14793 - DNA, 846 bp, synthetic construct; identical to SEQ ID NO: 2474
  source 1..846: mol_type = other DNA

SEQ ID NO: 14794 - DNA, 422 bp, synthetic construct; identical to SEQ ID NO: 1836
  source 1..422: mol_type = other DNA

SEQ ID NO: 14795 - DNA, 626 bp, synthetic construct; identical to SEQ ID NO: 2209
  source 1..626: mol_type = other DNA

SEQ ID NO: 14796 - DNA, 834 bp, synthetic construct; identical to SEQ ID NO: 227
  source 1..834: mol_type = other DNA

SEQ ID NO: 14797 - DNA, 988 bp, synthetic construct; identical to SEQ ID NO: 2569
  source 1..988: mol_type = other DNA

SEQ ID NO: 14798 - DNA, 774 bp, synthetic construct
  source 1..774: mol_type = other DNA
ttcggaatcccctccatttagtaatacttttgtattattcgtgcgtacaggcacattattttttactgtacattttgaaacaaacacttgtgatcttttattagatcacataatgtttattttaattactatgattgctcctgtagttgatctgtgattaaggcatactatatttataaatttggcgcttatccatgttatcactctcaggcaatcatacccctgagtttagaatatcatggacctccttatttaattcatatggccctttttcattgaaatcgtaaatcttacaaatcatttgttattaaaatgtcattgaataagagcatgtattctaatgacgtttctaacttcatgcaaaaacaccttttatatgttccaataaaaacaattaaaaaaaaatatataaaaattaaaataattataaaaaatataaacaatataaaacaataaaatataaaaataagatttgtaatgtgtgttcttgttagatttcattctcctaataattaaatttttgtgaaacacatcgaatgtttgatgttagtatttgcatagtactactgtggtaaagcaagtggtttgatattttgtcttcaaacctctcagctgtaacgttctcagctcacgttgccatctctgtttatgcggtggatcatcaccatcgtccacggtacgaaatgatgatattattacttatcaaggttagaaccctagatatatcctgcagcgggagaaaacaaaatctgaatttaaagataagaacaagaa

SEQ ID NO: 14799 - DNA, 294 bp, synthetic construct
  source 1..294: mol_type = other DNA
tcagcgatgcgatgcatatgtccgaaatgacaataaactaatggaagtccgcaatgacattaaactattgtgaggacttttattcatttcgtcctccttaaagtgagatggtatcgtcctccatccaccaagattagaaaatgtcaaactcacaagcgaagcgcttgtgtctgtgcggatgcagtgttgtaactttcgttcatgcaatttagcgtagcatgagcaacattgctggggcctataattataagcccaccttgcgtgataaaggcacaggataattacatattactc

SEQ ID NO: 14800 - DNA, 529 bp, synthetic construct; identical to SEQ ID NO: 2084
  source 1..529: mol_type = other DNA

SEQ ID NO: 14801 - DNA, 423 bp, synthetic construct; identical to SEQ ID NO: 1839
  source 1..423: mol_type = other DNA

SEQ ID NO: 14802 - DNA, 304 bp, synthetic construct
  source 1..304: mol_type = other DNA
tcacttcggagatttcaaatccgacccagttttaaatctgatggtaagcaaaattaatgtatgtatatggataccacatgtattttgatctttatgtgttttgtagagtatgtgtaggctttgcatatgtgaacgctccctaaaggggaatcgatagatgggttcagcgtgcccaattgtaaatacttcgttccgtgtgagttaatctgctccacggtctgtacataaatagattggtaataattgtaaattaaatattttagatagtgtacgtgtgggtcttggcacgagcactactacccca

SEQ ID NO: 14803 - DNA, 711 bp, synthetic construct; identical to SEQ ID NO: 2324
  source 1..711: mol_type = other DNA

SEQ ID NO: 14804 - DNA, 483 bp, synthetic construct; identical to SEQ ID NO: 1990
  source 1..483: mol_type = other DNA

SEQ ID NO: 14805 - DNA, 807 bp, synthetic construct
  source 1..807: mol_type = other DNA
ttatgaaaggtgggttagtaacccactaggagacctgcacggtctctgttgaaattgtacctggagtgatactgattgcttgcgttagttgatatgctcgccgttgtacaccaatttcgagttttagtcctaattcaagtggatagcatacacagtttgtgtggttgttgcattgacggatacctcgacgttgtacaccaatttcgagataattaccattctgcaattacacatcacatttcaataactaagtgcaaaaccccccaaaatcgactacgtttgctctttcgttataagagtcgtctgtgccgcgtaaaaagcatcgcatctactgcgtaaaatagaacccccccccttatatgtttatttgtcttgtgtcgtatattctcatgtagagttttaaagaaaaatgctcaaataaaaagatagttttgtcgtaatttatatgttagtgcttgctgagtagcagacttttgtagtaattttggtggaaatagttttcactggttcttcttggtcaaagaccttagctctcttccctgcattccctagttgaaagattcccgacatatcggttgaaggccggattctagtaagaggttcacattagagataagagtgggttgtgtctgtcatgacttatgtttaaactttgtttgagatcaaagaggatgccaccatttttattatgggatactgatcatgtaaaagtcaagatccgtttgctggtttagtaaaaccagctatccttggaccgggagaaataatacgtttacaccaaaccctctgaactacaactttacgata

SEQ ID NO: 14806 - DNA, 738 bp, synthetic construct; identical to SEQ ID NO: 2360
  source 1..738: mol_type = other DNA

SEQ ID NO: 14807 - DNA, 337 bp, synthetic construct; identical to SEQ ID NO: 1613
  source 1..337: mol_type = other DNA

SEQ ID NO: 14808 - DNA, 901 bp, synthetic construct; identical to SEQ ID NO: 2526
  source 1..901: mol_type = other DNA

SEQ ID NO: 14809 - DNA, 1000 bp, synthetic construct; identical to SEQ ID NO: 2612
  source 1..1000: mol_type = other DNA

SEQ ID NO: 14810 - DNA, 724 bp, synthetic construct; identical to SEQ ID NO: 2340
  source 1..724: mol_type = other DNA

SEQ ID NO: 14811 - DNA, 474 bp, synthetic construct; identical to SEQ ID NO: 1973
  source 1..474: mol_type = other DNA

SEQ ID NO: 14812 - DNA, 521 bp, synthetic construct; identical to SEQ ID NO: 2071
  source 1..521: mol_type = other DNA

SEQ ID NO: 14813 - DNA, 453 bp, synthetic construct
  source 1..453: mol_type = other DNA
ggaagaaaaaggaaagatttctctcttgccccaagcccgtccagcacacgacgtgatataaacttctgcattaagcccgtctagctcccgacgtgatataaacgtagcaataagcccgtctagctcccgacgtgaaataaacgtagcaattaagcccggccagctcacgccgtgatataaacctcagcaacactttccaaccaaaacaccaattagatatttaagttatttttacaattgattataaatatttactgcgtacgtccttgatcggagctcgtacagtattcgtactgatttgcacaaatcttcgcagtgttattggcttctttttgcctaaagttttgctcttgatatttacactctttttcttttgcggtctcgtaaataagaagagttatttatcttgtttgtttttgatttacgcatttgacacttataaaaccatacaaa

SEQ ID NO: 14814 - DNA, 630 bp, synthetic construct; identical to SEQ ID NO: 200
  source 1..630: mol_type = other DNA

SEQ ID NO: 14815 - DNA, 322 bp, synthetic construct; identical to SEQ ID NO: 1556
  source 1..322: mol_type = other DNA

SEQ ID NO: 14816 - DNA, 383 bp, synthetic construct; identical to SEQ ID NO: 1737
  source 1..383: mol_type = other DNA

SEQ ID NO: 14817 - DNA, 391 bp, synthetic construct
  source 1..391: mol_type = other DNA
ttaaaaatcgtgcgtggtttatgcgccacgcacgatttaatactaccagttagtcacacttgagtacactcttagactctactcaattctgacgtctgttagtatcatttattaaataaggcataagtgctcatagcacaatagttttgttttgtctctattcaaaagacaacacactcggggggacgtcccgctcctcgttttatttcaaccattgactcgacatcaattggtggaccttcatcaccctccgccgtaagttgctttagcctcgcgctatattttcaatacttgtggttctataagagtagcttaaaacgtatatagacggcctacatattatagaatgcgtatccggaacgccaagcccggacaagtccctgatatatag

SEQ ID NO: 14818 - DNA, 371 bp, synthetic construct
  source 1..371: mol_type = other DNA
gttttatacttgcaatactttctcattgacgacagctcctagcgtacgctcataacgccttgtagcggaaacaatacttgtgctgtggtgtgcgtgtggtcaagctagcggtgagaaacaacttatgttattgtaagtgtgatgcttgcaatactctctcattgacgacagctcctagcgtacgctcataacgccttgtagcggaaacaatacttgtgctgtggtgtgcgtgtggtcaagctagcggtgagagacaacttagatttaatttaattttaagtcaatataccccctaaattaattctatatattggatacccatctaaattaactacgctccagacgactaaatttagtaaggcttatatagg

SEQ ID NO: 14819 - DNA, 279 bp, synthetic construct
  source 1..279: mol_type = other DNA
atataaacctcagcaacactttccaaccaaaacaccaattagatatttaagttatttttacaattgattataaatatttactgcgtacgtccttgatcggagctcgtacagtattcgtactgatttgcacaaatcttcgcagtgttattggcttctttttgcctaaagttttgctcttgatatttacactctttttcttttgcggtctcgtaaataagaagagttatttatcttgtttgtttttgatttacgcatttgacacttataaaaccatacaaa

SEQ ID NO: 14820 - DNA, 663 bp, synthetic construct
  source 1..663: mol_type = other DNA
agtgattaacccgcctttatatattattgccgattaaatactcatgttcatgtgtgtttattttggacgtggaaactagattcaaaaagactttgaagagcgcaatatcgtcgaacttaaccgtttgtatacccgcaagctctgggaatcatcgttgatgagaaattgagaatttgcatattgcatcttctcacccacctaagcggacgtttattgtccttagataggagcctttgaataaggaagcccacgagttgtagaggtacattagtgcgttgtctgccaaaacaggtacgtacggattacaccacaaggaccattagagttgttcattttgcccccttaaccggattcggcgaacactctattttatttacccacccatttaaagttaaagctttacaacttaaaagtaagccggttggaaacgttaatccaaatttattttattttattttacttagtttatattattcaatatagattattttagatatttaagaccagtatttagctgccttaagcaactattatacttattttttgttattcttaaatttttaggagctaaagtagctttattagctattgcacttttatttattttaggaatattgtcccctaggaattatttgttaataacactttgtttatcattatata

SEQ ID NO: 14821 - DNA, 416 bp, synthetic construct; identical to SEQ ID NO: 1819
  source 1..416: mol_type = other DNA

SEQ ID NO: 14822 - DNA, 414 bp, synthetic construct
  source 1..414: mol_type = other DNA
ctttaaaagtcgtgcgtggcttcaccaggcacgatcagtactatcagttaaccactcttgaatatgctcaatgaccctattcaacactggtgtctcttagtacattgttttagcacttaacgtgcatgagttttgcccatttctttcaaaaatgagcattcgaggagacgtcccgctccccgtcttatttcaaccgtagactcgacatctattggtggacatttaattccagtcgccgtaagttgcttctgccccgcgctatattttctcatacttatggttctataggtctggtttaaaacgtaaatagacggcccacaaactatagaacgcgtacccggaacgccaatcccggataagtccctggatatatagatgcaccgcaatataagcctgcagactggctcatatact

SEQ ID NO: 14823 - DNA, 538 bp, synthetic construct; identical to SEQ ID NO: 2096
  source 1..538: mol_type = other DNA

SEQ ID NO: 14824 - DNA, 768 bp, synthetic construct; identical to SEQ ID NO: 2393
  source 1..768: mol_type = other DNA

SEQ ID NO: 14825 - DNA, 390 bp, synthetic construct
  source 1..390: mol_type = other DNA
ccacgcacgattagtactatcagttaaccactcttgaatatgctcaatgaccctattcaacactggtgtctcttagtacattgttttagcacttaacgtgcttgagttttgcccatttctttcaaaaatgagtattcgaggagacgtcccgctccccgtcttatttcaaccgtagactcgacatctattggtggacatttaattccagtcgccgtaagttgcttctgccccgcgctatattttcttatacttatggttctataggtctggtttaaaacgtaaatagacggcccacaaactatagaacgcgtacccggaacgccaatcccggataagtccctggatatatagatgcaccgcaatataagcctgcagactggctcatatact

SEQ ID NO: 14826 - DNA, 662 bp, synthetic construct
  source 1..662: mol_type = other DNA
tgattaacccgcctttatatattattgccgattaaatactcatgttcatgtgtgtttattttggacgtggaaactagattcaaaaagactttgaatgagcgcaatatcgtcgaacttaaccgtttgtatacccgcaagctctgggaatcatcgttgatgagaaattgagaatttgcatattgcatcttcttgcccacctaagcggacgtttattgtccttagataggagcctttgaataaggaagcccacgaattgtagaggtacattagtgcgttgtctgccaaaacaggtacgtacggattacaccacaaggaccattagagttgttcattttgcccccttaatcggattcggcgaacactctatttaatttacccacccatttaaagttaaagctttacaacttaaaagtaagccggttggaaacgttaatccaaatttattttattttattttacttagtttatattgttcaatatagattattttaggtatttaagaccagtatttagctgccttaagcaactattatacttattttttgttattcttaaatttttaggagctaaagtagctttattagctattgcacttttatttattttaggaatattgtcccctaggaattatttgttaataacactttgtttatcattatata

SEQ ID NO: 14827 - DNA, 691 bp, synthetic construct; identical to SEQ ID NO: 2298
  source 1..691: mol_type = other DNA

SEQ ID NO: 14828 - DNA, 350 bp, synthetic construct
  source 1..350: mol_type = other DNA
cgctcaaggaccctattcaacactggtttctcttagtacattattttagcacttaatgtgcacgagttttgcccgtttctttcaaaaatgagcattcgaggagacgtcccgctccccgtcttatttcaaccgtagactcgacatctattggtggacatttaattccagtcgccgtaagttgcttctgccccgcgctatattttcttatacttatggttctataggtctggtttaaaacgtggatagacggcccacaaactatagaacgcgtacccggaacgccaagcccggataagtccctggatatatagatgcaccgcaatataagcctgcagactggctcatatact

SEQ ID NO: 14829 - DNA, 756 bp, synthetic construct
  source 1..756: mol_type = other DNA
ttacgggcctacgtggcctacgctagtacaatgtagtatagcagggacttaaaggtcctttcaaaaccaatataggctcggaaatccgaagtacaccctataccagcatttacgcaggattgcgtaaaggtcaatgaaattaacaataagtatatcgtatacaagagattgtatccacaaaaaaggagccgtaattcctgatgagcagcatatagcgcggtgtgacgcggtgtgcgaagggattataggttcttttttgtggatacaatctcttgtatacgatatacttattgttaatttcattgacctttacgcaatcctgcgtaaatgctggtatagggtgtacttcggatttccgagcctatattggttttgaaaggacctttaagtccctgctatactatattgtactagcgtaggccacgtaggcccgtaagatattataattattttattatattttattcaccccccacattaactccagttaaagctttataactataagtaagccgtgccgaaacgttaatcggtcgctagttgcgtaacaactattagtttaattttccaaaatttatttttcacaatttttagttaagattttagcttgccttaagcagtctttatatcttctgtatattattttaaagtttataggagcaaagttcgctttactcgcaatagctattttatttattttaggaatattatcacctcgtaattatttaattataacgttagctctatctatttata

SEQ ID NO: 14830 - DNA, 396 bp, synthetic construct
  source 1..396: mol_type = other DNA
ggtttaccacgcacgatcagtactaccagttaaccactcttgaatatgctcaatgaccctattcaacactggtgtctcttagtacatcatcttagcacttaacgtgcacgagttttgcccatttctttcaaaaatgagtattcgaggagacgtcccgctccccgtcttatttcaaccgtagactcgacatctattggtggacattcatttccagtcgtcgtaagttgcttctgccccgcgctatattttcttatacttatggttctataggtctggtttaaaacgtaaatagacggcccacaaactatagaacgcgtacccggaacgccaagcccggataagtccctggatatatagatgcactgcaatataagcctgcagactggctcatatact

SEQ ID NO: 14831 - DNA, 618 bp, synthetic construct
  source 1..618: mol_type = other DNA
gtgtatctacggcactgacggactaattatgtgttgagaatattgatggacagatttatgaaataatatatttctgacagcaatattgtcatacgaaatcccccataggcgttatctacggcactggcgaatatggactaaaaatgtttacccaactgatcacttagagatcacccctaaaattcacacaaaatacacttataaaatgattgataacattatgataatctgtaggcaacaatttattagaatttaagtataatgatgttagtaacctcatagtaacctagatatatttgtttgacaaatatcccaaaattgagtgaaatcaataatgggccgtttaggcaatgttatgagaactgaggcgttaaattttgacaaatacaatacctgacaagtccctttaggattgacttaatataagaatagtatcaatagtttttgaatttaaatatgttattgtagatgaagacatgtatttcttgcaataacctctgtatttcttaaactatatgcaattactcggtggtatttgcattttgatcgaagttaaccttcattcttatattgctgtgtcggagcagtggtattggcgccggactattttacataaac

SEQ ID NO: 14832 - DNA, 634 bp, synthetic construct
  source 1..634: mol_type = other DNA
agccacataagtaggacgtgtatctacggcactgacggactaattatgtgttgagaatattgatggacagatttatgaaataatatatttctgacagcaatattgtcatacgaaatcccccataggcgttatctacggcactggcgaatatggactaaaaatgtttatccaactgatcacttagagatcaccctaaaattcacacaaaatacacttataaaatgattgataacaatatgataatctgtaggcagcaatttattagaatttaagtataacgatgttagtaacctcatagtaacctagatatatttgtttgacaaatatcccaaaattgagtgaaatcaataatgggccgtttaggcaatgttatgagaactgaggcgttaaattttgacaaatacaatacctgacaagtccctttaggattgacttaatataagaatagtatcaatagtttttgaatttaaatatgttattgtagatgaagacatgtatttcttgcaataacctctgtatttcttaaactatatgcaattactcggtggtatttgcattttgatcgaagttaacctttattcttatattgctgtgtcggagcagtggtattggcgccggactattttacataaac

SEQ ID NO: 14833 - DNA, 580 bp, synthetic construct
  source 1..580: mol_type = other DNA
gataaaagaacctataatcccttcgcacaccgcgtcacaccgcgctatatgctgctcattaggaattacggctccttttttgtggatacaatctcttgtatacgatatacttattgttaatttcattgacctttacgcaatcctgcgtaaatgctggtatagggtgtacttcggatttccgagcctatattggttttgaaaggacctttaagtccctactatactacattgtactagcgtaggccacgtaggcccgtaagatattataactattttattatattttattcaccccccacattaatcccagttaaagctttataactataagtaagccgtgccgaaacattaataggtcgcataccggcctaacaacatgtatagcttaattttccaaaatttattcttcacaatttttagttaagattttagcttgcttaacaatctttatatcgtctgtatatgattttaaagtttttaggtgcaaaggtagctcttctagctatcgcgctcctttttattttaggaatattatcccctaggaattatttgctgattacattatgcttgtcattatata

SEQ ID NO: 14834 - DNA, 722 bp, synthetic construct
  source 1..722: mol_type = other DNA
gtatagtagggacttaaaggtcctttcaaaaccaatataggctcggaaatccgaagtacaccctataccagcatttacgcaggattgcgtaaaggtcaatgaaattaacaataagtatatcgtatacaagagattgtatccacaaaaaaggagccgtaattcctgatgagcagcatatagcgcggtgtgacgcggtgtgcgaagggattataggttcttttttcgtggatacaatctcttgtatacgatatacttattgttaatttcattgacctttacgcaatcctgcgtaaatgctggtatagggtgtacttcggatttccgagcctatattggttttgaaaggacctttaagtccctactatactatattgtactagcgtaggccacgtaggcccgtaagatattataattattttattatattttattcaccccccacattaactccagttaaagctttataactataagtaagccgtgccgaaacgttaatcggtcgctagttgcgtaacaactatcagtttaattttccaatatttatttttcacaatttttagttaagattttagcttgccttaagcagtctttatatcttctgtatattattttaaagtttataggagcaaagttcgctttactcgctatagctattttatttattttaggaatattatcacctcgtaattatttaattataacattagctttatctatttata

SEQ ID NO: 14835 - DNA, 614 bp, synthetic construct
  source 1..614: mol_type = other DNA
acgtgtatctacggcactgacggactaattatgtgttgaggatatcgacggatagatttatgaaataatatatttctgacggcgatattgtcatacgaaatcccccataggcgttatctacggcactggcgaatatggactaaaaatgtttaccaaactgatcacttagagatccccaaccacacataaatacacttataaacgattgataacactataacaatttgtaggcaatattttattagaatttaagcataatgatgttagtaacctcatagtaacctagatatatttgtttgacaaatatcccaaagttgagtgaaatcaacaatgggccgtttaggcaatgttatgagaactgaggcgttaaattttgacaaatacaatacctgacaagtcccttttggattgactaaatataagaatagtatcaatagtttttgaatttaaataagttattgtagatgaagacatgtatttcttgcaataacctctgtatttcttaaactatatgcaattactcggtggtacttgcatcttgatcgaagttaacctttattcttatattgctgtgtcggagcagtggtattggcgccggactaattaacataaac

SEQ ID NO: 14836 - DNA, 753 bp, synthetic construct
  source 1..753: mol_type = other DNA
acgtacgcagtaaatatttataatcaattgtaaaaataacttaaatatctaattggtgttttgattggaaagtgttgctaaggtttatatcacggcgtgagctggccgggcttaattgctacgtttatatcacgtcgggagctagacgggcttattgctacgtttatatcacgtcgggagctagacgggcttaatgcagaagtttatatcacgtcgtgtgctggacgggcttcagctacgtaaaagcgcaagaaatgtatattgtaagaatatatagtttcttgcgcttttaaggagaaatcctcaaaccttagacccgtaagacactaaggaagaaaaaggaaagatttctctcttgccccaagcccgtccagcacacgacgtgatataaacttctgcattaagcccgtctagctcccgacgtgatataaacgtagcaataagcccgtctagctcccgacgtgatataaacgtagcaattaagcccggccagctcacgccgtgatataaaccttagcaacactttccaatcaaaacaccaattagatatttaagttatttttacaattgattataaatatttactgcgtacgtccttgatcggagctcgtacagtattcatactgatttgcacaaatcttcgcagtgttattggcttctttttgcctaaagttttgctcttgatatttacactctttttcttttgcggtctcgtaaataagaagagttatttatcttgtttgtttttgattt

SEQ ID NO: 14837 - DNA, 579 bp, synthetic construct
  source 1..579: mol_type = other DNA
gataaaagaacctataatcccttcgcacaccgcgtcacaccgcgctatatgctgctcattaggaattacggctccttttttgtggatacaatctcttgtatacgatatacttattgttaatttcattgacctttacgcaatcctgcgtaaatgctggtatagggtgtacttcggatttccgagcctatattggttttgaaaggacctttaagtccctactatactacattgtactagcgtaggccacgtaggcccgtaagatattataactattttattatattttattcaccccccacattaatcccagttaaagctttataactataagtaagccgtgccgaaacgttaatcggtcgctagttgcgtaacaactgttagtttaattttccaaaatttatttttcacaatttttagttaagattttagcttgccttaagcagtctttatatcttctgtatattattttaaagtttataggagcaaagttcgctttactcgcaatagctattttatttattttaggaatattatcacctcgtaattatttaattataacattagctttatctatttata

SEQ ID NO: 14838 - DNA, 639 bp, synthetic construct
  source 1..639: mol_type = other DNA
cgagtagccacataagtaggacgtgtatctacggcactgacggactaattatgtgttgagaatattgatggacagatttatgaaataatatatttctgacagcaatattgtcatacgaaatcccccataggcgttatctacggcactggcgaatatggactaaaaatgtttacccaactgatcacttagagatcaccctaaaattcacacaaaatacacttataaaatgattgataacaatatgataacctgtaggcaataatttattagagtttaagtataacgatgttagtaacctcatagtaacctagatatatttgtttgacaaatatcccaaaattgagtgaaatcaatgatgggccgtttaggcaatgttatgagaactgaggcgttaaattttgacaaatacaatacctgacaagtccctttaggattgacttaatataagaatagtatcaatagtttttgaatttaaatatgttattgtagatgaagacatgtatttcttgcaataacctctgtatttcttaaactatatgcaattactcggtggtatttgcattttgatcgaagttaacctttattcttatattgctgtgtcggagcagtggtattggcgccggactattttacataaac

SEQ ID NO: 14839 - DNA, 867 bp, synthetic construct; identical to SEQ ID NO: 232
  source 1..867: mol_type = other DNA

SEQ ID NO: 14840 - DNA, 668 bp, synthetic construct
  source 1..668: mol_type = other DNA
tgagtgattaacccgcctttatatattattgccgattaaatactcatgttcatgtgtgtttattttggacgtggaaactagattcaaaaagactttgaagagcgcaatatcgtcgaacttaaccgtttgtatacccgcaagctctgggaatcgtcgttgacgagaaattgagaatttgcctattgcatcttctcacccacctaagcggacgtatattgtccttagataggagcctttgaataaggaagcccacgaattgtagaggtacattagtgcgttatctgccaaaacaggtgcgtacggattacaccacaaggaccactagagttgttcattttgcccccttaaccggattcggcgaacactctattttatatacccacccatttaaagttaaagctttacaacttaaaagtaagccggttggaaacgttaatccaaatttattttaatttattttaaatagcttatataatattacaatatagattattttagatatttaagaccagtatttagctgccttaagcaactattatacttattttttattattcttaaatttttaggagctaaagtagctttattagttattgcgcttttatttattttaggaatattatcccccaggaattatttgttaataacactttgtttatcattatata

SEQ ID NO: 14841 - DNA, 523 bp, synthetic construct; identical to SEQ ID NO: 183
  source 1..523: mol_type = other DNA

SEQ ID NO: 14842 - DNA, 351 bp, synthetic construct; identical to SEQ ID NO: 1649
  source 1..351: mol_type = other DNA

SEQ ID NO: 14843 - DNA, 535 bp, synthetic construct
  source 1..535: mol_type = other DNA
cggcgaatttgtcatacgaaatcccccataggcgttatctacggcactggcgaatatggactaaaaatgtttaccaaactgatcacttagagatccccaaccacacataaatacacttataaacgattgataacactacaacaatttgtaggcaatattttattagaatttaagcataatgatgttagtaacctcatagtaacctagatatatttgtttgacaaatatcccacagttgagtgaaatcaacaatgggccgtttaggcaatgttatgagaactgaggcgttaaattttgacaaatacaatacctgacaagtcccttttggattgactaaatataagaatagtatcaatagtttttgaatttaaataagttattgtagatgaagacatgtatttcttgcaataacctctgtatttcttaaactatatgcaattactcggtggtacttgcatcttgatcgaagttaacctttattcttatattgctgtgtcggagcagtggtattggcgccggactaattaacataaac

SEQ ID NO: 14844 - DNA, 461 bp, synthetic construct; identical to SEQ ID NO: 1941
  source 1..461: mol_type = other DNA

SEQ ID NO: 14845 - DNA, 284 bp, synthetic construct
  source 1..284: mol_type = other DNA
tcccctccccgaccccgtaccgcaataaccacttcaggtgcagacgttggacgaatgtgtgtaagaatgtgtgtgtggccccttcagggcaaatgcttccgcaagaaaggagaaaactcacggtcaagtttgaaccacgagtcgagtatccggacctaggaaagtatctccgccaaatcggaaataggcacccgacgtgtgaagtctctacgatagtgagacccttacaggcaaaggaagagcttaccctgtattgtaactagctcgcgttacgacacccaccc

SEQ ID NO: 14846 - DNA, 476 bp, synthetic construct; identical to SEQ ID NO: 1978
  source 1..476: mol_type = other DNA

SEQ ID NO: 14847 - DNA, 585 bp, synthetic construct
  source 1..585: mol_type = other DNA
atccacaaaaaaggagccgtaattcctgatgagcagcatatagcgcggtgtgacgcggtgtgcgaagggattataggttctttttttgtggatacaatctcttgtatacgatatacttattgttaatttcattgacctttacgcaatcctgcgtaaatgctggtatagggtgtacttcggatttccgagcctatattggttttgaaaggacctttaagtccctactatactatattgtactagcgtaggccacgtaggcccgtaagatattataattattttattatattttattcaccccccacattaactccagttaaagctttataactataagtaagccgtgccgaaacgttaatcggtcgctagttgcgtaacaactattagtttaattttccaatatttatttttcacaatttttagttaagattttagcttgccttaagcagtctttatatcttctgtatattattttaaagtttataggagcaaagttcgctttactcgctatagctattttatttattttaggaatattatcacctcgtaattatttaattataacattagctttatctatttata

SEQ ID NO: 14848 - DNA, 737 bp, synthetic construct
  source 1..737: mol_type = other DNA
atcaaggacgtacgcagtaaatatttataatcaattgtaaaaataacttaaatatctaattggtgttttggttggaaagtgttgctaaggtttatatcacggcgtgagctggccgggcttaattgctacgtttatttcacgtcgggagctagacgtgcttagtcttacgggtctaaggtttgaggatttctccttaaaagcgcaagaaatgtatattgtaagaatatatagtttcttgcgcttttaaggagaaatcctcaaaccttagacccgtaagacactaaggaagaaaaaggaaagatttctctcttgccccaagcccgtccagcacacgacgtgatataaacttctgcattaagcccgtctagctcccgacgtgatataaacgtagcaataagcccgtctagctcccgacgtgaaataaacgtagcaattaagcccggccagctcacgccgtgatataaaccttagcaacactttccaaccaaaacaccaattagatatttaagttatttttacaattgattataaatatttactgcgtacgtccttgatcggagctcgtacagtattcgtactgatttgcacaaatcttcgcagtgttattggcttctttttgcctaaagttttgctcttgatatttacactctttttcttttgcggcctcgtaaataagaagagttatttatcttgtttgtttttgatttacgcatttgacacttataaaaccatacaaa

SEQ ID NO: 14849 - DNA, 582 bp, synthetic construct
  source 1..582: mol_type = other DNA
ttaaataagaactatataaatttgtattctatacaatttcttgcgcttttaaggaataacctgaaaccttagacccgtaagatcctaaggaagaaaaacgaaagttatctcctcattctacctccgaattaaaacgagttgacacgacctacctccggtctaaaacgagtcgatacaacctacctccggtttaaaacgagttgacattccgcccgcttgcgcgagacaatcagctacctacctccggtataaaacgagttgacttacctacctccggtataaaacgagaagaatctagctcgtgatttaaaacttagcaaccccccccaaatcttaaactccaacaatttagattttaataaattattgattataaaaggatactgcgtacgtccttagtcggagctcgtacagtaattttactgatttgcacaaatcttcgcagtttactaggatttttcctacccaaaattttattagtgatatttactcttttcttcctttgcggtatcgtaaataagaaaagttatctatcttgtttatttttgatttacgcatttgacacttatcgaactattcaaa

SEQ ID NO: 14850 - DNA, 942 bp, synthetic construct; identical to SEQ ID NO: 240
  source 1..942: mol_type = other DNA

SEQ ID NO: 14851 - DNA, 350 bp, synthetic construct
  source 1..350: mol_type = other DNA
gtgtgatattcgggaggctttctcttatggttacccatcatttgaggaaatttccaataaactcgaatgtaaggcttagagaaaggtcaaggtgccctatttagggtgaggagccttgctggcagccccagtgaatcctctattggatagaaaccgctatatcgggtagctatagcagtcagttagtaacatagctggcgtttcgaaataccatacctgctgactcccaaaacaatactaccgacgtacacaatacggaactcgcatcgtcctcacaggaaaactctatcgaaacggaacaaatcaccacctttcatgatgtggaaactccaaatcggatcgataccccc

SEQ ID NO: 14852 - DNA, 516 bp, synthetic construct
  source 1..516: mol_type = other DNA
ggaggaatcctcaaaccttagacccgtaagacactaaggaagaaaaaggaaagattcttctcttaccctaagcccgtccgaactaaaacgagttgacacgacctacctccggtctaaagacttgacgtcgacacaaccttcctccggtttaaaaccggcagttcacactcagcccgcttgcgcgagacaatcagctacctacctccggtataaaacgagttgacttacctacctccggtataaaacgagaagaatctagctcgtgatttaaaacttagcaaccccccccaaatcttaaactccaacaatttagatatttaagttatattattgattataaaagtatactgcgtacgtccttaatcggagctcgtacagtatttatactggtttgcacaaatcttcgcagtttgctaggcttctttttgcctaaaattttattattgatatttactcttttcttcttttgcggactcgtaaataagaaaagttatctatcttgtctatttttgattt

SEQ ID NO: 14853 - DNA, 524 bp, synthetic construct
  source 1..524: mol_type = other DNA
tatatttttacaatatacatttcttgcgcttttaaggaggaatcctcaaaccttagacccgtaagacactaaggaagaaaaaggaaagatttctctcttaccccaagcccgtctagctcccgacgtgatataaacgtcagcattaagcccgtctagctcccgacgtgatataaacgtagcattaagcccgtctagctcccgacgtgatataaacgtagtactaagcccggccagctcacgccgtgatataaacctcagcaacactttccaaccaaaacaccaattagatatttaagctatttttacaattgactataaatatttactgcgtacgtccttgatcggagctcgtacagtattcgtactgatttgcacaaatcttcgcagtgttattggcttctttttgcctaaagttttgctcttgatatttacactctttttcttttgcggtctcgtaaataagaagagttatctatcttgtttgtttttgatttacgcatttgacacttataaaactatacaaa

SEQ ID NO: 14854 - DNA, 681 bp, synthetic construct
  source 1..681: mol_type = other DNA
gctcggaaatccgaagtacaccctataccagcatttacgcaggattgcgtaaaggtcaatgaaattaacaataagtatatcgtatacaagagattgtatccacaaaaaagaacctataatcccttcgcacaccgcgtcacaccgcgctatatgctgctcatcaggaattacggctccttttttgtggatacaatctcttgtatacgatatacttattgttaatttcattgacctttacgcaatcctgcgtaaatgctggtatagggtgtacttcggatttccgagcctatattggttttgaaaggacctttaagtccctactatactatattgtactagcgtaggccacgtaggcccgtaagatattataattattttattatattttattcaccccccacattaactccagttaaagctttataactataagtaagccgtgccgaaacgttaatcggtcgctagttgcgtaacaactattagtttaattttccaatatttatttttcacaatttttagttaagattttagcttgccttaagcagtctttatatcttctgtatattattttaaagtttataggagcaaagttcgctttactcgctatagctattttatttattttaggaatattatcacctcgtaattatttaattataacattagctttatctatttata

SEQ ID NO: 14855 - DNA, 744 bp, synthetic construct
  source 1..744: mol_type = other DNA
cgcgacgattgtacttagctatgattctcgtatttgggagttggactcccaggaccctgccatcatagttatttagcgattaaacccgcacacatttaaataagtgtgttagcgtgatggattttgccaaatggtgaatttccctttcaggaacattttaacttgaatcagaattttgtacagatggaatcgacgattgtacttagctatgattctcgtattagtgttaggaaattttgtgaaatttttcacacctactagttttaaggccctttagtttagttgcaagtattttgatagaatagtactctttgagtatgcgattgtatcatgtgctcggcgagccaggggcaatttaagtaaagtaggatccctattcttagccaattgatgaatattgttaattcggaaagtgtagactacctctgtatatttttgatgatatgcgaggaacatcgtgttttaccgtccaataggtagtttttctacgaggacgagatgcttagctgcacacgtgaacttaattgattgcgattttcgatgatataatacaatttaattgacttttgaatagactatgcgtagttcttgtcccaaccaggaatgattgcacttaatttgtttctaccgattaaagtgatcattcaagtactctctgtagtctattcttgattgtacttgcactagcttaaggatttatgttttgtgtttgttttgtcttgttttgtccccccccacttttcc

SEQ ID NO: 14856 - DNA, 519 bp, synthetic construct
  source 1..519: mol_type = other DNA
atttttgcaatatacatttcttgcgcttttaaggaggaatcctcaaaccttagacccgtaagacactaaggaagaaaaaggaaagatttctctcttgccccaagcccgtccagctcacgacgtgatataaacctcagcactaagcccgtctagctcccgacgtgatataaacgtagcaaagcccgtctagctcccgacgcgatataaacgtagcactaagcccggccagctcacgccgtgatataaacctcagcaacactttccaaccaaaacaccaattagatatttaagttatttttacaattgattataaatatttactgcgtacgtccttgatcggagctcgtacagtattcgtactgatttgcacaaatcttcgcagtgttattggcttctttttgcctaaaattttattattgatatttactcttttcttcttttgcggtctcgtaaataagaaaagttatttatcttgtttatttttgatttacgcttttgacacttacaaaaccatacaaa

SEQ ID NO: 14857 - DNA, 470 bp, synthetic construct
  source 1..470: mol_type = other DNA
tacccgtaagacactaaggaagaaaaaggaaagatttctctcttgccccaagcccgtccagcacacgacgtgatataaacttctgcattaagcccgtctagctcccgacgtgatataaacgtagcaataagcccgtctagctcccgacgtgatataaacgtagcaattaagcccggccagctcacgccgtgatataaacctcagcaacactttccaaccaaaacaccaattagatatttaagttatttttacaattgattataaatatttactgcgtacgtccttgatcggagctcgtacagtattcgtactgatttgcacaaatcttcgcagtgttattggcttctttttgcctaaagttttgctcttgatatttacactctttttcttttgcggtctcgtaaataagaagagttatttatcttgtttgtttttgatttacgcatttgacacttataaaactatacaaa

SEQ ID NO: 14858 - DNA, 486 bp, synthetic construct
  source 1..486: mol_type = other DNA
aaatcctcaaaccttagacccgtaagacactaaggaagaaaaaggaaagatttctctcttgccccaagcccgtccagcacacgacgtgatataaacttctgcattaagcccgtctagctcccgacgtgatataaacgtagcaataagcccgtctagctcccgacgtgaaataaacgtagcaattaagcccggccagctcacgccgtgatataaacctcagcaacactttccaaccaaaacaccaattagatatttaagttatttctacaattgattataaatatttactgcgtacgtccttgatcggagctcgtacagtattcgtactgatttgcacaaatcttcgcagtgttattggcttctttttgcctaaagttttgctcttgatatttacactctttttcttttgcggtctcgtaaataagaagagttatttatcttgcttgtttttgatttacgcatttgacacttataaaaccatacaaa

SEQ ID NO: 14859 - DNA, 668 bp, synthetic construct
  source 1..668: mol_type = other DNA
gggcttattgctacgtttatatcacgtcgggagctagacgggcttaatgcagaagtttatatcacgtcgtgtgctggacgggcttggggcaagagagaaatctttcctttttcttccttagtgtcttacgggtctaaggtttgaggatttctccttaaaagcgcaagaaatgtatattatgagaatatatagtttcttgcgcttttaaggagaaatcctcaaaccttagacccgtaagacactaaggaagaaaaaggaaagatttctctcttgccccaagcccgtccagcacacgacgtgatataaacttctgcattaagcccgtctagctcccgacgtgatataaacgtagcaataagcccgtctagctcccgacgtgatataaacgtagcaattaagcccggccagctcacgccgtgatataaacctcagcaacactttccaaccaaaacaccaattagatatttaagttatttttacaattgattataaatatttactgcgtacgtccttgatcggagctcgtacagtattcgtactgatttgcacaaatcttcgcagtgttattggcttctttttgcctaaagttttgctcttgatatttacactctttttcttttgcggtctcgtaaataagaagagttatttatcttgtttgtttttgattt

SEQ ID NO: 14860 - DNA, 609 bp, synthetic construct
  source 1..609: mol_type = other DNA
aagtatatcgtatacaagagattgtatccacaaaaaaggagccgtaattcctgatgagcagcatatagcgcggtgtgacgcggtgtgcgaagggattataggttcttttttgtggatacaatctcttgtatacgatatacttattgttaatttcattgacctttacgcaatcctgcgtaaatgctggtatagggtgtacttcggatttccgagcctatattggttttgaaaggacctttaagtccctactatactatattgtactagcgtaggccacgtaggcccgtaagatattataattattttattatattttattcaccccccacattaactccagttaaagctttataactataagtaagccgtgccgaaacgttaatcggtcgctagttgcgtaacaactattagtttaattttccaatatttatttttcacaatttttagttaagattttagcttgccttaagcagtctttatatcttctgtatattattttaaagtttataggagcaaagttcgctttactcgctatagctattttatttattttaggaatattatcacctcgtaattatttaattataacattagctttatctatttata

SEQ ID NO: 14861 - DNA, 484 bp, synthetic construct
  source 1..484: mol_type = other DNA
atcctcaaaccttagacccgtaagacactaaggaagaaaaaggaaagatttctctcttgccccaagcccgtccagcacacgacgtgatataaacttctgcattaagcccgtctagctcccgacgtgatataaacgtagcaataagcccgtctagctcccgacgtgatataaacgtagcaattaagcccggccagctcacgccgtgatataaaccttagcaacactttccaaccaaaacaccaattagatatttaagttatttttacaattgattataaatatttactgcgtacgtccttgatcggagctcgtacagtattcgtactgatttgcacaaatcttcgcagtgttattggcttctttttgcctaaagttttgctcttgatatttacactctttttcttttgcggtctcgtaaataagaagagttatttatcttgtttgtttttgatttatgcatttgacacttataaaaccatacaaa

SEQ ID NO: 14862 - DNA, 507 bp, synthetic construct
  source 1..507: mol_type = other DNA
tattcttgcgcttttaaggagaaatcctcaaaccttagacccgtaagacactaaggaagaaaaaggaaagatttctctcttgccccaagcccgtccagcacacgacgtgatataaacttctgcattaagcccgtctagctcccgacgtgatataaacgtagcaataagcccgtctagctcccgacgtgaaataaacgtagcaattaagcccggccagctcacgccgtgatataaaccttagcaacactttccaaccaaaacaccaattagatatttaagttatttttacaattgattataaatatttactgcgtacgtccttgatcggagctcgtacagtattcgtactgatttgcacaaatcttcgcagtgttattggcttctttttgcctaaagttttgctcttgatatttacactctttttcttttgcggtctcgtaaataagaagagttatttatcttgtttgtttttgatttacgcatttgacacttataaaaccatacaaa

SEQ ID NO: 14863 - DNA, 310 bp, synthetic construct
  source 1..310: mol_type = other DNA
taagcccgtctagctcccgacgtgatataaacgtagtaattaagcccggccagctcacgccgtgatataaacttcagcaaactttccaattttacacaattacctagtttattaagttttataattgattacaaacgttatctgcgtacgtccttaatcggagctcgtacagtatttatactggtttgcacaaatcttcgcagtttgctaggcttctttttgcctaaaattttattattgatatttactcttttcttcttttgcggactcgtaaataagaaaagttatctatcttgtttatttttgattt

SEQ ID NO: 14864 - DNA, 501 bp, synthetic construct
  source 1..501: mol_type = other DNA
tgcgcttttaaggagaaatcctcaaaccttagacccgtaagacactaaggaagaaaaaggaaagatttctctcttgccccaagcccgtccagcacacgacgtgatataaacttctgcattaagcccgtctagctcccgacgtgatataaacgtagcaataagcccgtctagctcccgacgtgaaataaacgtagcaattaagcccggccagctcacgccgtgatataaaccttagcaacactttccaaccaaaacaccaattagatatttaagttatttttacaattgattataaatatttactgcgtacgtccttgatcggagctcgtacagtattcgtactgatttgcacaaatcttcgcagtgttattggcttctttttgcctaaagttttgctcttgatatttacactctttttcttttgcggtctcgtaaataagaagagttatttatcttgtttgtttttgatttacgcatttgacacttataaaaccatacaaa

SEQ ID NO: 14865 - DNA, 654 bp, synthetic construct; identical to SEQ ID NO: 2250
  source 1..654: mol_type = other DNA

SEQ ID NO: 14866 - DNA, 338 bp, synthetic construct
  source 1..338: mol_type = other DNA
tctagctcccgacgtgatataaacgtagcaattaagcccggccagctcacgccgtgatataaacttcagcaaactttccaattttattattatacaattacctagtttattaagttttataattgattacaaacgttatctgcgtacgtccttagtcggagctcgtacagtatttatactggtttgcacaaatcttcgcagtttgctaggcttctttttgcctaaaattttattattgatatttactcttttcttcttttgcggtctcgtaaataagaaaagttatttatcttgtttatttttgatttacgcttttgacacttacaaaacaatacaaa

SEQ ID NO: 14867 - DNA, 812 bp, synthetic construct; identical to SEQ ID NO: 224
  source 1..812: mol_type = other DNA

SEQ ID NO: 14868 - DNA, 399 bp, synthetic construct; identical to SEQ ID NO: 1774
  source 1..399: mol_type = other DNA

SEQ ID NO: 14869 - DNA, 640 bp, synthetic construct
  source 1..640: mol_type = other DNA
gggacttttatgtccctacgtacaattttcgccgaaattagcgatataatttcaaaaccgtttcgcggcgcctgagcagcctttccaatggtaggagcgtcgatcccccgtatggagtggagaatataaggctcagctaggatgacacgcctgtacactgtcgacattagttaagttgcaattacacgtctgttgccgaagaaaccattttagtcaactgattatgatttttgtataatgacaaacagtgatgaactgtataactcatcaacaacaaaacggattacgaacctatttgtaactatcttgatcgaagtctagtagatccccaatatagccctgaaaagcttgagggatgggatagctctataaatagacgtgaggctttaaatcctgataagtacattacctgagaattcctccttttggagtttgaatttatataagttagtaccaatagttaatatcatttaagtatgttattatcgctgaaggcatgtatttcggataataacctctacattgatatataaactatatgcaagtctcggtggatattgcgttatggtcgcagttaacctgtagcttatatattcctgtgtcggagcagtggtaatggagccggacaatttcgccaaaa

SEQ ID NO: 14870 - DNA, 711 bp, synthetic construct
  source 1..711: mol_type = other DNA
tgattttaaaggtaaccttggttattatgctttacggttttcattgttgatggtatttgcggcctgcggtccctaattgttgaattatttattctgatacgttgttttcttgttgatggtaaggattcttattttggagtggtttttcagaagataactctaaatatgaattatgccttattgttttcaatgttgatggccttcgtttgaatatttttttttgttaatgacggtaatcaaagattacatctcaaacttagattaatattttaagtagggtatactgagttagtcctctctctttactgattttgatatctggtaattgacttcgaagaaagatgcgtcttttggatttgtaatgactgggccttaagttcataggtgttattgcatggaggaacacattactttggttgatgatgatgttttgatgatgactttcaatgtatgtgcttatgttaagcctgacataagaacttactaatttgcatagtgcaaagggttagtatatgatttttagtatgtggattttgacactgcctttgattaggatgtgtgaatgattttgaaacatattaagatgtttatacgagcgtgttgtttaccattttcaggatatgtggaagcggttgtgtatgatctatacgcacatttagttcccagagggcgttgtcgtctccccctaagcaagggagaaacacgtggcac

SEQ ID NO: 14871 - DNA, 341 bp, synthetic construct
  source 1..341: mol_type = other DNA
ttaagatgtgatcttgcttccttatacaattttgagaggttaataagaaggaagtagtgctatcttaataattaggttaactatttagttttactgttcaggatgcctattggcagccccataatatccaggacaccctctctgcttcttatatgattaggttgtcatttagaataagaaaataacctgctaactttcaaacaaacaataataacattgaaaatgaagatcggaaaattacttccgagcaaaaagagattgtacacttttctagtgaaggagttacccctagtaccactgcggtgcctgatatcgttagcctttcaacagattatttgtct

SEQ ID NO: 14872 - DNA, 628 bp, synthetic construct
  source 1..628: mol_type = other DNA
ctatacgcgcttggttgttttcacatatcaagtgggttaaaagccccgtatgcttggagaccaggtttgtttgccgacttacggaacgtcgttaaactctaggctttccggatggcttctaattatccgaggcccgtacgtgggctcgaagtttagtagagagtacgcgtacaaaagtcctagttgttttcatacatcaagtgggttaaaagccccgtgtacttggaggctaggcagcacgattacagtagcctgtactacctgaagcatgtagtaaaactgcacagttgaacattgtcacaaacgggctgatagcgtatagctggattgttgagagatagcatcttgcgggatgtgaaagagcatgttagacatgtattatggcttttctcaatacgcagtctttgctatgcgtgtgtaggcaaaaggaagtgagagagttgaccgtctctcatgggtatttaggttattcagagtacgctgctactgcggtagtggacacaacccaggtgttcgggtctctgtcttagaaactatatgaaaggcgaaagttgtgaagagttttctaacgtcactcttaaatggtacgtgtcgattaaacttgtagcaatgaatagccaaccctata

SEQ ID NO: 14873 - DNA, 316 bp, synthetic construct; identical to SEQ ID NO: 1540
  source 1..316: mol_type = other DNA

SEQ ID NO: 14874 - DNA, 1000 bp, synthetic construct; identical to SEQ ID NO: 2613
  source 1..1000: mol_type = other DNA

SEQ ID NO: 14875 - DNA, 971 bp, synthetic construct; identical to SEQ ID NO: 2559
  source 1..971: mol_type = other DNA

SEQ ID NO: 14876 - DNA, 853 bp, synthetic construct; identical to SEQ ID NO: 2485
  source 1..853: mol_type = other DNA

SEQ ID NO: 14877 - DNA, 976 bp, synthetic construct; identical to SEQ ID NO: 2563
  source 1..976: mol_type = other DNA

SEQ ID NO: 14878 - DNA, 783 bp, synthetic construct; identical to SEQ ID NO: 2415
  source 1..783: mol_type = other DNA

SEQ ID NO: 14879 - DNA, 706 bp, synthetic construct; identical to SEQ ID NO: 2314
  source 1..706: mol_type = other DNA

SEQ ID NO: 14880 - DNA, 840 bp, synthetic construct; identical to SEQ ID NO: 2471
  source 1..840: mol_type = other DNA

SEQ ID NO: 14881 - DNA, 1000 bp, synthetic construct
  source 1..1000: mol_type = other DNA
cacgcgtcaagcgtgcatactttgtgagtgtggctacgtctaggtgcaactttagctacgctctggtccagaattatcgatactatatccatgaggtataggtcgacaatgttcttgatactttgtgagttattgtcattttgtgttatcgggtcactgtggatatcggacacacccgagagcaacttgtttattgcatactatttgagttaatactacgcttaggtgcatgtggaagcgtaatggcttttcaaaccctagttaagaaacctataattacaaaactataaaaataatgataaagtataaaacccgttcgtatacttgtatacttgggacaaaaattacagtggaaaactgtttcttttccaaccgttttaaccggaaggttaggagttcggataaactcccggaagatatgtatttcgataaaggctacatataggagcataccctcagtatgatgtttttgcttgttttgcattctaaacgagacgtgatgtagtgcactattgattgaactattagtctgctattccagaaaactcacgacatccctgttatcagttcgggacgtgagttagtatggtttgtgaggcaggaggttgaagtcctccctaatagagactgtcgtaactatcattaagaactgccgtaattctgtagtcagttggtaagctttttgagcgtgggctcttgaggcctgaagaacctcaatcccagacgtagtaacagtcctacaatagttgtatttcttcccatcacgatgtgcaccggccgtggtacgctgcacattatttgttcaattgttgggagactaacgttgttcacgccatcgccggctccggacgggcatttaattacctacaggtcgtaaaaggaattttcgatctgttcttcagcggttttaaacctcttcaattttcttcgattttcttcgattttatcttcagtttttttattataattattaaatatttttacttcaattatatttaaa

SEQ ID NO: 14882 - DNA, 819 bp, synthetic construct; identical to SEQ ID NO: 2454
  source 1..819: mol_type = other DNA

SEQ ID NO: 14883 - DNA, 1000 bp, synthetic construct; identical to SEQ ID NO: 2614
  source 1..1000: mol_type = other DNA

SEQ ID NO: 14884 - DNA, 344 bp, synthetic construct
  source 1..344: mol_type = other DNA
agctaaggcttaacgattcataccccttgtgttctctttgtttaatagcgtctcttgcttaaacaactgaattggttctttccttttcagaacttattgtttattgtgattgaagaccttttactcatacatttggcgtacgtttgtaagctatttttctcgctttcgagcttattgctctgcaagcatcccttgcctgcataaggctatataactgctatagtgaagcaagtaattaaggatttattattaagttttattattgttgttttttttattttagttataatatttagttttggtatttatattgtgtaagataatatatttaaccacctataaaa

SEQ ID NO: 14885 - DNA, 930 bp, synthetic construct; identical to SEQ ID NO: 2544
  source 1..930: mol_type = other DNA

SEQ ID NO: 14886 - DNA, 728 bp, synthetic construct; identical to SEQ ID NO: 2343
  source 1..728: mol_type = other DNA

SEQ ID NO: 14887 - DNA, 676 bp, synthetic construct; identical to SEQ ID NO: 2282
  source 1..676: mol_type = other DNA

SEQ ID NO: 14888 - DNA, 448 bp, synthetic construct; identical to SEQ ID NO: 1914
  source 1..448: mol_type = other DNA

SEQ ID NO: 14889 - DNA, 878 bp, synthetic construct
  source 1..878: mol_type = other DNA
gcgggggccaaacccccgtctactgatgagctgcacctctatatttagtttcaagagattcttcttatatgtgttgttctccctaactagactatcctctgcacacctaaaagcgtcgcatgatactctaccacacctaaaagcgtggcttccctccccctaacttaaccttatttagttttaataattttagttttaatttttagttcacgggactaccacttggaatccctaatagtaacaaaatactaaatacccagaaaattaactacagtttatagtcatgtcttataaaatgtagctagtagttttgatatactaaagtacattcacgtatacgtgttaccgctccgattcttggaatcaagtgtatcaaaattacgagattgttatgttgggcagtaaagatctcggtataactcttattaaattctttaccgccttgcagagctatacgtaattagaagtgggtagttttgagtggtgttaatctaacgcaggagaaaatgcttcggccctattacttttgtagataggggcgagtagggagctctgaaggccttggaaaccttcatctctaatccgggacgattttaacattcggctgcttctagttcgtatatgatgatcacaaggttgctcacacccgtggaggtcggctgtgtagtatttgggaggataaaaggttagccacaccttccttcttgtacctcttctctctattgaataatagaacttttaaaacaaacaagaaaatatagttatattttctgctccaagcttccagctttccaaacaattccaattttccagcctttccaatttaatccaatttattccaattttatcaccagattttccaacttatttcacttata

SEQ ID NO: 14890 - DNA, 1000 bp, synthetic construct
  source 1..1000: mol_type = other DNA
ttcgattctttattggttcgataattgtgtgtaacaaactttgacaacttactatgtgattttcgttgactttactttataaacaaacttaattatagggctttcattaactattctcacgtagtgagtttattgattgagcatacattatgttccattgatgttccgaaaaggttcgattctttattggttcgatgattgtgtgtaacaaactttgacaacttactatgtgattttcgttaactttactttataaacaaacttaattataagcataaacttacttagtaataaatataaacgtagttagttggttttatatatatattataacgtatagtgtcattaaaatataaaaactcggtgccgaccggggttgtatctaacaattaataaaatttatattatgtgttttcactatcggcccgtcttattagtcttttagtagcatagacaaatagtgacactggcataatcacccccagtggcaacaagcacctctaatatttcttttattaaaatgatttacaatgcaaaaatattaattttaaggcaaggctatttcatatttcaaatgtctatgagtagatgaaacgttgtatataagtaagtgcgataaaacagggacccctctgactggcaaacaccagcgcctactgctttttatacgtttgcgacataatcgaaaatgaccgctttgtttttgaagatagtgaccactattctaggcaactggaggtagtgttaacccagctggatttattccaaaacctcgatgacgtgtgtatccatggacttcgggaatatatcttaaagatatagttgggcttctgaaccctagttttacggacgtttttataggaagaataaaacgtgtccgatttttatttctctttctcttatggttacaattctgtgaatattattttcggaatttttattgattgcgtatttgtgtctcacctttctttaaccaattgaattattttacattgaaaac

SEQ ID NO: 14891 - DNA, 1000 bp, synthetic construct
  source 1..1000: mol_type = other DNA
ttactttgcaagttggagcttactattttggattatgaatatgtgcacttagtgtctgtatttatagtcgtttgtggttcaaggttttgtgttagtagtacacttatgtatgaatgtacctttagtatgaatgttatagaatgacaatatcgaaggaaaaatctttataaaatacaaaaatattgtttttattatttcgatatggtgttttatagagtagattgccatgtgaccgctcatagaagtccattatggtttatcaatcgaagttgaatgtatttataagaatattatacttaattagtaatattagtagtccgtaactattatcatccttttacagtttgatgtgataatagaccactgcagtatcgagtagagtttcgaatgcgtagtgcaatagtacaatcactgtcaccgaccatctatcgtaatgatagatctgtcggaaaccattatttatgaagtgactagcaatcatggattaaattagatggtattctagtttagaggtgattcggcgctgcggtgcgactgaaacttctaaattagcatgtcagattgtattatgaatgcgttagtagtaatttctgcgatagagctgggacccctcagtctctcaggtattgtatgaggcgaaagtgtgaaagttttgtatgtatttttttatatgtacgactgtatcgggaattcctttagcaagaatccttttaatacagtataatctgtgctacggtacgttatgttcgcagggcacccgttaatgtctcatagcccagacgatggcggatggaaagacatcatattttattttaatgctgtctttattgctgatttattttgctgtttttatttgctattttatatttgctaattttcattattgcgaaatatattatattgctatttttattatatacgctagattcaattttattctttctatattttcaatttaattttgatttcgaaggtaaatatatataattgattattaaaa

SEQ ID NO: 14892 - DNA, 921 bp, synthetic construct
  source 1..921: mol_type = other DNA
attatcggtatttccgtgtaattagctaatgaagagttaccacatgctggctgcttattagatatgcggaaagatcggtaagatctttttctatacacaaacgtaggttaagaatcatttccattattaacaaggcttggatagacagattgaaactccaagttttcatctcggaatagacagattgaaatttccgtctcatccttttactaaccaatcatcttgtaggaatcaaattctttcctagtcgtataattaatgatagtgttgcgactttaaaattttacacttcgtcattatagttgagatctatttcttctcacatggtttataagatgtgaatgtaccatgttaaataacacaaaccaactggaattttccaggattgttttgtagtagtgcttcaatccattcaaagcactctcatcttgcgcgtcgtgctagatgttaaagacgtcacgatcggttttttggcttgagttttacgataaataaccaaacaatgataacgctaatagcaagtaaagaacgattaaagatttttagatatgtgtacaattgtgtcatacgaaagtgtttcaccattgaaatgatatccaattcgactgaaaaatgtcgcggttgatcgatttcctgatgcccttgagaaaggctaaatggaggttgtacacgtgtttttaattgttgtttcgctaggctaatcagcccgttgcagaccccggtacaatccgtggtggtggagttaaatgcccatccaacgttaatggtcaagtttcccgatgattccctggggctggggtcgttaattctctaaagtgacaagtgatttcttttgctctcccaagttcttacccaaagctttctctccccaattttcttttaaacgtttttctttttaaatcttttaaaataatttataaa

SEQ ID NO: 14893 - DNA, 816 bp, synthetic construct; identical to SEQ ID NO: 2450
  source 1..816: mol_type = other DNA

SEQ ID NO: 14894 - DNA, 1000 bp, synthetic construct; identical to SEQ ID NO: 2615
  source 1..1000: mol_type = other DNA

SEQ ID NO: 14895 - DNA, 792 bp, synthetic construct; identical to SEQ ID NO: 2424
  source 1..792: mol_type = other DNA

SEQ ID NO: 14896 - DNA, 1000 bp, synthetic construct
  source 1..1000: mol_type = other DNA
tgttactttgcaagttggagtttactatcttggattatgagtatgtgcacttagtgtctgtatttatagtcgtttgtggttcaaggttttgtgttagtagtacacttatgtatgaatgtacctttagtatgaatgttatagaatgacaatatcgaaggaaaaatttttataaaatacaaaaatattgtttttattatttcgatatggtgttttatagagtagattgccatgtgaccgctcatagaagtccattatggtttatcaatcgaagttgaatgtacttataagaatattatacttaattggtaatattagtagtccgtaactattatcatcctttttcagtttgatgtgataatagaccactgcagtatcgagtagagttccgaatgcgtagtgcaatagtataatcactgtcaccgaccatctattgtaatgatagatctgtcggaaaccattatttatgaagtgactagcaatcatggattaaattagatggtattctaatttagaggtgattcggcgctgcggtgcgactgaaacttctaagttagcatgtcagattatattatgaatgcgttagtagtaatttctgcgatagagctgggacccctcagtctctcaggtattgtacgaggcgaaagtgtgaaagttttgtatgtgtttttatatgtacgactgtatcgggacttcctttagcaagaatccttttaatacagtataatttgtgctacggtacgttacgttcgcagggcacccgttaatgtctcatagcccagacgatgacggatggaaagacatcatattttattttaatgctgtctttattgctgatttattttgctgtttttatttgctattttatatttgctgattttcattattgcgaaatatattacattgctatttttattatacacgctagattcaattttatttttcctatattttcaatttaattttgattttgaaggtaaatatatataattaattattaaaa

SEQ ID NO: 14897 - DNA, 428 bp, synthetic construct; identical to SEQ ID NO: 1855
  source 1..428: mol_type = other DNA

SEQ ID NO: 14898 - DNA, 618 bp, synthetic construct
  source 1..618: mol_type = other DNA
atgcccctcgggcggggggcctttaccccccgctcgagttttaaacctagttaagtttatgttaagattttctataatttcattaacatggaaaagaaacgtaggttcggtgtggatcttaatagtttcatacagaaatcgcagccttttccagcttgactttatatgaaactttattttgttttatttagtttatagtttaagttactctttagttcacgggataactactagttgcggctagcaagaatccttattagtaacaaaagtgccttaacaggacaaaatataagaaaactctactccaattttagtacctatacgaaagaacacagtttagcgaagctttgagctggcaacgctatgtatcggattatttaacgtcacctcctagtgagtgcgtgtcgacttaatttgtatatagttatttagtccctcaaagaataagcagaattgttagtatggatcatgtgggaattaattgtttgatgtaggactgcttcatgtaggtttagcaccctaatatgacagtataaaagtttttgctcgttttcaacctcagcaacgtttttcgttataaagcgtagatttgttttatttctttcttttcagttcatt

SEQ ID NO: 14899 - DNA, 728 bp, synthetic construct
  source 1..728: mol_type = other DNA
tttgcatgagtataagaaatacgcaacgttatcctaaacaggaccagaattaactgaaaatgaaaaacgttggaactcttacggagcagagaggggagcgttgaggggtgtagtccttagtctgaaactttggaactactactattgcaagacgagtctcacaatagccactaagcaatcacgaagattcttaatggctattgtgagactcgtcttgcaatagtagtagttccaaagtttcagactaaggactacacccctcaacgctcccctctctgctccgtaagagttccaacgtttttcattttcagttaattctggtcctgtttaggataacgttgcgtatttcttatactcatgcaaagatttgttgacaaacatggctcagtctcctacacttgtcaaaagtgtaggagattgagccatgtttgtcaacaaatctttgcatgagtataagaaatacgcaacgttatcctaaacaggaccagaattaactgaaaatgaaaaacgttggaactcttaagaatcttcgtgattgcttagtggctattgtgagactcgtcttgcaatagtagtagttccaaagtttcagactaaggactacacccctcaacgctcccctctctgctccgtaagagttccaacgtttttcattttcagttaattctggtcctgtttaggataacgttgcgtatttcttatactcatgcaaagatttgttgacaaac

SEQ ID NO: 14900 - DNA, 936 bp, synthetic construct; identical to SEQ ID NO: 2546
  source 1..936: mol_type = other DNA

SEQ ID NO: 14901 - DNA, 400 bp, synthetic construct; identical to SEQ ID NO: 1780
  source 1..400: mol_type = other DNA

SEQ ID NO: 14902 - DNA, 732 bp, synthetic construct; identical to SEQ ID NO: 2349
  source 1..732: mol_type = other DNA

SEQ ID NO: 14903 - DNA, 915 bp, synthetic construct
  source 1..915: mol_type = other DNA
attaattaatgagtctcttaaatgagttttatatttcttgagtttcatgttccgaaaaggttcgatgattatactcttggataatatttaatgacatttttggattggctcattattaagtcttttctctgtacttagttaaggtttatttgcttttaaattatatgtattatacaacttatatgttttagaaactgaaatactcggttcagaccggggctatatctaacaacttgtaataaataatttacctattttcactatcggcctctcttattagtcttttagtagcatagagaaatagtgacatgagcataatcacccctcatggcaacaagtagctctttattttctattacaagtatgatttatagtgtataaaaattaattttaaggcaaggcaacataatattgtagatgtctatgagtagatgaaacgtagttgacatgtgtgtgcgataaaatggggacccctccaactggctaacaccagcgcctactacatttcaatatattgcgacataatcgaaaatgaccgctctatatattagggttgtgaccactattctgatttattttggaggtagtgttaatccggctgagtttatctcaaaacctcgatgacaagtgtatccttggacttcgggcatatatctctaagatatagtcggacttttgaaccgtaaatttgcggaggctttaagtacgaagaataagcctgtccattttcattttactttttcttatggttacaatttcagattacattaaagcgatttcattgttcattgttgtttcaattattctcaattgcaatcctattacccctttgttttatttttattccaattttataatccttttgttaattgtttctcatattgattttaaatttgtatcaaaatatttttgaag

SEQ ID NO: 14904 - DNA, 937 bp, synthetic construct
  source 1..937: mol_type = other DNA
tagattttcagattatcggtatttccgtgtaattagctaatgaagagttaccacatgctggctgcttattagatatgcggaaagatcggtaagatctttttctatacacaaacgtaggttaagaatcatttccattactaacaaggcttggatagacagattgaaactctaagttttcatctcggaatagacagattgaaatttccgtctcatccttttactaaccaatcatcttgtaggaatcaaattctttcctagtcgtataattaatgatagtgttgcgactttaaaattttacacttcgtcattatagttgagatctatttcttctcacatggtttataagatgtgaatgtaccatgttaaataacacaaaccaactggaattttccaggattgttttgtagtagtgcttcaatccattcaaagcactctcatcctgcgcgtcgtgctagatgttaaagacgtcacgatcggttttttggcttgagttttacgataaataaccaaacaatgataacgctaatagcaagtaaagaacgattaaaaatttttagatatgtgtacaattgtgtcatacgaaagtgtttcaccattgaaatgatatccaattcgactgaaaaatgtcgcggttgatcgatttcctgatgcccttgagaaaggctaaatggaggttgtacacgtgtttttaattgttgtttcgctaggctaatcagcccgttgcagaccccggtacaatccgtggtggtggagttaaatgcccatccaacgttaatggtcaagtttcccgatgattccctggggctggggtcgttaattctctaaagtgacaagtgatttcttttgctctcctaagttcttacccaaagctttctctcccccaatttttttttaaacgtttttctttttaaatcttttaaaataattttttaaaaaa

SEQ ID NO: 14905 - DNA, 879 bp, synthetic construct; identical to SEQ ID NO: 2515
  source 1..879: mol_type = other DNA

SEQ ID NO: 14906 - DNA, 941 bp, synthetic construct
  source 1..941: mol_type = other DNA
ggggtgtatccccgcgatcttttcctctattctccttatcaggcttgcttgttagttagtctcgtttggagcttagagtttcttgctaggttttgatgtatcttgccttcgtttcgtttgtgacgtatcgattttcctagcaattattcttatattctatttagttttaaggttttaggttagttagttttaagttaaaatataaaatcaaatacaaaagttatttccttatatcttttatagtgcagttgtcatattattatggcgttgtactatattttaatttttcttgtcttgtctttctacttgtgcctgaactataagttactaccatgttatctacggccagtagcctgttctctatgctagtacgtgcggctccggccttaacggaactgtctttgtgttgtgagtatatttgaattgtgtgacgtgccctcatagatttgaggaacttcggttctatgtcccaaagttcagatataaatagtggaatccccccaagtggtaagggctcctcccatccgaggtacccctgtgtaaacgcgctgccccgagcgcggttaataatgtgtctttttttttaatatttagccgttggatgtatactattgctcctgatcacacattgaacaccatgggctcaggggaattctgtagtggtatggtagatacttacttataggtataataggttttagctctccctatttccaattgagtagtgcttattgctgtgtcttggcaagactaggctttagtgatggtcgagcactagtcctgttatagagaggctatgataggacgaatcctaattttggtggccctccaccgccttttaccccacaagtgcagaacaactataagaatctccgttttgttttcgtaagcaccttccagtaagttttatcccccaaaacttttcccttacgtaatttaaa

SEQ ID NO: 14907 - DNA, 905 bp, synthetic construct; identical to SEQ ID NO: 2528
  source 1..905: mol_type = other DNA

SEQ ID NO: 14908 - DNA, 551 bp, synthetic construct
  source 1..551: mol_type = other DNA
atcattttcgggagtttttgaggaggaggagagcttcggcggcctttcgtcgtgcgattcggtcttcggcgtctcgcataaaagcgtcaagtcgttgagcgtgttggaaagagttcgctgtagattgggcgatgtttcgtcgggcatcttcgattcgcttttgttgttgggtgtgttggacacaatgtccacaagagttgatatagctaactcgcctacaggtttgacaagtgtaggagactgagccatgtttgtcaacaaatctttgcatgagtataagaaatacgcaacgttatcctaaacaggaccagaattaactgaaaatgaaaaacgttggaactcttaagaatcttcgtgattgcttagtggctattgtgagactcgtcttgcaatagtagtagttccaaagtttcagactaaggactacacccctcaacgcacccctctctgctccgtaagagttccaacgtttttcattttcagttaattctggtcctgtttaggataacgttgcgtatttcttatactcatgcaaagatttgttgacaaac

SEQ ID NO: 14909 - DNA, 254 bp, synthetic construct
  source 1..254: mol_type = other DNA
cctggttaactacgcttacttgcgattcacgcgcttcgagaattttgaatgcccttttcttttttgcgacgacctataccccctggttaactacgcttacttgcgattcacgcgcttcgagaattttgaatgcccttttcttttttgcgacgaaaaagaccccctttcagaaatcttacgcgattttgcacgttagtagaaccccgttatagaacgacgcttagtttgcccatttgggccaaacaatcacaaca

SEQ ID NO: 14910 - DNA, 253 bp, synthetic construct
  source 1..253: mol_type = other DNA
gatgactgtaagtttatactattgattacgccgtacttatgtgccgttagtttgatatagagtactataaatgataaagaaccccgtgggcaagtaaaatattgtatcgttacagaaattaacgacgctttgtgaaaagaataaattctctattgtctatagaaatagaatagttgaaggtagaaatcttccgtttgcaactgacgttcagaatgcaccaaaaagttttttaaatttatatggttacaatcaa

SEQ ID NO: 14911 - DNA, 606 bp, synthetic construct
  source 1..606: mol_type = other DNA
actacagtttatagtcatgtcttataaaatgtagctagtagttttgatatactaaagtacattcacgtatacgtgttaccgctccgattcttggaatcaagtgtatcagaattatgaaattgttatgttgggcagtaaagatctcggcatacctcttactaaattctttaccgccttacagagctatacgtaattggaagtgggtagttttgagtggtgttaatctaacgcaggagaaaatgcttcggctctattacattgtatatagaggcgagtagggagctctgaaggccttggaaaccttcatctctaatccgggacgattttaacattcggctgcttttagttcgtatatgatgatcataaggttgctcacacccgcggaggtcggctgtgtagtatttgggaggataaaaggttagccacaccttccttcttgtacctcttctctctattgaataatagaatttaataaacaaataggaaaatatagttatattttctgctccaagcttccagctatccaaaccattccaattttccaattcttccagcttattccaacttttgtaccaaacttttcaactttactccagaaatataata

SEQ ID NO: 14912 - DNA, 271 bp, synthetic construct
  source 1..271: mol_type = other DNA
tgctttttaaggtttcatatatgctataacggttatgggtactagtatagtggattaatatcaatatatggcattttacaccaacaatgtgatcttgcttgcggaggcaaaaatatgcacagtataaaatctgcaagtagtgctattgttggaatcaccgtacctatttaggtttacgctccaagatcggtggatagcagccctatcaatatctaggagaactgtgctatgtttagaagattaggtagtctctaaacagaacaatttacct

SEQ ID NO: 14913 - DNA, 410 bp, synthetic construct
  source 1..410: mol_type = other DNA
taggagactgagccatgtttgtcaacaaatctttgcatgagtataagaaatacgcaacgttatcctaaacaggaccagaattaactgaaaatgaaaaacgttggaactcttacggagcagagaggggagcgttgaggggtgtagtccttggtctgaaactttggaactactactattgcaagacgagtctcacaatagccactaagcaatcacgaagattcttaatggctattgtgagactcgtcttgcaatagtagtagttccaaagtttcagaccaaggactacacccctcaacgctcccctctctgctccgtaagagttccaacgtttttcattttcagttaattctggtcctgtttaggataacgttgcgtatttcttatactcatgcaaagatttgttgacaaac

SEQ ID NO: 14914 - DNA, 618 bp, synthetic construct
  source 1..618: mol_type = other DNA
aaattaactacagtttatagtcatgtcttataaaatgtagctagtagttttgatatactaaagtacattcacgtatacgtgttaccgctccgattcttggaatcaagtgtatcagaattacgaaattgttatgttgggcagtaaagatctcgacatagctcttattaaattctttaccgccttgcagagctatacgtaattagaagtgggtagttttgagtggtgttaatctaacgcaggagaaaatgcttcggccctattattgtagataggggcgagtagggagctctgaaggccttggaaaccttcacctctaatccgggtcgattttaacattcggctgcttctagttcgtatatgatgatcacaaggttgctcacacccgcggaggtcggctgtgtagtatttgggaggataaaaggttagccacaccttccttcttgtacctcttctctctattgaacaatagaactttttaaacaaacaagaaaatatagttatattttctgctccaagcttccagctttccaaacaattccaattttccagcttttccaatttattccaatttattccaattttatcaccagatttccaacttatttcacctatacaata

SEQ ID NO: 14915 - DNA, 694 bp, synthetic construct
  source 1..694: mol_type = other DNA
taatattagtagtccgtaactattatcatcctttttcagtttgatgtgataatagaccactccagtatcgagtagagtttcgaatgcgtagtgcaatagtacaatcactgtcaccgaccatctattgtaatgatagatttgtcggaaaccattatttatgaagtgactagcaatcatggattaaattagatggtattctagtttagaggtgattcggcgctgcggtgcgactgaaacttctaaattagcatgtcagattgtattatgaatgcgttagtagtaatttctgcgatagagctgggacccctcagtctctcaggtattgtacgaggcgaaagtgtgaaagttttgtatgtgtttttatatgtacgactgtatcgggaattcctttagcaagaatccttttaatacagtataatctgtgctacggtacgttacgttcgcagggcacccgttaatgtctcatagcccagacgatggcggatggaaagacatcatattttattttaatgctgtctttattgctgatttattttgctgtttttatttgctattttatatttgctaattttcattattgcgaaatatattacattgctatttttattatatacgctagattcaattttatttttcctatattttcaatttaattttgattttgaaggtaaatatatataattaattattaaaa

SEQ ID NO: 14916 - DNA, 393 bp, synthetic construct
  source 1..393: mol_type = other DNA
ttttgttgttgggtgtgttggacacaatgtccacaagagttgatatagctaactcgcctacaggtttgacaagtgtaggagactgagccatgtttgtcaacaaatctttgcatgagtataagaaatacgcaacgttatcctaaacaggaccagaattaactgaaaatgaaaaacgttggaactcttaagaatcttcgtgattgcttagtggctattgtgagactcgtcttgcaatagtagtagttccaaagtttcagactaaggactacacccctcaacgctcccctctctgctccgtaagagttccaacgtttttcattttcagttaattctggtcctgtttaggataacgttgcgtatttcttatactcatgcaaagatttgttgacaaac

SEQ ID NO: 14917 - DNA, 777 bp, synthetic construct; identical to SEQ ID NO: 2402
  source 1..777: mol_type = other DNA

SEQ ID NO: 14918 - DNA, 370 bp, synthetic construct
  source 1..370: mol_type = other DNA
gtataagaaatacgcaacgttatcctaaacaggaccagaattaactgaaaatgaaaaacgttggaactcttacggagcagagaggggagcgttgagggatgtagtccttagtctgaaactttggaactactactattgcaagacgagtctcacaatagccactaagcaatcacgaagatgcttaatggctattgtgagactcgtcttgcaatagtagtagttccaaagtttcagactaaggactacacccctcaacgctcccctctctgctccgtaagagttccaacgtttttcattttcagttaattctggtcctgtttaggataacgttgcgtatttcttatactcatgcaaagatttgttgacaaac

SEQ ID NO: 14919 - DNA, 718 bp, synthetic construct; identical to SEQ ID NO: 2334
  source 1..718: mol_type = other DNA

SEQ ID NO: 14920 - DNA, 488 bp, synthetic construct; identical to SEQ ID NO: 2001
  source 1..488: mol_type = other DNA

SEQ ID NO: 14921 - DNA, 630 bp, synthetic construct; identical to SEQ ID NO: 2215
  source 1..630: mol_type = other DNA

SEQ ID NO: 14922 - DNA, 473 bp, synthetic construct; identical to SEQ ID NO: 1970
  source 1..473: mol_type = other DNA

SEQ ID NO: 14923 - DNA, 606 bp, synthetic construct; identical to SEQ ID NO: 2178
  source 1..606: mol_type = other DNA

SEQ ID NO: 14924 - DNA, 322 bp, synthetic construct
  source 1..322: mol_type = other DNA
gtgtgagtgccgctagtgagtggagtatgatgttatacgattgtatattaaatttagctctgagtaaaatggctgaaccccatgttgaaatgacgctatctgatatacgaacgtatgagccagaatgttgacaacacctaataatgcacaattgcaacaacctcggttggagcctcaaactgcgattggtcatgtaatttactagcttttaaactatcgacctagacaagtcttagggagtttaaaagaataggaaaccaattcgtgaatgtttgtgtacccgtgtcggagcggattattaggacggcggacgttttaaaag

SEQ ID NO: 14925 - DNA, 667 bp, synthetic construct; identical to SEQ ID NO: 204
  source 1..667: mol_type = other DNA

SEQ ID NO: 14926 - DNA, 316 bp, synthetic construct
  source 1..316: mol_type = other DNA
atataaaataagtaaatagaactaagtaagtataatataataatatatttgaaaataatctaaaatagcttaataaaagttaatgtaattaatattttgtgtatacacgtatttaataaaacttaataaaatgcttagtaatatttgtttttagaactctgtctgtaaactttaattaactcagtaataatgtttgattttcaacgggtttgtaacgggttttgtaaataactctgtattcgctttgatatttcttttcaaatatattattatattatacttacttagttctatttacttattttatatttataat

SEQ ID NO: 14927 - DNA, 258 bp, synthetic construct
  source 1..258: mol_type = other DNA
gaagaagagtaagattctttgcgattgaactaaacaacgtcggcccgtttttaagcggtttaccacgtttgatgttctgggttttgatcattcaatttcttcaattcctgcttggctattttgtcactcgttggcttttaaatagtccgcagtatattgactttgtgattgatcattttcgagagatttttactctttttattggcttagtccttgtgtttttctcacattttttggttaaaattgtttcaactaaag

SEQ ID NO: 14928 - DNA, 437 bp, synthetic construct
  source 1..437: mol_type = other DNA
tctagcacctgcattccaaggagtatttgcgaaaatcttattcttaaaaccaattcttaattttaagtacaaacctcgcagaacttacaaatcgtgctcacgccttttgttctatttagttaatttgtatttgaagaatttagacgaataatataacgtgcttattattcacgagaccctctaacgtttttaacgcattgatctcgtaaaatctgaagactgatcttacattgatattgaattagacaaaagaaacgcaccacgacagtagtgtggccttactgttaaaataactaggcctaacgagtatttctaactgtgacgttcgatgaattattccgaactatgtactaactgatctaaatcgttgttctacaaggaacgtttcaccgcctcaatagatcctaactatagaggaaaagaaacaacaaacaaac

SEQ ID NO: 14929 - DNA, 672 bp, synthetic construct; identical to SEQ ID NO: 2274
  source 1..672: mol_type = other DNA

SEQ ID NO: 14930 - DNA, 284 bp, synthetic construct
  source 1..284: mol_type = other DNA
cagagtatttttacttaaagcagagcgtacatacagccgcttcggtctggggtgcagtttcacaccaattcaccagagagaccgccggattgaatgcttctaagcttggattttccttgtctccagaaaaagagatatataatggacattcattggcatatccccctgggtggggggaaatacctgcacattatgttccggaaaatattgtcaagtactggcaagaaaatccaccagtgtttgctaagaacactgagtacctaacatttggagagtatgtaacc

SEQ ID NO: 14931 - DNA, 677 bp, synthetic construct
  source 1..677: mol_type = other DNA
tcgaccaagttggaggacacgttggaaagtacattgatggaaaaaataatttagaccttcaaaatttaaaggggagaaatttattagaccttcaaaatttaatcggtgaacaaaaaaaagatgtcaccggtatggagatagctggaaataaagatttgcagaagaatcagcttgacaaccaggataagtggatcaatgcaggacgtgactcgttcactaaagcaggcctcccggaattttcattctgggatcggggtcgcggtggaccactcaatgtcggttcgacgagaagttcaatcggtggtaataactttgtgaactcctttggaggcccaaacacaaacttaccgtcaaccggttcctcgccatacgcagacttgaatggattatcccgcccgttctgatcagggttgtcataaattttcttcatcatctcttgcattcttaagcgttttgtcatgagtcgcaggttgctgttactcatggggtactggtttgcgcacaacaaagtgttcttactggaaaagcgtttcattatgcacaaaaaattagaattcctaaggagcttaactcccgtcattctagctatcgtgtaaactaaattagtttagtagtctttattaaaaagataaattaaaattcaatttgggttaaacataacatcatacacatggatc

SEQ ID NO: 14932 - DNA, 754 bp, synthetic construct
  source 1..754: mol_type = other DNA
taaaacaaccatcaccatcatcatggcagctctactaggtttacttggtggattaggtaaattgggagaaagctcccctttttcaaaattaacagatcatgcgcttggaataggcgataaggctatagatcgagaaacagctatgaatttacaaaaactaatcaatcaaggtaaaatcgatacctccgaattaaacattggaggtcaaatgaatttattgaaagaacaacttgggcaccaagataagtggaaccagaaaggacttgattcctttaaagaagctggtcttccaggcttttcgtttttcaacggaggcggcttaaatattggctcatcgaggagttatatcggtggaaacaattcagtgggatcaatcggaggccccggggttcgactccccagaacgggtacatccacatttgctgatctcaatggtttgtcgaaaccgttttagctcgtccatgttctttcaatttattcatccaaattcaaaataaatttagctctcaatgctcggttgcgtgcttgtcgttcaactaggttccggaacccgttctcagtagttggttcctattgaaagttcaatttatccaaaatttgagggtgtctaggtgtgcttaacacaccgtcgcccagtaatagtaaaataaagtaaaatatatcaactcgatctatttccttcatttaactttaactttaaatttaaatttcttctttttattgtttttttttaaagtccttcatcatcaaatcc

SEQ ID NO: 14933 - DNA, 621 bp, synthetic construct; identical to SEQ ID NO: 2199
  source 1..621: mol_type = other DNA

SEQ ID NO: 14934 - DNA, 754 bp, synthetic construct
  source 1..754: mol_type = other DNA
taaaacaaccattatcatcatcatggcagctctactaggtttacttggtggattaggtaaattgggagagagctcccctttttcaaaattaacagatcacgcgcttggaataggcgataaggctatagatcgagaaacagctatgaatttacaaaaactaatcaatcaaggtaaaattgatacctccgaattaaatattggaggtcaaatgaatttattgaaagaacaacttgggcaccaagataagtggaaccagaaaggacttgattcctttaaagaagctggtcttccaggcttttcgtttttcaacggaggcggcttaaacattggctcatcgaggagttacatcggtggaaacaattcagtaggatcaatcggaggccccggggttcgactccccagaacgggtacatccacatttgctgatctgaatggtttgtcgaaaccgttttagctcgtccatgttctttcaatttattcatccaaattcaaaataaatttagctctcaatgcttggttgcgtgcttgtcgttcaactaggttccggaacccgttcttagtagttggttcctattgaaagttcaatttatccaaaatttgagggtgtctaggtgtgcttaacacaccgtcgcccagtaatagtaaaataaagtaaaatatatcaactcgatctatttccttcatttaactttaactttaaatccaaatttcttcttttcattatttttttttaaagtccttcatcatcaaatcc

SEQ ID NO: 14935 - DNA, 601 bp, synthetic construct
  source 1..601: mol_type = other DNA
aatctctagcgtcaagaatctcatcaatgtatgtatgtttgtgatgtcttttatgtttgtgacgtcagtgtttgttttgtatatatgttgtgacgatggaacaattaaaatgagttttaaataaaatataaaaatcaaaaatattaatgttgttttgtgtgttaatgtgtaaatgttgattgtgtgttttattttaattgttcccacattgtaggaggttaactctacaatggcgattcaagtctgttcgtatcatagaatgaggcagggcggagcgtccggactaagtggaggaaggcgcgcgatgaagtgttgataagttctatgatttggatagcaacgtgtatttaagaaatctgcaaaacgagtttagtagtggctagaaggtttttcgtgcaaacccttaggagaacatcgggagactggtgcctttgggcagaggctgataaccggctaggtttaccactattcgaattgtgctgcggcgttcttatttacatatgggttacttgcgttgacgaatgcaagagtttgttgtaccgttctgcattgcggctaaagtaagtgtgaggacgtgactttgagcccgtttcaagagcaa

SEQ ID NO: 14936 - DNA, 712 bp, synthetic construct; identical to SEQ ID NO: 2325
  source 1..712: mol_type = other DNA

SEQ ID NO: 14937 - DNA, 721 bp, synthetic construct; identical to SEQ ID NO: 2336
  source 1..721: mol_type = other DNA

SEQ ID NO: 14938 - DNA, 751 bp, synthetic construct; identical to SEQ ID NO: 2376
  source 1..751: mol_type = other DNA

SEQ ID NO: 14939 - DNA, 545 bp, synthetic construct; identical to SEQ ID NO: 2105
  source 1..545: mol_type = other DNA

SEQ ID NO: 14940 - DNA, 367 bp, synthetic construct; identical to SEQ ID NO: 156
  source 1..367: mol_type = other DNA

SEQ ID NO: 14941 - DNA, 727 bp, synthetic construct
  source 1..727: mol_type = other DNA
ttgtatttatgtttgtattgtttatttacgtgtatatgttttgtatatgttttattatatgtttgttttgtgttgtgttatctttgttatttgataactgtaaaaatataaaatcactataagttggtatcattttatatcaaagtttaaatattacgaagttaatctggatttataacagaagtaaatgccaaattggatgtcgctcacttaataatcaaaatgctctttgagtgatttttagtcaaaaccatctgtagttcatatcactgaagaaatcttttaaagctcttcaaatacatgctacggggactattaatcgggtcatgccgttgttttattatgatagatatatcaccgagcccaatttggactggacgtttatggagttatattggtaggttaacaattcgttttattaattacaaactcttgtttcgagaaatccttctttggaccgccaaagaatcgtcaaagttatgagcgagatatgcacatacaccgagacgttgcaagactttctaattaatatgacagtatttttaccgaggtataaagtgggtttgtcgcgtgtttccatggttctgccgccgaataacatgcgggttcgtattccttaagtacgggagacaggggaagacctgtgacggatggaaagacatcatttttcagtacccaatgtttttatgaagtgttttattattgtattattatattgtttttcaaa

SEQ ID NO: 14942 - DNA, 623 bp, synthetic construct; identical to SEQ ID NO: 2203
  source 1..623: mol_type = other DNA

SEQ ID NO: 14943 - DNA, 415 bp, synthetic construct; identical to SEQ ID NO: 1814
  source 1..415: mol_type = other DNA

SEQ ID NO: 14944 - DNA, 1000 bp, synthetic construct; identical to SEQ ID NO: 2616
  source 1..1000: mol_type = other DNA

SEQ ID NO: 14945 - DNA, 1000 bp, synthetic construct; identical to SEQ ID NO: 2617
  source 1..1000: mol_type = other DNA

SEQ ID NO: 14946 - DNA, 1000 bp, synthetic construct
  source 1..1000: mol_type = other DNA
aaccacacatgggaagttattgccctcatgtgagtccagctaaatagtttggcattaggtaaagattgcagtgagcaaattccattgcagtcgaggtttagcctcgccattcgtcttttaaaattagtttcttttaagatgctagaagataaaacacggtaaaaaattgtatataacgatataggtctggagtatagtaatcaatgttattcgttgcattggtgataacgacatactgtatactcccaactttcgcgccggacgattccggatatattgtacgtgataataatgtcttcttaattgagactgactttttaagtcaattaaacaactctaccagagcctacgcgttctatctctgacacgggatagttctcagggttgaagattccataggtctttaacctgccgaaactctgtgctgtactgtagggtcgactaccatctacctatttaggtttgaatcggtctgagataatttcaatacatgaccggccttaaaatagttcttcagagccaccggatggttagttcagatgtggcatagcgaaaaacgcagcacactgatgatattctttcaaacgaattttgttccctcacgatcggtgaggacctgcttcaagcaggagataatggatttttgcttgcccctgttatattagggcaggctcaagaaactcatgtacatggacctactattgtacgtgattttacagattgggacgcctttgatttgtggcaggtcccagatcttaattatgatggtccggaagcagattttgctgaacgagatggttttaataactatcaaaatgaagcaaatttgcgacggactacgactaccgtcgttgaaaaagatctacctccttatgaggtgttaatttttagtgatgaagaagaaagttctcgaactttcttttcctgtgagtcggataatgaagggtacactccttcgtcttctgattcacaagaacagatgcctgatatcatatatcag

SEQ ID NO: 14947 - DNA, 780 bp, synthetic construct
  source 1..780: mol_type = other DNA
attatggcggcaatccttggctcacttggtggactctcgggtctactaggcaaaaagactccctttgacaaaactgtggatggtggttttgaccttttgaacaaaggcatcgaccgtgaaacagctcttggcattggtgatcaacaaattaaaggtagaaaggatttagctaaaataattggagatcaaaatttaaaaatcactgataaaaacattggcggccaattacagttgctgaaagaggctcttggaaatcaagacaagtggactcaagccggattagactcctacaccaaggcgggattaccaggcttttctttctttgatcgaaatagaggtaatctcaatgtcggctccacttcaagttacattggtggaaacaactttgttcgatcctttggaggtcccggtacaaaacttccaatgactggcacttctccctttgcggatatgaatgggttgtctcgaccattttgataactaagagcaaatttcatcaactccaaattcgaaacagatttgcttagtgtgcttagctgtgtcaacatgtggcatggccgggtttcgtgaaagttgcataacaatcagctggatctacactaaaccactctgtctaaatttgagcatttctcgtcaggcttaacctgacttcatgcagaatcagtaaattaaaacgaacttaacatctctcgctttaattaactcttgttaaacttctaaatttttctgttcttttaaatttttctgtttaactttgtgtaatgtatcttaattctctaa

SEQ ID NO: 14948 - DNA, 416 bp, synthetic construct; identical to SEQ ID NO: 1820
  source 1..416: mol_type = other DNA

SEQ ID NO: 14949 - DNA, 850 bp, synthetic construct; identical to SEQ ID NO: 2482
  source 1..850: mol_type = other DNA

SEQ ID NO: 14950 - DNA, 753 bp, synthetic construct; identical to SEQ ID NO: 2378
  source 1..753: mol_type = other DNA

SEQ ID NO: 14951 - DNA, 360 bp, synthetic construct
  source 1..360: mol_type = other DNA
gcatgtcatttcagtcgcgcgagggggatgacgttaactacccccgccggaatactaatccttagacgttcttccctttggattaagtaaatcttaataacttttaaatggctaatagcgatttaccggaatttttacaaaaatacgtcacaaattttcccaaggccagttctggattgagcattcaacaaaagcaaaatattgaagaattgagaaaacttcccattcaggattcagactcacctcgtttaatttgcttaaagtgctttcctgatatctcttacgagcgtatgttaaaagaagaggtgtttaggaacgcttggtattcatacttagaacatagcagtcagtggaaaaatc

SEQ ID NO: 14952 - DNA, 369 bp, synthetic construct; identical to SEQ ID NO: 1698
  source 1..369: mol_type = other DNA

SEQ ID NO: 14953 - DNA, 752 bp, synthetic construct; identical to SEQ ID NO: 215
  source 1..752: mol_type = other DNA

SEQ ID NO: 14954 - DNA, 1000 bp, synthetic construct; identical to SEQ ID NO: 2618
  source 1..1000: mol_type = other DNA

SEQ ID NO: 14955 - DNA, 500 bp, synthetic construct; identical to SEQ ID NO: 179
  source 1..500: mol_type = other DNA

SEQ ID NO: 14956 - DNA, 760 bp, synthetic construct; identical to SEQ ID NO: 2386
  source 1..760: mol_type = other DNA

SEQ ID NO: 14957 - DNA, 261 bp, synthetic construct
  source 1..261: mol_type = other DNA
tagccacacgaaaaagagcatatagcgtatacgttatatcagagcgacagttcctgttacggacggttctatttttctgcgtttcctgactcgaattaaaattgtcatttgtcctgactcgacgtaaaattgtcacttgtcctgactcgactataaattgtcaattcttttaatattttaaaccttcatttcttatattttaattttaaagtgtagatttgtttgttattgttatattttcttgtttctgtatttgttact

SEQ ID NO: 14958 - DNA, 263 bp, synthetic construct
  source 1..263: mol_type = other DNA
tagccacacgaaaaagagcatatagcgtatacgttatatcagaacgacagttcctgttacggacggttctatttttctgcgtttcctgactcgaattaaaattgtcttttgtcctgactcgactttaaattgtcatttgtcctgactcgacgtaaaattgtcaatccatttttattttaatccaaatcactctctttttattttatattttgtcagtgttttgttttattttgatttacatctgtttttctgtatctatgtaa

SEQ ID NO: 14959 - DNA, 1000 bp, synthetic construct
  source 1..1000: mol_type = other DNA
cacaaccaccattgtgctttagttttaagttctctttcaaagttctgtgtttgcttttaccattagtattggtattcacatcttctttattttctacagaactttccttcttaagtgtgaatgttgtttgtgtgtttgttatatgtgttttaatttcttccaattacataaaaatgtctgtatgcgtgagtgttagaacgttttataactttatttttccctcgttttgacggactgattacccagatcttcgttgtatcaatagtcacggaaggatagactcttcgcagtgtatttataaatccacgcaaaagtggtagcaagtagcgtgacaccacactagccagagtcggcgtagcgtttacttgttgtgttccctgatagtgaccgaaagcagcgtttctgcaaacgtcatatgtagattggtgaaggattttgccatgtactcattaggctgtagctttctgtaccttttattctaggtgtttagattgggattcataagaatttgataccccgatcgaagtacgaactgctagtgtatttaaacgtatgcacgcctggttagtcttcgcatcataagaataactgtagattttatcgtgtccatttagctccttttgatacatgtcatgcctgatctggttgagcataacatatactgagaagtccctgcgctccctagccagcttgctggtgaagttagtaaactctcgtatgtggtggcttttgtatgcaagactccttgtgtaagtcccagcacgttggatgagctaacaggcgtcgcacaccaggctggtgcgtctatgtcgcgggatgtgaattcgttctgcccgggccctgtgaaacgactagtgattagagaacgactcagtagtcctttatttaccattagtctcaaaattacctggcacaagtttcaaacgtgaacacttgtgctttcgttcagcctattttccttaataatttttaaatattttatattttgttttactttaat

SEQ ID NO: 14960 - DNA, 699 bp, synthetic construct; identical to SEQ ID NO: 2307
  source 1..699: mol_type = other DNA

SEQ ID NO: 14961 - DNA, 760 bp, synthetic construct; identical to SEQ ID NO: 216
  source 1..760: mol_type = other DNA

SEQ ID NO: 14962 - DNA, 619 bp, synthetic construct; identical to SEQ ID NO: 2198
  source 1..619: mol_type = other DNA

SEQ ID NO: 14963 - DNA, 290 bp, synthetic construct
  source 1..290: mol_type = other DNA
atgcttcgaatattgctcagtcatttgacaatggtaatcgtatccaagttaacagaaatgctaatgtcgttccaactcaaacgttgagatgtgccccgagcattcctcaagatcagactgttttggccgatggtcgggttgagaggcgtgtccgggatgcggctcaacaaattgctattgtcaataacgatgttcaatttgagacttcgtggaaatcgtttgtttatgtgctatgtcagaatgggtcacaacctataatcgatgcctccacttcaattgagactggtcgg

SEQ ID NO: 14964 - DNA, 1000 bp, synthetic construct; identical to SEQ ID NO: 262
  source 1..1000: mol_type = other DNA

SEQ ID NO: 14965 - DNA, 495 bp, synthetic construct; identical to SEQ ID NO: 2018
  source 1..495: mol_type = other DNA

SEQ ID NO: 14966 - DNA, 400 bp, synthetic construct; identical to SEQ ID NO: 1781
  source 1..400: mol_type = other DNA

SEQ ID NO: 14967 - DNA, 784 bp, synthetic construct
  source 1..784: mol_type = other DNA
ggaccccttaatgcgcgcgaattcaaccgcgcctagtcggctcaaataagaataaaaggaaacctcaaataggtgcctctcactcgtgagtggttggcccggaatggtcagccatgaactagtgtgcgattcccacagtgttggtcgaaagccccgcactgtctactcgcatatttgactccagtccttccgcagccagcggttaggttctggttaaagtgcattatgtgcacggcgccacgcagaactgccagaaatggtaagctgcgcccaacgccaacggtttgtgtatcccgttagtcacacgtttacagctgttcgttaacagtagggttttgtcgacccggaccccttaatgcgcgcgaattcaaccgcgcctagtcggcaatggtatcatttaatcccatgcactacgggagaaatttgagaccaaagaattcctgagggccactgcttgctctaagtgcaatgcctcgggagacttctgtcaggagcctagcggctttcaaccgcgacagctaactcctgcgggatgtttggtgtccatacttactggcgtcctcacaacgctaagtggatgttgtccacaggtaggcaaacaccgagccccacattcaggagacctgtatgaacgatcctatcagcattagagttggaattgggtgtgctaacgtccgcataagtgcaccccgtggtaacgctgggaaactatccagcgcaacgtactgtcctcaatgtctagggaaggaccgccctaagcgtacaaccgggccatgtgtcgagc

SEQ ID NO: 14968 - DNA, 871 bp, synthetic construct
  source 1..871: mol_type = other DNA
tgagaatttcctaattctcatatcataggttttgctggcgcattaccttgacttcgcctgcgcgatgttatattttgagtcaaagatggttgctggcgcgattgtctttgatagctgctggcgcggctttctcaatctcctcaaactccttattttgcattctggctgttcaagcggcccaaatcgcaagcgtctctcatttccttgcgtgcgtacccgaaaatttattgaatttggcttgaattataagcaatgcttcttatagcggacactttgagaatataatgcttgcatggattaatgtatactgtttcaaataacaaacctagacacgcagttgcgttgatggttgtatcaatcacatacgggtgttgaactcgtgttaatcctcgatcgctatatgtttgcctcctacttccaataaaatagattacatacgcgacatgcctttgtgggttacctattggcctctgtcaaaaacaaatcgtttgatttgtagtttcctagcctaaaaagctgggcgcggtctggctctcgtcggatggaaaggtccatcaatggctggttgagtgtaagctccggtgttctggttgtcgcaattccagacgtcgtaataacctatattgcatctgactctaattcttgtggctctactgtatctagttcttgttctactaactctaataatgctactgattctatgttcgaaaaactctcctatgtcaatatagaaaatgtccttgatcctgatatccctcacgtcactgaaattcatcgcaagcggatttcagatgatatcctcgaatctcaaggctgtacttgctctgaacctattattactcctcgtgtgttttcattctcaactcttggc

SEQ ID NO: 14969 - DNA, 868 bp, synthetic construct
  source 1..868: mol_type = other DNA
gaatttcctaattctcatatcataggttttgctggcgcattaccttgacttcgcctgcgcgatgttatattttgagtcaaagatggttgctggcgcgattgtctttgatagctgctggcgcggctttctcaatctcctcaaactccttattttgcattctggctgttcaagcggcccaaatcgcaagcgtctctcatttccttgcgtgcgtacccgaaaatttattgaatttggcttgaattataagcaatgcttcttatagcggacactttgagaatataatgcttgcatggattaatgtatactgtttcaaataacaaacctagacacgcagttgcgttgatggttgtatcaatcacatacgggtgttgaactcgtgttaatcctcgatcgctatatgtttgcctcctacttccaataaaatagattacatacgcgacatgcctttgtgggttacctattggcctctgtcaaaaacaaatcgtttgatttgtagtttcctagcctaaaaagctgggcgcggtctggctctcgtcggatggaaaggtccatcaatggctggttgagtgtaagctccggtgttctggttgtcgcaattccagacgtcgtaataacctatattgcatctgactctaattcttgtggctctactgtatctagttcttgttctactaactctaataatgctactgattctatgttcgaaaaactctcctatgtcaatatagaaaatgtccttgatcctgatatccctcacgtcactgaaattcatcgcaagcggatttcagatgatatcctcgaatctcaaggctgtacttgctctgaacctattattactcctcgtgtgttttcattctcaactcttggc

SEQ ID NO: 14970 - DNA, 829 bp, synthetic construct
  source 1..829: mol_type = other DNA
tcttgacatcatgaaaatggtgttatattttgagcttaggggtctccagaaatggtgattcctatgttgctgcgaaagtggctctctcttttatctccctaaactccttaatctgcatcctggctgttcaagcggcccaaatcgcaagcgtctaacatttccttgcgtgcgcacccgaaaatttattgaacttggcttgaatcataagtaatgcttcttatagcggacactttgagaatataatgcttgtatggattaatgtatactgttttaaataacaaacctagacacgcagttgcgttgatggttgtatcaatcacatataagtgttgaactcgtgttaatcctcgatcgctatatgtttgccgcctacttccaataaaatagattacatgcgcgtcatgcctttgtgggttacctattggcctctgacaaaaacaagtcgtaagatttgtagcttcccggtgtaaaaagctgggcgcggtctggctctcgtagggtggaaaggtccaccaatggctggttgagtgtaagctccggtgtcctggttgtcgcaattccaggcgtcgtaataacctatattgcatctgactctaactcttgtggctctactgtatctagttcttgttctactaactctaataatactactggctctaatactgaaaaacttacatatgttaatatagataatatccttgatcctgatatccctcacgtcactgaagttcgccgaaaacgaatttcagatcatatcattgaatctcaaggatgtacttgctctgaacctactataactcctcatgcgttttcattttctactcttggc

SEQ ID NO: 14971 - DNA, 853 bp, synthetic construct
  source 1..853: mol_type = other DNA
tcttgacatcatgaaaatggtgttatattttgagcgtaagggtttccagaaatggtaattcttatgttgctgcgaaagtggccttctcttttatctcctcaaactccttattttgcattctggctgatcaagcggcccaaatcgcaagcgtctatcacttccttgcgtgcgtacccgaaaatttattgaacttggcttgaattataagcaatgcttcttatagcggacactttgagaatataatgcttgcatggattaatgtatactgtttccaataacaaacctagacacgcagttgcgttgatggttgtatcaatcacatacttgtgttgaactcgtgttaatcctcgatcgctatatgtttgcctcctacttccaataaaatagattacatacgcgacatgcctttgtggtttacctattggcctctgtcaaaaacaaattgtttgatttgtagtttcctggcctaaaaagctgggcgcggtctggctctcgtcggatggaaaggtccatcaatggctggttgagtgtaagctccggtgctctggttgtcgcaattccagacgtcgtaataacctatattgcatctgactctaattcttgtggctctactgtatctagttcttgttctactaactctaataatgttactggttctaattctactattgctactgattctatgttcgaaaaactctcctatgtcaatatagataatgtccttgatcctgatatccctcacgtcactgaaattcatcgcaagcggatttcagatgatatcctcgaatctcaaggctgtacttgctctgaacctattctcactcctcgtgtattttcgttttctactcttggc

SEQ ID NO: 14972 - DNA, 868 bp, synthetic construct
  source 1..868: mol_type = other DNA
gaatttcctaattctcatatcataggttttgctggcgcattaccttgacttcgcttgcgcgttgttatattttgagtcaaagatggttgctggcgcgattgtctttgatagctgctgacgcggctttctcaatctcctcaaactccttattttgcattctggctgttcaagcggcccaaatcgcaagcgtctttcacttccttgcgtgcgtacccgaaaatttattgaatttggcttgaattataagcaatgcttcttatagcggacactttgagaatataatgcttgcatggattaatgtatactgtttcaaataacaaacctagacacgcagttgcgttgatggttgtatcaatcacatacgggtgttgaactcgtgttaatcctcgatcgctatatgtttgcctcctacttccaataaaatagattacatacgcgacatgcctttgtgggttacctattggcctctgtcaaaaacaaatcgtttgatttgtagtttcctagcctaaaaagctgggcgcggtctggctctcgtcggatggaaaggtccatcaatggctggttgagtgtaagctccggtgttctggttgtcgcaattccagacgtcgtaataacctatattgcatctgactctaattcttgtggctctactgtatctagttcttgttctactaactctaataatgcaactgattctatgttcgaaaaactctcctatgtcaatatagaaaatgtccttgatcctgatatccctcacgtcactgaaattcatcgcaagcggatttcagatgatatcctcgaatctcaaggctgtacttgctctgaacctattattactcctcgtgtgttttcattctcaactcttggc

SEQ ID NO: 14973 - DNA, 829 bp, synthetic construct
  source 1..829: mol_type = other DNA
tcttgacatcatgagaatgatgttatattttgagcttaggggtctccagaaatggtgattcctatgttgctgcgaaagcggctttctctttatctcctcaaactccttactctgcatcctggctgttcaagcggcctaaatcgcaagcgctgttcatttccttgcgtgcgtacccgaaaaacttttgaatttggcttgaactataagtaatgtttcctgtagcggacactttgagaatacaatgcttgtatggattaatgtgtactgttttggataacagacctagacacgcagatgcgttgatggttgtaccaatcacatataagtgttaaactcgtgttgatcctcgatcgctactcgtttaccgcctacttccaataaaatcgtttacatacgcgacatgcctttgtgggttacctattggcctctgtcaaaaacaaatcgtatgatttgtagttccccagtgtaaaaagctgggcgcggtctggctcctgtagggtggaaaggtccaccaatggctggttgggcgtgatgcctcggtgtcctggttgtcgcaattccaggcgtcgtaataacctatattgcttctgttaccaactcttgttgttctactgtatctagttcttgttctactaactctaataatgctactgattctatgttcgaaaaactctactctgttgatattaatacagttcttgatcctgatattcctcacatcactgaaactcgtggcaaacgaatttcagatcgtatcattgaatctcaaggctgtacttgttctgaacctactataactcctcgtgtgttttcattctctactcttggc

SEQ ID NO: 14974 - DNA, 380 bp, synthetic construct
  source 1..380: mol_type = other DNA
ttatatcaccaaaataatttatattgtttttgtgaatagtaacttgaattaaataataagtggaatttattaaaataaataataaactaaatcaatttatcattttataataataattcaaagtaatatttcagtttaaacaagattttaagattaaattttcaagtctttgagaggtaataattatttcaccaaagtaatttattttatttttgtgaataataacttgaatttatcttaaagttagattttatgaataataataacatttatactatcgttcaattggaagaacttgatcgagatacaacacctttagtagaagaaaattttggtcaaggttatacgttatcaggtaatactagtagtactctttcaga

SEQ ID NO: 14975 - DNA, 831 bp, synthetic construct
  source 1..831: mol_type = other DNA
tcttgacatcatgaaaatggtgttatattttgagtgtaagggtctccagaaatggtgattcttatattgctgcgaaagtggctctctctttttatctcctcaaactccttaatctgcatcctggctgttcaagcggcctaaatcgcaagcgtcttttatcttccttgcgtgcgtacccgaaaatttattgaacttggcttgaatcataagtaatgcttcttatagcggacactttgagaatataatgcctatatggattaatgtatactgtttttaataacaaacctagacacgcagttgcgttgatggttgtatcaatcacatatgggtgttgaactcgtgttaatcctcgatcgctatatgtttgccgcctacttccaataaaatagattacatacgcgacatgcctttgtgggttacctattggcctctgtcaaaaacaaatcgtttgatttgtagtttcccggtgtaaaaagctgggcgcggtctggctctcgttgggtggaaaggtccaccaatggctggttgagtgtaagctccggtgtcctggttgtcgcaattccaggcgtcgtaataacctatattgcatctgactctaactcttgtggctctactgtatctagttcttgttctactaattctaataatactactggctctaatattgaaaaacttacatatgttaatatagataatatccttgatcctgatattcctcacatcactgaagttcgcaaaaaacgaatttcagatcgtatcattgaatctcaaggatgtacttgctctgaacctactataactcctcatgcgttttcattttctactcttggt

SEQ ID NO: 14976 - DNA, 861 bp, synthetic construct
  source 1..861: mol_type = other DNA
agaatttccaattctcatatcataggttttgctaacgcattaccttgacttcgctcacgcgttgttatattttgagtcaaagatggttgctaacgcgattatctttgaagctgctaacgcggctttctcaatctccccaaactccttactctgcatcctggctgttcaagcggcctaaatcgcaagcgtccgacatttccttgcgtgcgtacccgaaaatttattgaatttggcttgaattataagcaatgcttcttatagcggacactttgagaatataatgcttgtatggattaatgtgtactgttttaaataactaacctagacacgcagttgcgttgatggttgtaccaatcacttacaagtattgaactcgtgttgatcctcgatcgctatatgtttgcctcctgcttccaataaaatagattacatacgcgacatgcctttgtgggttacctattggcctctgtcaaaaacaaatcgtttgatttgtagcttcccggtgtaaaaagctgggcgcggtctggctcccgtcgggtggaaaggtccaccaatggctggttgagtgtaagctccggtgctctggttgtcgcaattccagacgtcgtaataacctatattgcatctgactctaatatttgtggccctactgtatctagttcttcttctgctcaatctgactctaaaaaacaaaaactacaaaaaactgcttacaaccttgaagaattctttgatcatgatcttcctgatcctatggtctcttatcgttctaaaatttcaacaagaattcttgaaaatcaaggttgcattcactctgattctcatcttactcctcgtgtgttttcattctctactgttggc

SEQ ID NO: 14977 - DNA, 872 bp, synthetic construct; identical to SEQ ID NO: 2506
  source 1..872: mol_type = other DNA

SEQ ID NO: 14978 - DNA, 834 bp, synthetic construct
  source 1..834: mol_type = other DNA
cttgacttcgctcacgcgttgttatattttgagtcaaagatggttgctaacgcgattgtctttgagctgctaacgtggctttctcattctccccaaactccttactctgcatcctggctgttcaagcggcccaaatcgcaagcgttctccattccttgcgtgcgtacccgaaaaacttttgaatttggcttgaatcataagtaatgtttcctgtagcggacactttgagaatataatgcttgtatggattaatgtgtactgttttggataacagacctagacacgcagatgcgttgatggttgtaccaatcacatataagtgttgaactcgtgttgatcctcgatcgctactcgtttaccgcctacttccaataaaatcgtttatatacgcgacatgcctttgtgggttacctattggcctctgtcaaagacaaatcgtttgatttgtggtttcccagtgtaaaaagctgggcgcggtctggctcctgtagggtggaaaggtccaccaatggctggttgggcgtatgcctcggtgtcctggttgtcgcaattccaggcgtcgtaataacctatattgcttctgttaccaactcttgttgttctaacgctgataataatactactggctctaactctactgactctgtaaattgttctaaacctaattatgaaaaactatactctgttgatataagtactgttcttgatcccaatattcctcacatcactgaaactcgtggcaaacgaatttcagattatattgttgaatctcaaggctgtacatgttctgaacctactattactcctcgtgtgttttcattctctactgttggc

SEQ ID NO: 14979 - DNA, 533 bp, synthetic construct
  source 1..533: mol_type = other DNA
tcctaattctcatatcataggttttgctggcgcattaccttgacttcgcctgcgcgttgttatattttgagtcaaagatggttgctggcgcgattgtctttgatagctgctggcgcggctttctcaatctccttaaactccttattttgcattctggctgttcaagcggcccaaatcgcaagcgtacttcacttccttgcgtgcgtacccgaaaatttattgaacttggcttgaattataagcagtgcttcttatagcggacactttgagaacataatgcttgcatggattaatgtatactgtttcaaataacaaacctagacacgcagttgcgttgatggttgtatcaatcacatacttgtgttgacctcgtgttaatcctcgatcgttatatgtttgcctcctgcttccaataaaataaattacatacgcgacatgcctttgtggtttacctattggcctctgtcaaaaacaaatcatttgatttgtagtttcctggcctaaaaagctgggcgcggtctggctctcgttgg

SEQ ID NO: 14980 - DNA, 560 bp, synthetic construct; identical to SEQ ID NO: 187
  source 1..560: mol_type = other DNA

SEQ ID NO: 14981 - DNA, 607 bp, synthetic construct; identical to SEQ ID NO: 2184
  source 1..607: mol_type = other DNA

SEQ ID NO: 14982 - DNA, 828 bp, synthetic construct
  source 1..828: mol_type = other DNA
cttgacgtcgtgaaaatggcgttatattttgagtgtaagggtctcctgaaaaggtgattcttatattgctgtgaaaacggctctctcttttatctcctcaaactccttattttgcattctggctgttcaagcggcccaaatcgcaagcgtacttcatttccttgcgtgcgtacccgaaaatttattgaatttggcttgaattataagcaatgcttcttatagcggacactttgagaatataatgcttgcatggattaatgtatactgtttcaaataacaaacctagacacgcagttgcgttgatggttgtatcaatcacatacgggtgttgaactcgtgttaatcctcgatcgctatatgtttgcctcctacttccaataaaatagattacatacgcgacatgcctttgtggtttacctattggcctctgtcaaaaacaaatcgtttgatttgtagtttcctggcctaaaaagctgggcgcggtctggctctcgtcggatggaaaggtccatcaatggctggttgagtgtaagctccggtgttctggttgtcgcaattccagacgtcgtaataacctatattgcatctgactctaattcttgtggctctactgtatctagttcttgttctactaactctaataatgctactgattctatgttcgaaaaactctcttacgtcaatatagataatatccttgatcctgatatccctcacgtcactgaaattcatcgcaagcggatttcagatgatatcctcgaatctcaaggatgtacttgctctgaacctattctcactcctcgtgtatttactttttcaacccttggt

SEQ ID NO: 14983 - DNA, 829 bp, synthetic construct
  source 1..829: mol_type = other DNA
cttgacgtcgtgaaaatggcgttatattttgagtgtaagggtttcctgaaaaggtgattcttatattgctgtgaaaacggctttctctttttatctcctcaaactccttattttgcatcctggctgttcaagcggcccaaatcgcaagcgtacttcatttccttgcgtgcgtacccgaaaatttattgaatttggcttgaattataagcaatgcttcttatagcggacactttgagaatataatgcttgcttggattaatgtatactgtttcaaataacaaacctagacacgcagttgcgttgatggttgtatcaatcacttacaggtgttgaactcgtgttaatcctcgatcgctatatgtttgcctcctacttccaataaaatagattacatacgcgacatgcctttgtggtttacctattggcctctgtcaaaaacaaatcgtttgatttgtagtttcctggcctaaaaagctgggcgcggtctggctctcgtcggatggaaaggtccatcaatggctggttgagtgtaagctccggtgttctggttgtcgcaattccagacgtcgtaataacctatattgcatctgactctaattcttgtggctctactgtatctagttcttgttctactaactctaataatgctactgattctatgttcgaaaaactctcctatgtcaatatagataatatccttgatcctgatatccctcacatcactgaaactcatcgcaagcggatttcagatgatatcctcgaatctcaaggatgttcttgctctgaacctattctcactcctcgtgtattctcattttcaactcttggc

SEQ ID NO: 14984 - DNA, 494 bp, synthetic construct
  source 1..494: mol_type = other DNA
actctcctcttcgtcgtcagcgtcagacgtgtttatgagacaggctctgcagatatcttatgttgctgcgaaagtggctctctttttatctcctcaaactccttattttgcatcctggctgttcaagcggcccaaatcgcaagcgtctatcatttccttgcgtgcgtacccgaaaatttattgaacttggcttgaattataagcaatgcttcttatagcggacactttgagaatataatgcttgcatggattaatgtatactgtttccaataacaaacctagacacgcagttgcgttgatggttgtatcaatcacatacttgtgttgaactcgtgttaatcctcgatcgctatatgtttgcctcctacttccaataaaatagattacatacgcgacatgcctttgtggtttacctattggcctctgtcaaaaacaaatcgtttgatttgtagtttcctggcctaaaaagctgggcgcggtctggctctcgtcgg

SEQ ID NO: 14985 - DNA, 987 bp, synthetic construct
  source 1..987: mol_type = other DNA
aatacgtacgtaggggttcgccctacgcacgcattgtgtcgattttataaggcctctaaagattccatgtgagctcaaattgtattttgggctgggattagcagtcgaacggactaattatcctagtagcgagcaaaaccagttcataatgtagttccttgcatggtattcgatagactgtcccgaattttgcgatgcaaaatttaaatataagttaattgttaagttagtaaagagactacactgggtagcgctagtgtagatcttgattagtaacaaaagcataaaatactcgtttctgaacggggccaataagaaagtatgctgaaagatactaaaacggtggtgtcattcacaagaatggaaagtctatggatgggctaagggtagttaccccaagacccttaggtcccccattgttttagtattgattaggtgtattagtaattttggtgtataaatagtaagtgtttagtcccttagaagggcaaggcacagacctatattgatgttagtaagtaacgttctagttccaataagtaagtgtgttaaaatcgggacccctcgatccggcaaacaccggcgcctactgctcgttgggtatagctataatgcgaaagcaaccgctctgtataggaagtgtgtgacagaagagtagttccttcttaactcgtgttaaccttagtgttactcctcgacggcggatgtcgaccggcgatcgggaatatgcttgggtgtgaattaagtaaacctataagcatgcacgagctagacgaccctagagttgtgagtacgcttaggaagtggcgaactctctttttctttcccttttcaaatttatggtgacaatttaagattttattcaaagtgatatcgaaaatttatttcccttaaaacttcgttttgaaaataataatttattacttcttatttaatattttcaaatatttaaatttatttaaataaaattaattaaaattatttaaa

SEQ ID NO: 14986 - DNA, 361 bp, synthetic construct
  source 1..361: mol_type = other DNA
agttaaagaaaatataaaataatccagctcacactttaataaatttgtttaaaatttattaaagtaacctgtattatttgcaaacgattgaagcttgtaatatcgttcttggaaaatcaagtgaaatatttgttaatcttcggacaaatagcctacgggtaagctagaagaaaaattaaaatatttgttattcttcggacaaatagcctacgggtaagtgagaagaaaattcgaattgtgtttaaatattctttcatttgaagtacagcataaagtgtatgaatactattacattatttgaagaacaaagagttgaagaagttcaatcacgcccacgctttcaaatagatttggaacaaat

SEQ ID NO: 14987 - DNA, 556 bp, synthetic construct
  source 1..556: mol_type = other DNA
tttataacgtgagtcgatagttttaccaaattaaattgacgaccatagtgaggtttgtagcgttttataacgtgagtcgatagttttaccaaattaaattgacgaccatagtgaggtttgtagcgttttataacgtgagtcgatagttttaccaaattaaattgacgaccatagtgaggtttgtagcgtatttatacgtgagtcaatttaacagattgagaaaagaaataaaacaagaggaaaagcaagaacgtggaatttttggaattttagtggatccagcacctaggttgaaaaactgatcagacggtgtgtgctaataatttcaagacgatttgatattttgcgttgcattataaaaatattaaatgagttttactcttgtggaattacaagattctcaaattgagtattcccaaggaggatttagaactaataacaatttgcctttatactccaactttgggagtggatatcaattgagtgaaactgattgtaatcaattgaagaattttttgaagcgagtttggaggtttttgtcaaagaagaacaaaat

SEQ ID NO: 14988 - DNA, 423 bp, synthetic construct; identical to SEQ ID NO: 1840
  source 1..423: mol_type = other DNA

SEQ ID NO: 14989 - DNA, 636 bp, synthetic construct; identical to SEQ ID NO: 2223
  source 1..636: mol_type = other DNA

SEQ ID NO: 14990 - DNA, 647 bp, synthetic construct
  source 1..647: mol_type = other DNA
gggctcggagatgtgtctgtctcttatacacacacacacacacacacacacacacacacacacacacacacacacacacacacacacacacctctcagcctcagatgtgtataagagacaggtacgtgaacgtattcagtttgggggttatgccaagtggaagcgtagtcattttcatcataaacgcgatatctggtcaattcaacttgctctggtcgtcgtcggggaagttgtcgaaagagataacgcacaattgcgcgttcctcaagctgttcctgtcgtcgtcggtgatctctttgtcgtctcacaaaggcatcaggtgaaaacaatggtccttcaatcttaggatgtcgttttgcattccgggtctgtcgcacttcacgccgataagtttgaagatttattcggtcgtgttctgcttttgtcgcctttttcctatcccactttgatctttattgcccgaacactggtttttcataacgtgaagaaatggatcatatccgcttaggtaacgtagcttaggcaccagttgtattttcacagtagacataagacagtaatagaagtcttacccggtaaggaaccaaactttcggaacagttatggcctagtttcgatcgcaattcagccatttattcagaattgct

SEQ ID NO: 14991 - DNA, 862 bp, synthetic construct; identical to SEQ ID NO: 2497
  source 1..862: mol_type = other DNA

SEQ ID NO: 14992 - DNA, 447 bp, synthetic construct; identical to SEQ ID NO: 1912
  source 1..447: mol_type = other DNA

SEQ ID NO: 14993 - DNA, 682 bp, synthetic construct; identical to SEQ ID NO: 2288
  source 1..682: mol_type = other DNA

SEQ ID NO: 14994 - DNA, 427 bp, synthetic construct; identical to SEQ ID NO: 1853
  source 1..427: mol_type = other DNA

SEQ ID NO: 14995 - DNA, 611 bp, synthetic construct
  source 1..611: mol_type = other DNA
gatatcatgtcctggctgttcaagcggcctaaatcgcaagcgtttttcatttccttgcgtgcgtacccgaaaatttattgaacttggcttgaatcataagcaatgcttcttatagcggacactttgagaatataacacttgtatggattaatgtgtgctgttttaaataacaaacctagacacgcagttgcgttgatggttgtaccaatcacatataagtgttgaactcgtgttgatcctcgatcgctatatgtttgcctcctgcttccaataaaatagattacatacgcgacatgcctttgtgggttacctattggcctctgtcaaaaacaaatcgtatgatttgtagcttcccggtgtaaaaagctgggcgcggtctggctctcgttgggtggaaaggctggttgagtgtaagctccggtgctctggttgtcgcaattccagacgtcgtaataacctatattgcatctgactctaattcttgtggctctactgtatctagttcttcttcaactcaatctattaatgtttctaatcccgttaaaaaacaaaaattacaaaaaactgcttacaatcttgaagaattctttgatcatgatcttcctgatcct

SEQ ID NO: 14996 - DNA, 322 bp, synthetic construct
  source 1..322: mol_type = other DNA
aatgcatccctctgtccgtgtctgcaatggacattaagttgaatagtagtgtgagcaattatatactcagtgatgaaagttttctctttggcttgctatgagagaatgctgtgagttgtttgcaaggagtcccccccgtgggacactctatttagaggtgtgcggaaccggcaaagaaagtatggatatatccactctcaatagcaatagagaggaggatgaataaataaaatttgctactttgtgttttaatattttagatttaattaatttttgtaataatagtaaaaaagaaaaagaaaaagaaaaagaaagtgaaaat

SEQ ID NO: 14997 - DNA, 909 bp, synthetic construct; identical to SEQ ID NO: 2531
  source 1..909: mol_type = other DNA

SEQ ID NO: 14998 - DNA, 665 bp, synthetic construct
  source 1..665: mol_type = other DNA
gcgtgcgcacccgaaaatttattgaacttggcttgaatcataagtaatgcttcttatagcggacactttgagaatataatgcttatatggattaatgtatactgtttttaataacaaacctagacacgcagttgcgttgatggttgtatcaatcacatataagtgttgaactcgtgttaatcctcgatcgctatatgtttgccgcctacttccaataaaatagattacatgcgcgtcatgcctttgtgggttacctattggcctctgacaaaaacaagtcgtaagatttgtagcttcccggtgcaaaaagctgggcgcggtctggctctcgtagggtggaaaggtccaccaatggctggttgagtgtaagctccggtgtcctggttgtcgcaattccaggcgtcgtaataacctatattgcatctgactctaactcctgtggctctactgtatctagtttttgttctactaactctaataatactactggctctaatattgaaaaacttacatatgttaatatagataatatccttgatcctgatatccctcacatcactgaagttcgccgaaaacgaatttcagatcgtatcattgaatctcaaggatgtacttgctctgaacctactataactcctcatgtgttttcattttctactcttggt

SEQ ID NO: 14999 - DNA, 357 bp, synthetic construct; identical to SEQ ID NO: 1663
  source 1..357: mol_type = other DNA

SEQ ID NO: 15000 - DNA, 1000 bp, synthetic construct; identical to SEQ ID NO: 263
  source 1..1000: mol_type = other DNA

SEQ ID NO: 15001 - DNA, 461 bp, synthetic construct; identical to SEQ ID NO: 1942
  source 1..461: mol_type = other DNA

SEQ ID NO: 15002 - DNA, 678 bp, synthetic construct; identical to SEQ ID NO: 2284
  source 1..678: mol_type = other DNA

SEQ ID NO: 15003 - DNA, 261 bp, synthetic construct
  source 1..261: mol_type = other DNA
tataatgcttgcatggattaatgtatactgtttccaataacaaacctagacacgcagttgcgttgatggttgtatcaatcacatacttgtgttgaactcgtgttaatcctcgatcgctatatgtttgcctcctacttccaataaaatagattacatacgcgacatgcctttgtggtttacctattggcctctgtcaaaaacaaatcgtttgatttgtagtttcctggcctaaaaagctgggcgcggtctggctctcgtcgg

SEQ ID NO: 15004 - DNA, 538 bp, synthetic construct
  source 1..538: mol_type = other DNA
ttttcctgttataatttcttgtcgtttttgctggtttagcgaaacctccacctgctgtatccatatagtgtcaaggggtttttcccgtattcattatatcgttatcgcatattgaaaagtttataaggctttctttgcaaaaagctgacgtccgagtcatttttccgttaagtgacgttccgcctggttgcccgagtctctacacaacagtgtcaaggggtttttcccgtattcattgattgtggacatagcccaacccgtttttgtgtgcgttatcacataacccaattttattatattatattttattatttttgcaagattaatttttcctgtttttgtcgtaagtcctatttaggagctcgtgcagtatttatactgatttgcacaaatctacgaactttactaggattctttattcccaagtgtttattaattattttaactttgttattctttttaggtttacttaataagaaaatttatttgtctactatatttgttatatacgcgtttgataccgttcaaactattaata

SEQ ID NO: 15005 - DNA, 489 bp, synthetic construct; identical to SEQ ID NO: 2004
  source 1..489: mol_type = other DNA

SEQ ID NO: 15006 - DNA, 910 bp, synthetic construct; identical to SEQ ID NO: 2532
  source 1..910: mol_type = other DNA

SEQ ID NO: 15007 - DNA, 329 bp, synthetic construct; identical to SEQ ID NO: 1579
  source 1..329: mol_type = other DNA

SEQ ID NO: 15008 - DNA, 365 bp, synthetic construct; identical to SEQ ID NO: 1683
  source 1..365: mol_type = other DNA

SEQ ID NO: 15009 - DNA, 496 bp, synthetic construct; identical to SEQ ID NO: 2021
  source 1..496: mol_type = other DNA

SEQ ID NO: 15010 - DNA, 328 bp, synthetic construct; identical to SEQ ID NO: 1575
  source 1..328: mol_type = other DNA

SEQ ID NO: 15011 - DNA, 357 bp, synthetic construct; identical to SEQ ID NO: 1664
  source 1..357: mol_type = other DNA

SEQ ID NO: 15012 - DNA, 418 bp, synthetic construct; identical to SEQ ID NO: 1827
  source 1..418: mol_type = other DNA

SEQ ID NO: 15013 - DNA, 1000 bp, synthetic construct; identical to SEQ ID NO: 2619
  source 1..1000: mol_type = other DNA

SEQ ID NO: 15014 - DNA, 441 bp, synthetic construct; identical to SEQ ID NO: 1896
  source 1..441: mol_type = other DNA

SEQ ID NO: 15015 - DNA, 1000 bp, synthetic construct; identical to SEQ ID NO: 2620
  source 1..1000: mol_type = other DNA

SEQ ID NO: 15016 - DNA, 250 bp, synthetic construct
  source 1..250: mol_type = other DNA
cacacctaataaatcctctattgaggaacttgacgactttttacagcaaaatctctccagaagctctcaaaatagacttgaaggacagtctgaggacgcatctccatgcatttctacagggaattcaggtagggatgatttgcttaacccaaaacccccttcaccccaaaccaaccctttcgcaccttttcctctcccacaggagaggaattctcctccatcatcatcaggaggagattcatcatcatac

SEQ ID NO: 15017 - DNA, 789 bp, synthetic construct; identical to SEQ ID NO: 2421
  source 1..789: mol_type = other DNA

SEQ ID NO: 15018 - DNA, 621 bp, synthetic construct; identical to SEQ ID NO: 2200
  source 1..621: mol_type = other DNA

SEQ ID NO: 15019 - DNA, 631 bp, synthetic construct
  source 1..631: mol_type = other DNA
agtctaaaactaaaactgtaaatatgtaaatacttttaaaatacgcccgtaatggcgttaaactactctggaaacattatattataatgaatccaagccccaaaggcaaatttaatgtgtgatcttgctttcttataggctcatcattgtgagttagtaatgctgcattgaataatctcaggactatttagtcactacgcccaaactgagagttggcaatcccaacgaacaaaagttagatgaaccctgatttagtgttaattgaagctaaattaggttaattaaaccaattgctaacattaactcaaaccaaccagtcactagtgttactagtggaatcctcaataatggagattcaacccccacccccgtccaaggtactcccgaagacgctcacactgaagcagctgtcaatcaagtttttcagcacgctaccaccaaattcatcgatgataatgataccgttaacagagatgaatccacagtcgaacatatcaactctagttggttatcactcaacgacactcaatccaccgaacagactattattgattttctttcgaaacctattatactcacttcaggtactttttccactactgatacttatactttttttaactactttact

SEQ ID NO: 15020 - DNA, 625 bp, synthetic construct; identical to SEQ ID NO: 2208
  source 1..625: mol_type = other DNA

SEQ ID NO: 15021 - DNA, 505 bp, synthetic construct; identical to SEQ ID NO: 2034
  source 1..505: mol_type = other DNA

SEQ ID NO: 15022 - DNA, 736 bp, synthetic construct; identical to SEQ ID NO: 2357
  source 1..736: mol_type = other DNA

SEQ ID NO: 15023 - DNA, 913 bp, synthetic construct; identical to SEQ ID NO: 2534
  source 1..913: mol_type = other DNA

SEQ ID NO: 15024 - DNA, 737 bp, synthetic construct; identical to SEQ ID NO: 2359
  source 1..737: mol_type = other DNA

SEQ ID NO: 15025 - DNA, 426 bp, synthetic construct; identical to SEQ ID NO: 1850
  source 1..426: mol_type = other DNA

SEQ ID NO: 15026 - DNA, 684 bp, synthetic construct; identical to SEQ ID NO: 2290
  source 1..684: mol_type = other DNA

SEQ ID NO: 15027 - DNA, 365 bp, synthetic construct; identical to SEQ ID NO: 1684
  source 1..365: mol_type = other DNA

SEQ ID NO: 15028 - DNA, 776 bp, synthetic construct; identical to SEQ ID NO: 2401
  source 1..776: mol_type = other DNA

SEQ ID NO: 15029 - DNA, 359 bp, synthetic construct; identical to SEQ ID NO: 1671
  source 1..359: mol_type = other DNA

SEQ ID NO: 15030 - DNA, 846 bp, synthetic construct; identical to SEQ ID NO: 2475
  source 1..846: mol_type = other DNA

SEQ ID NO: 15031 - DNA, 351 bp, synthetic construct; identical to SEQ ID NO: 1650
  source 1..351: mol_type = other DNA

SEQ ID NO: 15032 - DNA, 352 bp, synthetic construct; identical to SEQ ID NO: 1652
  source 1..352: mol_type = other DNA

SEQ ID NO: 15033 - DNA, 307 bp, synthetic construct; identical to SEQ ID NO: 1504
  source 1..307: mol_type = other DNA

SEQ ID NO: 15034 - DNA, 282 bp, synthetic construct
  source 1..282: mol_type = other DNA
tctaacccctgtggattttccaatgagaatatgaggcccttgataagaatgttacataatatttttcgatttaatcgatgtgaccttgtatacattctttgataggagaccaggtttgacgttctttaatacgatgctaataagtctaaattttatttagatttaggaagccagattattgaattgttaaaacttggggctgaaaaaccctctcttccttggtggctacgcacatagcctgggaccttatccgaattagtgccatacgaaacagatacaact

SEQ ID NO: 15035 - DNA, 284 bp, synthetic construct
  source 1..284: mol_type = other DNA
aacccaaacccaacaaacaaaccaacccaaacacaacccaacaaaaccacccgacgccctgataacttgttatcttgaacgaaccagaatattatcatttgagccacgcgtaaagtgatcgtattctgcgatctgtatcatccaataggatcttacatgtcaacattttcgatagttgaattcgatagagaagaagatactgtgtaccaatcaaccacaggacccctcgtctttaccggaaccggatatcgattggaagctaggagagacgtattgcggcgagt

SEQ ID NO: 15036 - DNA, 664 bp, synthetic construct; identical to SEQ ID NO: 2263
  source 1..664: mol_type = other DNA

SEQ ID NO: 15037 - DNA, 297 bp, synthetic construct
  source 1..297: mol_type = other DNA
atagattgcatctatatatgattcaagtgctcagcaagattagtagttgtcgcagtgtttaattgtaattaaactaggagaaatccgaagcccagagtacggacactactatcaagtttcagattgtatctgttatttgctaagcaaccataattacttaaataataatatactattcttatatattatattcaatacaatagttttattctaatacttatatataataatttactttatttgaagtttgttaggatttcggttatattataatctaaatagctaagctagaataaa

SEQ ID NO: 15038 - DNA, 614 bp, synthetic construct; identical to SEQ ID NO: 2193
  source 1..614: mol_type = other DNA

SEQ ID NO: 15039 - DNA, 681 bp, synthetic construct; identical to SEQ ID NO: 2286
  source 1..681: mol_type = other DNA

SEQ ID NO: 15040 - DNA, 645 bp, synthetic construct; identical to SEQ ID NO: 2238
  source 1..645: mol_type = other DNA

SEQ ID NO: 15041 - DNA, 815 bp, synthetic construct; identical to SEQ ID NO: 2449
  source 1..815: mol_type = other DNA

SEQ ID NO: 15042 - DNA, 311 bp, synthetic construct; identical to SEQ ID NO: 1519
  source 1..311: mol_type = other DNA

SEQ ID NO: 15043 - DNA, 750 bp, synthetic construct; identical to SEQ ID NO: 2374
  source 1..750: mol_type = other DNA

SEQ ID NO: 15044 - DNA, 663 bp, synthetic construct; identical to SEQ ID NO: 2260
  source 1..663: mol_type = other DNA

SEQ ID NO: 15045 - DNA, 368 bp, synthetic construct; identical to SEQ ID NO: 1695
  source 1..368: mol_type = other DNA

SEQ ID NO: 15046 - DNA, 253 bp, synthetic construct
  source 1..253: mol_type = other DNA
cctctgtgactgtagttactctactaggtgttttatgctttatactactcctgcctcgacttgtcgtataagtcaggagtccccccattaagtttatttttggcccttggttaggcgtatatggtcacgctatgagaattatttgctgtaatgccgagaacttattttccgttcgttccgtcacgatgttcttgtagctataccggatctgagtcttttgacgaagctaacctatgggccgccttatgaaatc

SEQ ID NO: 15047 - DNA, 342 bp, synthetic construct; identical to SEQ ID NO: 1625
  source 1..342: mol_type = other DNA

SEQ ID NO: 15048 - DNA, 745 bp, synthetic construct; identical to SEQ ID NO: 2366
  source 1..745: mol_type = other DNA

SEQ ID NO: 15049 - DNA, 378 bp, synthetic construct; identical to SEQ ID NO: 1724
  source 1..378: mol_type = other DNA

SEQ ID NO: 15050 - DNA, 510 bp, synthetic construct; identical to SEQ ID NO: 2047
  source 1..510: mol_type = other DNA

SEQ ID NO: 15051 - DNA, 297 bp, synthetic construct
  source 1..297: mol_type = other DNA
tcgcatttaaacgactaaagggagtaaaagtatgtcaaatagctcatctggggtagcaacccgttagacctctacataatatgccctttagaagtttcttattgtttaggaatttttatgaagaacgcccaactcacagtggcgcctattctaagtttcgttagtaaacttgcctacagcaccccgtctataagactcggcttagttccgacgatggacaaaaatgttttatcttatcatatggggattgagtagctacttcctaacggaatggcgaacatttctccgacctaaatc

SEQ ID NO: 15052 - DNA, 563 bp, synthetic construct; identical to SEQ ID NO: 2129
  source 1..563: mol_type = other DNA

SEQ ID NO: 15053 - DNA, 764 bp, synthetic construct
  source 1..764: mol_type = other DNA
tgttctcttaattaatagctatgtatgcttatactacaaaacagtaacgtactactttacaggcctttaatgatgcgtattaacacgtcgctatcatttcatataaatatgtgttacacaggtttagtgtaaataaactttttatagtgtgttcagaattttcactactatatcatatcaaaattctaccagttgattggacgtaatttattttaacaatcctatttttagttttagttttaactatatattttattttaacatcttatatctcgtatataagtgtcgacacagttattctatggctgcgttttctttcagtttaagcatgtaataaagaagtgacagtgatttacatgatactttggaattcgttcccctctattttaacctagtcaaaacacgttttgcaactctgccgtgtaagcagatgccaattttaatttaagagttttattttattaaccatactcaaattttatattttaatgtcggttcgtgtgctttagcagacctacttactaacctctatgatcttgcatatatttctagcgtctatgaccacttaattgtgagcgatatatgtatttttgattatgttagtctttaaactataatagctgttgggctctgattttaattgagtatcccctaatgttctgaggattctttaacgtgaaggccgttcgccaaaagcgcgctatatgtggtagaaccaacttagtgtaaaataacggaggtccacatgggagaacaaacaatca

SEQ ID NO: 15054 - DNA, 456 bp, synthetic construct; identical to SEQ ID NO: 1931
  source 1..456: mol_type = other DNA

SEQ ID NO: 15055 - DNA, 588 bp, synthetic construct; identical to SEQ ID NO: 2157
  source 1..588: mol_type = other DNA

SEQ ID NO: 15056 - DNA, 512 bp, synthetic construct; identical to SEQ ID NO: 2053
  source 1..512: mol_type = other DNA

SEQ ID NO: 15057 - DNA, 673 bp, synthetic construct
  source 1..673: mol_type = other DNA
tacgggaattcccgtacgcagtgtaatttagattaattggcagtttttgccctagtagaccatagacgtcattttgggcatattatgcccattgtgacctctacgtctattagttgatttaacacaaccaatgttttattctaagtattgatcgtgctaaactagcgatccccattttctttgagttgagttttatttgactcgttactctattttatatagggtattttgctagcctgccagctagctatttgttactattgtaactatttgattcttcataatgaagatgtagaactatacctggttactgagttcaggcgatttaatgttctaattttctatagtctgtagtgaatacagcacactaatagaagttccgtcaatcttactattagctctatgaatatatttcatggatatcagattatttaaagttttaacaaataacgtacgaattctcggtaatgtatgtgtgtgtaggccggtaccgcatggataaatccgaaaacctgatcacatatgcgttattgcttgtagaacgctatatgaagcattgtgaagaatagggttaagcgcgaaccccgttcatcaaatttcaagaacaccactcctgtatgaaaaataagtttttagtattataatatcgttttagtggtgaaaaattgacaac

SEQ ID NO: 15058 - DNA, 475 bp, synthetic construct
  source 1..475: mol_type = other DNA
gcagggtcgttctgtatcattttgtatattagtagagtcacttcggagactataaatccgacccagtttcaaatctgatggttagcaaaattgatgtatgtatatggataccgcgtgtatatttatatttgtgtatttttatattttattcgtaggctttgcatatgttaacggtccctaaaggggaatcgagagatgggttctccgtgcccactgtaaatacacctagttatatgagttaatcgcctctataacttgtacataatagattggtaataattgtaaatgtaaattaaatatttttgaaaatgccagtgttggtgttggcgctggtaaccagcctagggttggtaaggacaacacagggtgcagtgaagacaattcgattgatagtgatacgagtgtgaaatctagtatatttcccaagcgtgtgcattttgatgacaatcgaaagactcatcgcaggggaattttg

SEQ ID NO: 15059 - DNA, 507 bp, synthetic construct; identical to SEQ ID NO: 2039
  source 1..507: mol_type = other DNA

SEQ ID NO: 15060 - DNA, 514 bp, synthetic construct
  source 1..514: mol_type = other DNA
ttgttatattatgggttcttggtcttgctctgttattatcatgtatccttactggtataataggttattattttttaagattagtacatagaacatataattatacatgcagaaaaatacaaaaacatacatttagcttaggtgatgaggagatggcgcctatttataagccaactactcatagtgttcttgttccagtgcccttgtcctgacccttagtaccttacccagcatgaacgatctaagactaaccgagtggggtgcgagattaaaacttggtaacaagttctctcactatgaagccggggtctgatttagtagtgtgacaagtgggaacctggtgttcagcgtgctggagtccataacctctcccaatgtaaattctgcgtgaggcattggcaaagttgtgggtggctctggtggtccagtccggagggctagaagtcttcgagtccggagggtatcgtcaccgcccaatcttgtgacgtctttcttttaaatttactctacaatc

SEQ ID NO: 15061 - DNA, 292 bp, synthetic construct
  source 1..292: mol_type = other DNA
acaacaacaacaacaacaacaacaacaacaacaacgatacaaccccaatctttggataaatatttcaaaaagaaataccaggggggagaacccacctggagtgggtaggagtgacatacataggagtgatgtgccccctacaattaggtctttgacctatcaatctccccctatcatcccatttatccaaaggaacaatgacaacccggaatctgccgatcaaaacaatatattagaacaagcattatctgcgatagctaaagcaattgagtcttttttaacgaaagataag

SEQ ID NO: 15062 - DNA, 614 bp, synthetic construct
  source 1..614: mol_type = other DNA
cgtatgtaacccatgcgcatgttttcatatagatatctttaaaacaatttgtagagaccctgcatattcttctttagaatcaggtatgagaccctgagtatttgctgttaagttttatttcgacgactattccgagaaatagggactctgtagccctggtattttgttctataactgtctggtttgtaatgaccttataaacatttcagttgttcataacatttgctataatttcagtataatatttctgtatgattataattttgcaaaaccccttttgttaatcacattttattcaaagcttcttaaatgaagttgcattagcattttatgcttttgctgtcagtctgatttattgttatatttacttattaatggtggcgagaattccactcgtcttgaaaacctttattttatatagaggtctgttttgttcacgctttaggtttcctatcgagcgactatgtgatgaaaaatgtggtagaaccaagtgtttcatcttatgcatacacctcaatgataggttgttaaaatctatatcacgctcgtgtcgtgaatgttgggtactctgatttaattgcagtaactttcctaaccgagttgtcatatcaacc

SEQ ID NO: 15063 - DNA, 375 bp, synthetic construct; identical to SEQ ID NO: 1718
  source 1..375: mol_type = other DNA

SEQ ID NO: 15064 - DNA, 1000 bp, synthetic construct; identical to SEQ ID NO: 2621
  source 1..1000: mol_type = other DNA

SEQ ID NO: 15065 - DNA, 425 bp, synthetic construct
  source 1..425: mol_type = other DNA
gtaaggtcagtcactttggagacgttaaatccaacccagtttcaatactgatggttagcaaaattgatatatgtatatggataccgtgtttgttttaatctttatatgttttgtagaaaattcataggctttgcatatattaacggtccctaccggggagttttgttcgagttcaccgtgctcacttgtaaatatgtcgtaccatatgagtcaatccactctatggtctgtaaataaataaatggattggtaatatttttcaatataaattatgccgggatgtacaagccaacataagttttggtcccggggaagcaaacgtacacaataaatctgtgtcggagacacagtcagcagtgactgaaaattctttattgaaaatagagaaatttaaaccacaatctggtccggaaggtactactgtt

SEQ ID NO: 15066 - DNA, 273 bp, synthetic construct
  source 1..273: mol_type = other DNA
agcaacaacagagaacgacaaaaccccaatctttggataaatatttcgaaaagaaataccaggggagagaacccacctggagtgggtaggagcgacatacacaggagtgatgtgccccctacaattaggtcttcgacctatcaatctctccctatcattccatttatccaaaggaacaatgacaacccggaacctgctgatcaaggcaatatcttagaacaagcactatctgcgatagctaaagcaattgaatcttttttaacaaaagataag

SEQ ID NO: 15067 - DNA, 530 bp, synthetic construct; identical to SEQ ID NO: 2085
  source 1..530: mol_type = other DNA

SEQ ID NO: 15068 - DNA, 622 bp, synthetic construct
  source 1..622: mol_type = other DNA
taaattattttaggttatcaaattattatttaatcaagaactcatttaatcaagaacattaaatcattataatcaagaatctcttcaatatcgttcactcatattctaatttagagtttattcaactgtctggaataagcttattataaagattgacaccctttgtaatattgtcttatctttggcaggaactctatcttagtcttatgattcaataacttgtttaacttagattttatagtctattttatttaattttgctttaacttcaaataatagtttacgcgcgtgacatataccataggaaagatatctattgatatcatggtgtccatgtgttaatcaaacctcagttggtctatttaaaatttgaattttcgcaaaattttgaatctcaaagcaagttgaatcaaagcctggaatggaataaagaattctcaaaacctggttttatcatatttataacctataaaataaatatggctgtgtgataacagtaaaatctaatctatgtactcacaagtatacatataaatatttgtggctagatcatcaactagtataataaatgttggatttttctatattttccaaaaattaaatatagagagcactaattaaa

SEQ ID NO: 15069 - DNA, 308 bp, synthetic construct; identical to SEQ ID NO: 1508
  source 1..308: mol_type = other DNA

SEQ ID NO: 15070 - DNA, 539 bp, synthetic construct; identical to SEQ ID NO: 2101
  source 1..539: mol_type = other DNA

SEQ ID NO: 15071 - DNA, 430 bp, synthetic construct; identical to SEQ ID NO: 1865
  source 1..430: mol_type = other DNA

SEQ ID NO: 15072 - DNA, 875 bp, synthetic construct; identical to SEQ ID NO: 2508
  source 1..875: mol_type = other DNA

SEQ ID NO: 15073 - DNA, 395 bp, synthetic construct; identical to SEQ ID NO: 1766
  source 1..395: mol_type = other DNA

SEQ ID NO: 15074 - DNA, 280 bp, synthetic construct
  source 1..280: mol_type = other DNA
tgaccataccaaattagcaaaatttatccacctattagtcatattatcaactttagtaatagtatcacttgaagtaaaatctaaccaatcaatagaatcaattactcgtatttctaaatgtagggaacgacgtcgtgatttgctattattacttaggaatcaaattgaacatttgaaattttttagaggcgctacatcgctttataattttacaaaatttaatagtaattatagattatatgctcgtttatataataataaatttaataatgtatgccag

SEQ ID NO: 15075 - DNA, 315 bp, synthetic construct; identical to SEQ ID NO: 1533
  source 1..315: mol_type = other DNA

SEQ ID NO: 15076 - DNA, 266 bp, synthetic construct
  source 1..266: mol_type = other DNA
ccccttcaaacgtgtatctgttgcctagttgaggaacttaatgttaccaatgatactagcagctacacaagtttgtttatcagcatttagtttcgtacaaatagcttatctggggtagcaacccgttagtatgcaacttgtctatagcgcctgtctctagtttggagctgatcttgatccctaagcgggagatgatagaagagatggatgaaatttcaatttttcttttgcttccaccttaagcggtgcatcttcaatgtaaccac

SEQ ID NO: 15077 - DNA, 513 bp, synthetic construct; identical to SEQ ID NO: 2057
  source 1..513: mol_type = other DNA

SEQ ID NO: 15078 - DNA, 586 bp, synthetic construct
  source 1..586: mol_type = other DNA
aaccttactaataccgtcattaaaactcaaagtagatttaatgaagctgttattggatgtatatttctattaattgatcagattttatctgttccgtacatggtttcaaaatttaaataaaataaaataaaataaaataaaacaatataaaattaagaaaatacaaaatattaccactttaataaaccactagaatgttttaaacatttctataccaccttatatttattatagagggctctatctacgagcacctaacgtttacagaagacgtaacttttgctttagcactctaaccttgtgaatggagtattggcggagggacctatgaggaagtacctactaacctcctttgttatcaaattttctgagtcgattttaatcgatgtttcatagttgtggcacactcccactgaatttagatactcaaaacccaatatgtggcattcctacgttgttagagagttccgcgcaggcggctattgcgtttatttaataatcaaggtttaataatgtaagtagccattcttacgtgaaatactaatcaccttttattatctaaaaccctgttgtttagctatatatc

SEQ ID NO: 15079 - DNA, 630 bp, synthetic construct
  source 1..630: mol_type = other DNA
agtccaaaactaaaactgtaaatatgtaaatacttttaaaatacgcccgtaatggcgttaaactattttggaaacattatatttaatggatccatgccccaaaggcaaatttgatgtgtgatcttgctcccttataggctcatcattataatctagtagtgctgcatcaaataatctcaggactttttagtcactacgcccaaactgagagttggcaatcccaatgaacaaaagttagatgaaccctgatttagtgttaattgaaactaaattgggttaaataaaccaattgctaacactaactcaaatcaaactaccactagtgttactagtggaatcctcaatattggagattcaacccccactcccgtccaaggtacacccgaggacgctcacactgaagctgctgttaatcaagtttttcagcatgctactaccaaattcatcgatgataatgataccgttaacagagatgaatccaccgtcgaacatatcaactctagttggttatcactcaacgacacacaatccactgagcaaactattattgattttctttcgaaacctatcattcttaattcaggtactttttccatttctgatacttattcttttcttaactactatact

SEQ ID NO: 15080 - DNA, 592 bp, synthetic construct; identical to SEQ ID NO: 2160
  source 1..592: mol_type = other DNA

SEQ ID NO: 15081 - DNA, 660 bp, synthetic construct; identical to SEQ ID NO: 2256
  source 1..660: mol_type = other DNA

SEQ ID NO: 15082 - DNA, 314 bp, synthetic construct; identical to SEQ ID NO: 1529
  source 1..314: mol_type = other DNA

SEQ ID NO: 15083 - DNA, 648 bp, synthetic construct; identical to SEQ ID NO: 2241
  source 1..648: mol_type = other DNA

SEQ ID NO: 15084 - DNA, 571 bp, synthetic construct; identical to SEQ ID NO: 2136
  source 1..571: mol_type = other DNA

SEQ ID NO: 15085 - DNA, 356 bp, synthetic construct; identical to SEQ ID NO: 1657
  source 1..356: mol_type = other DNA

SEQ ID NO: 15086 - DNA, 431 bp, synthetic construct; identical to SEQ ID NO: 1870
  source 1..431: mol_type = other DNA

SEQ ID NO: 15087 - DNA, 356 bp, synthetic construct; identical to SEQ ID NO: 1658
  source 1..356: mol_type = other DNA

SEQ ID NO: 15088 - DNA, 1000 bp, synthetic construct; identical to SEQ ID NO: 264
  source 1..1000: mol_type = other DNA

SEQ ID NO: 15089 - DNA, 653 bp, synthetic construct; identical to SEQ ID NO: 2247
  source 1..653: mol_type = other DNA

SEQ ID NO: 15090 - DNA, 528 bp, synthetic construct; identical to SEQ ID NO: 2083
  source 1..528: mol_type = other DNA

SEQ ID NO: 15091 - DNA, 334 bp, synthetic construct; identical to SEQ ID NO: 1597
  source 1..334: mol_type = other DNA

SEQ ID NO: 15092 - DNA, 786 bp, synthetic construct; identical to SEQ ID NO: 2419
  source 1..786: mol_type = other DNA

SEQ ID NO: 15093 - DNA, 669 bp, synthetic construct; identical to SEQ ID NO: 2270
  source 1..669: mol_type = other DNA

SEQ ID NO: 15094 - DNA, 779 bp, synthetic construct; identical to SEQ ID NO: 2406
  source 1..779: mol_type = other DNA

SEQ ID NO: 15095 - DNA, 731 bp, synthetic construct; identical to SEQ ID NO: 2347
  source 1..731: mol_type = other DNA

SEQ ID NO: 15096 - DNA, 469 bp, synthetic construct; identical to SEQ ID NO: 1961
  source 1..469: mol_type = other DNA

SEQ ID NO: 15097 - DNA, 308 bp, synthetic construct; identical to SEQ ID NO: 1509
  source 1..308: mol_type = other DNA

SEQ ID NO: 15098 - DNA, 732 bp, synthetic construct; identical to SEQ ID NO: 2350
  source 1..732: mol_type = other DNA

SEQ ID NO: 15099 - DNA, 595 bp, synthetic construct; identical to SEQ ID NO: 194
  source 1..595: mol_type = other DNA

SEQ ID NO: 15100 - DNA, 371 bp, synthetic construct; identical to SEQ ID NO: 1705
  source 1..371: mol_type = other DNA

SEQ ID NO: 15101 - DNA, 455 bp, synthetic construct; identical to SEQ ID NO: 1927
  source 1..455: mol_type = other DNA

SEQ ID NO: 15102 - DNA, 704 bp, synthetic construct; identical to SEQ ID NO: 2310
  source 1..704: mol_type = other DNA

SEQ ID NO: 15103 - DNA, 336 bp, synthetic construct; identical to SEQ ID NO: 1610
  source 1..336: mol_type = other DNA

SEQ ID NO: 15104 - DNA, 657 bp, synthetic construct; identical to SEQ ID NO: 2253
  source 1..657: mol_type = other DNA

SEQ ID NO: 15105 - DNA, 571 bp, synthetic construct; identical to SEQ ID NO: 2137
  source 1..571: mol_type = other DNA

SEQ ID NO: 15106 - DNA, 652 bp, synthetic construct; identical to SEQ ID NO: 2245
  source 1..652: mol_type = other DNA

SEQ ID NO: 15107 - DNA, 826 bp, synthetic construct; identical to SEQ ID NO: 2459
  source 1..826: mol_type = other DNA

SEQ ID NO: 15108 - DNA, 563 bp, synthetic construct; identical to SEQ ID NO: 2130
  source 1..563: mol_type = other DNA

SEQ ID NO: 15109 - DNA, 430 bp, synthetic construct; identical to SEQ ID NO: 1866
  source 1..430: mol_type = other DNA

SEQ ID NO: 15110 - DNA, 402 bp, synthetic construct; identical to SEQ ID NO: 1787
  source 1..402: mol_type = other DNA

SEQ ID NO: 15111 - DNA, 448 bp, synthetic construct; identical to SEQ ID NO: 1915
  source 1..448: mol_type = other DNA

SEQ ID NO: 15112 - DNA, 285 bp, synthetic construct
  source 1..285: mol_type = other DNA
acgtcgcaccttagggtgctggggctcatatacgcgtgtagaccaggcaaaaaagtcacgctaataatggtttgcatgagcggaagcccaaaaaacagaccttgtttttcaacattacggcccagggtggtctataaaaacccagggcaccgtgactcgggccaccacgtttgactgtacgtgggaactaggtctgccaacctagcgccttaaattgatacagttgctcaacaaaatgcaaattccagttcttcggtactgaaaaccgaagcttatggcgatgcc

SEQ ID NO: 15113 - DNA, 773 bp, synthetic construct; identical to SEQ ID NO: 2398
  source 1..773: mol_type = other DNA

SEQ ID NO: 15114 - DNA, 553 bp, synthetic construct
  source 1..553: mol_type = other DNA
gccgtttagggctgtttccacggctgaaggtgaaagaagtcgttacccgcctgcctacttcgggccgggctagtaacatggatactacctcaagcgtgtgatccgggtgaggtctcccccctccccagaaacttgtgatgagggtcaccgttccgcatacggcgacgtatgggtgtccctgcgttggcacaaggcctgctcctgaaagggacaggcacgcctgagatgttgaagtgtgaagacccggactgagctaggtatggagtcctccgccccctgaatgcggctaaccttaaccccggagctgttgcgggcaaaccagctcgtaggcagtcgtaatgcgtaagtctgggatgggaccgactactttggggtagcgtgtttcctttttattttataatggcgtgtatggtgacaacaatagggtattgttgttatcatacattcagcgccctcctagctcttttacagtggttcataaccgctgtctcattgatccccagtggaatttcttggatttttctcggcttgtttttaggaggatttgctcaca

SEQ ID NO: 15115 - DNA, 692 bp, synthetic construct; identical to SEQ ID NO: 2300
  source 1..692: mol_type = other DNA

SEQ ID NO: 15116 - DNA, 358 bp, synthetic construct; identical to SEQ ID NO: 1669
  source 1..358: mol_type = other DNA

SEQ ID NO: 15117 - DNA, 700 bp, synthetic construct
  source 1..700: mol_type = other DNA
ttttccccctctcttaaccacacgctttgctcagcgtaacttctccgggttacgtggagaccaaaaggctacggagactcgggctacggccctggagcacctaggtgctcctaaagacgttagaagttgtacaaactcgcccaatagggccccccaaccaggggggtagcgggcaagcacttctgtttccccggtatgatctcataggctgtacccacggctgaaagagagattatcgttacccgcctcactacttcgagaagcccagtaatggttcatgaagttgatctcgttgacccggtgtttcccccacaccagaaacctgtgatgggggtggtcatcccggtcatggcgacatgacggacctccccgcgccggcacagggcctcttcggaggacgagtgacatggattcaaccgtgaagagcctattgagctagtgttgattcctccgcccccgtgaatgcggctaatcccaactccggagcaggcgggcccaaaccagggtctggcctgtcgtaacgcgaaagtctggagcggaaccgactactttcgggaaggcgtgtttccttttgttccttttatcaagttttatggtgacaactcctggtagacgttttattgcgtttattgagagatttccaacaattgaacagactagaaccacttgttttatcaaaccctcacagaataagataaca

SEQ ID NO: 15118 - DNA, 686 bp, synthetic construct; identical to SEQ ID NO: 2293
  source 1..686: mol_type = other DNA

SEQ ID NO: 15119 - DNA, 582 bp, synthetic construct; identical to SEQ ID NO: 2149
  source 1..582: mol_type = other DNA

SEQ ID NO: 15120 - DNA, 466 bp, synthetic construct; identical to SEQ ID NO: 1953
  source 1..466: mol_type = other DNA

SEQ ID NO: 15121 - DNA, 555 bp, synthetic construct; identical to SEQ ID NO: 2119
  source 1..555: mol_type = other DNA

SEQ ID NO: 15122 - DNA, 665 bp, synthetic construct; identical to SEQ ID NO: 2264
  source 1..665: mol_type = other DNA

SEQ ID NO: 15123 - DNA, 254 bp, synthetic construct
  source 1..254: mol_type = other DNA
ttgtaaaaaccaaacaaaaccatgtgatcgggactattcgtagatgatggaatatcgagtagtgactgctgggtgcacttgttggcaacaatgagtgcggtgagagaattatttagttccattgcagactgtttgctcaccttaaaataataggataatctgcccatccgtcgatagctgacgttgagtgacgagctattaagacgttaacatattcacttgccgaaacaaacgaaacaaattcaaattttgcg

SEQ ID NO: 15124 - DNA, 313 bp, synthetic construct; identical to SEQ ID NO: 1527
  source 1..313: mol_type = other DNA

SEQ ID NO: 15125 - DNA, 369 bp, synthetic construct
  source 1..369: mol_type = other DNA
tgcggtttgctcgtttatgtttatcattttaaagtattaaacaacgtgatggcttcatcagcaaaaactaacgaacaagctttagggactacggtagcagcacatggcactagcggccaagtgttagccgaaccaagtccaattgatcaacaaattcatgataaccctggtacgattaaggcgtcgactgcaattgaaactcttttcaaccttttgttcaaagattacattttcaaaggattgtataccatctctactgatatggctcccggacaaatcatttggaaattacctattcacccagcagtttgcaatcaatataatgatcacgtaagaaaaatgtttaatgtttggacaggaggaatgaaa

SEQ ID NO: 15126 - DNA, 877 bp, synthetic construct; identical to SEQ ID NO: 2510
  source 1..877: mol_type = other DNA

SEQ ID NO: 15127 - DNA, 426 bp, synthetic construct; identical to SEQ ID NO: 1851
  source 1..426: mol_type = other DNA

SEQ ID NO: 15128 - DNA, 538 bp, synthetic construct; identical to SEQ ID NO: 2097
  source 1..538: mol_type = other DNA

SEQ ID NO: 15129 - DNA, 597 bp, synthetic construct; identical to SEQ ID NO: 2163
  source 1..597: mol_type = other DNA

SEQ ID NO: 15130 - DNA, 467 bp, synthetic construct; identical to SEQ ID NO: 1955
  source 1..467: mol_type = other DNA

SEQ ID NO: 15131 - DNA, 602 bp, synthetic construct; identical to SEQ ID NO: 2168
  source 1..602: mol_type = other DNA

SEQ ID NO: 15132 - DNA, 847 bp, synthetic construct; identical to SEQ ID NO: 2476
  source 1..847: mol_type = other DNA

SEQ ID NO: 15133 - DNA, 315 bp, synthetic construct; identical to SEQ ID NO: 1534
  source 1..315: mol_type = other DNA

SEQ ID NO: 15134 - DNA, 383 bp, synthetic construct; identical to SEQ ID NO: 1738
  source 1..383: mol_type = other DNA

SEQ ID NO: 15135 - DNA, 1000 bp, synthetic construct; identical to SEQ ID NO: 2622
  source 1..1000: mol_type = other DNA

SEQ ID NO: 15136 - DNA, 759 bp, synthetic construct; identical to SEQ ID NO: 2385
  source 1..759: mol_type = other DNA

SEQ ID NO: 15137 - DNA, 333 bp, synthetic construct; identical to SEQ ID NO: 1593
  source 1..333: mol_type = other DNA

SEQ ID NO: 15138 - DNA, 551 bp, synthetic construct; identical to SEQ ID NO: 2116
  source 1..551: mol_type = other DNA

SEQ ID NO: 15139 - DNA, 562 bp, synthetic construct; identical to SEQ ID NO: 2127
  source 1..562: mol_type = other DNA

SEQ ID NO: 15140 - DNA, 756 bp, synthetic construct; identical to SEQ ID NO: 2381
  source 1..756: mol_type = other DNA

SEQ ID NO: 15141 - DNA, 457 bp, synthetic construct; identical to SEQ ID NO: 1933
  source 1..457: mol_type = other DNA

SEQ ID NO: 15142 - DNA, 306 bp, synthetic construct; identical to SEQ ID NO: 1499
  source 1..306: mol_type = other DNA

SEQ ID NO: 15143 - DNA, 673 bp, synthetic construct; identical to SEQ ID NO: 2278
  source 1..673: mol_type = other DNA

SEQ ID NO: 15144 - DNA, 546 bp, synthetic construct; identical to SEQ ID NO: 2109
  source 1..546: mol_type = other DNA

SEQ ID NO: 15145 - DNA, 631 bp, synthetic construct
  source 1..631: mol_type = other DNA
agtctaaaactaaaactgtaaatatgtaaatacttttaaaatacgcccgtaatggcgttaaactactttggaaacattatattataatgaatccaagccccaaaggcaaatttaatgtgtgatcttgctttcttataggctcatcattgtgagttagtaatgctgcattgaataatctcaggactatttagtcactacgcccaaactgagagttggcaatcccaacgaacaaaagttagatgaaccctgatttagtgttaattgaagctaaattaggttaattaaaccaattgctaacattaactcaaaccaaccagtcactagtgttactagtggaatcctcaataatggagattcaacccccacccccgtccaaggtactcccgaagacgctcacactgaagcagctgtcaatcaagtttttcagcacgctaccaccaaattcatcgatgataatgataccgttaacagagatgaatccacagtcgaacatatcaactctagttggttatcactcaacgacacacaatccactgagcaaactattattgattttctttcgaaacctatcattcttaattcaggtactttttccatttctgatacttattcttttcttaactactatact

SEQ ID NO: 15146 - DNA, 547 bp, synthetic construct; identical to SEQ ID NO: 2111
  source 1..547: mol_type = other DNA

SEQ ID NO: 15147 - DNA, 250 bp, synthetic construct
  source 1..250: mol_type = other DNA
aagccttccccccaaaaaaggggggcatccaacccatgatcatccggcagcaatcccgctgcaagggtgtcgtaacgcgcaagtcgtgggcggaaccgactactttgggaagacgtgtttccttcattttatcattactgtgcttatggtgacaagttatagaattcgttctatagctattcttgagagatttccaacgattttccaaacgcgcacagtacttgtattcaaacccaatagaaccatcaaa

SEQ ID NO: 15148 - DNA, 512 bp, synthetic construct; identical to SEQ ID NO: 2054
  source 1..512: mol_type = other DNA

SEQ ID NO: 15149 - DNA, 464 bp, synthetic construct; identical to SEQ ID NO: 1949
  source 1..464: mol_type = other DNA

SEQ ID NO: 15150 - DNA, 473 bp, synthetic construct; identical to SEQ ID NO: 1971
  source 1..473: mol_type = other DNA

SEQ ID NO: 15151 - DNA, 519 bp, synthetic construct; identical to SEQ ID NO: 2066
  source 1..519: mol_type = other DNA

SEQ ID NO: 15152 - DNA, 416 bp, synthetic construct; identical to SEQ ID NO: 1821
  source 1..416: mol_type = other DNA

SEQ ID NO: 15153 - DNA, 451 bp, synthetic construct; identical to SEQ ID NO: 1918
  source 1..451: mol_type = other DNA

SEQ ID NO: 15154 - DNA, 667 bp, synthetic construct; identical to SEQ ID NO: 2269
  source 1..667: mol_type = other DNA

SEQ ID NO: 15155 - DNA, 454 bp, synthetic construct
  source 1..454: mol_type = other DNA
attttataaaataaaatagaaaaaaaattagaattagatttgatcttctttattcccattatgagaatttggtgctggatgtgattccgaccattaatgtgcactgggagcgcgatacgtcgtggttctatgtgaaccccaaatgcacagttttcataaccctattgttcagtgctgggaacgaatttgccgtttagtattaggaaaccggcgatttcgactcagaaagattgctagcattgggcaaatgcttagctccagtggtcgctgcagagagatgccgcccgtgagggagactctgcggtttgcagctgggttactatgtatggtttttctgattagaatgagtggttggccctagtgctatacgtcaaacgtgggaactgagccttcgactccccaagtccttgggagcgaagtgaaaaataggcaacaccccaactcaattttcaat

SEQ ID NO: 15156 - DNA, 392 bp, synthetic construct; identical to SEQ ID NO: 1759
  source 1..392: mol_type = other DNA

SEQ ID NO: 15157 - DNA, 359 bp, synthetic construct; identical to SEQ ID NO: 1672
  source 1..359: mol_type = other DNA

SEQ ID NO: 15158 - DNA, 855 bp, synthetic construct; identical to SEQ ID NO: 228
  source 1..855: mol_type = other DNA

SEQ ID NO: 15159 - DNA, 327 bp, synthetic construct; identical to SEQ ID NO: 1573
  source 1..327: mol_type = other DNA

SEQ ID NO: 15160 - DNA, 606 bp, synthetic construct; identical to SEQ ID NO: 2179
  source 1..606: mol_type = other DNA

SEQ ID NO: 15161 - DNA, 269 bp, synthetic construct
  source 1..269: mol_type = other DNA
atatgacatcgtctccggaggactttaaactcgtcgtaagtgcgacctctcatcgcattcatgctaaaaagagagaggtgagttatggataccgtttcacttttgggggaccaacacccatgtgtgagataggcttgctcattttaggctaattcctatttaggaaagtttttgccaaacaacaagttggcggtcctcgcagtgtaacacacctgtgagtcaaccgtgctgaacgtgttaacaattttactgactatttatcaatttat

SEQ ID NO: 15162 - DNA, 575 bp, synthetic construct; identical to SEQ ID NO: 2142
  source 1..575: mol_type = other DNA

SEQ ID NO: 15163 - DNA, 360 bp, synthetic construct
  source 1..360: mol_type = other DNA
tatattcagcgccccggagcatcagttccgaagaatcgataacgattatccagagcattagctacaaaacgccttacagagtaagaagacacgacacgataacgttgagtgtatgcgaacacaaagagatgaatacttgtggcacctaaagctgataacagctttacgtggcaagattccgcgtgaggagttgaaggagataattataaaatatcaagtacattttaaaataaccccatcaatatatagtagtcataatacaaatatagttagacctaagttagaagaatactataggatagcatattaggataagttagattataattagtggaactttccacctaatctacctccact

SEQ ID NO: 15164 - DNA, 490 bp, synthetic construct
  source 1..490: mol_type = other DNA
tgtgcaagtaatacacttgcacactctatgtttgcgtctgagctatttgggcctttgtaggtaactcctattctggtctgaaaacgcccgggctcacgcatagatgtgcagtcccttttatggatcattcttatttatagcaattcaattttacaattcacatttgtcgttaagtctatcacgacattttacaactacccgctttaattagtaggctcttggttgtagaattgaacaggcctcttttaatgaaagaataaatcattcgttatttataggaagcgaagaattttctatagataatcgtagtgtcattcctatttaggatacggttggacacattaataactaatcttcttcccagcactttggtctataccatctacccctttgtgttgtgtaaatttatggtggtcaaaataacaacaacaactcagaatctgatggttcccagtctacctctccatcacagattcataacccagataaa

SEQ ID NO: 15165 - DNA, 511 bp, synthetic construct; identical to SEQ ID NO: 2050
  source 1..511: mol_type = other DNA

SEQ ID NO: 15166 - DNA, 495 bp, synthetic construct; identical to SEQ ID NO: 2019
  source 1..495: mol_type = other DNA

SEQ ID NO: 15167 - DNA, 372 bp, synthetic construct; identical to SEQ ID NO: 1710
  source 1..372: mol_type = other DNA

SEQ ID NO: 15168 - DNA, 659 bp, synthetic construct; identical to SEQ ID NO: 2255
  source 1..659: mol_type = other DNA

SEQ ID NO: 15169 - DNA, 397 bp, synthetic construct; identical to SEQ ID NO: 1770
  source 1..397: mol_type = other DNA

SEQ ID NO: 15170 - DNA, 827 bp, synthetic construct; identical to SEQ ID NO: 226
  source 1..827: mol_type = other DNA

SEQ ID NO: 15171 - DNA, 959 bp, synthetic construct; identical to SEQ ID NO: 2556
  source 1..959: mol_type = other DNA

SEQ ID NO: 15172 - DNA, 616 bp, synthetic construct; identical to SEQ ID NO: 2195
  source 1..616: mol_type = other DNA

SEQ ID NO: 15173 - DNA, 756 bp, synthetic construct; identical to SEQ ID NO: 2382
  source 1..756: mol_type = other DNA

SEQ ID NO: 15174 - DNA, 699 bp, synthetic construct; identical to SEQ ID NO: 2308
  source 1..699: mol_type = other DNA

SEQ ID NO: 15175 - DNA, 424 bp, synthetic construct; identical to SEQ ID NO: 1843
  source 1..424: mol_type = other DNA

SEQ ID NO: 15176 - DNA, 650 bp, synthetic construct; identical to SEQ ID NO: 2243
  source 1..650: mol_type = other DNA

SEQ ID NO: 15177 - DNA, 384 bp, synthetic construct; identical to SEQ ID NO: 160
  source 1..384: mol_type = other DNA

SEQ ID NO: 15178 - DNA, 387 bp, synthetic construct; identical to SEQ ID NO: 1745
  source 1..387: mol_type = other DNA

SEQ ID NO: 15179 - DNA, 313 bp, synthetic construct
  source 1..313: mol_type = other DNA
tcttgctatatgtatacaaaattcatgatgtaaataaaacatttagtattgctattttaggaagccgtgtagatattaatctttatatcctaggaccacggaaagcagccctttattgtccaaggaaccatcattgcagcataacgattaagtagtcatatgcctaagaaatttacttactgaacaaaattttaatgcaaacccagatattttagccgtaacgacaccagattcaaatgataccataacccttcgtgatgatggaactagggtcaccgactcttttaccgcttgcgaaggcgatttacccccc

SEQ ID NO: 15180 - DNA, 578 bp, synthetic construct; identical to SEQ ID NO: 2145
  source 1..578: mol_type = other DNA

SEQ ID NO: 15181 - DNA, 548 bp, synthetic construct; identical to SEQ ID NO: 2112
  source 1..548: mol_type = other DNA

SEQ ID NO: 15182 - DNA, 331 bp, synthetic construct
  source 1..331: mol_type = other DNA
gtgttaaagagtcgttaagctgtatgctgttgttactcatttgttatttacccacgctgaggaagccgtcccattgtcccgaaaccaaaataaaaataataaaagaaataaaaaacaaaataaaaacagagaaaataacaaaaaacaaaataaaaatgagagaaaaaacaaaaatgaaaataaaaatgaagaaaataacagtggacaaaacaatgacgacgtaaactccgtcattactcaacgtactatcgcacagagtttgagatcacaaacttctaacaatactgccgtgtcaaataagaccgatcgcagttcatcacacgaagaatgg

SEQ ID NO: 15183 - DNA, 814 bp, synthetic construct; identical to SEQ ID NO: 225
  source 1..814: mol_type = other DNA

SEQ ID NO: 15184 - DNA, 331 bp, synthetic construct; identical to SEQ ID NO: 1583
  source 1..331: mol_type = other DNA

SEQ ID NO: 15185 - DNA, 325 bp, synthetic construct; identical to SEQ ID NO: 1567
  source 1..325: mol_type = other DNA

SEQ ID NO: 15186 - DNA, 467 bp, synthetic construct; identical to SEQ ID NO: 1956
  source 1..467: mol_type = other DNA

SEQ ID NO: 15187 - DNA, 299 bp, synthetic construct
  source 1..299: mol_type = other DNA
caacttcaattcaagatggagcccaaacgcaagacgttgggtctatactttcttctgacttatcggccttcgttctcacttctgagagtgacaaagttgtggttaccgctaaaacggcaatcaaatctggaatctctcttaagccagacgatgttttcacacggtgggcgttgatgggcacttctgtcccgtcttcgccggcagccagttcgtaccttacggctttcaatagtgcggggtatttttctttggcttcggtttcgactttcgtggcttcctcccaagggtttagggcggac

SEQ ID NO: 15188 - DNA, 273 bp, synthetic construct
  source 1..273: mol_type = other DNA
caaaatttttaatagaacacgatcaggaccagggtccgaccagttactttaaacagcaatcgttacgataaagaacgcaatcaacaagttacttgagaaagcaatcgttacgaaacaaagaacgagaactttaatattgaactctatatgtccgccagtactggggaggaatagagattgttcttgttcaaatcaagtaagttcaccaccatatataacatattttgtctcattaaaataatcttatgttatacacaggtgtgtggacttgat

SEQ ID NO: 15189 - DNA, 473 bp, synthetic construct
  source 1..473: mol_type = other DNA
tgcacactctatgtttgcgtctgagctatttgggcctttgtaggtaactcctattctggtctgaaaacgcccgggctcacgcatagatgtgcagtcccttttatggatcattcttatttatagcaattcaattttacaattcacaattgtcgttaagtctatcacgacattttacaactacccgctttaattagtaggctcttggttgtagaattgaacaggcctcttttaatgaaagaataaatcattcgttatttataggaagcgaagaattttctatagataatcgtagtgtcattcctatttaggatacggttggacacattaataactaatcttcttcccagcactttggtctataccatctacccctttgtgttgtgtaaatttatggtggtcaaaataacaacaacaactcagaatctgatggttcccagtctacctctccatcacagattcataacccagataaa

SEQ ID NO: 15190 - DNA, 377 bp, synthetic construct
  source 1..377: mol_type = other DNA
gctagtctctggactatccagaagctcttcgctcttctcagctagtctctggactatccagaagctcttcgctcttctcagctagtctctggactatccagaatttttctttgttgctcattgtcgtgctgcggtaatacagctttcccaattttagggaacttgagtcttaactcaagcgactccggttgattgtccgtgttaattttcccttggactctcggtcggccaccacgtttactttaagcaactccgcgtccccgatttgtcaagttaggggtttttgcttttctttttttgtttcacaaaccacttttgtttgttgtgtttttcttttgttgttgctgtacgttgtgttaccacccttggttgataca

SEQ ID NO: 15191 - DNA, 279 bp, synthetic construct
  source 1..279: mol_type = other DNA
tggcaaatcgtcctgggcacgactttaaaaggccaacccgtaagggggtaaactacctgtatagggcgggcttggtacacctgtgaacagaaagtacccgtgtaagacgtaaactgaaaagggccatccgattaatctctaggatcgcttgtttaagagattacaacaatgcacaaaaattcatccgagtcaggcagttctcaagaactaactgcccccgctcaaacagcggtgttcccgaccccaacgcttagcttcgcagaagtaggcgagaccgaa

SEQ ID NO: 15192 - DNA, 326 bp, synthetic construct; identical to SEQ ID NO: 1570
  source 1..326: mol_type = other DNA

SEQ ID NO: 15193 - DNA, 326 bp, synthetic construct
  source 1..326: mol_type = other DNA
ttgaaaagcaatctgcgaactttgttacgatttgttacttccaactagctattgggcttatccaatttctctcgtttccgcaatcactagcaccgggcttatccggatctctttttgttttctttgttacctctgttctgtgcgcgctttaattttcctttgcgttctttacagcagtcacaacgtttacattaagtaatctcgcttccccgatttgtcaagttaggggtttttgtttttcttttttcgtttcacagcaaacttttgctcttttccttttctttctgctcctctgctatatagttcttccccctttgatttctaac

SEQ ID NO: 15194 - DNA, 445 bp, synthetic construct; identical to SEQ ID NO: 1907
  source 1..445: mol_type = other DNA

SEQ ID NO: 15195 - DNA, 273 bp, synthetic construct
  source 1..273: mol_type = other DNA
aaataggaacacacagtgaagaagatgaagtgtttgaaaaatcaatgatcaaaaacaacccctggtatcatggtgaaaaggatttctacggtgaaattatcatcggaaaaactacacaaatgaacaaagtaatgcgtggaactaagtattcagcaacaccgctgaaagactgtttacctgcagaacctgattgtgtacctatcaacatgtacccacacatcaacaaagacggtgaattggttgaccctgttgccaaaaccttacgaaagaaaa

SEQ ID NO: 15196 - DNA, 753 bp, synthetic construct; identical to SEQ ID NO: 2379
  source 1..753: mol_type = other DNA

SEQ ID NO: 15197 - DNA, 452 bp, synthetic construct; identical to SEQ ID NO: 1921
  source 1..452: mol_type = other DNA

SEQ ID NO: 15198 - DNA, 466 bp, synthetic construct; identical to SEQ ID NO: 1954
  source 1..466: mol_type = other DNA

SEQ ID NO: 15199 - DNA, 357 bp, synthetic construct; identical to SEQ ID NO: 1665
  source 1..357: mol_type = other DNA

SEQ ID NO: 15200 - DNA, 292 bp, synthetic construct
  source 1..292: mol_type = other DNA
gcgctccaaacaattacatcctacacttctctttttgagattattttcaatttgaaaatcaaaccaacatttttgatcagcctttcgcttttgcgttatcagcttttcaaaaattttaaaacttaatattttattagcttttgctcatttaaaatattttaaactttttgttgaattagtatttattacgttttttaacaacttttaatcttatttaacaataacaactatcgctaaagcgattttgaattttttattttattattttatttgaatctcattactcttcgac

SEQ ID NO: 15201 - DNA, 302 bp, synthetic construct; identical to SEQ ID NO: 1489
  source 1..302: mol_type = other DNA

SEQ ID NO: 15202 - DNA, 326 bp, synthetic construct; identical to SEQ ID NO: 150
  source 1..326: mol_type = other DNA

SEQ ID NO: 15203 - DNA, 353 bp, synthetic construct
  source 1..353: mol_type = other DNA
ctcttccgatctcaggaagtttagttggcaacgcgcgaagagtgaaggtgaaagaaagagtgtacgaatttttcttttaaataactgttactttttaaattttatttattcattttatttattctttctgtaaaaaattttttgtttctaaatttaaaaaacaaattgtatataaaaatgttaaaaattttaatcatttatgtgttaatcgccatctgtgtaaaaatggctttgtaaatattcacttattgtttcattcctgcaagccattttgtccgatcatctgtaaaaatatcattgctagccattgggaagatgagcgccccaatgcgccaagggccactgccggatcg

SEQ ID NO: 15204 - DNA, 305 bp, synthetic construct; identical to SEQ ID NO: 1495
  source 1..305: mol_type = other DNA

SEQ ID NO: 15205 - DNA, 483 bp, synthetic construct; identical to SEQ ID NO: 1991
  source 1..483: mol_type = other DNA

SEQ ID NO: 15206 - DNA, 282 bp, synthetic construct
  source 1..282: mol_type = other DNA
aatgaattgagtttcaattttccacgtgtgaatcacactgctgatgctgatctgcctcatattgactatcgcgcctatcctgatctcgctactgagtcaaatggtgtcctgaattgccagtttttcactattcctggtttgttagaaaatttcttcatccagagtaaacgttttaaacgctggtactatcttggacctgctcaaggtgatggtgtgctctatgagaatgatttgcatgctagtggtgtttcttttaaggtctttctttctgagaattataac

SEQ ID NO: 15207 - DNA, 470 bp, synthetic construct; identical to SEQ ID NO: 1963
  source 1..470: mol_type = other DNA

SEQ ID NO: 15208 - DNA, 368 bp, synthetic construct
  source 1..368: mol_type = other DNA
aacgtctaaaagtattggctattaaagcccgattatatacacaaatttattaacggaactgaaattgaaacaacccgtatagcaagagaggtttttaaaaatttagattcaagcacttaagtgcattctttttgctatatagaccataccgataaaatacacccaatttcggggatttcccccattttgcaaagtatttatagctaaactaaaacagagtttcagatatctacttgacgctttgtagcagtggttatatttgcttatttttcgcccttaggccattttaaacatatttttatcgaagttcctaacttggaggtgtcacttaggaaaaattaacaactaaaaaaggtcacatacacaca

SEQ ID NO: 15209 - DNA, 250 bp, synthetic construct
  source 1..250: mol_type = other DNA
cgattgtttgccagcaacatgttcgtcccgccttcgggcatgtgattattgagagtctcttgtcggtggtgatctcctggctttgcttcttgcgtgacttaatcttgtgttccggccgtttttgctttgcacgcttgtctctttgtgcttgagcttgcggcttagtactacttttgctcccgccttttggcgggggcctcatcgctttaactcttgctgtgccacttttactcgattgtttgccagcaac

SEQ ID NO: 15210 - DNA, 263 bp, synthetic construct
  source 1..263: mol_type = other DNA
gactaaatatcttgatggacaatgtgggcttaactggatagttaatacaatacacggtagtatctgcttaacaatcatctatcactgtagtaatgcgggaacaaaatcaaacattatcaaataatattccattgaaccttaatttctaagaaaactagtaacaatgataataattattagttatacaatgaaaaaaataggtggttaacaccatatatagctttaagatcagtcactttctaataccttgttcatgtaaagaa

SEQ ID NO: 15211 - DNA, 299 bp, synthetic construct
  source 1..299: mol_type = other DNA
ctgcaccatgaagtactttggcacggccctcaaggtccaccgacctccagaaaagcattaataagccaatacacaacaacaaccaaaacactgaaagaaccaacaaaagacaccacaaacacaacaacaagcttgagacccacactgaaaaaaataggcggtgaacactgtcaattaagagaaacagttgtagttattcgaaacccaaccaactctccgacaaaaaatctctacccagcactatctaacaaaaccaacagtgatagtcaatttcttcgacaattgtgtttataacagat

SEQ ID NO: 15212 - DNA, 1000 bp, synthetic construct
  source 1..1000: mol_type = other DNA
accattaccattttaaaaactacactgttatcgtaaactaaatctgatttaaactacggttactgtgttttcttttgcttggtaatattttaatcctgtgtttttcttatttcaaagatttgtcatgggtttcttgtttataacttgtataattgtttatattgttgtttgcattacggttgtatgttgtgaagctataatctgtctttagacttgttattagtttcatcatatactgacgttttagttagatttaaactttagttaaacattttatttaatttaattttaattgtttcgtttgaaaattttataatatcatcataaaaatttattgttatgtttatgttgactagttcgttagtatttcttatcaccgttatttgtattacagtctcttgtttattatcaatatttacttcttaattataaatttgaatactggttttaattactgtttgttttaatcatgttttcattaatgtcattagtttgttcctgcggcatagttttaactgttgtttgtattgtttatgtaattgtagaagttatattttgtgcttgttaaattgctcattttattgattttagttttgtagtgtatattggtttcggttttgtttgttttgtttgggttacatacatttgtttatattatatcttaatcaattatattatattggattattggttttaagttagttagtaattaaagtttaattatacattggttattgggtcggtttttcattttaatcattattatcaattttatatattactctttgaattttctttatttagtgtaaggtgactgggttttgttacaaattttacagtttattcacttattatcatcaatgttgtttgttttgacttgtattactattatttggttcataactttaattcgtgtttttgattattaatcaatctgggtgtcatattaatctttgttttgttcttaattatattcttattgtttacatttgttatcacg

SEQ ID NO: 15213 - DNA, 1000 bp, synthetic construct
  source 1..1000: mol_type = other DNA
ttttcttcaattttgtttatcataatgttttctttggttctattagcttgtacttttgttgctgtcgttagtgctattagtatttgtgtcataggcttagagattatttggtgtatgtaaatagtttgttttaatcgtatatataatttaagtatttgtttaatagttttagtgatcttattatactagtatatattattcaattttattaatcattaaatttattattgtcaatatgttatttagtgctatatgtcttcttgctttgagttcagtcatttcaattgtgtttacttatttaacttttggtgattgtttattctaattttaaataaaattttaaatttgtattttaggttttaatattacgtattttggtcttgattgtattagtttaaattttgttttattatattttctttgttgattttgtaacatgtttcttgagtgtagtattattttttgtgtattgtgtgttgctactttagtatatgcttgtttgattgctgacgaattgtaaataaattctaaatttcttttattattttattttatttctttaggtgttggttgttataattcgatactagctattctatttttcataattatctattttattgacatgtttttgaatctagtattatattttctatattgtgtgttattacattggtgtatgcttgtttaatctgtaacgagttttaattttaatttttgtatatttgcttaattttgaaatttattagtatactatttaaggttataagggtttaatcaattttcttcattttgtttattttgatttattaggttttggttctgggttttgtttctttaattttattttaatatttccgattgttttattttttttaaattatttcacttgatatatcttaggttagttttctaaattatttattattaatcctattgaattttactataatatcattctttgttttatacgttaatattagttatcttaatatttaaa

SEQ ID NO: 15214 - DNA, 258 bp, synthetic construct
  source 1..258: mol_type = other DNA
ctgggctccaccgattaccgcaaagtaaaacaatttaaaaaaacaaacaaccttggcccggcaataacaaagctgggcctttttaataataataaagttaatgaccaccttaaagaccttggttgggccggcgaaggggtcattaactataaaacacacgccaaccaaccaacacaaaatacaaataaactatggaatagtcataaaaaatggctgagtaaagaccgtagaacattaaattgcatacctgcaaagcga

SEQ ID NO: 15215 - DNA, 434 bp, synthetic construct
  source 1..434: mol_type = other DNA
aagtttttgattatagatatttcgtgcgttggtgatacctttttttagtatctgttaccttattgtgatcttctgagtcttgaagtgcataagtttaacataccatcattgataccagatccaaagaattatcatttacaattcattgtactttttctctcctctcttttgagggagtcttagtcgaatcctcttttgaggggacaaccgctacgtaaggtttggtgtgagggcaggtgtaagcaattgagctaggcatcgaagcattttcctttcggctgagtgtaaagaaccactgtggaggttctacacgcttgtcttgtacaacgcaacgaaatattatcaaaactacgaaaaacagatattgtcaattaaaattttaaaaacgacataacattttttgtaataaaaaatttacatcaaataatttcaac

SEQ ID NO: 15216 - DNA, 296 bp, synthetic construct
  source 1..296: mol_type = other DNA
gaagcagatgagagacttagaccttgatcatgtgccatgactaaaccttataatcatttatcattttttattctttattaagtaatcacttgaaaattgtttgtttttgtatttttataattaattttgtaatctttatttgattagtattgggatcatgttaatgaagggtgaattgaaaagttaaaatatcttgtatttttgtagaatttgcatgctgttttaaaactgcaaagaaaatagaagaaaggaaaacttgaagaacacaataacaaattaaaatatcaagtcgatct

SEQ ID NO: 15217 - DNA, 280 bp, synthetic construct
  source 1..280: mol_type = other DNA
ggaaaaaccccatccgatcgtatttctacgaccgggtgattattcttttcaggtacaatacttacaagtttacaactacggtcatctttcggtgatcctccttttcaggaatttgtaaccttgttccacacgtacgtctacaatcatctctcggtgattctccttttcaggagttcgtgctatcaaccttgaattaataaagtgatatatcaccttataattccgcgcaatattacattttcatataatatttgcaaaagaattataatcttccattatc

SEQ ID NO: 15218 - DNA, 340 bp, synthetic construct; identical to SEQ ID NO: 1622
  source 1..340: mol_type = other DNA

SEQ ID NO: 15219 - DNA, 315 bp, synthetic construct; identical to SEQ ID NO: 1535
  source 1..315: mol_type = other DNA

SEQ ID NO: 15220 - DNA, 301 bp, synthetic construct; identical to SEQ ID NO: 1488
  source 1..301: mol_type = other DNA

SEQ ID NO: 15221 - DNA, 300 bp, synthetic construct; identical to SEQ ID NO: 1484
  source 1..300: mol_type = other DNA

SEQ ID NO: 15222 - DNA, 672 bp, synthetic construct; identical to SEQ ID NO: 2275
  source 1..672: mol_type = other DNA

SEQ ID NO: 15223 - DNA, 530 bp, synthetic construct; identical to SEQ ID NO: 2086
  source 1..530: mol_type = other DNA

SEQ ID NO: 15224 - DNA, 419 bp, synthetic construct; identical to SEQ ID NO: 1829
  source 1..419: mol_type = other DNA

SEQ ID NO: 15225 - DNA, 383 bp, synthetic construct; identical to SEQ ID NO: 1739
  source 1..383: mol_type = other DNA

SEQ ID NO: 15226 - DNA, 857 bp, synthetic construct
  source 1..857: mol_type = other DNA
ctttacattaagtaaagtttatataatagtatgggggtataggttatacaaccgtcttcggatttccccaaaggagtactaacccaactattatatatactttaattaaaatttaaatataatctattattatattaatgtaaattaaatttaattttagttcacgggatgaattgtagtagcgtgcaatcactccctattagtaacaaaatgctcttaaaaatataaaaatatcttaaaataaaaacgtagttattgaaattatgaagctataagaagtagtaatttattgaagcttatggaagtagtaataattttcataattaccccaaaaataatatttagtttttaaaagttatactagatccattgatttagaatagtaaagaaatttatgctcatttacttgcctcttgaatgtccaattacgtagtcgtaagaccgcttcaacgcgtattgaatcgaataagtgtggctcgcggtgcagttgttttatacaagtgcggtacacgggtgtattctgccgaaagattgaatatataacaaattgttatgagactaatgagtttatttatcttgagcctctaatctcaatgtatttagtatagattccacggtgtagttatggcatgctacttactgttatgtggaagtaaacagccctggtaattactgacggagcactaccagttaattcacgcgttatgttagataagctgcgaccctaacgggatctaaccggatcgtcggactagtcatccgagatgagaaaccggctaacttatgacataatttgcgatgaatagtgttgacgacaaaaattctttttatcttgacttggcttgaaatcattaatc

SEQ ID NO: 15227 - DNA, 414 bp, synthetic construct; identical to SEQ ID NO: 170
  source 1..414: mol_type = other DNA

SEQ ID NO: 15228 - DNA, 406 bp, synthetic construct; identical to SEQ ID NO: 1797
  source 1..406: mol_type = other DNA

SEQ ID NO: 15229 - DNA, 867 bp, synthetic construct; identical to SEQ ID NO: 2504
  source 1..867: mol_type = other DNA

SEQ ID NO: 15230 - DNA, 663 bp, synthetic construct; identical to SEQ ID NO: 2261
  source 1..663: mol_type = other DNA

SEQ ID NO: 15231 - DNA, 935 bp, synthetic construct; identical to SEQ ID NO: 2545
  source 1..935: mol_type = other DNA

SEQ ID NO: 15232 - DNA, 535 bp, synthetic construct; identical to SEQ ID NO: 186
  source 1..535: mol_type = other DNA

SEQ ID NO: 15233 - DNA, 508 bp, synthetic construct; identical to SEQ ID NO: 181
  source 1..508: mol_type = other DNA

SEQ ID NO: 15234 - DNA, 258 bp, synthetic construct
  source 1..258: mol_type = other DNA
ataatgaaagtatcaattatggatcgtgctacaagaaaatgcgttgtttgcaaagcttttaggaagcataaagacctcctgaagtttgttatgggtgccaataatcgatgcttgatttgctgcgcaaatttgcacagacgtatggctattcaaatgatccttgggggacacagagcaatctttatagatgagtccttggatcgcagatatagcatctagtcattgcgaataaatactagttaagatcagtattgcaag

SEQ ID NO: 15235 - DNA, 942 bp, synthetic construct; identical to SEQ ID NO: 2547
  source 1..942: mol_type = other DNA

SEQ ID NO: 15236 - DNA, 271 bp, synthetic construct
  source 1..271: mol_type = other DNA
gttggcgattcaaactcaaaaacccatagaaatgaagatgactccccttggcgaggcccataacgttaattggacggttaaaataacttatgatgagagggaatcagaagccacacattctaaagttagaaaagctcaagaagcagcagccaccggtattctaaacaacggggtcgatcttgaagccaaaattagacaactggaagagcaacttagaatgttaaaatcttagatctttgtaataaatatatttcaagcgaaaatttcaatc

SEQ ID NO: 15237 - DNA, 478 bp, synthetic construct; identical to SEQ ID NO: 1981
  source 1..478: mol_type = other DNA

SEQ ID NO: 15238 - DNA, 478 bp, synthetic construct
  source 1..478: mol_type = other DNA
gcaaaaaggcccctgggggggggttaatgagtactggaaaaagaagcgcgagataccacttcgctgattatgctgattctggtattaaggattagtagagtatcggaagtgccgaagggaataatgctggtccgttgtaaacaggatacttatgagacctcttaacagaaactttgagcaaacaacaaataaacgaacaaaaagagttatacattgaacttgaaaaatcaatgtcttttatttagactgatttatattggtctttataatcgtaaggaataattctcatctaatgatatcgatgtaaaatgtatcattctagctattcaattatattaattgagcttagcatctgattaaattattattataaaataatatttaatccccatctttgcaagatggaaactctcaataaatcaggagtataatagatttaaaccctcacactgaatcacgagtataaacagattcaaat

SEQ ID NO: 15239 - DNA, 465 bp, synthetic construct
  source 1..465: mol_type = other DNA
tgggggggggttaatgagtactggaaaaagaagcgcgagataccactttgctgattatgctgattctggtattaaggattagtagagtatcgaaagtgccgaagggaataatgctggtccgttgtaaacaggatacttatgagacctcttaacagaaactttgagcaaacaataaacagacgaacaaaaagagttatacattgaacttgaaaaatcaatgtcttttatttagattgatttatattaatctttataatcgtaaggaataattctcatctaatgatatcgatgtaaaatgtatcattttagctattcaattatattaattgagcttagcacctgattaaattattattataaaataatatttaatccccatctttgcaagatggaaactcttaataaatcaggagtataatggatttaaaccctcgtaccgaatcatgagtataaatagattcaaat

SEQ ID NO: 15240 - DNA, 502 bp, synthetic construct
  source 1..502: mol_type = other DNA
ccctgggcgggggttaatgagcactggaaataagaaacgcgagacaacgctttgctgattacgtataagtggagtatcggggagtaaaatcctgctgattacggttatatggagtatcggaagtggcaattgctataaactgggtccggagtaaacaggctgtttattaattttacgttcaaacctattgcaacaattccttacaacaacaaaaagttaaataggaaacttgaaaaattcctatcttaataaagtatattttgttttgttatcactacccgttttaactaataggctctgtaacattcataatagaaatatttcgtaatgataattctcatcaaaagatatcgatgtaaaatgtatctatagctattcaattatattaattgagcttagcaatcgttaaattattataatttaaataataatttaatctcaatctagcagattgaaaaacacaaaagcataagtgtataaatatgcaaacgatggaagaaga

SEQ ID NO: 15241 - DNA, 512 bp, synthetic construct
  source 1..512: mol_type = other DNA
cctgggggggggttagtatgtactggaacaagaaacgcgagacagcgctatgctgattacgtatttacggagtatcggatatgtcaatattgctgattacgtttatatggagtatcggtagtgacaattgttataaatcgggtccggagtaaacaggatatatattaatcaatttccaaacctattgcaaccaaacaaacagacgacaaacaaagttaaatattatactgcaaataatatcttttttgtaattcctttctatatcactacccgtatatgatataggttcattgtgtgctctgtatattaaagaattaacgatcttgtggttggtaatgaataattctcttcaaatgatatcgaagtaaaatgtatcaatagttaatcaattatattaattgagcttaacaatcgttttatatatctatattttgatatataaaaccttactcttgcagagtaacaacacttaaagaaacaggtgtataatggtttcaaaaacaacagacaca

SEQ ID NO: 15242 - DNA, 508 bp, synthetic construct; identical to SEQ ID NO: 2041
  source 1..508: mol_type = other DNA

SEQ ID NO: 15243 - DNA, 334 bp, synthetic construct; identical to SEQ ID NO: 1598
  source 1..334: mol_type = other DNA

SEQ ID NO: 15244 - DNA, 312 bp, synthetic construct; identical to SEQ ID NO: 1525
  source 1..312: mol_type = other DNA

SEQ ID NO: 15245 - DNA, 616 bp, synthetic construct; identical to SEQ ID NO: 2196
  source 1..616: mol_type = other DNA

SEQ ID NO: 15246 - DNA, 281 bp, synthetic construct
  source 1..281: mol_type = other DNA
ggccgtaggtgcggctgtatgttgtataagatgatcggagacgtgaaatcccctagtggatgtctggtttatcttcgtgacactaagactgctaggtgggcaaatccgggtagagtgactcgaactacttcagaatgttaatcttacatctccttttttgcccctgtgagagcagggttaccaatatctaaacctttggaaataggttataaattccacaaccaaacactagtgacaccccgtgtataaacgttgtgtcaacctcccgataaaggaaatat

SEQ ID NO: 15247 - DNA, 332 bp, synthetic construct; identical to SEQ ID NO: 1587
  source 1..332: mol_type = other DNA

SEQ ID NO: 15248 - DNA, 366 bp, synthetic construct
  source 1..366: mol_type = other DNA
cgaagggaataatgctggtccgttgtaaacaggatacttatgagacctcttaacagaaactttgagcaaacaataaacagacgaacaaaaagagttatacattgaacttgaaaaatcaatgtcttttatttagattgatttatattaatctttataatcgtaaggaataattctcatctaatgatatcgatgtaaaatgtatcattttagctattcaattatattaattgagcttagcatctgattaaattattattataaaataatatttaatccccatctttgcaagatggaaactctcaataaatcaggagtataatggatttaaaccctcacaccgaatcatgagtataaaaagattcaaac

SEQ ID NO: 15249 - DNA, 366 bp, synthetic construct
  source 1..366: mol_type = other DNA
cgaagggaataatgctggtccgttgtaaacaggatacttttgagacctcttaacagaaacttggagcaaacaataaacaaatgaacaaaaagagttatacattgaacttgaaaaatcaatgtcttttatttagattgatttatattaatctttataatcgtaaggaataattctcatctaatgatatcgatgtaaaatgtatcattttagctattcaattatattaattgagtttagcaactggttaaattattattataaaataatatttaatccccatcttcgcaagatggaaactcttaagaaatcaggagtataatggatttaaaccctcataccgaatcatgagtataaagagattcaaac

SEQ ID NO: 15250 - DNA, 366 bp, synthetic construct
  source 1..366: mol_type = other DNA
cgaagggaataatgctggtccgttgtaaacaggatacttatgagacctcttaacagaaactttgagcaaacaacaaataaacgaacaaaaagagttatacattgaacttgaaaaatcaatgtcttttatttagactgatttatattggtctttataatcgtaaggaataattctcatctaatgatatcgatgtaaaatgtatcattttagctattcaattatattaattgagcttagcatctgattaaattattattataaaataatatttaatccccatctttgcaagatggaaactcttaataaatcaggagtataatggatttaaaccctcacaccgaatcatgagtataaacagattcaaat

SEQ ID NO: 15251 - DNA, 366 bp, synthetic construct
  source 1..366: mol_type = other DNA
cgaagggaataatgctggtccgttgtaaacaggatacttatgagacctcttaacagaaactttgagcaaacaacaaataaacgaacaaaaagagttatacattgaacttgaaaaatcaatgtcttttatttagactggtttatattggtctttataatcgtaaggaataattctcatctaatgatatcgatgtaaaatgtatcattttagctattcaattatattaattgagcttagcatctgattaaattattattataaaataatatttaatctccatctttgcaagatggaaactcttaataaatcaggagtataatggatttaaaccctcataccgaatcatgagtataaacagattcaaac

SEQ ID NO: 15252 - DNA, 366 bp, synthetic construct
  source 1..366: mol_type = other DNA
cgaagggaataatgctggtccgttgtaaacaggatacttatgagacctcttaacagaaactttgagcaaacaataaacagacgaacaaaaagagttatacattgaacttgaaaaatcaatgtcttttatttagattgatttatattaatctttataatcgtaaggaataattctcatctaatgatatcgatgtaaaatgtatcattttagctattcaattatattaattgagcttagcatctgattaaattattattataaaataatatttaatccccatctttgcaagatggaaactcttaataaatcaggagtataatggatttaaaccctcacaccgaatcatgagtataaaaagattcaaat

SEQ ID NO: 15253 - DNA, 366 bp, synthetic construct
  source 1..366: mol_type = other DNA
cgaagggaataatgctggtccgttgtaaacaggatacttatgagacctcttaacagaaactttgagcaaacaataaacagacgaacaaaaagagttatacattgaacttgaaaaatcaatgtcttttatttagattgatttatattaatctttataatcgtaaggaataattctcatctaatgatatcgatgtaaaatgtatcattttagctattcaattatattaattgagcttagcatctgattaaattattattataaaataatatttaatccccgtctttgcaagatggaaactcttaataaatcaggagtataatggatttaaaccctcgtaccgaatcatgagtataaaaagattcaaat

SEQ ID NO: 15254 - DNA, 293 bp, synthetic construct
  source 1..293: mol_type = other DNA
cgaagggaataatgctggtccgttgtaaacaggatacttatgagacctcttaacagaaactttgagcgaacaacagataaacgaacaaaaagagttattctcatctaatgatatcgatgtaaaatgtatcattttagctattcaattatattaattgagtttagcatctgattaaattattattataaaataatatttaatcctcatctttgcaagatggaaactcttaataaatcaggagtataatggatttaaaccctcacatcgaatcatgagtataaacagattcaaat

SEQ ID NO: 15255 - DNA, 289 bp, synthetic construct
  source 1..289: mol_type = other DNA
ggcttagtttgtacgtgttctaataacgttcggcttagtttgtacgtgttctaataacgttcagtgtagtttggtagtatctaataactatctttcgtggttttcaaggttatccctgtaatcctcgattagtttgtcagtatctgataactgtctaagtttggtagtgtcctgataactatctttcgacgtttttaagaccagctcctagcttcgtcgattagttcgtgagcacctgatagctctcaaaatttttagttggttagaactataaaatctaacagggaaa

SEQ ID NO: 15256 - DNA, 251 bp, synthetic construct
  source 1..251: mol_type = other DNA
gactgtcgcccctacagagtaagaagacaccgtctttgtctagtgtaccagactgcttgaggaaggcttaaactcagcagaaccgtgccactagaacgacattaaacaacgataggttcgcgcagcctccggcagccccggttaaatgcgtggccgcttcaccactaaatggtaatctacatggtggagtaaatctcaaaattaccgctatctcaaattctaatgctactatttctactcttactcagcgt

SEQ ID NO: 15257 - DNA, 1000 bp, synthetic construct; identical to SEQ ID NO: 2623
  source 1..1000: mol_type = other DNA

SEQ ID NO: 15258 - DNA, 1000 bp, synthetic construct; identical to SEQ ID NO: 2624
  source 1..1000: mol_type = other DNA

SEQ ID NO: 15259 - DNA, 687 bp, synthetic construct; identical to SEQ ID NO: 2294
  source 1..687: mol_type = other DNA

SEQ ID NO: 15260 - DNA, 736 bp, synthetic construct; identical to SEQ ID NO: 2358
  source 1..736: mol_type = other DNA

SEQ ID NO: 15261 - DNA, 600 bp, synthetic construct; identical to SEQ ID NO: 195
  source 1..600: mol_type = other DNA

SEQ ID NO: 15262 - DNA, 913 bp, synthetic construct
  source 1..913: mol_type = other DNA
ccctaagtaataaattgaggattttgttttataaagtgttaagtatgcgtaatataattttggtgttggttataattttaataactgttcaagctaagaaaaatatggagcgacgttttgtatatgctacacttcaaaaacaattagaaatagctaggaatgttcgggatgttcagaatgcggatcgtatactttttgatcaatcattcgtgactaaaactatcagaatggtaaatcaataccgagttgaagttgacgctgagggtagagaagcaatactatcctacggtgctcaggtttcctttaatactgataagtatatgagtttcatggttgggcaagcggatgttactcgtgatggttctgttgtgaagttaggcaagaaatagttatagccgttaaatttataaaggaaaagaatataatattaaaatggtaaatttttcaagagtttttactacagcattgaataatatattgagtagacctattctactcattttaatgagtttttttataatagtagtgattgccgaattggaatatattgatgataaacctacagctttgcttgttaaaagtataaatgaaacaaaatttggaggaaagtttttaaaaaaaattgtagttaaaatagaagaaaatttgtatttcttaacattaacatatggtctattggtgttgggtatattcattactggtataaggtatcttttttttatacatatattagtagtcacagttctagcaggtatagatataactaaagaaacttttatcacagtagctattcttataataatagaatatttatatttcgttattaaaatttttatgattagagttgttttattagtagcatttttagcatcattttatatagaattggaatttaaaaccaaagagaggaaaa

SEQ ID NO: 15263 - DNA, 642 bp, synthetic construct; identical to SEQ ID NO: 2233
  source 1..642: mol_type = other DNA

SEQ ID NO: 15264 - DNA, 343 bp, synthetic construct; identical to SEQ ID NO: 1630
  source 1..343: mol_type = other DNA

SEQ ID NO: 15265 - DNA, 378 bp, synthetic construct; identical to SEQ ID NO: 1725
  source 1..378: mol_type = other DNA

SEQ ID NO: 15266 - DNA, 877 bp, synthetic construct; identical to SEQ ID NO: 2511
  source 1..877: mol_type = other DNA

SEQ ID NO: 15267 - DNA, 517 bp, synthetic construct
  source 1..517: mol_type = other DNA
taaaaatatacaactatttttataattgaagctaataacttcattgcaccttgccaactaaggaatttaattcctgttacttggatgcaacactcgaggttttacaacctcaatccgtaccttgccaacgcctgggcactaaaccccccacgatacttggacggaaaatcaacgcaaagttagtcgaaagacaaacactgcacgcaaagttagtcgaaagacaaacactgcacaacgcaaaagtagcccaaagctattattgcaaacttcaacaaagttagcgaaagcaaacactgttgattaaagagtaccttgccaacgcctgggcctacgtaccccacgatacctggactcaaatcctcacagaggtctccgagaggacgcaaaatcgagtcggctcatcagtgccgcaaaccccttgagaaaaggataaatcgaaacgaatataattatattcgtcagagagtgtggacgcaatctctggtacttcaaagtacaggtctaacaagccttaaat

SEQ ID NO: 15268 - DNA, 257 bp, synthetic construct
  source 1..257: mol_type = other DNA
attagttactaacaattgtttttcaaaattttaacttgactatggaaagaccacaacgttgtaatagttgtttcagagtcattgtgtacacagatgtttatgttagaagactagcttctgagtattgcgaacgttccataatagaccacttcgaaactgagtgtttacatttggttgatcaaggtgaagaagaagatctttattggaacggtgatcccatttttgttcttgatcctcgcgctttaggataatacatt

SEQ ID NO: 15269 - DNA, 754 bp, synthetic construct; identical to SEQ ID NO: 2380
  source 1..754: mol_type = other DNA

SEQ ID NO: 15270 - DNA, 272 bp, synthetic construct
  source 1..272: mol_type = other DNA
tttcgataccctcttgttttgcgaattgtaccctcttctaccgcgtgcgattgtagaaagcaacacctctccctagtacgtatcggaacgggaagtcaagctgctctgcgtataaaggtgctttgctttattttgtgcttttacccaaaaacccccctcccccccttcgtgggggcattgatgtgactggttatccggtcttttccagtgctcttcacaaactgactagggaccgccgtaaatcgctaccgttggccgcagccctagcagcc

SEQ ID NO: 15271 - DNA, 530 bp, synthetic construct; identical to SEQ ID NO: 2087
  source 1..530: mol_type = other DNA

SEQ ID NO: 15272 - DNA, 644 bp, synthetic construct; identical to SEQ ID NO: 2236
  source 1..644: mol_type = other DNA

SEQ ID NO: 15273 - DNA, 256 bp, synthetic construct
  source 1..256: mol_type = other DNA
tatgcacatgtgtactaaccatacacataccaccgatttcacgtcgatctttatccgtgatttcaccccctacgaactcgattgttctattgaaacacactgatcatcgcgacaccgtgtttctacacacatagatctcagttcacctcaccattacaccatacacttttacacactacatacattttacatacattacacacattacacatattacacaatttacactacaatacatacacaacacacctacacc

SEQ ID NO: 15274 - DNA, 706 bp, synthetic construct
  source 1..706: mol_type = other DNA
cgcatgagtattttatatactcatgtattacttgacaacaccctgggtttatgtgtttgacctttgctaaacacttagtgcgtaactttttattgcaccgggtttatctgtttgacctttgctaaacagttaatgcgtgatttttcattgcacagggtttatatgtttgacctttgctaaacatttagtgagacacttttgtttcaaacggtttgtatatttcacgtatgaaatattcaatggattcatccatttctcttttcttatgcacacttgcaaagaaatgaattcgggattggttgacgctatatgcgctagcctggtcttttagaacgacgagtagtaaatacgagatgatgtggcccactagctaacccattagtggacagaaccattgatcgtacgcagctcgaggaaactgtgtcaagggcaccttgcggttgttcgaaaaagatctttcaaagtctcgccctgaggggttgtgtgatggagaaagtaacaggaacgtactaggatatgagcggacccaatactgaattgtggttttttgtatgtgtgacggttattctcttcctttaaaaagagatactttggtgttctgtataaacacctataatggtgaataattaactcacctttactcgcgactcgagtataactagtcattttatggacagtacaccaaataatatataaaccttttacc

SEQ ID NO: 15275 - DNA, 284 bp, synthetic construct
  source 1..284: mol_type = other DNA
ggataccgggggtttcgataccctcttgttttgcgaattgtaccctcttctaccgcgtgcgattgtagaaagcaacacctctccctagtacgtatcggaacgggaagtcaagctgctctgcgtataaaggtgctttgctttattttgtgcttttacccaaaaacccccctcccccccttcgtgggggcattgatgtgactggttatccggtcttctctagtgctcttcacaaactgactagggaccgccgtaaatcgctaccgttggccgcagccctagcagcc

SEQ ID NO: 15276 - DNA, 1000 bp, synthetic construct; identical to SEQ ID NO: 2625
  source 1..1000: mol_type = other DNA

SEQ ID NO: 15277 - DNA, 848 bp, synthetic construct; identical to SEQ ID NO: 2479
  source 1..848: mol_type = other DNA

SEQ ID NO: 15278 - DNA, 710 bp, synthetic construct
  source 1..710: mol_type = other DNA
gcgtgcattatatatgcacgcacacatttgtccgtcggtaataagcaaccgtcagactagcgataatctgagaacctcttagctcgttcgaggcgatcgtaatcgagttgatttggtgggtgaaagaataaccctatttgattatcttggattggagaggataatcatcttagagactccaaacatagttgtatcttatgatacgtggttaatagttattgagttcttagaaaaactctctcttttctttaatttagtgtttattatatttattcgttaattaaataattataaaagtcataggaatgtataattatattaatatatgtgttattttgtataaaaataaaaaccaaaaatattgtgaatgttttctggcgtgtcaatgcccagtataaagaaaagttgacacttaataagattcatcttgtaacaacctgttgaaagcttaccttccgccaagtgtagtgtgtaccggttactggaacaacaaggggtgacccttgcctatgaccgcggatagcgaactaggaattacaagtttttaaaataggacatcaagaagaagattattattaaaagagacaactacaactctataaaagcgtcggctggaaggcgtgagttcccagcgtattctaatctattggggatacaagaagcaatagacgttcgactacggagtgtcgttttaccaccccccaacgatc

SEQ ID NO: 15279 - DNA, 675 bp, synthetic construct; identical to SEQ ID NO: 2281
  source 1..675: mol_type = other DNA

SEQ ID NO: 15280 - DNA, 538 bp, synthetic construct; identical to SEQ ID NO: 2098
  source 1..538: mol_type = other DNA

SEQ ID NO: 15281 - DNA, 340 bp, synthetic construct; identical to SEQ ID NO: 1623
  source 1..340: mol_type = other DNA

SEQ ID NO: 15282 - DNA, 490 bp, synthetic construct; identical to SEQ ID NO: 2007
  source 1..490: mol_type = other DNA

SEQ ID NO: 15283 - DNA, 641 bp, synthetic construct; identical to SEQ ID NO: 2231
  source 1..641: mol_type = other DNA

SEQ ID NO: 15284 - DNA, 1000 bp, synthetic construct; identical to SEQ ID NO: 2626
  source 1..1000: mol_type = other DNA

SEQ ID NO: 15285 - DNA, 302 bp, synthetic construct; identical to SEQ ID NO: 1490
  source 1..302: mol_type = other DNA

SEQ ID NO: 15286 - DNA, 692 bp, synthetic construct; identical to SEQ ID NO: 2301
  source 1..692: mol_type = other DNA

SEQ ID NO: 15287 - DNA, 707 bp, synthetic construct
  source 1..707: mol_type = other DNA
cccgcgtgtcgaagctgggcccatcacgcttgcgaaagcagccatcttcgcagccactgtcggcgccgctttgaccacgataatagccatggacgccgatgtttttgatttactacaacccatgcagagcatgctctccagcattaacaacgttatcaaagacactgcctacggcaacgtcataaccaatgacacctatgacgctgtcgtcgatatcgccatagacactgagagtataaagcgatcttcagctgacactgctacacgcatctctgctgtcgtgaccaacacccagaatacggtcgctaaactcactgctgttgaagctctactggcgactatcgaagcgaacgtcgcgacgatgaccggcgtacaagctttgatgcacacccaaaacgctaatctcatggctatgcttactactaagttagacgccatcttgagagctatagaagccgttaatgcgcccggctctttcctgaagcgcatgaatgccgcggcaaacggcttgagtgcgacgtctctcgtttccctcgattttactggggatgtttgtgaatacgaccccctaggcttcggcccgattgagtgcgagggaacagaaatactgaagaccgatatgcagggcataaaattcaccttcgtttgatttagaataaataatcacttaataaaattagattctaaatcaattgaaagcattcaac

SEQ ID NO: 15288 - DNA, 1000 bp, synthetic construct; identical to SEQ ID NO: 265
  source 1..1000: mol_type = other DNA

SEQ ID NO: 15289 - DNA, 266 bp, synthetic construct
  source 1..266: mol_type = other DNA
gttgtagggatacattctaccgacgcgtcctttcctttgtaaattcacagcttgatgatgtatgtcatcaagttcttgttgccattctttcgaatactcattataaaaatgagcatttatctgtgaatttactcaatcatttgaaacaccagttaatccctactagctggtcttcacttgatgtttcatgtatatatgttaatttccatttacttacaagtattcattcgcttaatgatactcctacatcatcttttactgcttac

SEQ ID NO: 15290 - DNA, 471 bp, synthetic construct; identical to SEQ ID NO: 1964
  source 1..471: mol_type = other DNA

SEQ ID NO: 15291 - DNA, 260 bp, synthetic construct
  source 1..260: mol_type = other DNA
agtacgtattgttgaacaaacaatacatcccctataccaagcgcactctttaccccctagaaatagggatccacggaaagagcctatagcaatataggagccaacgctgcacaagcgaatagctgcaaaagctgcccgctgcaaagcgacgagctgaataagctacccgctgtaccaagcgaagagctgtataagctacccgctgcacaagcgaagagctgcaaagctttacgctgcacaagcgtcattcctgaacaagg

SEQ ID NO: 15292 - DNA, 527 bp, synthetic construct
  source 1..527: mol_type = other DNA
ccaagttcgcaaatagaccaaaacgggtggttaaccatgtccaccgtcctcttagagggaacgaacttggaatcacgtactaccaagttcgcaaatagaccaaaacgggtggttaaccatgtccaccgtcctcattgagggaacacctagggagtctcggctgcaaactgccggacacttcagaccaccagactagaaagtagtaccttggaaaaggggtcattgatcggtattccgttccgaacacggatatctttgtattaactctcctaaagcagactgtggagagctaactcacctcacattgtttgacgctgtgtgttgtggggatatgataacgagagatgataggacccatccatcctatttgtgagaaaactaagcctgactttcttcggaagggacgcccacgcggatgggataaaaggttgaagatcaaactgatatgatgtgtcgagagaaagattttagaaaagtggtcagaagtgagaccataaaaatagactataaacaccccaacaatcaag

SEQ ID NO: 15293 - DNA, 410 bp, synthetic construct; identical to SEQ ID NO: 1801
  source 1..410: mol_type = other DNA

SEQ ID NO: 15294 - DNA, 418 bp, synthetic construct
  source 1..418: mol_type = other DNA
tggttaaccatgtccaccgtcctcattgagggaacacctagggagtctcggctgcaaactgccggacacttcagaccaccagactagaaagtagtaccttggaaaaggggtcattgatcggtattccgttccgaacacggatatctttgtattaactctcctaaagcagactgtggagagctaactcacctcacattgtttgacgctgtgtgttgtggggatatgataacgagagatgataggacccatccatcctatttgtgagaaaactaagcctgactttcttcggaagggacgcccacgcggatgggataaaaggttgaagatcaaactgatatgatgtgtcgagagaaagattttagaaaagtggtcagaagtgagaccataaaaatagactataaacaccccaacaatcaag

SEQ ID NO: 15295 - DNA, 252 bp, synthetic construct
  source 1..252: mol_type = other DNA
gtcatttgaccgtgtgtgggtttccctctaccttgactaacttgttcggaaaacagaggtaaatattttactataactataacaaaacactactatcctagcagagggtaaactggtcaaaacccggccacccgcaatcctaaaagcggccccgggctaaaaaccagccatgctggataaaccacacggagggatataggcgtgtaaatctctagtgcccaattctacccgaaaggcaccgagagatacacc

SEQ ID NO: 15296 - DNA, 769 bp, synthetic construct; identical to SEQ ID NO: 2396
  source 1..769: mol_type = other DNA

SEQ ID NO: 15297 - DNA, 810 bp, synthetic construct
  source 1..810: mol_type = other DNA
gatatgcaagttttaacttgcatatcatctgacagactcactgtataactgaagtcctgattagggaatgtactaatcacagactcactgtataactgaaatcctggttagggagctgtactaactcgttgccaactcgtaaagttgaagacagcctcactgtataactgaaatcctggttagggagctgtactaactcgttgccaactcgtaaagttgaagacagcctcactgtataactgaaatcctggttagggagtgtactaactcgccttattccgtagcgttgtgtcggataactttcctcacttattttacttctaagttttaatacttactatcaaatttgtgtgttttaaaatgttatatatatttatatttcatttcttttaacttgatctcccaaggcttgccttgtgttatcaagctattgtgtatctaccactatcattacattataatcgcttttagccctatagattataatgtaaaatctttcttttcaaatgtgctatttgtcccttgcgtgtatggtactaatgtactccccgcctgggttatccaattcttagaactcaacactctaagaaggcatgtttcaagtcctgcgtaagaccatatctcttttaggtgtctagcgcgtttttatgtattgtgtgaagaactaagcaaaggaaatacttctgtataaatacctccttagttcggcttgatccggaatcagcacccggcgcataagaagtatcaacgtatgcagccctatgtgagacccacgtggattcaatatggctataaggacgaccatacagt

SEQ ID NO: 15298 - DNA, 757 bp, synthetic construct; identical to SEQ ID NO: 2384
  source 1..757: mol_type = other DNA

SEQ ID NO: 15299 - DNA, 257 bp, synthetic construct
  source 1..257: mol_type = other DNA
ttatacgattgatcatttgatccgaagttgattcgagtcatttgtgtttcgtgtagtgatcttttgaagcgccagaagaattttcagagcactcatacgcaatacccttgtctgttgaagcaggatttgcccgcgtttttgagtactaggtattccgtagcattttcgaattctacaaacttacgacgatttatttcgttcaacgtgcgcagcgttgattaaagtcaagcaccttgttaaggtaaatttgacgcgaa

SEQ ID NO: 15300 - DNA, 292 bp, synthetic construct
  source 1..292: mol_type = other DNA
atttaaatataatttttcaaactcataatcaaaatgcatatcaaaatttatctatgtctatttttaatgtcacttgttaatttcattccgttgcactcccgatcgttggaaaatggtcatcttagggttaacgttacttattctccgttgtcctttggttctactaaatttcccatcgatcaatacactcctcctccgtttgtagttgtcaatgatggttcggtaattgatcgttctcgtcgccgatttccgaattaagattaaaatttaatttttcaaatttataatcaaa

SEQ ID NO: 15301 - DNA, 458 bp, synthetic construct; identical to SEQ ID NO: 1936
  source 1..458: mol_type = other DNA

SEQ ID NO: 15302 - DNA, 292 bp, synthetic construct
  source 1..292: mol_type = other DNA
atttaaatataatttttcaaactcataaccaaaatgcatatcaaaatttatctatgtctatttttaatgtcacttgttaatttcattccgttgcactcccgatcgttggaaaatggtcatcttagggttaacgttacttattctccgttgtcctttggttccactaaatttcccatcgatcaatacactcctcctccgtttgtagttgtcaatgatggttcggtaattgatcgttctcgtcgccgatttccgaattaagattaaaatttaatttttcaaatttataatcaaa

SEQ ID NO: 15303 - DNA, 458 bp, synthetic construct
  source 1..458: mol_type = other DNA
cttccggttgccgacgcttccctcagttataaagattatcttaacgaaaaaatttttctcgctcctcctcaacctcctataagaaatcaaacctcggtctctccgaccttaagtactactactgccgttagtgtcccgactacaacacccgagatcgtcactacgtctcgtccgataccatctactactagaaagtcgagaccagtccctccatcttccattcctccatacatcgattgcggatgtctcgaaccacatcagtgcggtcctcctttaggcctccctcagaatgaccctcgtatgtctcgtgattaccctagggtttattcacctaactgcaattggtctgatggaaaacctcaggacacctatataagacctcctgacactcgcaatcgtcatcaaaatcaacgatcccgcaatatttaatttgaatataatttatcaattctataaaa

SEQ ID NO: 15304 - DNA, 649 bp, synthetic construct; identical to SEQ ID NO: 2242
  source 1..649: mol_type = other DNA

SEQ ID NO: 15305 - DNA, 1000 bp, synthetic construct
  source 1..1000: mol_type = other DNA
tcctcgctagaatgaaatttgctttcgtttgttttgagcgtttgtacctaattctctagtttaaatatcacaaaaaccccaccccttttagttttaagttaggttaagtagaaattttaaatttcgatgtaaatgtagattttccttatttgaatttaataataaatgtcgtaaatatatgttcttttgaattaatatatatttatgtagatattttaaattatagtttagactaaattaaaaccttacgttcgtagggtagaagaatattaaaagtactggagcagcgcctgatggtttaatatttttctaatgaatcatgcttcttatagtagccggtaaaatgcgttaaatagatcgtgtaatatggtgaaagtcttatttaagatactattttgttggaaagtaagattaagaggagcattgcaggcaaccacaagaagttaattatcattataaaggtttaatgatattagcgccatcgcctggttagatatggtatactggcaaggatagctgaacctataccttttaagccatgtcgaactgctagatgatcttggagctgttgtaatctttgttcatttctggttttgttagtacatataggtgtctaaaatttgttatttctgaattgtataagtacgtcaaagcctattgtaaaggtgcgggttataacaccatcactcttagtccccattttgggtatggacagtgaaaaaagtcttatatgaatttacacgcttcttctggatgatgtttctttagcatcttaaggaagacatgagtcacggcaagccgttccctgacgatgattgcacgtagcgacatgtgacgagctatttgaagccccattgacctggggaagcgcggtagctgtatcgcgaatgggtcagggtgaaaatccctagctgttatttccaactgtgattcatacagttaaaaacaggcacatcttttaaatttttgattatattgattttctttgaatttatccatt

SEQ ID NO: 15306 - DNA, 306 bp, synthetic construct; identical to SEQ ID NO: 1500
  source 1..306: mol_type = other DNA

SEQ ID NO: 15307 - DNA, 353 bp, synthetic construct; identical to SEQ ID NO: 1653
  source 1..353: mol_type = other DNA

SEQ ID NO: 15308 - DNA, 1000 bp, synthetic construct; identical to SEQ ID NO: 2627
  source 1..1000: mol_type = other DNA

SEQ ID NO: 15309 - DNA, 416 bp, synthetic construct; identical to SEQ ID NO: 1822
  source 1..416: mol_type = other DNA

SEQ ID NO: 15310 - DNA, 570 bp, synthetic construct
  source 1..570: mol_type = other DNA
gtacatagaacttacagttttatctcactgacgacagctcctaacgtatgctcgtaacgccttgctgcggaaacaatgcatgtgctgtggtttgcgagtggtcaagctagcgatggaaagatatttatgtgaatgccgggcattcgcattcatttctcattgacgacagctcctatcgtacgctcctaacgccttgctgcggaaacaatgcatgtgctgtggtgtgcgtgtggtcaagctagcgatgagaataaatattctgactatttttagtcaatacccctgaactctacatactggatacccatctaaactaactacgctccagacgactaaatttagtaaggcttatgtagagtggtttgttatttaacgtgcgtgtaccctaggcagccccaaaaacacgcgtcaggagacagtctcagtcactttgggcagagttggcagccacgcttgcgtggtgagacttatctattgcctgctatttctaatgactctaataatgatagttcttcttcttctgctggtcttctacctgagagttcagttacgaattctgagggtaggaca

SEQ ID NO: 15311 - DNA, 290 bp, synthetic construct
  source 1..290: mol_type = other DNA
gtggtccccgtttggtggaacgtaaaaccagcccgggtgcgaatcccgctaaaagcgccccattgacctcgacactcagtgggttctttctcttcatgtaagtttctgcctcagttttgcaaaactgctgcggggctaatgttataaatgtgtgcgacaaagtagctttgaataactctcgctcacagaggcgcttaccggagttcgcctcccggataacagtcccccccgcagtaagatgctcttctactgcttaatttcaaactgtgacacatgactctctatatacc

SEQ ID NO: 15312 - DNA, 694 bp, synthetic construct
  source 1..694: mol_type = other DNA
cttttgagtgattaacccgcctttataaagttttgccgattaaatactcatgttcttgtgtgtttattttggacgtggaaactagtttcaaaaagacattgaagagcgcaataacgtcgaacttggaaaaagtttgtatacccgaaagctctgggaaccgtcgttgacgggaaattgagaccgttgtgtatgctttgtgatcttcaccgtctcacccacctaatcggacgcttattgtccttggatttgagcctttgaaaaaggaagcccgcgacttatagaggtacattagtgcgttgtctgccaaaacaggtacgtacggattacaccttaaggcccctagagttgttcaatttgcccccttaatcggatccggcgaacactctatttatttaaacccacccatttacagttaaagctttacaacttaaaagtaagccggacggaaacgttaatccgtaattattttatttattttacattattatatagattatcactatagatatatttagatatttaagaccagtatttagttgccttaagcaacttttatacttattttttgtaatactaaagtttttaggtgcaaaggtagctcttctagctatcgcgctcctttttattttaggaatattatcccctaggaattatttgctgattacattgtgcttgtcattatataacgtgtacg

SEQ ID NO: 15313 - DNA, 390 bp, synthetic construct
  source 1..390: mol_type = other DNA
gtttttacttagcatcaagcttcctcccaaactgtattcatacattggtattaaaacgtatttatacgtaattttgcaaacggttcaccggttattattggcgatttatcgttctcgtatattttattttcatatattcattttattcctcatttttaaaatattaatcattatactaacaatttcattaaatcactatatatcactaaaaatttttataattattatattaacaatttcattaatattattattaattatattatataactacaaatttgtggttttaaattactatattaattcgcacaattctattaattttcgaacatattcagtatacatatattctacctttttaatcttcacctttcatctaataacctaaaa

SEQ ID NO: 15314 - DNA, 420 bp, synthetic construct; identical to SEQ ID NO: 1831
  source 1..420: mol_type = other DNA

SEQ ID NO: 15315 - DNA, 494 bp, synthetic construct
  source 1..494: mol_type = other DNA
attttcttagaaaagaacaaaaatttcttttgttcaatgtaagaatatatgtctggggaagcaccaagcgaactaactcggttactagtggggtgttctttgctttgaataatattcaggcctcatgttagttatatatatatataacaatgtgatgttgggcatatattctttctattgttaaatatatttattttgacgttttaaatgacgaaatatttaaattattttatttatttattttgaatttctttgtcactttctttattctttaaagaaatgtgattctaaccgtcctgaattttctttaagatcgcagtacctgaattgggagccgtacttaactaaaattcttggtagttgccttaactgtgttagcagtgtttaagggtgaaaacattcaactttacttatgtagtttaacggtaaaatgtctatataggtaagggtttctgtgtcggagcagccttattcaagggtttcagggttttatt

SEQ ID NO: 15316 - DNA, 829 bp, synthetic construct; identical to SEQ ID NO: 2462
  source 1..829: mol_type = other DNA

SEQ ID NO: 15317 - DNA, 810 bp, synthetic construct; identical to SEQ ID NO: 2445
  source 1..810: mol_type = other DNA

SEQ ID NO: 15318 - DNA, 809 bp, synthetic construct
  source 1..809: mol_type = other DNA
catggggacgatatccccatgcgatcggcctgtgttaatcagactctgttatacctagtgtcttatttggcttccagtaagacacaatttggtatcagacaataattaacaaaacaaattaattttaaggtataattttaagtaacttagttcaaagggctattaaacccctgattagtaacaaaattataaaatactcggttctgaccggggtaattcttttaacaataatatatgataattttatcgaagataacagttagcacctaccagatggcgctgttgcgtagagtataacccccaactctacttcccaactttgataatttttaattatatttttggagaattatgtataaaaattgaggaaacccctcaggtttaactacgacggcgaattaagatgagcgaaagtaaagtgcttaccaaggaggcgtaataatagggacccctctaaccagcaaacactggacgttacttaaggtaagaattacattttattagtagccggcttatagtaggcgtttaaggttaagcgacaaccctagtggtttacagtattctagcctatgtgctaatcctcgacggcagtagatcgctggcgatcgggaatatacctggatgtgaattaagtaaatctataggtatggatactcttctgaccctccagttttacactgtactaatcagctgaggaagagcagattatttcctttttttttcttcttatggtgacaattttatgatttatttataaagttgttatttaatttgaattttattgtattgacttatatattttatttaaa

SEQ ID NO: 15319 - DNA, 819 bp, synthetic construct
  source 1..819: mol_type = other DNA
gtgaggttgagagcttttgctctcaacctcaccagttttcccaagatgtcttgatatcacactcgactaacatcgaggttcttacaccaaacaatgttatcagaagcattggagaacagtgatagttctaatcttcggcaccgatgtgctaccaacggcggttctgtacgccacggagttggtactagcatcaaaataaatttaccttgttattttaatgagtactttgtacttagtacgattgttatttattattatggtttagataattttattatttcttatctttatgtatatatattgagcagtattattattttaattgtaaatattagttataaatgtaaatattagcttaattgtataataaccctgaaatatcttaaaggatttgcctgtccccccattgcaagttatacacttagtagacttgtgaaaggtccgtccctgtattatatggatagtggggtctctgcagtcccacttgaagtatatgtcagacggctgccttggcaagggcgacgtgaaaaccgatgaaacttaacgcttatcccgatgaggcttcaattcgattcaacccctctggagttatcatgtacgttgaatcactatggatggtgaatgctgaccggagtagaccgttatgtagaagttgagtagcgacccccaagtgtagtacgcacctaaactgtaggcgtttctagtccctttttgatatccctaatgtcccgattgcttttatgatcaaatggcccggaatttatcggagcgtgagaacctcctgtatcttaagtctgtctcaacccactgctttatgaa

SEQ ID NO: 15320 - DNA, 397 bp, synthetic construct; identical to SEQ ID NO: 1771
  source 1..397: mol_type = other DNA

SEQ ID NO: 15321 - DNA, 311 bp, synthetic construct; identical to SEQ ID NO: 1520
  source 1..311: mol_type = other DNA

SEQ ID NO: 15322 - DNA, 973 bp, synthetic construct; identical to SEQ ID NO: 2561
  source 1..973: mol_type = other DNA

SEQ ID NO: 15323 - DNA, 250 bp, synthetic construct
  source 1..250: mol_type = other DNA
tgattggcgccacgacctgccgtatgtcattaaaagacgggacctgacctgccgtatgtctttaaaagacgggcccagtacagtctgggtgtttagattaaacaaaactgcgctgtgtgtttggttaccaggagtcacgttgaacagtggcttcctaggcttcgcatggtggttctacacgttgacgagagtaggcaattttgtcgatgtttgcatatttatatattttattttatagcctagtacaaca

SEQ ID NO: 15324 - DNA, 471 bp, synthetic construct
  source 1..471: mol_type = other DNA
gcgatatacatgattttcttgcttatttcttgggccttgttataataaatagtgtgtgctattttatataacaagttctggcgtttgcttatcgcatcaaataagcttcttcttgtagacccgtctagtatagtctttaaactgctagatccggatttttgcagatccacaactattgcaccctgattgtttgggttaaaacaatatctagtttggagtaatccaatttaatctccggttccaaaccgctaacaaaagaagaagcttgcttctagtgcacaagaactaattgcacttccgagttttaacactctgacctactttagctcaagagtaaaattgagccactgcgttctagctctcgaaccaaattgagcaactgcgttctagctctcgaaccaaattgagcacatattattttagtttaatatttatccatattatatttatttatttatttatattattagt

SEQ ID NO: 15325 - DNA, 572 bp, synthetic construct; identical to SEQ ID NO: 2138
  source 1..572: mol_type = other DNA

SEQ ID NO: 15326 - DNA, 1000 bp, synthetic construct; identical to SEQ ID NO: 2628
  source 1..1000: mol_type = other DNA

SEQ ID NO: 15327 - DNA, 252 bp, synthetic construct
  source 1..252: mol_type = other DNA
taagtcgcagtataatagccatctacaggtgtttcgagtagggctaagaggcttttgaaaaccctcgcatctgttattttgttttgtaatataagttttattatgatataatctattgggatttttccctctcctgaccggtcctttgtaaagcaactcgcggttgggttgtattgtatctttagtcatgctagccatgttggcctgcacgttcgcagagtcggacattttctagtctgtagtaaagatata

SEQ ID NO: 15328 - DNA, 655 bp, synthetic construct; identical to SEQ ID NO: 202
  source 1..655: mol_type = other DNA

SEQ ID NO: 15329 - DNA, 983 bp, synthetic construct; identical to SEQ ID NO: 2565
  source 1..983: mol_type = other DNA

SEQ ID NO: 15330 - DNA, 1000 bp, synthetic construct; identical to SEQ ID NO: 2629
  source 1..1000: mol_type = other DNA

SEQ ID NO: 15331 - DNA, 877 bp, synthetic construct; identical to SEQ ID NO: 2512
  source 1..877: mol_type = other DNA

SEQ ID NO: 15332 - DNA, 566 bp, synthetic construct; identical to SEQ ID NO: 2134
  source 1..566: mol_type = other DNA

SEQ ID NO: 15333 - DNA, 252 bp, synthetic construct
  source 1..252: mol_type = other DNA
agaggctaaacaggggctattcgctataaacgcgactcctaaaataaaagtaaaaaagatgtatttttaatatacatacgtagttagtaaaaacaaaggggctattcgctataaacgcgactcctaaaataaataaataaaaaagatgtatttttaatatacatacgtagttagtaaaaacaaaggggctattcgctataaacgcgactcctaaaataaataaatataacaagtctattacacgactctaaa

SEQ ID NO: 15334 - DNA, 393 bp, synthetic construct; identical to SEQ ID NO: 1762
  source 1..393: mol_type = other DNA

SEQ ID NO: 15335 - DNA, 974 bp, synthetic construct
  source 1..974: mol_type = other DNA
acataaagtgactcttatgaactatttgagtcacgtattggaatttatttgatgaagatacatcatacacaagactttgagcttgatgtatatgtatgctttgttggattgatttctttacaactttatgcactattagtactacccttcaacactacataataggtagatgaatgttggagtactagaatcacaacgacggtggtgaatccgtgtctcattttcaagttatttaaagaaaatgaggatcaggtgctacgttttataacgtagcacttttatttgtacatatttagtgtgatatcttgtagccattatggcgaagatacgagttgtagattatttatttgtcagcaaccttggtggcttttcccaaaaagtgggaatgactttaatcttagcatgaaataaaaaatataaaattataaaactattacaaaaatatttacatgttatttacataaattaatcttcatctgaaaaatttatgctaagagattggttttgattgatattatagcccagaataaaacatctaacatacctggcacttttcgctttgcgattggtataagacccagacagagtgtgtctaatttgttatttgtgtataaaaggagctccagcgcctgagtaatggctggaaggcacttctggacttgaagtgtttgctatagatcgttgaaatcagatcaaaaatttcgtttttgttgaagcgaaattctggataagtcccagtttagttttactcaacactcagcgcggggagctacccgcgtgacgccgagggtcggacaggaaccctctccccatagctttatcaattaaagctccctacgtattcaattctgaatagctgtactttcttttcttcttttcaatgcaatttattatattattttctttcaccgacttgataaaacattatatagatctttaattttagatctttttacgatattacgaattttaaa

SEQ ID NO: 15336 - DNA, 716 bp, synthetic construct; identical to SEQ ID NO: 2329
  source 1..716: mol_type = other DNA

SEQ ID NO: 15337 - DNA, 258 bp, synthetic construct
  source 1..258: mol_type = other DNA
gaacaaaagcataaagccccataattcatcaatactactttttgcgtgtgattacaccgttccaagtgtttgatgaattccggaattcgctgattattgcgtgtgattacaccgttctaatctcgtttttcggctcgctttcgccaacgccttatttcaactagcttgtttcaactagattgatcttactcgccaacgctcacttaacactgtgtgattacaccattgttaatcctactcgccatcgttgcagtcaag

SEQ ID NO: 15338 - DNA, 332 bp, synthetic construct; identical to SEQ ID NO: 1588
  source 1..332: mol_type = other DNA

SEQ ID NO: 15339 - DNA, 969 bp, synthetic construct; identical to SEQ ID NO: 2557
  source 1..969: mol_type = other DNA

SEQ ID NO: 15340 - DNA, 976 bp, synthetic construct
  source 1..976: mol_type = other DNA
gtcgggttttaatcccgacgcgcgtcttttgacctcaatgtaagtagcttatttacttagcaagagtattgtttgaagtaataagttcgattgttgcataggttttaagtaaagtttctgtaagtggctagtaaagaatgaaatgtccaggaatctagtgttaagttattttaaggttataatttactatcacctttaatttcatgttcatactagagttgctagttagcattgctagcttttgtaaacctttgttcatttatattttgagtcactcggttgtaggagatgagaacctacgactgtttcactttccaggatgtgcttttgttgcctgaagattttagtgtcagagccacgagccagtccagacaagtgtagtacgacactaagatgaagttcaccaatagcgaccggagacggtgcgttagcgaagttcatttctttagtatctatacaagcctatcaagtgggaaagttgatactttacttgaatcattaagcctttcggaaatggccctcaggatctaactaaagtatggtagtaccctgacttgtgtgcggttagctaaattatttagcggactattaacaagcgtttcgcccagaaagtaatatgaggatagtataattttgataagtacctttaggaagctttgatgagaacttaaccatgatatataatttcgggcagagccgtgactcgggagtaattttactcgaatataagctttaacacggtatcatgggttatgaattgagtttactcgcagtacaggctcccgcaattggcctgattacattactgtagctaatgacatttgactgagagcgatttggtttttaaaaattcgtttttctcttcaaaattatactgggcaagaaactcaaaaagagaacttcttgcttaaataaaattgcaaacaattaattttatatttctttgaattttaattttgtttaatttttatttgaa

SEQ ID NO: 15341 - DNA, 729 bp, synthetic construct
  source 1..729: mol_type = other DNA
cataaaactatactaacgtattggcttatcaggtttgtattcaggtacagatcatagtcggttcctatccaggtaggaactgtataccggcggctcgtaaggcgagttgctgtaaactggtacgtagccagactacgtactgtaataactggagtcccgaattacgcgactctgtaaatcccggtgttccgctagacggatcactgtataattgctgctcatctaggtgaggagtgtaaactgaataacgttaagcgctattctcaaacaccacgacgttctttcgggagcgttgtttaactgctgactttctaggaagtcagtgtaaaaattccgcaagttcgcttgtggatctaaaataggagaaactttcgaggtttttcccgtctgtctcgtgcttagctcgcttttgacggacagtgtcgcacacgcgttgtcacggaagaccgaattttgctcttctacgcttcgcctacgcttcacatctctgtctctcgcagccgcactgtctttgtgctttgcgatttgattgaacaattgcacttccatcatttggaactgctgaggaccggacttgctcctcacgcacccaactcgttgtcggtgcatcgttcttctttcgggaagcactttcttactgtctccggaattattttcggggtctgtctagcgctccattgagcccttctaccatcgtctcttggccaaggacgattacacactttcatc

SEQ ID NO: 15342 - DNA, 728 bp, synthetic construct
  source 1..728: mol_type = other DNA
cataaaactatactaacgtattggcttatcaggtttgtattcaggtacagatcatagtcggttcctattcaggtaggaactgtataccggcggctcgtaaggcgagttgctgtaaactggtacgtagccagactacgtactgtaataactggagtcccgaattacgcgactctgtaaatcccggtgttccgctagacggatcactgtataattgctgctcatctaggtgaggagtgtaaactgaataacgttaagcgctattctcaaacaccacgacgttctttcgggagcgttgtttaactgctgactttctaggaagtcagtgtaaaaattccgcaagttcgcttgtggatctaaaataggagaaactttcgaggtttttcccgtctgtctcgtgcttagctcgcttttgacggacagtgtcgcacacgcgttgtcacggaagaccgaattttgctcttctacgcttcgcctacgcttcacatctctgtctctcgcagccgcactgtctttgtgcttgcgatttgattgaacaattgcacttccatcatttggaactgctgaggaccggacttgctcctcacgcacccaactcgttgtcggtgcatcgttcttctttcgggaagcactttcttactgtctccggaattattttcggggtctgtctagcgctctattgagcccttctaccatcgtctcttggccaaggacgattacacactttcatc

SEQ ID NO: 15343 - DNA, 730 bp, synthetic construct
  source 1..730: mol_type = other DNA
aaaaaactatactatcgtattggcttatcaggtttgtatccaggtacagatcatagtcggttcctatccaggtaggaactgtataccggtagctcgtaaggcgagttgctgtaaactggtgcgtagccagactacgtactgtaataactggagtcccgaattacgcgactctgtaaaccccggtgttccgctagacggatcactgtataactgctgctcatctaggtgaggagtgtaaactgaataacgtcaagcgctattctcaaacaccacgacgttctttcgggagcgtcgtttaactgctgactttctagggagtcagtgtaaaaattccgcaagttcgcttgtggatctaaaataggagaaactttcgaggtttctcccgtctgtctcgtgcttagctcgcttttgacggacagtgttgcacacgcgttgttacggaagaccgaattttgctcttctacgcctcgcctacgcttcacatctctgtctctcgcagccgcactgtctctgtgttttgcgacttgatagaacaactgcacttccatcatttggaactgctgaggaccggacttgctcctcacgcacccaactcgtcgtcggtgcatcgttcttctttcgggaagcactgtctttttgtctccggattttactttccggggtctgtctagcgctctactgagcccttctaccatcgtctcttggccaaggacgatcatacactttcatc

SEQ ID NO: 15344 - DNA, 730 bp, synthetic construct
  source 1..730: mol_type = other DNA
tgataaaactatactaacgtattggcttatcaggtttgtattcaggtacagatcatagtcggttcctattcaggtaggaactgtataccggcggctcgtaaggcgagttgctgtaaactggtacgtagccagactacgtactgtaataactggagtcccgaattacgcgactctgtaaatcccggtgttccgctagacggatcactgtataattgctgctcatctaggtgaggagtgtaaactgaataacgttaagcgctattctcaaacaccacgacgttctttcgggagcgttgtttaactgctgactttctaggaagtcagtgtaaaaattccgcaagttcgcttgtggatctaaaataggagaaactttcgaggtttttcccgtctgtctcgtgcttagctcgcttttgacggacagtgtcgcacacgcgttgtcacggaagaccgaattttgctcttctacgcttcgcctacgcttcacatctctgtctctcgcagccgcactgtctttgtgctttgcgatttgattgaacaattgcacttccatcatttggaactgctgaggaccggacttgctcctcacgcacccaactcgttgtcggtgcatcgttcttctttcgggaagcactttcttactgtctccggaattattttcggggtctgtctagcgctctattgagcccttctaccatcgtctcttggccaaggacgattacacactttcatc

SEQ ID NO: 15345 - DNA, 724 bp, synthetic construct
  source 1..724: mol_type = other DNA
aactatactaacgtattggcttatcaggtttgtattcaggtacagatcatagtcggttcctatccaggtaggaactgtataccggcggctcgtaaggcgagttgctgtaaactggtacgtagccagactacgtactgtaataactggagtcccgaattacgcgactctgtaaatcccggtgttccgctagacggatcactgtataattgctgctcatctaggtgaggagtgtaaactgaataacgttaagcgctattctcaaacaccacgacgttctttcgggagcgttgtttaattgctgactttctaggaagtcagtgtaaaaattccgcaagttcgcttgtggatctaaaataggagaaactttcgaggtttttcccgtctgtctcgtgcttagctcgcttttgacggacagtgtcgcacacgcgttgtcacggaagaccgaattttgctcttctacgcttcgcctacgcttcacatctctgtctctcgcagctgcactgtctttgtgctttgcgatttgattgaacaattgcacttccatcatttggaactgctgaggaccggacttgctcctcacgcacccaactcgttgtcggtgcatcgttcttctttcgggaagcactttcttactgtctccggaattattttcggggtctgtctagcgctccattgagcccttctaccatcgtctcttggccaaggacgattacacactttcatc

SEQ ID NO: 15346 - DNA, 726 bp, synthetic construct
  source 1..726: mol_type = other DNA
aaaactatactaacgtattggcttatcaggtttgtattcaggtacagatcatagtcggttcctattcaggtaggaactgtataccggcggctcgtaaggcgagttgctgtaaactggtacgtagccagactacgtactgtaataactggagtcccgaattacgcgactctgtaaatcccggtgttccgctagacggatcactgtataattgctgctcatctaggtgaggagtgtaaactgaataacgttaagcgctattctcaaacaccacgacgttctttcgggagcgttgtttaactgctgactttctaggaagtcagtgtaaaaattccgcaagttcgcttgtggatctaaaataggagaaactttcgaggtttttcccgtctgtctcgtgcttagctcgcttttgacggacagtgtcgcacacgcgttgtcacggaagaccgaattttgctcttctacgcttcgcctacgcttcacatctctgtctctcgcagccgcactgtctttgtgctttgcgatttgattgaacaattgcacttccatcatttggaactgctgaggaccggacttgctcctcacgcacccaactcgttgtcggtgcatcgttcttctttcgggaagcactttcttactgtctccggaattattttcggggtctgtctagcgctctattgagcccttctaccatcgtctcttggccaaggacgattacacactttcatc

SEQ ID NO: 15347 - DNA, 728 bp, synthetic construct
  source 1..728: mol_type = other DNA
ataaaactatactaacgtattggcttatcaggtttgtattcaggtacagatcatagtcggttcctattcaggtaggaactgtataccggcggctcgtaaggcgagttgctgtaaactggtacgtagccagactacgtactgtaataactggagtcccgaattacgcgactctgtaaatcccggtgttccgctagacggatcactgtataattgctgctcatctaggtgaggagtgtaaactgaataacgttaagcgctattctcaaacaccacgacgttctttcgggagcgttgtttaactgctgactttctaggaagtcagtgtaaaaattccgcaagttcgcttgtggatctaaaataggagaaactttcgaggtttttcccgtctgtctcgtgcttagctcgcttttgacggacagtgtcgcacacgcgttgtcacggaagaccgaattttgctcttctacgcttcgcctacgcttcacatctctgtctctcgcagccgcactgtctttgtgctttgcgatttgattgaacaattgcacttccatcatttggaactgctgaggaccggacttgctcctcacgcacccagctcgttgtcggtgcatcgttcttctttcgggaagcactttcttattgtctccggaattattttcggggtctgtctagcgctctattgagcccttctaccatcgtctcttggccaaggacgattacacactttcatc

SEQ ID NO: 15348 - DNA, 726 bp, synthetic construct
  source 1..726: mol_type = other DNA
aaaactatactaacgtattggcttatcaggtttgtattcaggtacagatcatagtcggttcctattcaggtaggaactgtataccggtggctcgtaaggcgagttgctgtaaactggtacgtagccagactacgtactgtaataactggagtcccgaattacgcgactctgtaaatcccggtgttccgctagacggatcactgtataattgctgctcatctaggtgaggagtgtaaactgaataacgttaagcgctattctcaaacaccacgacgttctttcgggagcgttgtttaactgctgactttctaggaagtcagtgtaaaaattccgcaagttcgcttgtggatctaaaataggagaaactttcgaggtttttcccgtctgtctcgtgcttagctcgcttttgacggacagtgtcgcacacgcgttgtcacggaagaccgaattttgctcttctacgcttcgcctacgcttcacatctctgtctctcgcagccgcactgtctttgtgctttgcgatttgattgaacaattgcacttccatcatttggaactgctgaggaccggacttgctcctcacgcacccaactcgttgtcggtgcatcgttcttctttcgggaagcactttcttactgtctccggaattattttcggggtctgtctagcgctctattgagcccttctaccatcgtctcttggccaaggacgattacacactttcatc

SEQ ID NO: 15349 - DNA, 727 bp, synthetic construct
  source 1..727: mol_type = other DNA
aaactatactatcgtattggcttatcaggtttgtatccaggtacagatcatagtcggttcctatccaggtaggaactgtataccggtagctcgtaaggcgagttgctgtaaactggtgcgtagccagactacgtactgtaataactggagtcccgaattacgcgactctgtaaaccccggtgttccgctagacggatcactgtataactgctgctcatctaggtgaggagtgtaaactgaataacgtcaagcgctattctcaaacaccacgacgttctttcgggagcgtcgtttaactgctgactttctagggagtcagtgtaaaaattccgcaagttcgcttgtggatctaaaataggagaaactttcgaggtttctcccgtctgtctcgtgcttagctcgcttttgacggacagtgttgcacacgcgttgttacggaagaccgaattttgctcttctacgcctcgcctacgcttcacatctctgtctctcgcagccgcactgtctctgtgttttgcgacttgatagaacaactgcacttccatcatttggaactgctgaggaccggacttgctcctcacgcacccaactcgtcgtcggtgcatcgttcttctttcgggaagcactgtctttttgtctccggattttactttccggggtctgtctagcgctctactgagcccttctaccatcgtctcttggccaaggacgatcatacactttcatc

SEQ ID NO: 15350 - DNA, 726 bp, synthetic construct
  source 1..726: mol_type = other DNA
aaaactatactaacgtattggcttatcaggtttgtattcaggtacagatcatagtcggttcctattcaggtaggaactgtataccggcggctcgtaaggcgagttgctgtaaactggtacgtagccagactacgtactgtaataactggagtcccgaattacgcgactctgtaaatcccggtgttccgctagacggatcactgtataattgctgctcatctaggtgaggagtgtaaactgaataacgttaagcgctattctcaaacaccacgacgttctttcgggagcgttgtttaactgctgactttctaggaagtcagtgtaaaaattccgcaagttcgcttgtggatctaaaataggagaaactttcgaggtttttcccgtctgtctcgtgcttagctcgcttttgacggacagtgtcgcacacgcgttgtcacggaagaccgaattttgctcttctacgcttcgcctacgcttcacatctctgtctctcgcagccgcactgtctttgtgctttgcgatttgattgaacaattgcacttccatcatttggaactgctgaggaccggacttgctcctcacgcacccaactcgttgtcggtgcatcgttcttctttcgggaagcactttcttactgtctccggaattattttcggggtctgtctagcgctctattgagcccttctaccatcgtctcttggccaaggacgattacgcactttcatc

SEQ ID NO: 15351 - DNA, 729 bp, synthetic construct
  source 1..729: mol_type = other DNA
ataaaactatactaacgtattggcttatcaggtttgtattcaggtacagatcatagtcggttcctatccaggtaggaactgtataccggtggctcgtaaggcgagttgctgtaaactggtacgtagccagactacgtactgtaataactggagtcccgaattacgcgactctgtaaatcccggtgttccgctagacggatcactgtataattgctgctcatctaggtgaggagtgtaaactgaataacgttaagcgctattctcaaacaccacgacgttctttcgggagcgttgtttaactgctgactttctaggaagtcagtgtaaaaattccgcaagttcgcttgtggatctaaaataggagaaactttcgaggtttttcccgtctgtctcgtgtttagctcgcttttgacggacagtgtcgcacacgcgttgtcacggaagaccgaattttgctcttctacgcttcgcctgcgcttcacatctctgtctctcgcagccgcactgtctttgtgctttgcgatttgattgaacaattgcacttccatcatttggaattgctgaggaccggacttgctcctcacgcacccagctcgttgtcggtgcatcgttcttctttcgggaagcactttcttactgtctccggaattatttttcggggtctgtctagcgctccactgagcccttctaccatcgtctcttggccaaggacgattacacactttcatc

SEQ ID NO: 15352 - DNA, 729 bp, synthetic construct
  source 1..729: mol_type = other DNA
aaaaaaactatactaacgtattggcttatcaggtttgtattcaggtacagatcatagtcggttcctattcaggtaggaactgtataccggcggctcgtaaggcgagttgctgtaaactggtacgtagccagactacgtactgtaataactggagtcccgaattacgcgactctgtaaatcccggtgttccgctagacggatcactgtataattgctgctcatctaggtgaggagtgtaaactgaataacgttaagcgctattctcaaacaccacgacgttctttcgggagcgttgtttaactgctgactttctaggaagtcagtgtaaaaattccgcaagttcacttgtggatctaaaataggagaaactttcgaggtttttcccgtctgtctcgtgcttagctcgcttttgacggacagtgtcgcacacgcgttgtcacggaagaccgaattttgctcttctacgcttcgcctacgcttcacatctctgtctctcgcagccgcactgtctttgtgctttgcgatttgattgaacaattgcacttccatcatttggaactgctgaggaccggacttgctcctcacgcacccaactcgttgtcggtgcatcgttcttctttcgggaagcactttcttactgtctccggaattattttcggggtctgtctagcgctctattgagcccttctaccatcgtctcttggccagggacgattacacactttcatc

SEQ ID NO: 15353 - DNA, 728 bp, synthetic construct
  source 1..728: mol_type = other DNA
aaaaaactatactaacgtattggcttatcaggtttgtattcaggtacagatcatagtcggttcctattcaggtaggaactgtataccggcggctcgtaaggcgagttgctgtaaactggtacgtagccagactacgtactgtaataactggagtcccgaattacgcgactctgtaaatcccggtgttccgctagacggatcactgtataattgctgctcatctaggtgaggagtgtaaactgaataacgttaagcgctattctcaaacaccacgacgttctttcgggagcgttgtttaactgctgactttctaggaagtcagtgtaaaaattccgcaagttcgcttgtggatctaaaataggagaaactttcgaggtttttcccgtctgtctcgtgcttagctcgcttttgacggacagtgtcgcacacgcgttgtcacggaagaccgaattttgctcttctacgcttcgcctacgcttcacatctctgtctctcgcagccgcactgtctttgtgctttgcgatttgattgaacaattgcacttccatcatttggaattgctgaggaccggacttgctcctcacgcacccaactcgttgtcggtgcatcgttcttctttcgggaagcactttcttactgtctccggaattattttcggggtctgtctagcgctctattgagcccttctaccatcgtctcttggccaaggacgattacacactttcatc

SEQ ID NO: 15354 - DNA, 726 bp, synthetic construct
  source 1..726: mol_type = other DNA
aaaactatactaacgtattggcttatcaggtttgtattcaggtacagatcatagtcggttcctattcaggtaggaactgtataccggcggctcgtaaggcgagttgctgtaaactggtacgtagccagactacgtactgtaataactggagtcccgaattacgcgactctgtaaatcccggtgttccgctagacggatcactgtataattgctgctcatctaggtgaggagtgtaaactgaataacgttaagcgctattctcaaacaccacgacgttctttcgggagcgttgtttaactgctgactttttaggaagtcagtgtaaaaattccgcaagttcgcttgtggatctaaaataggagaaactttcgaggtttttcccgtctgtctcgtgcttagctcgcttttgacggacagtgttgcacacgcgttgtcacggaagaccgaattttgctcttccacgcttcacctacgcttcacatctctgtctctcgcagccgcactgtctttgtgctttgcgatttgattgaacaattgcacttccatcatttggaactgctgaggaccggacttgctcctcacgcacccaactcgttgtcggtgcatcgttcttctttcgggaagcactttcttactgtctccggaattattttcggggtctgtctagcgctctattgagcccttctaccatcgtctcttggccaaggacgattacacactttcatc

SEQ ID NO: 15355 - DNA, 728 bp, synthetic construct
  source 1..728: mol_type = other DNA
ataaaactatactaacgtattggcttatcaggtttgtattcaggtacagatcatagtcggttcctattcaggtaggaactgtataccggcggctcgtaaggcgagttgctgtaaactggtacgtagccagactacgtactgtaataactggagtcccgaattacgcgactctgtaaatcccggtgttccgctagacggatcactgtataattgctgctcatctaggtgaggagtgtaaactgaataacgttaagcgctattctcaaacaccacgacgttctttcgggagcgttgtttaactgctgactttctaggaagtcagtgtaaaaattccgcaagttcgcttgtggatctaaaataggagaaactttcgaggtttttcccgtctgtctcgtgcttagctcgcttttgacggacagtgtcgcacacgcgttgtcacggaagaccgaattttgctcttctacgcttcgcctacgcttcacatctctgtctctcgcagccgcactgtctttgtgctttgcgatttgattgaacaattgcacttccatcatttggaactgctgaggaccggacttgctcctcacgcacccaactcgttgtcggtgcatcgttcttctttcgggaagcactttcttactgtctccggaattattttcggggtctgtctagcgctctattgagcccttctaccatcgtctcttggccaaggacgattacacactttcatc

SEQ ID NO: 15356 - DNA, 727 bp, synthetic construct
  source 1..727: mol_type = other DNA
aaaaactatactaacgtattggcttatcaggtttgtattcaggtacagatcatagtcggttcctattcaggtaggaactgtataccggcggctcgtaaggcgagttgctgtaaactggtacgtagccagactacgtactgtaataactggagtcccgaattacgcgactctgtaaatcccggtgttccgctagacggatcactgtataattgctgctcatctaggtgaggagtgtaaactgaataacgttaagcgctattctcaaacaccacgacgttctttcgggagcgttgtttaactgctgactttttaggaagtcagtgtaaaaattccgcaagttcgcttgtggatctaaaataggagaaactttcgaggtttttcccgtctgtctcgtgcttagctcgcttttgacggacagtgttgcacacgcgttgtcacggaagaccgaattttgctcttccacgcttcacctacgcttcacatctctgtctctcgcagccgcactgtctttgtgctttgcgatttgattgaacaattgcacttccatcatttggaactgctgaggaccggacttgctcctcacgcacccaactcgttgtcggtgcatcgttcttctttcgggaagcactttcttactgtctccggaattattttcggggtctgtctagcgctctattgagcccttctaccatcgtctcttggccaaggacgattacacactttcatc

SEQ ID NO: 15357 - DNA, 863 bp, synthetic construct; identical to SEQ ID NO: 2498
  source 1..863: mol_type = other DNA

SEQ ID NO: 15358 - DNA, 727 bp, synthetic construct
  source 1..727: mol_type = other DNA
aaaactatactaacgtattggcttatcaggtttgtattcaggtacagatcatagtcggttcctatccaggtaggaactgtataccggcggctcgtaaggcgagttgctgtaaactggtacgtagccagactacgtactgtaataactggagtcccgaattacgcgactctgtaaatcccggtgttccgctagacggatcactgtataattgctgctcatctaggtgaggagtgtaaactgaataacgttaagcgctattctcaaacaccacgacgttctttcgggagcgttgtttaactgctgactttctaggaagtcagtgtaaaaattccgcaagttcgcttgtggatctaaaataggagaaactttcgaggtttttcccgtctgtctcgtgcttagctcgcttttgacggacagtgtcgcacacgcgttgtcacggaagaccgaattttgctcttctacgcttcgcctacgcttcacatctctgtctctcgcagccgcactgtctttgtgctttgcgatttgattgaacaattgcacttccatcatttggaactgctgaggaccggacttgctcctcacgcacccaactcgttgtcggtgcatcgttcttctttcgggaagcactttcttactgtctccggaattatttttcggggtctgtctagcgctccactgagcccttctaccatcgtctcttggccaaggacgattacacactttcatc

SEQ ID NO: 15359 - DNA, 724 bp, synthetic construct
  source 1..724: mol_type = other DNA
aactatactaacgtattggcttatcaggtttgtattcaggtacagatcatagtcggttcctattcaggtaggaactgtataccggcggctcgtaaggcgagttgctgtaaactggtacgtagccagactacgtactgtaataactggagtcccgaattacgcgactctgtaaatcccggtgttccgctagacggatcactgtataattgctgctcatctaggtgaggagtgtaaactgaataacgttaagcgctattctcaaacaccacgacgttctttcgggagcgttgtttaactgctgactttctaggaagtcagtgtaaaaattccgcaagttcgcttgtggatctaaaataggagaaactttcgaggtttttcccgtctgtctcgtgcttagctcgcttttgacggacagtgtcgcacacgcgttgtcacggaagaccgaattttgctcttctacgcttcgcctacgcttcacatctctgtctctcgcagccgcactgtctttgtgctttgcgatttgattgaacaattgcacttccatcatttggaactgctgaggaccggacttgctcctcacgcacccaactcgttgtcggtgcatcgttcttctttcgggaagcactttcttactgtctccggaattattttcggggtctgtctagcgctctattgagcccttctaccatcgtctcttggccaaggacgattacacactttcatc

SEQ ID NO: 15360 - DNA, 724 bp, synthetic construct
  source 1..724: mol_type = other DNA
aactatactaacgtattggcttatcaggtttgtattcaggtacagatcatagtcggttcctattcaggtaggaactgtataccggcggctcgtaaggcgagttgctgtaaactggtacgtagccagactacgtactgtaataactggagtcccgaattacgcgactctgtaaatcccggtgttccgctagacggatcactgtataattgctgctcatctaggtgaggagtgtaaactgaataacgttaagcgctattctcaaacaccacgacgttctttcgggagcgttgtttaactgctgactttctaggaagtcagtgtaaaaattccgcaagttcgcttgtggatctaaaataggagaaactttcgaggtttttcccgtctgtctcgtgcttagctcgcttttgacggacagtgtcgcacacgcgttgtcacggaagaccgaattttgctcttctacgcttcgcctacgcttcacatctctgtctctcgcagccgcactgtctttgtgctttgcgatttgattgaacaattgcacttccatcatttggaactgctgaggaccggacttgctcctcacgcacccaactcgttatcggtgcatcgttcttctttcgggaagcactttcttactgtctccggaattattttcggggtctgtctagcgctctattgagcccttctaccatcgtctcttggccaaggacgattacacactttcatc

SEQ ID NO: 15361 - DNA, 730 bp, synthetic construct
  source 1..730: mol_type = other DNA
ataaaactatactatcgtattggcttatcaggtttgtatccaggtacagatcatagtcggttcctatccaggtaggaactgtataccggtagctcgtaaggcgagttgctgtaaactggtgcgtagccagactacgtactgtaataactggagtcccgaattacgcgactctgtaaaccccggtgttccgctagacggatcactgtataactgctgctcatctaggtgaggagtgtaaactgaataacgtcaagcgctattctcaaacaccacgacgttctttcgggagcgtcgtttaactgctgactttctagggagtcagtgtaaaaattccgcaagttcgcttgtggatctaaaataggagaaactttcgaggtttctcccgtctgtctcgtgcttagctcgcttttgacggacagtgttgcacacgcgttgttacggaagaccgaattttgctcttctacgcctcgcctacgcttcacatctctgtctctcgcagccgcactgtctctgtgttttgcgacttgatagaacaactgcacttccatcatttggaactgctgaggaccggacttgctcctcacgcacccaactcgtcgtcggtgcatcgttcttctttcgggaagcactgtctttttgtctccggattttactttccggggtctgtctagcgctctactgagcccttctaccatcgtctcttggccaaggacgatcatacactttcatc

SEQ ID NO: 15362 - DNA, 726 bp, synthetic construct
  source 1..726: mol_type = other DNA
aaaactatactaacgtattggcttatcaggtttgtattcaggtacagatcatagtcggttcctatccaggtaggaactgtataccggcggctcgtaaggcgagttgctgtaaactggtacgtagccagactacgtactgtaataactggagtcccgaattacgcgactctgtaaatcccggtgttccgctagacggatcactgtataattgctgctcatctaggtgaggagtgtaaactgaataacgttaagcgctattctcaaacaccacgacgttctttcgggagcgttgtttaactgctgactttctaggaagtcagtgtaaaaattccgcaagttcgcttgtggatctaaaataggagaaactttcgaggtttttcccgtctgtctcgtgcttagctcgcttttgacggacagtgtcgcacacgcgttgtcacggaagaccgaattttgctcttctacgcttcgcctacgcttcacatctctgtctctcgcagccgcactgtctttgtgctttgcgatttgattgaacaattgcacttccatcatttggaactgctgaggaccggacttgctcctcacgcacccaactcgttgtcggtgcatcgttcttctttcgggaagcactttcttactgtctccggaattattttcggggtctgtctagcgctccattgagcccttctaccatcgtctcttggccaaggacgattacacactttcatc

SEQ ID NO: 15363 - DNA, 728 bp, synthetic construct
  source 1..728: mol_type = other DNA
aaaaactatactaacgtattggcttatcaggtttgtattcaggtacagatcatagtcggttcctatccaggtaggaactgtataccggtggctcgtaaggcgagttgctgtaaactggtacgtagccagactacgtactgtaataactggagtcccgaattacgcgactctgtaaatcccggtgttccgctagacggatcactgtataattgctgctcatctaggtgaggagtgtaaactgaataacgttaagcgctattctcaaacaccacgacgttctttcgggagcgttgtttaactgctgactttctaggaagtcagtgtaaaaattccgcaagttcgcttgtggatctaaaataggagaaactttcgaggtttttcccgtctgtctcgtgtttagctcgcttttgacggacagtgtcgcacacgcgttgtcacggaagaccgaattttgctcttctacgcttcgcctgcgcttcacatctctgtctctcgcagccgcactgtctttgtgctttgcgatttgattgaacaattgcacttccatcatttggaattgctgaggaccggacttgctcctcacgcacccagctcgttgtcggtgcatcgttcttctttcgggaagcactttcttactgtctccggaattatttttcggggtctgtctagcgctccactgagcccttctaccatcgtctcttggccaaggacgattacacactttcatc

SEQ ID NO: 15364 - DNA, 728 bp, synthetic construct
  source 1..728: mol_type = other DNA
ataaaactatactaacgtattggcttatcaggtttgtattcaggtacagatcatagtcggttcctattcaggtaggaactgtataccggcggctcgtaaggcgagttgctgtaaactggtacgtagccagactacgtactgtaataactggagtcccgaattacgcgactctgtaaatcccggtgttccgctagacggatcactgtataattgctgctcatctaggtgaggagtgtaaactgaataacgttaagcgctattctcaaacaccacgacgttctttcgggagcgttgtttaactgctgactttttaggaagtcagtgtaaaaattccgcaagttcgcttgtggatctaaaataggagaaactttcgaggtttttcccgtctgtctcgtgcttagctcgcttttgacggacagtgttgcacacgcgttgtcacggaagaccgaattttgctcttccacgcttcacctacgcttcacatctctgtctctcgcagccgcactgtctttgtgctttgcgatttgattgaacaattgcacttccatcatttggaactgctgaggaccggacttgctcctcacgcacccaactcgttgtcggtgcatcgttcttctttcgggaagcactttcttactgtctccggaattattttcggggtctgtctagcgctctattgagcccttctaccatcgtctcttggccaaggacgattacacactttcatc

SEQ ID NO: 15365 - DNA, 727 bp, synthetic construct
  source 1..727: mol_type = other DNA
aaaactatactaacgtattggcttatcaggtttgtattcaggtacagatcatagtcggttcctattcaggtaggaactgtataccggcggctcgtaaggcgagttgctgtaaactggtacgtagccagactacgtactgtaataactggagtcccgaattacgcgactctgtaaatcccggtgttccgctagacggatcactgtataattgctgctcatctaggtgaggagtgtaaactgaataacgttaagcgctattctcaaacaccacgacgttctttcgggagcgttgtttaactgctgactttctaggaagtcagtgtaaaaattccgcaagttcgcttgtggatctaaaaataggagaaactttcgaggtttttcccgtctgtctcgtgcttagctcgcttttgacggacagtgtcgcacacgcgttgtcacggaagaccgaattttgctcttctacgcttcgcctacgcctcacatctctgtctctcgcagccgcactgtctttgtgctttgcgatttgattgaacaattgcacttccatcatttggaactgctgaggaccggacttgctcctcacgcacccaactcgttgtcggtgcatcgttcttctttcgggaagcactttcttactgtctccggaattattttcggggtctgtctagcgctctattgagcccttctaccatcgtctcttggccaaggacgattacacactttcatc

SEQ ID NO: 15366 - DNA, 727 bp, synthetic construct
  source 1..727: mol_type = other DNA
aaaaactatactaacgtattggcttatcaggtttgtattcaggtacagatcatagtcggttcctattcaggtaggaactgtataccggcggctcgtaaggcgagttgctgtaaactggtacgtagccagactacgtactgtaataactggagtcccgaattacgcgactctgtaaatcccggtgttccgctagacggatcactgtataattgctgctcatctaggtgaggagtgtaaactgaataacgttaagcgctattctcaaacaccacgacgttctttcgggagcgttgtttaactgctgactttctaggaagtcagtgtaaaaattccgcaagttcgcttgtggatctaaaataggagaaactttcgaggtttttcccgtctgtctcgtgcttagctcgcttttgacggacagtgtcgcacacgcgttgtcacggaagaccgaattttgctcttctacgcttcgcctacgcttcacatctctgtctctcgcagccgcactgtctttgtgctttgcgatttgattgaacaattgcacttccatcatttggaactgctgaggaccggacttgctcctcacgcacccaactcgttgtcggtgcatcgttcttctttcgggaagcactttcttactgtctccggaattattttcggggtctgtctagcgctctattgagcccttctaccatcgtctcttggccagggacgattacacactttcatc

SEQ ID NO: 15367 - DNA, 726 bp, synthetic construct
  source 1..726: mol_type = other DNA
aaaactatactaacgtattggcttatcaggtttgtattcaggtacagatcatagtcggttcctattcaggtaggaactgtataccggcggctcgtaaggcgagttgctgtaaactggtacgtagccagactacgtactgtaataactggagtcccgaattacgcgactctgtaaatcccggtgttccgctagacggatcactgtataattgctgctcatctaggtgaggagtgtaaactgaataacgttaagcgctattctcaaacaccacgacgttctttcgggagcgttgtttaactgctgactttctaggaagtcagtgtaaaaattccgcaagttcgcttgtggatctaaaataggagaaactttcgaggtttttcccgtctgtctcgtgcttagctcgcttttgacggacagtgtcgcacacgcgttgtcacggaagaccgaattttgctcttctacgcttcgcctacgcttcacatctctgtctctcgcagccgcactgtctttgtgctttgcgatttgattgaacaattgcacttccatcatttggaactgctgaggaccggacttgctcctcacgcacccaactcgttgtcggtgcatcgttcttctttcgggaagcattttcttactgtctccggaattattttcggggtctgtctagcgctctattgagcccttctaccatcgtctcttggccaaggacgattacacactttcatc

SEQ ID NO: 15368 - DNA, 727 bp, synthetic construct
  source 1..727: mol_type = other DNA
taaaactatactaacgtattggcttatcaggtttgtattcaggtacagatcatagtcggttcctattcaggtaggaactgtataccggcggctcgtaaggcgagttgctgtaaactggtacgtagccagactacgtactgtaataattggagtcccgaattacgcgactctgtaaatcccggtgttccgctagacggatcactgtataattgctgctcatctaggtgaggagtgtaaactgaataacgttaagcgctattctcaaacaccacgacgttctttcgggagcgttgtttaactgctgactttctaggaagtcagtgtaaaaattccgcaagttcgcttgtggatctaaaataggagaaactttcgaggtttttcccgtctgtctcgtgcttagctcgcttttgacggacagtgtcgcacacgcgttgtcacggaagaccgaattttgctcttctacgcttcgcctacgcttcacatctctgtctctcgcagccgcactgtctttgtgctttgcgatttgattgaacaattgcacttccattatttggaactgctgaggaccggacttgctcctcacgcacccaactcgttgtcggtgcatcgttcttctttcgggaagcactttcttactgtctccggaattattttcggggtctgtctagcgctctattgagcccttctaccatcgtctcttggccaaggacgattacacactttcatc

SEQ ID NO: 15369 - DNA, 724 bp, synthetic construct
  source 1..724: mol_type = other DNA
aaactatactaacgtattggcttatcaggtttgtattcaggtacagatcatagtcggttcctattcaggtaggaactgtataccggcggctcgtaaggcgagttgctgtaaattggtacgtagccagactacgtactgtaataactggagtcccgaattacgcgactctgtaaatcccgtgttccgctagacggatcactgtataattgctgctcatctaggtgaggagtgtaaactgaataacgttaagcgctattctcaaacaccacgacgttctttcgggagcgttgtttaactgctgactttctaggaagtcagtgtaaaaattccgcaagttcgcttgtggatctaaaataggagaaactttcgaggtttttcccgtctgtctcgtgcttagctcgcttttgacggacagtgtcgcacacgcgttgtcacggaagaccgaattttgctcttctacgcttcgcctacgcttcacatctctgtctctcgcagccgcactgtctttgtgctttgcgatttgattgaacaattgcacttccatcatttggaactgctgaggaccggacttgctcctcacgcacccaactcgttgtcggtgcatcgttcttctttcgggaagcactttcttactgtctccggaattattttcggggtctgtctagcgctctattgagcccttctaccatcgtctcttggccaaggacgattacacactttcatc

SEQ ID NO: 15370 - DNA, 729 bp, synthetic construct
  source 1..729: mol_type = other DNA
aataaaactatactaacgtattggcttatcaggtttgtattcaggtacagatcatagtcggttcctattcaggtaggaactgtataccggcggctcgtaaggcgagttgctgtaaactggtacgtagccagactacgtactgtaataactggagtcccgaattacgcgactctgtaaatcccggtgttccgctagacggatcactgtataattgctgctcatctaggtgaggagtgtaaactgaataacgttaagcgctattctcaaacaccacgacgttctttcgggagcgttgtttaactgctgactttctaggaagtcagtgtaaaaattccgcaagttcgcttgtggatctaaaataggagaaactctcgaggtttttcccgtctgtctcgtgcttagctcgcttttgacggacagtgtcgcacacgcgttgtcacggaagaccgaattttgctcttctacgcttcgcctacgcttcacatctctgtctctcgcagccgcactgtctttgtgctttgcgatttgattgaacaattgcacttccatcatttggaactgctgaggaccggacttgctcctcacgcacccaactcgttgtcggtgcatcgttcttctttcgggaagcactttcttactgtctccggaattattttcggggtctgtctagcgctctattgagcccttctaccatcgtctcttggccaaggacgattacacactttcatc

SEQ ID NO: 15371 - DNA, 728 bp, synthetic construct
  source 1..728: mol_type = other DNA
aataaactatactaacgtattggcttatcaggtttgtattcaggtacagatcatagtcggttcctattcaggtaggaactgtataccggcggctcgtaaggcgagttgctgtaaactggtacgtagccagactacgtactgtaataactggagtcccgaattacgcgactctgtaaatcccggtgttccgctagacggatcactgtataattgctgctcatctaggtgaggagtgtaaactgaataacgttaagcgctattctcaaacaccacgacgttctttcgggagcgttgtttaactgctgactttctaggaagtcagtgtaaaaattccgcaagttcgcttgtggatctaaaataggagaaactttcgaggtttttcccgtctgtctcgtgcttagctcgcttttgacggacagtgtcgcacacgcgttgtcacggaagaccgaattttgctcttctacgcttcgcctacgcttcacatctctgtctctcgcagccgcactgtctttgtgctttgcgatttgattgaacaattgcactaccatcatttggaactgctgaggaccggacttgctcctcacgcacccaactcgttgtcggtgcatcgttcttctttcgggaagcactttcttactgtctccggaattattttcggggtctgtctagcgctctattgagcccttctaccatcgtctcttggccaaggacgattacacactttcatc

SEQ ID NO: 15372 - DNA, 267 bp, synthetic construct
  source 1..267: mol_type = other DNA
cgaaaataagtatatattgcttctatttcgatattgttcaagcgttgaccgttgcaggcgcttgtcctattatatgtgcggggttaggatttctcagaatttataagaaaggtattttctctcttgtcttatagaaatttccacattatttacttaattggttgatttgaacttttatcgttcgtattttgttattttgcttttagcaagaattgttttatttcacccataggtgagttttaaatttataatcgttataaaatcacg

SEQ ID NO: 15373 - DNA, 723 bp, synthetic construct
  source 1..723: mol_type = other DNA
actatactaacgtattggcttatcaggtttgtattcaggtacagatcatagtcggttcctatccaggtaggaactgtataccggcggctcgtaaggcgagttgctgtaaactggtacgtagccagactacgtactgtaataactggagtcccgaattacgcgactctgtaaatcccggtgttccgctagacggatcactgtataattgctgctcatctaggtgaggagtgtaaactgaataacgttaagcgctattctcaaacaccacgacgttctttcgggagcgttgtttaattgctgactttctaggaagtcagtgtaaaaattccgcaagttcgcttgtggatctaaaataggagaaactttcgaggtttttcccgtctgtctcgtgcttagctcgcttttgacggacagtgtcgcacacgcgttgtcacggaagaccgaattttgctcttctacgcttcgcctacgcttcacatctctgtctctcgcagctgcactgtctttgtgctttgcgatttgattgaacaattgcacttccatcatttggaactgctgaggaccggacttgctcctcacgcacccaactcgttgtcggtgcatcgttcttctttcgggaagcactttcttactgtctccggaattattttcggggtctgtctagcgctccattgagcccttctaccatcgtctcttggccaaggacgattacacactttcatc

SEQ ID NO: 15374 - DNA, 624 bp, synthetic construct; identical to SEQ ID NO: 2206
  source 1..624: mol_type = other DNA

SEQ ID NO: 15375 - DNA, 726 bp, synthetic construct
  source 1..726: mol_type = other DNA
aaaaactatactaacgtattggcttatcaggtctgtatccaggtacagatcatagtcggttcctattcaggtaggaactgtataccggcggctcgtaaggcgagttgctgtaaactggtacgtagccagactacgtactgtaataactggagtcccgaattacgcgactctgtaaatcccggtgttccgctagacggatcactgtataattgctgctcatctaggtgaggagtgtaaactgaataacgttaagcgctattctcaaacaccacgacgttctttcgggagcgttgtttaactgctgactttctaggaagtcagtgtaaaaattccgcaagttcgcttgtggatctaaaataggagaaactttcgaggtttttcccgtctgtctcgtgcttagctcgcttttgacggacagtgtcgcacacgcgttgtcacggaagaccgaattttgctcttctacgcttcgcctacgcttcacatctctgtctctcgcagccgcactgtctttgtgcttgcgatttgattgaacaattgcacttccatcatttggaactgctgaggaccggacttgctcctcacgcacccaactcgttgtcggtgcatcgttcttctttcgggaagcactttcttactgtctccggaattattttcggggtctgtctagcgctctattgagcccttctaccatcgtctcttggccaaggacgattacacactttcatc

SEQ ID NO: 15376 - DNA, 715 bp, synthetic construct
  source 1..715: mol_type = other DNA
aacgtattggcttatcaggtttgtattcaggtacagatcatagtcggttcctattcaggtaggaactgtataccggcggctcgtaaggcgagttgctgtaaactggtacgtagccagactacgtactgtaataactggagtcccgaattacgcgactctgtaaatcccggtgttccgctagacggatcactgtataattgctgctcatctaggtgaggagtgtaaactgaataacgttaagcgctattctcaaacaccacgacgttctttcgggagcgttgtttaactgctgactttctaggaagtcagtgtaaaaattccgcaagttcgcttgtggatctaaaataggagaaactttcgaggtttttcccgtctgtctcgtgcttagctcgcttttgacggacagtgtcgcacacgcgttgtcacggaagaccgaattttgctcttctacgcttcgcctacgcttcacatctctgtctctcgcagccgcactgtctttgtgctttgcgatttgattgaacaattgcacttccatcatttggaactgctgaggaccggacttgctcctcacgcacccaactcgttgttggtgcatcgttcttctttcgggaagcactttcttactgtctccggaattattttcggggtctgtctagcgctctattgagcccttctaccatcgtctcttggccaaggacgattacacactttcatc

SEQ ID NO: 15377 - DNA, 719 bp, synthetic construct
  source 1..719: mol_type = other DNA
ataaaactatactaacgtattggcttatcaggtttgtattcaggtacagattgtagtcggttcctatccaggtaggaactatataccggcggttcgtaaggcgaattgctgtaaattggtgcgtagccagactacgcgctgtaataactggagtcccgaattacgcgactctgtaaaccccggtgttccgccagacggttcactgtataactgctgctcatctaggtgaggagtgtaaactgaacagcgttaaacgttgttctcaaacactacgacgctctcccgggagtgttgtctaactgctgactttcaaggaaatcagtgtaaaacttccgtaagttcgcttgcggatctaactcaggaaaaactttcgaggtttttcccgtctgtcttgctagctcgctattgacagacactgtcgcgcacgcgttgctactgaggaccgaattttgctcctctacgcctcgcctacgcttcacacctctgtctctcgcagctgcgtctctttgtgcttcgcgataggacaaccgcatttccatcatttggaattgccgaggaccggacttgctcctcgcgcacccaatttgctgttggtgcatcgttcttctttcgggaagtactgtctattcgcctccggatttcgatcccgaggttcttcaagtgctcactgagcccttctaccgtcgtcccccggccaaggacgattgcgcacttccatc

SEQ ID NO: 15378 - DNA, 1000 bp, synthetic construct; identical to SEQ ID NO: 266
  source 1..1000: mol_type = other DNA

SEQ ID NO: 15379 - DNA, 716 bp, synthetic construct
  source 1..716: mol_type = other DNA
taacgtattggcttatcaggtttgtattcaggtacagatcatagtcggttcctatccaggtaggaactgtataccggcggctcgtaaggcgagttgctgtaaactggtacgcagccagactgcgtactgtaataactggagtcccgaattacgcgactctgtaaatcccggtgttccgctagacggatcactgtataattgctgctcatctaggtgaggagtgtaaactgaataacgttaagcgctattctcaaacaccacgacgttctttcgggagcgttgtttaactgctgactttctaggacgtcagtgtaatttttccgcaagttcgcttgtggatctaaaataggagaaactttcgaggtttctcccgtctgtcttgtgcttagctcgcttttgacggacagtgttgcacacgcgttgttatagaagaccgaattttgctcttctgcgcttcgcctacgcttcacatctctgtctctcgcagctgcactgtcttcgtgctttgcgattcgatagaacaaccgcacttccatcatttggaattgctgaggaccggacttgctcctcacgcacccaactcgttgtcggtgcatcgttcttctttcgggaagcactgtcttactgtctccggaattattttcggggtctgtctagcgctctgctgagcccttctaccatcgtctctcggccaaggacgattacacactttcaac

SEQ ID NO: 15380 - DNA, 524 bp, synthetic construct; identical to SEQ ID NO: 2076
  source 1..524: mol_type = other DNA

SEQ ID NO: 15381 - DNA, 277 bp, synthetic construct
  source 1..277: mol_type = other DNA
atccaaaaacttaggcttagggcatagtagtgatggttgtaacaattattatgcagcaaatcccggacctaagtaggttaatagattcgttcttccttaacttagtggagagttatttagctctagtaataagtgtttgccacttaaaatataggatacttattcaacccgtccggtattggattaagttgcccaatactatcagacgtaaaacaattgacttgctgacacaaaaattataaaattcccctctgacttaaaacttagtaaaaagacc

SEQ ID NO: 15382 - DNA, 706 bp, synthetic construct
  source 1..706: mol_type = other DNA
aacgtattggcttatcaggtttgtattcaggtacagattgtagtcggttcctatccaggtaggaactatataccggcggttcgtaaggcgaattgctgtaaattggtgcgtagccagactacgcgctgtaataactggagtcccgaattacgcgactctgtaaaccccggtgttccgccagacggttcactgtataactgctgctcatctaggtgaggagtgtaaactgaacagcgttaaacgttgttctcaaacactacgacgctctcccgggagtgttgtctaactgctgactttcaaggaaatcagtgtaaaacttccgtaagttcgcttgcggatctaactcaggaaaaactttcgaggtttttcccgtctgtcttgctagctcgctattgacagacactgtcgcgcacgcgttgctactgaggaccgaattttgctcctctacgcctcgcctacgcttcacacctctgtctctcgcagctgcgtctctttgtgcttcgcgataggacaaccgcatttccatcatttggaattgccgaggaccggacttgctcctcgcgcacccaatttgctgttggtgcatcgttcttctttcgggaagtactgtctattcgcctccggatttcgatcccgaggttcttcaagtgctcactgagcccttctaccgtcgtcccccggccaaggacgattgcgcacttccatc

SEQ ID NO: 15383 - DNA, 1000 bp, synthetic construct
  source 1..1000: mol_type = other DNA
agttccggagaaggagcattgtcggaacattatataataccacgcttcacgtggtcttgtataccggcattgtgaataccgtaaacctcttcaaggtacctcagtgtttgaattatttagctgaggataaattttcttaaatgagttgtcactgtacacaatactcttcaagtagtacatacctcacgtaatttagaaaaggtgtttgaattctttaaccttttcaccttgaatttggtttaatcaatcatgtggatcttatgagcacggatcctgatgctgaaaagtgagcctagacgtggaggaacctgcaaggcgggtgttctttaaggctgtcgtaccctagctgagacagggggggtcccaatactgtcgaagccagacttttagaacatgtgccgctatcgaagggtagcacgcgggcgcgccctcctagagcgaagttcagccagtaagtatcgattgattaatcgacggtggacatgagcacccatcagtcaataaacaccccgttgggagagagaaacgaacgaggaatggcacacctcacaataaaaagccgttgtattctctttccggcctgggagtctcaaacctttgaaccaattggttccgccacatatactggggacagttatgtggtgctacatccctcggacctaaggtagatcgtgtttatctacttgatagaacctcctgcacctcagagtgcggtccgtagtagaggcaagagaatagtatagcggtcagaaacaaactggattcttcaaaggtacgatttctcagactgagcagactgggtaaacctgctcctaaaaagcataaggggaaacccactgcaggcgtgaggcatttttcaaatgcctttttcgctaaatgggccatcgacccaaccaagtccctcctagaggagctcctcggaacgcccgtaaccgaggaggtattccggactttcgagcggggtttgtggaggcggccagtgattgtgccggcgcggtgt

SEQ ID NO: 15384 - DNA, 716 bp, synthetic construct; identical to SEQ ID NO: 2330
  source 1..716: mol_type = other DNA

SEQ ID NO: 15385 - DNA, 414 bp, synthetic construct
  source 1..414: mol_type = other DNA
aaggtttgcatcccttgcacgattcactatgagtcctctttgtggcacactagtataccctactttgaccctagcttttagctacgctcatgtacgctgtactactctgtcatttttggttagtagtgttttgagttttcctcataatttgcatctttattcggagagacgtcccgctcttcgtcttatttcaactcacggactcaacatccatgggtggacatttcttaactcccgctgtaagagctttgtgccccgcgctacatttctcatacttacaggtttgcaggttctgtttaaaacgtatttagacggccagtatactgcaaatgcgtagccaggattccgaccctgggtaagtccctcagtatgtagatgcaccgccgatatagccgatagggagtacgatacatc

SEQ ID NO: 15386 - DNA, 264 bp, synthetic construct
  source 1..264: mol_type = other DNA
ctcagcctcgtgattggttacccatcactgcaaattactctccagacggctgtgcagtgtaaggctttcacgaggtggcttgcttttcagcgtacgtgtgccacaggcagccccgaaaacacgcgtcaggagacctttcctgctttcttgggcgagaacagcagctgcgcttcttcgtgcagtggaaagtttaaactgcctgctccaactcaaactcaaacttctacttctcttacatctgatgtctccagctctggaggtgtc

SEQ ID NO: 15387 - DNA, 416 bp, synthetic construct; identical to SEQ ID NO: 1823
  source 1..416: mol_type = other DNA

SEQ ID NO: 15388 - DNA, 264 bp, synthetic construct
  source 1..264: mol_type = other DNA
ctcagcctcgtgattggttacccatcactgcaaattactctccagacggctgtgcagtgtaaggctttcacgaggtggcttgcttttcagcgtacgtgtgccacaggcagccccgaaaacacgcgtcaggagacctttcctgctttcttgggcgagaacagcagctgcgcttcttcgtgcagtggaaagtttaaactgcctgctccaactcaaactcaaacttctacttctcttacatctgatgtctccagttctggaggtgtc

SEQ ID NO: 15389 - DNA, 275 bp, synthetic construct
  source 1..275: mol_type = other DNA
cgaaaataagtatatattgcttttatttcgattttgttcaagcatcgaccgtttgcaggtgcttgtcctattagatgcgcgggtcttttgttcatttttgaattttaagaaagagttgtatttttgcgctttcttttgaaatttccacattatttacttaattggttgtattgaacttttaattagttcgaaaaataacgtttacaccgtcggtaaaaatcggtgcaatctttgcctgttggtaaattttgttttataactattgttatagaaag

SEQ ID NO: 15390 - DNA, 863 bp, synthetic construct; identical to SEQ ID NO: 2499
  source 1..863: mol_type = other DNA

SEQ ID NO: 15391 - DNA, 658 bp, synthetic construct; identical to SEQ ID NO: 2254
  source 1..658: mol_type = other DNA

SEQ ID NO: 15392 - DNA, 252 bp, synthetic construct
  source 1..252: mol_type = other DNA
attgcttctatttcgattttgttcaagcgttgaccgttgcaggcgcttgtcctattatatgtgcggggttaggatttctcagaatttataagaaagatatttttcctcttgtcttatagaaatttccacattatttacttaattggttgaattgaacttttactgttcgtattttgttattttgctctttgcaagaattgttttatttcacctgtaggtgagttttaaatttataatcgttataaaatcacg

SEQ ID NO: 15393 - DNA, 858 bp, synthetic construct
  source 1..858: mol_type = other DNA
ccacacggtcctttcgaccgtgtggagattcagttaatttcttttgtcaaatagtttattctcagaagtgcatactatatgcttctgagactttatgtgtagtaagtcatactttagagttgagttattacactctactctactttatgatatatgtatgctatacttaaagtctatcagaattgtacttctgttagtgagatatttgatttataagaattacagtaatcgaaaccccgtcatttatcgactttctgtgtttgaaatgtcgcacagatcgtagttcctaaagttagacataacataatttaaggattgtcaaggctaatgattaagttgttaactttcttcttatgatttagttgtactttttaacttgatatagcgcacagcaccgtgcgcttccaatccgacctcttaggtttaatttgttagttcagtaaccgtcaattattgaatgtttacaaattaacccatttgtttattaacactatttaaacatcttatttataatatttttgatttagacataggacttatataacctgttgtatccccctactatatttcatacttgttttaacggaaaaccgcgtaaagagacgtataggattcccagagaatttgtcttatagtagaagaatcggccaatggagtatatttaacgaaacgtacatcgagatccaatgattgtcggaatatattaccaagatatgtatagtttaaggcatcgtacaccgcgatgttaaggtcgtcttacctgatttttaattacctctacttggaattgacccattaatagagtaaataattagtgtttatatattgtgatttacaataaagtattttgacgttttt

SEQ ID NO: 15394 - DNA, 860 bp, synthetic construct
  source 1..860: mol_type = other DNA
ctccacacggtcctttcgaccgtgtggagattcagttaatttcttttgtcaaatagtttattctcagaagtgcatactatatgcttctgagactttatgtgtagtaagtcatactttagagttgagttattacactctactctactttatgatatatgtatgctatacttaaagtctatcagaattgtacttctgttagtgagatatttgatttataagaattacagtaatcgaaaccccgtcatttatcgactttctgtgtttgaaatgtcgcacagatcgtagttcctaaagttagacataacataatttaaggattgtcaaggctaatgattaagttgttaactttcttcttatgatttagttgtactttttaacttgatatagcgcacagcaccgtgcgcttccaatccgacctcttaggtttaatttgttagttcagtaaccgtcaattattgaatgtttacaaattaacccatttgtttattaacactatttaaacatcttatttataatatttttgatttagacataggacttatataacctgttgtatccccctactatatttcatacttgttttaacggaaaaccgcgtaaagagacgtataggattcccagagaatttgtcttatagtagaagaatcggccaatggagtatatttaacgaaacgtacatcgagatccaatgattgtcggaatatattaccaagatatgtatagtttaaggcatcgtacaccgcgatgttaaggtcgtcttacctgatttttaattacctctacttggaattgacccattaatagagtaaataattagtgtttatatattgtgatttacaataaagtattttgacgttttt

SEQ ID NO: 15395 - DNA, 860 bp, synthetic construct
  source 1..860: mol_type = other DNA
atccacacggtcctttcgaccgtgtggagattcagttaatttcttttgtcaaatagtttattctcagaagtgcatactatatgcttctgagactttatgtgtagtaagtcatactttagagttgagttattacactctactctactttatgatatatgtatgctatacttaaagtctatcagaattgtacttctgttagtgagatatttgatttataagaattacagtaatcgaaaccccgtcatttatcgactttctgtgtttgaaatgtcgcacagatcgtagttcctaaagttagacataacataatttaaggattgtcaaggctaatgattaagttgttaactttcttcttatgatttagttgtactttttaacttgatatagcgcacagcaccgtgcgcttccaatccgacctcttaggtttaatttgttagttcagtaaccgtcaattattgaatgtttacaaattaacccatttgtttattaacactatttaaacatcttatttataatatttttgatttagacataggacttatataacctgttgtatccccctactatatttcatacttgttttaacggaaaaccgcgtaaagagacgtataggattcccagagaatttgtcttatagtagaagaatcggccaatggagtatatttaacgaaacgtacatcgagatccaatgattgtcggaatatattaccaagatatgtatagtttaaggcatcgtacaccgcgatgttaaggtcgtcttacctgatttttaattacctctacttggaattgacccattaatagagtaaataattagtgtttatatattgtgatttacaataaagtattttgacgttttt

SEQ ID NO: 15396 - DNA, 859 bp, synthetic construct
  source 1..859: mol_type = other DNA
tccacacggtcctttcgaccgtgtggagattcagttaatttcttttgtcaaatagtttattctcagaagtgcatactatatgcttctgagactttatgtgtagtaagtcatactttagagttgagttattacactctactctactttatgatatatgtatgctatacttaaagtctatcagaattgtacttctgttagtgagatatttgatttataagaattacagtaatcgaaaccccgtcatttatcgactttctgtgtttgaaatgtcgcacagatcgtagttcctaaagttagacataacataatttaaggattgtcaaggctaatgattaagttgttaactttcttcttatgatttagttgtactttttaacttgatatagcgcacagcaccgtgcgcttccaatccgacctcttaggtttaatttgttagttcagtaaccgtcaattattgaatgtttacaaattaacccatttgtttattaacactatttaaacatcttatttataatatttttgatttagacataggacttatataacctgttgtatccccctactatatttcatacttgttttaacggaaaaccgcgtaaagagacgtataggattcccagagaatttgtcttatagtagaagaatcggccaatggagtatatttaacgaaacgtacatcgagatccaatgattgtcggaatatattaccaagatatgtatagtttaaggcatcgtacaccgcgatgttaaggtcgtcttacctgatttttaattacctctacttggaattgacccattaatagagtaaataattagtgtttatatattgtgatttacaataaagtattttgacgttttt

SEQ ID NO: 15397 - DNA, 857 bp, synthetic construct
  source 1..857: mol_type = other DNA
cacacggtcctttcgaccgtgtggagattcagttaatttcttttgtcaaatagtttattctcagaagtgcatactatatgcttctgagactttatgtgtagtaagtcatactttagagttgagttattacactctactctactttatgatatatgtatgctatacttaaagtctatcagaattgtacttctgttagtgagatatttgatttataagaattacagtaatcgaaaccccgtcatttatcgactttctgtgtttgaaatgtcgcacagatcgtagttcctaaagttagacataacataatttaaggattgtcaaggctaatgattaagttgttaactttcttcttatgatttagttgtactttttaacttgatatagcgcacagcaccgtgcgcttccaatccgacctcttaggtttaatttgttagttcagtaaccgtcaattattgaatgtttacaaattaacccatttgtttattaacactatttaaacatcttatttataatatttttgatttagacataggacttatataacctgttgtatccccctactatatttcatacttgttttaacggaaaaccgcgtaaagagacgtataggattcccagagaatttgtcttatagtagaagaatcggccaatggagtatatttaacgaaacgtacatcgagatccaatgattgtcggaatatattaccaagatatgtatagtttaaggcatcgtacaccgcgatgttaaggtcgtcttacctgatttttaattacctctacttggaattgacccattaatagagtaaataattagtgtttatatattgtgatttacaataaagtattttgacgttttt

SEQ ID NO: 15398 - DNA, 855 bp, synthetic construct
  source 1..855: mol_type = other DNA
cacggtcctttcgaccgtgtggagattcagttaatttcttttgtcaaatagtttattctcagaagtgcatactatatgcttctgagactttatgtgtagtaagtcatactttagagttgagttattacactctactctactttatgatatatgtatgctatacttaaagtctatcagaattgtacttctgttagtgagatatttgatttataagaattacagtaatcgaaaccccgtcatttatcgactttctgtgtttgaaatgtcgcacagatcgtagttcctaaagttagacataacataatttaaggattgtcaaggctaatgattaagttgttaactttcttcttatgatttagttgtactttttaacttgatatagcgcacagcaccgtgcgcttccaatccgacctcttaggtttaatttgttagttcagtaaccgtcaattattgaatgtttacaaattaacccatttgtttattaacactatttaaacatcttatttataatatttttgatttagacataggacttatataacctgttgtatccccctactatatttcatacttgttttaacggaaaaccgcgtaaagagacgtataggattcccagagaatttgtcttatagtagaagaatcggccaatggagtatatttaacgaaacgtacatcgagatccaatgattgtcggaatatattaccaagatatgtatagtttaaggcatcgtacaccgcgatgttaaggtcgtcttacctgatttttaattacctctacttggaattgacccattaatagagtaaataattagtgtttatatattgtgatttacaataaagtattttgacgttttt

SEQ ID NO: 15399 - DNA, 752 bp, synthetic construct
  source 1..752: mol_type = other DNA
atgcgctgggaagcgctttataaatatccaaatgtttgccagagttctaataactggctatgcgctgggaagcgctttataaatatccaaatgtttgccagagttctaataactggctgtgcgctgagaagcgcattataaatatctaactttctttttatgcgctgagaagcgctttataaatatctaacccctttgtgattgagattaaaagaaaattctataaaaataaatttaatcctatgtgatgtgtttttgtcggtctgtagccgacactatatgtttatttgttcacaaagctattaactaatccacatggaagctatatgtccatgagatttgaagctataatcaatagcatgcatcgtattaagcttgctttgcgatgtgattaatagaggattcacgtatccgttgtataccaaacgtgaactttgccggcgatttgagcaccggccaattcgggtaacgtcttcggatagggacccaaccccagacgagactcagtagcaagcgaagtatgacttgttgatcaggcactcgctcataagatatttgagtttagagacctggttgcaatagtatttctaacttgtaaacggaggacggccgttagtgtccacggaataacgtccaatgatgtttgtgattaaacccttttattagggcgaaagctgctgtgtcgactgttcaagatttattcttagcaggacacctgcacggaataatcttgggctcgtcgattgttaaac

SEQ ID NO: 15400 - DNA, 708 bp, synthetic construct; identical to SEQ ID NO: 2319
  source 1..708: mol_type = other DNA

SEQ ID NO: 15401 - DNA, 853 bp, synthetic construct
  source 1..853: mol_type = other DNA
cggtcctttcgaccgtgtggagattcagttaatttcttttgtcaaatagtttattctcagaagtgcatactatatgcttctgagactttatgtgtagtaagtcatactttagagttgagttattacactctactctactttatgatatatgtatgctatacttaaagtctatcagaattgtacttctgttagtgagatatttgatttataagaattacagtaatcgaaaccccgtcatttatcgactttctgtgtttgaaatgtcgcacagatcgtagttcctaaagttagacataacataatttaaggattgtcaaggctaatgattaagttgttaactttcttcttatgatttagttgtactttttaacttgatatagcgcacagcaccgtgcgcttccaatccgacctcttaggtttaatttgttagttcagtaaccgtcaattattgaatgtttacaaattaacccatttgtttattaacactatttaaacatcttatttataatatttttgatttagacataggacttatataacctgttgtatccccctactatatttcatacttgttttaacggaaaaccgcgtaaagagacgtataggattcccagagaatttgtcttatagtagaagaatcggccaatggagtatatttaacgaaacgtacatcgagatccaatgattgtcggaatatattaccaagatatgtatagtttaaggcatcgtacaccgcgatgttaaggtcgtcttacctgatttttaattacctctacttggaattgacccattaatagagtaaataattagtgtttatatattgtgatttacaataaagtattttgacgttttt

SEQ ID NO: 15402 - DNA, 250 bp, synthetic construct
  source 1..250: mol_type = other DNA
tgcttctatttcgattttgttcaagcgttgaccgttgcaggcgcttgtcctattatatgtgcggggttaggatttctcagaatttataagaaagatattttccctcttgtcttatagaaatttccacattatttacttaattggttgaattgaacttttactgttcgtattttgttattttgctctttgcaagaattgttttatttcacctgtaggtgagttttaaatttataatcgttataaaatcacg

SEQ ID NO: 15403 - DNA, 734 bp, synthetic construct; identical to SEQ ID NO: 2354
  source 1..734: mol_type = other DNA

SEQ ID NO: 15404 - DNA, 611 bp, synthetic construct; identical to SEQ ID NO: 2190
  source 1..611: mol_type = other DNA

SEQ ID NO: 15405 - DNA, 1000 bp, synthetic construct; identical to SEQ ID NO: 267
  source 1..1000: mol_type = other DNA

SEQ ID NO: 15406 - DNA, 722 bp, synthetic construct
  source 1..722: mol_type = other DNA
ctatactaacgtattggcttatcaggtttgtattcaggtacagatcatagtcggttcctattcaggtaggaactgtataccggcggctcgtaaggcgagttgctgtaaactggtacgtagccagactacgtactgtaataactggagtcccgaattacgcgactctgtaaatcccggtgttccgctagacggatcactgtataattgctgctcatctaggtgaggagtgtaaactgaataacgttaagcgctattctcaaacaccacgacgttctttcgggagcgttgtttaactgctgactttctaggaagtcagtgtaaaaattccgcaagttcgcttgtggatctaaaataggagaaactttcgaggtttttcccgtctgtctcgtgcttagctcgcttttgacggacagtgtcgcacacgcgttgtcacggaagaccgaattttgctcttctacgcttcgcctacgcttcacatctctgtctctcgcagccgcactgtctttgtgctttgcgatttgattgaacaattgcacttccatcatttggaactgctgaggaccggacttgctcctcacgcacccaactcgttgtcggtgcatcgttcttctttcgggaagcactttcttactgtctccggaattattttcggggtctgtctagcgctctattgagcccttctaccatcgtctcttggccaaggacgattacacactttcatc

SEQ ID NO: 15407 - DNA, 637 bp, synthetic construct; identical to SEQ ID NO: 2225
  source 1..637: mol_type = other DNA

SEQ ID NO: 15408 - DNA, 256 bp, synthetic construct
  source 1..256: mol_type = other DNA
tatatatttaacaagccaaaagctccccaaccgccgtaaaaggaagtactcttgtgaaaactcgagcgcgcccccccaaacccaaccaaatatacgttttatacaatttgaagtttttgaactttaaagtgacagctgtgtctgcaaattgttataagttttgaatactgttttgactcaagtctacgcgaaagtagtgaaaagtggatattgacaatttattagttgtgaaaagattttgtgaatttatattgaa

SEQ ID NO: 15409 - DNA, 620 bp, synthetic construct
  source 1..620: mol_type = other DNA
ctgtaaactggtacgtagccagactacgtactgtaataactggagtcccgaattacgcgactctgtaaatcccggtgttccgctagacggatcactgtataattgctgctcatctaggtgaggagtgtaaactgaataacgttaagcgctattctcaaacaccacgacgttctttcgggagcgttgtttaactgctgactttctaggaagtcagtgtaaaaattccgcaagttcgcttgtggatctaaaataggagaaactctcgaggtttttcccgtctgtctcgtgcttagctcgcttttgacggacagtgtcgcacacgcgttgtcacggaagaccgaattttgctcttctacgcttcgcctacgcttcacatctctgtctctcgcagccgcactgtctttgtgctttgcgatttgattgaacaattgcacttccatcatttggaactgctgaggaccggacttgctcctcacgcacccaactcgttgtcggtgcatcgttcttctttcgggaagcactttcttactgtctccggaattattttcggggtctgtctagcgctctattgagcccttctaccatcgtctcttggccaaggacgattacacactttcatc

SEQ ID NO: 15410 - DNA, 357 bp, synthetic construct; identical to SEQ ID NO: 1666
  source 1..357: mol_type = other DNA

SEQ ID NO: 15411 - DNA, 922 bp, synthetic construct; identical to SEQ ID NO: 2541
  source 1..922: mol_type = other DNA

SEQ ID NO: 15412 - DNA, 615 bp, synthetic construct
  source 1..615: mol_type = other DNA
tatataaagcgacaattttatatacttcttgcgtttttaaggaggaatcctcaaaccttagacccgtaagatactaaggaagaaaaaggaaagattcttctcttacccactcgtgcagctcaccacgataaaaaattcagcattaatcccggccagctcacgccgtgacaatatttcagcccgagcagctcacctcggttatcaaatttagcattaatcccggccagctcacgccgtgacaatatttcagcccgagcagctcacctcggttatcaaatttagcattaatcccggccagctcacgccgtgaaaatatttcagcccgtgcagctcaccacggttatcaaattcagcaaactttccaaaacccacaattttagtagtttaagaattttataattgattacaaacgtttactgcgtacgtccttagtcggagctcgtacaatatttatattggtttgcacaaatcttcgcagtttattaggctttttcttgccaaaaattttattattgatatttactcttttcttcttttgcggactcgtaaataagaaaagttatctatcttgtttatttttgatttacgcttttgacacttatagaacaatacaaa

SEQ ID NO: 15413 - DNA, 385 bp, synthetic construct
  source 1..385: mol_type = other DNA
agctattgtgtatctaccactatcattacattataatcgcttttagccctatagattataatgtaaaatctttcttttcaaatgtgctatttgtcccttgcgtgtatggtactaatgtactccccgcctgggttatccaattcttagaactcaacactctaagaaggcatgtttcaagtcctgcgtaagaccatatctcttttaggtgtctagcgcgtttttatgtattatgtgaagaactaagcaaaggaaatacttctgtataaatacctccttagttcggcttgatccggaatcagcacccggcgcataagaagtatcaacgtatgcagccctatgtgagacccacgtggatttaatatggctataaggacgaccatacagt

SEQ ID NO: 15414 - DNA, 1000 bp, synthetic construct; identical to SEQ ID NO: 268
  source 1..1000: mol_type = other DNA

SEQ ID NO: 15415 - DNA, 488 bp, synthetic construct; identical to SEQ ID NO: 2002
  source 1..488: mol_type = other DNA

SEQ ID NO: 15416 - DNA, 1000 bp, synthetic construct; identical to SEQ ID NO: 2630
  source 1..1000: mol_type = other DNA

SEQ ID NO: 15417 - DNA, 351 bp, synthetic construct; identical to SEQ ID NO: 1651
  source 1..351: mol_type = other DNA

SEQ ID NO: 15418 - DNA, 1000 bp, synthetic construct
  source 1..1000: mol_type = other DNA
aaagggcaacaacaatgtttatgcttatcacaaaagcaattaaggaacgtgtgttatagttcccactttatgtgacctaatgacggtgagcttccgtaagcaagtccgtacatactgaagaatactttgaaagaatctgcaacatggttctctctcgatagtatatatcaggtgacaaacacacactcaacccgattatttcgcgagttctcgataagagaccgcaccaggtcgagctggaggggtgtaccaatccccgcctaacgttgaacttataacgtctgttagtattgttgtaacaaaacaatcctagatgattttggatcctcaatgtatagattgatcacaagagtagtatggtattgattgaaattgaggctatatttaattcgaagattgtagagttcaatatgaaagcattccaagcaggggaccctgtgttagtacgttagaaattggaatcccccgttcagaggtttctgacaaataggatggttgacacatatgtgaatgttattcagttagagtagatttaattttggtacgtgagcagccaactcatgtacaaactgggtcagttaattggaaaacgcaaggagagttttcactgcaatgcagtctagctttagcaggaccaaaattaagttgtagaagactgaatatttacataggaggacgtacactgatggatttaactcgacctctgtgtcgagacggtgaggattaggaaagttccctactacttctcctaggacgccggtgcgactgtgtacgagtcgtacggaaagtgtgatctttagagagcacgaagtttaagtggggcctgacatggtaaagagtctgaaacagttcactgtaaaggtgaaccttggcaagctcgtgatcgatacgagattataaagcaagttcgatgtttccagatttcccccccccgcgccccaccccagaacactcacactttagtcttgtaaattttgaacaagactaaagattattgaaa

SEQ ID NO: 15419 - DNA, 597 bp, synthetic construct; identical to SEQ ID NO: 2164
  source 1..597: mol_type = other DNA

SEQ ID NO: 15420 - DNA, 643 bp, synthetic construct
  source 1..643: mol_type = other DNA
tttctttttatgcgctgagaagcgcattataaatatctaactttctttttatgcgctgagaagcgctttataaatatctaacccctttgtgattgagattaaaagaaaattctataaaaataaatttaatcctatgtgatgtgtttttgtcggtctgtagccgacactatatgtttatttgttcacaaagctattaactaatccacatggaagctatatgtccatgagatttgaagctataatcaatagcatgcatcgtattaagcttgctttgcgatgtgattaatagaggattcacgtatccgttgtataccaaacgtgaactttgccggcgatttgagcaccggccaattcgggtaacgtcttcggatagggacccaaccccagacgagactcagtagcaagcgaagtatgacttgttgatcaggcactcgctcataagatatttgagtttagagacctggttgcaatagtatttctaacttgtaaacggaggacggccgttagtgtccacggaataacgtccaatgatgtttgtgattaaacccttttattagggcgaaagctgctgtgtcgactgttcaagatttattcttagcaggacacctgcacggaataatcttgggctcgtcgattgttaaac

SEQ ID NO: 15421 - DNA, 1000 bp, synthetic construct
  source 1..1000: mol_type = other DNA
gcacatttttctgattgccctttctttgggcgtaactcgttggcgccatcgtgaacaaacttcgaccgacgtctgcctgctacgctttgaagagaaggtggcctcaattcaatgcttatattgcttcagcccgaaacgacatactcaggataagccctgtttattagtgggtcgttgtaatttgagatattgagttgtggtgtttaattgtctcaattaaactgtaaatatttttgttttcttttgttttgttcattttattagtacaatagttttatttttcttttgtttcatgccggtacctatccgcgtccgatgtgggaaagcacttcactagttgatcttagctttataaatctatcaagcggtattctagtgggctaggtacgtcttggtagtctcacttttgtgagcacagtattaagcccggacctcgctcaggtgttgtcagtaaggggattcgtccttctgaaacttcgtaaggcgaaaagggaagtacggtttttgcaatagataggagaaatagcagtgtgcctttaaagtgctgcaaataaaataaaataaaaattttggtttaatacttcccgggactcatttagataaggcggtgtgcaggggtgacctcctatcggatcgaattatctccgactggaaagagagctgtaattgtaaacttcccgagggaacaggattatcgtgatcctggtgtgtaggcccattaacgttcgactgtcccaatttagcggcaggaaataagaaaaattcggcgttagtaaaacctatgatctttgtcccattcgagccaaagcatgtttatgttaggcttgacggttattgttgctataagaacctactgaagagatccccttccatcttttaaataaccagtaggtcgcagtatttcccctgggtgctctttggacttgtctgggggtttgggaaggcaactcatgcgcctccctcactctacgagcatactaataagcatggggccctcttc

SEQ ID NO: 15422 - DNA, 553 bp, synthetic construct; identical to SEQ ID NO: 2118
  source 1..553: mol_type = other DNA

SEQ ID NO: 15423 - DNA, 551 bp, synthetic construct
  source 1..551: mol_type = other DNA
cggttttaaaaccgtacgcaatatttgccatctagctcctgatgtaaaattgagcattaatcaagtttagctctctactataaattgagtaattgttcgtgatgaaatattcatgggcgactctagctctctagtataaattgagcaatcttttatttagtgcttattgttttattgaagacgactgatggcatacggaattgtacttttaattaagggttagtatcctaatagtaaccatgataccgaataaagtaggtccaaagcaaagtgaaatttgtggaggccgtcatggcaatgctattagaactgaggatttaatgcttgacaagcgcaatatctgagcagatagtgtaaaaaatagcaacaatagttaaattattttacgatatgttatgaatatgttagacatgtattatgattcataacctctattcttaatttaactatatccaagtctcggtggatattggattctgttcgcagttaaccgtatttttacattgcccgagtcggagcggtgatattgtatccggactacttaatacaaa

SEQ ID NO: 15424 - DNA, 370 bp, synthetic construct; identical to SEQ ID NO: 1701
  source 1..370: mol_type = other DNA

SEQ ID NO: 15425 - DNA, 251 bp, synthetic construct
  source 1..251: mol_type = other DNA
ccccgcgtctttcacaaagattgcggggagcaagcctcggaaatgttttaggtttaactttttgtgactatatattcattcatttggaaggggataaattaacagatctaaattatattaaaactttagaaccgatagacaccattaaaaatagaacttttgtacctaatgatgtaagtactgaaataagtggtcacttcaagtatactttttgtgatcagggctatttggcatattttcaacacgatggt

SEQ ID NO: 15426 - DNA, 328 bp, synthetic construct; identical to SEQ ID NO: 1576
  source 1..328: mol_type = other DNA

SEQ ID NO: 15427 - DNA, 452 bp, synthetic construct; identical to SEQ ID NO: 1922
  source 1..452: mol_type = other DNA

SEQ ID NO: 15428 - DNA, 561 bp, synthetic construct
  source 1..561: mol_type = other DNA
aaaccagtattacgaccaagtagtgcacgttggccaattttagaatacagtattttacagtatccaagattatgcttctccctaaagagaagcggacaagactttacggtagtatagtcttgtccgcttctctttagggagaagcataatcttggatactgtaaaatactgtattctaaattggccaacgtgcactactttggtcgtaatactggtttcagttcatctgaagctatactaattgggttgttaaaagcaacccgtaatacttacgagtttcatcgctcgtttaatatttctactctttctgagcagaataccacccctacaactcttaatcggagttagtaaacttttcacaccttatcgtgtgaatacattgttttccagttagctgtgaaaactgtctttctgcttcctgttattcaggaagctcttctttgagactagttgtctctcttctattctctcgtaatcgagagaatcctgtcttcggtcctcgcaagagaaccactactgtcttgaaggtttcttttgaagccgtcttatcttgatcttcaa

SEQ ID NO: 15429 - DNA, 547 bp, synthetic construct
  source 1..547: mol_type = other DNA
cgaccaaagtagtgcacgttggccaatttagaatacagtattttacagtatccaagattatgcttctccctaaagagaagcggacaagactttacggtagtatagtcttgtccgcttctctttagggagaagcataatcttggatactgtaaaatactgtattctaaattggccaacgtgcactactttggtcgtaataccggtttcagttcatctgaagctatactaattgggttgttaaagcaacccgtaatgcttacgagtttcatcgctcgtttaatatttctactctttctgagcagaataccacccctacaactcttaattggagttagtaaacttttcacaccttatcgtgtgaatacattgttttccagttagctgtgaaaactgtcttttcgcttcctattattcaggaagctcttctttgagactattgtctctcttctattctctcgtaatcgagagaatcctgtcttcggtcctcgcaagagaaccactactgtcttgaaggtttcttttgaagccgtcttatcttgatcttcaa

SEQ ID NO: 15430 - DNA, 1000 bp, synthetic construct
  source 1..1000: mol_type = other DNA
tgcacatttttctgattgccctttcttcgggcgtatctcgttggcgccatcgtgaacaaacttcgaccgacgtctgcctgctacgctttgaagagaaggtggcctcaattcaatgcttatattgcttcagcccgaacgacatactcaggataagccctgtttattagtgggtcgttgtaatttgagatattgagttgtggtgtttaattgtcccaattaaactgtaaatatttttgttctcttttgttttgtttatttcattagtacaatagttctatttttcttttgtttcatgccggtacctatccgcgtccgatgtgggaaagcacttcactagttgatcttagctttataaatctatcaagcggtattctagtgggctaggtacgtcttggtagtctcgcttctgtgagcacagtattaagcccggacctcgctcaggtgttgtcagtaaggggattcgtccttctgaaacttcgtaaggcgaaaagggaagtacggtttttgcaatagataggagaaatagcagtgtgcctttaaagtgctgcaaataaaataaaataaaaattttggtttaatacttcccgggactcatttagataaggcggtgtgcaggggtgacctcctatcggatcgaattatctccgactggaaagagagctgtaattgtaaacttcccgagggaacaggattatcgtgatcctggtgtgtaggcccattaacgttcgactgtcccaacttagcggcaggaaataagaaaaattcggcgttagtaaaacctatgatctttgtcccattcgagccaaagcatgtttatgttaggcttgacggttattgttgctataagaacctactgaagagatccccctccatcttttaaataaccagtaggtcgcagtatttcccctgggtgctctttggacttgtctgggggtttaggaaggcaactcatgcgcctccttcactctacgagcatactaataagcatggggccctcttc

SEQ ID NO: 15431 - DNA, 777 bp, synthetic construct; identical to SEQ ID NO: 2403
  source 1..777: mol_type = other DNA

SEQ ID NO: 15432 - DNA, 562 bp, synthetic construct
  source 1..562: mol_type = other DNA
aaaccggtattacgaccaaagtagtgcacgttggccaattttagaatacagtattttacagtatccaagattatgcttctccctaaagagaagcggacaagactttacggtagtatagtcttgtccgcttctctttagggagaagcataatcttggatactgtaaaatactgtattctaaattggccaacgtgcactactttggtcgtaataccggtttcagttcatctgaagctatactaattgggttgttaaaagcaacccgtaatacttacgagtttcatcgctcgtttaatatttctactctttctgagcagaataccacccctacaactcttaatcggagttagtaaacttttcacaccttatcgtgtgaatacattgttttccagttagctgtgaaaactgtctttctgcttcctgttattcaggaagctctcctttgagactagttgtctctcttctattctctcgtaatcgagagaatcctgtcttcggtcctcgcaagagaaccactactgtcttgaaggtttcttttgaagccgtcttatcttgatcttcaa

SEQ ID NO: 15433 - DNA, 877 bp, synthetic construct; identical to SEQ ID NO: 2513
  source 1..877: mol_type = other DNA

SEQ ID NO: 15434 - DNA, 1000 bp, synthetic construct; identical to SEQ ID NO: 2631
  source 1..1000: mol_type = other DNA

SEQ ID NO: 15435 - DNA, 520 bp, synthetic construct
  source 1..520: mol_type = other DNA
agaatacagtattttacagtatccaagattatgcttctccctaaagagaagcggacaagactttacggtagtatagtcttgtccgcttctctttagggagaagcataatcttggatactgtaaaatactgtattctaaattggccaacgtgcactactttggtcgtaataccggtttcagttcatctgaagctatactaattgggttgttaaaagcaacccgtaatacttacgagtttcatcgctcgtttaatatttctactctttctgagcagaataccacccctacaactcttaatcggagttagtaaacttttcacaccttatcgtgtgaatacattgttttccagttagctgtgaaaactgtctttctgcttcctgttattcaggaagctcttctttgagactatttgtctctcttctattctctcgtaatcgagagaatcctgtcttcggtcctcgcaagagaaccactactgtcttgaaggtttcttttgaagccgtcttatcttgatcttcaa

SEQ ID NO: 15436 - DNA, 884 bp, synthetic construct
  source 1..884: mol_type = other DNA
gtattaacctaattttaaacactgtatacacacctaaaagcgtaaggtacaagaaccatacaccacctaaaagcggactgtatgtttaaaacaaaccccaaaatccaattcaaacaaaaacctagtcagttaatatttatctgattaaattcaagagatgtgggaagtctcgataatattaaccctttagttttaagttagaagaagagtataacacctaagctctgacctcttagccgagccgtgaaccgccaaagaaagcgcagtaggcgacgagggtaaacgttcaccttgagaaacgatgaaggtgcgtaatcgaaaacttaattaatagattcatcatttgacaccaagttaagtgggaaaatttgttggtttagaactcaaattgtaataaaaattttgaaccgaaacgataagatttctatgattgaataccttatcaagggtgcgccaagctagttagattaaattcgaaacgaaatactagtgcccattcaaaatcataaaagcagttgaaactttaaatcaataaaaatgtacctttgtaaatcttgctctcttgaatgatggatactataacacataattgcttgctagcgggtagtaactagccaatttattgaaggatgaaagccacatcccattatgtgattaagttagcctttgggcgtagtgcaggaaccgtgtaagccctgataaaccactatagattatgacattgaattcagatcaacataggtattcattttcggaaacccattctaaattactttggcaggacttcaaaattgaacgttctgctttcaaataattacacacaaaacaaaacattaactttcatttcaacttcgtacaatttaaacttgaaataataatcaatt

SEQ ID NO: 15437 - DNA, 539 bp, synthetic construct
  source 1..539: mol_type = other DNA
gtgcacgttggccaattttagaatacagtattttacagtatccaagattatgcttctccctaaagagaagcggacaagactttacggtagtatagttttgtccgcttctctttagggagaagcataatcttggatactgtaaaatactgtattctaaattggccaacgtgcactactttggtcgtaataccggtttcagttcatctgaagctatactaattgggttgttaaaagcatcccgtaatacttacgagtttcatcgctcgtttaatatttctactctttctgagcagaataccacccctacaactcttaattggagttagtaaacttttcacaccttatcgtgtgaatacattgttttccagttagctgtgaaaactgtctttctgcttcctgttattcaggaagctcttctttgagactagctgtctctcttctattctctcgtaatcgagagaatcctgtctttggtcctcgcaagagaaccactactgtcttgaaggtttcttttgaagccgtcttatcttgatcttcaa

SEQ ID NO: 15438 - DNA, 611 bp, synthetic construct
  source 1..611: mol_type = other DNA
gtgaggtttatacctcacacacagttttgacccatctatgggtaaaatagacgtccagagttttttagcatgcattctttgagagacgttaagcacatgaaagagcatgaagttgtcgatgtacagagaatttattctccaaggcagggcacatcttagtatatataacaaaacgattccgattatttacgacgaaaccatttaagtattaatcctgacccgattttgatatacaacaaacagctgaataactgttaaaactattcaaacccaatggaccagtaatcttaaattacctgtgacagccgaagtttagtaggttcccaatatagccgtgaaacgcttgagggccgttacagctctagtttaagacctacgtttttaaagcttggtaagcgctttacttgagcaacatatataaaactagtaccaaatcttagtagaatttaagtatgatatttgaatgttagacatgtattatgtcaaatatcctctacatttctacataaaggttatgcaacgctcagtggttgttgcattatggtcgcagttaacttgtagttttatattgcctgtgtcggagcagtagtaaagtaaacagacgatttcac

SEQ ID NO: 15439 - DNA, 946 bp, synthetic construct; identical to SEQ ID NO: 2551
  source 1..946: mol_type = other DNA

SEQ ID NO: 15440 - DNA, 872 bp, synthetic construct; identical to SEQ ID NO: 2507
  source 1..872: mol_type = other DNA

SEQ ID NO: 15441 - DNA, 251 bp, synthetic construct
  source 1..251: mol_type = other DNA
ccccgcgtctttcacaaagattgcggggagcaagcctcggaaatgttttaggtttaactttttgtgactatatattcattcatttggaaggggataaactgacagatctgaattatattaaaactttagaaccgatagataccattaaaaatagaacttttacacctaatgatgtaagtactgaaataaatggtcacttcaagtatactttttgtgatcagggctatttggcatattttcaacacgatagt

SEQ ID NO: 15442 - DNA, 870 bp, synthetic construct
  source 1..870: mol_type = other DNA
taggaggcactcttttgaacactgtagatcggtcgggtaacagcgcagcgatacaagattcttccacagcccttcaggctgactggaagcctttcaaaattttaaaaccacaatactttaaatgtgatcactgctttccactataagactgcctgaacaacagtacgtggttagttagatttaattttaaggaaagaagagtaaaacatcaaagctctgacactgaagccgagcctgtgagtaagccagacaagcagcattaggcagaagtggtaaacgttcaccttgagaaacgtggacggcgcgtcaacgaagtttactttacaaaccatttacaatcgcgtcgtgtgggaaattggaacattctctattatctaaaattctggagtataaacaacccgaaaaggccgtagaaaccatgaagattacggacgagggggcgacaggctagttataactaagttatagcgaaatattagtgcccagttgtttaatatgaaagaatcgcagatttgagagaaggaaccatcgtacctgcgtaaatcgtataagaagattgaaatgagtttaagcaccaagcatacctagcgggttgcgactaggcaagtttaacttgacgggaaatttaaagcctcccatggtgtaagtaaatagcgaaagcgagggtctgacagtgtgcaagctcagatgctaacccttagttgttcttatttagcaaataagattaccctaaccaggtagcgacgtcgaaagccaatcaacataggtacaatcttttaggccgttcatcaaaattaccctggcaggactttcaaaaagaacgttctgctttcaaataattgcacaataataaaacaagtaaataagaaa

SEQ ID NO: 15443 - DNA, 611 bp, synthetic construct
  source 1..611: mol_type = other DNA
gtgaggtttatacctcacacacaattttgacccatctatgggtaaaatagacgtccagagttttttagcatgcattctttgagagacgttaagcacatgaaagagcatgaagttgtcgatgtacagagaaattattctccaaggcagggcacatcttagtatataaaacaaaacgattccgattatttacgacgaaaccatttaagtattaatcttgacccgattttgatatacgacaaacagctgaataactgttaaaactattcaaacccaacggaccagtaatcttagattacctgtgacagccgaagtttagtaggttcccaatatagccgtgaaacgcttgagggccgttacagctctagtttaagacctacgtttttaaagcttggtaagcgctttacttgagcaacatatataaaactagtaccaaatcttagtagaatttaagtatgatatttgaatgttagacatgtattatgtcaaatatcctctacatttctacataaaggttatgcaatgctcagtggttattgcataatggtcgcagttaacttgcagttttatattgcctgtgtcggagcagtagtaaagtaaacagacgatttcac

SEQ ID NO: 15444 - DNA, 429 bp, synthetic construct; identical to SEQ ID NO: 171
  source 1..429: mol_type = other DNA

SEQ ID NO: 15445 - DNA, 890 bp, synthetic construct; identical to SEQ ID NO: 2521
  source 1..890: mol_type = other DNA

SEQ ID NO: 15446 - DNA, 459 bp, synthetic construct
  source 1..459: mol_type = other DNA
caaccgtaaagtcttgtccgcttctctttagggagaagcaaaatactggatactgtaaaataccgtattctaacttggccaacgtgcactactttggtcgtaatactggtttcagtcaatctgaaactatactaattgggttgtttgaaacaatccgtaaaactcacgagtttaaccactcgtttaaactttctgttcgttctcgagcagaatacaactcagacaactctatcttggagttagtcaaaatctttcacactttactgtgtgagtatattgttttccagttaactgcgaaaactgtcttcctgtttcctgttcaccaggaaactcttctttgagattaaccatctctcttctgttctctcgttatcaagagaactttgtctttgatcctcgcaagagaatcactactgtcttgagggtttcttttgaaatcgtcttcttcttgatcttcaa

SEQ ID NO: 15447 - DNA, 475 bp, synthetic construct
  source 1..475: mol_type = other DNA
gagaagcggacaagactttacggtagtatagtcttgtccgcttctctttagggagaagcataatcttggatactgtaaaatactgtattctaaattggccaacgtgcactactttggtcgtaataccggtttcagttcatctgaagctatactaattgggttgttaaaagcatcccgtaatacttacgagtttcatcgctcgtttaatatttctactctttctgagcagaataccacccctacaactcttaattggagttagtaaacttttcgcaccttatcgtgtgaatacattgttttccagttagctgtgaaaactgtcttcttgcttcctgttattcaggaagctcttctttgagactagctgtctctcttctattctctcgtaatcgagagaatcctgtctttggtcctcgcaagagaaccactactgtcttgaaggtttcttttgaaaccgtcttatcttgatcttcaa

SEQ ID NO: 15448 - DNA, 274 bp, synthetic construct
  source 1..274: mol_type = other DNA
cgataaacaaataaatatatgtgtttatattgaaaccataaccgcgtattcacaactggactgtacagcggtagtgtcttattatactggcaggttaaggttttaatataaacacatatatttatttgtttatcgatattatcaatttattattcactactggtttcatcagcggtattgtcttattaaactgaagaagttttaaacgttttattataaaacgcatatttaattgtttattgagaatattgcattaataactctttgggttata

SEQ ID NO: 15449 - DNA, 498 bp, synthetic construct; identical to SEQ ID NO: 2023
  source 1..498: mol_type = other DNA

SEQ ID NO: 15450 - DNA, 288 bp, synthetic construct
  source 1..288: mol_type = other DNA
cgactagtcgtcggcagcgtcagaacaatatatgtgtttatatggaaactttatacctgccagtataataagacactaccgctgtacaggccagtagtgaatacgcagaaaacaagtgaaatatatgcacatatattgtttattgatactatcaatttattattcattactggtctgttcagcagtattgtcttattaaactgacagatttttgttttaaaggttttaatataaaacgtctacttgtctgtgtatcgggtgtctaatattataaccctccgggttacg

SEQ ID NO: 15451 - DNA, 747 bp, synthetic construct; identical to SEQ ID NO: 2370
  source 1..747: mol_type = other DNA

SEQ ID NO: 15452 - DNA, 334 bp, synthetic construct; identical to SEQ ID NO: 1599
  source 1..334: mol_type = other DNA

SEQ ID NO: 15453 - DNA, 744 bp, synthetic construct
  source 1..744: mol_type = other DNA
gcgtaggcaaaacctacgcagtttcttttgactcctctcagaggagagggatcaagtaagtcgatgtatcgcattgataaagggtgggctgacatgtaagtcgatgctgtcattacatgtccatcgctttgtttattagttttaagattttcttcgtctccaatttatttttcgaaatatcttcaacaagaaaaattattgttttaattgactgagttcttataagactatgagtttattgtgtatttctctcttatttgaaccctcgtattttatatagatgcattatgtgtatttggattgtctttcttgacgcttttgaaagggtacaggatatttactttctccagttctcgttggaaaggctctttgaatgattgatatatgctgtttcacattgtttcttgcatagtattgtagacataggctcggcacgcattggcacttccgtacagcaactactctacaacgaatatgtatagcgacaatgtaacgttaaccttggtgatgagttggtgataccctcttggttatgtttcagtatatgtttttctttttaaagatgtgtcccgaggccattctttggtttgatggattgatgaaaagaatacagacattttgttgacatttattatatgagcatattatacacacgacgatgtgaaagaacattgacaatatgaaagcatattgactacaggaaagactgttgacaataggaaagactatacatatgactttaca

SEQ ID NO: 15454 - DNA, 455 bp, synthetic construct
  source 1..455: mol_type = other DNA
cgtaaagtcttgtccgcttctctttagggagaagcaaaatactggatactgtaaaataccgtattctaacttggccaacgtgcactactttggtcgtaatactggtttcagtcaatctgaaactatactaattgggttgtttgaaacaatccgtaaaactcacgagtttaaccactcgtttaaactttctgttcgttctcgagcagaatacaactcagacaactctatcttggagttagtcaaaatctttcacactttactgtgtgagtatattgttttccagttaactgcgaaaactgtcttcctgtttcctgttcaccaggaaactcttctttgagattaaccatctctcttctgttctctcgttatcaagagaactttgtctttgatcctcgcaagagaatcactactgtcttgagggtttcttttgaaatcgtcttcttcttgatcttcaa

SEQ ID NO: 15455 - DNA, 572 bp, synthetic construct
  source 1..572: mol_type = other DNA
attttttacattttattttttatttatttattatttatttttatttaattaaaattttaatttccattttgatttatgaccttttattttaaaaaaatagagtgatagactatatgtcgagggtacactctccagaatcaacataagaagatataatgatttgaatgtttattgtctggtaattgagctaaagcttaggttgaatctgagacggttaccaagttggggctcttaaataattcctagtcatgtcttagggttatttaatccctgtgcaaaacattgctttggtgataaaagctatttgatttatattttcttatgcccctttttattaatacgctgaattggggattctgaaggtatatgcggtgtgtatatagtatatcgccagcggctgggtgaactggcgtgagtgtctgcttcggatgtgactatactcattgtcaggtgaccagtaccgttgtcggcttcatatgtggaggttgagtccgtgatctgaagagttgaactacttatgttggaattcctcttcgggccgatcatatgagtgaatcaatttttattttatt

SEQ ID NO: 15456 - DNA, 286 bp, synthetic construct
  source 1..286: mol_type = other DNA
actacgcaataaaagacctatatagtatatcctactatatatttctgtaagaccgttatactacgtgatacaagtaaacccgttatacctcgcgataaaggtaccccgttctactacgtgacacaagtatccgttatactacgcgataaaagtaaaccgttttactacgtgacaaaagtattccgttataccacgcgataaaggtaacccgttatactacgtgacaaaagtaccccgttataccacgcgataaaagtaacccgttctactacgtgataaagtaaac

SEQ ID NO: 15457 - DNA, 856 bp, synthetic construct; identical to SEQ ID NO: 2489
  source 1..856: mol_type = other DNA

SEQ ID NO: 15458 - DNA, 756 bp, synthetic construct; identical to SEQ ID NO: 2383
  source 1..756: mol_type = other DNA

SEQ ID NO: 15459 - DNA, 877 bp, synthetic construct
  source 1..877: mol_type = other DNA
accttcttttaaacactgtatacacacctaaaagcgtaaggtacaagaatcatacaccacctaaaagcggactgtatgtttaaaacaaaccccaaaatccaattaaaacaaaagcctagtcagttaatattaatctgatttaattcaagagatgtgggaagtctcgataatattaaccttttagttttaagttcaaagaagagtaaaacaactaagctctgacctcttagccgagccgtgaaccgccaaagaaaacgcagtaggcgacgagggtaaacgttcaccttgagaaacgatgaaggtgcgtaatcgaaaacttaattaataaattcatctcttgacaccaagttgagtgggaaaatttattagtttgaaactcagattgtaataaaattttgaaccgaaacgataagatttctatgaatgaataccttatcaagggtgcgccaagctagttagattaaattcgaaacgaaatactagtgcccattcaaaactataaaaacaattgaaactttaaactaataaaaatgtaccttcgtaaaccttgctcttttgagagatggatattataacacataattgcttgctagcgggtagtaactagccaatttattgaaggatgaaagccacatcccattatgtgattaagttagccttttggcgtagtgcaggaaccgtgtaagccctgataaaccactatagattatgacattgaattcagatcaataaaggtatgcactttcggaaacccattctaaattactttggcaggacttcaaaattgaacgttctgctttcaaataattacacacaaaataaaactttaattttcatttcaacttcgtttaatttgactttgaattaataatcaatt

SEQ ID NO: 15460 - DNA, 593 bp, synthetic construct
  source 1..593: mol_type = other DNA
gcacaatcatccctcctggcaacaagtacctctcacacttttattaatagaatgattgatagtgtataaataataattttaaggcaaggttcagattgtaaataatgtttataagtacatcttatactcctagtaagagtccttaatatatatagacggtatactgggcgtaataatggggacccctccaacctgcaaacacaggacgtaaccagtgacgctagattatgagtataagacgaaagtgaccgcttatttatagtcgtggatgacagaaattctattagatagattttcttaaacgcgttctgatcgtgagaatactttcgcgagttactcacggcggagatcgtaagcagatccagactggttacggtacaatacctaaatgatcttacagtgataggtattacgtgtcttacaggcatcgagttcgactgttacgcggatgaagcagcgtagctgaatttttcattttctttcttttatggtgacaagcgatatttaaacattttcgatattttccaagtgattaattgcatttcttatttcattttcaattgtgacttatattatttcaacaataatcaaca

SEQ ID NO: 15461 - DNA, 254 bp, synthetic construct
  source 1..254: mol_type = other DNA
ccccgcgtctctcccagagattgcggggtgttagcctcggaaacgtgttgggacttggtttttgtgactacgtctttgcgcatatagaaggagataaacttaccaatttagactatgaagacacacttgtgtctttaccaccaataactaatcaagaattcatacctagtcaagttagttgtagtgatgaaacgtattttggctttacattttgtccccaaggctacttggcttatcataagaaagaagaatat

SEQ ID NO: 15462 - DNA, 1000 bp, synthetic construct
  source 1..1000: mol_type = other DNA
ccgaaaccgaacttgactgtggatgcaaccaaaagttacctggcgttgcagaccattgtttatcacgaaaaacccatcaatgctatgttttgttccattttccgtgagataaaaactcgggtcacattgtccctaaagaaacatgttaagatcttttgtgatatgtcagctgaagattttgagaatgtgttgaacagagacgtacgaccgagatcgttgtccccttttctcgagaagttggaaatagacattagcaagtatgacaaaagtcagagagaattggcgctcgaatttgagtgtaaattgatgtcgtattttggtgtcgacgcggatatcgttgaattgtggttcaatgctcacgtgttaaccgaagtgtatgacaaaaccacgaagatgagagctcttattccgtatcagaggaaatcgggtgacgcatcgacattcattggaaacaccttgttcttgatggctgtcgtgtgtgatctggtgcctgtatctgaacttgagcttgcattgttttcgggagacgattctctcttatatggtcacaacatggatgtctatcgtgattcgcaacatttcggtttgaagtttaatctcgaaattaagtttttctcttttgaaatgtcgtatttttgttcgaagtttctgttagttgtcaatgataaatggacgtttacgcccgacccagtcaaattcatgactaagctcggtcgacacgatctggttaatcctctacatgttgaggagtaccgtatctcattcgttgacactgttagaaattatcgcgattaccatgtgtgcagaaacgtggcgaaggctttaattgagcgttatggaattgtgactgatcacacatcttttttgatgtctctggacgatatgacttcaagagaaaatttttctctgttgttttattcgttgtcaggtgataaaatcgactactctattactttcaataaagacttctaatctacgagattcgttcatataagttaaa

SEQ ID NO: 15463 - DNA, 341 bp, synthetic construct
  source 1..341: mol_type = other DNA
ccgatcttatgtataaatatctaacttgaaccaaccccaaccaaccccaaccaaccccaactgtctctttcgtgtttcaaccaaccccaaccaaccggaactaactgagattaactggaactaactggaaccaactagagacaaccttattaaggtttggcaacacttgtgttggcttttattcaagcgattttaaaactctattttatatcagtaactgctagctttagtaggccgtacgcgggagccctacaagaacagtgaaagtatcaaacaaaatacaccaaagaaaattaattaaattcaaattttataataaaaatttcaaaataaacttcaat

SEQ ID NO: 15464 - DNA, 692 bp, synthetic construct
  source 1..692: mol_type = other DNA
aatttaaaataagtataggatagttaattttaattaaatttaaaataagtataggatagttaattttaattatttttaataactttatttttaagacaactttatatataagttatgtttaagttattttaagtttttaatcccttttcttttactatactttcttaggagttattttgacaacttggtttgacgatgtttaacatcttttggggtggttccctaactgattgttatttcattattcattctgggtttattaatttctcctttggttagttttaagtggcccttttctccctgggaatgcagcgaagtagtcttgtgctttaagatgcgccttacgattcccttttctctttcttaaattgggatagtttggtatttgggggctagaaacaattctgactggagcgcttaaggttgatactacagtattttcaaactccaaataatactcctggattttttttataggtcattaggggatgtctccgcggtctttctttgtttgaagggggttgcctgatggggtttcggcacccggagtaatttactgtagtttttactttttgcatttagccaaggtcggggttagtttccaagtaggataatacgtcggtctttatggcaagtatttcctatagtgttagtctcaggctgtttgtggaggattgggttgttcatgatca

SEQ ID NO: 15465 - DNA, 800 bp, synthetic construct; identical to SEQ ID NO: 2432
  source 1..800: mol_type = other DNA

SEQ ID NO: 15466 - DNA, 563 bp, synthetic construct; identical to SEQ ID NO: 2131
  source 1..563: mol_type = other DNA

SEQ ID NO: 15467 - DNA, 362 bp, synthetic construct
  source 1..362: mol_type = other DNA
ttggtcgtaataccggtttcagttcatctgaagctatactaattgggttgttaaaagcaacccgtaatacttacgagtttcatcgctcgtttaatatttctactctttctgagcagaataccacccctacaactcttaatcggagttagtaaacttttcacaccttatcgtgtgaatacattgttttccagttagctgtgaaaactgtctttctgcttcctgttattcaggaagctcttctttgagactatttgtctctcttctattctctcgtaatcgagagaatcctgtcttcggtcctcgcaagagaaccactactgtcttgaaggtttcttttgaagccgtcttatcttgatcttcaa

SEQ ID NO: 15468 - DNA, 428 bp, synthetic construct; identical to SEQ ID NO: 1856
  source 1..428: mol_type = other DNA

SEQ ID NO: 15469 - DNA, 780 bp, synthetic construct; identical to SEQ ID NO: 2408
  source 1..780: mol_type = other DNA

SEQ ID NO: 15470 - DNA, 837 bp, synthetic construct; identical to SEQ ID NO: 2470
  source 1..837: mol_type = other DNA

SEQ ID NO: 15471 - DNA, 359 bp, synthetic construct; identical to SEQ ID NO: 1673
  source 1..359: mol_type = other DNA

SEQ ID NO: 15472 - DNA, 286 bp, synthetic construct
  source 1..286: mol_type = other DNA
attagttttctttcgtacgcacgcactttacttatctgttcgttacccccatttgggatccacggaacgatcgtcgacgcatttacgcactcgcactcgcactcgcaactcaaattcgcactcgtattaatactcgttcgcgccaatcgcattcgtaatcgtatcaacgcacctgcactcgcactcgtaaatcgcattcgcactcgcattcgcactcacattcgcaaatcgcacttacaacagtaaattgcacgcaagtattatttcagttacaacaagtaataca

SEQ ID NO: 15473 - DNA, 488 bp, synthetic construct; identical to SEQ ID NO: 2003
  source 1..488: mol_type = other DNA

SEQ ID NO: 15474 - DNA, 897 bp, synthetic construct; identical to SEQ ID NO: 2523
  source 1..897: mol_type = other DNA

SEQ ID NO: 15475 - DNA, 662 bp, synthetic construct; identical to SEQ ID NO: 2258
  source 1..662: mol_type = other DNA

SEQ ID NO: 15476 - DNA, 682 bp, synthetic construct; identical to SEQ ID NO: 2289
  source 1..682: mol_type = other DNA

SEQ ID NO: 15477 - DNA, 775 bp, synthetic construct; identical to SEQ ID NO: 2400
  source 1..775: mol_type = other DNA

SEQ ID NO: 15478 - DNA, 412 bp, synthetic construct; identical to SEQ ID NO: 1808
  source 1..412: mol_type = other DNA

SEQ ID NO: 15479 - DNA, 987 bp, synthetic construct; identical to SEQ ID NO: 2568
  source 1..987: mol_type = other DNA

SEQ ID NO: 15480 - DNA, 301 bp, synthetic construct
  source 1..301: mol_type = other DNA
gtgagtccctccgtcttgggcagacgttaaatgcatccattccggacctattcgggattgtattactagtgttgaaaataggtttgtacaattggattactgcatgtttttatattttatatgtttacataatacatgaacagctttgtacatttagacatgtccctcgtggcataccagtgttcactggagagctcgtcactcaacaaaacatcattgcctttatgtgtgttaagcagcaccatttaggtattcgttaaataagcttaccgattctaataataataataataataatagc

SEQ ID NO: 15481 - DNA, 987 bp, synthetic construct
  source 1..987: mol_type = other DNA
catggacgtaatgtccatgcagagaattataatacttttatcagatatatctatgatattgtttcaagagttcatcttgaaactttcgtatgttagagcttgtatattgttgtcaatgtatgggttcttcccatacaacttcatatacaagatatttttcatacgctaagtttcgtaattgatagaatctcttgttgctttaagtagaatatttgatgaggtgttattattcgccccagttttctatctgtttacagctacgacttaaccattagtcgataacgcaggctgtatcctagttcagtaaagtacatagaatgcaaagatatttagactacttaagctactgataaagtttatactttcgcttttgatgtagatgttcatttacttaagtatagcgctctgaaccgagcgcttttgtttatgaaagaatttaatcaactctttcacccggccacacatctttagagatgtttatgacagtattaatttgtttaatactcgaggccaaatttcggtgtttttactaattgcaagatgtctacggactgccaaaatcttgtgtatttagtataaattcctctcccattttagttttaactatgaaattcttttattagtcgactatttaggtttaggactttaacactgctcgaggaatccccctttatatgtgaaaattatgatttaacacatactcgccccaaagaagggtttagagatgttagtaaaagagtaacattttagagaagaatcggtccttggaggtgttttaatggaacgtaccccaagatcttattataaccggaatatacaaaggatgtatgtataatttaaggtatagttaccgctatgctagggccgacatgcccgatttttaattacctctacccgatgttgaccagtcaatatttttaaactaatgaattagttttattctaactttggaggaaagttatttggcacgccctttctattttaatc

SEQ ID NO: 15482 - DNA, 301 bp, synthetic construct
  source 1..301: mol_type = other DNA
gtgagtccctccgtcttgggcagacgttaaatgcatccattccggacctattcgggattgtattactagtgttgaaaataggtttgtacaattggattactgcatgtttttatattttatatgtttacataatacatgaacagctttgtacatttagacatgtccctcgtggcataccagtattcactggagagctcgtcactcaacaaaacatcattgcctttatgtgtgttaagcagcaccatttaggtattcgttaaataagcttaccgattctaataataataataataataatagc

SEQ ID NO: 15483 - DNA, 987 bp, synthetic construct
  source 1..987: mol_type = other DNA
catggacgtaatgtccatgcagagaattataatacttttatcagatatatctatgatattgtttcaagagttcatcttgaaactttcgtatgttagagcttgtatattgttgtcaatgtatgggttcttcccatacaacttcatatacaagatatttttcatacgctaagtttcgtaattgatagaatctcttgttgctttaagtagaatatttgatgaggtgttattattcgccccagttttctatctgtttacagctacgacttaaccattagtcgataacgcaggctgtatcctagttcagtaaagtacatagaatgcaaagatatttagactacttaagctactgataaagtttatactttcgcttttgatgtagatgttcatttacttaagtatagcgctctgaaccgagcgcttttgtttatgaaagaatttaatcaactctttcacccggctacacatctttagagatgtttatgacagtattaatttgtttaatactcgaggccaaatttcggtgtttttactaattgcaagatgtctacggactgccaaaatcttgtgtatttagtataaattcctctcccattttagttttaactatgaaattcttttattagttgactatttaggtttaggactttaacactgctcgaggaatccccctttatatgtgaaaattgcgatttaacacatactcgccccaaagaagggtttagagatgttagtaaaagaataacattttagagaagaatcggtccttggaggtgttttaatggaacgtaccccaagatcttattataaccggaatatacaaaggatgtatgtataatttaaggtatagttaccgctatgctagggccgacatgcccgatttttaattacctctacccgatgttgaccagtcaatatttttaaactaatgaattagttttattctaactttggaggaaagttatttggcacgccctttctattttaatc

SEQ ID NO: 15484 - DNA, 301 bp, synthetic construct
  source 1..301: mol_type = other DNA
gtgagtccctccgtcttgggcagacgttaaatgcatccgttccggacctattcgggattgtattactagtgttgaaaataggtttgtacaattggattactgcatgtttttatattttatatgtttacataatacatgaacagctttgtacatttagacatgtccctcgtggcataccagtattcactggagagctcgtcactcaacaaaacatcattgcctttatgtgtgttaagcagcaccatttaggtattcgttaaataagcttaccgattctaataataataataataataatagc

SEQ ID NO: 15485 - DNA, 471 bp, synthetic construct; identical to SEQ ID NO: 1965
  source 1..471: mol_type = other DNA

SEQ ID NO: 15486 - DNA, 328 bp, synthetic construct; identical to SEQ ID NO: 1577
  source 1..328: mol_type = other DNA

SEQ ID NO: 15487 - DNA, 365 bp, synthetic construct; identical to SEQ ID NO: 1685
  source 1..365: mol_type = other DNA

SEQ ID NO: 15488 - DNA, 279 bp, synthetic construct
  source 1..279: mol_type = other DNA
tctttctgttacattagtagcaaggcactcatcttcattatacatactacatattcataagtttttacacttatcaagttctagtatcatataagaaaatgaaacccccacgcatgagcaaattataggtaaagatctcgtgttttttaagacaaatacacataaaagaacttgtccagtgaaagtttcaaaaatctcacccgatttcggagtatttcgtcaatatatgtcacccatccacagaggattcaggtcagcataattgatgtcactatcagc

SEQ ID NO: 15489 - DNA, 1000 bp, synthetic construct; identical to SEQ ID NO: 2632
  source 1..1000: mol_type = other DNA

SEQ ID NO: 15490 - DNA, 528 bp, synthetic construct; identical to SEQ ID NO: 184
  source 1..528: mol_type = other DNA

SEQ ID NO: 15491 - DNA, 707 bp, synthetic construct; identical to SEQ ID NO: 2317
  source 1..707: mol_type = other DNA

SEQ ID NO: 15492 - DNA, 253 bp, synthetic construct
  source 1..253: mol_type = other DNA
gtaacatcagaactccgccttgaacctctaaaggtttggttttcggcgtggatacctagagccttatgacatttgtcctatgagtttgtatggttcctcaccgagcttgacgacctcgtgttgacatggaacgtagtctttttcttgatcctttccgaacgtatcataggagcgctggtagtcttgttgagtaatccaagacaattagctctgagtgtgagtttggatgtaggtgatctgtacatatttattt

SEQ ID NO: 15493 - DNA, 303 bp, synthetic construct
  source 1..303: mol_type = other DNA
gtacttgtggactaagtctaacccgtttttgtgtgcgttatcacataacccatttgtattttattatattttattattttagcaagattaatttttccgctgttttccgtaagtcctacataggagctcgtgcagtatttatactgatttgcacaaatctacgggcactcctcggattctttattcccaagtgtttattaattgttttaaccctgttgttctttttaggtcttcttaataagaaaatttatttgtcaactatatttgtaatttacgcttttgatactgttcaaactattaaca

SEQ ID NO: 15494 - DNA, 390 bp, synthetic construct
  source 1..390: mol_type = other DNA
taaagtttaagatttaaactcactacaaaacaaatacatgggcgcagcgtatgcgcccatgtatttgttttgttgtgagtttaaatcttaaactttaaaaatacttaagttcaagctttatgtttttattttatcatttttgtatttcattccttttatattttctttaggtgtagtgaaatttgttatttgctcctgtttaatttctttaggggtatactttctgtcagcatacaaatgatatagaacttgacggtttgattgatagtgatttgggctttatgttaaaaatcgtttctccggagtcgagattttcgccggttaaacggggtcgagtccctggtaaagtctaatgatcttgatagataactttaaggtgttggagtttgt

SEQ ID NO: 15495 - DNA, 783 bp, synthetic construct; identical to SEQ ID NO: 2416
  source 1..783: mol_type = other DNA

SEQ ID NO: 15496 - DNA, 576 bp, synthetic construct
  source 1..576: mol_type = other DNA
tcgtacggacgttaaccgtccgtacgagatatagtctagttggcagcttaaacccgctgcccaggttctacctgtattttaggtactgttctggtttgctctggaatgggatcgcatcgtacatggaagaaccatgacgatgtcccactgtagagtgtaccacactgttactgctacgattgacagctatataaaagtttttaatggagggggagttaacctctgtaaaaaatcataaacccttataaagtgtttttcatactgattcaaaggcttgcacttgataaagcctcaagatctaaccccataatcaatgggattactgtgcatacggaagtaccggagccagttcttatgatggtattcgcttatatgccgaaaataaagcccccgtcctaacaaaacaaggtgggcaccctacacgggtggacaccgagccgtagagtcacgggaagtgtagatttgaaagagcttgctcttagtctgcttctatacgcttgacagagatttgagttttgcacttgtgtatatagcgtctcatttgtcttgttaaaacgtgtctcgatttgttgtcga

SEQ ID NO: 15497 - DNA, 404 bp, synthetic construct; identical to SEQ ID NO: 1789
  source 1..404: mol_type = other DNA

SEQ ID NO: 15498 - DNA, 943 bp, synthetic construct; identical to SEQ ID NO: 241
  source 1..943: mol_type = other DNA

SEQ ID NO: 15499 - DNA, 583 bp, synthetic construct; identical to SEQ ID NO: 2151
  source 1..583: mol_type = other DNA

SEQ ID NO: 15500 - DNA, 578 bp, synthetic construct; identical to SEQ ID NO: 2146
  source 1..578: mol_type = other DNA

SEQ ID NO: 15501 - DNA, 648 bp, synthetic construct
  source 1..648: mol_type = other DNA
tattatgatcttgtatcagaaccacgccgataagctcggataatattatccctggctctgcaatttattatgacgactattgagatgaacactattggactatgacttgacttattatttgttatttgtacgttagaatcaggcaagcttgcctatcctgtttacttgtcgattaatctaggactgaacgttaatacgaactacttatcgagtaggtaacccactaccgaaattgtggctaacccgaaacattaagtagaatttttgtatcgattattaagaactttgattatgaaaccgcactcagtgacgcaagtaatactatgaaagaagaaacggcttttatagtgattaggacgtgaacgcaaaatcgtaatgtttgcctatacattgacgatttgttctgtctgagtagttattacgttatagaattcctaaagtatcttggaaccctcgtattactctcacacttgaggaggtgtgttagtattaaggtaatccattgatatgtgaagaattcgactaacggtgttggtatgttaccggtaaggtttgtactatgatgtacttaagggaccagttaggttaactcttggtgccacggccaagacccgctcaacgcgcataccgcatgaatggaaatatttt

SEQ ID NO: 15502 - DNA, 919 bp, synthetic construct
  source 1..919: mol_type = other DNA
ggtataggccaccctctctcttagtaatactcagcattatataactgttagctcgtttaatcgtctgcacgctctgaaccagtattttcagttatggtgttgtgtacctaagttcccgtgtctcaagtatgatattctcgattaatcgtctgcacgctctgttcgagaaggattgtacacccaataccacccaaccgaaccttattatgattttgaagacccttctgacagtatcaggctactacccgcatttatgtaggctctagtgttactgaaagaagcttaatcttctacccgccacctgatttatattgaatgttaacggaatatcctagtttaagcaattagttaagtgattagtttaacttaagtttaagaacacaataaaaaaacaaaaacaaaatacaaaatctagtataaggccgtaccgagacgaatttgtgagttagtaattattcgcggcactctcccaaaaggacttgatgcttggataatgaacgcaatatcttaggatcctaccagcagcagctggacctgttttacaggtgggcaaggcatgttattggggagaccatagcagttttactgtaccctaccacacctcctcgtggataaattggagcaagttttggcgaatatttcttgtataaaatgtcactaggacggtatcgccgaataaaggatacccggaaccagccccgtcatcagcggtgaggacactaatgtgttaaaaaccactttttcaatccacatatgcgtacaacctaaagaattcaacacaagtgcttccccaagcgattatacaaagcgattacacaaagcaaatattcaaagcgaatacccaaagcgattacacaaagcgaataaatcaagaagaagatatctgaggagaatatatagacaagcagttacttgtact

SEQ ID NO: 15503 - DNA, 695 bp, synthetic construct
  source 1..695: mol_type = other DNA
cgtagcatgacccttatgggtcttgcactgaggggcatgttggtgaactagcgaatcaccagggtgttccaataaccggcctaatcagccaaccccttgggttggggtctttctcttttgatgatagggtgtcttttgacaactttttggacctttatgtcatcaactgatgagagacgaaatccaccagtggtttaccattggaatttgttttgattgttttgtcttcattcgtttattttttatagttttatttttctatatatttattatatatatgtgtctgtttattgcatttttatatacatgttaggtgtttttcatttgtgttctatgatacatttataatatgattttcgtttgataccaaacataaagccgtgggtttatccccaaacagcctaacgatccgctacggcggggaaggccttaactgagtcctcctgctttctacgtgagtgggagccctgttcctgggttgtgaccagataaaactcgtagggacctggtgtgggttggcgagttctggacattcatgatgaggagtacatcaagctctatattctgcattgtctttgttctcgttatagctaatacatccggtttgcacgtatgttcggctaactttgccttggagatgtgcgaatgtgactccccgaaaggtaaccaagtgagttgcgagccaaaaagggtaa

SEQ ID NO: 15504 - DNA, 692 bp, synthetic construct; identical to SEQ ID NO: 2302
  source 1..692: mol_type = other DNA

SEQ ID NO: 15505 - DNA, 666 bp, synthetic construct; identical to SEQ ID NO: 2267
  source 1..666: mol_type = other DNA

SEQ ID NO: 15506 - DNA, 724 bp, synthetic construct; identical to SEQ ID NO: 2341
  source 1..724: mol_type = other DNA

SEQ ID NO: 15507 - DNA, 916 bp, synthetic construct; identical to SEQ ID NO: 2537
  source 1..916: mol_type = other DNA

SEQ ID NO: 15508 - DNA, 451 bp, synthetic construct; identical to SEQ ID NO: 1919
  source 1..451: mol_type = other DNA

SEQ ID NO: 15509 - DNA, 716 bp, synthetic construct
  source 1..716: mol_type = other DNA
gggtaaaaccctcctctccttttggcacaaacagagattcctccttgttaggttaagtcctggtggtagatcactctgccattaggttaagtcctgactttgactgcccctctgtgttatgtcgagattccttgtgattaagtagtaagtcctgaccttgggttaccccactgttaggttgtaagtcttggtctcaactaaccctcggcgtagctgtgtcgaattgagaacctttatttgcttagattaggacaagcgattttctttgtcgctataagttcgtcaggcattgcttattgcctgtccctttctatctgtcccagagtcctgtgactactcttgtcccaaaacattgtagctgctagtaccatcgtgtgttgattattacaggtaacagcgtagatcttcactggcaacagtaaagcacgacagcggaacgcagagcactatggtgtattaaggcacttgtagtttctaactctatctttttcgacaaccggatgcgcatgacgggattccttctttaggaatgaaagggtaattattgcgtagtcgggtttaccggctattgtctactcgttgtgcgttaatgttcgcttccagaacagtccgaaagtgcactctatctctctcttcagtgtgtactgccacgtgttgtcttcttagtggcatatctttaacccgctagggatcttttaattttgcaatttcattat

SEQ ID NO: 15510 - DNA, 606 bp, synthetic construct; identical to SEQ ID NO: 2180
  source 1..606: mol_type = other DNA

SEQ ID NO: 15511 - DNA, 573 bp, synthetic construct; identical to SEQ ID NO: 2139
  source 1..573: mol_type = other DNA

SEQ ID NO: 15512 - DNA, 479 bp, synthetic construct; identical to SEQ ID NO: 1983
  source 1..479: mol_type = other DNA

SEQ ID NO: 15513 - DNA, 305 bp, synthetic construct; identical to SEQ ID NO: 1496
  source 1..305: mol_type = other DNA

SEQ ID NO: 15514 - DNA, 869 bp, synthetic construct
  source 1..869: mol_type = other DNA
aggaggcactcttttgaacactgtagatcggtcgggtaacagcgcagcgatacaagattcttccacagcccttcaggctgactggaagcctttcaaaattttaaaaccacaatactttaaatgtgatcactgctttccactataagactgcctgaacaacagtacgtggttagttagatttaattttaaggaaagaagagtaaaacatcaaagctctgacactgaagccgagcctgtgagtaagccagacaagcagcattaggcagaagtggtaaacgttcaccttgagaaacgtggacggcgcgtcaacgaagtttactttacaaaccatttacaatcgcgtcgtgtgggaaattggaacattctctattatctaaaattctggagtataaacaacccgaaaaggccgtagaaaccatgaagattacggacgagggggcgacaggctagttataactaagttatagcgaaatattagtgcccagttgtttaatatgaaagaatcgcagatttgagagaaggaaccatcgtacctgcgtaaatcgtataagaagattgaaatgagtttaagcaccaagcatacctagcgggttgcgactaggcaagtttaacttgacgggaaatttaaagcctcccatggtgtaagtaaatagcgaaagcgagggtctgacagtgtgcaagctcagatgctaacccttagttgttcttatttagcaaataagattaccctaaccaggtagcgacgtcgaaagccaatcaacataggtacaatcttttaggccgttcatcaaaattaccctggcaggactttcaaaaagaacgttctgctttcaaataattgcacaataataaaacaagtaaataagaaa

SEQ ID NO: 15515 - DNA, 815 bp, synthetic construct
  source 1..815: mol_type = other DNA
agcactgatcttagaaggatcttattatagattattactttgtagcatgggtccttcttagggccccatgttagattgtttaattttgtatattaggatgtggacatttcagttagctattgaattacgatttatgtaatcttggtgctccagactggtaatctggagcctccattgtaactttgaattaattaaatatctaaatttaccactttgagtgtttattctgtgaatatgcactcgttgctctccaccttgcgtggagagcttttgctccccatatatcggggagcttttgctccacactattgtgtggagcttttccctgcttttgcaggggttcttgatgttttatctgagttgactacggtcatgtgtttacgctcagacttatcatcacctatagaaatctcaagaattttattagttgaatttctatggttcgttaccttttataagaatggttatgtatgttcgaggaatcccctcggcactatttagtaatttcgtttattaaatctccgaagataggagagcttaccagaaacagaactttagtgccgaaacaatcggtcctcggctgcgttttgagcaacgtatcgctacatttacattatgttaggtattcgcaatatcatttagggattatgtatcgtttaagcatcagtcaccgctgatgtagggtgttggcactcccgacttttaaatacctctatctcttttgtgagccgatatcattagattttcgtaaactactattacgattgtttttaatatagttttatttaaacacaacccccctctccacttttatc

SEQ ID NO: 15516 - DNA, 414 bp, synthetic construct; identical to SEQ ID NO: 1811
  source 1..414: mol_type = other DNA

SEQ ID NO: 15517 - DNA, 1000 bp, synthetic construct; identical to SEQ ID NO: 269
  source 1..1000: mol_type = other DNA

SEQ ID NO: 15518 - DNA, 424 bp, synthetic construct; identical to SEQ ID NO: 1844
  source 1..424: mol_type = other DNA

SEQ ID NO: 15519 - DNA, 860 bp, synthetic construct; identical to SEQ ID NO: 2493
  source 1..860: mol_type = other DNA

SEQ ID NO: 15520 - DNA, 768 bp, synthetic construct; identical to SEQ ID NO: 2394
  source 1..768: mol_type = other DNA

SEQ ID NO: 15521 - DNA, 950 bp, synthetic construct; identical to SEQ ID NO: 2552
  source 1..950: mol_type = other DNA

SEQ ID NO: 15522 - DNA, 993 bp, synthetic construct; identical to SEQ ID NO: 246
  source 1..993: mol_type = other DNA

SEQ ID NO: 15523 - DNA, 983 bp, synthetic construct
  source 1..983: mol_type = other DNA
ctccacgcgggtattacccgcgtggagatcaatgaacttttatcagtagtaacaatttgttactcaagtctatcgaatgacttttattaggtattcgaaactctttataaacaaccatgtctattaggggttttacccctatagttatttgtttgtatttgagtttcaatgaattgttagtaaaagtaatttaagcatatacttgtttaatgtattgaaaattctgctgatttagtttatgatcgaacccaagttttctatctgtagtcgtttcattattcttttttgaattttgttctagctggcgattatgttgctctttcgagcgccaagctaaatatcgaaccgatttggattgcaattggattatatggcattagtctcagttgtagttgttctttaacatttcgattccggtgaaccccggaatttgttcaggccttttggccactaaaacgctattaactcatacacacagaagcgttttaaatatatgtctgtgagatgtaatttcgtaatttacggactttattgaatgaggtagtacctgtatcaatatcgtatttccactctacggagtgaagagcccccctgtttatttggctcataatagaatagacctagtttatcatcacgctatgatcctgtgatgttcttaggttacctatcttatgatatggggaccaaaccctagacaagactcattagtcggcgtattgtctgaaacctatagtgggaagtaatgacccccaagttcacttgagaattcttgttggacagctatttggttgaagccttaccaaccgatgtacttagtgtaccgcttctgcctgcggcgaataatacatgtttaaagtacgtaagtaagttcatcctcttaattgagtggtgaagcaaagcttttgtgtcgaagcacaattggattaccaattttgcgggcctctcgcgaattggttcctctgtgcttgtcgctttcaatttta

SEQ ID NO: 15524 - DNA, 622 bp, synthetic construct; identical to SEQ ID NO: 2202
  source 1..622: mol_type = other DNA

SEQ ID NO: 15525 - DNA, 437 bp, synthetic construct
  source 1..437: mol_type = other DNA
gttatatgtctatgtgtttagtgttgtacgttcaattatttgaacgtgccgctctcgatacatatgtcattataggtattgattgttcaatttaaactcgtttttcgtacttttgtcgtaaaaaagttcactttttcagtctactatcaagactttaaaaggatagttggagttttcgcacgtctccgtaatttacacttcgtgtagtgcaatctccggtactttggtaatcagccggattataaatttttggatttactgagctaacagtctcctcatactgtacgtcgtgcccatagatggtacgcaaattgtaggtattcctactcatggggtttaatggtagtactgatctggtaccccggctattatagcctaaacaactcagtttttgccaggacgctgttatttataacagtagtcctggcgtatatatt

SEQ ID NO: 15526 - DNA, 665 bp, synthetic construct; identical to SEQ ID NO: 2265
  source 1..665: mol_type = other DNA

SEQ ID NO: 15527 - DNA, 278 bp, synthetic construct
  source 1..278: mol_type = other DNA
tcttgtatgcatataatgtagtctagtaaattgcatacactgctatccagcttttaggtcccctatttagggagagcgtcctgcgagcagccctccaaaagctcaatagacttcggagcagccatcctgggttagatcggcagccatgtttacatggtgctcttaaaaattaacctgctaatcaaacttcaactaacaacagcagcacaattgctgcatcaactcccgccaattttggcgatcaggtagtacaatcttccactcaagtatcaactact

SEQ ID NO: 15528 - DNA, 911 bp, synthetic construct; identical to SEQ ID NO: 2533
  source 1..911: mol_type = other DNA

SEQ ID NO: 15529 - DNA, 692 bp, synthetic construct
  source 1..692: mol_type = other DNA
catgacccttatgggtcttgcactgaggggcatgttggtgaactagcgaatcaccagggtgttccaataaccggcctaatcagccaaccccttgggttggggtctttctcttttgatgatagggtgtcttttgacaactttttggacctttatgtcatcaactgatgagagacgaaatccaccagtggtttaccattggaatttgttttgattgttttgtcttcattcgtttattttttttatagttttatttttctatatatttattatatatatgtgtctgtttattgcatttttatatacatgttaggtgtttttcatttgtgttctatgatacatttataatatgattttcgtttgataccaaacataaagccgtgggtttatccccaaacagcctaacgatccgctacggcggggaaggccttaactgagtcctcctgctttctacgtgagtgggagccctgttcctgggttgtgaccagataaaactcgtagggacctggtgtgggttggcgagttctggacattcatgatgaggagtacatcaagctctatattctgcattgtctttgttctcgttatagctaatacatccggtttgcacgtatgttcggctaactttgccttggagatgtgcgaatgtgactccccgaaaggtaaccaagtgagttgcgagccaaaaagggtaa

SEQ ID NO: 15530 - DNA, 289 bp, synthetic construct
  source 1..289: mol_type = other DNA
gaaacgaccatgatttctcctctactatgttgtcaatcgctagtagaacattagtcttagaccatgattagttaatactcatttacgagtcccttgctatgtttgtatctttgacgagtcgattgaattatgagcgtttgacgaacgttcagcactttaagtgtaagttagtcttaggttttagcctaaagcactcttccctttaattaggttagtaattggagtgtagtaagctttctgccaatatggcaccccatgggtttggacttaccttagtaccacgaacgtt

SEQ ID NO: 15531 - DNA, 801 bp, synthetic construct; identical to SEQ ID NO: 2436
  source 1..801: mol_type = other DNA

SEQ ID NO: 15532 - DNA, 303 bp, synthetic construct; identical to SEQ ID NO: 1493
  source 1..303: mol_type = other DNA

SEQ ID NO: 15533 - DNA, 465 bp, synthetic construct
  source 1..465: mol_type = other DNA
ctttaattaatttaatttgaatgcgcatacacccttcgtatgcgtattcaaattaaattaattaaagattactattgattttaatcggcttatttgatcaaacacttaattcttcctaaaattggtattaagactttaattataatacctcatattggtcttccatctttgggttatagcaaaactataattcttcctgatattggcttatatggcgtttaattttcttctgatacccatcatccaatttattctttccttatacttttatctattactttatccttttctatactttcgttatatatcacttatataacataaaatataaaaatccaaaaagtttaattaaattactcattttattctttaaaataacttcatattcacacatcaattattctacggaatttcatatctttgtaaggtaagcataaagatccttactccttgaacaaggcataa

SEQ ID NO: 15534 - DNA, 381 bp, synthetic construct
  source 1..381: mol_type = other DNA
gtatgcaacaacatacacactcagtttgacggacctatccgtaaaatagtccacccacttttagtggtcgctttttaccaggactcgatcctgtcgcacataaataacatactaatattattttatgatgctgatttggtattgtgttttagttagacctacgttgttcattagtactgccttgcgaggacgactatagacactggaacgtgaactgcaagtcggaccttttattaaccgctgcatgcaagttatagatcctattacacaatatgcgagaatgaccatggctttggattatggctttgaacagaacgctggaacacgtttcaggctctcgaaaagttacagtacggagctagtgaaataagtctttgtgga

SEQ ID NO: 15535 - DNA, 331 bp, synthetic construct
  source 1..331: mol_type = other DNA
atccagagctaggggctctctctaatcgccgcaaggagggagcagcaaagtccggtctctggtcttcgttttagaagggcggagagcttcggctctactggctggtgtgtgccgcctaaaatccaggctaccagctcggcgcttttgaccagatccgttgaatcgagcgactgggagttagctaactcaatcgattgctacatcacaaaatcaagatttgtcccatattgggccgcaagaagatgttcagcagatcacgacattcgtcgacgattctaacatccagtcgtacgaaaagccacatatatcatctgtgactgcatggacaaaa

SEQ ID NO: 15536 - DNA, 654 bp, synthetic construct; identical to SEQ ID NO: 2251
  source 1..654: mol_type = other DNA

SEQ ID NO: 15537 - DNA, 439 bp, synthetic construct; identical to SEQ ID NO: 1886
  source 1..439: mol_type = other DNA

SEQ ID NO: 15538 - DNA, 453 bp, synthetic construct; identical to SEQ ID NO: 1924
  source 1..453: mol_type = other DNA

SEQ ID NO: 15539 - DNA, 321 bp, synthetic construct; identical to SEQ ID NO: 1551
  source 1..321: mol_type = other DNA

SEQ ID NO: 15540 - DNA, 784 bp, synthetic construct; identical to SEQ ID NO: 2417
  source 1..784: mol_type = other DNA

SEQ ID NO: 15541 - DNA, 291 bp, synthetic construct
  source 1..291: mol_type = other DNA
aatcctctatttctcctaggtttgattgggcggtcaaatctctgtacggtagtctatcacttaattctatgtgatctccaaggttggagcgatagatttaattttaaaatattttaaataatattaaaagtacctttaataatagtattaatataaatttatttaccaaagcttatcaagtgtaaatttacttatttatgagagagtatttgattacttttgtttcatatttattaggttatttaattggttattcaatttcttatttttattttaatattataagaggag

SEQ ID NO: 15542 - DNA, 283 bp, synthetic construct
  source 1..283: mol_type = other DNA
attcaaaagaaggcatcgtcgttaggtgacgttaaaacctacccagtttcaaatctgatggtgagcaaaattgaacatgtatatggataccatgtattttatatgttttctagtttttgtatattgtatataggctttgcatgtgaagggcccgtactgcgggatcgagagatgggtacaccctgcccaactgtaaattagacgcaatgagttataatcctaagctcatatgtgtacatagtggattactaaaacaaataaacaaacaaacaaaaataaaaac

SEQ ID NO: 15543 - DNA, 778 bp, synthetic construct
  source 1..778: mol_type = other DNA
ccgatctggggaaacccccctgttctcttttgaaagctgaagtattggattttgcgtgatttattgagttaccgcagtttcatctgaatttattccggattttgcaaaatgttcttttgtttaattgataccagcgggattttatctaacgaatctagccacacttttaatcattagcactctttagtacaacggcaccaaccaacccccccttttatcattttaatattcttctgtgacaggcgccttagcgcagtcagtgtttgaggattctttatccatttcggaccgcgttatctatttatagatcctttttacgatttcacactgattgtttttaacaaccatcacccttatatttacgtgtacaaaaaattataaaaacgtcgcaagacaccaaaaacaactgtcttttcatacattagatgcaataataacactgatgaattagactatgaatcagatttacctatatgatactaaaacgtcgccgaggcataaagagcggacccaaaaggaaaacctacgtcaagtattatatctgctgatcagccatcttttttattttgtgcgctgtttttgcggacactttgtaaatgctatgtcgttgctgggctcacttttcgagcaataattactagaacccaaaaaatgaataaaggtcttacgggtattcttaggcagcaactttcattgtcaatccaaacatgtttcggtgtttggttctagcaattaatccttcccacgattcctattttaactctttttaacattcacg

SEQ ID NO: 15544 - DNA, 1000 bp, synthetic construct
  source 1..1000: mol_type = other DNA
tcaaccaacccctaggttttgtacactttagccacaatcaaatgtactttttgggttagacctagttctaacccacatgctttgtaatagcatgttaatcaaaatacaaccctttttagttaatcacactggtattatttcattaactaacctgtagagtgtgtaatacttaaaatttaatttttataagagatttattaagatttttaatattataattataaataccccctagcgtgcgcaatgcgttttggggatttattatttgaatttgcgtctaatgtaattcttaccttccgccattatttaattttttatcaccgcgaggagtcctattagagtgatacaattttatttataaggttttgaaagagaagatagtttttaggtccaaattgcaagccttcacagggtattagaatcgattccctggtgtttaagactgaagtttgctgctaattattatgtttttgattaattaatttatttattatttaaatcaaaattttttgtattcaaggtactaactttttatttctttattgtcattataagtcaaccaattgttcgacgacacgaaagcgaaaattgcaccaatacaattgattcaatcaataatcaattaactactacaaattcattttgctcactttttaatggtgagcatgtgattgatgagactttaccaattaaagtcgtcgttctctctgatactgaacgatttgtgttcaagatttttaatatctatgatatttatcggaaattacgaacacgttttactaaacgaaattatgatttgaagcattactataatcctttagatttgcctcaattttatttatcgtttaacaacaaaccattacgagatttacctattccctattgggaatatggtcttaaaaatttttctattatagaaattacttacattggtttaaatggaggtacaccatcaattcctggcttgcttaatgtagaccaatatttgttatgtgtccaa

SEQ ID NO: 15545 - DNA, 417 bp, synthetic construct; identical to SEQ ID NO: 1826
  source 1..417: mol_type = other DNA

SEQ ID NO: 15546 - DNA, 321 bp, synthetic construct; identical to SEQ ID NO: 1552
  source 1..321: mol_type = other DNA

SEQ ID NO: 15547 - DNA, 777 bp, synthetic construct
  source 1..777: mol_type = other DNA
ggggcaggggaaacccccctgttctcttttgaaagctgaagtattggattttgcgtgatttattgagttaccgcagtttcatctgaatttattccggattttgcaaaatgttcttttgtttaattgataccagcgggattttatctaacgaatctagccacacttttaatcattagcactctttagtacaacggcaccaaccaacccccccttttatcattttaatattcttctgtgacaggcgccttagcgcagtcagtgtttgaggattctttatccatttcggaccgcgttatctatttatagatcctttttacgatttcacactgattgtttttaacaaccatcacccttatatttacgtgtacaaaaaattataaaaacgtcgcaagacaccaaaaacaactgtcttttcatacattagatgcaataataacactgatgaattagactatgaatcagatttacctatatgatactaaaacgtcgccgaggcataaagagcggacccaaaaggaaaacctacgtcaagtattatatctgctgatcagccatcttttttattttgtgcgctgtttttgcggacactttgtaaatgctatgtcgttgctgggctcacttttcgagcaataattactagaacccaaaaaatgaataaaggtcttacgggtattcttaggcagcaactttcattgtcaatccaaacatgtttcggtgtttggttctagcaattaatccttcccacgattcctattttaactctttttaacattcacg

SEQ ID NO: 15548 - DNA, 754 bp, synthetic construct
  source 1..754: mol_type = other DNA
agtggttctgccactgcagctttttaccggcacttgtacggtgtcgtagtgtatcatgactggttaccttttttgggctagcttgatactcccgtgctccggaggtgcattaatgatggttacgttaattcggctgtccttaatgcgtttatccagctcagtaaagagtctaaaatcttgtttgttttgaatcgcgtactacataaagatttattaatgaccttgattttatcagggatactttggagcgtccgatacgtcacaattttttgcgacactcttatgagaaccgtggaatggatgtgttgttgtcgcttgtgagaacacattccgatgcgctatgcgctggttgccttccggtatgaattgtggacgtatctggagtatcaagacccctcaggtagggattgtcaaatagttagcccaacgtctattgtgatgctgctgaaatattaaacgattgtcaaatagttagcccaacgtctattgtgatgctgctgaaatattaaacgattgtctctgaaaaccatcgcactggaagctttgggcatcgttcgccatgttgaggaacattcgtttgctattaatgatgcgtgccggtaagcggtaagctttttatttgacggatgtgtggcaatattgattgcgcactaatgtggatgcttagttggccggcgtaaaggcgaattctcggaggaggctaaactcaccccaacccacgaaccagatacaaccattataaacaacgtttaaa

SEQ ID NO: 15549 - DNA, 508 bp, synthetic construct; identical to SEQ ID NO: 2042
  source 1..508: mol_type = other DNA

SEQ ID NO: 15550 - DNA, 615 bp, synthetic construct; identical to SEQ ID NO: 2194
  source 1..615: mol_type = other DNA

SEQ ID NO: 15551 - DNA, 284 bp, synthetic construct
  source 1..284: mol_type = other DNA
tggttaaattctccaccccgaagtccatcggggttcctgtgtatagttaaaacggactgtgtatatatggtttaccaattgtgtttatgttttgtgttgtgtacatttatggaattaggctttgtacatattggtatggtgctcggccatacccctatttaggggagtagttagccactacaaaatcatcgcaccgttctacagtttgagtcaactgtagatattgtttatattgactcagtaacaattttgattatttatttataaatttatgttgtgaaaag

SEQ ID NO: 15552 - DNA, 806 bp, synthetic construct; identical to SEQ ID NO: 2441
  source 1..806: mol_type = other DNA

SEQ ID NO: 15553 - DNA, 342 bp, synthetic construct; identical to SEQ ID NO: 1626
  source 1..342: mol_type = other DNA

SEQ ID NO: 15554 - DNA, 331 bp, synthetic construct; identical to SEQ ID NO: 1584
  source 1..331: mol_type = other DNA

SEQ ID NO: 15555 - DNA, 354 bp, synthetic construct; identical to SEQ ID NO: 1654
  source 1..354: mol_type = other DNA

SEQ ID NO: 15556 - DNA, 484 bp, synthetic construct; identical to SEQ ID NO: 1993
  source 1..484: mol_type = other DNA

SEQ ID NO: 15557 - DNA, 688 bp, synthetic construct
  source 1..688: mol_type = other DNA
ggcggggaaaaaccccgcctcttttccaaatggcaggcctgtataccgcccagctaataactaagttcctcgagatccaatttttattagtatggtagatatggaaccgacaaaccttaggactagaggatgagatttttaacccctacttttgagcacccaatttttacaaacaaacaaaactttattaaatataaaatatttattttacgttacccaaaatataaaatgtataaaaacaaaccagtggtaaccttttattttcttattattttcagttgttgattgtaagatcactttatctattcacacgtacttaccttgatttagatactctggaccccgaggggttttaaaagcatgagagactagtaacccaaattgcctagagcctatttctctgacgtggaagacaatgaggttttcgaacaatacgtaaatgctatgatgcgtgggcaatgtctatattgcaataatggtcgattgacctgtcgtccctcatacctattatgaggccctaagacacgtattcattgtgaactaattctttaatccgtggaattagcgctggcaacaaactcttcaaaggattctttaaatttttaattttacacatatggtcacatcataagaattttcaataaagcgattttaagattttcacaaattacaaaacaaacaaaacaaa

SEQ ID NO: 15558 - DNA, 748 bp, synthetic construct
  source 1..748: mol_type = other DNA
tgaaagctgaagtattggattttgcgtgatttatcgagttaccgcagtttcatctgaatttattccggattttgcaaaatgttcttttgtttaattgataccagcgggattttatctaacgaatctagccacacttttaatcattagcactctttagtacaacggcaccaaccaacccccccttttatcattttaatattcttctgtgacaggcgccttagcgcagtcagtgtttgaggattctttatccatttcggaccgcgttatctatttatagatcctttttacgatttcacactgattgtttttaacaaccatcacccttatatttacgtgtacaaaaaattataaaaacgtcgcaagacaccaaaaacaactgtcttttcatacattagatgcaataataacactgatgaattagactatgaatcagatttacctatatgatactaaaacgtcgccgaggcataaagagcggacccaaaaggaaaacctacgtcaagtattatatctgctgatcagccatcttttttattttgtgcgctgtttttgcggacactttgtaaatgctatgtcgttgctgggctcacttttcgagcaataattactagaacccaaaaaatgaataaaggtcttacgggtattcttaggcagcaactttcattgtcaatccaaacatgtttcggtgtttggttctagcaattaatccttcccacgattcctattttaactctttttaacattcacg

SEQ ID NO: 15559 - DNA, 508 bp, synthetic construct; identical to SEQ ID NO: 2043
  source 1..508: mol_type = other DNA

SEQ ID NO: 15560 - DNA, 331 bp, synthetic construct
  source 1..331: mol_type = other DNA
atccagagctaggagctctctctaatcgccgcaaggagggagcagcaaagtccggtctctggtcttcgttttagaagggcggagagtttcggctctactggctggtgtgtgccgcctaaaatccaggctaccagctcggcgcttttgaccagatccgtttaatcgagcgactgggagttagctaactcaatcgattgctacatcacaaaatcaagatttgtcccatattgggccgcaagaagacgttcagcagatcacgacattcgtcgacgattctaacatccagtcgtacgaaaagccacatatatcatctgtgactgcatggacaaaa

SEQ ID NO: 15561 - DNA, 714 bp, synthetic construct; identical to SEQ ID NO: 2326
  source 1..714: mol_type = other DNA

SEQ ID NO: 15562 - DNA, 350 bp, synthetic construct; identical to SEQ ID NO: 1645
  source 1..350: mol_type = other DNA

SEQ ID NO: 15563 - DNA, 847 bp, synthetic construct; identical to SEQ ID NO: 2477
  source 1..847: mol_type = other DNA

SEQ ID NO: 15564 - DNA, 294 bp, synthetic construct
  source 1..294: mol_type = other DNA
caaacaacaaacaacaaacaacaaacaacaaacaacaaattggcttaaacagcgctcgagtccgatataattggagagtaattcaaggattgtttaagtctaaaaatctattgctaaactagtactttggtttccatcataaaagtgccagtttggcaattatatgagtgatactttttcacttgtacaattgagtgatcttagtgttgaaacacctgaacctcaagatccgcttttggagttttctggaagaggatatacactaagagcaccacgtgccgaattacaagcaat

SEQ ID NO: 15565 - DNA, 693 bp, synthetic construct; identical to SEQ ID NO: 2303
  source 1..693: mol_type = other DNA

SEQ ID NO: 15566 - DNA, 1000 bp, synthetic construct; identical to SEQ ID NO: 2633
  source 1..1000: mol_type = other DNA

SEQ ID NO: 15567 - DNA, 382 bp, synthetic construct; identical to SEQ ID NO: 1735
  source 1..382: mol_type = other DNA

SEQ ID NO: 15568 - DNA, 365 bp, synthetic construct; identical to SEQ ID NO: 1686
  source 1..365: mol_type = other DNA

SEQ ID NO: 15569 - DNA, 269 bp, synthetic construct
  source 1..269: mol_type = other DNA
aaaccccactaacgccttttgtccataatgaagatgaatactgtgtctgttattgtggttatcctactactcgccggcacagttgtgtcgccgccgccgtattgtcgtaacctttgcgacgtgctgctctccaaaaaccgcagcattagcaacgtgttcgccaacggccgctgcgcacctggggctaacataccgctccagcaggtgtaccgctctctggtgcgccgcagctcgaacgcggttcgttgccctccctgttggtaactgcc

SEQ ID NO: 15570 - DNA, 691 bp, synthetic construct; identical to SEQ ID NO: 2299
  source 1..691: mol_type = other DNA

SEQ ID NO: 15571 - DNA, 463 bp, synthetic construct; identical to SEQ ID NO: 1947
  source 1..463: mol_type = other DNA

SEQ ID NO: 15572 - DNA, 768 bp, synthetic construct; identical to SEQ ID NO: 2395
  source 1..768: mol_type = other DNA

SEQ ID NO: 15573 - DNA, 807 bp, synthetic construct; identical to SEQ ID NO: 2444
  source 1..807: mol_type = other DNA

SEQ ID NO: 15574 - DNA, 438 bp, synthetic construct; identical to SEQ ID NO: 1880
  source 1..438: mol_type = other DNA

SEQ ID NO: 15575 - DNA, 1000 bp, synthetic construct; identical to SEQ ID NO: 2634
  source 1..1000: mol_type = other DNA

SEQ ID NO: 15576 - DNA, 574 bp, synthetic construct
  source 1..574: mol_type = other DNA
atcccttccgccttggagaggcgtaaaatctatccactccggaactattcgtagtataagtttaaaatagttgtgtatatatggatactacatattttttaatttatatgtttatataatatatggaagctttgtacatatagacatcctacttttaggataccggtttttactgggggtttcgtcagccaacaaaacatgttgcacacatgagcagaaggtactgccgtgatgtgtatgtgaataaaatttgcctacctcaaacaataattacaataaaaatagtcttggaactgactcaaatagttcttctatcggtgcttatagtgtctcaaaagcacctgatagcatatcaacgcaaaatgtacattttgtcgatggagacacaccatggtcttacgacatttcatcatcaccagatgtcacaactaagctctcaggattctctgacgcagagctcggttccttcctcagtcgtcctcttaaaatcaaagaatacacttggactccggagagtactcgcctgtatgagacatttaatccgtggactgagttttttaccaatatagatgtt

SEQ ID NO: 15577 - DNA, 471 bp, synthetic construct
  source 1..471: mol_type = other DNA
gataaaactatacaaccgtaaagtcttgtccgcttctctttagggaggagcaaaattctggatactgtaaaataccgtattctaacttggccaacgtgcactactttggtcgtaatactggtttcagtcaatctgaaactatactaattgggttgtttaaaacaacccgtaatactcacgagtttaattactcgtttaatctttctgttcgatctcgagcagaatacaattcagacaactcttacttggagttagtcaaaatctttcacactttactgtgtgaatatattgttttccagttaactgtgaaaactgtctttctgtttcctgtttaccaggaaacacttctttgagattaaccatctctcttctgttctctcgttaccgagagagccttgtctttggttctcgcaagagaatcactactgtcttgagggtttcttttgaaatcgtcttcttcttgatcttcaa

SEQ ID NO: 15578 - DNA, 450 bp, synthetic construct; identical to SEQ ID NO: 1917
  source 1..450: mol_type = other DNA

SEQ ID NO: 15579 - DNA, 504 bp, synthetic construct
  source 1..504: mol_type = other DNA
gtatgtaatcacatacacactcagtttgacggacctatccgataaatagcttacccacttattagtggtcgctcttttaccaggacttgatcctgtcgcaagtacaaaatattattacctacgtcttacgatgatgatttggtattgtgttttagttagacctatatgatttgttagtactgccttgcgaggagctggaacgcttatcattagtcggaccttttattaaccgctgcaagcaagttatagatcctattgcacaatatgcgagaatgaccaatgattttggaatatgacgctgataagattgctatggccccgttctaggcccccgaaaagttacagtacggggctaatggaacaagtctttgtggagtgaaattacctctctctgaaattagcgacttcagctgcgtgagttctcttcacattgtacgtatatctaggaataagggctttataggccctgacgtagtactagacgaaaaactttacattgctacc

SEQ ID NO: 15580 - DNA, 331 bp, synthetic construct
  source 1..331: mol_type = other DNA
atccgaagctaggggctctttccaatcgccgcaaggaaagagcagcaaagcccggtcttcggtcttcgttagaagggcggagagtttagagactctactggctggtgtgtgccgcctaaaatccaggctaccagctcggcgcttttgatcagatccgtttaatcgagcggctgagagttagctaactcaatcgattgctacatcacaagatcaagatttgacccatatcgggccgcaagaaaatgttcagcagattacaacattcgtggacgactctaacatccagtcctacgagaagccacatatatcatctgtgactgcatggaccaaa

SEQ ID NO: 15581 - DNA, 502 bp, synthetic construct
  source 1..502: mol_type = other DNA
atgtaatcacatacacactcagtttgacggacctatccgataaatagcttacccacttattagtggtcgctcttttaccaggacttgatcctgtcgcaagtacaaaatattattacccacgtcttacgatgatgatttggtattgtgttttagttagacctatatgatttgttagtactgccttgcgaggagctggaacgcttatcattagtcggaccttttattaaccgctgcaagcaagttatagatcctattgcacaatatgcgagaatgaccaatgattttggaatatgacgctgataagattgctatggccccgttctaggcccccgaaaagttacagtacggggctaatggaacaagtctttgtggagtgaaattacctctctctgaaattagcgacttcagctgcgtgagttctcttcacattgtacgtatatctaggaataagggctttataggccctgacgtagtactagacgaaaaactttacattgctacc

SEQ ID NO: 15582 - DNA, 425 bp, synthetic construct
  source 1..425: mol_type = other DNA
atgcaatcacatacacactcagtttgacggacctatccgataaatagcttacccacttattagtggtcgcccttttaccaggacttgatcctgtcgcaagtacaaaatgttatctacgttttacgatgatgatttggtattgtgttgtagttagacctatatgatttgttagtactgccttgcgaggaactggaatacttatcattagtcggaccttttattaaccgctgcaagcaagttatagatcctactgcacaatatgcgagaatgaccaacgactttggaatatgattttgataagattgctacggccccgttctaggccccggaaaagttgcagtacggggttaatggaacaagtctttgtggagtgaaattatctctcactgaaattagcaacttcagaagcgtgagttctcttcaca

SEQ ID NO: 15583 - DNA, 331 bp, synthetic construct
  source 1..331: mol_type = other DNA
atccgaagctaggggctctttccaatcgccgcaaggagagagcagcaaagcccggtcttcggtcttcgttagaagggcggagagtttagagactctactggctggtgtgtgccgcctaaaatccaggctaccagctcggcgcttttgatcagatccgtttaatcgagcggctgagagttagctaactcaatcgattgctacatcacaagatcaagatttgacccatatcgggccgcaagaaaatgttcagcagattacaacattcgtggacgactctaacatccagtcctacgagaagccacatatatcatctgtgactgcatggaccaaa

SEQ ID NO: 15584 - DNA, 800 bp, synthetic construct; identical to SEQ ID NO: 2433
  source 1..800: mol_type = other DNA

SEQ ID NO: 15585 - DNA, 413 bp, synthetic construct; identical to SEQ ID NO: 1810
  source 1..413: mol_type = other DNA

SEQ ID NO: 15586 - DNA, 746 bp, synthetic construct; identical to SEQ ID NO: 2368
  source 1..746: mol_type = other DNA

SEQ ID NO: 15587 - DNA, 503 bp, synthetic construct
  source 1..503: mol_type = other DNA
tatgtaatcacatacacactcagtttgacggacctatccgataaatagcttacccacttattagtggtcgctcttttaccaggacttgatcctgtcgcaagtacaaaatattattacccacgtcttacgatgatgatttggtattgtgttttagttagacctatatgatttgttagtactgccttgcgaggagctggaacgcttatcattagtcggaccttttattaaccgctgcaagcaagttatagatcctattgcacaatatgcgagaatgaccaatgattttggaatatgacgctgataagattgctatggccccgttctaggcccccgaaaagttacagtacggggctaatggaacaagtctttgtggagtgaaattacctctctctgaaattagcgacttcagctgcgtgagttctcttcacattgtacgtatatctaggaataagggctttataggccctgacgtagtactagacgaaaaactttacattgctacc

SEQ ID NO: 15588 - DNA, 331 bp, synthetic construct
  source 1..331: mol_type = other DNA
atccgaagctaggggctctttccgatcgccgcaaggaaagagcagcaaagcccggtcttcggtcttcgttagaagggcggagagtttagagactctactggctggtgtgtgccgcctaaaatccaggctaccagctcggcgcttttgatcagatccgtttaatcgagcggctgagagttagctaactcaatcgattgctatatcacaagatcaagatttgacccatatcgggccgcaagaaaatgttcagcagattacaacattcgtggacgactctaacatccagtcctacgagaagccacatatatcatctgtgactgcatggaccaaa

SEQ ID NO: 15589 - DNA, 513 bp, synthetic construct; identical to SEQ ID NO: 2058
  source 1..513: mol_type = other DNA

SEQ ID NO: 15590 - DNA, 516 bp, synthetic construct
  source 1..516: mol_type = other DNA
tatgtatttacatatttttattttaatcaaacgaattttaaagctatattgactcattttaattaaatgaactaaataaaacaaagtgatttgaatatttgatctactttaacaaaatattgaatatcgcaaaaacaatttaaagatttttaaaacaattttaatatttaatagaacgaccataggaggtttgtagcgcttagcgtgagttctattaagaaattcaagagagcaaccataggaggtttgtagcacatagtgtgagttctctttaaacattaaaaagaaaatattttaaattaatttaaatacaacaaccataggaggtttgtagcgcttagcgtgagttctattaagaaattcaagagagcaaccataggaggtttgtagcacatagtgtgagttcttttattttaataggtatatgacaacagttgtatatcagactttggaagagttacagatagaagaaattcaatctttaagaaattccgattttgaattttttaaccaatt

SEQ ID NO: 15591 - DNA, 455 bp, synthetic construct
  source 1..455: mol_type = other DNA
aatgaataccttatcaagggtgcgccaagctagttagattaaattcgaaacgaaatactagtgcccattcaaaactataaaaacaattgaaactttaaactaataaaaatgtaccttcgtaaaccttgctcttttgagagatggatattataacacataattgcttgctagcgggtagtaactagccaatttattgaaggatgaaagccacatcccattatgtgattaagttagccttttggcgtagtgcaggaaccgtgtaagccctgataaaccactatagattatgacattgaattcagatcaacaaaggtatgcactttcggaaacccattctaaattactttggcaggacttcaaaattgaacgttctgctttcaaataattacacacaaaataaaactttaattttcatttcaacttcgtttaatttgactttgaattaataaccaatt

SEQ ID NO: 15592 - DNA, 258 bp, synthetic construct
  source 1..258: mol_type = other DNA
gaagaagagtaagaatctttaagtgactttgtgaactaaacaacgtcggcccgtttttaaacggtcaaccacgtttgatgttctggaattcagtggtctggattgcacagtttgcctttggatactgtgttacccgagctttgttgaatagtgaatcttatcttcgatttattgaggataatattgaggtcgttcttactcttttgtttggttattttcttgtgagaggaactttctttattgctactggtttttaat

SEQ ID NO: 15593 - DNA, 932 bp, synthetic construct
  source 1..932: mol_type = other DNA
tgcttaattcattttggtaaccgtgctaaactagcggttaatacttagaataaaacactgcacgcgggaatccgcgtgcagtgtaagttagattagttggcagttattgccttaatagaccataaacgtcatattaggcatactatgcctatttgtgacctttacgtctattatttttctaacacaaccaatgttttattctaagtattaaccgtgctaaactagcggttaccaaaatgaattaagcagcaattgtttagattatatggcagttattgccccagtagaccatagacgtcatagtgggcatataatgcctattatgacctttacgtctatttgatattttaatacaatcaatgctttattctaagtattgaccgtgctaaactagcggtcaccagactatttatatagtcgataaccataacgacggtaatgtcaccacaagggtgaccaagtccgtgtcctagtatctacttgggaatattttcggaccagcctgccagctgggccttgcctctacatttgaggccatttgattcttcatgttgaagatgtagaactacacctggatactgttttcaggcgatttaatgttttgattttaattgattcgtagcgtatacagcgcactagttgaggtttccgtcaattcctcactagcctctcattgagagcatcggttcaattcgaatcttggcaaataacgtacgaaaactcagtattgtgtgtgtgtgtaggccggtaccgtatgggtaaaaccgaaatcctgatcacacatgcattattgcttgtggaaagctacgtgacgcaacgtgaaggatagggttgaccaagaaccccgttcatcaaatttcaagaatccaccctgtatgaatttaaagttgttataagattaaaacgtttttaggtggataaatattgacaaa

SEQ ID NO: 15594 - DNA, 598 bp, synthetic construct
  source 1..598: mol_type = other DNA
tcatttggagactttaaatccaatccagtttcgaatctgggttaacaaaatcggccatgtcactttggagactttaaatccaatccagtttcgaatctgggttaacaaaatcggccatgtcactttggagacattaaatccaacccagtttcaaatctgatggtaagcaaaattggcacgtgtgcatggttaccgtgtgtgtgtctatctttacgcattttgtagatcacatataggcttcgcacgtggaagggtccctgaggggaatcgagagatgagttcaccctgctcaaacgtaaatgcctcactctgcatgagctaacccgctcagcagtttgtacataaatgggttaataacatatgtattaataaaaatatatacaatgatggtcgtgttgaggttggcactaccagtccactattggtggatctttacaaccataccacaagtgtcggtgtatcattaccgatattttgtggaccgcagtcaggtcttgaatcatatgcagatgggacaacaaatgacaattcaattgtaaaggttgacggaaattcacaagttgaaaatgtgaaattttctgatcaaattgatccctat

SEQ ID NO: 15595 - DNA, 265 bp, synthetic construct
  source 1..265: mol_type = other DNA
gttattatttacagcgcaaggatttgaaatctaaacaaatttatttccaacttatattttatagtataattggacctgggcaaacgtaacaggtaaaaccgagtttaaacaaaatattaacgagttataataattattaaactattatatttcatttattgagtgttttgattagcagatttaagtatttaggcaattaaattaaaggttattgtattagctattatatttgtaatcactgttaaggtattattaagaatacggt

SEQ ID NO: 15596 - DNA, 1000 bp, synthetic construct; identical to SEQ ID NO: 270
  source 1..1000: mol_type = other DNA

SEQ ID NO: 15597 - DNA, 305 bp, synthetic construct; identical to SEQ ID NO: 1497
  source 1..305: mol_type = other DNA

SEQ ID NO: 15598 - DNA, 779 bp, synthetic construct; identical to SEQ ID NO: 2407
  source 1..779: mol_type = other DNA

SEQ ID NO: 15599 - DNA, 259 bp, synthetic construct
  source 1..259: mol_type = other DNA
gtgccttaaacctactcgcccagttttgagtctgggttctacggaaaagcaaaacttcatgtgtatatatggataccagtcctttcgcaattttgtgtatttttgtgtgttgggattaggctttgtacatattgacatcctgcctgcggggtacttctatttagaagagagactcgtctactcaatgtaaattacaccactctgtgcactgagcaatgcatggagattgtaaataccgcttactaaaaatgtaaataat

SEQ ID NO: 15600 - DNA, 1000 bp, synthetic construct; identical to SEQ ID NO: 2635
  source 1..1000: mol_type = other DNA

SEQ ID NO: 15601 - DNA, 291 bp, synthetic construct
  source 1..291: mol_type = other DNA
atggttaaattctccaccccgaaatccatcggggttccagtgtaaagttgaaacggattgtgtatatatggattaccgatttcatgtttgttttgtgtcatgtgcatttatgaaattaggctttgtacatattggcatggtgctcggccatacccctatttaggggagtagttagccactacaacaacatcgcaccactttacagtttgagtcaactgtagagattgtttatattgacttactaatgataattatttggaaaatgtttgtatatgtttatattgtaaaaga

SEQ ID NO: 15602 - DNA, 906 bp, synthetic construct; identical to SEQ ID NO: 2529
  source 1..906: mol_type = other DNA

SEQ ID NO: 15603 - DNA, 629 bp, synthetic construct; identical to SEQ ID NO: 2214
  source 1..629: mol_type = other DNA

SEQ ID NO: 15604 - DNA, 792 bp, synthetic construct; identical to SEQ ID NO: 2425
  source 1..792: mol_type = other DNA

SEQ ID NO: 15605 - DNA, 627 bp, synthetic construct
  source 1..627: mol_type = other DNA
cacacgggtttttgcccgtgtggagatcatcaagcttttatcagtagtaatttgcagttactcgagtcctctgtttggactctatttaggaatgttaatttaaactcaattcagtcgtcgatgtctctattgggtttattccctttagagttatacaattgtcttgagttttaaaaaattgcatcactatttagagtctcgcattttgcgcatgactcggataattttactttattaccgattttagtttgtgatctgacccagttttctatctattcagtgtttttgctaaccatgcaataatatgtcgcactgtctacgccataaagcaagactatttataggtgcaaatttaactttgagaattctaggctttgaacttcttattagttgtccgataatttgttatcgccccggaccgggcgatttccttctcatttatgagagaaacttttcaatgtgctgagtactgatcacgtggaagcacactaatatgtccacatgaactatagtcataatcaatgaccctaaaagtccttgtccggaaaacacgcacaaggcattatccgcaggttttgtcgcgaatccaaaataggccggattgtagacctatcgaatcgcgataac

SEQ ID NO: 15606 - DNA, 909 bp, synthetic construct; identical to SEQ ID NO: 236
  source 1..909: mol_type = other DNA

SEQ ID NO: 15607 - DNA, 395 bp, synthetic construct; identical to SEQ ID NO: 1767
  source 1..395: mol_type = other DNA

SEQ ID NO: 15608 - DNA, 624 bp, synthetic construct
  source 1..624: mol_type = other DNA
cacgggtttttgcccgtgtggagatcatcaagcttttatcagtagtaatttgcagttactcgagtcctctgtttggactctatttaggaatgttaatttaaactcaattcagtcgtcgatgtctctattgggtttattccctttagagttatacaattgtcttgagttttaaaaattgcatcactatttagagtctcgcattttgcgcatgactcggataattttactttattaccgattttagtttgtgatctgacccagttttctatctattcagtgtttttgctaaccatgcaataatatgtcgcactgtctacgccataaagcaagactatttataggtgcaaatttaactttgagaattctaggctttgaacttcttattagttgtccgataatttgttatcgccccggaccgggcgatttccttctcatttatgagagaaacttttcaatgtgctgagtactgatcacgtggaagcacactaatatgtccacatgaactatagtcataatcaatgaccctaaaagtccttgtccggaaaacacgcacaaggcattatccgcaggttttgtcgcgaatccaaaataggccggattgtagacctatcgaatcgcgataac

SEQ ID NO: 15609 - DNA, 480 bp, synthetic construct
  source 1..480: mol_type = other DNA
tggctcgcattgtctttactgatcacggtagacgttaaataaagagatcccggtgttatccaatgctggaggtgttaagccaaaatcaaaatggattgctaagtaagatatacgcacagcgattaggttctgcattacctattcaatgtggtcaggctgcttagtggacttgtacatacccctttttaggggagggtttggtcacccaacaaaatagcactgttatgttgtcgattgatgtgccgcacataatatttattaaattacattactaatctttatactatttgtgagccagaatcagctcaaaatgattcacacatatcgtgcgatcctcgcacaattcatactgtcgcgtctttcgatgaagatgatgaagtctcgcaacttcgtgctcgggtcagggagctacgacaaaaacttgaccgaaagtaccgccatgttaagcagctcactaaacgaattgagcagctagaaggt

SEQ ID NO: 15610 - DNA, 623 bp, synthetic construct
  source 1..623: mol_type = other DNA
acgggtttttgcccgtgtggagatcatcaagcttttatcagtagtaatttgcagttactcgagtcctctgtttggactctatttaggaatgttaatttaaactcaattcagtcgtcgatgtctctattgggtttattccctttagagttatacaattgtcttgagttttaaaaattgcatcactatttagagtctcgcattttgcgcatgactcggataattttactttattaccgattttagtttgtgatctgacccagttttctatctattcagtgtttttgctaaccatgcaataatatgtcgcactgtctacgccataaagcaagactatttataggtgcaaatttaactttgagaattctaggctttgaacttcttattagttgtccgataatttgttatcgccccggaccgggcgatttccttctcatttatgagagaaacttttcaatgtgctgagtactgatcacgtggaagcacactaatatgtccacatgaactatagtcataatcaatgaccctaaaagtccttgtccggaaaacacgcacaaggcattatccgcaggttttgtcgcgaatccaaaataggccggattgtagacctatcgaatcgcgataac

SEQ ID NO: 15611 - DNA, 329 bp, synthetic construct
  source 1..329: mol_type = other DNA
taaatatctaacttgaaccaaccccaaccaaccccaaccaaccccaactgtctctttcgtgtttcaaccaaccccaaccaaccggaactaactgagattaactggaactaactggaactaactagagacaaccttattaaggtttggcaacacttgtgttggcttttattcaagcgattttaaaaactctattttatatcagtaactgctagctttagtaggccgtacgcgggagccctacaagaacagtgaaagtatcaaacaaaatataccaaagaaaattaattaaattcaaattttataacaaaaatttcaaaataaacttcaat

SEQ ID NO: 15612 - DNA, 366 bp, synthetic construct; identical to SEQ ID NO: 1689
  source 1..366: mol_type = other DNA

SEQ ID NO: 15613 - DNA, 884 bp, synthetic construct
  source 1..884: mol_type = other DNA
ataaaacactgcacgcgggaatccgcgtgcagtgtaagttagattagttggcagttattgccttaatagaccataaacgtcatattaggcatactatgcctatttgtgacctttacgtctattatttttctaacacaaccaatgttttattctaagtattaaccgtgctaaactagcggttaccaaaatgaattaagcagcaattgtttagattatatggcagttattgccctagtagaccatagacgtcacagtgggcatataatgcctattatgacctttacgtctatttgatattttaatacaatcaatgctttattctaagtattgaccgtgctaaactagcggtcacgaaactatttatatagtttcataaccataacgacggtaatgtcaccacaagggtgaccaagtccgtgtcctagtatctacttgggaatattttcggaccagcctgccagctgggccttgcctctataattgaggccatttgattctttatgttgaagatgtagaactacacctggatactgttttcaggcgatttaatgtcctgattctaattgattcgtagcgtatacagcgcactagttgaggtttccgtcaattcctcactagcctctcattgagagtatcgattcaattcgaatcttgacaaataacgtacgaaaactcagtattgtgtgtgtgtgtaggccggtaccgtatgggtaaaaccgaaatcctgatcacacatgcattattgcttgtggaaagctacgtgacgcaacgtgaaggatagggttgaccaagaaccccgttcatcaaatttcaagaatccaccctgtatgaatttaaagttgttataagattaaaacgtttttaggtggataaatattgacaaa

SEQ ID NO: 15614 - DNA, 598 bp, synthetic construct
  source 1..598: mol_type = other DNA
tcatttggagactttaaatccaatccagtttcgaatctgggttaacaaaatcggccatgtcactttggagactttaaatccaatccagtttcgaatctgggttaacaaaatcggccatgtcactttggagacattaaatccaacccagtttcaaatctgatggtaagcaaaattggcacgtgtgcatggttaccgtgtgtgtatcgatctttacgcattttgtagatcacatataggcttcgcacgtggaagggtccctgaggggaatcgagagatgagttcaccctgctcaaacgtaaatgcctcactctgcatgagctaacccgctcagcagtttgtacataaatgggttaataacatatgtattaataaaaatatatacaatgatggtcgtgttgaggttggcactaccagtccactattggtggatctttacaaccataccacaagtgtcggtgtatcattaccgatattttgtggaccgcagtcaggtcttgaatcatatgcagatgggacaacaaatgacaactcaattgttaaggtcagcggaaattcacaaattgaaaatgtgaaattttccgatcaagttgatccctat

SEQ ID NO: 15615 - DNA, 867 bp, synthetic construct; identical to SEQ ID NO: 2505
  source 1..867: mol_type = other DNA

SEQ ID NO: 15616 - DNA, 349 bp, synthetic construct; identical to SEQ ID NO: 1642
  source 1..349: mol_type = other DNA

SEQ ID NO: 15617 - DNA, 603 bp, synthetic construct; identical to SEQ ID NO: 2172
  source 1..603: mol_type = other DNA

SEQ ID NO: 15618 - DNA, 780 bp, synthetic construct; identical to SEQ ID NO: 2409
  source 1..780: mol_type = other DNA

SEQ ID NO: 15619 - DNA, 262 bp, synthetic construct
  source 1..262: mol_type = other DNA
atgccggttgactcagcgctcgtcagcgcttaaataaatagacgactgcgtaggtttcatgcaggataaaccaaagaacccgttatgtgtagttacttgcttttccgtatagtgttaccaaatccgctaaggaggagtagagaaaagcataacgttgggtgtgccctcgtgcacagtgttttttagcatagtcgagttcccgctcgcacaattttggctctggctaggggctgtgcggccagcttctagtgtatgtacataa

SEQ ID NO: 15620 - DNA, 846 bp, synthetic construct
  source 1..846: mol_type = other DNA
ctccacgtgcgcgtttcgcgcacgtggagttattgttgtatttggcgtttgactacgcccagtgtacttgttatgtagtgagttggggcgttacgacgccccctcttcctgcattagcagctacattgacttcaatttcatctttatcatacccgttccctgggatagtgggaccccctctgtcatgaggatagtcatttctgacgtaagacagacgtatgaagaatgacatattgaatataggtaacattgacgaactatgcctctaagttcgaatgatatgtttaccgaattgatgtgtaccttcttttgaaggcacgtctactttcttgatgagaccgaccgaaaggcggcacttgattgtagattcacattttatgtttctcgtgagagaacacaattcggtacaggtaagactgacctgtctggcaatcggtcagagattgataatctcgactcgatttgttgtgattttgtattgatcactttagcgccgagaaggcgtttgcaccgagagtaagcggtacgagacatgccctactagcatgggccgacgtaatggtcaagtgaaacttgttttaggctatctgttccggtagtcacgcagaattaagtgtactgaggggtggcacccgatgaaggcacttttgctactttgtgtaaacaaattctaggacatcattttgatattttgtcaataattttatcgctatgtttggggtatttacagaaactctggcttttgccgtaagacgatttatgagacattatttgagacttgatgtaagtgattgatcttttgatcagtaattcgagggactacgttccttttatcttgaacacagc

SEQ ID NO: 15621 - DNA, 258 bp, synthetic construct
  source 1..258: mol_type = other DNA
gcggctaagtcttgggcagacattaaatgcatccctctgggcgtatcccaccacgtctaattaaaccaaaagggggctctctgtattggatgaccgtgctcgtccaactagtcgatcataggactgagcataggcttgcagagagaggcactttcctcgcaaagtacccctatttaggggagtattcgccatacgcaagattgacacacgctctgtggattgagtcttccatagaagcgttaatgatgacttgctaac

SEQ ID NO: 15622 - DNA, 847 bp, synthetic construct
  source 1..847: mol_type = other DNA
actccacgtgcgcgtttcgcgcacgtggagttattgttgtatttggcgtttgactacgcccagtgtacttgttatgtagtgagttggggcgttacgacgccccctcttcctgcattagcagctacattgacttcaatttcatctttatcatacccgttccctgggatagtgggaccccctctgtcatgaggatagtcatttctgacgtaagacagacgtatgaagaatgacatattgaatataggtaacattgacgaactatgcctctaagttcgaatgatatgtttaccgaattgatgtgtaccttcttttgaaggcacgtctactttcttgatgagaccgaccgaaaggcggcacttgattgtagattcacattttatgtttctcgtgagagaacacaattcggtacaggtaagactgacctgtctggcaatcggtcagagattgataatctcgactcgatttgttgtgattttgtattgatcactttagcgccgagaaggcgtttgcaccgagagtaagcggtacgagacatgccctactagcatgggccgacgtaatggtcaagtgaaacttgttttaggctatctgttccggtagtcacgcagaattaagtgtactgaggggtggcacccgatgaaggcacttttgctactttgtgtaaacaaattctaggacatcattttgatattttgtcaataattttatcgctatgtttggggtatttacagaaactctggcttttgccgtaagacgatttatgagacattatttgagacttgatgtaagtgattgatcttttgatcagtaattcgagggactacgttccttttatcttgaacacagc

SEQ ID NO: 15623 - DNA, 859 bp, synthetic construct; identical to SEQ ID NO: 2492
  source 1..859: mol_type = other DNA

SEQ ID NO: 15624 - DNA, 845 bp, synthetic construct
  source 1..845: mol_type = other DNA
taatggagtccttatatagaacaccagttgggtttaaagtcgtttgtaacagccccaactaaatgatagtattctatcaacacctttatttcgttgtttcatcattgagacaggcgtgaaagaatgccattaatggagtccttatatagaacaccagttgggtttaaagtcgtttgtaacagccccaactaaatgatagtattctatcaacacctttatttcgttgtttcatcattgagacaggcgtgaaagaatgccatccgtggagtcgctttatacatactgcgctattctgaccaatattcgacatactagaaagagaatattgcttattgtagaccagccatatgagtgtaatcttggtgcagtccttgttacactatgatttcaactgccacgtaagtgatcgcgtcactatagaattccaaaaacattgttttgttctaccgtgtcaatttatcatcaggatacaatttttgcttaggcattcgatggttgtcgtcccttccatcgaacccgcacctcggagaaaggtgtgctcccacattacgtcaagttaaggtaaagctgctgttataacataatgagaatcaggagatcatttcctatggattagatattacgatttctgtagtatcctcatcatctgtatggatttgtaccaaatgtagttgtgtttattaagtggagcccgatacacttgggtcgtgtgatgagtaaacaagaaggtttggtcaccatttcttgttgggattatcgaggtccgagattttgcgacatttgaacaaatagtttgagagaattcccacttccatttattctagtgaattatagtgctttgcatt

SEQ ID NO: 15625 - DNA, 349 bp, synthetic construct
  source 1..349: mol_type = other DNA
gctatatacggggctaacatgtaaaaatgctaaacggcatgttagcttacacggataaaccgaaagcgggttatttaaccttactactcagagcttatcagagagatttagcaacttgtatgaattgggcgattcatgcatgtacatatagtctgctacaataacaaaagaaacaaattgtaatgaaatagaagggatttctaatcctactttcactgatttaacaggcactttggtctcggcaggtgttgcaccagtttgtgctgagattccttacacagtgccatcatcttttatttctacttctgaggtgtctcaggatttgagagactatttttccagaccaagg

SEQ ID NO: 15626 - DNA, 798 bp, synthetic construct; identical to SEQ ID NO: 2430
  source 1..798: mol_type = other DNA

SEQ ID NO: 15627 - DNA, 442 bp, synthetic construct; identical to SEQ ID NO: 1899
  source 1..442: mol_type = other DNA

SEQ ID NO: 15628 - DNA, 267 bp, synthetic construct
  source 1..267: mol_type = other DNA
cgtagttacaataacatgagtggacgcccctatattttgatacatatttcatgttgatgtgtattgcatagtttcatacttctataaaaagtgtacataaaatttcctgtaaatacaaggcgttttccctcttcgcgaagtcttaaagaggcccaagacatagaggatgtctataattttccttcagcgctggatggcgcgatcgaacacattgcgagtggactatcagttttattagtggtagttgtcgcctataccctgtatgat

SEQ ID NO: 15629 - DNA, 373 bp, synthetic construct; identical to SEQ ID NO: 1713
  source 1..373: mol_type = other DNA

SEQ ID NO: 15630 - DNA, 743 bp, synthetic construct; identical to SEQ ID NO: 2364
  source 1..743: mol_type = other DNA

SEQ ID NO: 15631 - DNA, 844 bp, synthetic construct
  source 1..844: mol_type = other DNA
ccacgtgcgcgtttcgcgcacgtggagttattgttgtatttggcgtttgactacgcccagtgtacttgttatgtagtgagttggggcgttacgacgccccctcttcctgcattagcagctacattgacttcaatttcatctttatcatacccgttccctgggatagtgggaccccctctgtcatgaggatagtcatttctgacgtaagacagacgtatgaagaatgacatattgaatataggtaacattgacgaactatgcctctaagttcgaatgatatgtttaccgaattgatgtgtaccttcttttgaaggcacgtctactttcttgatgagaccgaccgaaaggcggcacttgattgtagattcacattttatgtttctcgtgagagaacacaattcggtacaggtaagactgacctgtctggcaatcggtcagagattgataatctcgactcgatttgttgtgattttgtattgatcactttagcgccgagaaggcgtttgcaccgagagtaagcggtacgagacatgccctactagcatgggccgacgtaatggtcaagtgaaacttgttttaggctatctgttccggtagtcacgcagaattaagtgtactgaggggtggcacccgatgaaggcacttttgctactttgtgtaaacaaattctaggacatcattttgatattttgtcaataattttatcgctatgtttggggtatttacagaaactctggcttttgccgtaagacgatttatgagacattatttgagacttgatgtaagtgattgatcttttgatcagtaattcgagggactacgttccttttatcttgaacacagc

SEQ ID NO: 15632 - DNA, 323 bp, synthetic construct; identical to SEQ ID NO: 1561
  source 1..323: mol_type = other DNA

SEQ ID NO: 15633 - DNA, 837 bp, synthetic construct
  source 1..837: mol_type = other DNA
cgcgtttcgcgcacgtggagttattgttgtatttggcgtttgactacgcccagtgtacttgttatgtagtgagttggggcgttacgacgccccctcttcctgcattagcagctacattgacttcaatttcatctttatcatacccgttccctgggatagtgggaccccctctgtcatgaggatagtcatttctgacgtaagacagacgtatgaagaatgacatattgaatataggtaacattgacgaactatgcctctaagttcgaatgatatgtttaccgaattgatgtgtaccttcttttgaaggcacgtctactttcttgatgagaccgaccgaaaggcggcacttgattgtagattcacattttatgtttctcgtgagagaacacaattcggtacaggtaagactgacctgtctggcaatcggtcagagattgataatctcgactcgatttgttgtgattttgtattgatcactttagcgccgagaaggcgtttgcaccgagagtaagcggtacgagacatgccctactagcatgggccgacgtaatggtcaagtgaaacttgttttaggctatctgttccggtagtcacgcagaattaagtgtactgaggggtggcacccgatgaaggcacttttgctactttgtgtaaacaaattctaggacatcattttgatattttgtcaataattttatcgctatgtttggggtatttacagaaactctggcttttgccgtaagacgatttatgagacattatttgagacttgatgtaagtgattgatcttttgatcagtaattcgagggactacgttccttttatcttgaacacagc

SEQ ID NO: 15634 - DNA, 838 bp, synthetic construct
  source 1..838: mol_type = other DNA
gcgcgtttcgcgcacgtggagttattgttgtatttggcgtttgactacgcccagtgtacttgttatgtagtgagttggggcgttacgacgccccctcttcctgcattagcagctacattgacttcaatttcatctttatcatacccgttccctgggatagtgggaccccctctgtcatgaggatagtcatttctgacgtaagacagacgtatgaagaatgacatattgaatataggtaacattgacgaactatgcctctaagttcgaatgatatgtttaccgaattgatgtgtaccttcttttgaaggcacgtctactttcttgatgagaccgaccgaaaggcggcacttgattgtagattcacattttatgtttctcgtgagagaacacaattcggtacaggtaagactgacctgtctggcaatcggtcagagattgataatctcgactcgatttgttgtgattttgtattgatcactttagcgccgagaaggcgtttgcaccgagagtaagcggtacgagacatgccctactagcatgggccgacgtaatggtcaagtgaaacttgttttaggctatctgttccggtagtcacgcagaattaagtgtactgaggggtggcacccgatgaaggcacttttgctactttgtgtaaacaaattctaggacatcattttgatattttgtcaataattttatcgctatgtttggggtatttacagaaactctggcttttgccgtaagacgatttatgagacattatttgagacttgatgtaagtgattgatcttttgatcagtaattcgagggactacgttccttttatcttgaacacagc

SEQ ID NO: 15635 - DNA, 724 bp, synthetic construct; identical to SEQ ID NO: 2342
  source 1..724: mol_type = other DNA

SEQ ID NO: 15636 - DNA, 950 bp, synthetic construct; identical to SEQ ID NO: 2553
  source 1..950: mol_type = other DNA

SEQ ID NO: 15637 - DNA, 826 bp, synthetic construct
  source 1..826: mol_type = other DNA
cacgtggagttattgttgtatttggcgtttgactacgcccagtgtacttgttatgtagtgagttggggcgttacgacgccccctcttcctgcattagcagctacattgacttcaatttcatctttatcatacccgttccctgggatagtgggaccccctctgtcatgaggatagtcatttctgacgtaagacagacgtatgaagaatgacatattgaatataggtaacattgacgaactatgcctctaagttcgaatgatatgtttaccgaattgatgtgtaccttcttttgaaggcacgtctactttcttgatgagaccgaccgaaaggcggcacttgattgtagattcacattttatgtttctcgtgagagaacacaattcggtacaggtaagactgacctgtctggcaatcggtcagagattgataatctcgactcgatttgttgtgattttgtattgatcactttagcgccgagaaggcgtttgcaccgagagtaagcggtacgagacatgccctactagcatgggccgacgtaatggtcaagtgaaacttgttttaggctatctgttccggtagtcacgcagaattaagtgtactgaggggtggcacccgatgaaggcacttttgctactttgtgtaaacaaattctaggacatcattttgatattttgtcaataattttatcgctatgtttggggtatttacagaaactctggcttttgccgtaagacgatttatgagacattatttgagacttgatgtaagtgattgatcttttgatcagtaattcgagggactacgttccttttatcttgaacacagc

SEQ ID NO: 15638 - DNA, 485 bp, synthetic construct; identical to SEQ ID NO: 1994
  source 1..485: mol_type = other DNA

SEQ ID NO: 15639 - DNA, 843 bp, synthetic construct
  source 1..843: mol_type = other DNA
cacgtgcgcgtttcgcgcacgtggagttattgttgtatttggcgtttgactacgcccagtgtacttgttatgtagtgagttggggcgttacgacgccccctcttcctgcattagcagctacattgacttcaatttcatctttatcatacccgttccctgggatagtgggaccccctctgtcatgaggatagtcatttctgacgtaagacagacgtatgaagaatgacatattgaatataggtaacattgacgaactatgcctctaagttcgaatgatatgtttaccgaattgatgtgtaccttcttttgaaggcacgtctactttcttgatgagaccgaccgaaaggcggcacttgattgtagattcacattttatgtttctcgtgagagaacacaattcggtacaggtaagactgacctgtctggcaatcggtcagagattgataatctcgactcgatttgttgtgattttgtattgatcactttagcgccgagaaggcgtttgcaccgagagtaagcggtacgagacatgccctactagcatgggccgacgtaatggtcaagtgaaacttgttttaggctatctgttccggtagtcacgcagaattaagtgtactgaggggtggcacccgatgaaggcacttttgctactttgtgtaaacaaattctaggacatcattttgatattttgtcaataattttatcgctatgtttggggtatttacagaaactctggcttttgccgtaagacgatttatgagacattatttgagacttgatgtaagtgattgatcttttgatcagtaattcgagggactacgttccttttatcttgaacacagc

SEQ ID NO: 15640 - DNA, 405 bp, synthetic construct; identical to SEQ ID NO: 1794
  source 1..405: mol_type = other DNA

SEQ ID NO: 15641 - DNA, 834 bp, synthetic construct
  source 1..834: mol_type = other DNA
gtttcgcgcacgtggagttattgttgtatttggcgtttgactacgcccagtgtacttgttatgtagtgagttggggcgttacgacgccccctcttcctgcattagcagctacattgacttcaatttcatctttatcatacccgttccctgggatagtgggaccccctctgtcatgaggatagtcatttctgacgtaagacagacgtatgaagaatgacatattgaatataggtaacattgacgaactatgcctctaagttcgaatgatatgtttaccgaattgatgtgtaccttcttttgaaggcacgtctactttcttgatgagaccgaccgaaaggcggcacttgattgtagattcacattttatgtttctcgtgagagaacacaattcggtacaggtaagactgacctgtctggcaatcggtcagagattgataatctcgactcgatttgttgtgattttgtattgatcactttagcgccgagaaggcgtttgcaccgagagtaagcggtacgagacatgccctactagcatgggccgacgtaatggtcaagtgaaacttgttttaggctatctgttccggtagtcacgcagaattaagtgtactgaggggtggcacccgatgaaggcacttttgctactttgtgtaaacaaattctaggacatcattttgatattttgtcaataattttatcgctatgtttggggtatttacagaaactctggcttttgccgtaagacgatttatgagacattatttgagacttgatgtaagtgattgatcttttgatcagtaattcgagggactacgttccttttatcttgaacacagc

SEQ ID NO: 15642 - DNA, 484 bp, synthetic construct
  source 1..484: mol_type = other DNA
tacaaaaatccttaaaagtcagagaacttttaaaaccccggttagcacaaactagccacaaatagtctgagtactaccaaacgcacgtattgtccgagcacaattacgtaaaccaacgctacaatcgcacgtattgtccgagtacaattacgtaaaccaacgctacgaacaacaaagcccataattttggatttatttccacaatttacgctatttagacttatcgctgccctccactatagtggttgtatcatttctcccggacaactgaatacttccaaggtttagcgtcgcagtcagagcacagcgcctaaattttggtataaacgaacgtacgcctacagaagcaacctatgagttacacttatactgctctcagctcgagcattaccgaacgagaaaacatcaacgatatcgacgacacaactgttgacccttcagcctcgttcctagtgcccgtcagcgaacaagtgtataggccaac

SEQ ID NO: 15643 - DNA, 882 bp, synthetic construct
  source 1..882: mol_type = other DNA
acactgcacgcgggaatccgcgtgcagtgtaagttagattagttggcagttattgccttaatagaccataaacgtcatattaggcatactatgcctatttgtgacttttacgtctattatttttctaacacaaccaatgttttattctaagtattaaccgtgctaaactagcggttaccaaaatgaattaagcagcaattgtttagattatatggcagttattgccctagtagaccatagacgtcacagtgggcatataatgcctattatgacctttacgtctatttgatattttaatacaatcaatgttttattctaagtattgaccgtgctaaactagcggtcacgaaactatttatatagtttcataaccataacgacggtaatgtcaccacaagggtgaccaagtccgtgtcctagtatctacttgggaatatcttcggaccagcctgccagctgggccttgcctctataattgaggccatttgattctttatgttgaagatgtagaactacacctggatactgttttcaggcgatttaatgtcctgattctaattgattcgtagcgtatacagcgcactagttgaggtttctgtcaattcctcactagcctctcattgagagtatcgattcaattcgaatcttgacaaataacgtacgaaaactcagtattgtgtgtgtgtgtaggccggtaccgtatgggtaaaaccgaaatcctgatcacacatgcattattgcttgtggaaagctacatgacgcatcatgaaggatagggttgaccaagaaccccgttcatcaaattttcacgaaaaccaccctgtatgaattttaaagttgttataagattaaaacgtttttaggtggttaaatattgacaaa

SEQ ID NO: 15644 - DNA, 317 bp, synthetic construct
  source 1..317: mol_type = other DNA
tcatttggagactttaaatccaatccagtttcgaatctgggtcaacaaaatcggcaattagtcatttggagacattaaatccaacccagtttcaaatctgatggtaagcaaaattggcacgtgtgcatggttaccgtgtgtgtatcgatctttacgcattttgtagatcacacataggcttcgcacgtggaagggtccctgaggggaatcgagagatgagtccaccctgctcaaacgtaaatgcctcgctctgcatgagttaacccgctcagcagtttgtacataaatgggttactaatatatgtattaataaaaac

SEQ ID NO: 15645 - DNA, 818 bp, synthetic construct; identical to SEQ ID NO: 2453
  source 1..818: mol_type = other DNA

SEQ ID NO: 15646 - DNA, 360 bp, synthetic construct; identical to SEQ ID NO: 1675
  source 1..360: mol_type = other DNA

SEQ ID NO: 15647 - DNA, 772 bp, synthetic construct
  source 1..772: mol_type = other DNA
tgtcgtttagccgcgacacccggcaatcatacatattcattgcagttcttgttctgctcttatttatgtcgtacagacgtgttgaataggggtagaaccctaatcacactttctgtattgatttaagagacctatagaataggcgaaagcttaatctgtagattataagaatgtatattaatatgatatttagtcaccaccccggaaaataaccaattcctaagtgatgaccgtatgaatgacgtagttgtggctactatgtcgtacgtttatgccgtcaccccagagagtcaactctgttgtaaatcaaccccttctgtaggaggtattagcagcctgtaaggacgagctgtttttgtacctgcctgcatagaccattgaattttatgatgagaaattcaacaactggtaattaacattcgtaaggttttgttgtcagtggaatcccactcgcatttattcatttcgttgatcaatctccacccgcagtagggtagaagagagattgtagatctaagaaatttgcgagaagaattggtccattggtttcaatttgacaaacgtaactgtacttactatgaatgaacaatatagatttgcttatgcacgtttacctcatgacaacctgagtgaggaggtttggtcacctaaatttttcgtgcctctgagtattttcttgaggttatcaatagttgttttatcgatcggattgagatgatttagtcttagtttgtttagccctttgaggttagtccctattcccactaaaatt

SEQ ID NO: 15648 - DNA, 320 bp, synthetic construct; identical to SEQ ID NO: 1549
  source 1..320: mol_type = other DNA

SEQ ID NO: 15649 - DNA, 903 bp, synthetic construct; identical to SEQ ID NO: 2527
  source 1..903: mol_type = other DNA

SEQ ID NO: 15650 - DNA, 273 bp, synthetic construct
  source 1..273: mol_type = other DNA
ggtaaattttcgcgaatgtgatatcgcgttggacacatgcgattaaaaccaaagaacccaagtgaggtagttacgaatttgcatatagtatcttccaaactaaatgtatgttgcgaaaactcatttgtcttgaacctccctcgtggggtaccactatttagtggagtagtttgaaactacaaacaagagaagctctgattcaggtatattgatgcgtatacttgttttaattacgtaaatagcattactagtattacacaatatccaagtgca

SEQ ID NO: 15651 - DNA, 900 bp, synthetic construct
  source 1..900: mol_type = other DNA
ctctatataggtttcacaacctatatagagttccatttgattagatattgtccgcttagcaccggaccatgcttttcttaattttattgaatacttacattctgaataagtatagtagtctcctctcaggttattactataccctgtttggagtgtctactttattcctaataagtttcaccccttattagttatgtttaagttttagtgtctataagcaccttggtattaggttctttgaccctattaccaatgagtagcttacctaagtatacgtttttcgaaccgtataaattgcttaatgtattcattattatttattttatctcgttgataaagaattatcaaaaataagagagtttgctaaacttcttaaatcgtctacaaggcgcagtttattttatttctctgttaaaaatattaaccaattttattattgcttcaacggtaaatttgtacttgattaaaatcaggagtacattacccgtgtttagcttacgatttacgaatttaattaaattggaaatttgattgtaatgatttagatttgacatttcaattgcttagagaaatcccactttattaataagtttcatttacgataaatgcactcgcaaaggacgagtaaagcgcattttagatgtataactgttattgaagaacaattggttctctggattttgattaatgcgacgtacagcatgttataaatcccaatactctttaaagtacccttagcttcagcacgtaccagcgtgtagggagttgcttcccgtgattcatataaggctatgctttgagatgaggcatttagattgatagtttcaactttttatttatttttgtgattgttatttgttagcttttatagttactgatattaaccctttctttttaatc

SEQ ID NO: 15652 - DNA, 522 bp, synthetic construct; identical to SEQ ID NO: 2075
  source 1..522: mol_type = other DNA

SEQ ID NO: 15653 - DNA, 337 bp, synthetic construct; identical to SEQ ID NO: 1614
  source 1..337: mol_type = other DNA

SEQ ID NO: 15654 - DNA, 893 bp, synthetic construct
  source 1..893: mol_type = other DNA
actctatataggtttcacaacctatatagagttccattgactagttattgtccgtttagcaccggaccatgcttttctttattttattgtatactttacattctgaataagtacagtagtctcctctcaggttacaactgtaccctgtttggagtgtctactttattcctaataagtttcaccccttattagttatgtataagttttagtgtcgattagcagcctggttttaggttctttgaccctaattccagtgagtagcttacctaatttcacgtttctttgaaccgtgattttcttatgtatacactaaaatgtattttatctcgttaatagagaactattacaaagagagagttgctaaactcttaaatcgtctatatggcgcagtttgagtcatttatctgtgaaaaatgaagccaaattttattgctttgacggtaaatttatacttgattaaaatcaggagtatattacccgtgcttagcttacaatttacgaatttaattaaaatgggaatttgattgtaatgatttagatttgacaatttgattgctcaaaagaatcccactttaataataagctccgttgattataaatacactcgcaaaggacgagtcaagcgtattttagacgtagagcaattattagagaacaattggtcttttggatttcgattaatgcgacgtaccgcatgttatagatcccaatatttttaaaagtacccttagtttcagcacgtaccggcgtgtagggagttgcttcccgtgattcatataaggctatgctttgagatgaggcatttagattgatagtttcaactttttatttatttttgtgattgttatttgttagcttttatagttactgatattaaccctttctttttaatc

SEQ ID NO: 15655 - DNA, 602 bp, synthetic construct; identical to SEQ ID NO: 2169
  source 1..602: mol_type = other DNA

SEQ ID NO: 15656 - DNA, 517 bp, synthetic construct; identical to SEQ ID NO: 2065
  source 1..517: mol_type = other DNA

SEQ ID NO: 15657 - DNA, 883 bp, synthetic construct
  source 1..883: mol_type = other DNA
aacctatatagagttccatttgattagatattgtccgcttagcaccggaccatgcttttcttaattttattgaatacttacattctgaataagtatagtagtctcctctcaggttattactataccctgtttggagtgtctactttattcctaataagtttcaccccttattagttatgtttaagttttagtgtctataagcaccttggtattaggttctttgaccctattaccaatgagtagcttacctaagtatacgtttttcgaaccgtataaattgcttaatgtattcattattatttattttatctcgttgataaagaattatcaaaaataagagagtttgctaaacttcttaaatcgtctacaaggcgcagtttattttatttctctgttaaaaatattaaccaattttattattgcttcaacggtaaatttgtacttgattaaaatcaggagtacattacccgtgtttagcttacgatttacgaatttaattaaattggaaatttgattgtaatgatttagatttgacatttcaattgcttagagaaatcccactttattaataagtttcatttacgataaatgcactcgcaaaggacgagtaaagcgcattttagatgtataactgttattgaagaacaattggttctctggattttgattaatgcgacgtacagcatgttataaatcccaatactctttaaagtacccttagcttcagcacgtaccagcgtgtagggagttgcttcccgtgattcatataaggctatgctttgagatgaggcatttagattgatagtttcaactttttatttatttttgtgattgttatttgttagcttttatagttactgatattaaccctttctttttaatc

SEQ ID NO: 15658 - DNA, 350 bp, synthetic construct; identical to SEQ ID NO: 1646
  source 1..350: mol_type = other DNA

SEQ ID NO: 15659 - DNA, 631 bp, synthetic construct; identical to SEQ ID NO: 2216
  source 1..631: mol_type = other DNA

SEQ ID NO: 15660 - DNA, 473 bp, synthetic construct
  source 1..473: mol_type = other DNA
aaaagtaataactctaataagtgtacagtgtacaatctgggtgttttattcttttcattaaggatactgcattcggatgtcttagtcgactactgtatatggcgtgcacttctgctgcctaaggaattattgcgaaacccccccttctcacaaacacacaaactcacaaatactctcgaactcatcacaactcgagttcagtttttatataaagctggtgtctgagaaacagctagtcgcgagctagtgtactatatgtcatgtctatgtagtacagtttcaacacgtatctttgccttatatgaattccccacacaaaaatttccttctgagtacgcctcccggtttcataccttactgaaacacgcgaggacaaacggccgtggcctctcagtcgtagctatcaaaactttatagccgaacaccgctatggcaaccccatggttattaggcaattctgaaaatcttaaact

SEQ ID NO: 15661 - DNA, 455 bp, synthetic construct
  source 1..455: mol_type = other DNA
aagtgtacagtgtacaatctgggtgttttattcttttcattaaggatactgcattcggatgtcttagtcgactactgtatatggcgtgcacttctgctgcctaaggaattattgcgaaacccccccttctcacaaacacacaaactcacaaatactctcgaactcatcacaactcgagttcagtttttatataaagctggtgtctgagaaacagctagtcgcgagctagtgtactatatgtcatgtctatgtagtacagtttcaacacgtatctttgccttatatgaattccccacacaaaaatttccttctgagtacgcctcccggtttcataccttactgaaacacgcgaggacaaacggccgtggcctctcagtcgtagctatcaaaactttatagccgaacaccgctatggcaaccccatggttattaggcaattctgaaaatcttaaact

SEQ ID NO: 15662 - DNA, 828 bp, synthetic construct; identical to SEQ ID NO: 2461
  source 1..828: mol_type = other DNA

SEQ ID NO: 15663 - DNA, 468 bp, synthetic construct
  source 1..468: mol_type = other DNA
gtcagcttctcgaaagcccgccctgggggcttctaataccgggggccaccgcaactatgcgttggataagctaaaaatagttgtctatgtttgattaacgcacaatgttttaggttctgcattacctagaatttgtggtcagctacatagatagtcattgtatatatccattatttagtggagggttgacaacccaagaaaatagcactgttatgttgtcgattgatgtgccgcacataatatttattaaattacattactaatctttatactacttatgagcctgaatcagctcaaaatgattcacacatatcgtgcgatcctcgcacaattcgcactgtcgcatcttttgatgaagatgatgaagtcttgcaacttcgtgctcgggtcagggagctacgacaaaaacttgaccgaaagtaccgccatgttaagcagctcactaaacgagttgagcagctagaaggt

SEQ ID NO: 15664 - DNA, 672 bp, synthetic construct; identical to SEQ ID NO: 2276
  source 1..672: mol_type = other DNA

SEQ ID NO: 15665 - DNA, 349 bp, synthetic construct; identical to SEQ ID NO: 1643
  source 1..349: mol_type = other DNA

SEQ ID NO: 15666 - DNA, 1000 bp, synthetic construct; identical to SEQ ID NO: 2636
  source 1..1000: mol_type = other DNA

SEQ ID NO: 15667 - DNA, 389 bp, synthetic construct; identical to SEQ ID NO: 1751
  source 1..389: mol_type = other DNA

SEQ ID NO: 15668 - DNA, 490 bp, synthetic construct; identical to SEQ ID NO: 2008
  source 1..490: mol_type = other DNA

SEQ ID NO: 15669 - DNA, 826 bp, synthetic construct
  source 1..826: mol_type = other DNA
gagagaaccatggattaacatccatggttctctccctacatatgattgtgtgtcgtttcaccgcgacacccggcaatcatacatattcattgcagatctcgttctgctcttattttacgtagatatagacgtgttgaataggggtagaacccctaatcgcatttgctgtatttgctttaagagacctatagaataggcaatagcttaatctatagattatgagaatgtatattaatatgatatttagtcaccactccggaaattaaccacttctaagtgatgaccgtatgaatgaaacagttgtggctactgttttgtacgtttatgccgtcaccccagagagtcaactctgagaataaatcacccacttctgcgagaagttgtagcagcctgtaaggacgagctgtgtttcgacttgttcgcatagattattgaatctcatgaactgaagtttaatgactgataattaacgcttgtaaggttttttaatcgttggaatcccacctattagtttcgatttcgcttaactgatctccacccgcagtagggttgaagagagatcatagatctaacgaacttttaggaagaattggtccaccggttttaatttgactgacgtactagtacttactataagtgaacaatatagatttatatatgcacgtttacctcatgacaacctgagtgaggaggtttggtcacctaaatttaccgtgtctctgtatgaattttgaggttatcgatagttgttctactgatgtgattgagatgatatcgtcttggtttgtttagcccgttgaggttagtccctattcccactaaaatt

SEQ ID NO: 15670 - DNA, 465 bp, synthetic construct
  source 1..465: mol_type = other DNA
gttcgacttctatagcccgccttgggggctttgtaccttgggccaccgtaactatacgttggataagctaaaaatagttgtctatgtttgattaacgcacaatgttttaggttctgcattacctagaatttgtggtcagctacatagatagtcattgtatatatccattatttagtggagggttgacaacccaagaaaatagcactgttatgttgtcgattgatgtgccgcacataatatttattaaattacattactaatctttatactacttatgagcctgaatcagctcaaaatgattcacacatatcgtgcgatcctcgcacaattcgcactgtcgcatcttttgatgaagatgatgaagtcttgcaacttcgtgctcgggtcagggagctacgacaaaaacttgaccgaaagtaccgccatgttaagcagctcactaaacgagttgagcagctagaaggt

SEQ ID NO: 15671 - DNA, 315 bp, synthetic construct; identical to SEQ ID NO: 1536
  source 1..315: mol_type = other DNA

SEQ ID NO: 15672 - DNA, 899 bp, synthetic construct
  source 1..899: mol_type = other DNA
ataatatgtgtagtttttactacacatgttattgctagcgcccttaacccttggcgtaggacgagtttttaacttgtctgtttcgataatgattgtatagtaatcgttatcgatactatacattcatttttcatgttccatagaacatgatatcgaaggaaattaaataaagggtaaggctatagcaaattatagtaacggagttttataactcccatcattgctttgatgataaggagtgatggtgaaacgctttgtgcagtttgtgcgataacaaactcttttaggaatattaatttgctaatattcctaaggttcgtctaaccttaatagatcgcccagcacagggcgtaaattttttgtgcactagacagtcagtcttatgtgtttcttgtcaaatacgtccactctgacgtatcgtttttaaatagagtttgcgtgtaattgaggggtgcgattccccgactggcttttcatgaccaactttttatattatgccagttttgtgtgtgtctagtattttatcagtattttaggtcaatactgtaagttattacaaaacaaaataaaaaatagaaaattttgctcaaataaaaagattatattttcatttatgttttaatgttgagtagcaaaccttttgaaatgattattaggaaatagttttcactggttgttgttttgtacatctcgaataataaatttcgtatttttcgaggccgccattgtgacttttcacgtggtatgtatccaggctttattgtcttaacaacatgcctaatcttgattttcaaaagtattcctattaggtaaaagtccaaataggcttttcccagttgaactgggatatcccttgaccgggagaaataatacgtcctaacacaccagatacgaccatt

SEQ ID NO: 15673 - DNA, 824 bp, synthetic construct
  source 1..824: mol_type = other DNA
gagaaccatggattaacatccatggttctctccctacatatgattgtgtgtcgtttcaccgcgacacccggcaatcatacatattcattgcagatctcgttctgctcttattttacgtagatatagacgtgttgaataggggtagaacccctaatcgcatttgctgtatttgctttaagagacctatagaataggcaatagcttaatctatagattatgagaatgtatattaatatgatatttagtcaccactccggaaattaaccacttctaagtgatgaccgtatgaatgaaacagttgtggctactgttttgtacgtttatgccgtcaccccagagagtcaactctgagaataaatcacccacttctgcgagaagttgtagcagcctgtaaggacgagctgtgtttcgacttgttcgcatagattattgaatctcatgaactgaagtttaatgactgataattaacgcttgtaaggttttttaatcgttggaatcccacctattagtttcgatttcgcttaactgatctccacccgcagtagggttgaagagagatcatagatctaacgaacttttaggaagaattggtccaccggttttaatttgactgacgtactagtacttactataagtgaacaatatagatttatatatgcacgtttacctcatgacaacctgagtgaggaggtttggtcacctaaatttaccgtgtctctgtatgaattttgaggttatcgatagttgttctactgatgtgattgagatgatatcgtcttggtttgtttagcccgttgaggttagtccctattcccactaaaatt

SEQ ID NO: 15674 - DNA, 819 bp, synthetic construct
  source 1..819: mol_type = other DNA
catggattaacatccatggttctctccctacatatgattgtgtgtcgtttcaccgcgacacccggcaatcatacatattcattgcagatctcgttctgctcttattttacgtagatatagacgtgttgaataggggtagaacccctaatcgcatttgctgtatttgctttaagagacctatagaataggcaatagcttaatctatagattatgagaatgtatattaatatgatatttagtcaccactccggaaattaaccacttctaagtgatgaccgtatgaatgaaacagttgtggctactgttttgtacgtttatgccgtcaccccagagagtcaactctgagaataaatcacccacttctgcgagaagttgtagcagcctgtaaggacgagctgtgtttcgacttgttcgcatagattattgaatctcatgaactgaagtttaatgactgataattaacgcttgtaaggtttttttaatcgttggaatcccacctattagtttcgatttcgcttaactgatctccacccgcagtagggttgaagagagatcatagatctaacgaacttttaggaagaattggtccaccggttttaatttgactgacgtactagtacttactataagtgaacaatatagatttatatatgcacgtttacctcatgacaacctgagtgaggaggtttggtcacctaaatttaccgtgtctctgtatgaattttgaggttatcgatagttgttctactgatgtgattgagatgatatcgtcttggtttgtttagcccgttgaggttagtccctattcccactaaaatt

SEQ ID NO: 15675 - DNA, 410 bp, synthetic construct
  source 1..410: mol_type = other DNA
ctataattgatattatagataatttcttaaataaaatatattttaataaagtacaaattaacaaatataatcaatattataataggttatctaggagtatattaaagttatgttctattcataaggacattatagctatagagcgccatttacgtgcgcatcatttatttagaaagcatcaaaaattagttaatttagttattaaggaattatctaacttaattaaagagaattatttgaaacaagaaaaaattagaatagaacataatagattattagctgaatataatattaataaatttaattattatttgttacctgttgaagagtgtccctacactcaatcagatgtagatgaggatttggaatataatcctcgacccgttaaaattattaaacccaaacgccgt

SEQ ID NO: 15676 - DNA, 818 bp, synthetic construct
  source 1..818: mol_type = other DNA
catggattaacatccatggttctctccctacatatgattgtgtgtcgtttcaccgcgacacccggcaatcatacatattcattgcagatctcgttctgctcttattttacgtagatatagacgtgttgaataggggtagaacccctaatcgcatttgctgtatttgctttaagagacctatagaataggcaatagcttaatctatagattatgagaatgtatattaatatgatatttagtcaccactccggaaattaaccacttctaagtgatgaccgtatgaatgaaacagttgtggctactgttttgtacgtttatgccgtcaccccagagagtcaactctgagaataaatcacccacttctgcgagaagttgtagcagcctgtaaggacgagctgtgtttcgacttgttcgcatagattattgaatctcatgaactgaagtttaatgactgataattaacgcttgtaaggttttttaatcgttggaatcccacctattagtttcgatttcgcttaactgatctccacccgcagtagggttgaagagagatcatagatctaacgaacttttaggaagaattggtccaccggttttaatttgactgacgtactagtacttactataagtgaacaatatagatttatatatgcacgtttacctcatgacaacctgagtgaggaggtttggtcacctaaatttaccgtgtctctgtatgaattttgaggttatcgatagttgttctactgatgtgattgagatgatatcgtcttggtttgtttagcccgttgaggttagtccctattcccactaaaatt

SEQ ID NO: 15677 - DNA, 828 bp, synthetic construct
  source 1..828: mol_type = other DNA
gggagagaaccatggattaacatccatggttctctccctacatatgattgtgtgtcgtttcaccgcgacacccggcaatcatacatattcattgcagatctcgttctgctcttattttacgtagatatagacgtgttgaataggggtagaacccctaatcgcatttgctttttatgctttaagagacctatagaataggcaatagcttaatctatagattatgagaatgtatattaatatgatatttagtcaccactccggaaattaaccacttctaagtgatgaccgtatgaatgaaacagttgtggctactgttttgtacgtttatgccgtcaccccagagagtcaactctgagaataaatcacccacttctgcgagaagttgtagcagcctgtaaggacgagctgtgtttcgacttgttcgcatagattattgaatctcatgaactgaagtttaatgactgataattaacgcttgtaaggttttttaatcgttggaatcccacctattagtttcgatttcgcttaactgatctccacccgcagtagggttgaagagagatcatagatctaacgaacttttaggaagaattggtccaccggttttaatttgactgacgtactagtacttactataagtgaacaatatagatttatatatgcacgtttacctcatgacaacctgagtgaggaggtttggtcacctaaatttaccgtgtctctgtatgaattttgaggttatcgatagttgttctactgatgtgattgagatgatatcgtcttggtttgtttagcccgttgaggttagtccctattcccactaaaatt

SEQ ID NO: 15678 - DNA, 1000 bp, synthetic construct; identical to SEQ ID NO: 2637
  source 1..1000: mol_type = other DNA

SEQ ID NO: 15679 - DNA, 321 bp, synthetic construct; identical to SEQ ID NO: 1553
  source 1..321: mol_type = other DNA

SEQ ID NO: 15680 - DNA, 842 bp, synthetic construct; identical to SEQ ID NO: 2473
  source 1..842: mol_type = other DNA

SEQ ID NO: 15681 - DNA, 717 bp, synthetic construct; identical to SEQ ID NO: 2332
  source 1..717: mol_type = other DNA

SEQ ID NO: 15682 - DNA, 287 bp, synthetic construct
  source 1..287: mol_type = other DNA
tggggcacggggcgtaagctataacgtcctttaaaccaaaatgtagccgtaagtgtgcagttacctaactcttattatatttggcaaatattgagtgaaggggcacacgcgagatccacatgagcgttcctcaaagtcactattcagtgatgtgaagttgatccacaccgccaaccacccgcattacaaatgaggataatgtagtgcataagggaaccattctcggcaaaattaatactaatctaatcggtattgattctggtgttgttgatgcgcatcaacatcag

SEQ ID NO: 15683 - DNA, 800 bp, synthetic construct
  source 1..800: mol_type = other DNA
gttctctccctacatatgattgtgtgtcgtttcaccgcgacacccggcaatcatacatattcattgcagatctcgttctgctcttattttacgtagatatagacgtgttgaataggggtagaacccctaatcgcatttgctgtatttgctttaagagacctatagaataggcaatagcttaatctatagattatgagaatgtatattaatatgatatttagtcaccactccggaaattaaccacttctaagtgatgaccgtatgaatgaaacagttgtggctactgttttgtacgtttatgccgtcaccccagagagtcaactctgagaataaatcacccacttctgcgagaagttgtagcagcctgtaaggacgagctgtgtttcgacttgttcgcatagattattgaatctcatgaactgaagtttaatgactgataattaacgcttgtaaggttttttaatcgttggaatcccacctattagtttcgatttcgcttaactgatctccacccgcagtagggttgaagagagatcatagatctaacgaacttttaggaagaattggtccaccggttttaatttgactgacgtactagtacttactataagtgaacaatatagatttatatatgcacgtttacctcatgacaacctgagtgaggaggtttggtcacctaaatttaccgtgtctctgtatgaattttgaggttatcgatagttgttctactgatgtgattgagatgatatcgtcttggtttgtttagcccgttgaggttagtccctattcccactaaaatt

SEQ ID NO: 15684 - DNA, 792 bp, synthetic construct
  source 1..792: mol_type = other DNA
cctacatatgattgtgtgtcgtttcaccgcgacacccggcaatcatacatattcattgcagatctcgttctgctcttattttacgtagatatagacgtgttgaataggggtagaacccctaatcgcatttgctgtatttgctttaagagacctatagaataggcaatagcttaatctatagattatgagaatgtatattaatatgatatttagtcaccactccggaaattaaccacttctaagtgatgaccgtatgaatgaaacagttgtggctactgttttgtacgtttatgccgtcaccccagagagtcaactctgagaataaatcacccacttctgcgagaagttgtagcagcctgtaaggacgagctgtgtttcgacttgttcgcatagattattgaatctcatgaactgaagtttaatgactgataattaacgcttgtaaggttttttaatcgttggaatcccacctattagtttcgatttcgcttaactgatctccacccgcagtagggttgaagagagatcatagatctaacgaacttttaggaagaattggtccaccggttttaatttgactgacgtactagtacttactataagtgaacaatatagatttatatatgcacgtttacctcatgacaacctgagtgaggaggtttggtcacctaaatttaccgtgtctctgtatgaattttgaggttatcgatagttgttctactgatgtgattgagatgatatcgtcttggtttgtttagcccgttgaggttagtccctattcccactaaaatt

SEQ ID NO: 15685 - DNA, 481 bp, synthetic construct; identical to SEQ ID NO: 1987
  source 1..481: mol_type = other DNA

SEQ ID NO: 15686 - DNA, 423 bp, synthetic construct
  source 1..423: mol_type = other DNA
aaacaataaacattgtttattagaaacattcaatgctttattggagaagttcaaacattatttaaagtaaagtttaataatgattccttcttattagttaattttatatgtatttgttatctcaatcagatagatacctatatttaaaccaacaacaaaacccaaaatctttatggtcaaaagatcttttaatttattaaaagttgttaataatttaacacctaatatatttaagcatcgagtttatttatatttagtgacccagcattcctatttaggatacggttggctgtaattactaatcctcggtccagctattagtctatagtgttaacgctagtagttgtgtaaatcacttatactaacaacaaacaagaaacaacaacaacaacaaatcaatcaacaacaaatcaagagtctcaa

SEQ ID NO: 15687 - DNA, 696 bp, synthetic construct; identical to SEQ ID NO: 2305
  source 1..696: mol_type = other DNA

SEQ ID NO: 15688 - DNA, 799 bp, synthetic construct
  source 1..799: mol_type = other DNA
ttctctccctacatatgattgtgtgtcgtttcaccgcgacacccggcaatcatacatattcattgcagatctcgttctgctcttattttacgtagatatagacgtgttgaataggggtagaacccctaatcgcatttgctgtatttgctttaagagacctatagaataggcaatagcttaatctatagattatgagaatgtatattaatatgatatttagtcaccactccggaaattaaccacttctaagtgatgaccgtatgaatgaaacagttgtggctactgttttgtacgtttatgccgtcaccccagagagtcaactctgagaataaatcacccacttctgcgagaagttgtagcagcctgtaaggacgagctgtgtttcgacttgttcgcatagattattgaatctcatgaactgaagtttaatgactgataattaacgcttgtaaggttttttaatcgttggaatcccacctattagtttcgatttcgcttaactgatctccacccgcagtagggttgaagagagatcatagatctaacgaacttttaggaagaattggtccaccggttttaatttgactgacgtactagtacttactataagtgaacaatatagatttatatatgcacgtttacctcatgacaacctgagtgaggaggtttggtcacctaaatttaccgtgtctctgtatgaattttgaggttatcgatagttgttctactgatgtgattgagatgatatcgtcttggtttgtttagcccgttgaggttagtccctattcccactaaaatt

SEQ ID NO: 15689 - DNA, 1000 bp, synthetic construct; identical to SEQ ID NO: 2638
  source 1..1000: mol_type = other DNA

SEQ ID NO: 15690 - DNA, 722 bp, synthetic construct; identical to SEQ ID NO: 2338
  source 1..722: mol_type = other DNA

SEQ ID NO: 15691 - DNA, 516 bp, synthetic construct; identical to SEQ ID NO: 2063
  source 1..516: mol_type = other DNA

SEQ ID NO: 15692 - DNA, 542 bp, synthetic construct; identical to SEQ ID NO: 2103
  source 1..542: mol_type = other DNA

SEQ ID NO: 15693 - DNA, 520 bp, synthetic construct; identical to SEQ ID NO: 2069
  source 1..520: mol_type = other DNA

SEQ ID NO: 15694 - DNA, 775 bp, synthetic construct
  source 1..775: mol_type = other DNA
gtcgtttcaccgcgacacccggcaatcatacatattcattgcagatctcgttctgctcttattttacgtagatatagacgtgttgaataggggtagaacccctaatcgcatttgctgtatttgctttaagagacctatagaataggcaatagcttaatctatagattatgagaatgtatattaatatgatatttagtcaccactccggaaattaaccacttctaagtgatgaccgtatgaatgaaacagttgtggctactgttttgtacgtttatgccgtcaccccagagagtcaactctgagaataaatcacccacttctgcgagaagttgtagcagcctgtaaggacgagctgtgtttcgacttgttcgcatagattattgaatctcatgaactgaagtttaatgactgataattaacgcttgtaaggttttttaatcgttggaatcccacctattagtttcgatttcgcttaactgatctccacccgcagtagggttgaagagagatcatagatctaacgaacttttaggaagaattggtccaccggttttaatttgactgacgtactagtacttactataagtgaacaatatagatttatatatgcacgtttacctcatgacaacctgagtgaggaggtttggtcacctaaatttaccgtgtctctgtatgaattttgaggttatcgatagttgttctactgatgtgattgagatgatatcgtcttggtttgtttagcccgttgaggttagtccctattcccactaaaatt

SEQ ID NO: 15695 - DNA, 854 bp, synthetic construct; identical to SEQ ID NO: 2488
  source 1..854: mol_type = other DNA

SEQ ID NO: 15696 - DNA, 479 bp, synthetic construct
  source 1..479: mol_type = other DNA
atcggcttcataagcccgccttgggggctttataccgagggccaccgcagctatgcgttggataagctaaaaatagtcgtttgcgatatgattaacgcacgaattgataggttctgaattacctaccgtttgtggacagctacgcaaatggtcatttaacagtccttatttagggacgggttgacaacccgcaaaaatagcactgttatgtatagattgatgtaccttacataatatttataataaattacattactaaaattaataataataacataatttcatattttgaagaggcacctagcacgcctacttcaacggtcttgagggaagaccttaaaatcccccaaattgggtcttttgactctactgatgagatagaagttctcaagcagcgaaataaagagttgcgtgagaaactatcgaagaagtatcggcacgttactcaattagagaaacgtatcgagcaattagaagct

SEQ ID NO: 15697 - DNA, 811 bp, synthetic construct; identical to SEQ ID NO: 2446
  source 1..811: mol_type = other DNA

SEQ ID NO: 15698 - DNA, 300 bp, synthetic construct; identical to SEQ ID NO: 1485
  source 1..300: mol_type = other DNA

SEQ ID NO: 15699 - DNA, 790 bp, synthetic construct; identical to SEQ ID NO: 2423
  source 1..790: mol_type = other DNA

SEQ ID NO: 15700 - DNA, 545 bp, synthetic construct; identical to SEQ ID NO: 2106
  source 1..545: mol_type = other DNA

SEQ ID NO: 15701 - DNA, 346 bp, synthetic construct; identical to SEQ ID NO: 1635
  source 1..346: mol_type = other DNA

SEQ ID NO: 15702 - DNA, 540 bp, synthetic construct; identical to SEQ ID NO: 2102
  source 1..540: mol_type = other DNA

SEQ ID NO: 15703 - DNA, 543 bp, synthetic construct
  source 1..543: mol_type = other DNA
tgcatataatgtcttctacgacattatatgcacttattaggaaatctttgtacgcttaccgcctacgtgattttcgaacacgtaacgttaggatttgcttagcatttacctggagtactgtaattagttttgacactatgcatgctgtttctacccccgtcttggttactacaccaagcagccggccttttagggcggttaccgttattatacgggctcttttgagtatgaaatttttgaagatttttaatggatgaaaaatcagctggcgggcatgccccgctaggacaagacgctctagctattgagcgcctggctatgaatgccggaatgaggtacattgtttgtaccaagaggttttttagatgttgtttgttagcgataattatgctttcgaaatcagacatcctgacggtgcgaagccgtacgatacaacctcaaggggtgcgtgtcggtgtccattgtattgaacatggacatacttgtttccgggaaacaagtgtcgaggactatctcccctcgagctagcttgctagtaatgtg

SEQ ID NO: 15704 - DNA, 908 bp, synthetic construct; identical to SEQ ID NO: 2530
  source 1..908: mol_type = other DNA

SEQ ID NO: 15705 - DNA, 851 bp, synthetic construct; identical to SEQ ID NO: 2483
  source 1..851: mol_type = other DNA

SEQ ID NO: 15706 - DNA, 259 bp, synthetic construct
  source 1..259: mol_type = other DNA
cgtggacgtagttactgtgcgtgtatatgtactctatatgtttgtaagtgtggacgtttgcgtaaattctctgctagggcgacccccgaaattcctatttaggaatgtgttgttgagacacaattgagtgaccccccagagtgaatagttaataactttggggtttaaatagttaactggaaatatttgtaccaaacatgcgttatctcagacgcaagaaactgagcctattaccatcaataacggaactgatggtgat

SEQ ID NO: 15707 - DNA, 597 bp, synthetic construct
  source 1..597: mol_type = other DNA
gagacaggcgtgaaagaatgccatctgtggagtcgctttatatatactgcgctattctgaccaatattcgacatactagaaagagaatattgttcgttgtagtccagccatgtgaatgcaatcttggtgcagtccttattgcattatgatttcaactgccacgtaagtgatcgcgtcactatagaattccaaaaacattgttttgttctaccgtgtcaatttatcatcaggatacaatttttgcttaggcattcgatggttgttgtcccttccatcgaacccgcacctcggagaaaggtgtgctcccacattacgtcaagttaaggtgaagctgttgttataacacaatgagaatcaggcgatcatttcctatggattagatattacgatttctgtagtatcctcagcatctgtatggatttgtaccaaatgtagttgtgtttattaagcggagcccgatacacttgggtcgtgtgacgagtaaacaagaaggtttggtcaccgtttcttgttgggattatcgaggtccgagattttgcgacatttgaacaaatagtttgagagaattcccatttccacttattctagtgaattata

SEQ ID NO: 15708 - DNA, 349 bp, synthetic construct
  source 1..349: mol_type = other DNA
gctatatacggggctaacatgtaaaaatgctaaacggcatgttagcttgcacggataaaccgaaagcgggttatttaaccttactactcagagcttatcagagagatttagcaacttgcatgaattgggcgattcatgtatgtacatatagtctgctacaataacaaaagaaactaattgtaatgaaatagaagggatttctaatcccactttcactgatttaacaggcactttggtctcagcaggtgttgcaccagtttgtgctgagatcccttacacagtgccatcatcttttatttcaagttctgaggtgtctcaggatttgagagactatttttccagaccaagg

SEQ ID NO: 15709 - DNA, 701 bp, synthetic construct; identical to SEQ ID NO: 2309
  source 1..701: mol_type = other DNA

SEQ ID NO: 15710 - DNA, 297 bp, synthetic construct
  source 1..297: mol_type = other DNA
atcttcaaaatgtgcccaacgtcccggtgtgacagtaaagcgtcccatctcggtatgatgtaaaagagtccctttgggcgtcagggatatgccctcagatgtacatacctgtaaaagaaattccccttttgtgcattggttaccatgcgtgttcatgtttatatgtatcaaaaatacgtagaggcttgcataatagataaaatacataacacggggtgaggctaggcacagtcttgctaccgttcatagtgtgccactacagaagcaaatatttattcattaaatccaacttcggag

SEQ ID NO: 15711 - DNA, 279 bp, synthetic construct
  source 1..279: mol_type = other DNA
agttctccgtcctgaccaaagtggtaacatcagttaccaacgcagacatttttatgttacatgatggcaaaccggcgtttaataaattagggtcgccatcctcccaaccccctgcaatttgggtaaattgtggataaggggaaaactttacctgccacgaatcaagaaaatgaaatagaacagaatccgacgttaaccgaactggcgagtacaccgactttgagtacctctataaatgacaattccgcatctgtggaagtcgtcgaccctgaggtacca

SEQ ID NO: 15712 - DNA, 404 bp, synthetic construct; identical to SEQ ID NO: 1790
  source 1..404: mol_type = other DNA

SEQ ID NO: 15713 - DNA, 1000 bp, synthetic construct; identical to SEQ ID NO: 2639
  source 1..1000: mol_type = other DNA

SEQ ID NO: 15714 - DNA, 572 bp, synthetic construct
  source 1..572: mol_type = other DNA
cgtggagtcgctttatatatactgcgctattttgaccaatattcgacatactagaaagagaatattgctcgttgtagtccagccatatgaatgcaatcttggtgcagtccttattgcattatgatttcaactgccacgtaagtgatcgcgtcactatagaattctaaaaacattgttttgttctaccgtgtcaatttatcatcaggatacaatttttgcttaggcattcgatggttgtcgtcccttccatcgaacccgcacctcggagaaaggtgtgctcccacattacgtcaagttaaggtgaagctgttgttataacacaatgagaatcaggcgatcatttcctatggattagatattacgatttctgtagtatcctcagcatctgtatggatttgtaccaaatgtagttgtgtttattaagcggagcccgatacgcttgggtcgtgtgacgagtaaacaagaaggtttggtcaccgtttcttgttgggattatcgaggtccgagattttgcgacatttgaacaaatagtttgagagaattcccatttccacttattctagtaaattata

SEQ ID NO: 15715 - DNA, 430 bp, synthetic construct; identical to SEQ ID NO: 1867
  source 1..430: mol_type = other DNA

SEQ ID NO: 15716 - DNA, 795 bp, synthetic construct; identical to SEQ ID NO: 2427
  source 1..795: mol_type = other DNA

SEQ ID NO: 15717 - DNA, 895 bp, synthetic construct
  source 1..895: mol_type = other DNA
gaactctatataggtttcacaacctatatagagttccattgattagttattgtccgtttagcaccggaccatgcttttctttattttattgtatactttacattctgaataagtacagtagtctcctctcaggttacaactgtaccctgtttggagtgtctactttattcctaataagttttaccccttattagttatgtataagttttagtgtcgattagcagcctggttttaggttctttgaccctaattccagtgagtagcttacctaatttcacgtttctttgaaccgtgattttcttatgtatacactaaaatgtattttatctcgttaatagagaactattacaaagagagagttgctaaactcttaaatcgtctatatggcgcagtttgagtcatttatctgtgaaaaatgaagccaaattttattgctttgacggtaaatttatacttgattaaaatcaggagtatattacccgtgcttagcttacaatttacgaatttaattaaaatgggaatttgattgtaatgatttagatttgacaattcgattgctcaaaagaatcccactttaataataagctccgttgattataaatacactcgcaaaggacgagtcaagcgtattttagacgtagagcaattattagagaacaattggtcttttggatttcgattaatgcgacgtaccgcatgttatagatcccaatatttttaaaagtacccttagtttcagcacgtaccggcgtgtagggagttgcttcccgtgatttatataaggctatgcttttaaaatgaggcatttagattgataatttcaactttttatttatttttgtgattgttattgaatagcttaatagctactgatattaacccttttcttattata

SEQ ID NO: 15718 - DNA, 287 bp, synthetic construct
  source 1..287: mol_type = other DNA
gatgaaaaattcacaattttgatattgcgttggttacatgcaatagaaaccaaagaacccgaataaggtagttacgaacttacgtatagtatcttccaaactatatgtatgttgcgaaaacttatttgtcttgaacctccctcgtgaggtaccattatttagtggagtagtttgaaactacaaataagagaagctctgattcaagtataatgatgcatatacttgttttataaataatagattgcattactagtattacacaatatccaagtgcattggatttaagt

SEQ ID NO: 15719 - DNA, 430 bp, synthetic construct; identical to SEQ ID NO: 1868
  source 1..430: mol_type = other DNA

SEQ ID NO: 15720 - DNA, 458 bp, synthetic construct
  source 1..458: mol_type = other DNA
gggaaccctgaccgtcatgtcattaaactgtccggaggcgcagcggtggtgtcgtcgttactacaatgaaaccaaaaccgaaccctgatctgattacagacgttaacgcgtggtgcagcacataccatggcggcggactgcttatcagggccaagaatgaagtgaacatactagtcgttttttagcggcagtggttttgaaccccacaaacaaaagtgtgaataggcagaggcaataatgcatgtttctgacccttatcaacaaatcgcattactaattttacaaattttgataaagagcgagcggtctctaaaaaccgctcattatatacaccccagtctggttcactgggggttattcaagaagaaggagttgcgaattttaccgcgcagattactaactttgaggagcaggatgctggttggacctcatccattggcgctggttgggaccctacg

SEQ ID NO: 15721 - DNA, 776 bp, synthetic construct
  source 1..776: mol_type = other DNA
tgtcgtttcaccgcgacacccggcaatcatacatattcattgcagatctcgttctgctcttattttacgtagatatagacgtgttgaataggggtagaacccctaatcgcatttgctgtatttgctttaagagacctatagaataggcaatagcttaatctatagattatgagaatgtatattaatatgatatttagtcaccactccggaaattaaccacttctaagtgatgaccgtatgaatgaaacagttgtggctactgttttgtacgtttatgccgtcaccccagagagtcaactctgagaataaatcacccacttctgcgagaagttgtagcagcctgtaaggacgagctgtgtttcgacttgttcgcatagattattgaatctcatgaactgaagtttaatgactgataattaacgcttgtaaggttttttaatcgttggaatcccacctattagtttcgatttcgcttaactgatctccacccgcagtagggttgaagagagatcatagatctaacgaacttttaggaagaattggtccaccggttttaatttgactgacgtactagtacttactataagtgaacaatatagatttatatatgcacgtttacctcatgacaacctgagtgaggaggtttggtcacctaaatttaccgtgtctctgtatgaattttgaggttatcgatagttgttctactgatgtgattgagatgatatcgtcttggtttgtttagcccgttgaggttagtccctattcccactaaaatt

SEQ ID NO: 15722 - DNA, 574 bp, synthetic construct; identical to SEQ ID NO: 2141
  source 1..574: mol_type = other DNA

SEQ ID NO: 15723 - DNA, 423 bp, synthetic construct; identical to SEQ ID NO: 1841
  source 1..423: mol_type = other DNA

SEQ ID NO: 15724 - DNA, 546 bp, synthetic construct; identical to SEQ ID NO: 2110
  source 1..546: mol_type = other DNA

SEQ ID NO: 15725 - DNA, 490 bp, synthetic construct; identical to SEQ ID NO: 2009
  source 1..490: mol_type = other DNA

SEQ ID NO: 15726 - DNA, 448 bp, synthetic construct; identical to SEQ ID NO: 1916
  source 1..448: mol_type = other DNA

SEQ ID NO: 15727 - DNA, 1000 bp, synthetic construct; identical to SEQ ID NO: 271
  source 1..1000: mol_type = other DNA

SEQ ID NO: 15728 - DNA, 761 bp, synthetic construct; identical to SEQ ID NO: 2388
  source 1..761: mol_type = other DNA

SEQ ID NO: 15729 - DNA, 262 bp, synthetic construct
  source 1..262: mol_type = other DNA
atcaatgaataatatggcagagaaaactgccttaacaaatccttgttgatcagggttgcaacctatagctcacttaataattatatggttatgcaatagaaggataacgatacttctagccatgattataagtgttttctttcgttatatcactggataacaaaacagtgattgaaaattttattttgttacacagcttgaaaatattgataagaattttaaacaaatttcaaatagtgattttgacatcacttctcaaaat

SEQ ID NO: 15730 - DNA, 741 bp, synthetic construct; identical to SEQ ID NO: 212
  source 1..741: mol_type = other DNA

SEQ ID NO: 15731 - DNA, 319 bp, synthetic construct; identical to SEQ ID NO: 1544
  source 1..319: mol_type = other DNA

SEQ ID NO: 15732 - DNA, 1000 bp, synthetic construct; identical to SEQ ID NO: 2640
  source 1..1000: mol_type = other DNA

SEQ ID NO: 15733 - DNA, 706 bp, synthetic construct; identical to SEQ ID NO: 2315
  source 1..706: mol_type = other DNA

SEQ ID NO: 15734 - DNA, 262 bp, synthetic construct
  source 1..262: mol_type = other DNA
attttttaatacagtggagtcaaccactataataaaaccttattgattaggttagcaacctatagctatcaatgcattatacggttatacaacaattcgatgacaatagaattggccgtgatgcaatgattatacaatttttgtctattccttgtgtttaacaatacacaaggtgaaaatttttattgttacagaactacaaaatatagatacacaatttaaacaagtcgcaaacaatgattttgacattgatgcgcaaaat

SEQ ID NO: 15735 - DNA, 660 bp, synthetic construct; identical to SEQ ID NO: 2257
  source 1..660: mol_type = other DNA

SEQ ID NO: 15736 - DNA, 632 bp, synthetic construct; identical to SEQ ID NO: 2218
  source 1..632: mol_type = other DNA

SEQ ID NO: 15737 - DNA, 415 bp, synthetic construct; identical to SEQ ID NO: 1815
  source 1..415: mol_type = other DNA

SEQ ID NO: 15738 - DNA, 695 bp, synthetic construct; identical to SEQ ID NO: 2304
  source 1..695: mol_type = other DNA

SEQ ID NO: 15739 - DNA, 760 bp, synthetic construct; identical to SEQ ID NO: 2387
  source 1..760: mol_type = other DNA

SEQ ID NO: 15740 - DNA, 630 bp, synthetic construct
  source 1..630: mol_type = other DNA
cgtcattatgtcagttgattaattagtttcactgattaattgagataacaaacaacttcctaaatttattttaagtgttttgagttgaagttcacaaatattatgcgatcatattactaatcaccgcctatttccatatcttccgatgaattccgtacaggaatgtaataatttttgttatttgtatttaatttataactttgatctatgctcatcccaccgtttagccattattaggttctgttatgaaactagtaattattgtttgaaaaccagtagttccagcgcgtcgtggcctattgacccccaaacaaagtctttgtctttccctaaaggtttggtcacctataagtctggctctaacatcgagtacagcaagtctgcccaacatttgttgcatctgactctgggggcaacaaatgtggcgggataaagttacaaacctgataacacaggtagctttagcacaaaaccccacattcccacccgagtaatgtcaattttattattttatgcactttataactatgttatggcaaatttattataaaaatgtatttcaactatccaccttcttctttcacctttactgtcgaaactcttttccagtcaagaaaatcttaatgaaaa

SEQ ID NO: 15741 - DNA, 411 bp, synthetic construct
  source 1..411: mol_type = other DNA
aggccagtaaatatatgtaacgtaatgatatataataattatattttcattacgttacgtatgtttgccaggtaaggtggtttaccagccatcatttccttcattcggtctattggtgaattgaccactcacccttcccatagttgttttcaacattccagcttacacccagccgcttttgcggctttgttccagctgtctgtgaatttaacagaccatgattacctatgaagctacaattagcagagttgtagtggaggagttggtttactgaaaccaaaggcattgaggattctctgccaagactagatgccttccttctttttaagttttgcgtgctctccaattttcacgtggattaaacgcaaggtagctgtagagccgttgacctaaacaacaacactatcaatt

SEQ ID NO: 15742 - DNA, 526 bp, synthetic construct; identical to SEQ ID NO: 2079
  source 1..526: mol_type = other DNA

SEQ ID NO: 15743 - DNA, 558 bp, synthetic construct; identical to SEQ ID NO: 2123
  source 1..558: mol_type = other DNA

SEQ ID NO: 15744 - DNA, 361 bp, synthetic construct; identical to SEQ ID NO: 1677
  source 1..361: mol_type = other DNA

SEQ ID NO: 15745 - DNA, 471 bp, synthetic construct; identical to SEQ ID NO: 1966
  source 1..471: mol_type = other DNA

SEQ ID NO: 15746 - DNA, 339 bp, synthetic construct
  source 1..339: mol_type = other DNA
agttagtctaattaccaaaaccaaacctagtcgaccttctgtcgactcattaattaagttaccaaacacaccaaaaccaaacaccataccaaaccaaccaacacaccaaccaaccaacttaccaaccaaccaaccaaccaaccaacctaccagttggctttatagtcaactgcgtcattaattaagtgaaaccaacctatcaaccgatctgttattatacaagattgctgatatatacttatacaccttataccgatacacaacgcacaaacacactaagctagttacacatcgttttaagtgtcacccctacccggaacttccaaattccaatccaag

SEQ ID NO: 15747 - DNA, 465 bp, synthetic construct; identical to SEQ ID NO: 1951
  source 1..465: mol_type = other DNA

SEQ ID NO: 15748 - DNA, 429 bp, synthetic construct; identical to SEQ ID NO: 1860
  source 1..429: mol_type = other DNA

SEQ ID NO: 15749 - DNA, 429 bp, synthetic construct; identical to SEQ ID NO: 1861
  source 1..429: mol_type = other DNA

SEQ ID NO: 15750 - DNA, 496 bp, synthetic construct; identical to SEQ ID NO: 2022
  source 1..496: mol_type = other DNA

SEQ ID NO: 15751 - DNA, 579 bp, synthetic construct; identical to SEQ ID NO: 2147
  source 1..579: mol_type = other DNA

SEQ ID NO: 15752 - DNA, 596 bp, synthetic construct; identical to SEQ ID NO: 2161
  source 1..596: mol_type = other DNA

SEQ ID NO: 15753 - DNA, 280 bp, synthetic construct
  source 1..280: mol_type = other DNA
gaactataatcagtgtgaacttgcttcattgataaagatgccatgaaaatctttgaagtattgctactgatagtttagggtgtccctatttagggatggagtgcccccagcaaccctggatactccaatttggcacaacctttgtgtgggaaggtcgcctgcacaattgcaaattagacttaacgaatttgaacaaaattatagtgcaagtgttggagcactagacaatccttcacaaacaaatttagagcgaaatgaatcgaatataattggaaatacc

SEQ ID NO: 15754 - DNA, 1000 bp, synthetic construct; identical to SEQ ID NO: 2641
  source 1..1000: mol_type = other DNA

SEQ ID NO: 15755 - DNA, 613 bp, synthetic construct; identical to SEQ ID NO: 2192
  source 1..613: mol_type = other DNA

SEQ ID NO: 15756 - DNA, 864 bp, synthetic construct; identical to SEQ ID NO: 2501
  source 1..864: mol_type = other DNA

SEQ ID NO: 15757 - DNA, 665 bp, synthetic construct; identical to SEQ ID NO: 2266
  source 1..665: mol_type = other DNA

SEQ ID NO: 15758 - DNA, 688 bp, synthetic construct; identical to SEQ ID NO: 2295
  source 1..688: mol_type = other DNA

SEQ ID NO: 15759 - DNA, 545 bp, synthetic construct; identical to SEQ ID NO: 2107
  source 1..545: mol_type = other DNA

SEQ ID NO: 15760 - DNA, 275 bp, synthetic construct
  source 1..275: mol_type = other DNA
agcacaccccgtatcatcaatggggttccagtgtaaagttgaatagatgtctctatgtatggttacggtgtttatatgtgttttgttatttttgtatatattgatagacgcttcatagaggaacaatacccgcgagggtactcgtgtttacggggcggattggatccggaccacaaaataacaccagtatacgtttaatcggacgtgtattgtttcataaatagattagtaaattatttagaaagaaaataaaggaacggtcacctaaaggaaaa

SEQ ID NO: 15761 - DNA, 806 bp, synthetic construct; identical to SEQ ID NO: 2442
  source 1..806: mol_type = other DNA

SEQ ID NO: 15762 - DNA, 321 bp, synthetic construct; identical to SEQ ID NO: 1554
  source 1..321: mol_type = other DNA

SEQ ID NO: 15763 - DNA, 410 bp, synthetic construct
  source 1..410: mol_type = other DNA
ggcaaacatacgtaacgtaatgatatataataattatattttcattacgttacgtatgtttgccaggtaaggtggtttaccagccatcatttccttttttcggtccattggtgatatgaccactcacccttcccattgttgttttcaacatttcagcttacatccagccgctcttgcggctctgttccagctgtctgtaagtttaacagactataatcacctatgaagctacaattagcagagttgtagtggaggagttcggttactgaaaccaaatcaagggcattgaggattctctgccgagattagatgccttatttaagttttgcgtgctttccaatttttacgtggatcaaacgcaaggtagcttgtagtcaagccgttgacctaaacaacagtactacaccatt

SEQ ID NO: 15764 - DNA, 416 bp, synthetic construct; identical to SEQ ID NO: 1824
  source 1..416: mol_type = other DNA

SEQ ID NO: 15765 - DNA, 312 bp, synthetic construct; identical to SEQ ID NO: 1526
  source 1..312: mol_type = other DNA

SEQ ID NO: 15766 - DNA, 291 bp, synthetic construct
  source 1..291: mol_type = other DNA
tggcattagacctacgccataaggtcgttaaatatatgtggcgccactatgtggcataggcttgcaccataaagtctgaaccaaaatgtggtcgcagtgcatagttactgccatgctggcttgtgaaaccagcttggagcgtggatgcactcgtatcttggatgggcgttccccaaaatcactatttagtgaagcgtggtcctggacgcacatctcacacaccctcccaggggcttggtcgcccctgtagaggttaaataacggccatctatttccactacttttgatatt

SEQ ID NO: 15767 - DNA, 486 bp, synthetic construct
  source 1..486: mol_type = other DNA
cgtttatacgcatatatgattagtagacgatgtctctatcgataaagaacttcaagtttagtatcccacgtgagatccttggagcgacaccccttttacaaataataccttttaaacgtattttcaggaccttgcatgacaatgattatcccccgcactgaatacaaccatacgtggattgtataagatgggaaccttgacaaacatttggtacgcgccgaaaggccatcggagacataatctccgcacctgtatgtagaccactacctggctctcaacagcttgagactttgtcttaaatcttcggattggaaacggctctatttgggtgtgctgataacccctcatcggagacgctgaggagggagattatgcctttagtgtacgccaccttgtcttgcgtaatgccttggttggtattgattctgggggccagcccagacggagctaagttgcactagagttatactggctgttcatatcgcc

SEQ ID NO: 15768 - DNA, 478 bp, synthetic construct
  source 1..478: mol_type = other DNA
cgcatatatgattagtagacgatgtctctatcgataaagaacttcaagtttagtatcccacgtgagatccttggagcgacaccccttttacaaataataccttttaaacgtattttcaggaccttgcatgacaatgattatcccccgcactgaatacaaccatacgtggattgtataagatgggaaccttgacaaacatttggtacgcgccgaaaggccatcggagacataatctccgcacctgtatgtagaccactacctggctctcaacagcttgagactttgtcttaaatcttcggattggaaacggctctatttgggtgtgctgataacccctcatcggagacgctgaggagggagattatgcctttagtgtacgccaccttgtcttgcgtaatgccttggttggtattgattctgggggccagcccagacggagctaagttgcactagagttatactggctgttcatatcgcc

SEQ ID NO: 15769 - DNA, 362 bp, synthetic construct; identical to SEQ ID NO: 1679
  source 1..362: mol_type = other DNA

SEQ ID NO: 15770 - DNA, 506 bp, synthetic construct
  source 1..506: mol_type = other DNA
gttcagttagtttttctaactgttcttaacttttactctaataagtagtatctatcttcattagcaattcatgaagtgatgtttaactcctaccacctttggtgttagagggggattcttactatcctctttaattagtaagtttgtttgggttcaagccccaactgtgaaattagcttgtagtacaatatattgaggcgtgtgactgaagaatcacacaactcgggaagtgaatacttccctctgataggagtagcagcctaccagagtattgcttatatagtttgcacgacttgaaatttccttttcctgatcgttcccgaaacgattcattaactatgagggacgtggtcctagagggactaccgtatggtaagacgatagaacgttaatctaaaaccttcccacgttaagaccaatgaggtattgttcctataccgtgacattgagtctttgacgtgtaataaaagtagttattttctaaagaggaaccgtggagacacatt

SEQ ID NO: 15771 - DNA, 399 bp, synthetic construct; identical to SEQ ID NO: 1775
  source 1..399: mol_type = other DNA

SEQ ID NO: 15772 - DNA, 388 bp, synthetic construct; identical to SEQ ID NO: 1749
  source 1..388: mol_type = other DNA

SEQ ID NO: 15773 - DNA, 820 bp, synthetic construct; identical to SEQ ID NO: 2455
  source 1..820: mol_type = other DNA

SEQ ID NO: 15774 - DNA, 277 bp, synthetic construct
  source 1..277: mol_type = other DNA
ggatatatacggttccacaagtgtacataatttgcgatcggctattgtggaatgtcaggatgaccccaaagtctttactactcacgactataaagagagagtaatcgcacactccaaggacgtggattaatccttggtttacatagaatccgctacaatcagtaatgagaaagtatgtgatcccattgtagagatcaccaaccccagcacttcagaaacggtaggtttacttaccagcgcaggtgtagcgcccgtatgtgctgagatcccctacacc

SEQ ID NO: 15775 - DNA, 787 bp, synthetic construct
  source 1..787: mol_type = other DNA
cacccgccgcccttcaggcgacgagtggaggtcacaagccctcataaactgtggagtgtaagacacatgccctttaaaggcatgaagattcttgcttattttagcagatgaatcatactagcttgctttacaatattagcaatcgagccagaccacgaggattgaacttcaattgaaaatgaaggacggtccgaatgccctcactttatagagaagtgtgccctcactttatagagcagtagcgttttccctcactctataaagcagatccatattataattgttgccctcacttgattgaatatttcaagccagcgaagcaagttggtgtggtcccggcgtgttaggtgagccgtttaagacatctaacaaatatttagtttctttcttttctcgaactaaattctttatttcaatcgctgaaacttgtatgtgacttaacttaggccagcatattttgtgtaagcgcagtgatagtctgactctatccgaggaatcactacctcgttaaataaatgtggcccggccagggttatccaagcctgagacttcgaaactctcaggtggcatacttcaagcggagcgtaagacctaaccaccgttggctagtggcgcagtatgagcgaattaatggattgtagcaaagtagctttgaataactcctacgatcagcacgcaaccgggttttcgtgccccggcatactagaaactgcttgttacagccaatcaacctgaaaagggcccttaacagggttatttaactaggctatttgtgcagccatacact

SEQ ID NO: 15776 - DNA, 295 bp, synthetic construct
  source 1..295: mol_type = other DNA
gtgcacgctaatgcgtgcacgctgccctttggacttctcagtccaccttagcaggtttgtgagagtcactatttttagttgacaagttagaagctcatccacttccacacaatgatggtgtgttaattccccagtgatgcttgatcctatggatgtatggatctcgatgcatcggcgcgaggaggcgccccggcgaggaggccggacaccagcggtaggggaccgcccgggcgtatttacaggcccggagttttgctaccaagtcgtgaatttacactcgacaaggtagtggctc

SEQ ID NO: 15777 - DNA, 290 bp, synthetic construct
  source 1..290: mol_type = other DNA
gcgtatatacggaagattgcgggggaaatgaataaacccatgacccgctgctttgtcaggaagccttgctcctgctttttagcttactactcagatggaatcagagaattgggtttctgcggagtgttttgaacttggcacccgcagtatataggttcgctacagaattaagagataatgagaagacttgtaatgaggttgacggtgtatccgtcaaccctgtccctgaacaaattggtgtggctaacatttccaacgaggcatgcacctcggttgaggttggcgttaat

SEQ ID NO: 15778 - DNA, 379 bp, synthetic construct; identical to SEQ ID NO: 1730
  source 1..379: mol_type = other DNA

SEQ ID NO: 15779 - DNA, 423 bp, synthetic construct; identical to SEQ ID NO: 1842
  source 1..423: mol_type = other DNA

SEQ ID NO: 15780 - DNA, 278 bp, synthetic construct
  source 1..278: mol_type = other DNA
tcttgtatgcatataatgtagtctagtaagttgcatacactgctatccagcttttaggtcccctatttagggagagcgtcctgcgagcagccctccaaaagctcaatagacttcggagcagccatcctgggttagatcggcagccatgtttacatggtgctcttaaaaattaacctgctaatcaaacttcaactaacaacagcagcacaattgctgcatcaactcccgccaattttggcgatcaggtagtacaatcttccactcaagtatcaactact

SEQ ID NO: 15781 - DNA, 362 bp, synthetic construct; identical to SEQ ID NO: 155
  source 1..362: mol_type = other DNA

SEQ ID NO: 15782 - DNA, 354 bp, synthetic construct; identical to SEQ ID NO: 1655
  source 1..354: mol_type = other DNA

SEQ ID NO: 15783 - DNA, 624 bp, synthetic construct
  source 1..624: mol_type = other DNA
tagcacgattattagttggatgcttgtatggtatatgttgcgcaaacgctcatatgccatgcaggcactaattataagagtctacccagttttaactaaactctgcttctagttccaggagaagccacctactttaaaagtagtttgtataatagtgtgtatatgtaagacctatttaataaaaattattcatgtcaattataaacttaaaacttaggtctgtgaattgtataatatagtccatccggaggacccctgaattactactagtcatgtagtaaggttgatataggaaatcctgcttgttggatgcttagggtatgattcactcactttgtgttgtgatagtacttggataagtatctagtgatgcttgaatgatcactattgctacattcggaatgtgtgtagctgattcaagaggatatggtggaaaaagatcactggcgtaaggcaatccagtgaacactccaggggaggagttagttcaagtttctccgtgtcaggctcaggaaagccgggtgtggacatccacctactgaaccggttttgtctatttccaataaaatagtcaccccaattcgcgcattcctaacccgtctccgcaaaactaaagaattaatc

SEQ ID NO: 15784 - DNA, 728 bp, synthetic construct
  source 1..728: mol_type = other DNA
gatattaacaatatcatgtcaaattttgcctccttctgtgaggaggggtgtgtccttgcgagggcacattcattgcagacgattgtgttacgttacaacacagtgtgggccctggcaccaaggtattatccgctgaatatgacgataccggaccagccatgttattggtgatccaacgtactatttgaggtttgctaatatttttccctacccttgggtagatgacactgttttgtgcttagcacattgtgtttccagtgcaccattccagagggtacagtttggctttagccactatgggttgctacctcttcccatagtcgaaagtagggaggcacttcccgtggaggtgcccacccctatggttgcaagagtttatcagcctgctctacattgtctttgaaccgctgttccggtgaatcgtggaagaccgtcgcctttgcttatgcgccgtgactggttggaagaccgtcgcctttgcttatgcgccgtgactggttggagtggatccggttaggatttctttgatgttgttttgcaggctggggatcttgtaattacgtgtgcctgggttgaccacaccaggcactttattccgaggccactggattggtgtgcagttacacaattcgtatgaactcacttttcctatttattattctttgcctatatgggatgggccttaattggcatgttccattggcactttggtttccattttggtttcc

SEQ ID NO: 15785 - DNA, 913 bp, synthetic construct; identical to SEQ ID NO: 2535
  source 1..913: mol_type = other DNA

SEQ ID NO: 15786 - DNA, 782 bp, synthetic construct; identical to SEQ ID NO: 2413
  source 1..782: mol_type = other DNA

SEQ ID NO: 15787 - DNA, 628 bp, synthetic construct; identical to SEQ ID NO: 199
  source 1..628: mol_type = other DNA

SEQ ID NO: 15788 - DNA, 510 bp, synthetic construct
  source 1..510: mol_type = other DNA
gtgtgacaaatcaaccctgaaatagggttgacgactcgacacgacaacagtttcttctaagttgtcatgatttagtaagtctaaaactgttccacaccgaatttcaaagaaattttgaaaaacgatacggaaagttcttgaattggacaaggcttttcctgtcataaggcaagattgtgcttgtgtgcgctctgaccgaaccggtgggcaaggactggagcataggaaggaccatttagtatgggcttagtcgggcacaagtgaaccgtggggtccaaaagactgcttaccggcttgtgcttagggcttagtcctgaaatttgcgtagtaccccagcttctgttcttacctacttaaagggaaatagacgtggacactagactacatggaaagacatgttgacacagaatgaatagtattctacaaccaacaaaactcaacatttatgaagacaccagacaaacctgaacaagtaattatccgacacccatttagtaattttagtgaaag

SEQ ID NO: 15789 - DNA, 454 bp, synthetic construct; identical to SEQ ID NO: 1925
  source 1..454: mol_type = other DNA

SEQ ID NO: 15790 - DNA, 369 bp, synthetic construct; identical to SEQ ID NO: 1699
  source 1..369: mol_type = other DNA

SEQ ID NO: 15791 - DNA, 525 bp, synthetic construct; identical to SEQ ID NO: 2077
  source 1..525: mol_type = other DNA

SEQ ID NO: 15792 - DNA, 279 bp, synthetic construct
  source 1..279: mol_type = other DNA
ttgctttcccgtggtggagaccacgttaaatatactcactatgtaaattttgtgaagtttgcacattatgtaatcttttgttaatatttgtacattgtgctgaggcagtaaaagtacgaagagtattcaaaagaaattcacatccccgctctatttagagttacagcacaggatggggagggtaatcaccaatatccagaagcctcacgaagcatggagttttagtcaatccatgtttttgtagttagactagctgaaaatactaaaattaatgaagtt

SEQ ID NO: 15793 - DNA, 457 bp, synthetic construct; identical to SEQ ID NO: 1934
  source 1..457: mol_type = other DNA

SEQ ID NO: 15794 - DNA, 801 bp, synthetic construct; identical to SEQ ID NO: 2437
  source 1..801: mol_type = other DNA

SEQ ID NO: 15795 - DNA, 347 bp, synthetic construct; identical to SEQ ID NO: 1636
  source 1..347: mol_type = other DNA

SEQ ID NO: 15796 - DNA, 487 bp, synthetic construct
  source 1..487: mol_type = other DNA
agtcaactctgttgtaaatcaccacccccttctgtaggaggtattagcagcctgtaaggacgagctgtttttgtacctgcctgcatagaccattgaattttatgatgagaaattcagcaactggtaattaacattcgtaaggttttgttgtcagtggaatcccactcgcatttattcatttcgttgatcaatctccacccgcagtagggtagaagagagattgtagatctaagaaatttgcgagaagaattggtccattggtttcaatttgacaaacgtaactgtacttactatgaatgaacaatatagatttgcttatgcacgtttacctcatgacaacctgagtgaggaggtttggtcacctaaatttttcgtgcctctgagtattttcttgaggttatcaatagttgttttatcgatcggattgagatgatttagtcttagtttgtttagccctttgaggttagtccctattcccactaaaatt

SEQ ID NO: 15797 - DNA, 320 bp, synthetic construct
  source 1..320: mol_type = other DNA
gtcagcttctcgaaagcccgccctgggggcttctaataccgggggccaccgcaactatgcgttggataagctaaaaatagttgcttgtgtttgattaacgcacaggttgtaggttctgaattacctgcaatttgtggacagctacacaagtagtcattgtatatagtcgttatttagcgacggggtgacgcccacaaaaatagcactgtcatgttgtcgattgatgcaccgctcatgatatttgtacaaattgcattacttatctacaaagaattttggaggacggtaccctcaataaaaataccgaattgaacactact

SEQ ID NO: 15798 - DNA, 605 bp, synthetic construct; identical to SEQ ID NO: 2174
  source 1..605: mol_type = other DNA

SEQ ID NO: 15799 - DNA, 688 bp, synthetic construct; identical to SEQ ID NO: 2296
  source 1..688: mol_type = other DNA

SEQ ID NO: 15800 - DNA, 599 bp, synthetic construct
  source 1..599: mol_type = other DNA
atgtatggtaaagccatactagctatttgccgcatttgcctaccgcgaaagataggggcacgcgtgccggacgtgttgaagctcggtgcttggaggtcagcgccttaaagcaagacccaaacaaaacagtttcagtttcctgagtgtgtgtgacgagtgaattactatcttaactctatcaaacagacggtgtttctgtttttgtcatgtaggtagcacatgcgattcgtgtgcgcctgctggccactatgaatcatacagtagctgtgggcaatatacgtaagacccacatactggcccgtaagggtgttccattttccaaagtcgtgagtgtttccgactttctgagtatgggctcttccattcatatgttcctgaggtttcctagcagtcgaaaattgaggacacgaccattgggggtttacgcaagttctacccattggagccgttaacaatctgatattagtaggcgatggtataggcgtagtggtcaaagaatactttcggtggtgtattacaccacccaattctttatagtcgccggactttaaacgtttttaaaagtctaatacaagtatacgatatacccggttttaaag

SEQ ID NO: 15801 - DNA, 804 bp, synthetic construct; identical to SEQ ID NO: 2440
  source 1..804: mol_type = other DNA

SEQ ID NO: 15802 - DNA, 489 bp, synthetic construct; identical to SEQ ID NO: 2005
  source 1..489: mol_type = other DNA

SEQ ID NO: 15803 - DNA, 335 bp, synthetic construct; identical to SEQ ID NO: 1602
  source 1..335: mol_type = other DNA

SEQ ID NO: 15804 - DNA, 675 bp, synthetic construct
  source 1..675: mol_type = other DNA
ccctggagaggtgtaattgtatctcttcagagtattttttggtgcgtgttcccgtagggtagtatactgtgaggttgctattcgtaggggcatgttaagaataatatatatattatcatgaggagttgtttaagccgtgtgttatcgggcttctttgaagtagtatattttctttgatttgatatgttacattttgaaagcgatcttttcgaatagtgatgtgcaaatatacagcaacgataatttacacctattttaattcttgtacgaagattttatcttcaattaagatggagtcagttaaacccaacagcctctaaagtttgaggaataagaacaaacgttggtgactgtgtcccatataattgtatttgattaatttaggaataatttggattgctagccttgtctgtggtacgttattggttttagcagcggccatgcagttttgaaaacacagatagtctaggcatctattagctgtagaatcttttgattcgagttgtattggcaatttttggttgacagccccctatcgtcctgggtaattgttcaatatgacgtgcaagtgtatgcaaagagccgattctatataagctcagctatgttaccccaagttgtacgcgatggtatcaaatccttgggagtaaaggaacagagagatagacttagttc

SEQ ID NO: 15805 - DNA, 908 bp, synthetic construct; identical to SEQ ID NO: 235
  source 1..908: mol_type = other DNA

SEQ ID NO: 15806 - DNA, 337 bp, synthetic construct
  source 1..337: mol_type = other DNA
cccttcaacgccctcccccggggcgtaaaataatgtgggccgcgtgtgccggtgcacacgacccccctgagcaaaagggggcgtaagtaaaaatttgccgccgatatatgacaccagcgtctgctatgtttcgttctttagtgagcagcgtgaggctttgtcggtgatgtacttgtagtgagtctcttatttaggagggtgttgcagcacaaaaataaggatgctacattttgtgaataatccgagagcataatgtagaaataaatggattactgaaaacaataaaacaaataaaaaaataagtgtgatcagcactgtaactgatcatcagaccgta

SEQ ID NO: 15807 - DNA, 674 bp, synthetic construct
  source 1..674: mol_type = other DNA
cctggagaggtgtaattgtatctcttcagagtattttttggtgcgtgttcccgtagggtagtatactgggaggttgctattcgtaggggcatgttaagaataatatatatattatcatgaggagttgtttaagccgtgtgttatcgggcttctttgaagtagtatattttctttgatttgatatgttacattttgaaagcgatcttttcgaatagtgatgtgcaaatatacagcaacgataatttacacctattttaattcttgtacgaagattttatcttcaattaagatggagtcagttaaacccaacagcctctaaagattgaggaataagaacaaacgttggtgactgtgtcccatataattgtatttgattaatttaggaataatttggattgctagccttgtctgtggtacgttattggttttagcagcggccatgcagttttgaaaacacagatagtctaggcatctattagctgtagaatcttttgattcgagttgtattggcaatttttggttgacagccccctatcgtcctgggtaattgttcaatatgacgtgcaagtgtatgcaaagagccgattctatataagctcagctatgttaccccaagttgtacgcgatggtatcaaatccttgggagtaaaggaacagagagatagacttagttc

SEQ ID NO: 15808 - DNA, 358 bp, synthetic construct
  source 1..358: mol_type = other DNA
catccgaggttagttctgcccccaaaaatatttgcaacgtgctacgatccaatcgtagtattttgttttgactcagtgagaaccgtttgcaacgcaagaaagacttgtctttcttgtgggatccctcattgttgtcgggtagagtttcgattctacaaagctatttgcgacttgattcggattcgtccgttaagagttgctcctcgcctttcacgaatcttgcttgcttttgctcgcttggtttgtgttcccctcctagccagagctgtctcatccgaggttagttctgcccccttaacttgtcttcaggacttgttgagaagttgtgtgtcaccatcggacagtgaagattccgaac

SEQ ID NO: 15809 - DNA, 305 bp, synthetic construct
  source 1..305: mol_type = other DNA
actaatatgagatggttttagccctatggaaatgtttagtacccttaggtgtgggaacacttttccagagtcggaaaaacttcaaccgctgtgtcgtacatgttgattgattttacatctcaccgctatgaaaaaggacattgctttattcatatgataaggacgatatggaatcggtttagctacgtcgagactttagttgtagacgcgtagtatgccaagctcattggtcaaactattaaggctctctggattagcaacccagtagtagatttagttttgatctgagcgtattccctgaagac

SEQ ID NO: 15810 - DNA, 461 bp, synthetic construct; identical to SEQ ID NO: 1943
  source 1..461: mol_type = other DNA

SEQ ID NO: 15811 - DNA, 373 bp, synthetic construct; identical to SEQ ID NO: 158
  source 1..373: mol_type = other DNA

SEQ ID NO: 15812 - DNA, 347 bp, synthetic construct; identical to SEQ ID NO: 1637
  source 1..347: mol_type = other DNA

SEQ ID NO: 15813 - DNA, 278 bp, synthetic construct
  source 1..278: mol_type = other DNA
ttttttaagatgttttgtactttaaacaaaatatcactgtatattaatttacttgtaaataattattcttgatctgacttaaagaattatttattaaaggaactatacaggataagtggagacctatttaggtttactacgattatatcagcgccactttgaactggggcgatccctcagtaataaacagatataattagtcagcgttatattttaagattgacacatctatttataacgtaatttgtgttgctaaaaatgttaatatatatgataat

SEQ ID NO: 15814 - DNA, 310 bp, synthetic construct; identical to SEQ ID NO: 1514
  source 1..310: mol_type = other DNA

SEQ ID NO: 15815 - DNA, 675 bp, synthetic construct
  source 1..675: mol_type = other DNA
ccctggagaggtgtaattgtatctcttcagagtattttttggtgcgtgttcccgtagggtagtatactgggaggttgctattcgtaggggcatgttaagaataatatatatattatcatgaggagttgtttaagccgtgtgttatcgggcttctttgaagtagtatattttctttgatttgatatgttacattttgaaagcgatcttttcgaatagtgatgtgcaaatatacagcaacgataatttacacctattttaattcttgtacgaagattttatcttcaattaagatggagtcagttaaacccaacagcctctaaagattgaggaataagaacaaacgttggtgactgtgtcccatataattgtatttgattaatttaggaataatttggattgctagccttgtctgtggtacgttattggttttagcagcggccatgcagttttgaaaacacagatagtctaggcatctattagctgtagaatcttttgattcgagttgtattggcaatttttggttgacagccccctatcgtcctgggtaattgttcaatatgacgtgcaagtgtatgcaaagagccgattctatataagctcagctatgttaccccaagttgtacgcgatggtatcaaatccttgggagtaaaggaacagagagatagacttagttc

SEQ ID NO: 15816 - DNA, 293 bp, synthetic construct
  source 1..293: mol_type = other DNA
aaaaataaaaaaataagaaaaagcaaaaagaatgaaggtccggtttaagacttctcctcgaatgaggcactctcttgtgcagaaagggcggtaggccaccgatagcaggccgcgatttttgcgattgcgctagactgaaccatatgtggtatctagcaagcgtgtttaagcaacgtgcactggtaaggcacgaacaataattacctgagggcatgaaatacacatgcctcctgatcaacggcaggtgcaataagaaccgttggggcgaaacctaagtcgaggtctttaacata

SEQ ID NO: 15817 - DNA, 544 bp, synthetic construct; identical to SEQ ID NO: 2104
  source 1..544: mol_type = other DNA

SEQ ID NO: 15818 - DNA, 852 bp, synthetic construct
  source 1..852: mol_type = other DNA
gtatatatttgattaactatcaaatatattcacgttttatgaaaggatgttgcttttagcaacatctaggaagtagtgcttacttctgacctatagcctggttttggcacgaacggataccgtatcgtcataatgcaactgggcctttatggtaccgcctcttatcattgtacgataatcactcgaacaaaccaactatagtcctggcacgtgcgtatgcatgccgtcactatgcagagggccttgaaggtaccgccactagtcattgtactgtaattacacgaacaaataaagcacaaccccatttaagttccctattcctgggttaaggaatgacgaactatcgtctaagcaaatagtgtgttgataatcactaaactatcatccccccttttttatgttaaatgtcaggtgtttcctgaccttcctcacaagggaatgcgttcttaacaattttatattgttaaacacactagtctttttagacttttattatctggttttatgaatactttgaccatgaccccatactacagaatgcgacgttcgcgtttgctccatagtatgtaatttcaaaggtatgttgtgggtttccaaccctccttgttttacgcgttttgccgaacttgatattataataataaatttccatgtgcctgggtgtacttgaagatggaacgacgaactgtttcctatcacttcttgatataccccgcacctctgagttatttttaaagaatattatttttagcctttatgactgcaaagatcagcatattgtttacgttatcccctatgtatgttaagggacactatcaattgtagaaacaagtaacatatgtccatgacgct

SEQ ID NO: 15819 - DNA, 635 bp, synthetic construct; identical to SEQ ID NO: 2222
  source 1..635: mol_type = other DNA

SEQ ID NO: 15820 - DNA, 702 bp, synthetic construct
  source 1..702: mol_type = other DNA
aaatgaaaagacctaatgtcctgatgtggcacggttaagtttaccgataaaaagacccggggggaaaccccccgggttctttttatcggtaaacttaaccgtgccaaggagtaatccgtgctaaacagtccactttttataggttttaggggaacggcccccacgtcttcctatgatagacaaaattcaccgtgctggttacagatatccagtcctaatggaggagaaatctcgtacaagctttcacattgcaagttgtgagtttcgtgcacttacgcattttagaattagattagatatccgacttactacatcaggacattaggtcttttcatttttccgttcaattgcaagtaccgctgttgattaatattttgatgagtttaactcactaacttcaaccaggtaattgttcttgtccacattttccattaaatctacgaatgaccacgtttggatacgctgtctgccttgaggttttgcaacatttgatatagagcgcggctctaattactcattgttgacatttctagcttggtgacactggggccacacttcttgtgttatcgcgtagtaacgcgctacggcgtcttcccttgatatcgcaatgttcatgggatttagttgggggcagtgcccaacattttattgcgttcttcctcatatttgccgttttggacggcccaacagctggtaacacat

SEQ ID NO: 15821 - DNA, 438 bp, synthetic construct; identical to SEQ ID NO: 1881
  source 1..438: mol_type = other DNA

SEQ ID NO: 15822 - DNA, 823 bp, synthetic construct
  source 1..823: mol_type = other DNA
tataagagacaggtgacgagtgaattactatcttaactctatcaaacagacggtgtttctgtttgatagagttaagatagtaattcactcgtcacacacactcaggaaactgaaactgttttgtttgggtcttgctttaaggcgctgacctccaagcaccgagcttcagcacgtccggcacgcgtgcccctatctttcgcggtaggcaaatgcggcaaatagctagtatggctttaccatacatagctatttgccgcatttgcctaccgcgaaagataggggcacgcgtgccggacgtgttgaagctcggtgcttggaggtcagcgccttaaagcaagacccaaacaaaacagtttcagtttcctgagtgtgtgtgacgagtgaattactatcttaactctatcaaacagacggtgtttctgtttttgtcatgcagatagcacatgcgattcgtgtgcgtctgctggccactatgaatcatacagtagctgtgggcaatatacgtaagacccacatactggcccgcaagggtatttcatcttccaaagtcgtgagtgtttccgactttctgagtatgggctcttccatacatatattcctgaggtttcctagcagtcgaaagttgaggacacgaccattgggggtttacgtaagttctacccattggagccgttaacaatctgatattagtaggcgatggtataggcatagtggtcaaagaatattttcggtggtgtattacaccacccaattctttatagtcgccggactttaaacgtttttaaattccagatacaactatacgatatactcggttttaaag

SEQ ID NO: 15823 - DNA, 304 bp, synthetic construct; identical to SEQ ID NO: 1494
  source 1..304: mol_type = other DNA

SEQ ID NO: 15824 - DNA, 323 bp, synthetic construct; identical to SEQ ID NO: 1562
  source 1..323: mol_type = other DNA

SEQ ID NO: 15825 - DNA, 605 bp, synthetic construct; identical to SEQ ID NO: 2175
  source 1..605: mol_type = other DNA

SEQ ID NO: 15826 - DNA, 685 bp, synthetic construct; identical to SEQ ID NO: 2292
  source 1..685: mol_type = other DNA

SEQ ID NO: 15827 - DNA, 490 bp, synthetic construct
  source 1..490: mol_type = other DNA
gcagggtcgttctgtatcattttgtacattagtagagtcacttcggagactataaatccgacccagtttcaaatctgatggttagcaaaattgatgtatgtatatggataccacttgtatattatatttatgtgtttttatactgtatttgtaggctttacatatgtgaacggtccctactggggagtcgagagacgggttccccgtgcccactgtaaacacatcgttctatctgagttaatcggctcgatagtttgtacataaatagattggtaataattgtaaatgtaaattaaatatctttgaaaatgccagtgttggtgttggcgctggcaaccagcctagggttggtaaagacaatacaagttgcagtgaagacaattcgatcgatagtgatacgagtgtgaagtctagtatatttcctaagcgagtgcattttgatgacaatcgaaagactcatcgcaggggaattctgacaccacaatccggt

SEQ ID NO: 15828 - DNA, 630 bp, synthetic construct
  source 1..630: mol_type = other DNA
aagatacagctgaaaggggaaaacgttaagtggaattgacgaacaattttccaaataacgccgtttgtcctaatagaaaatactatagcattgaaccaacttttatgtattatttatgtttttgtattgtattgtatatgtataaaatcttcttttatataataaatgaacttttgtgtgagatattgcattatgacttttaagtactcaggcacgatattaccaacgggacatctaacaccggacttcgaaaacccggcgcatttgtactgtaattatattgtaaatgagcaactgaattttgtatttgtaataataagtaacacgagatagtaaaatattttatggaagaagtacccaataagggttagagatggctgattaccatatcttcaacttattgggtatactgttaattgtacttctaagcactggcatgatcgccgttaagatctaccttcatcaggtacctagaatcggactctaggatgttataacttagtaatgttgggaacagacgtctatcacagaccttaaacgtgagaacccggccaggactggcaaccttccatcaaacggtgcgaacgatagcgatggattgtaacttaactgggcgcacaatgtataata

SEQ ID NO: 15829 - DNA, 462 bp, synthetic construct; identical to SEQ ID NO: 1945
  source 1..462: mol_type = other DNA

SEQ ID NO: 15830 - DNA, 607 bp, synthetic construct; identical to SEQ ID NO: 2185
  source 1..607: mol_type = other DNA

SEQ ID NO: 15831 - DNA, 848 bp, synthetic construct; identical to SEQ ID NO: 2480
  source 1..848: mol_type = other DNA

SEQ ID NO: 15832 - DNA, 272 bp, synthetic construct
  source 1..272: mol_type = other DNA
tttggcgtgccccagctcgtgcatttggggaagaacgcgtccgtttattggtcaacgtatgtcccgggttcactcgcgaggtaatacgttggttgcgagcagtagttgtcactagacatctagctgcatttaagcctggctgcactagcagcttgattgacaaccgcgtagtgtgccacgttcactctggaaaaacacaggccgggcttaatcagttagagagaaaggagttgttttcgttagtgcgtaaggcagtgcctagttattctggc

SEQ ID NO: 15833 - DNA, 866 bp, synthetic construct; identical to SEQ ID NO: 2503
  source 1..866: mol_type = other DNA

SEQ ID NO: 15834 - DNA, 853 bp, synthetic construct; identical to SEQ ID NO: 2486
  source 1..853: mol_type = other DNA

SEQ ID NO: 15835 - DNA, 270 bp, synthetic construct
  source 1..270: mol_type = other DNA
ataaatggtattcgagatcgttggacaaaaatagaggattccgtccatggtgatcgatatcaatcagaggcaagcgttactaagatagcttgtttactattggccattcttggtaaaacgaaattcggatttggattatctgatttagcttccttgattaaagacacgaaaaagaatacgactgtttataaggaattaatcgaagagatagaagatttcgctgaagaacatggattcgggttttcatcacgggctaaattagtaagagaa

SEQ ID NO: 15836 - DNA, 384 bp, synthetic construct
  source 1..384: mol_type = other DNA
cgttgagcggctacaaagtagaccgctccgtccagatttatacgaagccgaggcccggcacaactgcgaaggggaggtcccccatttggtgaagcggaagccccgcaaatttttaaagtatagtttgtttagcatattaactataagtaaggatttatttttaatattcaaataggtacaccctttaggcctattggctgaagggttaagtaaggccttgtgccttagagcgagccgtagggcattataattttattaaatatttattatatatatatttttagtttgatagtcccttaagggctatttagatagttttgtatttatttatattatattatatattttattttattatattatatatatatttaaatattaata

SEQ ID NO: 15837 - DNA, 317 bp, synthetic construct
  source 1..317: mol_type = other DNA
gttcgacttctatagcccgccttgggggctttgtaccttgggccaccgtaactatacgttggataagctaaaaatagttgcttgtgtttgattaacgcacaggttgtaggttctgaattacctgcaatttgtggacagctacacaagtagtcattgtatatagtcgttatttagcgacggggtgacgcccacaaaaatagcactgtcatgttgtcgattgatgcaccgctcatgatatttgtacaaattgcattacttatctacatagaattttggaggacggtaccctcaataaaaataccgaattgaacactact

SEQ ID NO: 15838 - DNA, 569 bp, synthetic construct; identical to SEQ ID NO: 189
  source 1..569: mol_type = other DNA

SEQ ID NO: 15839 - DNA, 812 bp, synthetic construct; identical to SEQ ID NO: 2447
  source 1..812: mol_type = other DNA

SEQ ID NO: 15840 - DNA, 817 bp, synthetic construct; identical to SEQ ID NO: 2452
  source 1..817: mol_type = other DNA

SEQ ID NO: 15841 - DNA, 275 bp, synthetic construct
  source 1..275: mol_type = other DNA
atacggctcacggccgtatagtatatttttcactcttcggagtgcccatgtttatcatatgtggtaaccgcttatatctggtggtataacatcttatatatgtgtgatgacacttatgatattcagggacctgtctcagcagtaattgagcgcgcaatcgtttgcctgtggaatcagtctttccccctctctatgggttactagggctgactgtgtccgcccgtttggcgttaactacacccttatgaatagtacaccacaacaataatagcaat

SEQ ID NO: 15842 - DNA, 401 bp, synthetic construct; identical to SEQ ID NO: 1784
  source 1..401: mol_type = other DNA

SEQ ID NO: 15843 - DNA, 288 bp, synthetic construct
  source 1..288: mol_type = other DNA
tgtacgtgtgatcttgcttttctatataaattccgagtcctttaaaagaaaagtagtgctgcgtgcatgttttccctagctttttagctttacgttccaggatgggaagaggcagcccctcaatatccaggaaagctcggtaggtctcaaaacattaagccgtgtgagagacgacagaactggcttgcgcaatcagtaaataaaaatacaactctctcctctctcggtgtaggagatattaaaaacaccgaaagtgtagaagaatccccgcaacaaggacagggagtt

SEQ ID NO: 15844 - DNA, 474 bp, synthetic construct; identical to SEQ ID NO: 1974
  source 1..474: mol_type = other DNA

SEQ ID NO: 15845 - DNA, 881 bp, synthetic construct
  source 1..881: mol_type = other DNA
aaaaaagtttctccgaagacgagttttgtgtaattttatgtaataaggtgtcagagataatgtaatagtgtgtttacccgctcataataggtagacgtgaattttcttattatttaatttgtttaagttttaaagatagaatcctttgatagttggtttaattgaaatactaatggtaaaaatgtatggtgcgtccgctcgctcagaataggtggacttagtattttgtttcaattaattatcaaaagtgagaggtttaatccctttgttttctaatatattaccttttagtggtaaaaatgtatggtgcgttcgctcgctcagaataggcgaacctaactgtgtggtatattgtaatatgaagagtgattctttctttattttaatgtgtttcctttattattttattttgtatatgatttgatgatttgttacgagtcggaatattttaaactagtatagagtgtagaggatgaagaggtatgatgcgtcgtatctctcctacgtaggttggaaccttaacctgcgttgctcaagatagtagaaagccctgtgatgtcgaaagacccaccggctgctttgccgcttagagcactagaggtgttattgtaggaaatagatagactagctcacgcagctgacttatttatgtttctgctttcttgatgcgcaacatcaagaagggcactgaaggtacgggatctcagttttagccgtctgagatcggccgttatgcatgtagtatattagtttgaatgtgtttttccttcttttaatctaaatcgtgtttgcttttgttttaatcttataatttgatttgccttttattaaaaaggacgcttctcgtgagagacccagtgatcctgggacacttaatcaca

SEQ ID NO: 15846 - DNA, 279 bp, synthetic construct
  source 1..279: mol_type = other DNA
atgttatttattatttattttaaagacaccgtcaatggtgtcgaactgattttgatgttatgttataatgaaagagctatttcagcaaagtaaatcaaaatcagacaaatcggtgttagctcacaccaatctttgttctgttggtagactaaactaagattaaaaactaccgctaatattaatcgaaatgacaattcaatacaggggcgtgatagtggagacgctcccaccaagtatggactttttagtccacttccactcaattttcataaaattaaa

SEQ ID NO: 15847 - DNA, 797 bp, synthetic construct; identical to SEQ ID NO: 2429
  source 1..797: mol_type = other DNA

SEQ ID NO: 15848 - DNA, 603 bp, synthetic construct; identical to SEQ ID NO: 2173
  source 1..603: mol_type = other DNA

SEQ ID NO: 15849 - DNA, 439 bp, synthetic construct; identical to SEQ ID NO: 1887
  source 1..439: mol_type = other DNA

SEQ ID NO: 15850 - DNA, 377 bp, synthetic construct; identical to SEQ ID NO: 1721
  source 1..377: mol_type = other DNA

SEQ ID NO: 15851 - DNA, 266 bp, synthetic construct
  source 1..266: mol_type = other DNA
caaacaaccacaaaaacttattttttgacccacgggctacctttttcaaggaatttactgaatttgctgtcttcattaggacggccgtatacgcaatataaatacaaaacaattagaagagaggaaaaaacaagacaattcaatcgtagaacgcccttggggcataacattgagtaggttcgctactcattacattaagttcggtttacgtttttcttaatccgaacgtattaaagaactataattgacccgttattccccgaccg

SEQ ID NO: 15852 - DNA, 260 bp, synthetic construct
  source 1..260: mol_type = other DNA
actggggcgcgccacagcccttaatcccagatgaacactggacatatcaagaccttgtcgatgcagtttgtgactacggtgaccgaatcctgtcaggccacgaaaaagtgaagtgtgagtgtgatcaaacaatagggtggaaccagccgctgaccgaattcaacgaacacttgcggcgatttcgattaccccccacacacggcaaatgtcatgggtgcttcctgaagcctggcgcactagaagatggattacacatcctc

SEQ ID NO: 15853 - DNA, 502 bp, synthetic construct; identical to SEQ ID NO: 2029
  source 1..502: mol_type = other DNA

SEQ ID NO: 15854 - DNA, 493 bp, synthetic construct
  source 1..493: mol_type = other DNA
actggcacgtctacttgggtagcaaggaagtttgtattcaatcccacccgattagggctccttgcgtgcgaaagcatgggaagtgcacaatgttgatggagggtacaaacattgtgtgtaaacgagactgcgacgggcataaggtaacctaaggtcggctggctatggtgattatgctaacaggaagggcaatgcctgggctgtggacaaccgactagaaatggttaggttgtgcccgagaggacggatgcggcagtcggtcacccaaatgatgacgttaaactgggcttatggtgcaaaccacgtcacaaaggtatgagcacaggattggtcacctggttagcaaaatgtgacgttgttgaccctgtggtgccgatcaagtcttaggacacaatataacacctaaaacttgattaaccccacacattgtgctgtctagggaccagcactcaaacaacaaaactatcataacaacacgggttacaccttaagg

SEQ ID NO: 15855 - DNA, 415 bp, synthetic construct; identical to SEQ ID NO: 1816
  source 1..415: mol_type = other DNA

SEQ ID NO: 15856 - DNA, 455 bp, synthetic construct
  source 1..455: mol_type = other DNA
tctggcacgtctacttgggtagcaagggagtttgtattcaatcccacccgataagggctccttgcgtgcaatagcatgggaagtgggcaacactgatggaggtaacaagtgttgtctgtaaacgagactgcgacgggcataaggtaacctaaggtcggctggctatggtgattatgctaacaggaagggcaatgcctgggctgtggacattcagccagaaatggttggattgtgcccgagaggacggatgcggcagtcggtcacccaaatgatgacgttaaactgggcttatggtgcaaaccatgtcacagaggtatgagcacaggattggtcacctggttagcaaaatgtgacattgttgacccctgtggcgccgatcaagtcttaggacacaacacgacgaacctaaaacttgctggcaccacgcactagtgttgtctagggcacaacacaaa

SEQ ID NO: 15857 - DNA, 274 bp, synthetic construct
  source 1..274: mol_type = other DNA
gcacttcccgtcttggaatgacgttaaacttaccctgcatactgtcttatgcatcaacatttgacacttttcggttatttatactagatatggagttgagaaatagttctcctcctgtattcattatagttttcttgttctattgatagctagacaatgccgaaaatttttccaaaataggacgtctccagcgcatattggcatgtagcgctgcagtgacgttaaatcatagaaattgtcaactaacacctataatattgatcataatattccg

SEQ ID NO: 15858 - DNA, 557 bp, synthetic construct
  source 1..557: mol_type = other DNA
aaaaaatttgactgaatatcgaagcccagaaaaatggtccgactgattgaattcacaattgacttccatgaggatgatattggcgatatccgatccctttcttattatttcccggacgagatcgatgctccaattacactgagtccagaaatgatcattaaatctattgaagacaaataccctcatatctgtattgagcagaccctacgatatgagctcttgcagtctggagagcttatggatgcaaaggcagaagatgaatttgagttccatgaagatcatgtggttttcaatgatgaagaattcagttctatcatgttaattttatatatctccatcgatgaagaacaagaatatgtcaatcacgacagactcatggacactatctaaattttgatttatgataatactgtcacttatttatgagtataagaatctgatcttatatgcttctgtctcaactttttgattaaaaaaaaccttttgatcttatcagtgaagattaaaattccccaaactttgaacactaagaattatacaaccccaattccccaatc

SEQ ID NO: 15859 - DNA, 378 bp, synthetic construct; identical to SEQ ID NO: 1726
  source 1..378: mol_type = other DNA

SEQ ID NO: 15860 - DNA, 565 bp, synthetic construct; identical to SEQ ID NO: 2133
  source 1..565: mol_type = other DNA

SEQ ID NO: 15861 - DNA, 452 bp, synthetic construct
  source 1..452: mol_type = other DNA
actggcacgtctacttgggtagcaaggaagtttgtattcaatcccacccgataagggctccttgcgtgcgaaagcatgggaagtgcacagtgttgatggagggcacaaacactgtgtgtaaacgagactgcgacgggcatgaagtaacctaaggtcggctggctaaggtgatcatgctaacaggaagggcaatgcctgggctgtggacaaccaattggaaacagttgagttgtgcccgagaggacggatgcggcagtcggtcacccaaatgatgacgttaaactgggcttatggtgcaaaccgtgtcacagaggtatgagcacaggattggtcacctggttagcaaaatgtgacactgttgacccctgttgtgccgatcaagtcttaggacacaatataatacctggatttgattgcatgacaaaaacgtgttgtctagggcacaacacaca

SEQ ID NO: 15862 - DNA, 495 bp, synthetic construct
  source 1..495: mol_type = other DNA
actggcacgtctacttgggtagcaaggaagtttgtattcaatcccacccgataagggctccttgcgtgcgaaagcatgggaagtgcacaatgttgatggagggtacaaacattgtgtgtaaacgagactgcgacgggcataaggtaacctaaggtcggctggctatggtgattatgctaacaggaagggcaatgcctgggctgtggacgaccgactagaaatggttaggttgtgcccgagaggacggatgcggcagtcggtcacccaaatgatgacgttaaactgggcttatggtgcaaaccacgtcacaaaggtatgagcacaggattggtcacctggttagcaaaatgtgacactgttgacccctgttgtgccgatcaagtcttaggacacaatataatacctaaaacttgattaactccacacattgtgctgtctagggaccagcactcaaataacaaaaccatcaataataacccgggttacaccttaagg

SEQ ID NO: 15863 - DNA, 623 bp, synthetic construct; identical to SEQ ID NO: 2204
  source 1..623: mol_type = other DNA

SEQ ID NO: 15864 - DNA, 452 bp, synthetic construct
  source 1..452: mol_type = other DNA
actggcacgtctacttgggtagcaagggagtttgtattcaatcccacccgataagggctccttgcgtgcgaaagcatgggaagtgcacagtgttgatggaggacacgaacactgtgtgtaaacgagactgcgacgggcatgaagtaacctaaggtcggctggctaaggtgatcatgctaacaggaagggcaatgcctgggctgtggacaaccaattggaaacagttgagttgtgcccgagaggacggatgcggcagtcggtcacccaaatgatgacgttaaactgggcttatggtgcaaaccgtgtcacagaggtatgagcacaggattggtcacctggttagcaaaatgtgacactgtagacccctgttgtgccgatcaagtcttaggacacaaaataacacctggatttgattgcatgacaaagacgtgttgtctagggcacaacacaca

SEQ ID NO: 15865 - DNA, 494 bp, synthetic construct
  source 1..494: mol_type = other DNA
actggcacgtctacttgggtagcaaggaagtttgtattcaatcccacccgattagggctccttgcgtgcgaaagcatgggaagtgcacaatgttgatggagggtacaaacattgtgtgtaaacgagactgcgacgggcataaggtaacctaaggtcggctggctatggtgattatgctaacaggaagggcaatgcctgggctgtggacgaccgactagaaatggttaggttgtgcccgagaggacggatgcggcagtcggtcacccaaatgatgacgttaaactgggcttatggtgcaaaccgcgtcacaaaggtatgagcacaggattggtcacctggttagcaaaatgtgacgttgttgaccctgtggtgccgatcaagtcttaggacacaatataatacctaaaacttgattaactccacacattgtgctgtctagggaccagcacccaaataataaaaccatcaataataacccgggttacaccttaagg

SEQ ID NO: 15866 - DNA, 501 bp, synthetic construct
  source 1..501: mol_type = other DNA
actggcacgtctacttgggtagcaaggaagtttgtattcaatcccacccgattagggctccttgcgtgcgaaagcatgggaagtgcacaatgttgatggagggtacaaacattgtgtgtaaacgagactgcgacgggcataaggtaacctaaggtcggctggctatggtgattatgctaacaggaagggcaatgcctgggctgtggacaactaactagaaatggttaggttgtgcccgagaggacggatgcggcagtcggtcacccaaatgatgacgttaaactgggcttatggtgcaaaccacgtcacaaaggtatgagcacaggattggtcacctggttagcaaaatgtgacgttgttgaccctgtggtgccgatcaagtcttaggacacaatacaaaagacctaaaacttgctagcactacaaatagtgttgtctagggcacaacacacaacaaacaaaacaacagaccacactcaagagtgcacacacaacacaagg

SEQ ID NO: 15867 - DNA, 291 bp, synthetic construct
  source 1..291: mol_type = other DNA
tatctataatctactagagtggcatattcgtttgcttagcgtaacagcctttgatgaaggtgcaagctccatccttggtcgcctcggtatcaccgattataattgcggttcacgctgtcgatagtaaagccaatggaatgatttactcttagttactacggcttacgtaattttgtttactctagtgtttaaatagaccttctacctttgtctatttttgattatatttatttgaactcctactttattctactttctattttaaaatttattattttaaatttattaaaa

SEQ ID NO: 15868 - DNA, 392 bp, synthetic construct; identical to SEQ ID NO: 1760
  source 1..392: mol_type = other DNA

SEQ ID NO: 15869 - DNA, 478 bp, synthetic construct; identical to SEQ ID NO: 1982
  source 1..478: mol_type = other DNA

SEQ ID NO: 15870 - DNA, 400 bp, synthetic construct; identical to SEQ ID NO: 165
  source 1..400: mol_type = other DNA

SEQ ID NO: 15871 - DNA, 508 bp, synthetic construct; identical to SEQ ID NO: 2044
  source 1..508: mol_type = other DNA

SEQ ID NO: 15872 - DNA, 848 bp, synthetic construct; identical to SEQ ID NO: 2481
  source 1..848: mol_type = other DNA

SEQ ID NO: 15873 - DNA, 411 bp, synthetic construct; identical to SEQ ID NO: 1806
  source 1..411: mol_type = other DNA

SEQ ID NO: 15874 - DNA, 250 bp, synthetic construct
  source 1..250: mol_type = other DNA
gccgcagtcgcgacaagaaattgttgatggcgcaaatgctggtcttttcagaaccacggctcaagccacaccgttcgacccttcggaccccaatgaatacttcatttcgcgccaattggtctttttctttgtccacactagggcccttactgttgctcagttgaatttcattctcggcacaacttatgaccccgataccattattgtccaaaacggcacagtttatccctacgaaacttcgactccgttc

SEQ ID NO: 15875 - DNA, 276 bp, synthetic construct
  source 1..276: mol_type = other DNA
gtggcctagtgccgggccccatttagtgcggtctcttttcagcagcattcagatgtcggagtggtggaggtgcctgggactggtacctacaaaggttttattggaacgtcaggctcgttttcgtgggattattcctccattttacggaggcccacttttgttggttcgtatgcgtggactttggatcatgatgcaactaaatcggtgtttgagtatcagttacctcatcacctgtttgtttcgcatttgcagagtgttccccttcaagccaatcgt

SEQ ID NO: 15876 - DNA, 521 bp, synthetic construct
  source 1..521: mol_type = other DNA
catgttgttgtcggtctgtagccggcactatttgttatatgttaatcacaggctctttactgatcaaatggaagcctatgtatatgtccattagaactaatccgtgatcaacggtaatatgagtattttggctgctcgtctaacagtcaaagctcctcctgagagtgcaacttaatgcaatcgggattgagtcgggacgaattatcccggccaccttttcgaggaacgccttcgggtagggcctcaaccccagacgagactcagtagcaagcgtgttgtgagttgtgtctaggtagtattcgttcatgaattttggacttgaacgcctctatgcaacagcaatgccaacttgcggattgagggtggccatacgtgtccgtggaataacacccaatgaagttcctgactaaactctacattcggcggtaatgtggagccaaaggtgctgtgtcgactgttgaagatttattctttgcaggacgcctgcacggaataatctttgactcgtcgattatattact

SEQ ID NO: 15877 - DNA, 464 bp, synthetic construct; identical to SEQ ID NO: 1950
  source 1..464: mol_type = other DNA

SEQ ID NO: 15878 - DNA, 669 bp, synthetic construct; identical to SEQ ID NO: 2271
  source 1..669: mol_type = other DNA

SEQ ID NO: 15879 - DNA, 323 bp, synthetic construct; identical to SEQ ID NO: 1563
  source 1..323: mol_type = other DNA

SEQ ID NO: 15880 - DNA, 286 bp, synthetic construct
  source 1..286: mol_type = other DNA
gtcgggcttacgcatagaaataatagactatatcgaagagacactattttcgagaggaaagaagacttatcttcttagtgatagctactttgttggatttccaaatagttttattagagacagctatgtggatcaaatagaagtagctactctaaatgaaaattttgatcctgtgcaaggacctcagatatcttggaaattcaaagatgattttgaaaagccagacaacttatctgagattagttatagtaccataaccaacacaaggtacaagttcagtcatgag

SEQ ID NO: 15881 - DNA, 299 bp, synthetic construct
  source 1..299: mol_type = other DNA
cgaacaacttactgaaaaccctagcaaccctgttgaagaaatggagagacacgccaccggattccctaacagcagatgaggcctttaacaactatttggattatgaatttcatcgacatgaatgtctaaacttgttggtgcaaaagaggctcactggagagtttcaacctgagactagcatcaaaagctggattaatgaaaattcattctcaggatttgttgtgaacaatccaagtgttgaaaacaaaagtccagacctgatatatatcagacaagtgttaaaccctgtgactttggtt

SEQ ID NO: 15882 - DNA, 286 bp, synthetic construct
  source 1..286: mol_type = other DNA
gtcgggcttacgcatagaaataattgattacatcgaagaaacactattttcaagaggtaaaaagacttatcttctcagtgatagctactttgttggatttccaactagtttcattagagatagttatgtagaccaaatagaggttgctacattaaatgagaactttgacccagttcaagggcctcaaatatcctggaagtttaaggatgattttgataaaccagacaacttgtctgagatcagctatagtaccataactaatactaggtacaagtttagtcatgag

SEQ ID NO: 15883 - DNA, 744 bp, synthetic construct; identical to SEQ ID NO: 2365
  source 1..744: mol_type = other DNA

SEQ ID NO: 15884 - DNA, 310 bp, synthetic construct; identical to SEQ ID NO: 1515
  source 1..310: mol_type = other DNA

SEQ ID NO: 15885 - DNA, 264 bp, synthetic construct
  source 1..264: mol_type = other DNA
atttaaggaccactcagaccgccgatgtctttaaactccaggcgctagctgcatctagttgttatccaagtggaaatgtgcccttatgtattagtgatttagtgaatcttatatatatttatcgttttgcatatttattcataccctgtacattattgtattaataaaatcttactcttactgcgtcattgcttcacgcgcagacaggagtctaaacatagctgataagcaggtatttcatttacaacaataaaagacacgttt

SEQ ID NO: 15886 - DNA, 600 bp, synthetic construct; identical to SEQ ID NO: 2166
  source 1..600: mol_type = other DNA

SEQ ID NO: 15887 - DNA, 310 bp, synthetic construct; identical to SEQ ID NO: 1516
  source 1..310: mol_type = other DNA

SEQ ID NO: 15888 - DNA, 885 bp, synthetic construct; identical to SEQ ID NO: 2519
  source 1..885: mol_type = other DNA

SEQ ID NO: 15889 - DNA, 475 bp, synthetic construct; identical to SEQ ID NO: 1977
  source 1..475: mol_type = other DNA

SEQ ID NO: 15890 - DNA, 298 bp, synthetic construct
  source 1..298: mol_type = other DNA
acacattgtcggctacacagagcaatctccaaatcacaaaccatttctccaatagtcctctcattttgactttggatttctcatcgtgtttgcagtcattatcacacataattgttgcttccttgcgcttcacattatagccttgacagctgctttgttgtttcagcctttgttgaatcaacaaattggcagtgaccattagtgttaagtcagtttgtagtttatttacttaagttttagttttagctattagttcttagtttttgtttatagtcttagtgtagtttattggtttaag

SEQ ID NO: 15891 - DNA, 1000 bp, synthetic construct; identical to SEQ ID NO: 2642
  source 1..1000: mol_type = other DNA

SEQ ID NO: 15892 - DNA, 339 bp, synthetic construct; identical to SEQ ID NO: 1621
  source 1..339: mol_type = other DNA

SEQ ID NO: 15893 - DNA, 1000 bp, synthetic construct; identical to SEQ ID NO: 2643
  source 1..1000: mol_type = other DNA

SEQ ID NO: 15894 - DNA, 462 bp, synthetic construct; identical to SEQ ID NO: 1946
  source 1..462: mol_type = other DNA

SEQ ID NO: 15895 - DNA, 438 bp, synthetic construct; identical to SEQ ID NO: 1882
  source 1..438: mol_type = other DNA

SEQ ID NO: 15896 - DNA, 317 bp, synthetic construct; identical to SEQ ID NO: 1542
  source 1..317: mol_type = other DNA

SEQ ID NO: 15897 - DNA, 257 bp, synthetic construct
  source 1..257: mol_type = other DNA
agattttttagtccagacaacaaaggttacgtatctgtgtccattcggacggaaaaacttcctgaaaacattgtgccgcctgatatcttcagtgtcatccaggccaggcacccaattgacataaaatctgcagcccgaatggtgggtttagagatagatcaagattctgatcaaaattggtcgattgtacggatgtggtccgatttatgatttgatgccaaaattgacatgaaaaaaagttgttaacagccctcaca

SEQ ID NO: 15898 - DNA, 333 bp, synthetic construct; identical to SEQ ID NO: 1594
  source 1..333: mol_type = other DNA

SEQ ID NO: 15899 - DNA, 333 bp, synthetic construct
  source 1..333: mol_type = other DNA
cctcattatagtaatattatatctcctgaatactatgtctattttgatggttatagtggaaaacctcatggtgaaactctttccgatttagatatatataaagcatatataacatattacagatatattaaggaattttcagaattttgtaacaacgataatgattctaatactagcaatattattgaatatgagaataaggttagaaaatccacgaaggctaaggataaggatttaaaaaccaaaaactttcctgtgtttaatccagcattacaagaattgtataatacatacatcaaagataaatcggaagttaataaaaccaggttatta

SEQ ID NO: 15900 - DNA, 330 bp, synthetic construct
  source 1..330: mol_type = other DNA
cattatagtaatattatatctcctgaatactatgtctattttgatggttatagtggaaaacctcatggtgaaactctttccgatttagatatatataaagcatatataacatattacagatatattaaggaattttcagaattttgtaacaacgataatgattctaatactagcaatattattgaatatgagaataaggttagaaaatccacgaaggctaaggataaggatttaaaaaccaaaaactttcctgtgtttaatccagcattacaagaattgtataatacatacatcaaagataaatcggaagttaataaaaccaggttatta

SEQ ID NO: 15901 - DNA, 404 bp, synthetic construct; identical to SEQ ID NO: 1791
  source 1..404: mol_type = other DNA

SEQ ID NO: 15902 - DNA, 341 bp, synthetic construct; identical to SEQ ID NO: 1624
  source 1..341: mol_type = other DNA

SEQ ID NO: 15903 - DNA, 649 bp, synthetic construct
  source 1..649: mol_type = other DNA
taaagcgcagacagacggaagcgcctcatgaaagaggggagaggatccgcctacgtggcgggcggataagacttctttttcttggtctcaggtgggtactttccagtctatcatgaggctgccacagactgctgcgtcgtaaagcgcagacagacggaagcggttcactacggtggatctcgggacaacgggtcgtgccgtccgaaagatgaggagttgggtgcatcgattgatccttggtgttcatcagccagatgaatatttagaaggatccgtttgatcagattttggtggacaatactacggggctacgtgcagacgttgagtcatctcaccaatgggtaggggaagcttgaatactatggggctacgtgcagacattgatgctgatggagtgacctgattggatgggtgtaattctcatgctcaaccagaaatggtgtagactatccgattcagaggcgacagattgcaactcgggggtaactgcatggatcatggacactcaggtgtcgaattttcgtggacagacttcgcaaccgtggacaatcggggttttacttataacgatgaagcgtgcacaagcggatgttcggagtaggaatgttcttgtgtacgtggagggcctggcctgtgcaagcaatctaac

SEQ ID NO: 15904 - DNA, 311 bp, synthetic construct; identical to SEQ ID NO: 1521
  source 1..311: mol_type = other DNA

SEQ ID NO: 15905 - DNA, 632 bp, synthetic construct; identical to SEQ ID NO: 2219
  source 1..632: mol_type = other DNA

SEQ ID NO: 15906 - DNA, 264 bp, synthetic construct
  source 1..264: mol_type = other DNA
ccgaacccgccctgcaccttgccgactgctgcaggaagttcaggtcccgaaacgacacccgcccgcggatccgccgaacgtcccacacgctctaagcgacctataccgtctttcgtgttcaccccttccgtcaagacctcgctcgaatcgcagccttccctcctctccattggagagaacgcgaaggttgaggcttcgactactctcggtgcaaacgcatctcccgctctatcctccactttcctcgctgaaaatggtttggtt

SEQ ID NO: 15907 - DNA, 399 bp, synthetic construct; identical to SEQ ID NO: 1776
  source 1..399: mol_type = other DNA

SEQ ID NO: 15908 - DNA, 609 bp, synthetic construct; identical to SEQ ID NO: 2188
  source 1..609: mol_type = other DNA

SEQ ID NO: 15909 - DNA, 446 bp, synthetic construct; identical to SEQ ID NO: 1909
  source 1..446: mol_type = other DNA

SEQ ID NO: 15910 - DNA, 485 bp, synthetic construct; identical to SEQ ID NO: 1995
  source 1..485: mol_type = other DNA

SEQ ID NO: 15911 - DNA, 665 bp, synthetic construct
  source 1..665: mol_type = other DNA
ccatttggatagttgttggagagggagaacgaggggaggtaggaggctgctgggggattctttaattgcaccttaaaaatcccccaaaagctcttccgcgggccatttggatagttgttggagagagccaggtggtcgacgcgtgttgccggttgacgacgagccgaagtcaacggcctcccataaaaactcgttgctctggttccatccttcggtggagaacggggttggaggaacacagccttagtggtggggagtagccggggttgtgaagggctgtggtgatcgtcgaccatgcggataccttgcctctctccctcgttgaggccgcttccctgtgcggagcgatacgtgaccgtcagcacagggcaccagataccggtgttttaccggggtggcccaagcgcctagtgactgactccccgcgaacggagttatcggcaggatgtcgggtacggcccccgctatcgccacttcttctttactgtagcctccttcttcctttctcacttcggtgtaccttgtctttttgcctccttcggactgctggacctgcctgggaacacacactaggaggatcgggcggcggagagatttccgggtgtgggcgtggtgaagagccacgtcagagggtgcttaccccacccgtttatcggcgcacggtg

SEQ ID NO: 15912 - DNA, 284 bp, synthetic construct
  source 1..284: mol_type = other DNA
tgataatcttggcgagatatccactagacaaacctatattatatacggaagtaccggaatattatagtattgcccataggctagcaaattggccttttgagaaagaatttgccccaaccatcacgcggccccctggggggacgcggagcctagtcaatcgtgggtctcacgacttgaaacagcttgctgttagcaaagactcgaaacgtattttacggtagtagaacacggttgcacatttgaacactataaaaccctaaccggttttgtgttcacataggctc

SEQ ID NO: 15913 - DNA, 1000 bp, synthetic construct; identical to SEQ ID NO: 2644
  source 1..1000: mol_type = other DNA

SEQ ID NO: 15914 - DNA, 473 bp, synthetic construct; identical to SEQ ID NO: 176
  source 1..473: mol_type = other DNA

SEQ ID NO: 15915 - DNA, 370 bp, synthetic construct
  source 1..370: mol_type = other DNA
taagtacctatattcagcgccccggagcattagttccgaagaatcgataacgattatccagagcattagctacaaaaacgccttacaaagtaagaagacacgatacgataacgttgagtgtatgcgaacacaaagagacgaatacttgtggcacctaaagctgatcacagctttacgtggcaagattccacgtgaggagttgagggagataattataaaatatcaagtacattttaaaataaccccatcaatatatagtagtcataataggaatatagttagacctacggtagaagaatactataggatagcatattaggataagttagattaaaaattagtggaactttccacttaatctacctccact

SEQ ID NO: 15916 - DNA, 259 bp, synthetic construct
  source 1..259: mol_type = other DNA
gtgagcccaccaagcccagagcgggagacgagagaagcatttgtatcgagtgtctaatccacgctacgaaaagcatctgcgcatctctcgctctgggcttggtgggctcacatctacaccagggatcaaccccaaaaccgaacagccggggaatttacctgagtgcaaaggtaaattccttccgaaggaggcttgagaaaagaaggtcaaagacaagattgttaacacccggaccgaaaatattcacggctgagacaaa

SEQ ID NO: 15917 - DNA, 717 bp, synthetic construct; identical to SEQ ID NO: 2333
  source 1..717: mol_type = other DNA

SEQ ID NO: 15918 - DNA, 389 bp, synthetic construct; identical to SEQ ID NO: 1752
  source 1..389: mol_type = other DNA

SEQ ID NO: 15919 - DNA, 483 bp, synthetic construct; identical to SEQ ID NO: 178
  source 1..483: mol_type = other DNA

SEQ ID NO: 15920 - DNA, 832 bp, synthetic construct; identical to SEQ ID NO: 2466
  source 1..832: mol_type = other DNA

SEQ ID NO: 15921 - DNA, 1000 bp, synthetic construct; identical to SEQ ID NO: 2645
  source 1..1000: mol_type = other DNA

SEQ ID NO: 15922 - DNA, 667 bp, synthetic construct; identical to SEQ ID NO: 205
  source 1..667: mol_type = other DNA

SEQ ID NO: 15923 - DNA, 262 bp, synthetic construct
  source 1..262: mol_type = other DNA
atgccggttgactcagcgctcgtcagcgcttaaataaatagacgactgcgtaggtttcatgcaggataaaccaaagaacccgttgtgtgtagttacttgctcttccgtatagtgttaccaaatccgctaaggaggagtagagaaaagcataacgttgggtgtgccctcgtgcacagtgttttttagcatagtcgagttcccgctcgcacaattttggctctggctaggggctgtgcggccagcttctagtgtatgtacataa

SEQ ID NO: 15924 - DNA, 344 bp, synthetic construct; identical to SEQ ID NO: 1632
  source 1..344: mol_type = other DNA

SEQ ID NO: 15925 - DNA, 399 bp, synthetic construct; identical to SEQ ID NO: 1777
  source 1..399: mol_type = other DNA

SEQ ID NO: 15926 - DNA, 251 bp, synthetic construct
  source 1..251: mol_type = other DNA
ccccgcgtctttcacaaagattgcggggagcaagcctcggaaatgttttaggtttaactttttgtgactatatattcattcatttggaaggggataaactgacagatctgaattatattaaaactttagaaccgatagataccattaaaaatagaacttttacacctaatgatgtaagtgctgaaataaatggtcacttcaagtatactttttgtgatcagggctatttggcatattttcaacacgatagt

SEQ ID NO: 15927 - DNA, 585 bp, synthetic construct; identical to SEQ ID NO: 2153
  source 1..585: mol_type = other DNA

SEQ ID NO: 15928 - DNA, 282 bp, synthetic construct
  source 1..282: mol_type = other DNA
gtgcaggatggcctttcccatcttaagtggtttgtaggatttcgtgggtccataccccccgatttcttggtacgtattccatgcacggagaatacgaccaaaactcttatttcaaaaaatattattttttactcttgtgggctgagtgcgacccaccagttccagcttagcaacctggaagttgttggagatttatggaaccaaattacacatgcgtggagtgccgccactccgtatctgttcactcattacgcgattaagttctgcgacgagacgagcgaa

SEQ ID NO: 15929 - DNA, 441 bp, synthetic construct; identical to SEQ ID NO: 1897
  source 1..441: mol_type = other DNA

SEQ ID NO: 15930 - DNA, 853 bp, synthetic construct; identical to SEQ ID NO: 2487
  source 1..853: mol_type = other DNA

SEQ ID NO: 15931 - DNA, 849 bp, synthetic construct
  source 1..849: mol_type = other DNA
ctccctgtaggcctcaaagcctacaggagttccctagagaaagtatattgtgtcgtttgaccgcgacacccgatatatgctttcacagatattcggattttatattccttttcaatgtgaaaaacattggcactggtaagtgctgtcgttactgggatgtgaaatcccggttcgtagtattttgctatatgtgtttaaaggagtctttgtatgctgctaacgcggcttcatcgcaaagtccttatttcatctgttatatttcgtcaccacccttatggtcacccgtaagtgatggttcatcatagattctatttgtggcgagtagagtttattattgatgtaaaccaccccggagagtcaacttcgctaagaaaatcaaaccccttgcgctatcatgtattaggaaattgtaaggaacgtttcccgtattacttgatagtgtcgattgatgctaactcataagattggcttcatttgaggattatttatactagatggtttagtattcgtgaagaatcccactcacattatatgatttcgcttaaccaccttcactcgcagtagagttgaacgaaggtgtagatctaacatttttgtgagaagaattggtcttctcggagctatttgctcaacgtaccgagacattattgatgtatacaataccatattttacaactacgttttaaccagggacaacctgacctggagagtttaagccactcaatttttccgtagctctgtctgatatgtgaggtaatcattactcagaagaagtttcaactatgatgcagtagatatcgtagtattgtttagcccttgtggttagttccctattcccattttgaaatc

SEQ ID NO: 15932 - DNA, 718 bp, synthetic construct; identical to SEQ ID NO: 2335
  source 1..718: mol_type = other DNA

SEQ ID NO: 15933 - DNA, 474 bp, synthetic construct; identical to SEQ ID NO: 1975
  source 1..474: mol_type = other DNA

SEQ ID NO: 15934 - DNA, 396 bp, synthetic construct; identical to SEQ ID NO: 1769
  source 1..396: mol_type = other DNA

SEQ ID NO: 15935 - DNA, 427 bp, synthetic construct
  source 1..427: mol_type = other DNA
cttttgggaaagtaggatgtatctttcaaaggaaagataagctaaatgtggttagatggaaggaaatgtccatcggcataaactcagattgatttactatcaaatagaggaatgattcgcgtcgcgtggggcccagttcacactgggcgcatcggcccaacatacaggttgggtgcgctacgtcgtagcacgcattgaaaagtccccttaagcaagggagcctttgcttcatcgattgcagatgaagatggtgatcaatataccgaaccgcaacagagaaagcggtagtcaaggcttacaagtcgcaatggataccacgactgtacgagtcgtgtgaaccgaaattgcgcaatctgacaacatacgcgacaggcttaaatggccagaaggcttacggtcccaggctttgggagtccacaaaaccaac

SEQ ID NO: 15936 - DNA, 483 bp, synthetic construct; identical to SEQ ID NO: 1992
  source 1..483: mol_type = other DNA

SEQ ID NO: 15937 - DNA, 467 bp, synthetic construct; identical to SEQ ID NO: 1957
  source 1..467: mol_type = other DNA

SEQ ID NO: 15938 - DNA, 1000 bp, synthetic construct; identical to SEQ ID NO: 272
  source 1..1000: mol_type = other DNA

SEQ ID NO: 15939 - DNA, 502 bp, synthetic construct; identical to SEQ ID NO: 2030
  source 1..502: mol_type = other DNA

SEQ ID NO: 15940 - DNA, 491 bp, synthetic construct; identical to SEQ ID NO: 2012
  source 1..491: mol_type = other DNA

SEQ ID NO: 15941 - DNA, 438 bp, synthetic construct; identical to SEQ ID NO: 1883
  source 1..438: mol_type = other DNA

SEQ ID NO: 15942 - DNA, 455 bp, synthetic construct; identical to SEQ ID NO: 1928
  source 1..455: mol_type = other DNA

SEQ ID NO: 15943 - DNA, 1000 bp, synthetic construct; identical to SEQ ID NO: 2646
  source 1..1000: mol_type = other DNA

SEQ ID NO: 15944 - DNA, 645 bp, synthetic construct; identical to SEQ ID NO: 2239
  source 1..645: mol_type = other DNA

SEQ ID NO: 15945 - DNA, 434 bp, synthetic construct; identical to SEQ ID NO: 1874
  source 1..434: mol_type = other DNA

SEQ ID NO: 15946 - DNA, 411 bp, synthetic construct
  source 1..411: mol_type = other DNA
tggcgatgaaaatgcctcaacaaataacaaacggcgaagaaaatgccttatcaaataaccaagattggcgatgagaatgcctgaccaaataactggcgatgaaaatgcctcaacaaataaccgtcgattaagaatagccatgagggctagactctacgttagcgaaacgtgaaaatgaattgttacgtagccacagagacagtgtgagcgttcgactgcaatagaattgggaatttgattgttccatagtattgctttcccgcgcttccactcctgttggtgattgatggggtatgataagaagcccactacataagcgcaccaaggatatcaacatcgattcttcgtgcacttgcttgcgtgctgccgcctttaaaggccgcaaaaccgattggtaaagctataaggcca

SEQ ID NO: 15947 - DNA, 311 bp, synthetic construct; identical to SEQ ID NO: 1522
  source 1..311: mol_type = other DNA

SEQ ID NO: 15948 - DNA, 638 bp, synthetic construct; identical to SEQ ID NO: 2226
  source 1..638: mol_type = other DNA

SEQ ID NO: 15949 - DNA, 515 bp, synthetic construct
  source 1..515: mol_type = other DNA
gggtactagacccgatgacggaatttcgctcctgccggccctggtcggggggggcagacttcggcgcacgtagacttcggtcgcggactggtgatatgcgcaagagatattctagttaagtcctagtggcaatatgtcccgggtgctgccctgattatagcagccgagtaacctgctcgatcgttaagagaaatataaggaccggaccgcaagtgggggtcatgcacaccgtcgttggatatgcatcagctcctacgtaggtccgacggcgcaccacgctttaaaatggtctcctagctggagtgtacgctagtggcagcttgtgtaggcttgttgttacgactacataccctggtccttggtacaccgatggacccctggccgaggttaatggcggccccgcagggcagttaaatatatgcaggtaagctccagccttgagtgggccggtctgacatacgtgagtccgttcgtgcaccagcgttaggtgtacactacccccctacaattacatc

SEQ ID NO: 15950 - DNA, 489 bp, synthetic construct; identical to SEQ ID NO: 2006
  source 1..489: mol_type = other DNA

SEQ ID NO: 15951 - DNA, 324 bp, synthetic construct; identical to SEQ ID NO: 1565
  source 1..324: mol_type = other DNA

SEQ ID NO: 15952 - DNA, 558 bp, synthetic construct
  source 1..558: mol_type = other DNA
cgttaataagttcaaggacttattagctattttatttgatagttttgcttctattcagaagtgtgccctgcatgcaaaacatgcaaattaggttaggcagtggaaacacagatcgccggggaccagcattcactctttacgaatcactgggttacagctactttgactagatcatatactgtatttatcattcgcgttggttggacctgtatcagcagggttccggtcttggaaatcaaaatgagggcactcaccaagatgcgttacgtcgtaacaacctgaaaaagcgggcttgacaacctggcctatcatacactggcaagtgatatgagaggtgatcaaatataccgagtagcataaatatcgctacatgtagtcacaacatgaaaacattctgacactgggaaagaccagaaacaatcgtgggatccaacgatggcaaaatgacgtttgggaatcaacgtgcccaatgccgaatcgatcacagttagtcaccgacgaaggtgcaattgaaaagaacacatagttagtatcctaaccacgacgctacaataattc

SEQ ID NO: 15953 - DNA, 276 bp, synthetic construct
  source 1..276: mol_type = other DNA
cgaggagtttggggatatacccggttttgcatttacaaaactacatcttacccgaataagtggggaagttcgtcttgtggattacaacacagatagatctccgtaagaaagagtatcaaacatgtttgaaactgttcttggagagtcctcaataaaggtggtatggacaacataaaattatgacatcgggaaagaccgaatattacttaattttgggtttacttttcagctcctttatcagcagaaaaccgtttgccgggtcgacggctaacgcac

SEQ ID NO: 15954 - DNA, 562 bp, synthetic construct; identical to SEQ ID NO: 188
  source 1..562: mol_type = other DNA

SEQ ID NO: 15955 - DNA, 280 bp, synthetic construct
  source 1..280: mol_type = other DNA
cgaggagttcggggatatacccggtttgcatttacaaaactacatctgccctgagtaatggggaagttcgtcttgtggattacaacacagatagatctccgcatgcacagaatcaaatacacttgaaactgtccttggagagtcctcaaacaaaagggttaaaccttataaaatacaaaactatgacattgggaaagactaaacaattatttaattatagggtttacttttcagctccttatcagcagaaaaccgtttgccgggttgacggctaaagcaa

SEQ ID NO: 15956 - DNA, 328 bp, synthetic construct; identical to SEQ ID NO: 1578
  source 1..328: mol_type = other DNA

SEQ ID NO: 15957 - DNA, 370 bp, synthetic construct; identical to SEQ ID NO: 1702
  source 1..370: mol_type = other DNA

SEQ ID NO: 15958 - DNA, 911 bp, synthetic construct; identical to SEQ ID NO: 237
  source 1..911: mol_type = other DNA

SEQ ID NO: 15959 - DNA, 982 bp, synthetic construct; identical to SEQ ID NO: 2564
  source 1..982: mol_type = other DNA

SEQ ID NO: 15960 - DNA, 341 bp, synthetic construct; identical to SEQ ID NO: 152
  source 1..341: mol_type = other DNA

SEQ ID NO: 15961 - DNA, 860 bp, synthetic construct; identical to SEQ ID NO: 2494
  source 1..860: mol_type = other DNA

SEQ ID NO: 15962 - DNA, 1000 bp, synthetic construct; identical to SEQ ID NO: 2647
  source 1..1000: mol_type = other DNA

SEQ ID NO: 15963 - DNA, 836 bp, synthetic construct; identical to SEQ ID NO: 2469
  source 1..836: mol_type = other DNA

SEQ ID NO: 15964 - DNA, 258 bp, synthetic construct
  source 1..258: mol_type = other DNA
ctcagtttaaagatttttctaaaattttatcaggacctcaaaagaaaatacagaaccaagggaatttatctattgaatttttaacaaaagaaaacgaacatttaaagaatagactaaaagatttagaaaatcgattcgagatcttaagtcttcgagtcttggcactagagtcatcatcagtaacacctcaagtagtagttccggataaagtagtatattgtaagccttcgactttagcgtggcacttaaataaagaac

SEQ ID NO: 15965 - DNA, 323 bp, synthetic construct; identical to SEQ ID NO: 1564
  source 1..323: mol_type = other DNA

SEQ ID NO: 15966 - DNA, 330 bp, synthetic construct; identical to SEQ ID NO: 1580
  source 1..330: mol_type = other DNA

SEQ ID NO: 15967 - DNA, 425 bp, synthetic construct; identical to SEQ ID NO: 1847
  source 1..425: mol_type = other DNA

SEQ ID NO: 15968 - DNA, 916 bp, synthetic construct; identical to SEQ ID NO: 2538
  source 1..916: mol_type = other DNA

SEQ ID NO: 15969 - DNA, 291 bp, synthetic construct
  source 1..291: mol_type = other DNA
gggtgccccgctcgtgaggacggagtcgacactaagaaaccgctatatcataccggagtgggatttaatggtgtcacagaagggattaccgtccgcgagtgtgggacatcgaaaccgcgtgagcagcgtatatcaatacggcaccctgcttgcgcaacaaaggaatttaggtgccacaacgcctccttgcccaacctcctgcgcgcgcttaatgagcgtgtatttaacgtggaggatgagcatgggggcgtcaagcccaccccacaggctgcccctggggaatgggctagg

SEQ ID NO: 15970 - DNA, 1000 bp, synthetic construct
  source 1..1000: mol_type = other DNA
tatcaaccctcgtacaaacgagaaagttgagcatccgggcctaagacacgaacagtcggcgataatgtctttaaaagttcagattgaatacaatcctttggttcgattttattcaaaagaaatagccgatattagtgatgcacctgcagatcaagtcacgatcgaaacagaggttattcaagagtggaataagttagaacgattgttggacacctttgtaactgatattaacgatatcaagattacacgagcgtgcaggcgcgaagctacaacccttgatgctctcacaaaaactcgagtctgtttttctcaaaatgacttggtcggttataaatcactattagacggattgaactcagcttctaatgatttgaaagattctacatctgacataagtagtctaaatatgggaatctgaagtgtaccgaacggttttcatatcgtatttaaatttaaagaaactaggagaactataatgacttcgaacaatgtcgagcttgatgatctatccgtacagcgtgtatcaagcagtatatcagagcttcgtggcgaccacctatctagtaagctatctgctggccatacaattcgtgactcaggtgagttacaccctaataccatacttactctcgcaaagaactcgactacaatagtcgttccttacgcaactgttccaagatatcctcttcgacgtgcatcggcgttatcagatctgacaatgaagaaaccatctttcttcaagcgcttgtcattgaaattcaagatctggaagaaattgaagcttttccattctcgaagaaaaatatgactgttcatacactacactaaagatcagtgcgaactgatattctacggtgttctattttacttatttgcttgtctggtggttatttaatttaaagaaactaggagatactcttactactttactcatctaacaatcattattcgtactttaaaaacttaaatcagttgtcccagacagaaatttgcaatcgtc

SEQ ID NO: 15971 - DNA, 256 bp, synthetic construct
  source 1..256: mol_type = other DNA
cggaatcgcgttttcaacccgaagtcccgggcttggcgcgagggcacccaaagctgcgaagtaatctttgggttcagtggccgggatatcccgccattcctattttgcactgttcgcagggccctttcctgcgcaactttgactttgcagattcttcctgcaagaattttctctcaacatttaattttgttcagctaacgctgttattttaattttgtccagctaacgctgttattttaactgtttgaccatcgcc

SEQ ID NO: 15972 - DNA, 813 bp, synthetic construct; identical to SEQ ID NO: 2448
  source 1..813: mol_type = other DNA

SEQ ID NO: 15973 - DNA, 490 bp, synthetic construct; identical to SEQ ID NO: 2010
  source 1..490: mol_type = other DNA

SEQ ID NO: 15974 - DNA, 416 bp, synthetic construct
  source 1..416: mol_type = other DNA
ctcagcaccaactgggctcttccagtataaaaaggggcccccctcgggcctggtacgggggaacagaaggaaaactgttcgcaatggaaaacccgggaccgctcgttagacggaggaaacatggcctaatggaagacgtttggaccttacgagggagcgcgcagatggacataattgtcccggtaccagcgattacggatttgtggagcaatgtacccttagctcttaagagacgcctggtatgagaggtggagtgctatttagcacaggaggcaggctcgagtgccacctttaagacgtagagatgcgttaataggtttgggcctgtgggtaatcgcgcgcaagagaccgaggtatcttttgcatgttaaatcatataccttactaataataaaaataataaaaataacagaaac

SEQ ID NO: 15975 - DNA, 391 bp, synthetic construct
  source 1..391: mol_type = other DNA
ccccagtgacctctatcaaatatctgtttagttgatgtctagggctattgagagactcattctgatcactgtgctaggctgccttctcttggaaatctttgactacatacagagaaataacaaggaaagtgaagtgactgttctcgggagaggtgactgtgttatatatacagggaaaaggttttgtgaggaagggaggaagttgagctgccctggtgtctatgaggatttcttctttgtaacaggtatcctgatttcaaaaggtttttcattggctgctattgcaggttctgtagcactgctagcatttgtttacgggaaaataacccgagagttgagaaccagcgaagtgatagacagacgactggacagggaagaagttgtgtaaagt

SEQ ID NO: 15976 - DNA, 392 bp, synthetic construct; identical to SEQ ID NO: 1761
  source 1..392: mol_type = other DNA

SEQ ID NO: 15977 - DNA, 782 bp, synthetic construct; identical to SEQ ID NO: 2414
  source 1..782: mol_type = other DNA

SEQ ID NO: 15978 - DNA, 832 bp, synthetic construct
  source 1..832: mol_type = other DNA
gcggggcttgctcgtagggtttgtggccattttggcccagccgtgtcgttaattagcttcgcgctttaattaaagtcccaggcctcagggaggaaatgccctgggggagacggcgtaggaccactgcaaacacggggatattccgcccctcgctcctggtccggggtgctgaagggagacaccctaacaagccgggcttattcttgacccctgcccgatgagcgcgggcagggcgcagcctgccggtcctgtgtaggagctggacctgaggtgaaggccgtgtcgagcgcgggtttaccaccgcgtggggttggccacccttaatcggcacagaaggggcccctctcccgcgcattcctaaggaatgtgactccagcacccaagccgcaaggcgtggtgtgttgggagggcctcgaaagaatggttacgatgtgacccagcactgcttgacaaatctgggcacacctagtagcaggagcacgtttccaagcccgccgacctctcacgtggactatcaaacatccatggtagctgttgacccatttccagtcatgtcggttgaggtggtttcttgagcgccaccttttggaaacaccaggatttagtcacctgactcggcgccgaacggttcgtccgatagttttggccgagtttgtgtggatacgtgctctgggtgtgggtacacctttgattattgcgtcattggttatcgctctgtacatagtttttctcgtcgtcccgaaacggctcacgacgacctgggtgaggactagatccgcactgcgatcgttgtagtgtgttcacgagctatcgcagctcaaagattgtagga

SEQ ID NO: 15979 - DNA, 300 bp, synthetic construct; identical to SEQ ID NO: 1486
  source 1..300: mol_type = other DNA

SEQ ID NO: 15980 - DNA, 429 bp, synthetic construct; identical to SEQ ID NO: 1862
  source 1..429: mol_type = other DNA

SEQ ID NO: 15981 - DNA, 335 bp, synthetic construct; identical to SEQ ID NO: 1603
  source 1..335: mol_type = other DNA

SEQ ID NO: 15982 - DNA, 327 bp, synthetic construct
  source 1..327: mol_type = other DNA
agaaagaaaaaacgtgtctccctagccatggattaaattcacggaccatggttagtgtggtgaaggcgataccgtgagtcgatccttaaccacccttcgactggtgaacctgtgggttggaagcccactgggggtggacaggtcgaagtgtaaaaaatccacaaaatttcctctaaaaatcaaagtgaagatgacgcattactcgaagtgatacgtaacagcgcagtgaaacagactcgggaaaactttgaacaggaggaggaattcactgtggcctccggtgttgcctttttggcggcactgaacgcccgatattctgactccgtg

SEQ ID NO: 15983 - DNA, 477 bp, synthetic construct; identical to SEQ ID NO: 1980
  source 1..477: mol_type = other DNA

SEQ ID NO: 15984 - DNA, 378 bp, synthetic construct; identical to SEQ ID NO: 1727
  source 1..378: mol_type = other DNA

SEQ ID NO: 15985 - DNA, 1000 bp, synthetic construct; identical to SEQ ID NO: 2648
  source 1..1000: mol_type = other DNA

SEQ ID NO: 15986 - DNA, 1000 bp, synthetic construct; identical to SEQ ID NO: 273
  source 1..1000: mol_type = other DNA

SEQ ID NO: 15987 - DNA, 1000 bp, synthetic construct; identical to SEQ ID NO: 2649
  source 1..1000: mol_type = other DNA

SEQ ID NO: 15988 - DNA, 342 bp, synthetic construct; identical to SEQ ID NO: 1627
  source 1..342: mol_type = other DNA

SEQ ID NO: 15989 - DNA, 799 bp, synthetic construct; identical to SEQ ID NO: 2431
  source 1..799: mol_type = other DNA

SEQ ID NO: 15990 - DNA, 277 bp, synthetic construct
  source 1..277: mol_type = other DNA
aaatgtcgcggaattggcctccgttggtgaaaaccaaaacggctatattgatggagcaaagactatcggtagcgcgatagacactagcttccttgatatagttgagaagcccggtgaaactagtactgcggtacgaaatgttgccaccgttgcatcgaatgctgaaacatgcaatcgatccaagaaagcaacatctgcaggttctcccaaggggaacaatgcacaacccggtaaaacgggttctgcgcctgctacccaacgcaaaaaacgccacaat

SEQ ID NO: 15991 - DNA, 858 bp, synthetic construct; identical to SEQ ID NO: 2491
  source 1..858: mol_type = other DNA

SEQ ID NO: 15992 - DNA, 985 bp, synthetic construct; identical to SEQ ID NO: 2567
  source 1..985: mol_type = other DNA

SEQ ID NO: 15993 - DNA, 963 bp, synthetic construct
  source 1..963: mol_type = other DNA
acttgtcggagttctgcactgcacgtaattcactcttcagcaattggaaggggtgctctgggcaagataacggcccggggtgagagtgacacaacccaatacgacgtatccggccaacctgccgccgcccaggggttgcacgcgttgaagggcccgcgtgtccgctgcgtcagcagcgagtgtccgccttattcttttgccaccttctcccggggtggtggaagcctggtgcgtggggacgggcccacctgaggtgaaggccagtcaggaggggggagatgggctccccctcgcgtccagccaacgcgcaacgtcctgagctacgagatcggcccggcccggggcttaattgtcaacagtggtcgcgtgctagcaatggcacgcggttgcaagccgatccttgcgatgtctacggaacctgaacgcgcggccgaaccgcgcgggcacgtacccgtggtcggacttacgaagctgtgagggaaggggaaaaggttcgagccagccgcaagtacccgtgacccttgagcttcggtcccccgcggcagtgccgccctatgtacagacgggaagtgcatgaaaacccctcgaggataaaacccgcactctggaggtggagtctgaagctgggcggcgcccgaccgggacgctgcgtgtgtccacgacaacggtccacgcgtcgcccgcttcggatggaagccatgagactgcggactaaaaatccctgaaaaccaaccaaaccccgcccgtcggcctgagccagtcaaaacgaccggccagaggaaccgcgggagggaccataaaccgtactctggaggtggagtccaggcggggagcgggccgcgagtcactcggcacactcggatggaaatgctgcggcatacgccaccaagtgtgcaggccccgccacggatggaagccatgagactacggccaaagggaaccccttgagtcgaattcgccacc

SEQ ID NO: 15994 - DNA, 269 bp, synthetic construct
  source 1..269: mol_type = other DNA
ccggtgccgtggtgagtgaatcgagcgccgatgcactccccacgactgctagcgttgttatccccagggtaagtaatgttatttcactttagttcaggctgggataagttttgcctgtgagcattttaccgtcgtccagtagggatctgcgcggcgggcaaccgagagatagcaccaggctagggaacatcagggctgccccaagttctctcggtgagcatgatgtgctaggtgccacatcatgtcttcctgcaccgcgcggtgggtaa

SEQ ID NO: 15995 - DNA, 258 bp, synthetic construct
  source 1..258: mol_type = other DNA
gatatagcgggagtaggcaagataaaagtaaaaggaggaactcctaatgtgaccctttcgtctcaaacctcagcaaattactacgctgactcgacaggtattcacttagatccgccgacagaccctaaaaggaagatctacctgtacgaagaaacctttgagcagactgttgaggtagaagctactgacgacagcggagtgataggtgctctaacctcctatcacgatcccagttcatacggagcaacctacgaacca

SEQ ID NO: 15996 - DNA, 1000 bp, synthetic construct; identical to SEQ ID NO: 2650
  source 1..1000: mol_type = other DNA

SEQ ID NO: 15997 - DNA, 774 bp, synthetic construct; identical to SEQ ID NO: 219
  source 1..774: mol_type = other DNA

SEQ ID NO: 15998 - DNA, 415 bp, synthetic construct; identical to SEQ ID NO: 1817
  source 1..415: mol_type = other DNA

SEQ ID NO: 15999 - DNA, 628 bp, synthetic construct; identical to SEQ ID NO: 2212
  source 1..628: mol_type = other DNA

SEQ ID NO: 16000 - DNA, 644 bp, synthetic construct; identical to SEQ ID NO: 2237
  source 1..644: mol_type = other DNA

SEQ ID NO: 16001 - DNA, 562 bp, synthetic construct; identical to SEQ ID NO: 2128
  source 1..562: mol_type = other DNA

SEQ ID NO: 16002 - DNA, 258 bp, synthetic construct
  source 1..258: mol_type = other DNA
gatatagcgggagtaggcaagataaaagtaaaaggaggaactcctaatgtgaccctttcgtcgcaaacctcagcaaattactatactgacccgacaggtattcacttagatccaccgacagaccccaaaaggaagatctacctgtacgaagaaacctttgagcagactgttgaggtagaagctactgacgacagcggagtgataggtgctctaacctcctatcatgaccccagttcatacggagcaacctacgagcca

SEQ ID NO: 16003 - DNA, 345 bp, synthetic construct; identical to SEQ ID NO: 1633
  source 1..345: mol_type = other DNA

SEQ ID NO: 16004 - DNA, 952 bp, synthetic construct; identical to SEQ ID NO: 2554
  source 1..952: mol_type = other DNA

SEQ ID NO: 16005 - DNA, 258 bp, synthetic construct
  source 1..258: mol_type = other DNA
gatatagcgggagtaggcaagataaaagtaaaaggaggaactcctaatgtgaccctttcgtcacaaacctcagcaaattactacactgactcgacaggaattcacttagatccgccgacagacccccaaaggaagatctacctgtacgaagagacctttgagcagactgttgaggtagaagcctctgacgacagcggagtgataggtgctctaacctcctatcacgaccctagttcatacggagcaacctacgagcca

SEQ ID NO: 16006 - DNA, 882 bp, synthetic construct; identical to SEQ ID NO: 2518
  source 1..882: mol_type = other DNA

SEQ ID NO: 16007 - DNA, 781 bp, synthetic construct; identical to SEQ ID NO: 2411
  source 1..781: mol_type = other DNA

SEQ ID NO: 16008 - DNA, 551 bp, synthetic construct; identical to SEQ ID NO: 2117
  source 1..551: mol_type = other DNA

SEQ ID NO: 16009 - DNA, 297 bp, synthetic construct
  source 1..297: mol_type = other DNA
ggggatggctatatagccatccccatcgaaaaccctttaccgtgtttgggaggtgcaaactcggacgcaaagaaggagcgtgttagcgtagctacgaatcctccccatgagaacagttacatttctgttcatatcggggacactccaccggagcctgtcgggaggtggagggatgaggagaaggaaaataggcctgctaggcaggaattgcgtcgcaaagcaattaaagactccgaagagaggggtcgcttggaggcggagggaaacaatgatggtatcgaagaacacaaagccatc

SEQ ID NO: 16010 - DNA, 334 bp, synthetic construct; identical to SEQ ID NO: 1600
  source 1..334: mol_type = other DNA

SEQ ID NO: 16011 - DNA, 294 bp, synthetic construct
  source 1..294: mol_type = other DNA
ctccgcataggacgacggcaggactatcatcaaaagggtgactataccctccctactgcgaaaacatttaatgcgtacgttcactatcctattgatcccgtcaaccgaccgcctgccaaaccgccaaagttaccgatttacagcactaatgaaatcttttctgctgtatatcatgttgacgaggcggcggttgaccctgtgcccgccgagacaattgaacctgaaccaccgcctttaccgttttcgcctgccgccgtccatggatctgtgggaaatctacagatctactatgac

SEQ ID NO: 16012 - DNA, 384 bp, synthetic construct; identical to SEQ ID NO: 1742
  source 1..384: mol_type = other DNA

SEQ ID NO: 16013 - DNA, 402 bp, synthetic construct; identical to SEQ ID NO: 1788
  source 1..402: mol_type = other DNA

SEQ ID NO: 16014 - DNA, 308 bp, synthetic construct; identical to SEQ ID NO: 1510
  source 1..308: mol_type = other DNA

SEQ ID NO: 16015 - DNA, 282 bp, synthetic construct
  source 1..282: mol_type = other DNA
gagccggccctgaaatattcgcaacagtcaatcacgatatttcgcaacaatttttgtggtccatactggtctgacgggaaattccagcagtcagtatccgacccgcaactaccatcagcaaacgagttcgacgaaacctgtagagttcacgacattgcaatcgcaaagtccaaaacgaacgcagatcttagacgagcagacaaagtattttacgagcagaacatcaacaagggcaagttacgtagtgcagcggcaatccttgttaaacacatcaacccaatc

SEQ ID NO: 16016 - DNA, 734 bp, synthetic construct; identical to SEQ ID NO: 2355
  source 1..734: mol_type = other DNA

SEQ ID NO: 16017 - DNA, 1000 bp, synthetic construct; identical to SEQ ID NO: 2651
  source 1..1000: mol_type = other DNA

SEQ ID NO: 16018 - DNA, 469 bp, synthetic construct; identical to SEQ ID NO: 1962
  source 1..469: mol_type = other DNA

SEQ ID NO: 16019 - DNA, 258 bp, synthetic construct
  source 1..258: mol_type = other DNA
gatatagcgggagtaggcaagataaaagtaaaaggaggaactcctaatgtgaccctttcgtctcaaacctcagcaaattactacgctgactcgacaggtattcacttagatccgccgacagaccctaaaaggaagatctacctgtacgaagaaacctttgagcagactgttgaggtagaagctactgacgacagcggagtgataggtgctctaacctcctatcatgaccccagttcatacggagcaacctacgaacca

SEQ ID NO: 16020 - DNA, 1000 bp, synthetic construct; identical to SEQ ID NO: 274
  source 1..1000: mol_type = other DNA

SEQ ID NO: 16021 - DNA, 335 bp, synthetic construct; identical to SEQ ID NO: 1604
  source 1..335: mol_type = other DNA

SEQ ID NO: 16022 - DNA, 840 bp, synthetic construct; identical to SEQ ID NO: 2472
  source 1..840: mol_type = other DNA

SEQ ID NO: 16023 - DNA, 295 bp, synthetic construct
  source 1..295: mol_type = other DNA
gcccccctacagttcaatctccattgatgtaaaattgatatataagattgtcttataaaagatacaatacaatttaatcatctgattaacttagttggtgctcagtaagttttaaagagaagtgattttacttcggtgatttgggaccagctgaattatagtggcaaataaatcttactggtaaagaaagctcaggtttgttctgataaagagcaggtcaagtagacattattaactgactgtctagctacaatcacatttaagtgcaagcctaactaactggaaatttaaaata

SEQ ID NO: 16024 - DNA, 395 bp, synthetic construct; identical to SEQ ID NO: 1768
  source 1..395: mol_type = other DNA

SEQ ID NO: 16025 - DNA, 280 bp, synthetic construct
  source 1..280: mol_type = other DNA
aagccggcgctaatttatcaattaggacaagatagattaccacacgaatttttgcggggcgtactggtcagacggtcaatttcaaccatctgtcgcatatcccaccaaaccagcacttaacgaatttgacgaaacgtgtagatcacacgattcagagaacgcgttagcaacaactaactcagaactacgagaatcagatttaaagttttacgaggccaatatcaacaaaggtctgaaacgagctatagcagccaacctcgtatattacattaacccaatc

SEQ ID NO: 16026 - DNA, 375 bp, synthetic construct; identical to SEQ ID NO: 1719
  source 1..375: mol_type = other DNA

SEQ ID NO: 16027 - DNA, 267 bp, synthetic construct
  source 1..267: mol_type = other DNA
ttggcaacaggtattgcataccggcggtttggctcccgccccttttgtagccgtgaaagtttcacaatcaatgcgctttggcgtcttcccaatagcgcgaaacctctgccgtggtacgcccacggtctcaattttgcgtaaaaatagcataatttactcttgagcgatcttcggtacgcttggcgtcttcggcacgtctctgaagagcgcggcgggtgacaatttcctttcgattgtcgaacgttgtctgttgcgttgggcattacc

SEQ ID NO: 16028 - DNA, 287 bp, synthetic construct
  source 1..287: mol_type = other DNA
gttgggacggttctcgcttggttaattttgaactccttaatgctaccaaggttaaggccgtcactgattcaccatacatttcgtttaatcgtcattccattcttattcaatcatatcatcatcatcagcttgtcaaggatatagacatttcctcctatgtgttaaaatgtgccgtcactgtcgtacagggcgtacctggtgccggtaagactgagcacatattgcgttctattgattattctaaaaagactcttctgttgacgttgaataaggttgcgaaggaggat

SEQ ID NO: 16029 - DNA, 274 bp, synthetic construct
  source 1..274: mol_type = other DNA
gaccaacgttcaagcaaaaagtaatgctctcacgcttttgaatgtggttgttggttccctgacccggggagcccggggcgggggagttcagctcagaccgaagggcactcgcgagcaacagttgctgcgcgagtatgcctcatatctcggtttggctaagacgaactctaagaagaattgttggaagttccaagacggatttgtctctggaccagaggcggctttcttttcgagagcctacctggaagtccttttggactacagcgtcaagttc

SEQ ID NO: 16030 - DNA, 297 bp, synthetic construct
  source 1..297: mol_type = other DNA
tctcctccattcgacacaaaattgggtctatggtgttaaatctcccaaaacggtgtgtgcgtcgtacccgagtaatcaactcatgtctagcatcaaatctgaaattccgctggaccgctgtgtgtggttacgcttcgtacacttaatacttccgtgctaagtgcgcttaacgtccccttgtacacgcggggatgtccgctaaatgccgacagactgcacgggaagcctacggtaacgtgggtcaccacagatgtacagtcgcgcgattctcagtctcgcgggatccaatactaagac

SEQ ID NO: 16031 - DNA, 434 bp, synthetic construct
  source 1..434: mol_type = other DNA
gcgaaagctagttactcacaggtgctgaaaggtacccagcctgctgaaaagcaagccgcccgaaagggcaaacaatccgcccgaaagggcaagaaatcagccccgttggaagtggctttgggtaagttgttacccggagtgcatttggggtggttgggtaaggttgtggctgaattggccaagcccagccctgggtctgcggaggcatcgcaacctccgttgttcagagcgctcaccgctgctctgaaggtgattggcggccaggacatcgatgctgccaatgcgtacaggaacagctctgccgtgaaagagtacgtgggaaaggtttttccccgtccgggaaacgccaagcagagcgaggggccggcaacgaacgtggctccgttgaacagcaagcaacgtcgggcgctcaagcgtgccgacaaacaggccgc

SEQ ID NO: 16032 - DNA, 429 bp, synthetic construct; identical to SEQ ID NO: 1863
  source 1..429: mol_type = other DNA

SEQ ID NO: 16033 - DNA, 258 bp, synthetic construct
  source 1..258: mol_type = other DNA
cccggtgtccgttgagttaagccttctaactgcgctgtattaactgcatagttgttataaggttgttatcaacagctgccagtggtttctactgagagtcggagtcttctggctatcttatgtcagttgtggttgtgtttttatttctgatttggtgcttcgccaaatatctcttgagtgacatcaagaattctatcctttccctccttctactcagcttttctcttcgtctaggagttgcgattctgcagatccaaa

SEQ ID NO: 16034 - DNA, 667 bp, synthetic construct; identical to SEQ ID NO: 206
  source 1..667: mol_type = other DNA

SEQ ID NO: 16035 - DNA, 370 bp, synthetic construct; identical to SEQ ID NO: 157
  source 1..370: mol_type = other DNA

SEQ ID NO: 16036 - DNA, 461 bp, synthetic construct; identical to SEQ ID NO: 1944
  source 1..461: mol_type = other DNA

SEQ ID NO: 16037 - DNA, 900 bp, synthetic construct; identical to SEQ ID NO: 2525
  source 1..900: mol_type = other DNA

SEQ ID NO: 16038 - DNA, 386 bp, synthetic construct; identical to SEQ ID NO: 161
  source 1..386: mol_type = other DNA

SEQ ID NO: 16039 - DNA, 444 bp, synthetic construct; identical to SEQ ID NO: 1901
  source 1..444: mol_type = other DNA

SEQ ID NO: 16040 - DNA, 681 bp, synthetic construct; identical to SEQ ID NO: 209
  source 1..681: mol_type = other DNA

SEQ ID NO: 16041 - DNA, 410 bp, synthetic construct; identical to SEQ ID NO: 1802
  source 1..410: mol_type = other DNA

SEQ ID NO: 16042 - DNA, 261 bp, synthetic construct
  source 1..261: mol_type = other DNA
ctggggggccataagcccctccagtctttcagactattgtctgatttgctcacactcgctcatatccggagacggcgagtgagtgcggagtgataacgaacatgtaagtctccgtgaggagtctacgtggatagtcgtacccgttcatctggcggaatctctagcgaagttactcgtttcattcatggcgcccagtcgggctctgtgaatgcttatgagtacatcgtccgtaacaccgaccctgtatttaggttaggtggt

SEQ ID NO: 16043 - DNA, 404 bp, synthetic construct; identical to SEQ ID NO: 1792
  source 1..404: mol_type = other DNA

SEQ ID NO: 16044 - DNA, 362 bp, synthetic construct; identical to SEQ ID NO: 1680
  source 1..362: mol_type = other DNA

SEQ ID NO: 16045 - DNA, 1000 bp, synthetic construct; identical to SEQ ID NO: 2652
  source 1..1000: mol_type = other DNA

SEQ ID NO: 16046 - DNA, 575 bp, synthetic construct; identical to SEQ ID NO: 2143
  source 1..575: mol_type = other DNA

SEQ ID NO: 16047 - DNA, 314 bp, synthetic construct; identical to SEQ ID NO: 1530
  source 1..314: mol_type = other DNA

SEQ ID NO: 16048 - DNA, 288 bp, synthetic construct
  source 1..288: mol_type = other DNA
ctccatgaaaattggtcctttgaaattgcagataagtctagtttatattaggcttaactgagtttcttagatagccagtttccaatgaaagttattccctggtacttgggttaaagatcacccataattagttgggttacggtgagtggatccttaatgtacgttaagcatatagcccgtaacctcggccgagtgggaaacctctacaatctctcttgtccataagagagattgcatgtttcctagacgaccgaggaccattatttgaggctgtgttaaaacacccct

SEQ ID NO: 16049 - DNA, 282 bp, synthetic construct
  source 1..282: mol_type = other DNA
aaacgcattgaaatcttgccttgcgcctgcgtcaacgtcgtacctattgacctaacgagacctagcttggcaattcgaacggatttcagtgctgtacacaagcagaagaactacattaaagtagttcatatagaaggactgggactatcagaacagttcttctacaatagttgttcctgtaacgagactgacggtctaaaacgccgtcatgttctcggagatatagaagggtttgatccaaagaacaaacatatagatctacttcggaaagagatagcatca

SEQ ID NO: 16050 - DNA, 360 bp, synthetic construct; identical to SEQ ID NO: 1676
  source 1..360: mol_type = other DNA

SEQ ID NO: 16051 - DNA, 332 bp, synthetic construct; identical to SEQ ID NO: 1589
  source 1..332: mol_type = other DNA

SEQ ID NO: 16052 - DNA, 526 bp, synthetic construct; identical to SEQ ID NO: 2080
  source 1..526: mol_type = other DNA

SEQ ID NO: 16053 - DNA, 1000 bp, synthetic construct; identical to SEQ ID NO: 275
  source 1..1000: mol_type = other DNA

SEQ ID NO: 16054 - DNA, 1000 bp, synthetic construct
  source 1..1000: mol_type = other DNA
aatctgtagccgaagttccgtcgcatttatcggagagttttaacaggatacggttatcaatctttgtggctctggacgcaacttttgataagagcaaagtcacttagaacaactagccaagagcagtcgagtcacagggctaacgcgagtgacgttggatgtgtaacgtacatcaattgagaaacgaacgtcactcaaaaaacctacggtaaaggccgtatcagacgacgcctcaaccactgacaaggcggacacggccggcccgaaatgttcaacaattgaatccttctcgggggcttgagccgttgatgggcggacccagctgtggcgatcgcatctctgattggtagagtgccaagcggcacccgcaaccactgaccgtctgatccgaggagcccaagcagcacccgcaaccactgaccgtctggtctgcggaggccaagcggcacccagcaatcctgaaggcctgttgcggcaacgagtgcactcagccaatcagagacacaatcctgacggctggacacgcctactcacggctcaaaccgccactcgtggaagattcgattgtcgaatctttcaactgcaattgtaccgttaggcactggggctaaggtctgttcggtacgtaatgtaccgaaagaaagaaaagtagccttttccttccttcggccgaaaatgattattttgccaaaattttaatcgcccagtacaagttacgatcccgggaccccttgctccgaaagcggatgtccaagccactggactacggggcgaccgtctttcgaattattaatttaccgattctactcagttcgtgtcttttaacacggcactcggtgtaagttcccctggtgatgtttatgcgcctttgagtgttgccgataagcgaatcttccgtgcgtttaatccacctttcgagagcggaaatggcgatctgacatttgttagaaatgcaatcatagaaagggctgagttggcacgtgtttctgacgccgtcgtc

SEQ ID NO: 16055 - DNA, 945 bp, synthetic construct; identical to SEQ ID NO: 2549
  source 1..945: mol_type = other DNA

SEQ ID NO: 16056 - DNA, 268 bp, synthetic construct
  source 1..268: mol_type = other DNA
gccttgccgcgtaagcggcaaggtagggttcctggattgtcaatcccggatcccaaaggacttttggaaaagtccctatcgttggaatgtttgttgaaatagatgggttcccccacctatcgttattttcaactcagtctcttcatcgatagagaatccctctttcttggcctagttagccaaggaggagtatccccatacttcagaacaattaaccacgtctccgatccggaaaaagatcggaagcgacggtaggcgtcaacctacc

SEQ ID NO: 16057 - DNA, 267 bp, synthetic construct
  source 1..267: mol_type = other DNA
ggggtcggcacgagggagccaagcgtatgtagtccatctgtatgcccacctgtctacaaaccaatcaggttgggttgctcggtcgtacgcgttcctccccaccagtgccaagatgataagcggtccatcacggtttatactcctcccgttgatggattataccgcccgttcgcccatcgcgggtgcacatgcaatgaacttcttgctatacgcaatcgagtaattggcgatgtacctgcaccagaaaggagtggtctctctcggctg

SEQ ID NO: 16058 - DNA, 324 bp, synthetic construct; identical to SEQ ID NO: 1566
  source 1..324: mol_type = other DNA

SEQ ID NO: 16059 - DNA, 337 bp, synthetic construct; identical to SEQ ID NO: 1615
  source 1..337: mol_type = other DNA

SEQ ID NO: 16060 - DNA, 660 bp, synthetic construct; identical to SEQ ID NO: 203
  source 1..660: mol_type = other DNA

SEQ ID NO: 16061 - DNA, 332 bp, synthetic construct
  source 1..332: mol_type = other DNA
acggcctctaagaggaatatcctctccggctctcgccggtcacctatcttacgatggtgatatcccataaccagcaactataggagagaagatcatgaaagacaagagccttgcggagattgctgtatcttcgccatattttgacgaatacgacatcaatctctacgtcgcaatgctcgaaatctctcttggtctcatcgaacctacagacgctgtttgctcataccattatggttgtgtgctcgcagctgctgagttgttgggttttgactggtccaaccagttgaaacttctccccagtgtcccgtccgaccctcttcacggagggttcc

SEQ ID NO: 16062 - DNA, 253 bp, synthetic construct
  source 1..253: mol_type = other DNA
ccatgtggttttcgaaggttatcaagatgctcctcatttcgaaagagatgggacatcttcccttcgttgcaatttgggtaggtgctattatggcgtctacctatatgattgcctctggtttcatactggaatcagatgcagctcaaattgcagcggaggtccgtgacttactgggtttccccagcgagtaagcctgtcggtaccctaatgatggggtatcgaatcttgttttcttgttccaaaggaaaagaat

SEQ ID NO: 16063 - DNA, 378 bp, synthetic construct; identical to SEQ ID NO: 1728
  source 1..378: mol_type = other DNA

SEQ ID NO: 16064 - DNA, 357 bp, synthetic construct; identical to SEQ ID NO: 1667
  source 1..357: mol_type = other DNA

SEQ ID NO: 16065 - DNA, 390 bp, synthetic construct; identical to SEQ ID NO: 1755
  source 1..390: mol_type = other DNA

SEQ ID NO: 16066 - DNA, 250 bp, synthetic construct
  source 1..250: mol_type = other DNA
ggagcgtttaccgtgccgacacgcctgccgactgtgtcaccgttggattctggccttccttcggctagtgggcacgttaattgtacacgattaggcttgaggttgacctgaagctctcagggtcctgcccgtagctggcagtagatgaccgtataatccgtaagagcaaatccccttcttagtgtgctcctttttgtatgaattgccggactgatcttgcctatgactatgcctgaaattgataaaatat

SEQ ID NO: 16067 - DNA, 1000 bp, synthetic construct; identical to SEQ ID NO: 2653
  source 1..1000: mol_type = other DNA

SEQ ID NO: 16068 - DNA, 1000 bp, synthetic construct; identical to SEQ ID NO: 2654
  source 1..1000: mol_type = other DNA

SEQ ID NO: 16069 - DNA, 331 bp, synthetic construct; identical to SEQ ID NO: 1585
  source 1..331: mol_type = other DNA

SEQ ID NO: 16070 - DNA, 347 bp, synthetic construct; identical to SEQ ID NO: 1638
  source 1..347: mol_type = other DNA

SEQ ID NO: 16071 - DNA, 887 bp, synthetic construct; identical to SEQ ID NO: 2520
  source 1..887: mol_type = other DNA

SEQ ID NO: 16072 - DNA, 624 bp, synthetic construct; identical to SEQ ID NO: 2207
  source 1..624: mol_type = other DNA

SEQ ID NO: 16073 - DNA, 256 bp, synthetic construct
  source 1..256: mol_type = other DNA
gggccccctagagtagcaaggcacagccgcctacacagtttcacacctgtgctcttagcagtgcgtcgacatggccacaatggctcgggggtgaacagcccggcgaatgtcatcagtgggttcgatccagtaattgcccaaaatcctttacagttaggtgctaaccaaaatgccaagagactgcacggcgcacccatttaggtttggatcggatgaacagtccctttatgtatgaggcatccactacaatacaaaa

SEQ ID NO: 16074 - DNA, 335 bp, synthetic construct; identical to SEQ ID NO: 1605
  source 1..335: mol_type = other DNA

SEQ ID NO: 16075 - DNA, 299 bp, synthetic construct
  source 1..299: mol_type = other DNA
gatctcccccgaaggggttgggtctgacttgccacaacggagtaccttgtgatatgcgcatagctgattttaacatcaaccatgcgggtatcgctcgcgccatcgttcttacggatgatggtgacttcgttgctctcatccaccttccagtaatggagatggaggatatggtaagacagctcagcggtaagattgccgctgggttggaacaggcgttgcgaaacgccttggtcgctccgtgtggggcgaaccttaactaagactgtcggaggtcttcgctcctccgcaaggaggaacga

SEQ ID NO: 16076 - DNA, 257 bp, synthetic construct
  source 1..257: mol_type = other DNA
ttcgttgatcactttgtcattgtgttggttataacacacgggtgcaccgttaagcactccaccattgcatttggtaaggttaacatgcagcttggcatcgttgctggggccccactcataattggggactggtgtgattcccaggtctgaatccggtgtatgagagtaaacttcagctcttaccattggtattaagtgggtcgtttgttgatacgtgacaacacttgcagcttggctgcactcacacaacactcacc

SEQ ID NO: 16077 - DNA, 274 bp, synthetic construct
  source 1..274: mol_type = other DNA
cgagagtttccagctttgctgccttggtgagtttgcaccattgatcctttactacggactgtcggaaattggggcgggaaggtgagttgctgcacttctccttggttaacacccacgctcgaaaggcggaggtcccataacacacgtttcttaatttcccattcatccattcctggcgtgcggaaacctaagtcctgttcgtagtctttggttggcgggttccggcgttgccggttgggttcttacagcaacattcgcaactacgttaaacaac

SEQ ID NO: 16078 - DNA, 366 bp, synthetic construct; identical to SEQ ID NO: 1690
  source 1..366: mol_type = other DNA

SEQ ID NO: 16079 - DNA, 350 bp, synthetic construct; identical to SEQ ID NO: 1647
  source 1..350: mol_type = other DNA

SEQ ID NO: 16080 - DNA, 516 bp, synthetic construct; identical to SEQ ID NO: 2064
  source 1..516: mol_type = other DNA

SEQ ID NO: 16081 - DNA, 258 bp, synthetic construct
  source 1..258: mol_type = other DNA
gctcttccgatctggccccctttgggggccccacggagattcgtctcctttcccgaataactgaaggagtgaactgtggtacgtagacgcacttattcccttccaagtactagcggaacttatacctgggatttatatcctggtaaagtttatactactactgcgaaaggcgacagtggccaatgcgatgatatcgcaaataaccctggcgggaacaacgtttttgacctcattcatgagtcgggaacctacacacca

SEQ ID NO: 16082 - DNA, 665 bp, synthetic construct
  source 1..665: mol_type = other DNA
atacgaaattggcacaccgcttagtcgttatgctacactgcagaagacggcttcgccaaagatcaggcgacatgtcgaggaagcagcggctgatatatcggaaggaaaattgccaccatcaatagctggtggcccgcgtccccggtagccttgcagcattaagatctaggcaagattatagccatggaatggatagttatttaaatagactaagacaccaaaatccatttctagtgtagttcatgcctcacaaaattacaatacagattcacataacaaatacacatataatttctaatttcataatgttccataaatgtataaaataaatgtataataaatgtataattagtttcattgttggaggtcttggatttaagaccaggtggtgaagcttgtcctgcggtttcttagaaatttaagctagtagaactagcgccgcaatagccggtccgattggatatgcattggttggatagtttaccagctactgtttgggcacgccccatgctcacttggcgagggattcaaccagcgggacaccccgtgctatttagcagaagctttgagtgtttgctggatgcaggaaatgctcgggtgctttggagattaccatcgagcagtggttctactccgagataaacaaagggctcagaacgaatttt

SEQ ID NO: 16083 - DNA, 407 bp, synthetic construct; identical to SEQ ID NO: 1798
  source 1..407: mol_type = other DNA

SEQ ID NO: 16084 - DNA, 1000 bp, synthetic construct; identical to SEQ ID NO: 2655
  source 1..1000: mol_type = other DNA

SEQ ID NO: 16085 - DNA, 268 bp, synthetic construct
  source 1..268: mol_type = other DNA
cgggtttcaatatatcccaggcaaccatggtggaggtgcttaccaccatgagtttgagcaactggattggctcaagtacaagcattttagcaattcgcaggtaactgttacctgccaactacttgagagcctaggggcaaatcacctctttgtgtacacccgtggcagacaactgagccctagagtaaggacctttgagaaagatacttttgtcatactccctgccgtcttccaccccacctgccgcaatcaaagcgagcccatcaag

SEQ ID NO: 16086 - DNA, 439 bp, synthetic construct; identical to SEQ ID NO: 1888
  source 1..439: mol_type = other DNA

SEQ ID NO: 16087 - DNA, 753 bp, synthetic construct
  source 1..753: mol_type = other DNA
ttatgtccactcctgacggcactgaatatcagcatccatacaacatctggaaagccgagggttgcattgtaggctccggtggtgctgccgtctacgcccgagtttatcgcgggccttcaatggacgtctattatgcctatcccgcttctggcacttatcatagtgatgatccacaccgcctcaaacgatcagaccaattcgaaaatcttcgcctcagcagtggcaacattgccagactctcttacaattctgtcaagattcaaactacttctggtgacaacattcttgattgtcctcgagatccatttgaaagagcagtcgcgaaatgtggtagcggtgtccgtgatctaaagttcttgcccacattatcatcatacattatatctaaattaaccatgcacgatttggaaattaacaacgcacaagacatcttagaattagcaaacatcatgtgtgagcgcttcgcgtttgacttctattcacactcccatcttgaatatgatcccactagtatcaacatctttactaggtgtcgccgtcatgccatgttgctagctcgtgctatccgacataccttagcacgcaatttgacttgctcaatcattaatcgcccgatcctacggcaatttacaccttgggcttttaagagcatcacgatgcctgcttacatcaagcatcgacgtgcacgtcacatcgacttgagacttgcttctgagaaacccaagccctttcgtgacgggcgcccgatacttg

SEQ ID NO: 16088 - DNA, 482 bp, synthetic construct; identical to SEQ ID NO: 1988
  source 1..482: mol_type = other DNA

SEQ ID NO: 16089 - DNA, 287 bp, synthetic construct
  source 1..287: mol_type = other DNA
tactactacctaacttttaaggagataatcatggatacgaagtataatattactaatgttgtcaggaattctatttcgactctaatgtcgagattagatcctggctccaaaatttatattatattagtaaccattatgaatacgaagtataatattaagatttatattatattagtactctttcttatctctcttatacttggtagtagcattctagcagatattctgttagaacagcttttgcaagctgacggtgtagttcgccttttacctctcaaggaggtaat

SEQ ID NO: 16090 - DNA, 606 bp, synthetic construct; identical to SEQ ID NO: 2181
  source 1..606: mol_type = other DNA

SEQ ID NO: 16091 - DNA, 1000 bp, synthetic construct; identical to SEQ ID NO: 2656
  source 1..1000: mol_type = other DNA

SEQ ID NO: 16092 - DNA, 753 bp, synthetic construct
  source 1..753: mol_type = other DNA
ttatgtctactcccgacggcactgaatatcagcacccgtacaacgtctggaaagctgaaggttgtattatcggctccggtggcgctgccgtctacgcccgagtctatcgcgggccttcaatggatgtttactacgcttaccccgcttcaggcacttatcatagtgatgatccgcaccgcctcaaacgatccgaccaattcgaaaatcttcgccttagtagtggcaatatcgccagactctctttcaaatcagtcaagatccaaaccacctccggtgacatcattctcgattgccctcgtgatccgttcgaaagagcagtcgctaagtgtggcagcggtgttcgtgatctgaagttcctgcccaccttatcctcatatatcatatctaaactcaccatgcacgacttggaaattaataacgcacaagacatcctagagttagctaacatcatgtgtgaacgcttcgcgtttgacttctattcccactcccatcttgagtatgatcccactagcattaacatcttcaccaggcttcgtcgccatgccatgttatttgctcgtgctatccgccataccctagcacgtaacttaacatgctcgatcatcaatcgccccatccttcggcaatttacaccttgggcgtttaagagcattaccatgccagcatacattaagcaccgacgcgcacgtcacattgacttgaggcttgcttctgacaaacccaagccctttcgtgacgggcgcccgatacttg

SEQ ID NO: 16093 - DNA, 753 bp, synthetic construct
  source 1..753: mol_type = other DNA
tcatgtccacccctgacggcactgaatatcagcacccatacaacatttggaaagctgaaggttgtatcataggatccggtggtgctgccgtctatgcccgagtctatcgtgggccttcaatggatgtttactacgcctatcccgcttctggcacttatcatagtgatgatccacaccgcctaaaacgctcagaccaattcgagaatctccgccttagtagtggcaacattgctagactttccttcaaatctgtcaagattcaaaccacttccggtgacaccatcctcgattgccctcgcgatccctttgaaagagcagttgccaaatgcggtagcggtgttcgtgatctgaagttcttacccacgctatcttcatatatcatatccaaattgaccatgcacgatttagagattaacaacgcacaagacatcttagaattagcaaacatcatgtgtgagcgcttcgcttttgacttctactcccattcccatcttgagtatgatcccaccaacataaacatctttactaggtgccgtcgtcatgccatgctgctggcccgcgctatccgccacactctagcgcgcaatataacatgttcgatcataaatcgtccgatcttacggcagtttacaccttgggcatttaaaagcatcaccatgcctgcttacatcaagcaccgacgcgcacgtcacatcgacttaagacttgcgtctgacaagcctaagccctttcgtgacgggcgcccgatacttg

SEQ ID NO: 16094 - DNA, 753 bp, synthetic construct
  source 1..753: mol_type = other DNA
tcatgtccacccctgacggcactgaatatcagcacccatacaacatctggaaagccgaaggttgtatcataggatccggtggtgctgccgtctatgcccgagtctatcgtgggccctcaatggatgtttactacgcctatcccgcttctggcacttatcatagtgatgatccacaccgcctaaaacgctcagaccaattcgagaatctccgccttagtagtggcaacattgctagactttccttcaaatctgtcaagattcaaaccacttccggtgacactatcctagattgccctcgcgatccttttgaaagagctgttgccaaatgcggtagcggtgttcgtgatctgaagttcttacccacgctatcttcatacatcatatccaaattaaccatgcacgatttagagattaataacgcacaagacatcttagagttagcaaacatcatgtgtgagcgcttcgcttttgacttctactcccactcccatcttgagtatgatcccaccaacataaacatctttactaggtgtcgtcgtcatgccatgctgctggctcgcgctatccgccacactctagcgcgcaatataacatgttcgatcataaatcgtccgatcttacggcagtttacaccttgggcatttaaaagcattaccatgcctgcttacatcaagcaccgacgcgcacgtcacatcgacttaagacttgcgtctgacaagcctaagccctttcgtgacgggcgcccgatacttg

SEQ ID NO: 16095 - DNA, 1000 bp, synthetic construct; identical to SEQ ID NO: 276
  source 1..1000: mol_type = other DNA

SEQ ID NO: 16096 - DNA, 281 bp, synthetic construct
  source 1..281: mol_type = other DNA
tgacgcgtaatacaattacacatcatactgcggggggtcgtgccccccagttgtcgaaagacaggcgacctcgtcgtgtgctgagaagcacaccaacaagcgctgaccttcacgtactgttacctgaactggtttgggatccagttcaggtagcaaggttgagtgctaagggatgttggcgtaaagccaacgacgcactaattgattccttccaactcttggggtacaagttcgagaacattctctgtcccgttcctcctagctcttcagtccctgaactg

SEQ ID NO: 16097 - DNA, 585 bp, synthetic construct; identical to SEQ ID NO: 2154
  source 1..585: mol_type = other DNA

SEQ ID NO: 16098 - DNA, 404 bp, synthetic construct
  source 1..404: mol_type = other DNA
tttatgactaacattacagttaacagtaaaactttcaaagaagttgctgaatacccagatagaaccgaatattctaattcggctgttgcgaccacgtcgccagagtcaatttctattacacaaaagtggaataagaaacctaattctaaaagatcaactacactgacatgcaggaaagttgttccgtataaaaacgaaaatggcgttgatgttgtcgaagttattcaagcatcaatccgcttaactcacctaccaggtcgtttagctaacgacaagctggagactatacagaatctttttaaagatctattagctattgcatcaaactctgatgttcaagtgtcgctagttgccggtgagcataatttgactctttcaatttagtaaaacttaaaggatttata

SEQ ID NO: 16099 - DNA, 293 bp, synthetic construct
  source 1..293: mol_type = other DNA
ctccatgcaccacgaacgggccgcaagcgaccttacgtgattgtgcatgaagttgtcgatcccaccttggtggggttttgagcggctgacgccgctcggtcctatgtaccttaactctaggagactcacatgtcgaccatcgatcgtctggttttcaacgatttcttcgaagtttacgaagaagcaggttcaaaagacctgtacgtaggagtaaatttctccgaatacgtttgttcgccagatgagctacgggcgttgtatgagtttctgaagagtcggtatgaaccggagct

SEQ ID NO: 16100 - DNA, 856 bp, synthetic construct; identical to SEQ ID NO: 2490
  source 1..856: mol_type = other DNA

SEQ ID NO: 16101 - DNA, 753 bp, synthetic construct
  source 1..753: mol_type = other DNA
ttatgtccactcctgacggcactgaatatcagcatccatacaacatctggaaagccgagggttgtattgtaggctcaggtggtgccgccgtctacgcccgagtttaccgcgggccttcaatggacgtttactatgcctatcccgcttctggcacctatcatagtgatgatccacaccgcctcaaacgatcagaccaattcgaaaatcttcgccttagtagtggcaacattgccagactctcttacaattcagtcaagattcaaacaacttctggtgacaacattcttgattgtcctcgagatccatttgaaagagcagtcgcgaaatgtggtagcggtgtccgcgatctaaagttcttgcccacattatcatcatatattatatctaaattaactatgcacgatttagaaattaacaacgcacaagacatcttagaattagcaaacatcatgtgtgagcgctttgcgtttgacttctattcacactcccatcttgaatatgatcccactagtatcaacatctttactaggtgccgccgtcatgccatgttgctagctcgtgctatccgacatactttagcacgtaatttgacttgctcaatcattaatcgcccaatcctacggcaatttacaccttgggcttttaagagtatcacgatgcctgcttacatcaagcatcgacgtgcacgtcacatcgacttgagacttgcttctgagaaacccaagccctttcgtgacgggcgcccgatacttg

SEQ ID NO: 16102 - DNA, 606 bp, synthetic construct; identical to SEQ ID NO: 2182
  source 1..606: mol_type = other DNA

SEQ ID NO: 16103 - DNA, 319 bp, synthetic construct; identical to SEQ ID NO: 1545
  source 1..319: mol_type = other DNA

SEQ ID NO: 16104 - DNA, 500 bp, synthetic construct
  source 1..500: mol_type = other DNA
cgaccgcccaaatgagttttcattaaaagtttgtcacacatgtttgatgagacacaattcatccccttatagttgactatgcacttcagtcgtaattctatgagagtcttgcctgctagtgggttcacactagttccgttgtagagttcctgggatcttcggattaaaaccccatacccctcatatatcgaaatagcctagtcttagccaataaagaagctagatgtgctatcagatcactatgtgcggcactggaactttgcagacaatattagtctgttaaaatcgacttaccagagtcagagacgccatctttggcctctatgggtgatgtgccctgacatctccgtctagtcaacgtgagcactatcgcatcattttaccttacacataacttacctgttcttgggttgccctctttcacgggccgaatatcatgtattcgaagtcttgtgttcgccgggtcaccaaaaccggttaggatctaactccgagaagtt

SEQ ID NO: 16105 - DNA, 512 bp, synthetic construct; identical to SEQ ID NO: 2055
  source 1..512: mol_type = other DNA

SEQ ID NO: 16106 - DNA, 371 bp, synthetic construct; identical to SEQ ID NO: 1706
  source 1..371: mol_type = other DNA

SEQ ID NO: 16107 - DNA, 265 bp, synthetic construct
  source 1..265: mol_type = other DNA
tacgcgctggagcccaaccctcccctccattggagggcggttgggtcccagggtgaacttaccgacgaatttggtttcgtcggcatatagtgagaagctttctcacttttatcttgaacgcgattcttgcgcgaatatcttcgtgcgacgcgtcaactcttccttcctgcgtaaagcaggaagggtagaccttataggttcatacctaaaagatctaccgtacgatgtgctttacgcatatcttttaaagggcctgtatccacgg

SEQ ID NO: 16108 - DNA, 705 bp, synthetic construct; identical to SEQ ID NO: 2313
  source 1..705: mol_type = other DNA

SEQ ID NO: 16109 - DNA, 404 bp, synthetic construct; identical to SEQ ID NO: 1793
  source 1..404: mol_type = other DNA

SEQ ID NO: 16110 - DNA, 366 bp, synthetic construct; identical to SEQ ID NO: 1691
  source 1..366: mol_type = other DNA

SEQ ID NO: 16111 - DNA, 499 bp, synthetic construct; identical to SEQ ID NO: 2024
  source 1..499: mol_type = other DNA

SEQ ID NO: 16112 - DNA, 419 bp, synthetic construct; identical to SEQ ID NO: 1830
  source 1..419: mol_type = other DNA

SEQ ID NO: 16113 - DNA, 325 bp, synthetic construct; identical to SEQ ID NO: 1568
  source 1..325: mol_type = other DNA

SEQ ID NO: 16114 - DNA, 405 bp, synthetic construct; identical to SEQ ID NO: 1795
  source 1..405: mol_type = other DNA

SEQ ID NO: 16115 - DNA, 600 bp, synthetic construct; identical to SEQ ID NO: 196
  source 1..600: mol_type = other DNA

SEQ ID NO: 16116 - DNA, 394 bp, synthetic construct; identical to SEQ ID NO: 1765
  source 1..394: mol_type = other DNA

SEQ ID NO: 16117 - DNA, 861 bp, synthetic construct; identical to SEQ ID NO: 2495
  source 1..861: mol_type = other DNA

SEQ ID NO: 16118 - DNA, 405 bp, synthetic construct
  source 1..405: mol_type = other DNA
tatgacaaataaagccatacttctccaggcgactggatcgaatcgcgtgtacgcacaccccgaagacattacacggactgttaaccaaaaattgcagttaaaagaacgtgtcgtcgacggaaaacgagtgccacatgtgagaacagaggtgatcctcggtaggcaagcaccaatcgcagtgtgtgaaaacacctgcgcgggctttgaaaatcttagtgtgcgtttaagtctaagtggcagcttatctaatgctgccaaactggacgaaatgctggatgaacttaaatccatcattgaccgtgccaaagaagacaaagtcagcaagggcttcccgttaactgaaattaatttcaatgattaaggaaggttaatgtgagtaaacaatctcgtgcgcaagcaccgaaa

SEQ ID NO: 16119 - DNA, 511 bp, synthetic construct
  source 1..511: mol_type = other DNA
ggtgtgacaaatcaaccctgaaatagggttgacgactcgacacgacaacagtttcttctaagttgtcatgatttagtaagtctaaaactgttccacaccgaatttcaaagaaattttgaaaaacgatacggaaagttcttgaattggacaaggcttttcctgtcataaggcaagattgtgcttgtgtgcgctctgaccgaaccggtgggcaaggactggagcataggaaggaccatttagtatgggcttagtcgggcacaagtgaaccgtggggtccaaaagactgcttaccggcttgtgcttagggcttagtcctgaaatttgcgtagtaccccagcttctgttcttacctacttaaagggaaatagacgtggacactagactacatggaaagacatgttgacacagaatgaatagtattctacaaccaacaaaactcaacatttatgaagacaccagacaaacctgaacaagtaattatccgacacccatttagtaattttagtgaaag

SEQ ID NO: 16120 - DNA, 291 bp, synthetic construct
  source 1..291: mol_type = other DNA
aagtgtctggtccttggattccctgcttaggcacatgatcagaacgggaactcagccgtaaaagttgcagtcgggtggcaaggcctcgtacataaccttccccacagagctcatcgatacctgtggttaaacatagtcgatgggtgcctcgtgcaccgtagtggacatctacagcttgtccagtccgtggaaccggacttgaatcagttctacgggtccaactagtccatacacccgtttccgtagtggtctagggctggcatcctctgccgtttccaaatgcactaaaca

SEQ ID NO: 16121 - DNA, 251 bp, synthetic construct
  source 1..251: mol_type = other DNA
ttcgggtttacccgcgtaagcggccacactgactggttgtcggtgttgaatttgtataccagatgaggagacgttaccaccgtctcggcagtgctacgtctgggaaaggactgtgatagtggacagtcctaccgtctttagatacattgcgttgtgtatagcccgggagggattaactaatagcaacgcaatgcacacggcggttcggatttgcttgactgatggaaagacatctaagttctaattgaacc

SEQ ID NO: 16122 - DNA, 293 bp, synthetic construct
  source 1..293: mol_type = other DNA
atgactcgcctgtgttagatccaacttcttcacctggtaatccgtggcaatctttgggctctactaatggttgtgtttttggctacgagccgtgtttgggatatttgggccttgaggtccataacctttacgcggctgtggtcaagcgcttccaggagcttgaagagggtcgaaaggcagacgacatttttccctttatcaaacaggagccccacaaacgagctaaggccgaatccgatcgatggcgtatcatttccggcgttggttgtaccgatcagcttgtggccgaactt

SEQ ID NO: 16123 - DNA, 305 bp, synthetic construct; identical to SEQ ID NO: 1498
  source 1..305: mol_type = other DNA

SEQ ID NO: 16124 - DNA, 708 bp, synthetic construct; identical to SEQ ID NO: 2320
  source 1..708: mol_type = other DNA

SEQ ID NO: 16125 - DNA, 403 bp, synthetic construct
  source 1..403: mol_type = other DNA
ttaaccctcctaggagaaatccttatgccacaagcaattgagctttatagcaatgcaaccgaagccgcttttgtacacccagaagacgtcctcactcgtgcgcgtttcacacgcaaattgagcgagaagactgtcaatgggcttaaaactgcgaatcttcgatccgagattatcttaaaccaaacggtcggcctgcgcgtatgcgagcagacctgtgcaggtgacgaggtactttccgcccgtgcttcaatatctggttcaatcaagaaccatgagaaggtcgacgcgttagtcgacaatttgattgcagcgttacaacagtggaaaacggataagggtagccgaggcttccctgttaccgacttcacgtttaacgattaacaattaaatcaacggagggtcc

SEQ ID NO: 16126 - DNA, 708 bp, synthetic construct; identical to SEQ ID NO: 2321
  source 1..708: mol_type = other DNA

SEQ ID NO: 16127 - DNA, 1000 bp, synthetic construct; identical to SEQ ID NO: 2657
  source 1..1000: mol_type = other DNA

SEQ ID NO: 16128 - DNA, 289 bp, synthetic construct
  source 1..289: mol_type = other DNA
cgtacacgtgttcactgtgacgctgatctctgaggatgatcgcccagtggctgctagagcacctgagcatactcgacggccgcgtcgtcgtgggccatccaactggcctccaagacgcggtgacgcgatgtgcgatggtagcaggagtcggcttcgctggctactgtgtgactcgggcagtgatgcgtaacatgcgcccaagcgcgtacgacgctcaacgtgtaccgtcagtcctgttggcgtgccagcgcgcgctgacggactacacccgaaaggacctgcgtgtgac

SEQ ID NO: 16129 - DNA, 372 bp, synthetic construct; identical to SEQ ID NO: 1711
  source 1..372: mol_type = other DNA

SEQ ID NO: 16130 - DNA, 514 bp, synthetic construct; identical to SEQ ID NO: 2061
  source 1..514: mol_type = other DNA

SEQ ID NO: 16131 - DNA, 422 bp, synthetic construct; identical to SEQ ID NO: 1837
  source 1..422: mol_type = other DNA

SEQ ID NO: 16132 - DNA, 274 bp, synthetic construct
  source 1..274: mol_type = other DNA
cgagcagcgagtcggacgcgatgagttcgatgagctcgaagcacgcatccaaggcctgaatcaggccgacggtgcggaggctgatcaaccaggcctcgaggcgaatcggttggagagggagcgcatccgtgaggaagccatcctcgaaatcgagagagttaggctacaaatagccgacgccgagagggctgcagcagcagcccgggaaggtgcgaggacgcctttctggttcaaggctttatgcttttgtaccggatttggattcttcgttctg

SEQ ID NO: 16133 - DNA, 1000 bp, synthetic construct; identical to SEQ ID NO: 2658
  source 1..1000: mol_type = other DNA

SEQ ID NO: 16134 - DNA, 513 bp, synthetic construct; identical to SEQ ID NO: 2059
  source 1..513: mol_type = other DNA

SEQ ID NO: 16135 - DNA, 650 bp, synthetic construct; identical to SEQ ID NO: 2244
  source 1..650: mol_type = other DNA

SEQ ID NO: 16136 - DNA, 629 bp, synthetic construct
  source 1..629: mol_type = other DNA
actgacctggttatcactaaccagtaccgtgtacaagtgactccacatgtggagactcctgtcttcacccgttaagtggccttcaactacacgtttcgacttgttctacgaacgagtcagacctgtagttggggttgccatcctgaagtagcattcttccttgtctcgacctgttcttgaacagaatcagactgggaagacattgctcccaggtggcttccccccgtttgctggagttctcattagactccagcagacggataagcccacctaatagtggtcattcaccattgcattgtgcgtaagtgaatggttgtcagaagtgacgtgatcgtgtcctctctcgaaattgttcttgttcaagagagagctcatgctgtgactttacaaccaccggtgtcctatttaggacaggtaccggggggtgcagcccaccccaaaaccttaacaggataggactagtgcgattgggtaaccgcattatcctttaccaacggtaagggagtccgaaaatacaactacctgctaacacgaaaacaaccccaggtataagggtcgttcccgtgtcgaggcgccgtactacttgtcctagcgaccgcaaggtcaatggaaagtcggacttgaaggct

SEQ ID NO: 16137 - DNA, 602 bp, synthetic construct; identical to SEQ ID NO: 2170
  source 1..602: mol_type = other DNA

SEQ ID NO: 16138 - DNA, 265 bp, synthetic construct
  source 1..265: mol_type = other DNA
cgggactagatggttgctaggaccccgggtggtggtggtcggcgacctcgcggggtcgtcgacgttttcatttgtcttcatccatgccccttctgttttccttctgttcgagttattgatttttacagtcagcaactgtaccttgctggctcgcctctcccatgggcgagcaatacaagtgcatgggacgtgagagaaccgtgctagatacctcacgtacacccaaagtcggtacggggatcgtaaccattacgctttttcctta

SEQ ID NO: 16139 - DNA, 367 bp, synthetic construct; identical to SEQ ID NO: 1694
  source 1..367: mol_type = other DNA

SEQ ID NO: 16140 - DNA, 275 bp, synthetic construct
  source 1..275: mol_type = other DNA
gttagcgatagcgttgagcattgctcgtctttgtaaatcgttactccgcctgatagccaagtctttgggtctcgcgtgtttagtagggctcgcaaataagctcgcccaaggtttgcgaagattgattgagtataggcagtcccgtccttatctcaagtcacgcgtttccgctttaacattgttcacccgttggttgactgacgtaaccaaagaaaccgtcgcatacaactggtaccctcttgacaaagtcccggactccttcaggaagtctgata

SEQ ID NO: 16141 - DNA, 415 bp, synthetic construct; identical to SEQ ID NO: 1818
  source 1..415: mol_type = other DNA

SEQ ID NO: 16142 - DNA, 446 bp, synthetic construct; identical to SEQ ID NO: 1910
  source 1..446: mol_type = other DNA

SEQ ID NO: 16143 - DNA, 321 bp, synthetic construct; identical to SEQ ID NO: 1555
  source 1..321: mol_type = other DNA

SEQ ID NO: 16144 - DNA, 307 bp, synthetic construct; identical to SEQ ID NO: 1505
  source 1..307: mol_type = other DNA

SEQ ID NO: 16145 - DNA, 605 bp, synthetic construct; identical to SEQ ID NO: 2176
  source 1..605: mol_type = other DNA

SEQ ID NO: 16146 - DNA, 330 bp, synthetic construct; identical to SEQ ID NO: 1581
  source 1..330: mol_type = other DNA

SEQ ID NO: 16147 - DNA, 254 bp, synthetic construct
  source 1..254: mol_type = other DNA
tgctcttccgatctgttcaggaacaagttattacaaaagcatttgacacattatcgaatattcgctttagtagcatagattcgaaaaaagtatacatactaagcatacccagaatacacataccaacaccgctaccacaaggtttcgttactataaaccaggtaccggcaagtgactttcctttattatatgatatcaaaatacttaaaaaaggcagtgaagaggatattacgttacgtcctacaatactgttt

SEQ ID NO: 16148 - DNA, 1000 bp, synthetic construct; identical to SEQ ID NO: 2659
  source 1..1000: mol_type = other DNA

SEQ ID NO: 16149 - DNA, 254 bp, synthetic construct
  source 1..254: mol_type = other DNA
ggagtctggatgctctgaatcctgatgttgcttctaggtggggtgaaatcgttgacgtcttggggagaaatcccgctgaacagtatgtggcgccgccagacactgacgcagctttattagactctttgtgttggcatgggaggaagtattgtgaagtccgagacaacacacaggaaccaggacttagcgagttcaagacagtagtcagtagaacttgccaggatctgggaatcctgtatagcgttccagacaac

SEQ ID NO: 16150 - DNA, 679 bp, synthetic construct; identical to SEQ ID NO: 208
  source 1..679: mol_type = other DNA

SEQ ID NO: 16151 - DNA, 698 bp, synthetic construct; identical to SEQ ID NO: 2306
  source 1..698: mol_type = other DNA

SEQ ID NO: 16152 - DNA, 335 bp, synthetic construct; identical to SEQ ID NO: 1606
  source 1..335: mol_type = other DNA

SEQ ID NO: 16153 - DNA, 556 bp, synthetic construct; identical to SEQ ID NO: 2120
  source 1..556: mol_type = other DNA

SEQ ID NO: 16154 - DNA, 607 bp, synthetic construct; identical to SEQ ID NO: 2186
  source 1..607: mol_type = other DNA

SEQ ID NO: 16155 - DNA, 1000 bp, synthetic construct; identical to SEQ ID NO: 2660
  source 1..1000: mol_type = other DNA

SEQ ID NO: 16156 - DNA, 365 bp, synthetic construct; identical to SEQ ID NO: 1687
  source 1..365: mol_type = other DNA

SEQ ID NO: 16157 - DNA, 746 bp, synthetic construct; identical to SEQ ID NO: 2369
  source 1..746: mol_type = other DNA

SEQ ID NO: 16158 - DNA, 639 bp, synthetic construct; identical to SEQ ID NO: 2227
  source 1..639: mol_type = other DNA

SEQ ID NO: 16159 - DNA, 347 bp, synthetic construct; identical to SEQ ID NO: 1639
  source 1..347: mol_type = other DNA

SEQ ID NO: 16160 - DNA, 398 bp, synthetic construct; identical to SEQ ID NO: 1773
  source 1..398: mol_type = other DNA

SEQ ID NO: 16161 - DNA, 1000 bp, synthetic construct; identical to SEQ ID NO: 277
  source 1..1000: mol_type = other DNA

SEQ ID NO: 16162 - DNA, 370 bp, synthetic construct; identical to SEQ ID NO: 1703
  source 1..370: mol_type = other DNA

SEQ ID NO: 16163 - DNA, 1000 bp, synthetic construct; identical to SEQ ID NO: 2661
  source 1..1000: mol_type = other DNA

SEQ ID NO: 16164 - DNA, 652 bp, synthetic construct; identical to SEQ ID NO: 2246
  source 1..652: mol_type = other DNA

SEQ ID NO: 16165 - DNA, 514 bp, synthetic construct
  source 1..514: mol_type = other DNA
actggaatgacgaggttagctactcccgagaatccatgtcttatccagaccatggtccggtagagcggcctgctgatgtgatacgtcagcaagagtccgctcccgtgtccacgtcacccgtagcacaagcagccccagcagtgtccgcgcccgcagcgcccgcttcgcccgttacctcctctcagcaggagggaaacgcgagcagggcctctgcaggtgcggaggcccgtggcaacgccagtccacaaggaagtgtactgagcggaaacgcttcagtaaaccccgcatcagcaactccttcgggaccgcaggcgacagctaccagtggccagacatcgacgcctgctccgcgaagcgtagcttccgtctccacgtcgaccgatttttcgcggcgcaagcaagccgcaaagctggtccgattggagcccggagcatcgaccgcgttgagaagagatgccgtagctggaagtgctcagtaacccgttttaaagattttgaagaaaactttgaaatc

SEQ ID NO: 16166 - DNA, 538 bp, synthetic construct; identical to SEQ ID NO: 2099
  source 1..538: mol_type = other DNA

SEQ ID NO: 16167 - DNA, 1000 bp, synthetic construct; identical to SEQ ID NO: 278
  source 1..1000: mol_type = other DNA

SEQ ID NO: 16168 - DNA, 1000 bp, synthetic construct
  source 1..1000: mol_type = other DNA
agatgaccaggtattgatggtcgagacaaaccaactcgacaacctggtcaaggagcttagtcccacattcgcgcgatttggttttcgcgtgaaagtagaggatcctgtctgggaattcgagagaatagatttttgccaaaccagaccgatcttcctatcaccaagtgagcctataatgtgccgatacccaatgcaatctatgtccaaagacgttgcgtccttcctcaatatagaaagatcagagggatggaaatacatgctcagagctataggagcatgtgggtcttctagtttctctcaagttccagtgcttggcgagttttatagtgcgctcagctccacatcaaacaaagatgaaaccagatggtggaggcgcacgggagttgatttggggtttaaacagcttaccaacaatgtaggcacgatcccctacgacgaggtcacggcacgaagctccttctataaggccttcggaatcctcccggacacccaagctgcactcgaaagcaatatacgcaactggaaaatgagctccgtaccacacatcgagcaagtccacaagttctcgagtgagttccccgtggttgacggatgggcctaacttagggaattcagttaggttaagttagtcggcctctcctcttgctggctgggtgaggggggaggccaacgcagactggttggataggtttgggaacatagatccgaactccaaccaacgggtaggtcgcacccgcgtagtcgagaatgattaccataattggtaggtgaggtcacgccgtatggccaagtcacccgagctttcggtagggggtctagttgttgagtgctactatggcataaccagatagacaccccacatttggagaagcggcttgcccacgctccaacattccatggatagattgaacgacgaaatgtcattgtcttgccgtcagaggcgttcccctctccaaggctagcccgagctgcgccatgcttgggatctatggaatagttg

SEQ ID NO: 16169 - DNA, 1000 bp, synthetic construct
  source 1..1000: mol_type = other DNA
atacacattgaagtagccaatgatggagatgatcaggtgctgatggtcgagacaaaccaactcgacaacctgatcaaggagcttagccccacatttgcacgatttggttttcgtgtaaaagttgaagatccagtctgggaattcgaaagaatagatttttgccaaaccagaccgatcttcctgtcgcccggcgaacctttaatgtgccggtacccaatgcaatctatgtcaaaagacgttgcatccttcctcaatatagaaagatcagagggatggaaatacatgctcagagctataggagcatgtgggtcttctagtttctctcaagttccagtacttgggaagttttatagtgcgctcagttccacatcaaataaagatgaatcaagatggtggaaacgcacgggagttgatttgggatttcagcagctcacaagtggtgtgggcgatattccctacgacgaggtcacggcacgaagctccttctataaggccttcggaatcctcccagacacccaagtagcactcgaaagcaaaatagaaaactggaatatgagctccgtaccaccaattgagcaagtccacaaattctcgagtgagtttcccgtggttgacggatgggcctaacatagggttaaagttaggtgttagtagttagggccccttcctcgctggctgggtgagaaaggggccaccgcagactggttggataggtttgggaacatagatccgaactccaaccaacgggtaggtcgaacccgcggagtcgagaatgattaccataattggtaggtgaggtcacgccgtttggtcaagtcacccgagctttcggtagggactctagttgttgagtgttattatggcatgacccgctagacgacccacacttggagaagcggcttgcccacgctccaacattccatagatagattgaacgacgaaatgtcattgtcttgccgtcagaggcgttcccctctccaaggctgacccgagctgcgcc

SEQ ID NO: 16170 - DNA, 1000 bp, synthetic construct
  source 1..1000: mol_type = other DNA
gggagatagtgatacctccctaggaaacgtgagtatcatgctagcgatcacgcgggtgatttgtgaggagctaaaaggcatacacattgaagtagccaatgatggagatgatcaggtgctgatggtcgagacaaaccaactcgacaacctgatcaaggagcttagccccacatttgcacgatttggttttcgtgtaaaagttgaagatccagtctgggaattcgaaagaatagatttttgccaaaccagaccgatcttcctgtcgcccggcgaacctttaatgtgccggtacccaatgcaatctatgtcaaaagacgttgcatccttcctcaatatagaaagatcagagggatggaaatacatgctcagagctataggagcatgtgggtcttctagtttctctcaagttccagtacttgggaagttttatagtgcgctcagttccacatcgaataaggatgaatcaagatggtggaaacgcacgggagttgatttgggatttcagcagctcacaagtggtgtgggcgatattccctacgacgaggtcacggcacgaagctccttctataaggccttcggaatcctcccagacacccaagtagcactcgaaagcaaaatagaaaactggaatatgagctccgtaccaccaattgagcaagtccacaaattctcgagtgagtttcccgtggttgacggatgggcctaacatagggttaaagttaggtgttagtagttagggccccttcctcgctggctgggtgagaaaggggccaccgcagactggttggataggtttgggaacatagatccaaactccaaccaacgggtaggtcgaacccgcggagtcgagaatgattaccataattggtaggtgaggccacgccgtttggtcaagtcacccgagctttcggtagggactctagttgttgagtgttattatggcatgaccaactagacgacccacatttggagaagcggcttgcccacgctccaacattcc

SEQ ID NO: 16171 - DNA, 572 bp, synthetic construct; identical to SEQ ID NO: 191
  source 1..572: mol_type = other DNA

SEQ ID NO: 16172 - DNA, 583 bp, synthetic construct; identical to SEQ ID NO: 193
  source 1..583: mol_type = other DNA

SEQ ID NO: 16173 - DNA, 336 bp, synthetic construct; identical to SEQ ID NO: 1611
  source 1..336: mol_type = other DNA

SEQ ID NO: 16174 - DNA, 439 bp, synthetic construct; identical to SEQ ID NO: 1889
  source 1..439: mol_type = other DNA

SEQ ID NO: 16175 - DNA, 970 bp, synthetic construct; identical to SEQ ID NO: 2558
  source 1..970: mol_type = other DNA

SEQ ID NO: 16176 - DNA, 332 bp, synthetic construct; identical to SEQ ID NO: 1590
  source 1..332: mol_type = other DNA

SEQ ID NO: 16177 - DNA, 394 bp, synthetic construct
  source 1..394: mol_type = other DNA
caatgtcacaatacaaaacgcgtactcgcggagaagccaaaactgtgcttgttaatccgtcaagctataaatcaacgcttgaggttatccacagtttcaaacgagacacagcccttaatcaggaccaagtccgaatcggtgttgcttcggcatatactgatgtagttaaaacctgcaaggactcctgtggcgtgccacgtcgcgagctggttaagcttgaaatgcctgttttattaggcatggacgaagcttattacaccagaaagaaacaacagctgactgacgttttagcgtcgggtcagaaacttctcgaagcattcgatgatgtgcagattggaatcattcctgatctgaacgtcgaagctactgtcgcttaacaataaggaatataatt

SEQ ID NO: 16178 - DNA, 458 bp, synthetic construct; identical to SEQ ID NO: 1937
  source 1..458: mol_type = other DNA

SEQ ID NO: 16179 - DNA, 254 bp, synthetic construct
  source 1..254: mol_type = other DNA
ggcgcctttaaagctggtggtgaggtagctggttgtacagccactatctcaggtgaacctataggtccattttgtgtatccggtctaaccaaccggcgtatattgcttacagagcccttggtcgggctctgtttgcgtatatgtatactttacacatccaccttcagggggtcagatatgaccccctgggtaccgcttgtactttaagcgtatccaaacctgaatacactcaattaacctaacaggagaaaccc

SEQ ID NO: 16180 - DNA, 425 bp, synthetic construct; identical to SEQ ID NO: 1848
  source 1..425: mol_type = other DNA

SEQ ID NO: 16181 - DNA, 321 bp, synthetic construct; identical to SEQ ID NO: 149
  source 1..321: mol_type = other DNA

SEQ ID NO: 16182 - DNA, 520 bp, synthetic construct; identical to SEQ ID NO: 2070
  source 1..520: mol_type = other DNA

SEQ ID NO: 16183 - DNA, 573 bp, synthetic construct; identical to SEQ ID NO: 2140
  source 1..573: mol_type = other DNA

SEQ ID NO: 16184 - DNA, 297 bp, synthetic construct
  source 1..297: mol_type = other DNA
cgctttcgttgcgtattagtatataagtatatgtgagtctgtacataatactatatctatagtgtcctgtgtgggttgatacagtagacaactgtgacgcgatgtcgtgttgagaagggaacacatctggttcttgtaagccacatcattagttttgaggttcaattcctcttgctccctgttgtgcccccttactttttcatggatgcttctccacgaaattgcgtttcgtctactggatcttagagagtctgtgttgtgtttttctctttgtgtcgtagatatttgagtcgagtc

SEQ ID NO: 16185 - DNA, 368 bp, synthetic construct; identical to SEQ ID NO: 1696
  source 1..368: mol_type = other DNA

SEQ ID NO: 16186 - DNA, 309 bp, synthetic construct; identical to SEQ ID NO: 1513
  source 1..309: mol_type = other DNA

SEQ ID NO: 16187 - DNA, 420 bp, synthetic construct; identical to SEQ ID NO: 1832
  source 1..420: mol_type = other DNA

SEQ ID NO: 16188 - DNA, 361 bp, synthetic construct; identical to SEQ ID NO: 1678
  source 1..361: mol_type = other DNA

SEQ ID NO: 16189 - DNA, 253 bp, synthetic construct
  source 1..253: mol_type = other DNA
cttctttctcgatgttctgatccactccttccgcaaggtcaagcggaggggggccgggtcctcggacccggtggcggccctcagttgcgatggacgcaaccaggtggtcttcgatgactctaagttgaaagcagccggcattcgagatagctcgattcctgactgccttcggactgtcaacgatgaccccgccaacaagttcttgacgtctgatgatgctacccgacggcttcgccgttatattgcagcatca

SEQ ID NO: 16190 - DNA, 379 bp, synthetic construct; identical to SEQ ID NO: 159
  source 1..379: mol_type = other DNA

SEQ ID NO: 16191 - DNA, 465 bp, synthetic construct
  source 1..465: mol_type = other DNA
ggccgccgtacatcccgacccccccgggggggggaatcgggctcgacagtacggtgcctggtggtccggcgctagcaccgccgtccagacctgccccggcaggtcccccaatgcccagcgacctctctccctagtcggggcctccactcggtgcccccgttgccgaagaccggccggcctacccgtgagggtaaagtcggaactggtcgccggtatcgggcggcagcgaggaaagcggccaacgaggtgaggaggttgctggttggggcgactgggtccgtcgggcccaccgtctcccaccctccagcagacgtccgcggtcggtctctgcccgagttgcccggcgcttgcctccggtcggcaggtgggcgggtcgcggcccccagggaattgaccctgggtgcctggtgcgacccgtctgtcctgcgctctcccgaagcggctgttaaggccccagtggggcat

SEQ ID NO: 16192 - DNA, 380 bp, synthetic construct; identical to SEQ ID NO: 1731
  source 1..380: mol_type = other DNA

SEQ ID NO: 16193 - DNA, 567 bp, synthetic construct; identical to SEQ ID NO: 2135
  source 1..567: mol_type = other DNA

SEQ ID NO: 16194 - DNA, 349 bp, synthetic construct; identical to SEQ ID NO: 332
  source 1..349: mol_type = other DNA

SEQ ID NO: 16195 - DNA, 498 bp, synthetic construct
  source 1..498: mol_type = other DNA
gacgcgcatcccgggtgaaagccccgggcgtacgacctggttcgggacttgtcccgtgtccagtgcggaggccccgcaaaccgagccgccctgtaggcagcttttagaatgcggagttaactcctggcactggcccgaagcatgaactgatcgcggtggcagggttcttcgggtaaatcccggccgcgtgttgtgattgtgttagggcaggtgacagtcggcggggtcggccccccgcttcaggaccactgactccgtggacgaccgctgctgaaaaagggccgccacggtctgtagctcgccgacgcttccaattcaggccggaggaccacgctccgtaatcgagcccaagtactcaaaccccagcacccctgggtcacgccctacgccgccctttttacgcttcggctaatagggtctatccggcgggttgacaaagggcgcagggttacctggtactacgagcttgggtgtccctgggagtgatctcagggtgcc

SEQ ID NO: 16196 - DNA, 614 bp, synthetic construct
  source 1..614: mol_type = other DNA
gataccgtgtcccggtacgacctgcgcgtccccaagctcgccctgaggggggagcgtaagggcgcgtagtggggtagccccccaaaccgagccaccctagtgagtgactttagaatggttagggagactaccgccttcgctgtttgggacctaatgatccgcgtgccagggttcttcgggtaaatcccggcgcggtgttttgggttcagggcagtaggggcagacgggccagcagtcgctggttcctggtaccaccaccctatccggacgacctccctcacgaaaggtcgccacggtctgtggctcgacgacgcctataattcagtccgaggggcgcagccctcgttaaacttaggcaaggttcctcgccattgatttggccaggggtttaagtgaacgccgcccttttaatgtttaatagggttctttcccggcgggttgacaaacacttccctgggctcttcgttggcctcggttccttgatgcttcggcacccatgagcgcacaggggggggaccctgcgacagtccgccaagaggaaaatccttcgggtgacctcgtgcgcaacccaatcccttcttcttccacatggcgtgtctgtggtgcatgctgtg

SEQ ID NO: 16197 - DNA, 590 bp, synthetic construct
  source 1..590: mol_type = other DNA
cgcgtccccaagcccgccctgaggggggggcgtaagggcgcgtagtggggtagccccccaaaccgagccaccctagtgagtgactttagaatggttagggagactaccgccttcgctgtttgggacctactgatccgcgtgccagggttcttcgggtaaatcccggcgcggtgttgtgggttcagggcagtaggggcagacgggccagcagtagctggttcctggtaccaccaccctatccggacgacctccctcacgaaaggtcgccacggtctgtggctcgacgacgcctacaattcagtccgaggggcgcagccctcgttaaacttaggcatggttcctcgcctttgatctggccaggggtttaagtgaacgccgcccttttaatgtttaatagggttctttcccggcgggttgacaaacacttccctgggcttttcctcggctccggttctatgttgcttcggcacccatgagcgcacaggggggggaccctgcgacagtccgccaagaggaaaatccttcgggtgacctcgtgcgcaacccaatccctttctcttccacatggcgtgtctgtggtgcatgctgtg

SEQ ID NO: 16198 - DNA, 285 bp, synthetic construct
  source 1..285: mol_type = other DNA
cgctaggtacgccaaaggcgtaggcccccggcgggttaaccgacgtgggacaatgcgctggaggattttacagccgacagagctgcgaaacctgtagtaaggccggagtaccggcctcccagcccgcgtcagcctaaacctggctgtgatacgcggtgtatggaggacatgtccaactatgggtgccttggggtggttcccctcggcgtggtgtgacgaccatagcagtactgcctgatagggtcccggcggatgggtcggctgtgtacatccgttgtccctccc

SEQ ID NO: 16199 - DNA, 617 bp, synthetic construct; identical to SEQ ID NO: 706
  source 1..617: mol_type = other DNA

SEQ ID NO: 16200 - DNA, 259 bp, synthetic construct
  source 1..259: mol_type = other DNA
gcaaggtaggacgtggtaaatgctcctaagggaacatgggctcggtagagcgagtaagacccacgaagcccggggaactgggctcccagcccgcgtcagcgtaaacctcgctgtcatacgcggtgcatggagggcatgtcccacgtgacgtgtctgcgtgggggggggttcccccacgcgcgggcgtggttgcccgtgctcgtactgcctgatagggtgccggcggacgcaccgagctcattagtccgtaggcagaggc

SEQ ID NO: 16201 - DNA, 323 bp, synthetic construct; identical to SEQ ID NO: 308
  source 1..323: mol_type = other DNA

SEQ ID NO: 16202 - DNA, 590 bp, synthetic construct
  source 1..590: mol_type = other DNA
cgcgtccccaagcccgccctgaggggggggcgtaagggcgcgtagtggggtagccccccaaaccgagccaccctagtgagtgactttagaatggttagggagactaccgccttcgctgtttgggacctactgatccgcgtgccagggttcttcgggtaaatcccggcgcggtgttgtgggttcagggcagtaggggcagacgggccagcagtagctggtccctggtaccaccaccctatccggacgacctccctcacgaaaggtcgccacggtctgtggctcgacgacgcctacaattcagtccgaggggcgcagccctcgttaaacttaggcatggttcctcgcctttgatctggccaggggtttaagtgaacgccgcccttttaatgtttaatagggttctttcccggcgggttgacaaacacttccctgggcttttcctcggctccggttctatgttgcttcggcacccatgagcgcacaggggggggaccctgcgacagtccgccaagaggaaaatccttcgggtgacctcgtgcgcaacccaatccctttctcttccacatggcgtgtctgtggtgcatgctgtg

SEQ ID NO: 16203 - DNA, 590 bp, synthetic construct
  source 1..590: mol_type = other DNA
cgcgtccccaagctcgccctgaggggggagcgtaagggcgcgtagtggggtagccccccaaaccgagccaccctagtgagtgactttagaatggttagggagactaccgccttcgctgtttgggacctaatgatccgcgtgccagggttcttcgggtaaatcccggcgcggtgttttgggttcagggcagtaggggcagacgggccagcagtcgctggttcctggtaccaccaccctatccggacgacctccctcacgaaaggtcgccacggtctgtggctcgacgacgcctataattcagtccgaggggcgcagccctcgttaaacttaggcaaggttcctcgccattgatttggccaggggtttaagtgaacgccgcccttttaatgtttaatagggttctttcccggcgggttgacaaacacttccctgggctcttcgttggcctcggttccttgatgcttcggcacccatgagcgcacaggggggggaccctgcgacagtccgccaagaggaaaatccttcgggtgacctcgtgcgcaacccaatcccttcttcttccacatggcgtgtctgtggtgcatgctgtg

SEQ ID NO: 16204 - DNA, 327 bp, synthetic construct
  source 1..327: mol_type = other DNA
aactgttgttgtagcaatgcgcatattgctacttcggtacgcctaattggtaggcgcccggccgaccggccccgcaagggcctagtaggacgtgtgacaatgccatgagggatcatgacactggggtgagcggaggcagcaccgaagtcgggtgaactcgactcccagtgcgaccacctggcttggtcgttcatggagggcatgcccacgggaacgctgatcgtgcaaagggatgggtccctgcactggtgccatgcgcggcaccactccgtacagcctgatagggtggcggcgggcccccccagtgtgacgtccgtggagcgcaac

SEQ ID NO: 16205 - DNA, 316 bp, synthetic construct
  source 1..316: mol_type = other DNA
tagcaatgcgcatattgctacttcggtacgcctgattggtaggcgcccggccgaccggccccgcaagggcctagtaggacgtgtgacaatgccatgagggatcatgacactggggtgagcggaggcagcaccgaagtcgggtgaactcgactcccagtgcgaccacctggcttggtcgttcatggagggcatgcccacgggaacgctgatcgtgcaaagggatgggtccctgcactggtgccatgcgcggcaccactccgtacagcctgatagggtggcggcgggcccccccagtgtgacgtccgtggagcgcaac

SEQ ID NO: 16206 - DNA, 312 bp, synthetic construct
  source 1..312: mol_type = other DNA
aatgcgcatattgctacttcggtacgcctaattggtaggcgcccggccgaccggccccgcaagggcctagtaggacgtgtgacaatgccatgagggatcatgacactggggtgagcggaggcagcaccgaagtcgggtgaactcgactcccagtgcgaccacctggcttggtcgttcatggagggcatgcccacgggaacgctgatcgtgcaaagggatgggtccctgcactggtgccatgcgcggcaccactccgtacagcctgatagggtggcggcgggcccccccagtgtgacgtccgtggagcgcaac

SEQ ID NO: 16207 - DNA, 327 bp, synthetic construct
  source 1..327: mol_type = other DNA
aactgttgttgtagcaatgcgcatattgctacttcggtacgcctaattggtaggcgcccggccgaccggccccgcaagggcctagtaggacgtgtgacaatgccatgagggattatgacactggggtgagcggaggcagcaccgaagtcgggtgaactcgactcccagtgcgaccacctggcttggtcgttcatggagggcatgcccacgggaacgctgatcgtgcaaagggatgggtccctgcactggtgccatgcgcggcaccactccgtacagcctgatagggtggcggcgggcccccccagtgtgacgtccgtggagcgcaac

SEQ ID NO: 16208 - DNA, 304 bp, synthetic construct
  source 1..304: mol_type = other DNA
tattgctacttcggtacgcctaattggtaggcgcccggccgaccggccccgcaagggcctagtaggacgtgtgacaatgccatgagggatcatgacactggggtgagcggaggcagcaccgaagtcgggtgaactcgactcccagtgcgaccacctggcttggtcgttcatggagggcatgcccacgggaacgctgatcgtgcaaagggatgggtccctgcactggtgccatgcgcggcaccactccgtacagcctgatagggtggcggcgggcccccccagtgtgacgtccgtggagcgcaac

SEQ ID NO: 16209 - DNA, 574 bp, synthetic construct; identical to SEQ ID NO: 623
  source 1..574: mol_type = other DNA

SEQ ID NO: 16210 - DNA, 528 bp, synthetic construct; identical to SEQ ID NO: 18
  source 1..528: mol_type = other DNA

SEQ ID NO: 16211 - DNA, 528 bp, synthetic construct
  source 1..528: mol_type = other DNA
gtcaggtggaaggcctgaaaccgatcctacaattggagagtaaccaacatgctcattaacacctcgggctggctcgaaagccggtgttgggcagatggcagggttcttagggtaaatcccggtctgtctggatccggtatagagctggcacttgaggtccactgttggcttgctgaagtgctcagaagattgatggacacggtacacaggtttggatgcaccggtgtgaatagcgtcccgtcaggagcgtctgacgttaaactgagtccccctcaacgatcgcaacatgggattgcgtacggacacgccgccaaaacccttcggggacagctatgcgggttgacaagtccagcagtcgcgtggggcctatattgtttaggcctgcgagttccggtttgggggagccgtaaggcagccacgggggtaccaaggcggcgtcgcgctacaggcggcaaggggaaaaatccttcgggtgacccctggtaccattttcctttcttgggtgttatgggtgtcggcaacgccacc

SEQ ID NO: 16212 - DNA, 560 bp, synthetic construct; identical to SEQ ID NO: 24
  source 1..560: mol_type = other DNA

SEQ ID NO: 16213 - DNA, 318 bp, synthetic construct
  source 1..318: mol_type = other DNA
tgtagcaatgcgcatattgctacttcggtacgcctaattggtaggcgcccggccgaccggccccgcaagggcctagtaggacgtgtgacaatgccatgcgggatcatgacactggggtgagcggaggcagcaccgaagtcgggtgaactcgactcccagtgcgaccacctggcttggtcgttcatggagggcatgcccacgggaacgctgatcgtgcaaagggatgggtccctgcactggtgccatgcgcggcaccactccgtacagcctgatagggtggcggcgggcccccccagtgtgacgtccgtggagcgcaac

SEQ ID NO: 16214 - DNA, 531 bp, synthetic construct; identical to SEQ ID NO: 20
  source 1..531: mol_type = other DNA

SEQ ID NO: 16215 - DNA, 329 bp, synthetic construct; identical to SEQ ID NO: 313
  source 1..329: mol_type = other DNA

SEQ ID NO: 16216 - DNA, 327 bp, synthetic construct
  source 1..327: mol_type = other DNA
aactgttgttgtagcaatcgctatattgctacttcggtacgcctaattggtaggcgcccggccgaccggccccgcaagggcctagtaggacgtgtgacaatgccatgagggatcatgacactggggtgagcggaggcagcaccgaagtcgggtgaactcgactcccagtgcgaccacctggcttggtcgttcatggagggcatgcccacgggaacgctgatcgtgcaaagggatgggtccctgcactggtgccatgcgcggcaccactccgtacagcctgatagggtggcggcgggcccccccagtgtgacgtccgtggagcgcaac

SEQ ID NO: 16217 - DNA, 520 bp, synthetic construct
  source 1..520: mol_type = other DNA
ggggaatctcaccccccgtccggttccggaagaatcggaaaccgacaccctgaccaatcattcttgatcatagagtggatgttagtgaaagccagacgaaagccggcggatgggtggtgacagggttggtaggtcgtaaatcccggccaccctggtacccggtataagttgggcggaagctgactgaagctccgtgctcttttctgtgcgttcttggtgcacggtccacaggtgacgcctataccggtgtgaataataggccgactcgagcggagtcgttaaactgagaacctccatacggatggcaacttggcttgcgtacggggacgccgctaaagtcacagtgggttaagtccggcgggttgacaaccccagcaaggcgagggggtcctattgttggactctgccagttcccggtggaggtaggcatggggtggcccagctccgcggcgcgctacagccggggtagcccaaaatccgaaaggtgagggcgggccacatgtccgaaatttagtcaagc

SEQ ID NO: 16218 - DNA, 520 bp, synthetic construct
  source 1..520: mol_type = other DNA
ggggaatctcaccccccgtccggttccggaagaatcggaaaccgacaccctgaccaatcattcttgatcatagagtggatgttagtgaaagccagacgaaagccggcggatgggtggtgacagggttggtaggtcgtaaatcccggccaccctggtacccggtataagttgggcggaagctgactgaagctccatgctcttttttgtgcgtgcttggtgcacggtccacaggtgacgcctataccggtgtgaataataggccgactcgagcggagtcgttaaactgagaacctccatacggatggcaacttggcttgcgtacggggacgccgctaaagtcacagtgggttaagtccggcgggttgacaaccccagcaaggcgagggggtcctattgttggactctgccagttcccggtggaggtaggcatggggtggcccagctccgcggcgcgctacagccggggtagcccaaaatccgaaaggtgagggcgggccacatgtccgaaatttagtcaagc

SEQ ID NO: 16219 - DNA, 520 bp, synthetic construct
  source 1..520: mol_type = other DNA
ggggaatctcaccccccgtccggttccggaagaatcggaaaccgacaccctgatcaatcattcttgatcatagagtggatgttagtgaaagccagacgaaagccggcggatgggtggtgacagggttggtaggtcgtaaatcccggccaccctggtacccggtataagttgggcggaagctgattgaagctctgtgctcttttctgtgcgttcttggtgcacggtccacaggtgacgcctataccggtgtgaataataggccgactcgagcggagtcgttaaactgagaacctccatacggatggcaacttggcttgtgtacggggacgccgctaaagtcacagtgggttaagtccggcgggttgacaaccccagcaaggcgagggggtcctattgttggactctgccagttcccggtggaggtaggcatggggtggcccagctccgcggcgcgctacagccggggtagcccaaaatccgaaaggtgagggcgggccacatgtccgaaatttagtcaagc

SEQ ID NO: 16220 - DNA, 520 bp, synthetic construct
  source 1..520: mol_type = other DNA
ggggaatctcaccccccgtccggttccggaagaatcggaaaccgacaccctgaccaatcattcttgatcatagagtggatgttagtgaaagccagacgaaagccggcggatgggtggtgacagggttggtaggtcgtaaatcccggccaccctggtacccggtataagttgggcggaagctgacggaagctccgtgctcttttttgtgcgtgcttggtgcacggtccacaggtgacgcctataccggtgtgaataatgggccgactcgagcggagtcgttaaactgagaacctccatacggatggcaacttggcttgcgtacggggacgccgctaaagtcacagtgggttaagtccggcgggttgacaaccccagcaaggcgagggggtcctattgttggactctgccagttcccggtggaggtaggcatggggtggcccagctccgcggcgcgctacagccggggtagcccaaaatccgaaaggtgagggcgggccacatgtccgaaatttagtcaagc

SEQ ID NO: 16221 - DNA, 519 bp, synthetic construct
  source 1..519: mol_type = other DNA
ggggaatctcaccccccgctcggttccggaagaatcgaaaccgacaccctgatcaatcattcttgatcatagagtggatgttagtgaaagccagacgaaagccggcggatgggtggtgacagggttggtaggtcgtaaatcccggccaccctggtacccggtataagttgggcggaagctgactgaagctccgtgctcttttttgtgcgttcttggtgcacggtccacaggtgacgcctataccggtgtgaataataggccgactcgagcggagtcgttaaactgagaacctccatacggatggcaacttggcttgcgtacggggacgccgctaaagtcacagtgggttaagtccggcgggttgacaaccccagcaaggcgagggggtcctattgttggactctgccagttcccggtggaggtaggcatggggtggcccagctccgcggcgcgctacagccggggtagcccaaaatccgaaaggtgagggcgggccacatgtccgaaatttagtcaagc

SEQ ID NO: 16222 - DNA, 309 bp, synthetic construct
  source 1..309: mol_type = other DNA
cgctatattgctacttcggtacgcctaattggtaggcgcccggccgaccggccccgcaagggcctagtaggacgtgtgacaatgccatgagggattctgacactggggtgagcggaggcagcaccgaagtcgggtgaactcgactcccagtgcgaccacctggcttggtcgttcatggagggcatgcccacgggaacgctgatcgtgcaaagggatgggtccctgcactggtgccatgcgcggcaccactccgtacagcctgatagggtggcggcgggcccccccagtgtgacgtccgtggagcgcaac

SEQ ID NO: 16223 - DNA, 307 bp, synthetic construct
  source 1..307: mol_type = other DNA
gcatattgctacttcggtacgcctaattggtaggcgcccggccgaccggccccgcaagggcctagtaggacgtgtgacaatgccatgagggatcatgacactggggtgagcggaggcagcaccgaagtcgggtgaactcgactcccagtgcgaccacctggcttggtcgttcatggagggcatgcccacgggaacgctgatcgtgcaaagggatgggtccctgcactggtgccatgcgcggcaccactccgtacagcctgatagggtggcggcgggcccccccagtgtgacgtccgtggagcgcaac

SEQ ID NO: 16224 - DNA, 520 bp, synthetic construct
  source 1..520: mol_type = other DNA
ggggaatctcaccccccgaccggttccggaagaatcggaaaccgacaccctgaccaatcattcttgatcatagagtggatgttagtgaaagccagacgaaagccggcggatgggtggtgacagggttggtaggtcgtaaatcccggccaccctggtacccggtataagttgggcggaagctgactgaagctccgtgttcttttttgtgcgtgcttggtgcacggtccacaggtgacgcctataccggtgtgaataataggccgactcgagcggagtcgttaaactgagaacctccatacggatggcaacttggcttgcgtacggggacgccgctaaagtcacagtgggttaagtccggcgggttgacaaccccagcaaggcgagggggtcctattgttgggctctgccagttcccggtggaggtaggcatggggtggcccagctccgcggcgcgctacagccggggtagcccaaaatccgaaaggtgagggcgggccacatgtccgaaatttagtcaagc

SEQ ID NO: 16225 - DNA, 312 bp, synthetic construct
  source 1..312: mol_type = other DNA
atgcgctatattgctacttcggtacgcctaattggtaggcgcccggccgaccggccccgcaagggcctagtaggacgtgtgacaatgccatgagggattctgacactggggtgagcggaggcagcaccgaagtcgggtgaactcgactcccagtgcgaccacctggcttggtcgttcatggagggcatgcccacgggaacgctgatcgtgcaaagggatgggtccctgcactggtgccatgcgcggcaccactccgtacagcctgatagggtggcggcgggcccccccagtgtgacgtccgtggagcgcaac

SEQ ID NO: 16226 - DNA, 452 bp, synthetic construct; identical to SEQ ID NO: 493
  source 1..452: mol_type = other DNA

SEQ ID NO: 16227 - DNA, 309 bp, synthetic construct
  source 1..309: mol_type = other DNA
cgctatattgctacttcggtacgcctaattggtaggcgcccggccgaccggccccgcaagggcctagtaggacgtgtgacaatgccatgagggatcatgacactggggtgagcggaggcagcaccgaagtcgggtgaactcgactcccagtgcgaccacctggcttggtcgttcatggagggcatgcccacgggaacgctgatcgtgcaaagggatgggtccctgcactggtgccatgcgcggcaccactccgtacagcctgatagggtggcggcgggcccccccagtgtgacgtccgtggagcgcaac

SEQ ID NO: 16228 - DNA, 520 bp, synthetic construct
  source 1..520: mol_type = other DNA
ggggaatctcaccccccgtccggttccggaagaatcggaaaccgacaccctgaccaatcattcttgatcatagagtggatgttagtggaagccagacgaaagccggcggatgggtggtgacagggttggtaggtcgtaaatcccggccaccctggtacccggtataagttgggcggaagctaactgaagctccgtgctcttttttgtgcgtgcttggtgcacggtccacaggtgacgcctataccggtgtgaataataggccgactcgagcggagtcgttaaactgagaacctccatacggatggcaacttggcttgcgtacggggacgccgctaaagtcacagtgggttaagtccggcgggttgacaaccccagcaaggcgagggggccctattgttgggctctgccagttcccggtggaggtaggcatggggtggcccagctccgcggcgcgctacagccggggtagcccaaaatccgaaaggtgagggcgggccacatgtccgaaatttagtcaagc

SEQ ID NO: 16229 - DNA, 305 bp, synthetic construct
  source 1..305: mol_type = other DNA
ttattgctacttcggtacgcctaattggtaggcgcccggccgaccggccccgcaagggcctagtaggacgtgtgacaatgccatgagggatcatgacactggggtgagcggaggcagcaccgaagtcgggtgaactcgactcccagtgcgaccacctggcttggtcgttcatggagggcatgcccacgggaacgctgatcgtgcaaagggatgggtccctgcactggtgccatgcgcggcaccactccgtacagcctgatagggtggcggcgggcccccccagtgtgacgtccgtggagcgcaac

SEQ ID NO: 16230 - DNA, 520 bp, synthetic construct
  source 1..520: mol_type = other DNA
ggggaatcccaccccccgtccggttccggaagaatcggaaaccgacaccctgaccaatcattcttgatcatagagtggatgttagtgaaagccagacgaaagccggcggatgggtggtgacagggttggtaggtcgtaaatcccggccaccctggtacccggtataagttgggcggaagctgactgaagctccatgctcttttttgtgcgtgcttggtgcacggtccacaggtgacgcctataccggtgtgaataataggccgactcgagcggagtcgttaaactgagaacctccatacggatggcaacttggcttgcgtacggggacgccgctaaagtcacagtgggttaagtccggcgggttgacaaccccagcaaggcgagggggtcctattgttggactctgccagttcccggtggaggtaggcatggggtggcccagctccgcggcgcgctacagccggggtagcccaaaatccgaaaggtgagggcgggccacatgtccgaaatttagtcaagc

SEQ ID NO: 16231 - DNA, 304 bp, synthetic construct
  source 1..304: mol_type = other DNA
tattgctacttcggtacgcctaattggtaggcgcccggccgaccggccccgcaagggcctagtaggacgtgtgacaatgccatgcgggatcatgacactggggtgagcggaggcagcaccgaagtcgggtgaactcgactcccagtgcgaccacctggcttggtcgttcctggagggcatgcccacgggaacgctgatcgtgcaaagggatgggtccctgcactggtgccatgcgcggcaccactccgtacagcctgatagggtggcggcgggcccccccagagtgacgtccgtggagcgcaac

SEQ ID NO: 16232 - DNA, 303 bp, synthetic construct
  source 1..303: mol_type = other DNA
attgctacttcggtacgcctaattggtaggcgcccggccgaccggccccgcaagggcctagtaggacgtgtgacaatgccatgagggatcatgacactggggtgagcggaggcagcaccgaagtcgggtgaactcgactcccagtgcgaccacctggcttggtcgttcatggagggcatgcccacgggaacgctgatcgtgcaaagggatgggtccctgcactggtgccatgcgcggcaccactccgtacagcctgatagggtggcggcgggcccccccagtgtgacgtccgtggagcgcaac

SEQ ID NO: 16233 - DNA, 273 bp, synthetic construct
  source 1..273: mol_type = other DNA
tggggcgggccgaccggtccgcagggcctagtaggacgtgtgacaatgccatgagggattctgacactggggtgagcggaggcagcaccgaagtcgggtgaactcgactcccagtgcgaccacctggcttggtcgttcatggagggcatgcccacgggaacgctgatcgtgcaaagggatgggtccctgcactggtgccatgcgcggcaccactccgtacagcctgatagggtggcggcgggcccccccagtgtgacgtccgtggagcgcaac

SEQ ID NO: 16234 - DNA, 521 bp, synthetic construct
  source 1..521: mol_type = other DNA
ggggaatctcacccccccgtccggttccggaagaatcggaaaccgacaccctgaccaatcattcttgatcatagagtggatgttagtgaaagccagacgaaagccggcggatgggtggtgacagggttggtaggtcgtaaatcccggccaccctggtacccggtataagttgggcggaagctgactgaagctccatgctcttttttgtgcgtgcttggtgcacggtccacaggtgacgcctataccggtgtgaataataggccgactcgagcggagtcgttaaactgagaacctccatacggatggcaacttggcttgcgtacggggacgccgctaaagtcacagtgggttaagtccggcgggttgacaaccccagcaaggcgagggggtcctattgttggactctgccagttcccggtggaggtaggcatggggtggcccagctccgcggcgcgctacagccggggtagcccaaaatccgaaaggtgagggcgggccacatgtccgaaatttagtcaagc

SEQ ID NO: 16235 - DNA, 520 bp, synthetic construct
  source 1..520: mol_type = other DNA
ggggaatctcaccccccgtccggttccggaagaatcggaaaccgacaccctgaccaatcattcttgatcatagagtggatgttagtgaaagccagacgaaagccggcggatgggtggtgacagggttggtaggtcgtaaatcccggccaccctggtacccggtataagttgggcggaagctaattgaagctccgtgctcttttttgtgcgttcttggtgcacggtccacaggtgacgcctataccggtgtgaataataggccgactcgagcggagtcgttaaactgagaacctccatacggatggcaacttggcttgcgtacggggacgccgctaaagtcacagtgggttaagtccggcgggttgacaaccccagcaaggcgagggggtcctattgttggactctgccagttcccggtggaggtaggcatggggtggcccagctccgcggcgcgctacagccggggtagcccaaaatccgcaaggtgagggcgggccacatgtccgaaatttagtcaagc

SEQ ID NO: 16236 - DNA, 498 bp, synthetic construct
  source 1..498: mol_type = other DNA
gttccggaagaatcggaaaccgacaccctgaccaatcatttttgatcatagagtggatgttagtgaaagccagacgaaagccggcggatgggtggtgacagggttggtaggtcgtaaatcccggccaccctggtacccggtataagttgggcggaagctgactgaagctccgtgctcttttctgtgcgttcttggtgcacggtccacaggtgacgcctataccggtgtgaataataggccgactcgagcggagtcgttaaactgagaacctccatacggatggcaacttggcttgcgtacggggacgccgctaaagtcacagtgggttaagtccggcgggttgacaaccccagcaaggcgagggggtcctattgttggactctgccagttcccggtggaggtaggcatggggtggcccagctccgcggcgcgctacagccggggtagcccaaaatccgaaaggtgagggcgggccacatgtccgaaatttagtcaagc

SEQ ID NO: 16237 - DNA, 436 bp, synthetic construct
  source 1..436: mol_type = other DNA
gtaaatcccggccccagtggatctgggaatatgataggaggagcagtgcggttcgaccaccgcacgggaccactgaccggcttgacgaagcggctagtagttgactagggcacggtccacaggtgtggcgtaccggtgtgaataacggcccgtctggagcgacagacgttaaactgaggggggtgtgaggatggcaacgcggcccgtgtacggggacgtcgctaaataccttcgggaacagctatgcgggttgtcaaccccagcggtggcgcggcccgcctactgttggcgggtgccagttccctctcaccctcgcgaaagcagcacggggccccccagctggcgcagcgctacatgcggcaagaggaaaatccttcgggtgacctcggggggcatgtcccaaccaaacatgatactaggggtagcaactgccaag

SEQ ID NO: 16238 - DNA, 509 bp, synthetic construct
  source 1..509: mol_type = other DNA
ccccccgtccggttccggaagaatcggaaaccgacaccctgaccaatcattcttgatcatagagtggatgttagtgaaagccagacgaaagccggcggatgggtggtgacagggttggtaggtcgtaaatcccggccaccctggtacccggtataagttgggcggaagctgactgaagctccgtgctcttttctgtgcgttcttggtgcacggtccacaggtgacgcctataccggtgtgaataataggccgactcgagcggagtcgttaaactgagaacctccatacggatggcaacttggcttgcgtacggggacgccgctaaagtcacagtgggttaagtccggcgggttgacaaccccagcaaggcgagggggtcctattgttggactctgccagttcccggtggaggtaggcatggggtggcccagctccgcggcgcgctacagccggggtagcccaaaatccgaaaggtgagggcgggccacatgtccgaaatttagtcaagc

SEQ ID NO: 16239 - DNA, 520 bp, synthetic construct
  source 1..520: mol_type = other DNA
ggggaatctcaccccccgtccggttccggaagaatcggaaaccgacaccctgaccaatcattcttgatcatagagtggatgttagtggaagccagacgaaagccggcggatgggtggtgacagggttggtaggtcgtaaatcccggccaccctggtacccggtataagttgggcggaagctgactgaagctccgtgctcttttctgtgcgttcttggtgcacggtccacaggtgacgcctataccggtgtgaataataggccgactcgagcggagtcgttaaactgagaacctccatacggatggcaacttggcttgcgtacggggacgccgctaaagtcacagtgggttaagtccggcgggttgacaaccccagcaaggcgagggggtcctattgttggactctgccagttcccggtggaggtaggcatggggtggcccagctccgcggcgcgctacagccggggtagcccaaaatccgaaaggtgagggcgggccacatgtccgaaacttagtcaagc

SEQ ID NO: 16240 - DNA, 419 bp, synthetic construct; identical to SEQ ID NO: 6
  source 1..419: mol_type = other DNA

SEQ ID NO: 16241 - DNA, 508 bp, synthetic construct
  source 1..508: mol_type = other DNA
cccccgtccggttccggaagaatcggaaaccgacaccctgatcaatcattcttgatcatagagtggatgttagtgaaagccagacgaaagccggcggatgggtggtgacagggttggtaggtcgtaaatcccggccaccctggtacccggtataagttgggcggaagctgactgaagctccgtgctcttttctgtgcgttcttggtgcacggtccacaggtgacgcctataccggtgtgaataataggccgactcgagcggagtcgttaaactgagaacctccatacggatggcaacttggcttgcgtacggggacgccgctaaagtcacagtgggttaagtccggcgggttgacaaccccagcaaggcgagggggtcctattgttggactctgccagttcccggtggaggtaggcatggggtggcccagctccgcggcgcgctacagccggggtagcccaaaatccgaaaggtgagggcgggccacatgtccgaaatttagtcaagc

SEQ ID NO: 16242 - DNA, 519 bp, synthetic construct
  source 1..519: mol_type = other DNA
ggggaatctcaccccccgtccggttccggaagaatcggaaaccgacaccctgaccaatcattcttgatcatagagtggatattagtgaaagccagacgaaagccggcggatgggtggtgacagggttggtaggtcgtaaatcccggccaccctggtacccggtataagttgggcggaagctgactgaagctctgtgctcttttttgtgcgtgcttggtgcacggtccacaggtgacgcctataccggtgtgaataataggccgactcgagcggagtcgttaaactgagaacctccatacggatggcaacttggcttgcgtacggggacgccgctaaagtcacagtgggttaagtccggcgggttgacaaccccagcaaggcgagggggtcctattgttggactctgccagttcccggtggaggtaggcatggggtggcccagctccgcggcgcgctacagccggggtagcccaaaatccgaaaggtgagggcgggccacatgtccgaatttagtcaagc

SEQ ID NO: 16243 - DNA, 275 bp, synthetic construct
  source 1..275: mol_type = other DNA
aggttgtgggcggcgacggtccgcagggcctagtaggacgtgtgacaatgccatgcgggatcatgacactggggtgagcggaggcagcaccgaagtcgggtgaactcgactcccagtgcgaccacctggcttggtcgttcatggagggcatgcccacgggaacgctgatcgtgcaaagggatgggtccctgcactggtgccatgcgcggcaccactccgtacagcctgatagggtggcggcgggcccccccagtgtgacgtccgtggagcgcaac

SEQ ID NO: 16244 - DNA, 524 bp, synthetic construct; identical to SEQ ID NO: 550
  source 1..524: mol_type = other DNA

SEQ ID NO: 16245 - DNA, 546 bp, synthetic construct; identical to SEQ ID NO: 585
  source 1..546: mol_type = other DNA

SEQ ID NO: 16246 - DNA, 531 bp, synthetic construct
  source 1..531: mol_type = other DNA
cccccccggcactgggtgcaagccccagaaaccgacgcctatcttagtagacgcaatgactcggcgccgactcggcgaccggccaaaaggtggtggatgggtgatgacagggttggtaggtcgtaaatcccggtcaccttggtagccactataggtgggtcttaagagaaggttaagattcctcttgtgcctgcgacgagaccgcgcacggtccgcaggtgttggccctaccggtgtgaataagggcccgacgtcaggctcgtcgttaaaccgagcccgtcacccacctgggcaaacgacgcccacgtacggtccacgtcgcccttcaatgcctctcttggccaataggtttaaccggcgagttggcaaggaccagtgggggccgggggcttggagagggactccaagtcctgcccttcccggtgggccgggaaatgcatggggccacccagctccgcggcggcctgcagccggggtagcccaagaatccttcgggtgagggcgggtggcatttctcttttctataccatc

SEQ ID NO: 16247 - DNA, 530 bp, synthetic construct; identical to SEQ ID NO: 561
  source 1..530: mol_type = other DNA

SEQ ID NO: 16248 - DNA, 533 bp, synthetic construct
  source 1..533: mol_type = other DNA
cccccccccggcactgggtgcaagccccagaaaccgacgcctactaaagcaggcattaaggcctcgcgccgaaccggcgaccggccaaaaggtggtggatgggtgatgccagggttggtaggtcgtaaatcccggtcatcttggtagccactataggtgggtcttaaggggaggctacagtccctctattacctgcggcgggaacgcgcacggtccacaggtgttggccctaccggtgtgaataagggcccgacgtcaggctcgtcgttaaaccgagcccgtcatccccctgggcaaacgacgcccacgtacggctcacgtcgcccttcaatgtctctcttgaccaataggcttagccggcgagttgacaagagccagtgggggccgggggtgagggggaaggacccccctccctgcccatcccgggggagcgggaaatgcatggggccacccagctccgcggcggcctgcagccggggtagcccaagagccttcgggtgagggcgggtggcatttctttccttgtaccgatc

SEQ ID NO: 16249 - DNA, 411 bp, synthetic construct; identical to SEQ ID NO: 448
  source 1..411: mol_type = other DNA

SEQ ID NO: 16250 - DNA, 533 bp, synthetic construct; identical to SEQ ID NO: 568
  source 1..533: mol_type = other DNA

SEQ ID NO: 16251 - DNA, 532 bp, synthetic construct
  source 1..532: mol_type = other DNA
cccccccccggcactgggtgcgagccccagaaaccgacgcctactgaagtagacgtaatggccctgcgccaaaccggcgaccggccaaaaggtggtggatgggtgatgacagggttggtaggtcgtaaatcccggtcatcctggtagccactataggtgggtctaaaggggaggttatggtccctcttgcgcatatggaggaaaagcgcacggtccacaggtgttggtcctaccggtgtaataaggacccggcgctaggcacgccgttaaaccgagcccgttactcccctgggcaaacgacgcccacgtacggtccacgtcgcccttcaatgtctctcttgaccaataggcttagccggcgagttgacaaggaccagtgggggccgggcgggagggggaaggacccccaccgctgcccttcccggggaggcgggaaatgcatggggccacccagctccgcggcggcctacagccggggtagcccaagaaccttcgggtgagggcgggtggcattctttttcctataccaatc

SEQ ID NO: 16252 - DNA, 532 bp, synthetic construct
  source 1..532: mol_type = other DNA
cccccccacggcactgggtgcgagccccagaaaccgacgcctactgaagtagacgtaatggccccgcgccaacctggcgaccggccaaaaggtggtggatgggtgatgacagggttggtaggtcgtaaatcccggtcatcctggtagccactataggtgggtcttaagggaaggctacggtccctcttgcgcatatggaggaaaagcgcacggtccacaggtgttggtcctaccggtgtaataaggacccggcgctaggcacgccgttaaaccgagcccgttactcccctgggcaaacgacgcccatgtacggtccacgtcgcccttcaatgtctctcttgaccaataggcttagccggcgagttgacaaggaccagtgggggccgggcgggagggggaaggaccccccccgctgcccttcccggggaggcgggaaatgcatggggccacccagctccgcggcggcctacagccggggtagcccaagagccttcgggtgagggcgggtggcatttctctttctgtaccaatc

SEQ ID NO: 16253 - DNA, 532 bp, synthetic construct
  source 1..532: mol_type = other DNA
cccccccccggcactgggtgcaagccccagaaaccgacgcctactgaagtagacgtaatggcccagcgccaaaccggcgaccggccaaaaggtggtggatgggtgatgccagggttggtaggtcgtaaatcccggtcatcttggtagccactataggtgggtcttaaggggaggcaaaggtccctcttgcgcttatggaggaacagcgcacggtccacaggtgttggtcctaccggtgtaataaggacccggcgctaggcacgccgttaaaccgagcccgttactcccctgggcgaacgacgctcacgtacggtccacgtcgcccttcaatgtctctcttgaccaataggcatagccggcgagttgacaaggaccagtgggggccgggcgggagggggaaggacccccaccgctgcccttcccggggaggcgggaaatgcatggggccacccagctccgcggcggcctacagccggggtagcccaagaaccttcgggtgagggcgggtggcatttttcttcctgtaccgatc

SEQ ID NO: 16254 - DNA, 389 bp, synthetic construct; identical to SEQ ID NO: 4
  source 1..389: mol_type = other DNA

SEQ ID NO: 16255 - DNA, 529 bp, synthetic construct
  source 1..529: mol_type = other DNA
cccacggcactgggtgcaagccccagaaaccgacgcctactgaagtagacgtaatggccccgcgccgaaccggcgaccggccaaaaggtggtggatgggtgatgccagggttggtaggtcgtaaatcccggtcatcttggtagccactataggtgggtcttaaggggaggtaaaggtccctcttgcgcatatggagggaaagcgcacggtccacaggtgttggtcctaccggtgtaataaggacccggcgctaggcacgccgttaaaccgagcccgttactctcctgggcaaacgacgcccacgtacggtccacgtcgcccttcaatgtctctcttgaccaataggcttagccggcgagttgacaaggaccagtgggggccgggcgagtgggggagggacccccaccgctgcccttcccggggaggcgggaaatgcatggggccacccagctccgcggcggcctacagccggggtagcccaagagccttcgggtgagggcgggtggcatttttctttcctgtaccgatc

SEQ ID NO: 16256 - DNA, 513 bp, synthetic construct; identical to SEQ ID NO: 538
  source 1..513: mol_type = other DNA

SEQ ID NO: 16257 - DNA, 523 bp, synthetic construct
  source 1..523: mol_type = other DNA
cactgggtgtaagccccagaaaccgacgcctatctaagtagacgcaatgactcggcgccaactcggcgaccggccaaaaggtggtggatgggtgatgacagggttggtaggtcgtaaatcccggtcatcctggtagccactataggtgggtcttaagagaaggttaagattcctcttgtgcctgcggcgagaccgcgcacggtccacaggtgttggccctaccggtggtaataagggcccgacgtcaggctcgtcgttaaaccgagcccgtcacccacctgggcaaacgacgcccacgtacggtccacgtcgcccttcaatgtctctcttgaccaataggcttagccggcgagttgacaaggaccagtgggggccgggggcttggagaaggactccaagtcctgcccttcccggtggaacgggaaatgcatggggccacccagctccgcggcggcctgcagccggggtagcccaagaatccttcgggtgagggcgggtggcattttctcttttctataccatc

SEQ ID NO: 16258 - DNA, 481 bp, synthetic construct
  source 1..481: mol_type = other DNA
acgcaatgactcggcgccgactcggcgaccggccaaaaggtggtggatgggtgatgacagggttggtaggtcgtaaatcccggtcatcctggtagccactataggtgggtcttaagagaaggttaagattcctcttgtgcctgcggcgagaccgcgcacggtccacaggtgttggccctaccggtgtgaataagggcccgacgtcaggctcgtcgttaaaccgagcccactacccacctgggcaaacgacgcccacgtacggtccacgtcgcccttcaatgtctctcttgaccaataggttcgtccggcgagttgacaaggaccagtgggggccgggggtcacggggatggaccccggaccctgcccttcccggtggagtgggaaatgcatggggccacccagctccgcggcggcctgcagccggggtagcccaagagccttcgggtgagggcgggtggcattttttcttctataccgatc

SEQ ID NO: 16259 - DNA, 518 bp, synthetic construct
  source 1..518: mol_type = other DNA
gggtgcaagccccagaaaccgacgcctatctaagtagacgcaatgactcggcgccgactcggcgaccggccaaaaggtggtggatgggtgatgacagggttggtaggtcgtaaatcccggtcaccttggtagccactataggtgggtcttaagaggaggttaagattcctcttgtgcctgcggcgagaccgcgcacggtccgcaggtgttggccctaccggtgtgaataagggcccgacgtcaggctcgtcgttaaaccgagcccgtaacccacctgggcaaacgacgcccacgtacggtccacgccgcccttcaatgcctctcttggccaataggtttaaccggcgggttgacaaggaccagtgggggccgggggctaggagagggactcctagccctgcccttcccggtgggccgggaaatgcatggggccacccagctccgcggcggcctgcagccggggtagcccaagaatccttcgggtgagggcgggtggcatttcctttttctataccatc

SEQ ID NO: 16260 - DNA, 513 bp, synthetic construct
  source 1..513: mol_type = other DNA
aagccccagaaaccgacgcctatctaagtagacgcaatgactcggcgccgactcggcgaccggccaaaaggtggtggatgggtgatgacagggttggtaggtcgtaaatcccggtcatcctggtagccactataggtgggtcttaagagaaggttaagattcctcttgtgcctgcggcgagaccgcgcacggtccacaggtgttggccctaccggtgtgaataagggcccgacgtcaggctcgtcgttaaaccgagcccgttacccacctgggcaaacgacgcccacgtacggtccacgtcgcccttcaatgtctctcttgaccaataggcttagccggcgagttgacaaggaccagtgggggccgggggctatggagatggactccaagtcctgcccttcccggtggggcgggaaatgcatggggccacccagctccgcggcggcctgcagccggggtagcccaagaacccttcgggtgagggcgggtggcatttttcttttctataccatc

SEQ ID NO: 16261 - DNA, 523 bp, synthetic construct; identical to SEQ ID NO: 548
  source 1..523: mol_type = other DNA

SEQ ID NO: 16262 - DNA, 498 bp, synthetic construct; identical to SEQ ID NO: 525
  source 1..498: mol_type = other DNA

SEQ ID NO: 16263 - DNA, 497 bp, synthetic construct
  source 1..497: mol_type = other DNA
gcttcggcgcctagccgaaaccgacaccctgttcgaaatctttccgaaacatagagcggttgtggggaaactggacgaaagccagcggatggggggtgacagggtaggcaggtcgtaaatcccggcctccctggtacctggtataagtctggtggaaccatagcttaactgtgcagacgtgggacgtaggcagagtgcacggtccacaggtgacgcctataccggtgtgaataataggccgactcgagcggagtcgttaaactgaggacccattctaggatcacaacttggctgccgtacggtgacgccgctaaagtcacagtgggttaagtccggcgggttgacaacaccaggcaggcggggggacgctactgttgcgccctgtgagttccctagttgggtaggcatggggggacccagctccgcggcgcgctacagccggggtaggccaaaaatccgaaaggtgaggccgggtcccattttctttcttgagtctc

SEQ ID NO: 16264 - DNA, 516 bp, synthetic construct
  source 1..516: mol_type = other DNA
cactgggtgcaagccccagaaaccgacgcctatctaagtagacgcaatgactcggcgccaactcggcgaccggccaaaaggtggtggatgggtgatgacagggttggtaggtcgtaaatcccggtcaccttggtagccactataggtgggtcttaagagaaggttaagattcctcttgtgcctgcggcgagaccgcgcacggtccgcaggtgttggccctaccggtgtgaataagggcccgacgtcagggtcgtcgttaaaccgagcccgttaccctcctgggcaaacgacgcccacgtacggtccacgtcgcccttcaatgtctctcttgaccaataggcttggccggcgagttgacaaggaccagtgggggccgggggtggagagggactcaccctgcccttcccggggggccgggaaatgcatggggccacccagctccgcggcgccctgcagccggggtagcccaagatccttcgggtgagggcgggtggcattttccttttctgtaccatc

SEQ ID NO: 16265 - DNA, 521 bp, synthetic construct
  source 1..521: mol_type = other DNA
ggggaatctcacccccccgtccggttccggaagaatcggaaaccgacaccctgaccaatcattcttgatcatagagtggatgttagtgaaagccagacgaaagccggcggatgggtggtgacagggttggtaggtcgtaaatcccggccaccctggtacccggtataagttgggcggaagctgacggaagctccgtgctcttttttgtgcgtgcttggtgcacggtccacaggtgacgcctataccggtgtgaataataggccgactcgagcggagtcgttaaactgagaacctccatacggatggcaacttggcttgcgtacggggacgccgctaaagtcacagtgggttaagtccggcgggttgacaaccccagcaaggcgagggggtcctattgttggactctgccagttcccggtggaggtaggcatggggtggcccagctccgcggcgcgctacagccggggtagcccaaaatccgaaaggtgagggcgggccacatgtccgaaatttagtcaagc

SEQ ID NO: 16266 - DNA, 420 bp, synthetic construct; identical to SEQ ID NO: 459
  source 1..420: mol_type = other DNA

SEQ ID NO: 16267 - DNA, 420 bp, synthetic construct
  source 1..420: mol_type = other DNA
gttggtaggtcgtaaatcccggtcatcttggtagccactataggtgggtcttaagggtgggtcaaggttcctcttacgcctgtggcgggacagcgcacggtccacaggtgttggccctaccggtgtgaataagggcccgacgtcaggctcgtcgttaaaccgagaccattacccgcctgggcaaacgacgcccacgtacggtccacgtcgcccttcaatgtctctcttgaccaataggctttgccggcgagttgacaaggaccagtgggggccgggtgcagggggaaggaccccctgtactgcccattccggcggggtgggaaatgcatggggccacccagctccgcggcggcctgcagccggggtagcccaagaatccttcgggtgagggcgggtggcatttttctttctgtaccaatc

SEQ ID NO: 16268 - DNA, 420 bp, synthetic construct
  source 1..420: mol_type = other DNA
gttggtaggtcgtaaatcccggtcatcttggtagccactataggtgggtcttaagggtgggtcaaggttcctcttacgcctgtggcgggacagcgcacggtccacaggtgttggccctaccggtgtgaataagggcccgacgtcaggttcgtcgttaaaccgagaccattactcacctgggcgaacgacgcccatgtacggtccacgtcgcccttcaatgtctctcttgaccaataggcttagccggcgagttgacaaggaccagtgggggccgggtgtagggggaaggaccccctgcactgcccttcccggtggggtgggaaatgcatggggccacccagctccgcggcgacctgcagccggggtagcccaagaacccttcgggtgaggacgggtggcattttattttctgtaccaatc

SEQ ID NO: 16269 - DNA, 513 bp, synthetic construct
  source 1..513: mol_type = other DNA
cccccccccggcactgggtgcgagccccagaaaccgacgcctactgaagtagacgtaatggccctgcgccaaaccggcgaccggccaaaaggtggtggatgggtgatgacagggttggtaggtcgtaaatcccggtcatcctggtagccactataggtgggtctaaaggggaggttatggtccctcttgcgcatatggaggaaaagcgcacggtccacaggtgttggtcctaccggtgtaataaggacccggcgctaggcacgccgttaaaccgagcccgttactcccctgggcaaacgacgctcacgtacggtccacgtcgcccttcaatgtctctcttgaccaataggcttagccggcgagttgacaaggaccagtgggggccccccctcgctgcccttcccggggaggcgggaaatgcatggggccacccagctccgcggcggcctacagccggggtagcccaagaaccttcgggtgagggcgggtggcattctttttcctataccaatc

SEQ ID NO: 16270 - DNA, 513 bp, synthetic construct
  source 1..513: mol_type = other DNA
cccccccccggcactgggtgcaagccccagaaaccgacgcctactgaagtagacgtaatggccccgcgccgaaccggcgaccggccaaaaggtggtggatgggtgatgacagggttggtaggtcgtaaatcccggtcatcctggtagccactataggtgggtcttaaggggaagcaacggtccctcttgcgcatatggagggaaagcgcacggtccacaggtgttggtcctaccggtgtaataaggacccggcgctaggcacgccgttaaaccgagcccgttactcccctgggcaaacgacgcccacgtacggtccacgtcgcccttcaatgtctctcttgaccaataggcttagccggcgagttgacaaggaccagtgggggccccccctcgctgcccttcccggggaggcgggaaatgcatggggccacccagctccgcggcggcctacagccggggtagcccaagagccttcgggtgagggcgggtggcatttctcttcctataccgatc

SEQ ID NO: 16271 - DNA, 513 bp, synthetic construct; identical to SEQ ID NO: 539
  source 1..513: mol_type = other DNA

SEQ ID NO: 16272 - DNA, 513 bp, synthetic construct
  source 1..513: mol_type = other DNA
cccccccccggcactgggtgcgagccccagaaaccggcgcctactaaagtagacgtaatggccccgcgccaaaccggcgaccggccaaaaggtggtggatgggtgatgccagggttggtaggtcgtaaatcccggtcatcttggtagccactataggtgggtcttaaggggaggtaacggtccctcttgcgtgtatggagggaaagcgcacggtccacaggtgttggtcctaccggtgtaataaggacccggcgctaggcacgccgttaaaccgagcccgttactcccctgggcaaacgacgcccacgtacggtccacgtcgcccttcaatgtctctcttgaccaataggcgtagccggcgagttgacaaggaccagtgggggccccccctcgctgcccttcccggggaggcgggaaatgcatggggccacccagctccgcggcggcctacagccggggtagcccaagagccttcgggtgagggcgggtggcatttttcttcctgaaccgatc

SEQ ID NO: 16273 - DNA, 513 bp, synthetic construct
  source 1..513: mol_type = other DNA
cccccccccggcactgggtgcgagccccagaaaccgacgcctactaaagtagacgcaatggtccagcgccaaactggcgaccggccaaaaggtggtggatgggtgatgacagggttggtaggtcgtaaatcccggtcatcctggtagccactataggtgggtcttaaagggaggctacggtccctcttgcgcttatggagggaaagcgcacggtccacaggtgttggtcctaccggtgtaataaggacccggcgctaggcacgccgttaaaccgagcccgttactcccctgggcaaacgacgcccatgtacggtccacgtcgcccttcaatgtctctcttgaccaataggcttagccggcgagttgacaaggaccagtgggggccccccctcgctgcccttcccggggaggcgggaaatgcatggggccacccagctccgcggcggcctacagccggggtagcccaagagccttcgggtgagggcgggtggcatttttcttcctgtaccgatc

SEQ ID NO: 16274 - DNA, 512 bp, synthetic construct
  source 1..512: mol_type = other DNA
cccccccccggcactgggtgcaagccccagaaaccgacgcctactgaagtagacgtaatggtccagcgccgaaccggcgaccggccaaaaggtggtggatgggtgatgacagggttggtaggtcgtaaatcccggtcatcctggtagccactataggtgggtctaaaggggaggttacggtccctcttgcgcatatggaggaaaagcgcacggtccacaggtgttggtcctaccggtgtaataaggacccggcgctaggcacgccgttaaaccgagcccgttactcccctgggcaaacgacgctcacgtacggtccacgtcgcccttcaatgtctctcttgaccaataggcttagccggcgagttgacaaggaccagtgggggcccccaccgctgcccttcccggggaggcgggaaatgcatggggccacccagctccgcggcggcctacagccggggtagcccaagagccttcgggtgagggcgggtggcatttttcttcctataccgatc

SEQ ID NO: 16275 - DNA, 512 bp, synthetic construct
  source 1..512: mol_type = other DNA
cccccccacggcactgggtgcgagccccagaaaccgacgcctactgaagtagacgtaatggccccgcgccgaaccggcgaccggccaaaaggtggtggatgggtgatgccagggttggtaggtcgtaaatcccggtcatcttggtagccactataggtgggtcttaaggagaggcaacggtccctcttgcgcatatggagggaaagcgcacggtccacaggtgttggtcctaccggtgtaataaggacccggcgctaggcacgccgttaaaccgagcccgttactcccctgggcaaacgacgcccacgtacggtccacgtcgcccttcaatgtctctcttgaccaataggtttatccggcgagttgacaaggaccagtgggggcccccgccgctgcccgttccggggaggcgggaaatgcatggggccacccagctccgcggcggcctacagccggggtagcccaagagccttcgggtgagggcgggtggcatttttcttcctgtaccgatc

SEQ ID NO: 16276 - DNA, 512 bp, synthetic construct
  source 1..512: mol_type = other DNA
cccccccccggcactgggtgcaagccccagaaaccgacgcctactgaagtagacgtaatggccctgcgccgaaccggcgaccggccaaaaggtggtggatgggtgatgacagggttggtaggtcgtaaatcccggtcatcctggtagccactataggtgggtcttaaggggaggttatggtccctcttgcgcgtatggaaggaaagcgcacggtccacaggtgttggtcctaccggtgtaataaggacccggcgctaggcacgccgttaaaccgagcccgttactcccctgggcaaacgacgcccacgtacgacccacgtcgcccttcaatgtctctcttgaccaataggctttgccggcgagttgacaagggtcagtgggggcccccaccgctgcccttcccggggaggcgggaaatgcatggggccacccagctccgcggcggcctacagccggggtagcccaagagccttcgggtgagggcgggtggcatttctcttcctgtaccgatc

SEQ ID NO: 16277 - DNA, 534 bp, synthetic construct; identical to SEQ ID NO: 571
  source 1..534: mol_type = other DNA

SEQ ID NO: 16278 - DNA, 533 bp, synthetic construct; identical to SEQ ID NO: 569
  source 1..533: mol_type = other DNA

SEQ ID NO: 16279 - DNA, 533 bp, synthetic construct
  source 1..533: mol_type = other DNA
cccccccccggcactgggtgcaagccccagaaaccgacgcctactaaagcaggcattaaggcctcgcgccgaaccggcgaccggccaaaaggtggtggatgggtgatgccagggttggtaggtcgtaaatcccggtcatcttggtagccactataggtgggtcttaaggggaggctacagtccctctattgcccgtggcgggaacgcgcacggtccacaggtgttggccctaccggtgtgaataagggcccgacgtcaggctcgtcgttaaaccgagcccgttatccccctgggcaaacgacgcccacgtacggctcacgtcgcccttcaatgtctctcttgaccaataggcttagccggcgagttggcaagagccagtgggggccgggggtgagggggatggaccccccaccctgcccttcccgggggagcgggaaatgcatggggccacccagctccgcggcggcctgcagccggggtagcccaagagccttcgggtgagggcgggtggcattttctcttctgtaccaatc

SEQ ID NO: 16280 - DNA, 529 bp, synthetic construct
  source 1..529: mol_type = other DNA
ccccccggcactgggtgcaagccccagaaaccgacgcctactgaagtagacgtgatggccccgcgccgaaccggcgaccggccaaaaggtggtggatgggtgatgccagggttggtaggtcgtaaatcccggtcatcttggtagccactataggtgggtcttaaggggaggtaacggtccctctcgcgcttatggaggaaaagcgcacggtccacaggtgttggtcctaccggtgtaataaggacccggcgctaggcacgccgttaaaccgagcccgttatccccctgggcaaacgacgcccatgtacggtccacgtcgcccttcaatgtctctcttgaccaataggcgtagccggcgagttgacaaggaccagtgggggccgggcggagggggaaggacctcctccgctgcccttcccgggggagcgggaaatgcatggggccacccagctccgcggcggcctacagccggggtagcccaagagccttcgggtgagggcgggtggcatttttctttcctgtaccgatc

SEQ ID NO: 16281 - DNA, 529 bp, synthetic construct
  source 1..529: mol_type = other DNA
ccccccggcactgggtgcgagccccagaaaccgacgcctatcaaaatagacgtgatggccccgcgccaaactggcgaccggccaaaaggtggtggatgggtgatgacagggttggtaggtcgtaaatcccggtcatcctggtagccactataggtgggtcttaaagggcggctacggtccctctcgcgcttacggagagaaagcgcacggtccacaggtgttggccctaccggtgtaataagggcccggcgctaggcacgccgttaaaccgagaccgttatccccctgggctaacgacgcccatgtacggcctacgtcgcccttcaatgtctctcttgaccaataggctttgccggcgagttgacaagggccagtgggggccgggcggcgggggaaggacctcctccgctgcccttcccgggggagcgggaaatgcatggggccacccagctccgcggcggcctacagccggggtagcccaagagccttcgggtgagggcgggtggcatttttctttcctataccgatc

SEQ ID NO: 16282 - DNA, 529 bp, synthetic construct
  source 1..529: mol_type = other DNA
ccccccggcactgggtgcaagccccagaaaccgacgcctactgaagtagacgtgatggccctgcgccgaaccggcgaccggccaaaaggtggtggatgggtgatgccagggttggtaggtcgtaaatcccggtcatcttggtagccactataggtgggtcttaaggggaggtaacggtccctctcgcgcttatggagggaaagcgcacggtccacaggtgttggtcctaccggtgtaataaggacccggcgctaggcacgccgttaaaccgagcccgttatccccctgggcaaacgacgcccacgtacggtccacgtcgcccttcaatgtctctcttgaccaataggcttagccggcgagttgacaaggaccagtgggggccgggtgagagggggagggacccccctcactgcccttcccgggggagcgggaaatgcatggggccacccagctccgcggcggcctacagccggggtagcccaagaaccttcgggtgagggcgggtggcatttttcttcctgtaccgatc

SEQ ID NO: 16283 - DNA, 528 bp, synthetic construct
  source 1..528: mol_type = other DNA
ccccccggcactgggtgcaagccccagaaaccgacgcctatcaaagtagacgtgatggccccgcgccaaactggcgaccggccaaaaggtggtggatgggtgatgacagggttggtaggtcgtaaatcccggtcatcctggtagccactataggtgggtcttaaagggaggctacggtccctctcgcgcttatggagagaaagcgcacggtccacaggtgttggccctaccggtgtaataagggcccggcgctaggcacgccgttaaaccgagaccgttatccccctgggcaaacgacgcccacgtacggcccacgtcgcccttcaatgtctctcttgaccaataggcaaagccggcgagttgacaagggccagtgggggccgggcggcaggggaaggacccctgtcgctgcccttcccgggggagcgggaaatgcatggggccacccagctccgcggcggcctacagccggggtagcccaagagccttcgggtgagggcgggtggcatttttcttcctataccaatc

SEQ ID NO: 16284 - DNA, 528 bp, synthetic construct
  source 1..528: mol_type = other DNA
ccccccggcactgggtgcaagccccagaaaccgacgcctatcaaaatagacgtgatggccccgcgccaaactggcgaccggccaaaaggtggtggatgggtgatgacagggttggtaggtcgtaaatcccggtcactctggtagccactataggtgggtcttaaagggcggctacggtccctctcgcgcttacggagagaaagcgcacggtccacaggtgttggccctaccggtgtaataagggcccggcgctaggcacgccgttaaaccgagaccgcactccccctgggcaaacgacgcccatgtacggcctacgtcgcccttcaatgtctctcttgaccaataggctttgccggcgagttgacaagggccagtgggggccgggcggcgggagaaggactccctccgctgcccatcccgggggaacgggaaatgcatggggccacccagctccgcggcggcctacagccggggtagcccaagagccttcgggtgagggcgggtggcattttctcttctgtaccaatc

SEQ ID NO: 16285 - DNA, 528 bp, synthetic construct
  source 1..528: mol_type = other DNA
ccccccggcactgggtgcaagccccagaaaccgacgcctactaaagtagacgtgatggccccgcgccgaaccggcgaccggccaaaaggtggtggatgggtgatgccagggttggtaggtcgtaaatcccggtcatcttggtagccactataggtgggtcttaaggggaggttacggtccctctcgcgcttacggagggaaagcgcacggtccacaggtgttggccctaccggtgtaataagggcccggcgataggcacgccgttaaaccgagcccgttatctccctgggcaaacgacgcccatgtacggtccacgtcgcccttcaatgtctctcttgaccaataggcttagccggcgagttgacaaggaccagtgggggccgggcaaggggggaaggaccccccttgctgcccttcccgggggagcggggaatgcatggggccacccagctccgcggcggcctacagccggggtagcccaagagccttcgggtgagggcgggtggcatttatctttcctgtatgatc

SEQ ID NO: 16286 - DNA, 531 bp, synthetic construct
  source 1..531: mol_type = other DNA
ccccccccggcactgggtgcaagccccagaaaccgacgcctatctaagcaggcgttatggcctcgcgccaaaccggcgaccggccaaaaggtggtggatgggtgatgccagggttggtaggtcgtaaatcccggtcatcttggtagccactataggtgggtcttaaggggaggctacagtccctctaatgcccgtggcgagaacgcgcacggtccacaggtgttggtcctaccggtgtaataaggacccgacgccaggctcgtcgttaaaccgagcccattatccccctgggcaaacgacgcccacgtacggtctacgtcgcccttcaatgtctctcttgaccaataggcgtgagccggcgagttgacaaagaccagtgggggccgggggtgtggggaaggaccccgcatcctgcccttcccgggggagtgggaaatgcatggggccacccagctccgcggcggcctgcagccggggtagcccaagagccttcgggtgagggcgggtggcattttctttcctataccgatc

SEQ ID NO: 16287 - DNA, 528 bp, synthetic construct
  source 1..528: mol_type = other DNA
ccccccggcactgggtgcaagccccagaaaccgacgcctatcaaagtagacgtgatggccccgcgccaaactggcgaccggccaaaaggtggtggatgggtgatgacagggttggtaggtcgtaaatcccggtcatcctggtagccactataggtgggtcttaaagggaggctacggtccctctcgcgcttatggagagaaagcgcacggtccacaggtgttggccctaccggtgtaataagggcccggcgctaggcacgccgttaaaccgagaccattatccccctgggcaaacgacgcccatgtacggtccacgtcgcccttcaatgtctctcttgaccaataggctatgccggcgagttgacaagggccagtgggggccgggcggtgggggaaggacctccaccgctgcccttcccgggggagtgggaaatgcatggggccacccagctccgcggcggcctacagccggggtagcccaagagccttcgggtgagggcgggtggcattttctttcctataccaatc

SEQ ID NO: 16288 - DNA, 529 bp, synthetic construct
  source 1..529: mol_type = other DNA
ccccccggcactgggtgcgagccccagaaaccgacgcctatcaaagtagacgtgatggccctgcgccaaactggcgaccggccaaaaggtggtggatgggtgatgacagggttggtaggtcgtaaatcccggtcatcctggtagccactataggtgggtcttaaagggaggtaatggtccctctcgcgcttatggagagaaagcgcacggtccacaggtgttggtcctaccggtgtaataaggacccggcgctaggcacgccgttaaaccgagaccgctatccccctgggcaaacgacgcccacgtacggcctacgtcgcccttcaatgtctctcttgaccaataggcctagccggcgagttggcaagggccagtgggggccgggcaccaagggagggacccttggtgctgcccatcccgggggaaacgggaaatgcatggggccacccagctccgcggcggcctacagccggggtagcccaagaaccttcgggtgagggcgggtggcattttctttcctataccaatc

SEQ ID NO: 16289 - DNA, 427 bp, synthetic construct; identical to SEQ ID NO: 469
  source 1..427: mol_type = other DNA

SEQ ID NO: 16290 - DNA, 427 bp, synthetic construct
  source 1..427: mol_type = other DNA
ctggacgaaagcccgtggacgggcggtgacagggttggcaggtcgtaaatcccggccgccctggtagcgggtataagtctggaggaaacccgtgaaccgacagcgtgacgctctgctagcgaacgtgcacggtccacaggagacgccgattccggtgtgaataatcggccgactcgagcggagtcgttaaactgaggaccattgaggagatggaaacctggcttgcgtacgggaacgccgctaaagtcacagtgggttaagtccggcgggttgacaatcccagcaaggcggggggacgttattgttacgcccttccagttcctcctctttggtaggcatggggggacccagctccgcggcgcgctacagccggggtagcccaaaatccttcgggtgagggcgggtcccatgtccctctttttcaggc

SEQ ID NO: 16291 - DNA, 529 bp, synthetic construct; identical to SEQ ID NO: 556
  source 1..529: mol_type = other DNA

SEQ ID NO: 16292 - DNA, 423 bp, synthetic construct; identical to SEQ ID NO: 463
  source 1..423: mol_type = other DNA

SEQ ID NO: 16293 - DNA, 498 bp, synthetic construct
  source 1..498: mol_type = other DNA
gcttcggcgcctagccgaaaccgacaccctgttcgaaatctttccgaaacatagagcggttgtggggaaactggacgaaagccagcggatggggggtgacagggtaggcaggtcgtaaatcccggcctccctggtacctggtataagtctggtggaaccatagcttaactgtgtggactttggacgtaggcagagtgcacggtccacaggtgacgcctataccggtgtgaataataggccgactcgagcggagtcgttaaactgaggacccattctaggatcacaacttggctgccgtacggtgacgccgctaaagtcacagtgggttaagtccggcgggttgacaacaccaggcaggcggggggacgctactgttgcgccctgtgagttccctagttgggtaggcatgggggggcccagctccgcggcgcgctacagccggggtaggccaaaaatccgaaaggtgaggccgggtcccatcttctttctttgagtctc

SEQ ID NO: 16294 - DNA, 387 bp, synthetic construct; identical to SEQ ID NO: 413
  source 1..387: mol_type = other DNA

SEQ ID NO: 16295 - DNA, 389 bp, synthetic construct; identical to SEQ ID NO: 423
  source 1..389: mol_type = other DNA

SEQ ID NO: 16296 - DNA, 387 bp, synthetic construct
  source 1..387: mol_type = other DNA
tagccactataggtgggtcttaagggtgggtcaaggcacctcttactcctgcggcgggacagcgcacggtccacaggtgttggccctaccggtgtgaataagggcccgacgtcaggctcgtcgttaaaccgagcccactacccacctgggcaaacgacgcccacgtacggtccacgtcgcccttcaatgtctctcttggccaataggctttgccggcgagttgacaaagaccaatgggggccgggcacagggggaaggacccctgtgctgcccttcccggtggggtgggaaatgcatggggccacccagctccgcggcggcctgcagccggggtagcccaagaaccttcgggtgagggcgggtggcattcttctttcctgactaatc

SEQ ID NO: 16297 - DNA, 388 bp, synthetic construct; identical to SEQ ID NO: 420
  source 1..388: mol_type = other DNA

SEQ ID NO: 16298 - DNA, 518 bp, synthetic construct
  source 1..518: mol_type = other DNA
actgggtgcaagccccagaaaccgacgcctatctaagtagacgcaatgactcggcgccgacccggcgaccggccaaaaggtggtggatgggtgatgccagggttggtaggtcgtaaatcccggtcatcttggtagccactataggtgggtcttaagggaaggttaagattcctcttgtgcctgttgcgagacagcgcacggtccacaggtgttggccctaccggtgtgaataagggcccgacgtcaggctcgtcgttaaaccgagaccgacaccacctgggcaaacgacgcccacgtacggtccacgtcgcccttcaatgtctctcttgaccaataggctttgccgcgagttgacaaggaccagtgggggccgggggcggggggaaggaccctccgtcctgcccttcccggtgggacgggaaatgcatggggccacccagctccgcggcggcctgcagccggggtagcccaagagccttcgggtgagggcgggtggcattttctcttctataccgatc

SEQ ID NO: 16299 - DNA, 423 bp, synthetic construct; identical to SEQ ID NO: 464
  source 1..423: mol_type = other DNA

SEQ ID NO: 16300 - DNA, 290 bp, synthetic construct
  source 1..290: mol_type = other DNA
ataggtgggtcttaagagaaggttaagattcctcttgtgcctgcggcgagaccgcgcacggtccacaggtgttggccctaccggtgtaataagggcccgacgtcaggctcgtcgttaaaccgagcccgtcacccacctgggcgaacgacgcccacgtacggtccacgtcgcccttcaaagcctctcttggacaataggatctcatccggcgagttggcaaggaccagtgggggccgggggtcacagggaaggaccctggaccctgcccttcccggtgggccgggaaatgc

SEQ ID NO: 16301 - DNA, 531 bp, synthetic construct; identical to SEQ ID NO: 564
  source 1..531: mol_type = other DNA

SEQ ID NO: 16302 - DNA, 461 bp, synthetic construct
  source 1..461: mol_type = other DNA
attcttgatcatagagtggatgttagtgaaagccagacgaaagccggcggatgggtggtgacagggttggtaggtcgtaaatcccggccaccctggtacccggtataagttgggcggaagctgactgaagctccgtgctcttttctgtgcgttcttggtgcacggtccacaggtgacgcctataccggtgtgaataataggccgactcgagcggagtcgttaaactgagaacctccatacggatggcaacttggcttgcgtacggggacgccgctaaagtcacagtgggttaagtccggcgggttgacaaccccagcaaggcgagggggtcctattgttggactctgccagttcccggtggaggtaggcatggggtggcccagctccgcggcgcgctacagccggggtagcccaaaatccgaaaggtgagggcgggccacatgtccgaaatttagtcaagc

SEQ ID NO: 16303 - DNA, 402 bp, synthetic construct; identical to SEQ ID NO: 438
  source 1..402: mol_type = other DNA

SEQ ID NO: 16304 - DNA, 501 bp, synthetic construct; identical to SEQ ID NO: 528
  source 1..501: mol_type = other DNA

SEQ ID NO: 16305 - DNA, 527 bp, synthetic construct; identical to SEQ ID NO: 552
  source 1..527: mol_type = other DNA

SEQ ID NO: 16306 - DNA, 450 bp, synthetic construct; identical to SEQ ID NO: 492
  source 1..450: mol_type = other DNA

SEQ ID NO: 16307 - DNA, 450 bp, synthetic construct
  source 1..450: mol_type = other DNA
acatagagcggttgtggggaaactggacgaaagccagcggatggggggtgacagggtaggcaggtcgtaaatcccggcctccctggtacctggtataagtctggtggaaccatagcttaactgtgtggactttggacgtaggcagagtgcacggtccacaggtgacgcctataccggtgtgaataataggccgactcgagcggagtcgttaaactgaggacccattctaggatcacaacttggctgccgtacggtgacgccgctaaagtcacagtgggttaagtccggcgggttgacaacaccaggcaggcggggggacgctactgttgcgccctgtgagttccctagttgggtaggcatggggggacccagctccgcggcgcgctacagccggggtaggccaaaaatccgaaaggtgaggccgggtcccatttctctttcttgagtctc

SEQ ID NO: 16308 - DNA, 367 bp, synthetic construct
  source 1..367: mol_type = other DNA
ggcacggtccacaggtgttggatgggtgatgccagggttggtaggtcgtaaatcccggtcatcatcttggtagccactataggtgggtcttaagcgttggtcaagatccctcttgtgcttgcggcgagaaagcgcacggtccacaggtgttggccctaccggtgggaataagggcccgacgtcaggctcgtcgttaaaccgagcccgtaacccgcctgggcaaacgacgcccacgtacggtccacgtcgcccttcaatgtcgctcttgaccaataggcttagccggcgagttgacaaggaccagtgggggccggggtttttggggaaggaccccaaaccctgcccttcccggcggaccgggaaatgc

SEQ ID NO: 16309 - DNA, 468 bp, synthetic construct
  source 1..468: mol_type = other DNA
gttcgaaatctttccgaaacatagagcggttgtggggaaactggacgaaagccagcggatggggggtgacagggtaggcaggtcgtaaatcccggcctccctggtacctggtataagtctggtggaaccatagcttaactgtgtggactttggacgtaggcagagtgcacggtccacaggtgacgcctataccggtgtgaataataggccgactcgagcggagtcgttaaactgaggacccattctaggatcacaacttggctgccgtacggtgacgccgctaaagtcacagtgggttaagtccggcgggttgacaacaccaggcaggcggggggacgctactgttgcgccctgtgagttccctagttgggtaggcatggggggacccagctccgcggcgcgctacagccggggtaggccaaaaatccgaaaggtgaggccgggtcccattttctttctttgagtctc

SEQ ID NO: 16310 - DNA, 375 bp, synthetic construct
  source 1..375: mol_type = other DNA
tgggtcttaaggggaggtaacggtccctctcgcgcttgtggagagaaagcgcacggtccacaggtgttggtcctaccggtgtgaataaggacccggcgttaggcacgccgttaaaccgagcccgtcatccccctgggcaaacgacgcccacgtacggcctacgtcgcccttcaatgtctctcttgaccaataggcttagccggcgagttgacaagggccagtgggggccgggcgtagggggaaggaccccctgcgctgcccttcccgggggagcgggaaatgcatggggccacccagctccgcggcggcctacagccggggtagcccaagagccttcgggtgagggcgggtggcattttcctttcctaaccgatc

SEQ ID NO: 16311 - DNA, 275 bp, synthetic construct
  source 1..275: mol_type = other DNA
caatgactcggcgccgactcggcgaccggccaaaaggtggtggatgggtgatgacagggttggtaggtcgtaaatcccggtcaccttggtagccactataggtgggtcttaagagaaggttaagattcctcttgtgcctgcggcgagaccgcgcacggtccacaggtgttggccctaccggtgggaataagggcccgacgtcaggctcgtcgttaaaccgagcccgtaacccgcctgggcaaacgacgcccacgtacggtccacgtcgcccttca

SEQ ID NO: 16312 - DNA, 427 bp, synthetic construct; identical to SEQ ID NO: 470
  source 1..427: mol_type = other DNA

SEQ ID NO: 16313 - DNA, 427 bp, synthetic construct
  source 1..427: mol_type = other DNA
tggacgaaagcccgtggatggacggtgacagggttggcaggtcgtaaatcccggccgccctggtagcgggtataagtctgagggaaacccactagaggcttacgtgtacttgtccgcgtggacgtgcacggtccacaggagacgcctattccggtgtgaataataggccgactcgagcggagtcgttaaactgaggaccatttgtaagatggcaacctggcctgcgtacgggaacgccgctaaagaatacagtgggttaagtccggcgggttggcaatcccagcagggcggggggactctattgttgagccctgccagttccttacaattggtaggcatggggggacccagctccgcggcgcgctacagccggggtagtccaaaatccttcgggtgaggacgggtcccatgtccctttttatggctc

SEQ ID NO: 16314 - DNA, 427 bp, synthetic construct
  source 1..427: mol_type = other DNA
tggacgaaagcccgtggatggacggtgacagggttggcaggtcgtaaatcccggccgccctggtagcgggtataagtctgagggaaacccactagaggcttacgtgtacttgtccgcgtggacgtgcacggtccacaggagacgcctattccggtgtgaataataggccgactcgagcggagtcgttaaactgaggaccatttgtaagatggcaacttggcctgcgtacgggaacgccgctaaagaatacagtgggttaagtccggcgggttggcaatcccagcagggcggggggactctattgttgagccctgccagttccttacaagtggtaggcatggggggacccagctccgcggcgcgctacagccggggtagtccaaaatccttcgggtgaggacgggtcccatgtccctttttatggctc

SEQ ID NO: 16315 - DNA, 427 bp, synthetic construct
  source 1..427: mol_type = other DNA
tggacgaaagcccgtggatggacggtgacagggttggcaggtcgtaaatcccggccgccctggtagcgggtataagtctgagggaaacccactagaggcttacgtgtacttgtccgcgtggacgtgcacggtccacaggagacgcctattccggtgtgaataataggccgactcgagcggagtcgttaaactgaggaccatttgtaagatggcaacttggcctgcgtacgggaacgccgctaaagaacacagtgggttaagtccggcgggttggcaatcccagcagggcggggggactctattgttgagccctgccagttccttacaagtggtaggcatggggggacccagctccgcggcgcgctacagccggggtagtccaaaatccttcgggtgaggacgggtcccatgtccctttttatggctc

SEQ ID NO: 16316 - DNA, 427 bp, synthetic construct
  source 1..427: mol_type = other DNA
tggacgaaagcccgtggatggacggtgacagggttggcaggtcgtaaatcccggccgccctggtagcgggtataagtctgagggaaacccactagaggcttacgtgtatttgtccgcgtggacgtgcacggtccacaggagacgcctattccggtgagaataataggccgactcgagcggagtcgttaaactgaggaccatttgtaagatggcaacttggcctgcgtacgggaacgccgctaaagaatacagtgggttaagtccggcgggttggcaatcccagcagggcggggggactctattgttgagccctgccagttccttacaagtggtaggcatggggggacccagctccgcggcgcgctacagccggggtagtccaaaatccttcgggtgaggacgggtcccatgtccctttttatggctc

SEQ ID NO: 16317 - DNA, 427 bp, synthetic construct
  source 1..427: mol_type = other DNA
tggacgaaagcccgtggatggacggtgacagggttggcaggtcgtaaatcccggccgccctggtagcgggtataagtctgagggaaacccactagaggcttacgtgtatttgtccgcgtggacgtgcacggtccacaggagacgcctattccggtgtgaataataggccgactcgagcggagtcgttaaactgaggaccatttgtaagatggcaacctggcctgcgtacgggaacgccgctaaagaatacagtgggttaagtccggcgggttggcaatcccagcagggcggggggactctattgttgagccctgccagttccttacaagtggtaggcatggggggacccagctccgcggcgcgctacagccggggtagtccaaaatccttcgggtgaggacgggtcccatgtccctttttatggctc

SEQ ID NO: 16318 - DNA, 427 bp, synthetic construct
  source 1..427: mol_type = other DNA
tggacgaaagcccgtggatggacggtgacagggttggcaggtcgtaaatcccggccgccctggtagcgggtataagtctgagggaaacccactagaggcttacgtgtatttgtccgcgtggacgtgcacggtccacaggagacgcctattccggtgtgaataataggccgactcgagcggagtcgttaaactgaggaccgcctgtgagatggtaacttggcctgcgtacgggaacgccgctaaagaatacagtgggttaagtccggcgggttgacaatcccagcagggcgggggggctctactgttgagtcctgccagttcctcacaggtggtaggcatggggggacccagctccgcggcgcgctacagccggggtagtccaaaatccttcgggtgaggacgggtcccatgtccctttttttggctc

SEQ ID NO: 16319 - DNA, 427 bp, synthetic construct
  source 1..427: mol_type = other DNA
tggacgaaagcccgtggatggacggtgacagggttggcaggtcgtaaatcccggccgccctggtagcgggtataagtctgagggaaacccactagaggcttacgtgtacttgtccgcgtggacgtgcacggtccacaggagacgcctattccggtgtgaataataggccgactcgagcggagtcgttaaactgaggaccgcctgtaagatggtaacttggcctgcgtacgggaacgccgctaaagaatacagtgggttaagtccggcgggttggcaatcccagcagggcgggggggctctaatgttgagtcctgccagttccttacaggtggtaggcatggggggacccagctccgcggcgcgctacagccggggtagtccaaaatccttcgggtgaggacgggtcccatgtccctttttgatgctc

SEQ ID NO: 16320 - DNA, 427 bp, synthetic construct
  source 1..427: mol_type = other DNA
tggacgaaagcccgtggatggacggtgacagggttggcaggtcgtaaatcccggccgccctggtagcgggtataagtctgagggaaacccactagaggcttacgtgtacttgtccgcgtggacgtgcacggtccacaggagacgcctattccggtgtgaataataggccgactcgagcggagtcgttaaactgaggaccgcctgtaagatggtaacttggcctgcgtacgggaacgccgctaaagaatacagtgggttaagtccggcgggttggcaatcccagcagggcgggggggctctactgttgagtcctgccagttccttacaggtggtaggcatggggggacccagctccgcggcgcgctacagccggggtagtccaaaatccttcgggtgaggacgggtcccatgtcccttttttatgctc

SEQ ID NO: 16321 - DNA, 427 bp, synthetic construct
  source 1..427: mol_type = other DNA
tggacgaaagcccgtggatggacggtgacagggttggcaggtcgtaaatcccggccgccctggtagcgggtataagtctgagggaaacccacgagaggcttacgtgtttttgtccgagtggacgtgcacggtccacaggagacgcctattccggtgtgaataataggccgactcgagcggagtcgttaaactgaggaccgcctgtaagatggcaacttggcctgcgtacgggaacgccgctaaagaatacagtgggttaagtccggcgggttggcaattccagcagggcgggggggccctattgttgggctctgccagttccttacaggtggtaggcatggggggacccagctccgcggcgcgctacagccggggtagcccaaaatccttcgggtgagggcgggtcccatgtccctttttatggctc

SEQ ID NO: 16322 - DNA, 534 bp, synthetic construct
  source 1..534: mol_type = other DNA
acccccccccggcactgggtgcaagccccagaaaccgacgcctatctaagtagacgcaatgactcggcgccgactcggcgaccggccaaaaggtggtggatgggtgatgacagggttggtaggtcgtaaatcccggtcaccttggtagccactataggtgggtcttaagagaaggttaagattcctcttgtgcctgcggcgagaccgcgcacggtccacaggtgttggccctaccggtgtgaataagggcccgacgtcaggctcgtcgttaaaccgagcccattacccacctgggcaaacgacgcccacgtacggtccacgtcgcccttcaatgtctctcttgaccaataggctagtccggcgagttgacaaggaccagtgggggccgggggtcacagggaaggaccctggaccctgcccttcccggtggggtgggaaatgcatggggccacccagctccgcggcggcctgcagccggggtagcccaagagccttcgggtgagggcgggtggcatttttcttcctgtaccgatc

SEQ ID NO: 16323 - DNA, 524 bp, synthetic construct
  source 1..524: mol_type = other DNA
ggcactgggtgcaagccccagaaaccgacgcctatctaagtagacgcaatgactcggcgccgactcggcgaccggccaaaaggtggtggatgggtgatgacagggttggtaggtcgtaaatcccggtcaccttggtagccactataggtgggtcttaagagaaggttaagaatcctcttgtgcctgcggcgagaccgcgcacggtccacaggtgttggccctaccggtgtgaataagggcccgacgtcaggctcgtcgttaaaccgagcccattacccacctgggcaaacgacgcccacgtacggtccacgtcgcccttcaatgtctctcttgaccaataggctaagccggcgagttgacaaggaccagtgggggccgggggtcacagggatggaccctggaccctgcccttcccggtggggtgggaaatgcatggggccacccagctccgcggcggcctgcagccggggtagcccaagagccttcgggtgagggcgggtggcatttctcttcttgtaccaatc

SEQ ID NO: 16324 - DNA, 521 bp, synthetic construct
  source 1..521: mol_type = other DNA
tcactgggtgcaagccccagaaaccgacgcctatcaaaatagacgtgatggccccgcgccgaactggcgaccggccaaaaggtggtggatgggtgatgacagggttggtaggtcgtaaatcccggtcatcctggtagccactataggtgggtcttaaagggaggctacggtccctctcgcgcttacggagagaaagcgcacggtccacaggtgttggccctaccggtgtaataagggcccggcgctaggcacgccgttaaaccgagaccgttatccccctgggcaaacgacgcccatgtacggcctacgtcgcccttcaatgtctctcttgaccaataggctttgccggcgagttgacaagggccagtgggggccgggcggcgggggaaggacctccgccgctgcccttcccgggggagcgggaaatgcatggggccacccagctccgcggcggcctacagccggggtagcccaagaaccttcgggtgagggcgggtggcattttctttcctataccgatc

SEQ ID NO: 16325 - DNA, 413 bp, synthetic construct
  source 1..413: mol_type = other DNA
cagaaaccgacgcctatctaagtagacgcaatgactcggcgccgactcggcgaccggccaaaaggtggtggatgggtgatgacagggttggtaggtcgtaaatcccggtcaccttggtagccactataggtgggtcttaagagaaggttaagattcctcttgtgcctgcggcgaaaccgcgcacggtccgcaggtgttggccctaccggtgtaaataagggcccgacgtcaggctcgtcgttaaaccgagcccgttacccacctgggcaaacgacgcccacgtacggtccacgtcgcccttcaatgtctctcttgaccaataggcttagccggcgagttgacaaggaccagtgggggccgggggcttggagagggaccccaagtcccgccccccccggtgggccgggaaatgc

SEQ ID NO: 16326 - DNA, 432 bp, synthetic construct; identical to SEQ ID NO: 477
  source 1..432: mol_type = other DNA

SEQ ID NO: 16327 - DNA, 359 bp, synthetic construct; identical to SEQ ID NO: 338
  source 1..359: mol_type = other DNA

SEQ ID NO: 16328 - DNA, 423 bp, synthetic construct
  source 1..423: mol_type = other DNA
agggttggtaggtcgtaaatcccggtcatcctggtagccactataggtgggtcttaagagaaggttaagattcctcttgtgcctgcggcgagaccgcgcacggtccacaggtgctggccttaccggtgtgaataaaggcccgacgtcaggctcgtcgttaaaccgagcccgttacccacctgggcaaacgacgcccacgtacggtccacgtcgcccttcaatgcctctcttggccaataggtttatccggcgagttgacaaggaccagtgggggccggggccttggagatggactccaagtcctgcccttcccggtgggccgggaaatgcatggggccacccagctccgcggcggcctgcagccggggtagcccaagaatccttcgggtgagggcgggtggcatttctcttttctataccatc

SEQ ID NO: 16329 - DNA, 376 bp, synthetic construct
  source 1..376: mol_type = other DNA
tgggtcttaagggaaggttaagattcctcttgtgcctgtggcgagacagcgcacggtccacaggtgttggccctaccggtgtgaataagggcccgacgtcaggctcgtcgttaaaccgagcccgttacccacctgggcaaacgacgcccacgtacggtccacgtcgcccttcaatgtctctcttgaccaataggcttagccggcgagttgacaaggaccagtgggggccggaggcggggggaaggaccccccgacctcgcccatcccggtggaacgggaaaagcatggggccacccagctccgcggcggcctgcagccggggtagcccaagagccttcgggtgagggcgggtggcatttcttttccttgactaatc

SEQ ID NO: 16330 - DNA, 400 bp, synthetic construct; identical to SEQ ID NO: 436
  source 1..400: mol_type = other DNA

SEQ ID NO: 16331 - DNA, 328 bp, synthetic construct
  source 1..328: mol_type = other DNA
agcgcacggtccacaggtgttggtcctaccggtgtaataaggacccggcgctaggcacgccgttaaaccgagcccgttactcccctgggcaaacgacgcccacgtacggtccacgtcgcccttcaatgtctctcttgaccaataggcttagccggcgagttgacaaggaccagtgggggccgggcggatgggggaaggacccccaccgctgcccttcccggggaggcgggaaatgcatggggccacccagctccgcggcggcctacagccggggtagcccaagagccttcgggtgagggcgggtggcatttctcttcctataccaatc

SEQ ID NO: 16332 - DNA, 425 bp, synthetic construct
  source 1..425: mol_type = other DNA
cagggttggtaggtcgtaaatcccggtcaccttggtagccactataggtgggtcttaagagaaggttaagattcctctcgtgcctgcggcgagaccgcgcacggtccacaggtgttggccctaccggtgtgaataagggcccgacgttaggctcgtcgttaaaccgagcccgttaaccacctgggcaaacgacgcccacgtacggtccacgtcgcccttcaatgcctctcttggccaataggtttatccggcgagttggcaaggaccagtgggggccgggggtcatggagatggactccagaccctgcccttcccggtgggacgggaaatgcatggggccacccagctccgcggcggcctacagccggggtagcccaagaatccttcgggtgagggcgggtggcatttttcttttctataccatc

SEQ ID NO: 16333 - DNA, 427 bp, synthetic construct; identical to SEQ ID NO: 471
  source 1..427: mol_type = other DNA

SEQ ID NO: 16334 - DNA, 390 bp, synthetic construct
  source 1..390: mol_type = other DNA
ggtagccactataggtgggtcttaagggttggtcaaggtccctctggcgcttgtggcgagaaagcgcacggtccacaggtgttggccctaccggtgtgaataagggcccgacgtcaggctcgtcgttaaactgagcccattacccacctgggcaaacaacgcccacgtacggtccacgtcgccctacaatgtctctcttgaccaataggctttgccggcgagttgacaaggaccagtgggggctgggcggcaggggagggacccctgtcgctgcccttcccggtggggtgggaaatgcatggggccacccagctccgcggcggcctgcagccggggtagcccaagagccttcgggtgagggcggttggcatttttcttcctataccgatc

SEQ ID NO: 16335 - DNA, 390 bp, synthetic construct
  source 1..390: mol_type = other DNA
ggtagccactataggtgggtcttaagggttggtcaaggtccctctggcgcttgtggcgagaaagcgcacggtccacaggtgatggccctaccggtgtgaataagggcccgacgtcaggctcgtcgttaaaccgagcccattacccacctgggcaaacaacgcccacgtacggtccacgtcgccctacaatgtctctcttgaccaataggctttgccggcgagttgacaaggaccagtgggggctgggcggtaggggagggacccctgccgctgcccttcccggtggggtgggaaatgcatggggccacccagctccgcggcggcctgcagccggggtagcccaagagccttcgggtgagggcgggtggcatttctttccttataccgatc

SEQ ID NO: 16336 - DNA, 296 bp, synthetic construct
  source 1..296: mol_type = other DNA
tagccactataggtgggtcttaagggttggttaaggtccctctggcgcttgtggcgagaaagcgcacggttcacaggtgatggccctaccggtgtgaataagggcccgacgtcaggctcgtcgttaaaccgagcccattacccacctgggcaaacgacgcccacgtacggtccacgtcgcccttcaatgtctctcttgaccaataggcttagccggcgagttgacaaggaccactgggggccgggcggcaggggaaggacctctgtctctgcccttcccggtggggtgggaaatgc

SEQ ID NO: 16337 - DNA, 266 bp, synthetic construct
  source 1..266: mol_type = other DNA
ttaaaccgagcccgttacccacctgggcaaacgacgcccacgtacggtccacgtcgcccttcaatgcctctcttggccaataggtttatccggcgagttgacaaggaccagtgggggccggggccttggagatggactccaagtcctgcccttcccggtgggccgggaaatgcatggggccacccagctccgcggcggcctgcagccggggtagcccaagaatccttcgggtgagggcgggtggcatttctcttttctataccatc

SEQ ID NO: 16338 - DNA, 266 bp, synthetic construct
  source 1..266: mol_type = other DNA
ttaaaccgagcccatttcccacctgggcaaacgacgcccacgtacggtccacgtcgcccttcaatgtctctcttgaccaataggctttgccggcgagttgacaaggaccagtgggggccgggcagcaggggaaggacccctgttgtcgcccttcccggtggggatgggaaatgcatggggccacccagctccgcggcggcctgcagccggggtagcccaagaaccttcgggtgagggcgggtggcatttttcttcctataccgatc

SEQ ID NO: 16339 - DNA, 510 bp, synthetic construct; identical to SEQ ID NO: 534
  source 1..510: mol_type = other DNA

SEQ ID NO: 16340 - DNA, 333 bp, synthetic construct; identical to SEQ ID NO: 318
  source 1..333: mol_type = other DNA

SEQ ID NO: 16341 - DNA, 384 bp, synthetic construct; identical to SEQ ID NO: 396
  source 1..384: mol_type = other DNA

SEQ ID NO: 16342 - DNA, 387 bp, synthetic construct; identical to SEQ ID NO: 414
  source 1..387: mol_type = other DNA

SEQ ID NO: 16343 - DNA, 387 bp, synthetic construct
  source 1..387: mol_type = other DNA
tgtatacgagagttagacaaaatgctcgtatacacattgggcaaactaaataataataattgggcctagggtactaatccccctctgcgaaggccgaagagaggctagccatgcccttagtaggactagcataatgaggggggtagcaacagtggtgagttcgctggatggcttaagccctgagtacagggtagtcgtcagtggttcgacgccttagtataaaggtctcgagatgccacgtggacgagggcacgcccaaagcacatcttaacctgagcgggggtcgctcaggcgaaagcagtttaaccaactgttacgaatacagcctgatagggtgctgcagaggcccactgtactgctactaaaaatctctgctgtacatggcac

SEQ ID NO: 16344 - DNA, 426 bp, synthetic construct; identical to SEQ ID NO: 8
  source 1..426: mol_type = other DNA

SEQ ID NO: 16345 - DNA, 386 bp, synthetic construct
  source 1..386: mol_type = other DNA
gtatacgagagttagacaaaatgcttgtatacacattgggcaaactaaataataataattgggcctagggtactaatccccctctgcgaaggccgaagagaggctagccatgcccttagtaggactagcataatgaggggggtagcaacagtggtgagttcgttggatggcttaagccctgagtacagggtagtcgtcagtggttcgacgccttagtataaaggtctcgagatgccacgtggacgagggcacgcccaaagcacatcttaacctgagcgggggtcgctcaggcgaaagcagtttaaccaactgttacgaatacagcctgatagggtgctgcagaggcccactgtactgctactaaaaatctctgctgtacatggcac

SEQ ID NO: 16346 - DNA, 386 bp, synthetic construct
  source 1..386: mol_type = other DNA
gtatacgagagttagacaaaatgctcgtatacacattgggcaaactaaataataataattgggcctagggtactaatccccctctgcgaaggccgaagagaggctagccatgcccttagtaggactagcataatgaggggggtagcaacagtggtgagttcgttggatggcttaagccctgagtacagggtagtcgtcagtggttcgacgccttagtataaaggtctcgagatgccacgtggacgagggcacgcccaaagcacatcttaacctgagcgggggtcgctcaggcgaaagcagtttaaccaactgttacgaatacagcctgatagggtgctgcagaggcccactgtactgctactaaaaatctctgctgtacatggcac

SEQ ID NO: 16347 - DNA, 498 bp, synthetic construct; identical to SEQ ID NO: 526
  source 1..498: mol_type = other DNA

SEQ ID NO: 16348 - DNA, 385 bp, synthetic construct
  source 1..385: mol_type = other DNA
gtatacgagaattagaaaaggcactcgtatacgtattgggcaattaaaaataataattaggcctagggaacaaatccctctcagcgaaggccgaaaagaggctagccatgcccttagtaggactagcataatgaggggggtagcaacagtggtgagttcgttggatggcttaagccctgagtacagggtagtcgtcagtggttcgacgccttggaataaaggtctcgagatgccacgtggacgagggcatgcccaaagcacatcttaacctgagcgggggtcgcccaggtaaaagcagttttaaccgactgttacgaatacagcctgatagggtgctgcagaggcccactgtattgctactaaaaatctctgctgtacatggcac

SEQ ID NO: 16349 - DNA, 373 bp, synthetic construct; identical to SEQ ID NO: 357
  source 1..373: mol_type = other DNA

SEQ ID NO: 16350 - DNA, 399 bp, synthetic construct; identical to SEQ ID NO: 434
  source 1..399: mol_type = other DNA

SEQ ID NO: 16351 - DNA, 386 bp, synthetic construct; identical to SEQ ID NO: 405
  source 1..386: mol_type = other DNA

SEQ ID NO: 16352 - DNA, 356 bp, synthetic construct
  source 1..356: mol_type = other DNA
ggattggatgtcggcaaaaatattgtattgaaaatgtagggaatcttcccctcagcgaaggccgaaaagaggctagccatgcccttagtaggactagcaaaagtaggggactagcggtagcagtgagttcattggatggccgaacccctgagtacaggggagtcgtcaatggttcgacactccattggttgaggagtctcgagatgccatgtggacgagggcatgcccacggcacatcttaacctatgcgggggctgcatgggtgaaagcgccattcgtggcgttatggacacagcctgatagggtgtagcagagacctgctattccgctagtaaaaactctgctgtacatggcac

SEQ ID NO: 16353 - DNA, 379 bp, synthetic construct; identical to SEQ ID NO: 382
  source 1..379: mol_type = other DNA

SEQ ID NO: 16354 - DNA, 371 bp, synthetic construct
  source 1..371: mol_type = other DNA
aaagtactcgtatacggattggacgttgacaaaatattgaattgaaaatgtagggaatcttcccctcagcgaaggccgaaaagaggctaaccacgcccttagtaggactagcaaaaggaggggactagcggtagcagtgagttcattggatggccgaacccctgagtacaggggagtcgtcaatggttcgacactccttcagttgaggagtctcgagatgccatgtggacgagggcatgcccacggcacatcttaacccatgcgggggctgcatgggtgaaagcgccattcgtggcgttatggacacagcctgatagggtgtagcagagacctgctatcccgctagtaaaaaactctgctgtacatggcac

SEQ ID NO: 16355 - DNA, 365 bp, synthetic construct
  source 1..365: mol_type = other DNA
ctcgtatacagattgggtgttggcaaacagttaattagtgaagtagggaaccttcccccctctgcgaaggccgaaaagaggctaaccatgcccttagtaggactagcaaaaagagggggctagcggtagcagtgagtttattggatggccgaatccctgagtacagggaagtcgtcaatggttcgacactctggtaatataagagtctcgagatgccatgtggacgagggcatgcccacggcacatcttaacctatgcgggggttgcatgggtgaaagcaccatttacggtgttataaacacagcctgatagggtgtagcagagacctgctatcccgctagtaaaaactctgctgtacatggcac

SEQ ID NO: 16356 - DNA, 367 bp, synthetic construct
  source 1..367: mol_type = other DNA
cgttatgcatcattggccataacaaattatctaatttggaatagggacctgcgacctgtacgaaggccgagcgtcggcagccattccgactagtaggactagtacaaataggtcaactggttgagcaggtgagtgtgctgcagcggctaagcggtgagtacaccgtattcgtcaacaggtgctactggaaaggatcacccactagcgatgcctgtgtggacgaggacatgtccaagccaatgttatcagtagcgggggtcgttactgagaaagctgcccagattgggtggttgcacatacagtctgataggatgccggcggatgccctgtattttgaccagtataaatattatccgttgtaaagcat

SEQ ID NO: 16357 - DNA, 356 bp, synthetic construct
  source 1..356: mol_type = other DNA
ggattggatgtcggcaaaaatattgaattgaaaatgtagggaatcttcccctcagcgaaggccgaaaagaggctagccatgcccttagtaggactagcaaaaggaggggactagcggtagcagtgagttcattggatggccgaacccctgagtacaggggagtcgtcaatggttcgacactccttcagctgaggagcctcgagatgccatgtggacgagggcatgcccacggcacatcttaacctatgcgggggctgcatgggtgaaagcgccattcgtggtgttatggacacagcctgatagggtgtagcagagacctgctattccgctagaaaaaactctgctgtacatggcac

SEQ ID NO: 16358 - DNA, 381 bp, synthetic construct; identical to SEQ ID NO: 388
  source 1..381: mol_type = other DNA

SEQ ID NO: 16359 - DNA, 382 bp, synthetic construct; identical to SEQ ID NO: 390
  source 1..382: mol_type = other DNA

SEQ ID NO: 16360 - DNA, 378 bp, synthetic construct; identical to SEQ ID NO: 377
  source 1..378: mol_type = other DNA

SEQ ID NO: 16361 - DNA, 372 bp, synthetic construct; identical to SEQ ID NO: 353
  source 1..372: mol_type = other DNA

SEQ ID NO: 16362 - DNA, 357 bp, synthetic construct
  source 1..357: mol_type = other DNA
ggattggatgtcggcaaaaatattgtattgaaaatgtagggaatcttcccctcagcgaaggccgaaaagaggctagccatgcccttagtaggactagcaaaaggaggggactagcggtagcagtgagttcattggatggccgaacccctgagtacagaggagtcgtcaatggttcgacactccttcagttgaggagtctcgagatgccatgtggacgagggcatgcccacggcacatcttaacctatgcgggggctgcatgggtgaaagcgccattcgtggcgttatggacacagcctgatagggtgtagcagagacctgctatcccgctagtaaaaaactctgctgtacatggcac

SEQ ID NO: 16363 - DNA, 391 bp, synthetic construct; identical to SEQ ID NO: 425
  source 1..391: mol_type = other DNA

SEQ ID NO: 16364 - DNA, 384 bp, synthetic construct
  source 1..384: mol_type = other DNA
gtatacgcccggttagctcatgtcggcgtatatgattgggtatcccaaattaatgatttggtttagggactaaattcccctagcgaaggccgaaataggttaaccataccttcagtaggacgagcataatgggggactagtggtagcagtgagctccttggattaccgaagccccgagtacggggtagtcgtcaatggttcgacgcatcaaggaatgcctcgagatgccatgtggacgagggcgtgcccacggtgaatcttaactcaagcgggggccgcttgggtgaaagagggtcattatgtggctctttgggagtacagcctgatagggtgttgcagagacctgctacatcactagtataaaaactctgctgtacatggcac

SEQ ID NO: 16365 - DNA, 384 bp, synthetic construct
  source 1..384: mol_type = other DNA
ctatacgcccggttagctcatgtcggcgtatatgattgggtatcccaaattaatgatttggtttagggactaaattcccctagcgaaggccgaaataggttaaccataccttcagtaggactagcataatgggggactagtggtagcagtgagctccttggattaccgaagccccgagtacggggtagtcgtcaatggttcgacgcatcaaggaatgcctcgagatgccatgtggacgagggcgtgcccacggtgaatcttaactcaagcgggggccgcttgggtgaaagagggtcattatgtggctctttgggagtacagcctgatagggtgttgcagagacctgctacatcactagtataaaaactctgctgtacatggcac

SEQ ID NO: 16366 - DNA, 284 bp, synthetic construct
  source 1..284: mol_type = other DNA
ttccgactagtaggactagtacaaataggtcaactggttgagcaggtgagtgtgctgcagcggctaagcggtgagtacaccgtattcgtcaacaggtgctactggaaaggatcacccactagcgatgcctgtgtggacgaggacatgtccaagccaatgttatcagtagcgggggtcgttactgagaaagctgcccagattgggtagttgcacatacagtctgataggatgccggcggatgccctgtattttgaccagtataaatattatccgttgtaaagcat

SEQ ID NO: 16367 - DNA, 385 bp, synthetic construct
  source 1..385: mol_type = other DNA
gtatacgagattagctaaagtactcgtatacggattggacgtcgacaaactttgaattggcaacacagggaaccttcccctcggcgaaggccgaaaagaggctagccatgcccttagtaggactagccaaaggaggggactagcggtagcagtgagtccattggatggccgaacccctgagtacaggggagtcgtcaatggttcgacactcctttagtcgaggagtctcgagatgccatgtggacgagggcatgcccacggcacatcttaacccacgcgggggttgcgtgggtgaaagcgccattcgtggcgtcatggacacagcctgatagggtgtagcagagacctgctactccgctagtaaaaactctgctgtacatggcac

SEQ ID NO: 16368 - DNA, 383 bp, synthetic construct; identical to SEQ ID NO: 393
  source 1..383: mol_type = other DNA

SEQ ID NO: 16369 - DNA, 379 bp, synthetic construct
  source 1..379: mol_type = other DNA
gttagataaagtactcgtatacagattggatattgacaaaacattgaattggcgaagtagggaactttttcccctcagcgaaggccgaaaagaggctagccatgcccttagtaggacgagcaaaatgaggggactagcggtagcagtgagttcattggatggcctaatccctgagtacagggaagtcgtcaatggttcgacactccatcagttgaggagtctcgagatgccatgtggacgagggcatgcccaaggcacatcttaacctatgcgggggttgcataggcaaaagcaccactcacggtgttgtggacacagcctgatagggtgtagcagagacctgctattccgctagtaaaaactctgctgtacatggcac

SEQ ID NO: 16370 - DNA, 379 bp, synthetic construct
  source 1..379: mol_type = other DNA
gattagataaagtactcgtatacagattggatattgacaaaacattgaattggcgaagtagggaacttttcccctcagcgaaggccgaaaagaggctagccatgcccttagtaggacgagcaaaatgaggggactagcggtagcagtgagttcattggatggcctaatccctgagtacagggaagtcgtcaatggttcgacactccatcagttgaggagtctcgagatgccatgtggacgagggcatgcccaaggcacatcttaacctatgcgggggttgcataggcaaaagcaccactcacggtgttgtggacacagcctgatagggtgtagcagagacctgctattccgctagtaaaaactctgctgtacatggcac

SEQ ID NO: 16371 - DNA, 367 bp, synthetic construct
  source 1..367: mol_type = other DNA
tactcgtatacagattggatattgacaaaacattgaattggcgaagtagggaacttttcccctcagcgaaggccgaaaagaggctagccatgcccttagtaggacgagcaaaatgaggggactagcggtagcagtgagttcattggatggcctaatccctgagtacagggaagtcgtcaatggttcgacactccatcagttgaggagtctcgagatgccatgtggacgagggcatgcccaaggcacatcttaacctatgcgggggttgcataggcaaaagcaccactcacggtgttgtggacacagcctgatagggtgtagcagagacctgctattccgctagtaaaaactctgctgtacatggcac

SEQ ID NO: 16372 - DNA, 367 bp, synthetic construct
  source 1..367: mol_type = other DNA
tactcgtatacagattggatattgacaaaacattgaattggcgaagtagggaacttttcccctcagcgaaggccgaaaagaggctagccatgcccttagtaggacgagcaaaatgaggggactagcggtagcagtgagttcattggatggcctaatccctgagtacagggaagtcgtcaatggttcgacactccatcagttgaggagtctcgagatgccatgtggacgagggcatgcccaaggcacatcttaacctatgcgggggttgcatgggcaaaagcaccactcacggtgttgtggacacagcctgatagggtgtagcagagacctgctattccgctagtaaaaactctgctgtacatggcac

SEQ ID NO: 16373 - DNA, 384 bp, synthetic construct; identical to SEQ ID NO: 397
  source 1..384: mol_type = other DNA

SEQ ID NO: 16374 - DNA, 373 bp, synthetic construct
  source 1..373: mol_type = other DNA
gtatacgaggttagttcattctcgtgtacatgattggacaaatcaaaatcactatttggtttagggcctccctccagcgacggccgaactgggctagccatgcccatagtaggactagcaaacggagggactagccatagtggcgagctccctgggtggtctaagtcctgagtacaggacagtcgtcagtagttcgacgtgagcaggagcccacctcgagatgctatgtggacgagggcatgcccaagacacaccttaaccctagcgggggtcgctagggtgaaatcacaccacgtgatgggagtacgacctgatagggcgctgcagaggcccactattaggctagtataaaaatctctgctgtacatggcac

SEQ ID NO: 16375 - DNA, 384 bp, synthetic construct
  source 1..384: mol_type = other DNA
gtatacgagagttagataaaaatactcgtatacacattgggcaataaaaattataattaggcctagggaacaaatcctcctctgcgaaggccgaaaagaggctagccatgcccttagtaggactagcataaagaggggggtagcaacagtggtgagttcgttggatggcttaagccctgagtacagggtagtcgtcagtggttcgacgccttggcataaaggtctcgagatgccacgtggacgagggcacgcccaaagcacatcttaacctgagcgggggtcgctcgggcgaaaacagtttgatcaactgctacgaatacagcctgatagggtgctgcagaggcccactgtattgctactaaaaatctctgctgtacatggcac

SEQ ID NO: 16376 - DNA, 383 bp, synthetic construct; identical to SEQ ID NO: 394
  source 1..383: mol_type = other DNA

SEQ ID NO: 16377 - DNA, 372 bp, synthetic construct; identical to SEQ ID NO: 354
  source 1..372: mol_type = other DNA

SEQ ID NO: 16378 - DNA, 388 bp, synthetic construct; identical to SEQ ID NO: 421
  source 1..388: mol_type = other DNA

SEQ ID NO: 16379 - DNA, 385 bp, synthetic construct
  source 1..385: mol_type = other DNA
gtatacgagattagctaaagaactcgtatatggattggacgtcaacaaatttttaattggcaacgtagggaaccttcccctcagcgaaggccgaaaagaggctagccatgcccttagtaggactagcaaaagtaggggactagcggtagcagtgagttcgttggatggccgaacccctgagtacaggggagtcgtcaatggttcgacactccattagtcgaggagtctcgagatgccatgtggacgagggcatgcccacggcacatcttaacccatgcgggggttgcatgggtgaaagcgctattcgtggcgttatggacacagcctgatagggtgtagcagagacctgctattccgctagtaaaaactctgctgtacatggcac

SEQ ID NO: 16380 - DNA, 374 bp, synthetic construct; identical to SEQ ID NO: 361
  source 1..374: mol_type = other DNA

SEQ ID NO: 16381 - DNA, 374 bp, synthetic construct; identical to SEQ ID NO: 362
  source 1..374: mol_type = other DNA

SEQ ID NO: 16382 - DNA, 376 bp, synthetic construct; identical to SEQ ID NO: 370
  source 1..376: mol_type = other DNA

SEQ ID NO: 16383 - DNA, 375 bp, synthetic construct
  source 1..375: mol_type = other DNA
gtatacgagagtagttcaggctcgtatgcaaaattgggtgtttcaaattttaaaattcgactagggccaccccccagcgacggccgaaacgggttagccatacccttagtaggactagcggacggggggactagccatcgtggtgagatccctgagcggtctaagtcctgagtacaggacagtcgtcagtggttcgacgcggtcatcgcatcgtctcgagatgccacgtggacgagggcatgcccaagacacgctttaatcctggcgggggtcgccagggtgaaaacgtcctagtggcgttggggttacagcctgatagggtgctgcagaggcccacgcataggctagtataaaaaactctgctgtacatggcac

SEQ ID NO: 16384 - DNA, 373 bp, synthetic construct
  source 1..373: mol_type = other DNA
gtatacgaggttagttcattctcgtatgcatgattggacaaattaaaatttcaatttggatcagggcctccctccagcgacggccgaactgggctagccatgcccacagtaggactagcaaacggagggactagccgtagtggcgagctccctgggtggtctaagtcctgagtacaggacagtcgtcagtagttcgacgtgagcagaagcccacctcgagatgctatgtggacgagggcatgcccaagacacaccttaaccctagcgggggtcgctagggtgaaatcacaccacgtgatgggagtacgacctgatagggtgctgcagaggcccactattaggctagtataaaaatctctgctgtacatggcac

SEQ ID NO: 16385 - DNA, 385 bp, synthetic construct
  source 1..385: mol_type = other DNA
gtatacgagattagctaaagtactcgtatatggattggacgtcaacaaatttttaattggcaacgtagggaaccttcccctcagcgaaggccgaaaagaggctagccatgcccttagtaggactagcaaaagtaggggactagcggtagcagtgagttcgttggatggccgaacccctgagtacaggggagtcgtcaatggttcgacactccattagtcgaggagtctcgagatgccatgtggacgagggcatgcccacggcacatcttaacccatgcgggggttgcatgggtgaaagcgctaatcgtggcgttatggacacagcctgatagggtgtagcagagacctgctattccgctagtaaaaactctgctgtacatggcac

SEQ ID NO: 16386 - DNA, 370 bp, synthetic construct; identical to SEQ ID NO: 347
  source 1..370: mol_type = other DNA

SEQ ID NO: 16387 - DNA, 346 bp, synthetic construct
  source 1..346: mol_type = other DNA
gacaaaacattgaattggcgaagtagggaacttttttcccctcagcgaaggccgaaaagaggctagccatgcccttagtaggacgagcaaaatgaggggactagcggtagcagtgagttcattggatggcctaatccctgagtacagggaagtcgtcaatggttcgacactccatcagttgaggagtctcgagatgccatgtggacgagggcatgcccaaggcacatcttaacctatgcgggggttgcataggcaaaagcaccactcacggtgttgtggacacagcctgatagggtgtagcagagacctgctattccgctagtaaaaactctgctgtacatggcac

SEQ ID NO: 16388 - DNA, 369 bp, synthetic construct; identical to SEQ ID NO: 344
  source 1..369: mol_type = other DNA

SEQ ID NO: 16389 - DNA, 373 bp, synthetic construct
  source 1..373: mol_type = other DNA
gtatacgaggttagttcattctcgtatacacgattggacaaatcaaaattataatttggttcagggcctccctccagcgacggccgaactgggctagccatgcccatagtaggactagcaaaacggagggactagccatagtggcgagctccctgggtggtctaagtcctgagtacaggacagtcgtcagtagttcgacgtgagcagaagcccacctcgagatgctacgtggacgagggcatgccaagacacaccttaaccctagcgggggtcgctagggtgaaatcacaccacgtgatgggagtacgacctgatagggcgctgcagaggcccactattaggctagtataaaaatctctgctgtacatggcac

SEQ ID NO: 16390 - DNA, 374 bp, synthetic construct
  source 1..374: mol_type = other DNA
gtatacgaggttagctcgttctcgtatatatgactggacaaatcaaaattataatttggttcagggctcccctccagcgacggccgaactgggctagccatgcccatagtaggactagcaaaacggagggactagccatagtggcgagctccctgggtggtctaagtcctgagtacaggacagtcgtcagtagttcgacgtgagcagaagcccacctcgagatgctatgtggacgagggcatgcccaagacgcaccttaaccctagcgggggtcgctagggtgaaatcacaccacgtgatgggagtacgacctgatagggcgctgcagaggcccactattaggctagtataaaaatctctgctgttcatggcac

SEQ ID NO: 16391 - DNA, 374 bp, synthetic construct
  source 1..374: mol_type = other DNA
gtatacgaggttagttcattctcgtatacacgattggacaaatcaaaattataatttggttcagggcctccctccagcgacggccgaactgggctagccatgcccatagtaggactagcaaaacggagggactagccatagtggcgagctccctgggtggtctaagtcctgagtacaggacagtcgtcagtagttcgacgtgagcagaagcccacctcgagatgctacgtggacgagggcatgcccaagacacaccttaaccctagcgggggtcgctagggtgaaatcacaccacgtgatgggagtacgacctgatagggcgctgcagaggcccactattaggctagtataaaaatctctgctgtacatggcac

SEQ ID NO: 16392 - DNA, 377 bp, synthetic construct; identical to SEQ ID NO: 373
  source 1..377: mol_type = other DNA

SEQ ID NO: 16393 - DNA, 385 bp, synthetic construct; identical to SEQ ID NO: 400
  source 1..385: mol_type = other DNA

SEQ ID NO: 16394 - DNA, 374 bp, synthetic construct
  source 1..374: mol_type = other DNA
gtatacgaggttagttcattctcgtatacacgattggacaaatcaaaattataatttggttcagggcctccctccagcgacggccgaactgggctagccatgcccatagtaggactagcaaaacggagggactagccatagtggcgagctccctgggtggtctaagtcctgagtacaggacagtcgtcagtagttcgacgtgagcagaagcccacctcgagatgctacgtggacgagggcatgcccaagacacaccttaaccctagcgggggtcgctagggtgaaatcacgccacgtgatgggagtacgacctgatagggcgccgcagaggcccactattaggctagtataaaaatctctgctgtacatggcac

SEQ ID NO: 16395 - DNA, 372 bp, synthetic construct
  source 1..372: mol_type = other DNA
gtatacgaggttagttcattctcgtatacaggatcggacaaatcaaatttcaatttggttcagggcctccctccagcgacggccgaactgggctagccatgcccacagtaggactagcaaacggagggactagccgtagtggcgagctccctgggtggtctaagtcctgagtacaggacagtcgtcagtagttcgacgtgagcagaagcccacctcgagatgctacgtggacgagggcatgcccaagacacaccttaaccctagcgggggtcgctagggtgaaatcacaccacgtgatgggagtacgacctgatagggtgctgcagaggcccactattaggctagtataaaaatctctgctgtacatggcac

SEQ ID NO: 16396 - DNA, 374 bp, synthetic construct
  source 1..374: mol_type = other DNA
gtatacgaggttagttcattctcgtatacacgattggacaaatcaaaattataatttggttcagggcctccctccagcgacggccgaactgggctagccatgcccatagtaggactagcaaaacggagggactagccatagtggcgagctccctgggtggtctaagtcctgagtacaggacagtcgtcagtagttcgacgtgagcagaagcccacctcgagatgctacgtggacgagggcatgcccaagacacaccttaaccctagcgggggtcgctagggtgaaatcacaccacgtgatgggagtacgacctgatagggcgctgcggaggcccactattaggctagtataaaaatctctgctgtacatggcac

SEQ ID NO: 16397 - DNA, 375 bp, synthetic construct
  source 1..375: mol_type = other DNA
gtatacgagagtagttcatgctcgtatacgaattggatattctaaaatttgttaattggactagggtctcctcctggcgacggccgaaccgggttagccatacccgtagtaggactagcatatgggaggactagctttcgtggtgaggttcctgagtggtctaagtcctgagtacaggatagtcgtcagtagttcgacacaaacggagtttttgtctcgagatgctacgtggacgagggcatgcccaagactcactttaatcctggcgggggtcgccagggtgaaaacgcccaatggcgttgggactacagcctgatagggtgctgcagaggcccacgcaacagctagtataaaaatctctgctgtacatggcac

SEQ ID NO: 16398 - DNA, 385 bp, synthetic construct; identical to SEQ ID NO: 401
  source 1..385: mol_type = other DNA

SEQ ID NO: 16399 - DNA, 381 bp, synthetic construct
  source 1..381: mol_type = other DNA
gtatacgagaatttgcctaacctcgtatacacattgggcactctaaaaatgaattaggcctgagggacaaatcctccttagcgaaggccgaaaagaggctagccatgcccttagtaggactagcaaaacaaggagggtagcaacagtggtgagttcgttggatggctgaagccctgagtacagggtagtcgtcagtggttcgacgctttgtgcgacaagcctcgagatgccacgtggacgagggcatgcccacagcacatcttaacctgagcgggggtcgttcaggtgaaaacggtttaaccaaccgctacgaatacagcctgatagggtgctgcagaggcccactgtatcgctactaaaaatctctgctgtacatggcac

SEQ ID NO: 16400 - DNA, 372 bp, synthetic construct
  source 1..372: mol_type = other DNA
gtatacgaggttagttcattctcgtatacaggatcggacaaatcaaatttcaatttggttcagggcctccctccagcgacggccgaactgggctagccatgcccacagtaggactagcaaacggagggactagccgtagtggtgagctccctgggtggtctaagtcctgagtacaggacagtcgtcagtagttcgacgtgagcagaagcccacctcgagatgctacgtggacgagggcatgcccaagacacaccttaaccctagcgggggtcgctagggtgaaatcacaccacgtgatgggagtacgacctgatagggtgctgcagaggcccactattaggctagtataaaaatctctgctgtacatggcac

SEQ ID NO: 16401 - DNA, 386 bp, synthetic construct; identical to SEQ ID NO: 406
  source 1..386: mol_type = other DNA

SEQ ID NO: 16402 - DNA, 381 bp, synthetic construct
  source 1..381: mol_type = other DNA
gtatacgaggttaggcaaattctcgtatacatattgggcattctaaaaataaattaggcctaagggacaaatcctccttagcgaaggccgaaaagaggctagccatgcccttagtaggactagcaaaacgaggagggtagcaacagtggtgagttcgttggatggctgaagccctgagtacagggtagtcgtcagtggttcgacgctttgtgtgaaaagcctcgagatgccacgtggacgagggcatgcccacagcacatcttaacctgagcgggggtcgttcaggtgaaaacggtttaaccaaccgctacgaatacagcctgatagggtgctgcagaggcccactgtattgctactaaaaatctctgctgtacatggcac

SEQ ID NO: 16403 - DNA, 376 bp, synthetic construct; identical to SEQ ID NO: 371
  source 1..376: mol_type = other DNA

SEQ ID NO: 16404 - DNA, 368 bp, synthetic construct
  source 1..368: mol_type = other DNA
cgaggttagttcattctcgtatacatgattggacaaatcaaaatttcaatttggttcagggcctccctccagcgacggccgaactgggctagccatgcccacagtaggactagcaaacggagggactagccgtagtggcgagctccctgggtggtctaagtcctgagtacaggacagtcgtcagtagttcgacgtgagcagaagcccacctcgagatgctatgtggacgagggcatgcccaagacacaccttaaccctagcgggggtcgctagggtgaaatcacaccacgtgatgggagtacgacctgatagggtgctgcagaggcccactattaggctagtataaaaatctctgctgtacatggcac

SEQ ID NO: 16405 - DNA, 379 bp, synthetic construct
  source 1..379: mol_type = other DNA
gtatacgagaatttgcctaacctcgtatacgtattggacactctaaaaaataattaggtccaaccaaaatcctccttagcgaaggccgaaaagaggctagccatgcccttagtaggactagcaaaataaggggggtagcaacagtggtgagttcgttggatggctgaagccctgagtacagggtagtcgtcagtggttcgacgctttggaggacaagcctcgatatgccacgtggacgagggcatgcccacagcacatcttagcctggacgggggtcgttcaggtgaaaacggtttaaccaaccgctacgaatacagcctgatagggtgctgcagaggcccactgtattgctactgaaaatctctgctgtacatggcac

SEQ ID NO: 16406 - DNA, 386 bp, synthetic construct; identical to SEQ ID NO: 407
  source 1..386: mol_type = other DNA

SEQ ID NO: 16407 - DNA, 373 bp, synthetic construct
  source 1..373: mol_type = other DNA
gtatacgaggttagttcattctcgtatgcattattggacaaatcaaaatttcaatttggttcagggcctccctccagcgacggccgaactgggctagccatgcccatagtaggactagcaaacggagggactagccgtagtggcgagctccctgggtgttctaagtcctgagtacaggacagtcgtcagtagttcgacgtgagcagaagcccacctcgagatgctatgtggacgagggcatgcccaagacgcaccttaaccctagcgggggtcgctagggtgaaatcacaccacgtgatgggagtacgacctgatagggtgctgcagaggctcactattaggctagtataaaaatctctgctgtacatggcac

SEQ ID NO: 16408 - DNA, 381 bp, synthetic construct
  source 1..381: mol_type = other DNA
gtatacgagaatttgcctaacctcgtatacacattgggcactctaaaaatgaattaggcctgagggacaaatcctccttagcgaaggccgaaaagaggctagccatgcccttagtaggactagcaaaacaaggagggtagcaacagtggtgagttcgttggatggctgaagccctgagtacagggtagtcgtcagtggttcgacgctttgtgcgacaagcctcgagatgccacgtggacgagggcatgcccacagcacatcttaacctgagcgggggtccttcaggtggaaacggtgtaaccaaccgctacgaatacagcctgatagggtgctgcagaggcccactgtatcgctactaaaactatctgctgtacatggcac

SEQ ID NO: 16409 - DNA, 373 bp, synthetic construct
  source 1..373: mol_type = other DNA
gtatacgaggttagttcattctcgtatgcattattggacaaatcaaaatttcaatttggttcagggcctccctccagcgacggccgaactgggctagccatgcccatagtaggactagcaaacggagggactagccgtagtggcgagctccctgggtgttctaagtcctgagtacaggacagtcgtcagtagttcgacgtgagcagaagcccacctcgagatgctatgtggacgagggcatgcccaagacgcaccttaaccctagcgggggtcgctagggtgaaatcacaccacgtgatgggagtccgacctgatagggtgctgcagaggctcactattaggctagtataaaaatctctgctgtacatggcac

SEQ ID NO: 16410 - DNA, 373 bp, synthetic construct
  source 1..373: mol_type = other DNA
gtatacgaggttagttcattctcgtatgcatgattggacaaattaaaatttcaatttggatcagggcctccctccagcgacggccgaactgggctagccatgccctcagtaggactagcaaacggagggactagccgtagtggcgagctccctgggtggtctaagtcctgagtacaggacagtcgtcagtagttcgacgtgagcagaagcccacctcgatatgctatgtggacgagggcatgcccaagacacaccttaaccctagcgggggtcgctagggtgaaatcgcatcacgtgatgggagtacgacctgatagggtgctgcagaggcccactattaggctagtataaaaatctctgctgtacatggcac

SEQ ID NO: 16411 - DNA, 373 bp, synthetic construct
  source 1..373: mol_type = other DNA
gtatacgaggttagttcattctcgtatgcatgattggacaaatcaaaatttcaatttggttcagggcctccctccagcgacggccgaactgggctagccatgcccacagtaggactagcaaacggagggactagccgtagtggcgagctccctgggtggtctaagtcctgagtacaggacagtcgtcagtagttcgacgtgagcagaagcccacctcgagatgctatgtggacgagggcatgcccaagacacaccttaaccctagcgggggtcgctagggtgaaatcacaccacgtgatgggagtacgacctgatagggcgctgcagaggcccactattaggctagtataaaaatctctgctgtacatggcac

SEQ ID NO: 16412 - DNA, 379 bp, synthetic construct
  source 1..379: mol_type = other DNA
gtatacgagaatttgcctaacctcgtatacgtattggacactctaaaaaataattaggtctagggaaaatcctccttagcgaaggccgaaaagaggctagccatgcccttagtaggactagcaacataaggggggtagcaacagtggtgagttcgttggatggctgaagccctgagtacagggtagtcgtcagtggttcgacgctttggaggacaagcctcgagatgccacgtggacgagggcatgcccacagcacatcttaacatggacgggggtcgttcatgtgaaaacggtttaaccaaccgctacgaatacagcctgatagggtgctgcagaggcccactgtattgctactgaaaatctctgctgtacatggcac

SEQ ID NO: 16413 - DNA, 373 bp, synthetic construct
  source 1..373: mol_type = other DNA
tattacgaggttagctcgtcctcgtatacaaaattggacaaaattaaattctgattcgacctagggcatccctccagcgacggccgacctgggctagccatgcccacagtaggactagcaaacggagggactagccgtagtggcgagctccctgggtggtctaagtcctgagtacaggacagtcgtcagtagttcgacgtgagcaggagcccacctcgagatgctatgtggacgagggcatgcccaagacacaccttaaccctggcgggggtcgctagggtgaaatcacaccatgtgatgggggtacgacctgatagggcgctgcagaggcccactaacaggctagtataaaaatctctgctgtacatggcac

SEQ ID NO: 16414 - DNA, 373 bp, synthetic construct
  source 1..373: mol_type = other DNA
gtatacgaggttagttcattctcgtatgcaatattggacaaaactaaattccgattcggtttagggcatccctccagcgacggccgagctgggctagccatgcccacagtaggactagcagacggagggactagccgtagtggcgagctccctgggtggtctaagtcctgagtacaggacagtcgtcagtagttcgacatgagcagaagctcacctcgagatgctatgtggacgagggcatgcccaagacacaccttaaccctggcgggggtcgctagggtgaactcacataatgtgatgggggtacgacctgatagggtgctgcagaggcccactaacaggctagtataaaaatctctgctgtacatggcac

SEQ ID NO: 16415 - DNA, 372 bp, synthetic construct
  source 1..372: mol_type = other DNA
gtatacgggagtagctcatacccgtatgcaaaattggacgtctcaaaatccgattgggtgagggagccctcctagcgacggccgaaccgtgttaaccatacacgtagtaggactagcaaacgggaggactagccatcgtggtgagatccctgagcagtctaagtcctgagtacaggatagtcgtcagtagttcaacgcaggcgtggttctgccttgagatgctacgtggacgagggcatgcccaagacatgctttaatcccgacgggggtcgccgggatgaaaacacctactggtgttgggattacagcctgatagggtgttgcagagacccacgtataggctagtataaaaatctctgctgtacatggcat

SEQ ID NO: 16416 - DNA, 373 bp, synthetic construct
  source 1..373: mol_type = other DNA
gtatacgaggttagttcattctcgtatgcattattggacaaatcaaaatttcaatttggttcagggcctccctccagcgacggccgaactgggctagccatgcccatagtaggactagcaaacggagggactagccgtagtggcgagctccctgggtgttctaagtcctgagtacaggacagtcgtcagtagttcgacgtgagcagaagcccacctcgagatgctatgtggacgagggcatgcccaagacacaccttaaccctagcgggggtcgctagggtgaaatcacaccacgtgatgggagtacgacctgatagggtgctgcagaggctcactattaggctagtataaaaatctctgctgtacatggcac

SEQ ID NO: 16417 - DNA, 373 bp, synthetic construct
  source 1..373: mol_type = other DNA
gtatacgaggttagttcattctcgtatgcatgattggacaaattaaaatttcaatttggatcagggcctccctccagcgacggccgaactgggctagccatgcccgcagtaggactagcaaacggagggactagccgtagtggcgagctccctgggtggtctaagtcctgagtacaggacagtcgtcagtagttcgacgtgagcagaagcccacctcgatatgctatgtggacgagggcatgcccaagacacaccttaaccctagcgggggtcgctagggtgaaatcacaccacgtgatgggagtacgacctgatagggtgctgcagaggcccactattaggctagtataaaaatctctgctgtacatggcac

SEQ ID NO: 16418 - DNA, 387 bp, synthetic construct
  source 1..387: mol_type = other DNA
tgtatacgagagttagataaaatactcgtatacacattgggcaaactaaataataataattgggcctagggtactaatccccctctgcgaaggccgaaaagaggctagccatgcccttagtaggactagcataatgaggggggtagcaacagtggtgagttcgttggatggcttaagccctgagtacagggtagtcgtcagtggttcgacgccttagtataaaggtctcgagatgccacgtggacgagggcacgcccaaagcacatcttaacctgagcgggggtcgctcaggcgaaagcagtttaaccaactgctacgaatacagcctgatagggtgctgcagaggcccactgtattgctactaaaaatctctgctgtacatggcac

SEQ ID NO: 16419 - DNA, 373 bp, synthetic construct
  source 1..373: mol_type = other DNA
gtatacgaggttagttcattctcgtatgcatgattggacaaattaaaatctcaatttggatcagggcctccctccagcgacggccgaactgggctagccatgccctcagtaggactagcaaacggagggactagccgtagtggcgagctccctgggtggtctaagtcctgagtacaggacagtcgtcagtagttcgacgtgagcagaagcccgcctcgatatgctatgtggacgagggcatgcccaagacacaccttaaccctagcgggggtcgctagggtgaaatcgcatcacgtgatgggagtacgacctgatagggtgctgcagaggcccactattaggctagtataaaaatctctgctgtacatggcac

SEQ ID NO: 16420 - DNA, 373 bp, synthetic construct
  source 1..373: mol_type = other DNA
gtatacgaggttagctctttctcgtatacgacattggatacactaaatttcgatttggtctagggcacccctccagcgacggccgaaatgggctagccatgcccatagtaggactagcaaacggagggactagccgtagtggcgagctccctgggtggtctaagtcctgagtacaggacagtcgtcagtagttcgacgtgagcaccagcccacctcgagatgctacgtggacgagggcatgcccaagacacaccttaaccctggcgggggtcgctagggtgaaatcacactatgtgatgggggtacgacctgatagggtgctgcagaggcccactagcaggctagtataaaaaatctctgctgtacatggcac

SEQ ID NO: 16421 - DNA, 373 bp, synthetic construct
  source 1..373: mol_type = other DNA
gtatacgaggttagttcattctcgtatgcatgattggacaaattaaaatttcaatttggatcagggcctccctccagcgacggccgaactgggctagccatgcccacagtaggactagcaaacggagggactagccgtagtggcgagctccctgggtggtctaagtcctgagtacaggacagtcgtcagtagttcgacgtgagcagaagcccacctcgatatgctatgtggacgagggcatgcccaagacacaccttaaccctagcgggggtcgctagggtgaaatcacaccacgtgatgggagtacgacctgatagggtgctgcagaggcccactattaggctagtataaaaatctctgctgtacatggcac

SEQ ID NO: 16422 - DNA, 373 bp, synthetic construct
  source 1..373: mol_type = other DNA
gtatacgaggttagttcattctcgtatgcatgattggaaaaattaaaatttcaatttggttcagggcctccctccagcgacggccgaactgggctagccatgcccacagtaggactagcaaacggagggactagccgtagtggcgagctccctgggtggtctaagtcctgagtacaggacagtcgtcagtagttcgacgtgagcagaagcccacctcgagatgctatgtggacgagggcatgcccaagacacaccttaaccctagcgggggtcgctagggtgaaatcacaccacgtgatgggagtacgacctgatagggtgctgcagaggcccactattaggctagtataaaaatctctgctgtacatggcac

SEQ ID NO: 16423 - DNA, 373 bp, synthetic construct
  source 1..373: mol_type = other DNA
gtatacgaggttagttcattctcgtatgcatgattggacaaatcaaaatttcaatttggttcagggcctccctccagcgacggccgaactgggctagccatgcccacagtaggactagcaaacggagggactagccgtagtggcgagccccctgggtggtctaagtcctgagtacaggacagtcgtcagtagttcgacgtgagcagaagcccacctcgagatgctacgtggacgagggcatgcccaagacacaccttaaccctagcgggggtcgctagggtgaaatcacaccacgtgatgggagtacgacctgatagggcgctgcagaggcccactattaggctagtataaaaatctctgctgtacatggcac

SEQ ID NO: 16424 - DNA, 373 bp, synthetic construct
  source 1..373: mol_type = other DNA
gtatacgaggttagttcattctcgtatgcatgattggacaaaacaaaatttcaatttggttcagggcctccctccagcgacggccgaactgggctagccatgcccatagtaggactagcaaacggagggactagccgtagtggcgagctccctgggtggtctaagtcctgagtacaggacagtcgtcagtagttcgacgtgagcagaagcccacctcgagatgctatgtggacgagggcatgcccaagacacaccttaaccctagcgggggtcgctagggtgaaatcacaccacgtgatgggagcacgacctgatagggcgctgcagaggcccactattaggctagtataaaaatctctgctgttcatggcac

SEQ ID NO: 16425 - DNA, 373 bp, synthetic construct
  source 1..373: mol_type = other DNA
gtatacgaggttagttcattctcgtatgcatgattggacaaaacaaaatttcaatttggttcagggcccccctccagcgacggccgaactgggctagccatgcccatagtaggactagcaaacggagggactagccgtagtggcgagctccctgggtggtctaagtcctgagtacaggacagtcgtcagtagttcgacgtgagcagaagcccacctcgagatgctatgtggacgagggcatgcccaagacgcaccttaaccctagcgggggtcgctagggtgaaatcacaccacgtgatgggagtacgacctgatagggcgctgcagaggcccactattaggctagtataaaaatctctgctgtacatggcac

SEQ ID NO: 16426 - DNA, 373 bp, synthetic construct
  source 1..373: mol_type = other DNA
gtatacgaggttagttcattctcgtatgcatgattggacaaattaaaattttaatttggatcagggcctccctccagcgacggccgaactgggctggccatgcccgcagtaggactagcaaacggagggactagccgtagtggcgagctccctgggtggtctaagtcctgagtacaggacagtcgtcagtagttcgacgtgagcagaagcccacctcgatatgctatgtggacgagggcatgcccaagacacaccttaaccctagcgggggtcgctagggtgaaatcacaccacgtgatgggagtacgacctgatagggtgctgcagaggcccactattaggctagtataaaaatctctgctgtacatggcac

SEQ ID NO: 16427 - DNA, 373 bp, synthetic construct
  source 1..373: mol_type = other DNA
gtatacgaggttagttcattctcgtatgcatgattggacaaatcaaaatttcaatttggttcagggcctccctccagcgacggccgaactgggctagccatgcccacagtaggactagcaaacggagggactagccgtagtggcgagctccctgggtggtctaagtcctgagtacaggacagtcgtcagtagttcgacgtgagcagaagcccacctcgagatgctatgtggacgagggcatgcccaagacacaccttaaccctagcgggggtcgttagggtgaaatcacaccacgtgatgggagtacgacctgatagggcgctgcagaggcccactattaggctagtataaaaatctctgctgtacatggcac

SEQ ID NO: 16428 - DNA, 373 bp, synthetic construct
  source 1..373: mol_type = other DNA
gtatacgaggttagttcattctcgtatgcatgattggacaaaacaaaatttcaatttggttcagggcctccctccagcgacggccgaactgggctagccatgcccatagtaggactagcaaacggagggactagccgtagtggcgagctccctgggtggtctaagtcctgagtacaggacagtcgtcagtagttcgacgtgagcagaagcccacctcgagatgctatgtggacgagggcatgcccaagacacaccttaaccctagcgggggtcgctagggtgaaatcacaccacgtgatgggagtacgacctgatagggcgctgcagaggcccactattaggctagtataaaaatctctgctgtacatggcac

SEQ ID NO: 16429 - DNA, 374 bp, synthetic construct; identical to SEQ ID NO: 363
  source 1..374: mol_type = other DNA

SEQ ID NO: 16430 - DNA, 375 bp, synthetic construct; identical to SEQ ID NO: 367
  source 1..375: mol_type = other DNA

SEQ ID NO: 16431 - DNA, 373 bp, synthetic construct; identical to SEQ ID NO: 358
  source 1..373: mol_type = other DNA

SEQ ID NO: 16432 - DNA, 373 bp, synthetic construct
  source 1..373: mol_type = other DNA
gtatacgaggttagttcgtactcgtgtacaatattgggcaaacctaaattccgatttggtttagggcacccctccagcgacggccgaactgggctagccatgcccatagtaggactagcaaacggagggactagccgtagtggcgagctccctgggtggtctaagtcctgagtacaggacagtcgtcagtagttcgacgtgagcagaagctcatctcgagatgctatgtggacgagggcatgcccaagacacaccttaaccctagcgggggtcgctagggcgaaatcatacaacgtgatgggggtacgacctgatagggtgctgcagaggcccactaacaggctagtataaaaatctctgctgtacatggcac

SEQ ID NO: 16433 - DNA, 373 bp, synthetic construct
  source 1..373: mol_type = other DNA
gtatacgaggttagttcgtactcgtgtacaatattgggcaaacctaaattccgatttggtttagggcacccctccagcgacggccgaactgggctagccatgcccatagtaggactagcaaacggagggactagacgtagtggcgagctccctgggtggtctaagtcctgagtacaggacagtcgtcagtagttcgacgtgggcagaagcccacctcgagatgctatgtggacgagggcatgcccaagacacaccttaaccctggcgggggtcgctagggtgaaatcacacaacgtgatgggggtacgacctgatagggtgctgcagaggcccactaacaggctagtataaaaatctctgctgtacatggcac

SEQ ID NO: 16434 - DNA, 373 bp, synthetic construct
  source 1..373: mol_type = other DNA
gtatacgaggttagttcattctcgtatacatgattggacaaaacaaaatttcaatttggttcagggcccccctccagcgacggccgaactgggctagccatgcccatagtaggactagcaaacggagggactagccgtagtggcgagctccctgggtggtctaagtcctgagtacaggacagtcgtcagtagttcgacgtgagcagaagcccacctcgagatgctatgtggacgagggcatgcccaagacacaccttaaccctagcgggggtcgctagggtgaaatcacaccacgtgatgggagtacgacctgatagggcgctgcagaggcccactattaggctagtataaaaatctctgctgtacatggcac

SEQ ID NO: 16435 - DNA, 373 bp, synthetic construct
  source 1..373: mol_type = other DNA
gtatacgaggttagttcattctcgtatgcatgattggacaaattaaaatttcaatttggatcagggcctccctccagcgacggccgaactgggctagccatgccctcagtaggactagcaaacggagggactagccgtagtggcgagctccctgggtggtctaagtcctgagtacaggacagtcgtcagtagttcgacgtgagcagaagcccacctcgatatgctatgtggacgagggcatgcccaagacacatcttaaccctagcgggggtcgctagggtgaaatcacatcacgtgatgggagtacgacctgatagggtgctgcagaggcccactattaggctagtataaaaatctctgctgtacatggcac

SEQ ID NO: 16436 - DNA, 373 bp, synthetic construct
  source 1..373: mol_type = other DNA
gtatacgaggttagttcattctcgtatgcatgattggacaaattaaaacttcaatttggatcagggcctccctccagcgacggccgaactgggctagccatgccctcagtaggactagcaaacggagggactagccgtagtggcgagctccctgggtggtctaagtcctgagtacaggacagtcgtcagtagttcgacgtgagcagaagcccacctcgatatgctatgtggacgagggcatgcccaagacacatcttaaccctagcgggggtcgctagggtgaaatcacatcacgtgatgggagtacgacctgatagggtgctgcagaggcccactattaggctagtataaaaatctctgctgtacatggcac

SEQ ID NO: 16437 - DNA, 373 bp, synthetic construct
  source 1..373: mol_type = other DNA
gtatacgaggttagttcattctcgtatgcatgattggacaaattaaaatttcaatttggatcagggcctccctccagcgacggccgaactgggctagccatgcccgcagtaggactagcaaacggagggactagccgtagtggcgagctccctgggtggtctaagtcctgagtacaggacagtcgtcagtagttcgacgtgagcagaagcccacctcgatatgctatgtggacgagggcatgcccaagacacaccttaaccctagcgggggtcgctagggtgaaatcactccacgtgatgggagtacgacctgatagggtgctgcagaggcccactattaggctagtataaaaatctctgctgtacatggcac

SEQ ID NO: 16438 - DNA, 373 bp, synthetic construct
  source 1..373: mol_type = other DNA
gtatacgaggttagttcattctcgtatgcataattggacaaattaaaatttcaatttggatcagggcctccctccagcgacggccgaactgggctagccatgcccgcagtaggactagcaaacggagggactagccgtagtggcgagctccctgggtggtctaagtcctgagtacaggacagtcgtcagtagttcgacgtgagcagaagcccacctcgatatgctatgtggacgagggcatgcccaagacacaccttaaccctagcgggggtcgctagggtgaaatcacaccacgtgatgggagtacgacctgatagggtgctgcagaggcccactattaggctagtataaaaatctctgctgtacatggcac

SEQ ID NO: 16439 - DNA, 373 bp, synthetic construct
  source 1..373: mol_type = other DNA
gtatacgaggttagttcattctcgtatgcatgattggacaaattaaaatttcaatttggataagggcctccctccagcgacggccgaactgggctagccatgcccgcagtaggactagcaaacggagggactagccgtagtggcgagctccctgggtggtctaagtcctgagtacaggacagtcgtcagtagttcgacgtgagcagaagcccacctcgatatgctatgtggacgagggcatgcccaagacacaccttaaccctagcgggggtcgctagggtgaaatcacaccacgtgatgggagtacgacctgatagggtgctgcagaggcccactattaggctagtataaaaatctctgctgtacatggcac

SEQ ID NO: 16440 - DNA, 373 bp, synthetic construct
  source 1..373: mol_type = other DNA
gtatacgaggttagttcattctcgtatgcatgattggacaaattaaaatttcaatttggatcagggcctccctccagcgacggccgaactgggctagccatgcccgcagtaggactagcaaacggagggactagccgtagtggcgagctccctgggtggtctaagtcctgagtacaggacagtcgtcagtagttcgacgtgagcagaagcccacctcgatatgctacgtggacgagggcatgcccaagacacaccttaaccctagcgggggtcgctagggtgaaatcacaccacgtgatgggagtacgacctgatagggtgctgcagaggcccactattaggctagtataaaaatctctgctgtacatggcac

SEQ ID NO: 16441 - DNA, 373 bp, synthetic construct
  source 1..373: mol_type = other DNA
gtatacgaggttagttcattctcgtatgcatgattggacaaattaaaatttcaatttggatcagggcctccctccagcgacggccgaactgggctagccatgcccgcagtaggactagcaaacggagggactagccgtagtggcgagctccctgggtggtctaagtcctgagtacaggacagtcgtcagtagttcgacgtgagcggaagcccacctcgatatgctatgtggacgagggcatgcccaagacacaccttaaccctagcgggggtcgctagggtgaaatcacaccacgtgatgggagtacgacctgatagggtgctgcagaggcccactattaggctagtataaaaatctctgctgtacatggcac

SEQ ID NO: 16442 - DNA, 373 bp, synthetic construct; identical to SEQ ID NO: 359
  source 1..373: mol_type = other DNA

SEQ ID NO: 16443 - DNA, 373 bp, synthetic construct
  source 1..373: mol_type = other DNA
gtatacgaggttagttcattctcgtatgcatgattggacaaattaaaatttcaatttggatcagggcctccctccagcgacggccgaactgggctaaccatgcccgcagtaggactagcaaacggagggactagccgtagtggcgagctccctgggtggtctaagtcctgagtacaggacagtcgtcagtagttcgacgtgagcagaagcccacctcgatatgctatgtggacgagggcatgcccaagacacaccttaaccctagcgggggtcgctagggtgaaatcacaccacgtgatgggagtacgacctgatagggtgctgcagaggcccactattaggctagtataaaaatctctgctgtacatggcac

SEQ ID NO: 16444 - DNA, 373 bp, synthetic construct
  source 1..373: mol_type = other DNA
gtatacgaggttagttcattctcgtatgcatgattggacaaattaaaatttcaatttggatcagggcctccctccagcgacggccgaactgggctagccatgcccgcagtaggactagcaaacggagggactagccgtagtggcgagctccctgggtggtctaagttctgagtacaggacagtcgtcagtagttcgacgtgagcagaagcccacctcgatatgctatgtggacgagggcatgcccaagacacaccttaaccctagcgggggtcgctagggtgaaatcacaccacgtgatgggagtacgacctgatagggtgctgcagaggcccactattaggctagtataaaaatctctgctgtacatggcac

SEQ ID NO: 16445 - DNA, 373 bp, synthetic construct
  source 1..373: mol_type = other DNA
gtatacgaggttagttcattctcgtatgcatgattggacaaatcaaaattccaatttggttcagggcctccctccagcgacggccgaactgggctagcaatgcccacagtaggactagcaaacggagggactagccgtagtggcgagccccctgggtggtctaagtcctgagtacaggacagtcgtcagtagttcgacgtgagcagaagcccacctcgagatgctacgtggacgagggcatgcccaagacacaccttaaccctagcgggggtcgctagggtgaaatcacaccacgtgatgggagtacgacctgatagggtgctgcagaggcccactattaggctagtataaaaatctctgctgtacatggcac

SEQ ID NO: 16446 - DNA, 373 bp, synthetic construct
  source 1..373: mol_type = other DNA
gtatacgaggttagttcattctcgtatgcatgattggacaaatcaaaatttcaatttggttcagggcccccctccagcgacggccgaactgggctagccatgcccacagtaggactagcaaacggagggactagccgtagtggcgagctccctgggtggtctaagtcctgagtacaggacagtcgtcagtagttcgacgtgagcagaagcccacctcgagatgctacgtggacgagggcatgcccaagacacaccttaactctagcgggggtcgctagggtgaaatcacaccacgtgatgggagtacgacctgatagggcgctgcagaggcccactattaggctagtataaaaatctctgctgtacatggcac

SEQ ID NO: 16447 - DNA, 372 bp, synthetic construct
  source 1..372: mol_type = other DNA
gtatacgaggttagctctttctcgtatacgatattggatacactaaatttcgatttggtctagggcacccctccagcgacggccgaaatgggctagccatgcccatagtaggactagcaaacggagggactagccgtagtggcgagctccctgggtggtctaagtcctgagtacaggacagtcgtcagtagttcgacgtgagcactagcccacctcgagatgctacgtggacgagggcatgcccaagacacaccttaaccctggcgggggtcgctagggtgaaatcacattatgtgatgggggtacgacctgatagggtgctgcagaggcccactagcaggctagtataaaaatctctgctgtacatggcac

SEQ ID NO: 16448 - DNA, 373 bp, synthetic construct
  source 1..373: mol_type = other DNA
gtatacgaggttagttcattctcgtatgcatgattggacaaaacaaaatttcaatttggttcagggcctccctccagcgacggctgaactgggctagccatgcccatagtaggactagcaaacggagggactagccgtagtggcgagctccctgggtggtctaagtcctgagtacaggacagtcgtcagtagttcgacgtgagcagaagcccacctcgagatgctatgtggacgagggcatgcccaagacacaccttaaccctagcgggggtcgctagggtgaaatcacaccacgtgatgggagtacgacctgatagggcgctgcagaggcccactattaggctagtataaaaatctctgctgtacatggcac

SEQ ID NO: 16449 - DNA, 374 bp, synthetic construct; identical to SEQ ID NO: 364
  source 1..374: mol_type = other DNA

SEQ ID NO: 16450 - DNA, 373 bp, synthetic construct
  source 1..373: mol_type = other DNA
gtatacgaggttagctcgttctcgtatacgatatcggatacactaaatttcgatttggtctagggcacccctccagcgacggccgaaatgggctagccatgcccatagtaggactagcaaacggagggactagccgtagtggcgagctccctgggtggtctaagtcctgagtacaggacagtcgtcagtagttcgacgtgagcaccagcccacctcgagatgctacgtggacgagggcatgcccaagacacaccttaaccctagcgggggtcgctagggtgaaatcacattatgtgatgggggtacgacctgatagggtgctgcagaggcccactatcaggctagtataaaaaatctctgctgtacatggcac

SEQ ID NO: 16451 - DNA, 373 bp, synthetic construct
  source 1..373: mol_type = other DNA
gtatacgaggttagctcgttctcgtatacgatatcggatacactaaatttcgattcggtctagggcacccctccagcgacggccgaaatgggctagccatgcccatagtaggactagcaaacggagggactagccgtagtggcgagctccctgggtggtctaagtcctgagtacaggacagtcgtcagtagttcgacgtgagcaccagcccacctcgagatgctacgtggacgagggcatgcccaagacacaccttaaccctagcgggggtcgctagggtgaaatcacattatgtgatgggggtacgacctgatagggtgctgcagaggcccactatcaggctagtataaaaaatctctgctgtacatggcac

SEQ ID NO: 16452 - DNA, 373 bp, synthetic construct
  source 1..373: mol_type = other DNA
gtatacgaggttagctcgttctcgtatacgatatcggatacactaaatttcgattcggtctagggcacccctccagcgacggccgaaatgggctagccatgcccatagtaggactagcaaacggagggactagccgtagtggcgagctccctgggtggtctaagtcctgagtacaggacagtcgtcagtagttcgacgtgagcactagcccacctcgagatgctacgtggacgagggcatgcccaagacacaccttaaccctagcgggggtcgctagggtgaaatcacattatgtgatgggggtacgacctgatagggtgctgcagaggcccactatcaggctagtataaaaaatctctgctgtacatggcac

SEQ ID NO: 16453 - DNA, 373 bp, synthetic construct
  source 1..373: mol_type = other DNA
gtatacgaggttagctcattctcgcatacgatattggatacactaaatttcgatttggtctagggcacccctccagcgacggccgaaatgggctagccatgcccatagtaggactagcaaacggagggactagccatagtggcgagctccctgggtggtctaagtcctgagtacaggacagtcgtcagtagttcgacgtgagcactagcccacctcgagatgctacgtggacgagggcatgcccaagacacaccttaaccctggcgggggtcgctagggtgaaatcacattatgtgatgggggtacgacctgatagggtgctgcagaggcccactagcaggctagtataaaaaatctctgctgtacatggcac

SEQ ID NO: 16454 - DNA, 373 bp, synthetic construct
  source 1..373: mol_type = other DNA
gtatacgaggttagttcgtactcgtgtacaatattgggcaaacctaaattccgatttggtttagggcacccctccagcgacggccgaactgggctagccatgcccatagtaggactagcaaacggagggactagccgtagtggcgagctccctgggtggtctaagtcctgagtacaggacagtcgtcagtagttcgacgtgggcagaagcccatctcgagatgctatgtggacgagggcatgcccaagacacaccttaaccctggcgggggtcgctagggcgaaatcatacaacgtgatgggggtacgacctgatagggtgctgcagaggcccactgacaggctagtataaaaatctctgctgtacatggcac

SEQ ID NO: 16455 - DNA, 373 bp, synthetic construct
  source 1..373: mol_type = other DNA
gtatacgaggttagctcatcctcgtatacaatattggacaaacgaaattccgatttggcctaggacacccctccagcgacggccgaactgggctagccatgcccacagtaggactagcagatggagggactagccgtagtggcgagctccctgggtggtctaagtcctgagtacaggacagtcgtcagtagttcgacgtgagcaggagcccacctcgagatgctatgtggacgagggcatgcccaagacacaccttaaccctggcgggggtcgccagggtgaaatcacatcatgtgatgggggtacgacctgatagggtgctgcagaggcccactaacaggctagtataaaaaatctctgctgtacatggcac

SEQ ID NO: 16456 - DNA, 374 bp, synthetic construct
  source 1..374: mol_type = other DNA
gggtatacgaggttagctcatcctcgtgtacaatattggacaaacaaaattccgatttggcttagggaacccctccagcgacggccgaactgggctagccacgcccatagtaggactagcagatggagggactagccgtagtggcgagctccctgggtggtctaagtcctgagtacaggacagtcgtcagtagttcgacgtgagcaggagcccacctcgagatgctatgtggacgagggcacgcccaagacacaccttaaccctggcgggggtcgccagggtgaaatcacaccatgtgatgggggtacgacctgatagggtgctgcagaggcccactaacaggctagtataaaaatctctgctgtacatggcac

SEQ ID NO: 16457 - DNA, 373 bp, synthetic construct
  source 1..373: mol_type = other DNA
gtatacgaggttagttcattctcgtatgcattattggacaaatcaaaatttcaatttggttcagggcctccctccagcgacggccgaactgggctagccatgcccatagtaggactagcaaacggagggactagccatagtggcgagctcgctgggtggtctaagtcctgagtacaggacagtcgtcagtagttcgacgtggacagaagcccacctcgagatgctatgtggacgagggcatgcccaagacacaccttaaccctggcgggggtcgctagggtgaaatcacacgacgtgatgggggtacgacctgatagggtgctgcagaggcccactaacaggctagtataaaaatctctgctgtacatggcac

SEQ ID NO: 16458 - DNA, 373 bp, synthetic construct
  source 1..373: mol_type = other DNA
gtatacgaggttagctcgtactcgtgtacaatattgggcaaactaaaattccgatttggtttagggcacccctccagcgacggccgaactgggctagccatgcccatagtaggactagcagacggagggactagccgtggtggcgagctccctgggtggtctaagtcctgagtacaggacagtcgtcagtagttcgacgtgggcagaagcccacctcgagatgctatgtggacgagggcacgcccaagacacaccttaaccctggcgggggtcgctagggtgaaatcacacaacgtgatgggggtacgacctgatagggtgctgcagaggcccactagcaggctagtataaaaatctctgctgtacatggcac

SEQ ID NO: 16459 - DNA, 373 bp, synthetic construct
  source 1..373: mol_type = other DNA
gtatacgaggtgagttcattctcgtatgcattattggacaaatcaaaatttcaatttggttcagggcctccctccagcgacggccgaactgggctagccatgcccatagtaggactagcaaacggagggactagccgtagtggcgagctccctgggtgttctaagtcctgagtacaggacagtcgtcagtagttcgacgtgagcagaagcccacctcgagatgctatgtggacgagggcatgcccaagacgcaccttaaccctagcgggggtcgctagggtgaaatcacaccacgtgatgggagtacgacctgatagggtgctgcagaggctcactattaggctagtataaaaatctctgctgtacatggcac

SEQ ID NO: 16460 - DNA, 374 bp, synthetic construct
  source 1..374: mol_type = other DNA
agatttagctcaatctctcgtatgcatattgggtaaaccaaacgataattgggcctagggaacaaaatcctccccagcgaaggccgaaaagaggctagccatgcccttagtaggactagcatattggggagggtagcaacagtggtgagttagttggatggctgaagccctgagtacagggtagtcgtcagtggttcgacgccttaggatgtaggcctcgagatgccacgtggacgagggcatgcccacagcacatcttaacctgagcaggggtcgcccaggtgaaaacggataaaaccgttactaacacagcctgatagggtgctgcagaggcccactgcactgctactaaaaatctctgctgtacatggcac

SEQ ID NO: 16461 - DNA, 373 bp, synthetic construct
  source 1..373: mol_type = other DNA
gtatacgaggttagttcattctcgtatgcatgattggacaaactaaaatttcaatttggatcagggcctccctccagcgacggccgaactgggctagccatgcccgcagtaggactagcaaacggagggactagccgtagtggcgagctccctgggtggtctaagtcctgagtacaggacagtcgtcagtagttcgacgtgagcagaagcccacctcgatatgctatgtggacgagggcatgcccaagacgcaccttaaccctagcgggggtcgctagggtgaaatcacaccacgtgatgggagtacgacctgatagggtgctgcagaggcccactattaggctagtataaaaatctctgctgtacatggcac

SEQ ID NO: 16462 - DNA, 373 bp, synthetic construct
  source 1..373: mol_type = other DNA
gtatacgaggttagttcattctcgtgtacaatattggacaaaccaaaattccgatttggcctagggcacccctccagcgacggccgaactgggctagccatgcccacagtaggactagcaaacggagggactagccgtagtggcgagctccctgggtggtctaagtcctgagtacaggacagtcgtcaatagttcgacgtgagcaggagcccacctcgagatgctaagtggacgagggcatgcccaagacacaccttaaccctggcaggggtcgccagggtgaaatcacaccatgtgatgggggtacgacctgatagggtgctgcagaggcccactaacaggctagtataaaaatctctgctgtacatggcac

SEQ ID NO: 16463 - DNA, 372 bp, synthetic construct
  source 1..372: mol_type = other DNA
gtatacgagattagctcgccctcgtgtacaatattggacaaataaaattccgatttggcttagggcacccctccagcgacggccgaactgggctagccatgcccacagtaggactagcaaatggagggactagccgtagtggcgagctccctgggtggtctaagtcctgagtacaggacagtcgtcagtagttcgacgtgagcaggagcccacctcgagatgctatgtggacgagggcatgcccaagacacaccttaaccctggcgggggtcgctagggtgaaatcacaccacgtgatgggggtacgacctgatagggtgctgcagaggcccactaacaggctagtataaaaatctctgctgtacatggcac

SEQ ID NO: 16464 - DNA, 373 bp, synthetic construct
  source 1..373: mol_type = other DNA
gtatacgaggttagctcgtcctcgtgtacaatattggacaagctaaaattccgatttggcctagggcacccctccagcgacggccgaactgggctagccatgcccacagtaggactagcaaacggagggactagccgtagtggcgagctccctgggtggtctaagtcctgagtacaggacagtcgtcagtagttcgacgtgagcatgagcccacctcgagatgctatgtggacgagggcatgcccaagacacaccttaaccctggcgggggtcgccagggtgaaatcacaccatgtgatgggggtacgacctgatagggtgctgcagaggcccactaacaggctagtataaaaatttttgttgtacatggcac

SEQ ID NO: 16465 - DNA, 372 bp, synthetic construct; identical to SEQ ID NO: 355
  source 1..372: mol_type = other DNA

SEQ ID NO: 16466 - DNA, 373 bp, synthetic construct
  source 1..373: mol_type = other DNA
gtatacgaggttagttcattctcgtatgcatgattggacaaaacaaaatttcaatttggttcagggcccccctccagcgacggccgaactgggctagccatgcccatagtaggactagcaaacggagggactagccgtagtggcgagctccctgggtggtctaagtcctgagtacaggacagtcatcagtagttcgacgtgagcagaagcccacctcgagatgctatgtggacgagggcatgcccaagacgcaccttaaccctagcgggggtcgctagggtgaaatcacaccacgtgatgggagtacgacctgatagggcgctgcagaggcccactattaggctagtataaaaatctctgctgtacatggcac

SEQ ID NO: 16467 - DNA, 373 bp, synthetic construct
  source 1..373: mol_type = other DNA
gtatacgaggttagttcattctcgtgtacaatattggacaaacaaaattccgatttggcttagggcacccctccagcgacggccgaactgggctagccatgcccacagtaggactagcagatggagggactaaccgtagtggcgagctccctgggtggtctaagtcctgagtacaggacagtcgtcagtagttcgacgtgagcaggagctcacctcgagatgctatgtggacgagggcatgcccaagacacaccttaaccctggcgggggtcgccagggtgaaatcacaccatgtgatgggggtacgacctgatagggtgctgcagaggcccactaacaggctagtataaaaaatctctgctgtacatggcac

SEQ ID NO: 16468 - DNA, 373 bp, synthetic construct
  source 1..373: mol_type = other DNA
gtatacgaggttagttcattctcgtgtacaatattggacaaacaaaaattccgatttggcctagggcacccctccagcgacggccgaactgggctagccatgcccacagtaggactagcaaacggagggactagccgtagtggcgagctccctgggtggtctaagtcctgagtacaggacagtcgtcagtagttcgacgtgagcagtagcccacctcgagatgctatgtggacgagggcatgcccaagacacaccttaaccctggcgggggtcgccagggtgaaatcacaccatgtgatgggggtacgacctgatagggtgctgcagaggcccactaacaggctagtataaaaatctctgctgtacatggcac

SEQ ID NO: 16469 - DNA, 372 bp, synthetic construct
  source 1..372: mol_type = other DNA
gtatacgaggttagttcattctcgtgtgcaatattgggtaaacaaaattccgatttggcctagggcacccctccagcgacggccgaactgggctagccatgcccacagtaggactagcaaacggagggactagccgtagtggcgagcttcctgggtggtctaagtcctgagtacaggacagtcgtcagtagttcgacgtgagcaggagcccacctcgagatgctatgtggacgagggcatgcccaagacacaccttaaccctggcgggggtcgccagggtgaaatcacaccatgtgatgggagtacgacctgatagggtgctgcagaggcccactaacaggctagtataaaaatctctgctgtacatggcac

SEQ ID NO: 16470 - DNA, 373 bp, synthetic construct
  source 1..373: mol_type = other DNA
gtatacgaggttagctcgtcctcgtgtactacattggacaaactaaaattccgatttggcctagggtacccctccagcgacggccgaactgggctagccatgcccacagtaggactagcaaacggagggactagccgtagtggcgagctccctgggtggtctaagtcctgagtacaggacagtcgtcagtagttcgacgtgagcaggagcccacctcgagatgctatgtggacgagggcatgcccaagacacaccttaaccctggcgggggtcgccagggtgaaatcacaccatgtgatgggggtacgacctgatagggtgctgcagaggcccactaacaggctagtataaaaatctctgctgtacatggcac

SEQ ID NO: 16471 - DNA, 373 bp, synthetic construct
  source 1..373: mol_type = other DNA
gtatacgaggttagctcgtcctcgtatacgatattggatacactaaatttcgatttggtctagggcacccctccagcgacggccgaaacgggctagccatgcccatagtaggactagcaaacggagggactagccgtagtggcgagctccctgggtggtctaagtcctgagtacaggacagtcgtcagtagttcgacgtgagcactagcccgcctcgagatgctacgtggacgagggcatgcccaagacacaccttaaccctggcgggggtcgctagggtgaaatcacattatgtgatgggggtacgacctgatagggtgctgcagaggcccactagcaggctagtataaaaaatctctgctgtacatggcac

SEQ ID NO: 16472 - DNA, 373 bp, synthetic construct
  source 1..373: mol_type = other DNA
gtatacgaggttagctcgtcctcgtatacaatattggacaaaccaaaattccgatttggcctagggcacccctccagcgacggccgaactgggctagccatgcccacagtaggactagcaaacggagggactagccgtagtggcgagctccctgggtggtctaagtcctgagtacaggacagtcgtcaatagttcgacgtgagcaggagcccacctcgagatgctatgtggacgagggcatgcccaagacacaccttaaccctggcaggggtcgccagggtgaaaccacaccatgtgatgggggtacgacctgatagggtgctgcagaggcccactaacaggctagtataaaaatctctgctgtacatggcac

SEQ ID NO: 16473 - DNA, 372 bp, synthetic construct
  source 1..372: mol_type = other DNA
gtatacgaggttagctcgtcctcgtgtacaatattggacaaacaaaattccgatttggcctagggcacccctccagcgacggccgaaccgggctagccatgcccatagtaggactagcaaacggagggactagccgtagtggcgagctccctgggtggtctaagtcctgagtacaggacagtcgtcagtagttcgacgtgagcaggagcccacctcgagatgctatgtggacgagggcatgcccaagacacaccttaaccctggcgggggtcaccagggtgaaatcacaccatgtggtgggggtacgacctgatagggtgctgcagaggcccactaacaggctagtataaaaatctctgctgtacatggcac

SEQ ID NO: 16474 - DNA, 372 bp, synthetic construct
  source 1..372: mol_type = other DNA
gtatacgaggttagttcgttctcgtgtacaaaattggacaaattaaattctgattcgacctagggcatccctccagcgacggccgacctgggctagccatgcccacagtaggactagcaaacggagggactagccgtagtggcgagctccctgggtggtctaagtcctgagtacaggacagtcgtcagtagttcgacgtgagcaggagcccacctcgagatgctatgtggacgagggcatgcccaagacacaccttaaccctggcgggggtcgctagggtgaaatcacaccatgtgatgggggtacgacctgatagggtgctgcagaggcccactaacaggctagtataaaaatctctgctgtacatggcac

SEQ ID NO: 16475 - DNA, 372 bp, synthetic construct
  source 1..372: mol_type = other DNA
gtatacgaggttagttcgttctcgtgtacaaaattggacaaatcaaattctgattcgacctagggcatccctccagcgacggccgacctgggctagccatgcccacagtaggactagcaaacggagggactagccgtagtggcgagctccctgggtggtctaagtcctgagtacaggacagtcgtcagtagttcgacgtgagcaggagcccacctcgagatgctatgtggacgagggcatgcccaagacacaccttaaccctggcgggggtcgctagggtgaaatcacaccatgtgatgggggtacgacctgatagggtgctgcagaggcccactaacaggctagtataaaaatctctgctgtacatggcac

SEQ ID NO: 16476 - DNA, 373 bp, synthetic construct
  source 1..373: mol_type = other DNA
gtatacgaggttagctcttcctcgtgtacaatattggacaaaacaaaattccgatttggcttagggcacccctccagcgacggccgaactgggctagccacgcccacagtaggactagcagatggagggactagccgtagtggcgagctccctgggtggtctaagtcctgagtacaggacagtcgtcagtagttcgacgtgagcaggagcccacctcgagatgctatgtggacgagggcatgcccaagacacaccttaaccctggcgggggtcgccagggtgaaatcacaccatgtgatgggggtacgacctgatagggtgctgcagaggcccactaacaggctagtataaaaatctctgctgtacatggcac

SEQ ID NO: 16477 - DNA, 372 bp, synthetic construct
  source 1..372: mol_type = other DNA
gtatacgaggttagttcgttctcgtgtacaaaattggacaaattaaattctgattcggcctagggcatccctccagcgacggccgacctgggctagccatgcccacagtaggactagcaaacggagggactagccgtagtggcgagctccctgggtggtctaagtcctgagtacaggacagtcgtcagtagttcgacgtgagcaggagcccacctcgagatgctatgtggacgagggcatgcccaagacacaccttaaccctggcgggggtcgctagggtgaaatcacaccatgtgatgggggtacgacctgatagggtgctgcagaggcccactaacaggctagtataaaaatctctgctgtacatggcac

SEQ ID NO: 16478 - DNA, 372 bp, synthetic construct
  source 1..372: mol_type = other DNA
gtatacgaggttagctcgtcctcgtgtacaaaattggacaaattaaattctgattcgacctagggcatccctccagcgacggccaacctgggctagccatgcccacagtaggactagcaaacggagggactagccgtagtggcgagctccctgggtggtctaagtcctgagtacaggacagtcgtcagtagttcgacgtgagcaggagcccaccttgagatgctatgtggacgagggcatgcccaagacacaccttaaccctggcgggggtcgctagggtgaaatcacaccatgtgatgggggtacgacctgatagggtgctgcagaggcccactaacaggctagtatgaaaatctctgctgtacatggcac

SEQ ID NO: 16479 - DNA, 373 bp, synthetic construct
  source 1..373: mol_type = other DNA
gtatacgagaatgaactaacctcgtatacctaattgggtagttcaaattccaatttggttcagggcccccctccagcgacggccgaactgggctagccatgcccacagtaggactagcagacggagggactagccgtagtggcgagctccctgggtggtctaagtcctgagtacaggacagtcgtcagtagttcgacgtgagcagcagctcatctcgagatgctatgtggacgagggcacgcccaagacacaccttaaccctggcgggggtcgccagggtgaaatcacactgcgtgatgggagtacgacctgatagggtgctgcagaggcccactattaggctagtataaaaaatctctgctgtacatggcac

SEQ ID NO: 16480 - DNA, 373 bp, synthetic construct
  source 1..373: mol_type = other DNA
gtatacgaggttagctcatcctcgtgtacaatattggacaaacaaaattccgatttggtttaggacacccctccagcgacggccgaactgggctagccatgcccacagtaggactagcagatggagggactagccgtagtggcgagctccctgggtggtctaagtcctgagtacaggacagtcgtcagtagttcgacgtgagcaggagcccacctcgagatgctatgtggacgagggcatgcccaagacacaccttaaccctggcgggggtcgccagggtgaaatcacatcatgtgatgggggtacgacctgatagggtgctgcagaggcccactaacaggctagtataaaaaatctctgctgtacatggcac

SEQ ID NO: 16481 - DNA, 373 bp, synthetic construct
  source 1..373: mol_type = other DNA
gtatacgaggttagctcatcctcgtgtacaatattggacaaacaaaattccgatttggcttaggacacccctccagcgacggccgaactgggctagccatgcccacagtaggactagcagatggagggactagccgtagtggcgagctccctgggtggtctaagtcctgagtacaggacagtcgtcagtagttcgacgtgagcaggagctcacctcgagatgctatgtggacgagggcatgcccaagacacaccttaaccctggcgggggtcgccagggtgaaatcacatcatgtgatgggggtacgacctgatagggtgctgcagaggcccactaacaggctagtataaaaaatctctgctgtacatggcac

SEQ ID NO: 16482 - DNA, 373 bp, synthetic construct
  source 1..373: mol_type = other DNA
gtatacgaggttagctcgtcctcgtatacaatattggacaaaccaaaattccgatttggcctagggcacccctccagcgacggccgaactgggctagccatgcccacagtaggactagcaaacggagggactagccgtagtggcgagctccctgggtggtctaagtcctgagtacaggacagtcgtcaatagttcgacgtgagcaggagcccacctcgagatgctatgtggacgagggcatgcccaagacacaccttaaccctggcaggggtcgccagggtgaaatcacaccaagtgatgggggtacgacctgatagggtgctgcagaggcccactaacaggctagtataaaaatctctgctgtacatggcac

SEQ ID NO: 16483 - DNA, 373 bp, synthetic construct
  source 1..373: mol_type = other DNA
gtatacgaggttagttcattctcgtgtacaatattggataaaacaaaattacgatttggcctagggcacccctccagcgacggccgaactgggctagccatgcccacagtaggactagcaaacggagggactagccgtagtggcgagctccctgggtggtctaagtcctgagtacaggacagtcgtcagtagttcgacgtgagcaggagcccacctcgagatgctatgtggacgagggcatgcccaagacacaccttaaccctggcgggggtcgccagggtgaaatcacaccatgtgatgggggtacgacctgatagggtgctgcagaggcccactaataggctagtataaaaatctctgctgtacatggcac

SEQ ID NO: 16484 - DNA, 373 bp, synthetic construct
  source 1..373: mol_type = other DNA
gtatacgaggttagctcatcctcgtgtacaatattggacaaacaaaattacgatttggcctagggcacccctccagcgacggccgaactgggctagccatgcccacagtaggactagcaaacggagggactagccatagtggcgagctccctgggtggtctaagtcctgagtacaggacagtcgtcagtagttcgacgtgagcaggagcccacctcgagatgctatgtggacgagggcatgcccaagacacaccttaaccctggcgggggtcgccagggtgaaatcacaccatgtgatgggggtacgacctgatagggtgctgcagaggcccactaataggctagtataaaaaatctctgctgtacatggcac

SEQ ID NO: 16485 - DNA, 372 bp, synthetic construct
  source 1..372: mol_type = other DNA
gtatacgaggttagttcattctcgtatgcaatattggacaaactaaatctcgattcggtttagggcacccctccagcgacggccgaactgggctagccatgcccacagtaggactagcagacggagggactagccgtagtggcgagctccctgggtggtctaagtcctgagtacaggacagtcgtcagtagttcgacgtgagcagaagcccacctcgagatgctatgtggacgagggcatgcccaagacacaccttaatcctggcgggggtcgccagggtgaaatcacacaatgtgaggggggtacgacctgatagggcgctgcagaggcccactaacaggctagtataaaaatctctgctgtacatggcac

SEQ ID NO: 16486 - DNA, 372 bp, synthetic construct
  source 1..372: mol_type = other DNA
tatacgaggttagctcggtcctcgtatacaatattggacaaacaaaattccgatttggcctagggcacccctccagcgacggccgaactgggctagccatgcccacagtaggactagcaaacggagggactagccgtagtggcgagctccctgggtggtctaagtcctgagtacaggacagtcgtcagtagttcgacgtgagcaggagcccacctcgatatgctatgtggacgagggcatgcccaagacacaccttaaccctggcgggggtcgccagggtgaaatcacaccatgtgatgggagtacgacctgatagggtgctgcagaggcccactaacaggctagtataaaaatctctgctgtacatggcac

SEQ ID NO: 16487 - DNA, 373 bp, synthetic construct
  source 1..373: mol_type = other DNA
gtatacgaggttagctcgttctcgtatactatattggatacactaaatttcgatttggcctagggcgcccctccagcgacggccgaaatgggctagccatgcccatagtaggactagcaaacggagggactagccgtagtggcgagctccctgggtggtctaagtcctgagtacaggacaatcgtcagtagttcgacgtgagcaccagcccacctcgagatgctacgtggacgagggcatgcccaagacacaccttaaccctggcgggggtcgctagggtgaaatcacattatgtgatgggggtacgacctgatagggtgctgcagaggcccactagcaggctagtataaaaaatctctgctgtacatggcac

SEQ ID NO: 16488 - DNA, 372 bp, synthetic construct
  source 1..372: mol_type = other DNA
gtatacgaggttagctcatcctcgtgtacaatattggacaaacaaaattccgatttggctcagggcacccctccagcgacggccgaactgggctagccatgcccatagtaggactagcagatggagggactagccgtagtggcgagctccctgggtggtctaagtcctgagtacaggacagtcgtcagtagttcgacgtgagcaagagcccacctcgagatgctatgtggacgagggcacgcccaagacacaccttaaccctggcgggggtcgccagggtgaaatcacaccatgtgatgggggtacgacctgatagggtgctgcagaggcccactaacaggctagtataaaaatctctgctgtacatggcac

SEQ ID NO: 16489 - DNA, 372 bp, synthetic construct
  source 1..372: mol_type = other DNA
gtatacgaggttagttcattctcgtgtacaatattggacaaactaaattcagatttggtctagggcacccctccagcgacggccgagctgggctagccatgcccacagtaggactagcaaacggagggactagccgtggtggcgagctccctgggtggtctaagtcctgagtacaggacagtcgtcagtagttcgacgtgagcagaatctcacctcgagatgctatgtggacgagggcatgcccaagacacaccttaaccctggcgggggtcgctagggtgaaatcacattatgtgatgggggtacgacctgatagggtgctgcagaggcccactaacaggctagtataaaaatctctgctgtacatggcac

SEQ ID NO: 16490 - DNA, 372 bp, synthetic construct
  source 1..372: mol_type = other DNA
gtatacgaggttagttcattctcgtgtacaatattggacaaacaaaattccgatttggcttagggcacccctccagcgacggccgaactgggctagccatgcccacagtaggactagcaaacggagggactagccgtagtggcgagctccctgggtggtctaagtcctgagtacaggacagtcgtcagtagttcgacgtgagcaggagcccacctcgagatgctatgtggacgagggcatgcccaagacacaccttaaccctggcgggggtcgccagggtgaaaccacaccatgtgatgggggtacgacctgatagggtgctgcagaggcccactaacaggctagtataaaaatctctgctgtacatggcac

SEQ ID NO: 16491 - DNA, 373 bp, synthetic construct
  source 1..373: mol_type = other DNA
gtatacgagattagctcatcctcgtgtacaatattgggcaaaacaaaatcccgatttggcttagggaatccctccagcgacggccgaactgggctagccatgcccacagtaggactagcagatggagggactagccgtagtggcgagctccctgggtggtctaagtcctgagtacaggacagtcgtcagtagttcgacgtgagcaggagcccacctcgagatgctatgtggacgagggcacgcccaagacacaccttaaccctggcgggggtcgccagggtgaaatcacaccatgtgatgggggtacgacctgatagggtgctgcagaggcccactaacaggctagtataaaaatctctgctgtacatggcac

SEQ ID NO: 16492 - DNA, 371 bp, synthetic construct
  source 1..371: mol_type = other DNA
gtatacgaggttagttcatcctcgtgtacaatattggacaacaaaattccgatttggcttaggacacccctccagcgacggccgaactgggctagccatgcccacagtaggactagcagatggagggactagccgtagtggcgagctccctgggtggtctaagtcctgagtacaggacagtcgtcagtagttcgacgtgagcaggagctcacctcgagatgctatgtggacgagggcatgcccaagacacaccttaaccctggcgggggtcgccagggtgaaatcacatcatgtgatgggggtacgacctgatagggtgctgcagaggcccactaacaggctagtataaaaatctctgctgtacatggcac

SEQ ID NO: 16493 - DNA, 373 bp, synthetic construct
  source 1..373: mol_type = other DNA
gtatacgaggttagctcatcctcgtgtacaatattggataaacaaaattccgatttggcctagggcacccctccagcgacggccgaactgggctagccatgcccacagtaggactagcaaacggagggactagccgtagtggcgagcttcctgggtggtctaagtcctgagtacaggacagtcgtcagtagttcgacgtgagcaggagcccacctcgagatgctatgtggacgagggcatgcccaagacacaccttaaccctggcgggggtcgccagggtgaaatcacaccatgtgatgggagtacgacctgatagggtgctgcagaggcccactaacaggctagtataaaaaatctctgctgtacatggcac

SEQ ID NO: 16494 - DNA, 348 bp, synthetic construct; identical to SEQ ID NO: 331
  source 1..348: mol_type = other DNA

SEQ ID NO: 16495 - DNA, 374 bp, synthetic construct
  source 1..374: mol_type = other DNA
gggtatacgaggttagctctttctcgtatacgatattggatacactaaatttcgatttggtctagggcacccctccagcgacggccgaaatgggctagccatgcccatagtaggactagcaaacggagggactagccgtagtggcgagctccctgggtggtctaagtcctgagtacaggacagtcgtcagtagttcgacgtgagcactagcccacctcgagatgctacgtggacgagggcatgcccaagacacaccttaaccctggcgggggtcgctagggtgaaatcacattatgtgatgggggtacgacctgatagggtgctgcagaggcccactagcaggctagtataaaaatctctgctgtacatggcac

SEQ ID NO: 16496 - DNA, 372 bp, synthetic construct
  source 1..372: mol_type = other DNA
gtatacgaggttagctcatcctcgtgtacaatattggacaaacaaaattccgatttggcttaggacacccctccagcgacggccgaactgggctagccatgcccacagtaggactagcagatggagggactagccgtagtggcgagctccctgggtggtttaagtcctgagtacaggacagtcgtcagtagttcgacgtgagcaggagcccacctcgagatgctatgtggacgagggcatgcccaaaacacaccttagccctggcgggggtcgccagggtgaaatcacatcatgtgatgggggtacgacctgatagggtgctgcagaggcccactaacaggctagtataaaaatctctgctgtacatggcac

SEQ ID NO: 16497 - DNA, 372 bp, synthetic construct
  source 1..372: mol_type = other DNA
gtatacgaggttagctcatcctcgtgtacaatattggacaaacaaaattccgatttggcttaggacacccctccagcgacggccgaactgggctagccatgcccacagtaggactagcagatggagggactagccgtagtggcgagctccctgggtggtttaagtcctgagtacaggacagtcgtcagtagttcgacgtgagcaggagcccacctcgagatgctatgtggacgagggcatgcccaaaacacaccttaaccctggcgggggtcgccagggtgaaatcacatcatgtgatgggggtacgacctgatagggtgctgcagaggcccactaacaggctagtataaaaatctctgctgtacatggcac

SEQ ID NO: 16498 - DNA, 372 bp, synthetic construct
  source 1..372: mol_type = other DNA
gtatacgaggttagctcatcctcgtgtacaatattggacaaacaaaattccgatttggcttaggacacccctccagcgacggccgaactgggctagccatgcccacagtaggactagcagatggagggactagccgtagtggcgagctccctgggtggtttaagtcctgagtacaggacagtcgtcagtagttcgacgtgagcaggagcccacctcgagatgctatgtggacgagggcatgcccaaaacacaccttaaccctggcgggggtcgccagggtgaaatcacatcatgtgatgggggtacgacctgatagggtgctgcagaggcccactaacaggctagtataaaaatctctgctgtacacggcac

SEQ ID NO: 16499 - DNA, 372 bp, synthetic construct
  source 1..372: mol_type = other DNA
gtatacgaggttagctcatcctcgtgtacaatattggacaaacaaaattccgatttggcttaggacacccctccagcgacggccgaactgggctagccatgcccacagtaggactagcagatggagggactagccgtagtggcgagctccctgggtggtctaagtcctgagtacaggacagtcgtcagtagttcgacgtgagcaggagctcacctcgagatgctatgtggacgagggcatgcccaagacacaccttaaccctggcgggggtcgccagggtgaaatcacatcatgtgatgggggtacgacctgatagggtgctgcagaggcccactaacaggctagtataaaaatctctgctgtacatggcac

SEQ ID NO: 16500 - DNA, 372 bp, synthetic construct
  source 1..372: mol_type = other DNA
gtatacgaggttagctcatcctcgtgtacaatattggacaaacaaaattccgatttggcttaggtcacccctccagcgacggccgaactgggctagccatgcccacagtaggactagcagatggagggactagccgtagtggcgagctccctgggtggtttaagtcctgagtacaggacagtcgtcagtagttcgacgtgagcaggagcccacctcgagatgctatgtggacgagggcatgcccaaaacacaccttaaccctggcgggggtcgccagggtgaaatcacatcatgtgatgggggtacgacctgatagggtgctgcagaggcccactaacaggctagtataaaaatctctgctgtacatggcac

SEQ ID NO: 16501 - DNA, 372 bp, synthetic construct
  source 1..372: mol_type = other DNA
gtatacgaggttagttcattctcgtatacaatattggacaaacaaaattcctatttggcttaggacacccctccagcgacggccgaactgggctagccatgcccacagtaggactagcagatggagggactagccgtagtggcgagctccctgggtggtttaagtcctgagtacaggacagtcgtcagtagttcgacgtgagcaggagcccacctcgagatgctatgtggacgagggcatgcccaaaacacaccttaaccctggcgggggtcgccagggtgaaatcacatcatgtgacgggggtacgacctgatagggtgctgcagaggcccactaacgggctagtataaaaatctctgctgtacatggcac

SEQ ID NO: 16502 - DNA, 372 bp, synthetic construct
  source 1..372: mol_type = other DNA
gtatacgaggttagttcattctcgtatacaatattggacaaacaaaattcctatttggcttaggacacccctccagcgacggccgaactgggctagccatgcccacagtaggactagcagatggagggactagccgtagtggcgagctccctgggtggtttaagtcctgagtacaggacagtcgtcagtagttcgacgtgagcaggagcccacctcgagatgctatgtggacgagggcatgcccaaaacacaccttaaccctggcgggggtcgccagggtgaaatcacatcatgtgatgggggtacgacctgatagggtgctgcagaggcccactaacaggctagtataaaaatctctgctgtacatggcac

SEQ ID NO: 16503 - DNA, 391 bp, synthetic construct; identical to SEQ ID NO: 426
  source 1..391: mol_type = other DNA

SEQ ID NO: 16504 - DNA, 372 bp, synthetic construct
  source 1..372: mol_type = other DNA
gtatacgaggttagctcattctcgtgtacaatattggacaaacaaaattccgatttggcttaggacacccctccagcgacggccgaactgggctagccatgcccatagtaggactagcagatggagggactagccgtggtggcgagctccctgggtggtctaagtcctgagtacaggacagtcgtcagtagttcgacgtgagcaggagctcacctcgagatgctatgtggacgagggcatgcccaagacacaccttaaccctggctggggtcgccagggtgaaatcacatcatgtgatgggggtacgacctgatagggtgctgcagaggcccactaacaggctagtataaaaatctctgctgtacatggcac

SEQ ID NO: 16505 - DNA, 372 bp, synthetic construct
  source 1..372: mol_type = other DNA
gtatacgaggttagttcatcctcgtgtacaatattggacaaacaaaattccgatttggcttaggacacccctccagcgacggccgaactgggctagccatgcccacagtaggactagcagatggagggactagccgtagtggcgagctccctgggtggtttaagtcctgagtacaggacagtcgtcagtagttcgacgtgagcaggagcccacctcgagatgctatgtggacgagggcatgcccaaaacacaccttaaccctggcgggggtcgccagggtgaaatcacatcatgtgatgggggtacgacctgatagggtgctgcagaggcccactaacaggctagtataaaaatctctgctgtacatggcac

SEQ ID NO: 16506 - DNA, 382 bp, synthetic construct
  source 1..382: mol_type = other DNA
gtatacgaggttaggcaagttctcgtatacatattggacactctaaaaataattaggcctaggggacaaaaatcctccttagcgaaggccgaaaagaggctaaccatgcccttagtaggactagcaaaataaggggggtagcaacagtggcgagttcgttggatggctgaagccctgagtacagggtagtcgtcagtggttcgacgctttggaggacaagcctcgagatgccacgtggacgagggcatgcccacagcacatcttaacctggacaggggtcgttcaggtgaaaacggtttaaccaaccgctacgaatacagtctgataggatgctgcagaggcccactgtattgctactgaaaatctctgctgtacatggcac

SEQ ID NO: 16507 - DNA, 373 bp, synthetic construct
  source 1..373: mol_type = other DNA
gtatacgaggttagttcattctcgtatgcacaatcgggcaaatgaaaacttcaatttggttcagggcctctctccagcgacggccgaactgggctagccatgcccatagtaggactagcaaatggagggactagccgtagtggcgagctccctgggtggtctaagtcctgagtacaggacagtcgtcagtagttcgacgtgagcagaagctcacctcgagatgctatgtggacgagggcgtgcccaagacacaccttaactctagcgggggtcgctagggtgagaccacaccatgtgatgggagtacgacccgatagggtgctgcttaggcccactaacaggctagtataaaaatctctgctgtacatggcac

SEQ ID NO: 16508 - DNA, 377 bp, synthetic construct; identical to SEQ ID NO: 374
  source 1..377: mol_type = other DNA

SEQ ID NO: 16509 - DNA, 373 bp, synthetic construct
  source 1..373: mol_type = other DNA
gtatacgaggttagttcattctcgtatacacgattggacaaatcaaaattataatttggttcagggcctccctccagcgacggccgaactgggctagccatgcccatagtaggactagcaaacggagggactagccgtagtggcgagctccctgggtggtctaagtcctgagtacaggacagtcgtcagtagttcgacgtgagcagaagcccacctcgagatgctacgtggacgagggcatgcccaagacacaccttaaccctagcgggggtcgctagggtgaaatcacaccacgtgatgggagtacgacctgatagggcgctgcagaggcccactattaggctagtataaaaatctctgctgtacatggcac

SEQ ID NO: 16510 - DNA, 366 bp, synthetic construct; identical to SEQ ID NO: 342
  source 1..366: mol_type = other DNA

SEQ ID NO: 16511 - DNA, 386 bp, synthetic construct
  source 1..386: mol_type = other DNA
gtatacgagattagctaaagtactcgtatacggattgggtgtcaacaaatttttgaattggcaacgtagggaaccttcccctcagcgaaggccgaaaagaggctagccatgcccttagtaggactagcaaaaagaggggactagcggtagcagtgagttcattggatggccgaacccctgagtacaggggagtcgtcaatggttcgacactccattagtcgaggagtctcgagatgccatgtggacgagggcatgcccacggcacatcttaacccatgcgggggttgcatgggtgaaagcgctattcgtggcgttatggacacagcctgatagggtgtagcagagacctgctactccgctagtaaaaactctgctgtacatggcac

SEQ ID NO: 16512 - DNA, 387 bp, synthetic construct; identical to SEQ ID NO: 415
  source 1..387: mol_type = other DNA

SEQ ID NO: 16513 - DNA, 361 bp, synthetic construct
  source 1..361: mol_type = other DNA
agttcattctcgtgtacatgattggacaaatcaaaatctcaatttggttcagggcctccctccagcgacggccgagctgggctagccatgcccacagtaggactagcaaacggagggactagccgtagtggcgagctccctgggtggtctaagtcctgagtacaggacagtcgtcagtagttcgacgtgagcagaagcccacctcgagatgctatgtggacgagggcatgcccaagacacaccttaaccctagcgggggtcgttagggtgaaatcacaccatgtgatgggagtacgacctgatagggtgctgcagaggcccactattaggctagtataaaaatctctgctgtacatggcac

SEQ ID NO: 16514 - DNA, 387 bp, synthetic construct; identical to SEQ ID NO: 416
  source 1..387: mol_type = other DNA

SEQ ID NO: 16515 - DNA, 390 bp, synthetic construct; identical to SEQ ID NO: 424
  source 1..390: mol_type = other DNA

SEQ ID NO: 16516 - DNA, 360 bp, synthetic construct
  source 1..360: mol_type = other DNA
gctctttctcgtatacgacattggatacactaaatttcgatttggtctagggcacccctccagcgacggccgaaatgggctagccatgcccatagtaggactagcaaacggagggactagccgtagtggcgagctccctgggtggtctaagtcctgagtacaggacagtcgtcagtagttcgacgtgagcaccagcccacctcgagatgctacgtggacgagggcatgcccaagacacaccttaaccctggcgggggtcgctagggtgaaatcacattatgtgatgggggtacgacctgatagggtgctgcagaggcccactaacaggctagtataaaaaatctctgctgtacatggcac

SEQ ID NO: 16517 - DNA, 360 bp, synthetic construct
  source 1..360: mol_type = other DNA
gctcgttctcgtatacgacattggatacactaaatttcgatttggtctagggcacccctccagcgacggccgaaatgggctagccatgcccatagtaggactagcaaacggagggactagccgtagtggcgagctccctgggtggtctaagtcctgagtacaggacagtcgtcagtagttcgacgtgagcaccagcccacctcgagatgctacgtggacgagggcatgcccaagacacaccttaaccctggcgggggtcgctagggtgaaatcacatcatgtgatgggggtacgacctgatagggtgctgcagaggcccactagcaggctagtataaaaaatctctgctgtacatggcac

SEQ ID NO: 16518 - DNA, 386 bp, synthetic construct
  source 1..386: mol_type = other DNA
gtatacgagattagctaaagtactcgtatacggattggatgttgacaaatatcgaattggcaaagtagggaacctttcccctcagcgaaggccgaaaagaggctagccatgcccttagtaggactagcaaaaggaggggactagcggtagcagtgagttcattggatggccgaatccctgagtacagggaagtcgtcaatggttcgacactccaccaatcgaggagtctcgagatgccatgtggacgagggcatgcccacggcacatcttaacctatgcgggggttgcatgggtgaaagcaccatttgcggtgttatggacacagcctgatagggtgtagcagagacctgctattccgctagtaaaaactctgctgtacatggcac

SEQ ID NO: 16519 - DNA, 386 bp, synthetic construct
  source 1..386: mol_type = other DNA
gtatacgagattagctaaagtactcgtatacggattggatgttgacaaaatattgaattgacaaggtagggaatttttccctcagcgaaggccgaaaagaggctaaccatgcccttagtaggactagcaaaaggaggggactagcggtagcagtgagttcattggatggcctaatccctgagtacagggaagtcgtcaatggttcgacactccaccagttgtggagtctcgagatgccatgtggacgagggcatgcccaaggcacatcttaacctatgcgggggttgcatgggcgaaagcaccatttatggtgttatggacacagcctgatagggtgtagcagagacctgctactccgctagtaaaaactctgctgtacatggcac

SEQ ID NO: 16520 - DNA, 385 bp, synthetic construct
  source 1..385: mol_type = other DNA
gtatacgagattagctaaagtactcgtatatggattggacgtcaacaaatttttaattggcaagtcagggaaccttcccctcagcgaaggccgaaaagaggctagccatgcccttagtaggactagccaaaggaggggactagcggtagcagtgagttcattggatggccgaacccctgagtacaggggagtcgtcaatggttcgacactccatcagctgaggagtctcgagatgccatgtggacgagggcatgcccacggcacatcttaacctatgcgggggttgcatgggtgaaagcgccattcgtggcgttatggacacagcctgatagggtgtagcagaagcctgctattccgctagtaaaaactctgctgtacatggcac

SEQ ID NO: 16521 - DNA, 385 bp, synthetic construct; identical to SEQ ID NO: 402
  source 1..385: mol_type = other DNA

SEQ ID NO: 16522 - DNA, 385 bp, synthetic construct
  source 1..385: mol_type = other DNA
gtatacgagattagctaaagtactcgtatacgcattggacgtcaacaaattttgaattggtaacgtagggaaccttcccctcagcgaaggccgaaaagaggctagccatgcccttagtaggactagcaaaagtaggggactagcggtagcagtgagttcgttggatggccgaacccctgagtacaggggagtcgtcaatggttcgacactccattagtcgaggagtctcgagatgccatgtggacgagggcatgcccacggcacatcttaacccatgcgggggttgcatgggtgaaagcgctattcgtggcgttatggacacagcctgatagggtgtggcagagacctgctactccgctagtaaaaactctgctgtacatggcac

SEQ ID NO: 16523 - DNA, 385 bp, synthetic construct
  source 1..385: mol_type = other DNA
gtatacgagattagctaaagtactcgtatacggattggacgtcaacaaattttgaattggtaacgtagggaaccttcccctcagcgaaggccgaaaagaggctagccatgcccttagtaggactagcaaaagtaggggactagcggtagcagtgagttcgttggatggccgaacccctgagtacaggggagtcgtcaatggttcgacactccattagtcgaggagtctcgagatgccatgtggacgagggcatgcccacggcacatcttaacccatgcgggggttgcatgggtgaaagcgctattcgtggcgttatggacacagcctgatagggtgtggcagagacctgctactccgctagtaaaaactctgctgtacatggcac

SEQ ID NO: 16524 - DNA, 370 bp, synthetic construct; identical to SEQ ID NO: 348
  source 1..370: mol_type = other DNA

SEQ ID NO: 16525 - DNA, 385 bp, synthetic construct
  source 1..385: mol_type = other DNA
gtatacgagattagctaaagtactcgtatacggattggacgtcaacaaattttgaattggcaacgtagggaaccttccccttagcgaaggccgaaaagaggctagccatgcccttagtaggactagcaaaaggaggggactagcggtagcagtgagttcgttggatggccgaacccctgagtacaggggagtcgtcaatggttcgacactccatcagtcgaggagtctcgagatgccatgtggacgagggcatgcccacggcacatcttaacccatgcgggggttgcatgggtgaaagcgctattcgtggcgttatggacacagcctgatagggtgtagcagagacctgctactccgctagtaaaaactctgctgtacatggcac

SEQ ID NO: 16526 - DNA, 385 bp, synthetic construct
  source 1..385: mol_type = other DNA
gtatacgagattagctaaagtactcgtatacggattggacgtcaacaaattttgaattggcaacgtagggaaccttcccctcagcgaaggccgaaaagaggctagccatgcccttagtaggactagcaaaaggaggggactagcggtagcagtgagttcgttggatggccgaacccctgagtacaggggagtcgtcaatggttcgacactccattagtcgaggagtctcgagatgccatgtggacgagggcatgcccacggcacatcttaacccacgcgggggttgcatgggtgaaagcgctattcgtagcgttacggacacagcctgatagggtgtagcagagacctgctattccgctagtaaaaactctgctgtacatggcac

SEQ ID NO: 16527 - DNA, 385 bp, synthetic construct
  source 1..385: mol_type = other DNA
gtatacgagattagctaaagtactcgtatatggattggacgtcaacaaatttttaattggcaacgtagggaaccttcccctcagcgaaggccgaaaagaggctagccatgcccttagtaggactagcaaaagtaggggactagcggtagcagtgagttcgttggatggccgaacccctgagtacaggggagtcgtcaatggttcgacactccattagtcgaggagtctcgagatgccatgtggacgagggcatgcccacggcacatcttaacccatgcgggggttgcatgggtgaaagcgctattcgtggcgttatggacacagcctgatagggtgtagcagagacctgctattccgctagtaaaaactctgctgtacatggcac

SEQ ID NO: 16528 - DNA, 385 bp, synthetic construct
  source 1..385: mol_type = other DNA
gtatacgagattagctaaagtactcgtatacggattggacgtcaacaaattttgaattggcaaagtagggaatcttccccttagcgaaggccgaaaagaggctagccatgcccttagtaggactagcaaaaggaggggactagcagtagcagtgagttcattggatggccgaacccctgagtacaggggagtcgtcaatggttcgacactccttcagttgaggagtctcgagatgccatgtggacgagggcatgcccacggcacatcttaacctatgcgggggctgcatgggtgaaagcgccattcttggtgttatggacacagcctgatagggtgtagcagagacctgctattctgctagtaaaaactctgctgtacatggcac

SEQ ID NO: 16529 - DNA, 385 bp, synthetic construct
  source 1..385: mol_type = other DNA
gtatacgagattagctaaagtactcgtatacggattggacgtcaacaaatttttaatcggcaacgtagggaaccttcccctcagcgaaggccgaaaagaggctagccatgcccttagtaggactagcaaaaggaggggactagcggtagcagtgagttcgttggatggccgaacccctgagtacaggggagtcgtcaatggttcgacactccattagtcgaggagtctcgagatgccatgtggacgagggcatgcccacggcacatcttaacccatgcgggggttgcatgggtgaaagcgccattcgtggcgtcatggacacagcctgatagggtgtagcagagacctgctattccgctagtaaaaactctgctgtacatggcac

SEQ ID NO: 16530 - DNA, 385 bp, synthetic construct
  source 1..385: mol_type = other DNA
gtatacgagattagctaaagtactcgtatacggattggacgtcaacaaattttgaattggtaacgtagggaaccttcccctcagcgaaggccgaaaagaggctagccatgcccttagtaggactagcaaaacgaggggactagcggtagcagtgagttcgttggatggccgaacccctgagtacaggggagtcgtcaatggttcgacactccattagtcgaggagtctcgagatgccatgtggacgagggcatgcccacggcacatcttaacccgtgcgggggttgcatgggtgaaagcgctattcgtggcgttatggacacagcctgatagggtgtagcagagacctgctactccgctagtaaaaactctgctgtacatggcac

SEQ ID NO: 16531 - DNA, 385 bp, synthetic construct
  source 1..385: mol_type = other DNA
gtatacgagattagctaaagtactcgtatacggattggacgtccacaaactttgaattggcaacacagggaaccttcccctcggcgaaggccgaaaagaggctagccatgcccttagtaggactagcaaaaggaggggactagcggtagcagtgagtccattggatggccgaacccctgagtacaggggagtcgtcaatggttcgacactcctttagtcgaggagtctcgagatgccatgtggacgagggcatgcccacggcacatcttaacccacgcgggggttgcgtgggtgaaagcgccattcgtggcgtcatggacacagcctgatagggtgtagcagagacctgctactccgctagtaaaaactctgctgtacatggcac

SEQ ID NO: 16532 - DNA, 385 bp, synthetic construct
  source 1..385: mol_type = other DNA
gtatacgagattagctaaagtactcgtatacggattggacgtcaacaaattttgaattggcaacgtagggaaccttccacttagcgaaggccgaaaagaggctagccatgcccttagtaggactagcaaaaggaggggactagcggtagcagtgagttcgttggatggccgaacccctgagtacaggggagtcgtcaatggttcgacactccattagttgaggagtctcgagatgccatgtggacgagggcatgcccacggcacatcttaacccatgcgggggttgcatgggtgaaagcgctattcgtggcgttatggacacagcctgatagggtgtagcagagacctgctactccgctagtaaaaactctgctgtacatggcac

SEQ ID NO: 16533 - DNA, 360 bp, synthetic construct
  source 1..360: mol_type = other DNA
agttcattctcgtgtacatgattggacaaatcaaaatctcaatttggttcagggcctccctccagcgacggccgagctgggctagccatgcccacagtaggactagcaaacggagggactagccgtagtggcgagctccctgggtggtctaagtcctgagtacaggacagtcgtcagtagttcgacgtgagcagaagcccacctcgagatgctatgtggacgagggcatgcccaagacacaccttaacctagcgggggtcgttagggtgaaatcacaccatgtgatgggagtacgacctgatagggtgctgcagaggcccactattaggctagtataaaaatctctgctgtacatggcac

SEQ ID NO: 16534 - DNA, 384 bp, synthetic construct
  source 1..384: mol_type = other DNA
gtatacgagattagctaaagtactcgtatacggattggacgtcgacaaattttaattggcaatgtagggaactatcccctcagcgaaggccgaaaagaggctagccatgcccttagtaggactagcaaaaggaggggactagcggtagcagtgagttcattggatggccgaatccctgagtacagggaagtcgtcaatggttcgacactccatcagctgaggagtctcgagatgccatgtggacgagggcatgcccacggcacatcttaacctatgcgggggttgcatgggtgaaagcgccattcgtggtgctatgaacacagcctgatagggtgtagcagagacctgctattccgctagtaaaaactctgctgtacatggcac

SEQ ID NO: 16535 - DNA, 383 bp, synthetic construct
  source 1..383: mol_type = other DNA
gtatacgcccagttagctcatgtcggcgtatatgattgggtatcccaaattaataatttggtttagggattaattcccctggcgaaggccgaaataggttaaccataccttcagtaggacgagcgtaatgggggactagtggtagcagtgagctccttggattaccgaagccccgagcacggggtagtcgtcaatggttcgacgcatcaaggaatgcctcgagatgccatgtggacgagggcgtgcccacggtgaatcttaacccaagcgggggtcgcttgggtgaaagagggtcattatatggctctttgggagtacagcctgatagggtgttgcagagacctgctacatcactagtataaaaactctgctgtacatggcac

SEQ ID NO: 16536 - DNA, 386 bp, synthetic construct
  source 1..386: mol_type = other DNA
gtatacgagattagctaaagtactcgtatacggattggatgtcgacaaatattgaattggcaaagtagggaattttcccctcagcgaaggccgaaaagaggctagccatgcccttagtaggactagcaaaagaaggggactagcggtagcagtgagttcattggatggccgaatccctgagtacagggaagtcgtcaatggttcgacactccatcagtcgaggagtctcgagatgccatgtggacgagggcatgcccacggcacatcttaacctatgcgggggttgcatgggtgaaaacgccaaccgtggtgttatggacacagcctgatagggtgtagcagagacctgctattccgctagtaaaaaactctgctgtacatggcac

SEQ ID NO: 16537 - DNA, 375 bp, synthetic construct; identical to SEQ ID NO: 368
  source 1..375: mol_type = other DNA

SEQ ID NO: 16538 - DNA, 380 bp, synthetic construct
  source 1..380: mol_type = other DNA
tacgccgacgtgagctaaccggacgtatatgattgggtatcccaaattaataatttggtttagggactaattcccctggcgaaggccgaaataggttagccataccttcagtaggacgagcgtaatgggggactagtggtagcagtgagctccttggattaccgaagccccgagtacggggtagtcgtcaatggttcgacgcatcaatgaatgcctcgagatgccatgtggacgagggcgtgcccacggtgaatcttaactcaagcgggggccgcttgggtgaaagagggtcattatgtggctctttgggagtacagcctgatagggtgttgcagagacctgctacatcactagtataaaaactctgctgtacatggcac

SEQ ID NO: 16539 - DNA, 381 bp, synthetic construct
  source 1..381: mol_type = other DNA
acgagactagctaaagtactcgtatacggattggatgttgacaaattttgaattggcaaagtaggtaactttcccctcagcgaaggccgaaaagaggctagccatgcccttagtaggactagcaaaaggaggggactagcggtagcagtgagttcattggatggccgaacccctgagtacaggggagtcgtcaatggttcgacactccatcgttcatggagtctcgagatgccatgtggacgagggcatgcccacggcacatcttaacctatgcgggggttgcatgggtgaaagcgccattcgtggcgttatggacacagcctgatagggtgtagcagagacctgctattccgctagtaaaaactctgctgtacatggcac

SEQ ID NO: 16540 - DNA, 385 bp, synthetic construct
  source 1..385: mol_type = other DNA
gtatacgagattagctaaagtactcgtatacggattggacgtcgacaaatttttaattggcaatacagggaaccttcccctcagcgaaggccgaaaagaggctagccatgcccatagtaggactagcaaaaggaggggactagcggtagcagtgagttcattggatggccgaatccctgagtacagggaagtcgtcaatggttcgacactccatcagtcgaggagtctcgagatgccatgtggacgagggcatgcccacggcacatcttaacctatgcgggggttgcataggcgaaagcgccattcgtggtgttatggacacagcctgatagggtgtagcagagacctgctattccgctagtaaaaactctgctgtacatggcac

SEQ ID NO: 16541 - DNA, 353 bp, synthetic construct
  source 1..353: mol_type = other DNA
ctcgtatacacgattggacaaatcaaaattataatttggttcagggcctccctccagcgacggccgaactgggctagccatgcccatagtaggactagcaaacggagggactagccatagtggcgagctccctgggtggtctaagtcctgagtacaggacagtcgtcagtagttcgacgtgagcagaagcccacctcgagatgctacgtggacgagggcatgcccaagacacaccttaaccctagcgggggtcgctagggtgaaatcacaccacgtgatgggagtacgacctgatagggtgctgcagaggcccactattaggctagtataaaaatctctgctgtacatggcac

SEQ ID NO: 16542 - DNA, 378 bp, synthetic construct
  source 1..378: mol_type = other DNA
aggttagttaaagttatcgtatacagattggacgttcacaaaacgagaattgacaaaatagggaaccttcccctcagcgaaggccgaaaagaggctagccatgcccttagtaggactagcaaaaagaggggactagcggtagcagtgagttcattggatggccgaatccctgagtacagggaagtcgtcaatggttcgacgctctagcaattgcagagcctcgagatgccatgtggacgagggcatgcccacggcacaccttaacctatgcgggggttgcgtaggtgaaagcaccatttgtggtgttatgaacacagcctgatagggcgtagcagagacctgctactccgctagtaaaaactctgctgtacatggcac

SEQ ID NO: 16543 - DNA, 374 bp, synthetic construct; identical to SEQ ID NO: 365
  source 1..374: mol_type = other DNA

SEQ ID NO: 16544 - DNA, 360 bp, synthetic construct
  source 1..360: mol_type = other DNA
ctcgtatacatattgggcactctaaaaatgaattaggcctgagggacaaatcctccttagcgaaggccgaaaagaggctagccatgcccttagtaggactagcaaaacaaggagggtagcaacagtggtgagttcgttggatggctgaagccctgagtacagggtagtcgtcagtggttcgacgctttgtgcgacaagcctcgagatgccacgtggacgagggcatgcccacagcacatcttaacctgagcgggggtcgttcaggtgaaaacggtttaaccaaccgctacgaatacagcctgatagggtgctgcagaggcccactgtatcgctactaaaaatctctgctgtacatggcat

SEQ ID NO: 16545 - DNA, 382 bp, synthetic construct
  source 1..382: mol_type = other DNA
gtatacgagaatttgcctaggacctcgtatacatattggacattctaaaaataattaggcctaagggacaaatcctctttagcgaaggccgaaaagaggctagccatgcccatagtaggactagcaaaataaggggggtagcaacagtggtgagttcgttggatggctgaagccctgagtacagggtagtcgtcagtggttcgacgcttcggaggacaagcctcgagatgccacgtggacgagggcatgcccacagcacatcttaacctgagcgggggtcgttcaggtgaaaacggtttaaccaaccgctacgaatacagcctgatagggtgctgcaggggcctactgtattgctactaaaaatctctgctgtacatggcac

SEQ ID NO: 16546 - DNA, 355 bp, synthetic construct
  source 1..355: mol_type = other DNA
acatattggacaacagaaaataactattaggcctagggaatgaatccctctcagcgaaggccgaaaggaggctagccatgcccttagtaggactagcataacgagaggggtagcaacggtggtgagttcgttggatggcttaagccctgagtacagggtagtcgtcagtggttcgacacctcggcataaaggtctcgagatgccacgtggacgagggcacgcccaaagcacatcttaacctgagcgggggtcgcttaggcaaaagcagattgaccaatctgttacgaatacagcctgatagggtgctgcagaggcccaccgtattgctactaaaaatctctgctgtacatggcac

SEQ ID NO: 16547 - DNA, 375 bp, synthetic construct
  source 1..375: mol_type = other DNA
tcagctaaagtactcgtatacggatcggacgtcaacaaattttgaattggcaacgtagggaaccttcccctcagcgaaggccgaaaagaggctagccatgcccttagtaggactagcaaaaggaggggactagcggtagcagtgagttcattggatggccgaacccctgagtacaggggagtcgtcaatggttcgacactccatcagtcgaggagtctcgagatgccatgtggacgagggcatgcccacggcacatcttaacccatgcgggggttgcatgggtgaaagcgccattcgtggcgttatggacacagcctgatagggtgtagcagagacctgctactccgctagtaaaaactctgctgtacatggcac

SEQ ID NO: 16548 - DNA, 369 bp, synthetic construct; identical to SEQ ID NO: 345
  source 1..369: mol_type = other DNA

SEQ ID NO: 16549 - DNA, 373 bp, synthetic construct
  source 1..373: mol_type = other DNA
gctaaaacgctcgtatacagattggacgttgacaaagtattgaattgacaaggtagggaattttcccctcagcgaaggccgaaaggaggctagccatgcccttagtaggactagcaaaaggaggggactagcggtagcagtgagttcattggatggcctaacccctgagtacaggggagtcgtcaatggttcgacactccatcagttaaggagtctcgagatgccatgtggacgagggcatgcccaaggcacatcttaacctatgcgggggttgcataggcgaaagcaccattcacggtgttatggacacagcctgatagggtgtagcagagacctgctattctgctagtaaaaactctgctgtacatggcac

SEQ ID NO: 16550 - DNA, 386 bp, synthetic construct; identical to SEQ ID NO: 408
  source 1..386: mol_type = other DNA

SEQ ID NO: 16551 - DNA, 375 bp, synthetic construct
  source 1..375: mol_type = other DNA
taggtaaagtgctcgtatacagattggatattgacaaatattgaattggcaaggtagggaatttttcccctcagcgaaggccgaaaagaggctagccatgcccttagtaggactagcagaaggaggggactagcggtagcagtgagttcattggatggcctaatccctgagtacagggaagtcgtcaatggttcgacactccatcagttgaggagtctcgagatgccatgtggacgagggcatgcccaaggcacatcttaacctatgcgggggttgcataggcaaaagcaccactcacggtgttatggacacagcctgatagggtgtagcagagacctgctattccgctagtaaaaactctgctgtacatggcac

SEQ ID NO: 16552 - DNA, 375 bp, synthetic construct
  source 1..375: mol_type = other DNA
agctaaagtactcgtatacggattggacgttgacaaaaatattgaattggaaatgtagggaattttcccctcagcgaaggccgaaaagaggttagccatacccttagtaggactagcaaaaggaggggactagcagtagcagtgagttcattggatggccgaacccctgagtacaggggagtcgtcaatggttcgacactccttcagttgaggagcctcgagatgccatgtggacgagggcatgcccacggcacatcttaacctatgcgggggctgcatgggtgaaagcgccatttttggtgttatggacacagcctgatagggtgtagcagagacctgctattctgctagtaaaaactctgctgtacatggcac

SEQ ID NO: 16553 - DNA, 373 bp, synthetic construct
  source 1..373: mol_type = other DNA
agctaaagtactcgtatacggattggacgttaacaaattttaaattggcaacgtagggaaccttcccctcagcgaaggccgaaaagaggctagccatgcccttagtaggactagcaaaaggaggggactagcggtagcagtgagttcgttggatggccgaacccctgagtacaggggagtcgtcaatggttcgacactccattaattgaggagtctcgagatgccatgtggacgagggcatgcccacggcacatcttaacccatgcgggggttgcatgggtgaaagcgctattcgtggcgttatggacacagcctgatagggtgtagcagagacctgctactccgctagtaaaaactctgctgtacatggcac

SEQ ID NO: 16554 - DNA, 386 bp, synthetic construct; identical to SEQ ID NO: 409
  source 1..386: mol_type = other DNA

SEQ ID NO: 16555 - DNA, 385 bp, synthetic construct
  source 1..385: mol_type = other DNA
gtatacgagattagctaaagtactcgtatacggattggacgtcaacaaattttgaattggcaaagtagggaatcttccccttagcgaaggccgaaaagaggctagccatgcccttagtaggactagcaaaacgaggggactagcggtagcagtgagttcgttggatggccgaacccctgagtacaggggagtcgtcaatggttcgacactccattagtcgaggagtctcgagatgccatgtggacgagggcatgcccacggcacatcttaacccatgcgggggttgcatgggtgaaagcgctattcgtggcgttatggacacagcctgatagggtgtagcagagacctgctactccgctagtaaaaactctgctgtacatggcac

SEQ ID NO: 16556 - DNA, 388 bp, synthetic construct; identical to SEQ ID NO: 422
  source 1..388: mol_type = other DNA

SEQ ID NO: 16557 - DNA, 386 bp, synthetic construct; identical to SEQ ID NO: 410
  source 1..386: mol_type = other DNA

SEQ ID NO: 16558 - DNA, 373 bp, synthetic construct
  source 1..373: mol_type = other DNA
agttaaagtactcgtatacggattggacgacaacaaattttgaattggcaacgtagggaaccttcccctcagcgaaggccgaaaagaggctagccatgcccttagtaggactagcaaaatgaggggactagcggtagcagtgagttcgttggatggccgaacccctgagtacaggggagtcgtcaatggttcgacactccattagtcgaggagtctcgagatgccatgtggacgagggcatgcccacggcacatcttaacccgtgcgggggttgcatgggtgaaagcgccattcgtggcgttatggacacagcctgatagggtgtagcagagacctgctactccgctagtaaaaactctgctgtacatggcac

SEQ ID NO: 16559 - DNA, 372 bp, synthetic construct
  source 1..372: mol_type = other DNA
agctaaagtactcgtatacggattgggtgttaacaaaatttaattggctaagtagggaattttcccctcagcgaaggccgaaaagaggctagccatgcccttagtaggactagcaaaaggaggggactagcggtagcagtgagttcattggatggccgaatccctgagtacagggaagtcgtcaatggttcgacactccatcaactgaggagtctcgagatgccatgtggacgagggcatgcccacggcacatcttaacctatgcgggggttgcatgggtgaaagcaccattcgtggtgtgatggacacagcctgatagggtgtagcagagacctgctattccgctagtaaaaactctgctgtacatggcac

SEQ ID NO: 16560 - DNA, 372 bp, synthetic construct
  source 1..372: mol_type = other DNA
gctaaagtactcgtatacagattggacgtcaacaaatttttaattggcaacatagggaaccttcccctcagcgaaggccgaaaagaggctagccatgcccttagtaggactagcaaaaggaggggactagcggtagcagtgagttcgttggatggccgaacccctgagtacaggggagtcgtcaatggttcgacactccattagtcgaggggtctcgagatgccatgtggacgagggcatgcccacggcacatcttaacccatgcgggggttgcatgggtgaaagcgctattcgtggcgttatggacacagcctgatagggtgtagcagagacctgctattccgctagtaaaaactctgctgtacatggcac

SEQ ID NO: 16561 - DNA, 371 bp, synthetic construct
  source 1..371: mol_type = other DNA
ctaaagtactcgtatacggattggacgttaacaaatttttaattggcaacgtagggaaccttcccctcggcgaaggccgaaaagaggctagccatgcccttagtaggactagcaaaaggaggggactagcggtagcagtgagttcgttggatggccgaacccctgagtacaggggagtcgtcaatggttcgacactccattagttgaggagtctcgagatgccatgtggacgagggcatgcccacggcacatcttaacccatgcgggggttgcatgggtgaaagcgctattcgtggcgttatggacacagcctgatagggtgtagcagagacctgctactccgctagaaaaaactctgctgtacatggcac

SEQ ID NO: 16562 - DNA, 372 bp, synthetic construct
  source 1..372: mol_type = other DNA
gtaaagtgctcgtatacagattggatattgacaaatattgaattggcaaggtagggaatttttcccctcagcgaaggccgaaaagaggctagccatgcccttagtaggactagcagaaggaggggactagcggtagcagtgagttcattggatggcctaatccctgagtacagggaagtcgtcaatggttcgacactccatcagttgaggagtctcgagatgccatgtggacgagggcatgcccaaggcacatcttaacctatgcgggggttgcataggcaaaagcaccactcacggtgttatggacacagcctgatagggtgtagcagagacctgctattccgctagtaaaaactctgctgtacatggcac

SEQ ID NO: 16563 - DNA, 382 bp, synthetic construct; identical to SEQ ID NO: 391
  source 1..382: mol_type = other DNA

SEQ ID NO: 16564 - DNA, 383 bp, synthetic construct
  source 1..383: mol_type = other DNA
gtatacgaggttaggcaagttctcgtatacatattggacattacaaaaaataattaggtctaggggacaaaaatcctccttagcgaaggccgaaaagaggctagccatgcccttagtaggactagcaaaataaggggggtagcagcagtggtgagttcgttggatggctgaagccctgagtacagggtagtcgtcagtggttcgacgctttggaggacaagcctcgagatgccacgtggacgagggcatgcccacagcacatcttaatctggacgggggtcgtccaggtgaaaacggtttgaccaaccgctacgaatacagcctgatagggtgctgcagaggcccactgtattgctactaaaaatctctgctgtacatggcac

SEQ ID NO: 16565 - DNA, 370 bp, synthetic construct
  source 1..370: mol_type = other DNA
taaagtactcgtatacggattggacgttaacaaatttttaattgtaaatgtagggaatcttcccctcagcgaaggccgaaaagaggctagccatgcccttagtaggactagcaaaaggaggggactagcggtagcagtgagttcgttggatggccgaacccctgagtacaggggagtcgtcaatggttcgacactccattagttgaggagtctcgagatgccatgtggacgagggcatgcccacggcacatcttaacccatgcgggggttgcatgggtgaaagcgctattcgtggcgttatggacacagcctgatagggtgtagcagagacctgctactccgctagaaaaaactctgctgtacatggcac

SEQ ID NO: 16566 - DNA, 356 bp, synthetic construct; identical to SEQ ID NO: 336
  source 1..356: mol_type = other DNA

SEQ ID NO: 16567 - DNA, 386 bp, synthetic construct; identical to SEQ ID NO: 411
  source 1..386: mol_type = other DNA

SEQ ID NO: 16568 - DNA, 384 bp, synthetic construct
  source 1..384: mol_type = other DNA
gtatacgagaatttgcctaggacctcgtatacgtattgggcatttaaaaataataattaggcctaagggacaaatcctccttagcgaaggccgaaaagaggctagccatgcccttagtaggactagcaaaataaggggggtagcaacagtggtgagttcgttggatggctgaagccctgagtacagggtagtcgtcagtggttcgacgcttcggaggacaagcctcgagatgccacgtggacgagggcatgcccacagcacatcttaacctggacgggggtcgttcaggtaaaaacggtttaaccaaccgctacgaatacagcctgatagggtgctgcagaggcccactgtattgctactgaaaatctctgctgtacatggcac

SEQ ID NO: 16569 - DNA, 384 bp, synthetic construct; identical to SEQ ID NO: 398
  source 1..384: mol_type = other DNA

SEQ ID NO: 16570 - DNA, 371 bp, synthetic construct
  source 1..371: mol_type = other DNA
ctaaagtactcgtgtacggattggatgtcgacaaattttgaattggtaacgtagggaaccttcccctcagcgaaggccgaaaagaggctagccatgcccttagtaggactagcaaaaggaggggactagcggtagcagtgagttcattggatggccgaacccctgagtacaggggagtcgtcaatggttcgacactccatcggtcgaggagtctcgagatgccatgtggacgagggcatgcccacggcacatcttaacccacgcgggggttgcatgggtgaaagcgtcattcgtggcgttatggacacagcctgatagggtgtagcagagacctgctattccgctagtaaaaactctgctgtacatggcac

SEQ ID NO: 16571 - DNA, 371 bp, synthetic construct
  source 1..371: mol_type = other DNA
ataaagtactcgtatacggattggacgttaacaaatttttaattggcaacgtagggaaccttcccctcagcgaaggccgaaaagaggctagccatgcccttagtaggactagcaaaaggaggggactagcggtagcagtgagttcgttggatggccgaacccctgagtacaggggagtcgtcaatggttcgacactccattagttgaggagtctcgagatgccatgtggacgagggcatgcccacggcacatcttaacccatgcgggggttgcatgggtgaaagcgctattcgtggcgttatggacacagcctgatagggtgtagcagagacctgctactccgctagaaaaaactctgctgtacatggcac

SEQ ID NO: 16572 - DNA, 387 bp, synthetic construct; identical to SEQ ID NO: 417
  source 1..387: mol_type = other DNA

SEQ ID NO: 16573 - DNA, 370 bp, synthetic construct
  source 1..370: mol_type = other DNA
tagctcatgtcggcgtatatgattggatatcccaaattaataatttggtctagggactaattcccctagcgaaggccgaaaaaggttaaccatacctttagtaggacgagcataatgggggactagtggtagcagtgagctccttggattaccgaagccccgagtacggggtagtcgtcaatggttcgacgcatcaaggaatgcctcgagatgccatgtggacgagggcgtgcccacggtgaatcttaactcaagcgggggccgcttgggtgaaagagggtcattatgtggctctttgggagtacagcctgatagggtgttgcagagacctgctacatcactagtataaaaactctgctgtacatggcac

SEQ ID NO: 16574 - DNA, 360 bp, synthetic construct
  source 1..360: mol_type = other DNA
gctcatcctcgtgtacaatattggacaaacaaaattccgacttggcttagggcacccctccagcgacggccgaactgggctagccatgcccacagtaggactagcagatggagggactagccgtagtggcgagctccctgggtggtctaagtcctgagcacaggacagtcgtcagtagttcgacgtgagcaggagcccacctcgagatgctatgtggacgagggcacgcccaagacacaccttaaccctggcgggggtcaccagggtgaaatcacaccatgtgatgggggtacgacctgatagggtgctgcagaggcccactaacaggctagtataaaaaatctctgctgtacatggcac

SEQ ID NO: 16575 - DNA, 367 bp, synthetic construct
  source 1..367: mol_type = other DNA
ctcatgtcggcgtatatgattggctatcccaaattaataatttggtttagggactaactcccctagcgaaggccgaaatgggttaaccataccttcagtaggacgagcataatgggggactagtggtagcagtgagctccttggattaccgaagccccgagtacggggtagtcgtcaatggttcgacgcatcaaggaatgcctcgagatgccatgtggacgagggcgtgcccacggtgaatcttaactcaagcgggggccgcttgggtgaaagagggtcattatatggctctttgggagtacagcctgatagggtgttgcagagacctgctacatcactagtataaaaactctgctgtacatggcac

SEQ ID NO: 16576 - DNA, 380 bp, synthetic construct
  source 1..380: mol_type = other DNA
gtatacgaggttaggcaagttctcgtatacatattggacactctaaaaataattaggtctaggggacaaaatcctccttagcgaaggccgaaaagaggctagccatgcccttagtaggactagcaaaataaggggggtagcaacagtggtgagttcgttggatggctgaagccctgagtacagggtagtcgtcagtggttcgacgctttggggacaagcctcgagatgccacgtggacgagggcatgcccacagcacatcttagcctggacgggggtcgttcaggtgaaaacggtttaaccaaccgctacgaatacagtctgataggatgctgcagaggcccactgtattgctactgaaaatctctgctgtacatggcac

SEQ ID NO: 16577 - DNA, 367 bp, synthetic construct
  source 1..367: mol_type = other DNA
gtactcgtatacagattggctattgacaaatattgaattgacaaggtagggaacttttcccctcagcgaaggccgaaaagaggctagccatgcccttagtaggactagcaaaaggaggggactagcggtagcagtgagttcattggatggcctaatccctgagtacagggaagtcgtcaatggttcgacactccatcagttgaggagtctcgagatgccatgtggacgagggcatgcccaaggcacatcttaacctatgcgggggttgcataggcaaaagcaccactcacggtgttatggacacagcctgatagggtgtagcagagacctgctattccgctagtaaaaactctgctgtacatggcac

SEQ ID NO: 16578 - DNA, 381 bp, synthetic construct; identical to SEQ ID NO: 389
  source 1..381: mol_type = other DNA

SEQ ID NO: 16579 - DNA, 381 bp, synthetic construct
  source 1..381: mol_type = other DNA
gtatacgagaatttgcctaacctcgtatacacattgggcactctaaaaataaattaggcctaagggacgaatcctccttagcgaaggccgaaaagaggctagccatgcccttagtaggattagcaaaacaaggagggtagcaacagtggtgagttcgttggatggctgaagccctgagtacagggtagtcgtcagtggttcgacgctttgtgtgacaagcctcgagatgccacgtggacgagggcatgcccacagcacatcttaacctgagcgggggtcgcttaggtgaaaacggtttaaccgaccgctacgaatacagcctgatagggtgctgcagaggcccactgtactgctactaaaaatctctgctgtacatggcac

SEQ ID NO: 16580 - DNA, 383 bp, synthetic construct; identical to SEQ ID NO: 395
  source 1..383: mol_type = other DNA

SEQ ID NO: 16581 - DNA, 370 bp, synthetic construct
  source 1..370: mol_type = other DNA
aagtactcgtatacagattggatattgacaaaatattgaattggcaaggtagggaacttttcccctcagcgaaggccgaaaagaggctagccatgcccttagtaggacgagcaaaaggaggggactagcggtagcagtgagttcattggatggcctaatccctgagtacagggaagtcgtcaatggttcgacactccatcagttgaggagtctcgagatgccatgtggacgagggcatgcccaaggcacatcttaacctatgcgggggttgcataggcaaaagcactactcatggtgttatggacacagcctgatagggtgtagcagagacctgctatcccgctagtaaaaactctgctgtacatggcac

SEQ ID NO: 16582 - DNA, 356 bp, synthetic construct
  source 1..356: mol_type = other DNA
attctcgtatatgatattggatacactaaatttcaatttggcctagggcacccctccagcgacggccgaaatgggctagccatgcccatagtaggactagcaaacggagggactagccatagtggcgagctccctgggtggtctaagtcctgagtacaggacagtcgtcagtagttcgacgtgggcactagcccacctcgagatgctacgtggacgagggcatgcccaagacacaccttaaccctggcgggggtcgctagggtgaaatcacattatgtgatgggggtacgacctgatagggtgctgcagaggcccactagcaggctagtataaaaaatctctgctgtacatggcac

SEQ ID NO: 16583 - DNA, 369 bp, synthetic construct
  source 1..369: mol_type = other DNA
taaaaatactcgtatacacattgggcaattaaaagtaataattaggcctagggaacgaatcctcctccgcgaaggccgaaaagaggctagccacgcccttagtaggactagcatagcgaggggggtagcaacagtggtgagttcgttggatggcttaagccctgagtacagggtagtcgtcagtggttcgacgccttaacatgaaggtctcgagatgccacgtggacgagggcacgcccaaagcacatcttagcccgagcgggggtcgctcggacgaaaacagtttgatcaactgctacgaatacagcctgatagggtgctgcagaggcccactgtattgctactaaaaatctctgctgtacatggcac

SEQ ID NO: 16584 - DNA, 362 bp, synthetic construct
  source 1..362: mol_type = other DNA
gatatcagattgggtgttggcaaacagttaattagtgaagtagggaatcttcccccctctgcgaaggccgaaaagaggctaaccatgcccttagtaggactagcaaaaagagggggctagcggtagcagtgagtttattggatggccgaatccctgagtacagggaagtcgtcaatggttcgacactctggtgatataagagtctcgagatgccatgtggacgagggcatgcccacggcacatcttaacctatgcgggggttgcatgggtgaaagcaccatttatggtgttataaacacagcctgatagggtgtagcagagacctgctatcccgctagtaaaaactctgctgtacatggcac

SEQ ID NO: 16585 - DNA, 362 bp, synthetic construct
  source 1..362: mol_type = other DNA
ggtatcagattgggtgttggcaaacagttaattagtgaagtagggaaccttcccccctctgcgaaggccgaaaagaggctaaccatgcccttagtaggactagcaaaaagagggggctagcggtagcagtgagtttattggatggccgaatccctgagtacagggaagtcgtcaatggttcgacactctggtgatataagagtctcgagatgccatgtggacgagggcatgcccacggcacatcttaacctatgcgggggttgcatgggtgaaagcaccatttatggtgttataaacacagcctgatagggtgtagcagagacctgctatcccgctagtaaaaactctgctgtacatggcac

SEQ ID NO: 16586 - DNA, 372 bp, synthetic construct
  source 1..372: mol_type = other DNA
agatttagttcaacctctcgtatgcgtattgggcaaactaaataataattaggcctagggaacaaatcctcctcagcgaaggccgaaaagaggctagccatgcccttagtaggactagcatattggggagggtagcaacagtggtgagttagttggatggctgaagccctgagtacagggtagtcgtcagtggttcgacgccttaggatataggcctcgagatgccacgtggacgagggcatgcccacagcacatcttaacctgagcaggggtcgcccaggtgaaagcggatataccgttactaacacagcctgatagggtgctgcagaggcccactgcactgctactaaaaatctctgctgtacatggcac

SEQ ID NO: 16587 - DNA, 360 bp, synthetic construct; identical to SEQ ID NO: 339
  source 1..360: mol_type = other DNA

SEQ ID NO: 16588 - DNA, 376 bp, synthetic construct; identical to SEQ ID NO: 372
  source 1..376: mol_type = other DNA

SEQ ID NO: 16589 - DNA, 355 bp, synthetic construct
  source 1..355: mol_type = other DNA
cggattggatgtcgacaaatattgaattggcaacgtagggaaccttcccctcagcgaaggccgaaaagaggctagccatgcccttagtaggactagcaaaaggaggggactagcggtagcagtgagttcattggatggccgaacccctgagtacaggggagtcgtcaatggttcgacactccattagtcgaggagtctcgagatgccatgtggacgagggcatgcccacggcacatcttaacccacgcgggggttgcatgggtgaaagcgctattcgtggcgttatggacacagcctgatagggtgtagcagagacctgctattccgctagtaaaaactctgctgtacatggcac

SEQ ID NO: 16590 - DNA, 356 bp, synthetic construct
  source 1..356: mol_type = other DNA
aggttgggtgttggcaaacagttaattagtgaagtagggaactttcccccctctgcgaaggccgaaaagaggctaaccatgccctcagtaggactagcaaaaagagggggctagcggtagcagtgagtttattggatggccgaatccctgagtacagggaagtcgtcaatggttcgacactctggtaatataagagtctcgagatgccatgtggacgagggcatgcccacggcacatcttaacctatgcgggggctgcatgggtgaaagcactatttacggtgttataaacacagcctgatagggtgtagcagagacctgctatcccgctagtaaaaactctgctgtacatggcac

SEQ ID NO: 16591 - DNA, 356 bp, synthetic construct
  source 1..356: mol_type = other DNA
ggattgggtgttggcaaacagttaattagtgaagtagggaaccttcccccctctgcgaaggccgaaaagaggctaaccatgcccttagtaggactagcaaaaagagggggctagcggtagcagtgagtttattggatggccgaatccctgagtacagggaagtcgtcaatggttcgacactctggtaatataagagtctcgagatgccatgtggacgagggcatgcccacggcacatcttaacctatgcgggggttgcatgggtgaaagcaccatttacggtgttataaacacagcctgatagggtgtagcagagacctgctatcccgctagtaaaaactctgctgtacatggcac

SEQ ID NO: 16592 - DNA, 374 bp, synthetic construct
  source 1..374: mol_type = other DNA
attagaaaaagctcctgtatacagattgggcaattaaaaattgaagattaggcctagggaaaaatccctctcagcgaaggccgaaaagaggctagccatgcccttagtaggactagcaaaatgagaggggtagcaacagtggtgagttcattggatggctgaagccctgagtacagggtagtcgtcagtggttcgacacctcggaaagaaggtctcgagatgccacgtggacgagggcatgcccacagcacatcttaacctggacgggggtcgcccaggtaaaagcagtttaattaactgttatggacacagcctgatagggtgctgcagaggcccactgcattgctactaaaaatctctgctgtacatggcac

SEQ ID NO: 16593 - DNA, 352 bp, synthetic construct
  source 1..352: mol_type = other DNA
gattggatgttgacaaatttgatttggctaagtagggaattttcccctcagcgaaggccgaaaagaggctagccatgcccttagtaggactagcaaaaggaggggactagcagtagcagtgagttcattggatggccgaatccctgagtacagggaagtcgtcaatggttcgacactccattaaccgaggagtctcgagatgccatgtggacgagggcatgcccacggcacttcttaacctatgcgggggttgcatgggtgaaagcaccattcgtggtgttatggacacagcctgatagggtgtagcagagacctgctattctgctagtaaaaactctgctgtacatggcac

SEQ ID NO: 16594 - DNA, 384 bp, synthetic construct
  source 1..384: mol_type = other DNA
tagtatacgaggttaggcaagccctcgtatacatattggacacactaaaaaaataattaggtctagggaaaaaatcctccttagcgaaggccgaaaagaggctagccatgcccttagtaggactagcaaaataaggggggtagcaacagtggtgagttcgttggatggctgaagccctgagtacagggtagtcgtcagtggttcgacgcttaggagaacaagcctcgagatgccacgtggacgagggcatgcccacagcacatcttaatctggacgggggtcgttcaggtgaaaacggtttaaccaaccgctacgaatacagcctgatagggtgctgcagaggcccactgtattgctactaaaaatctctgctgtacatggcac

SEQ ID NO: 16595 - DNA, 377 bp, synthetic construct; identical to SEQ ID NO: 375
  source 1..377: mol_type = other DNA

SEQ ID NO: 16596 - DNA, 367 bp, synthetic construct
  source 1..367: mol_type = other DNA
ggtaaattctcgtatacatattggacactctaaaaacaaattaggcctaggggacaaatcctccttagcgacggccgaaaagaggctagccatgcccttagtaggactagcaaacaaggagggtagcaacagtggtgagttcgttggatggctgaagccctgagtacagggtagtcgtcagtggttcgacgcttaacatgataagcctcgagatgccacgtggacgagggcatgcccacagcacatcttaacctgagcgggggtcgctcaggcaaaaacggtttaaccaaccgctacgaatacagcctgatagggtgctgcagaggcccactgtattgctactaaaaatctctgctgtacatggcac

SEQ ID NO: 16597 - DNA, 349 bp, synthetic construct
  source 1..349: mol_type = other DNA
ggacgtcaacaaattttgaattggcaacgtagggaaccttcccctcagcgaaggccgaaaagaggctagccatgcccttagtaggactagcaaaaggaggggactagcggtagcagtgagttcgttggatggccgaacccctgagtacaggggagtcgtcaatggttcgacactccattagtcgaggagtctcgagatgccatgtggacgagggcatgcccacggcacatcttaacccatgcgggggttgcatgggtgaaagcgctattcgtggcgttatggacacagcctgatagggtgtagcagagacctgctactccgctagtaaaaactctgctgtacatggcac

SEQ ID NO: 16598 - DNA, 378 bp, synthetic construct
  source 1..378: mol_type = other DNA
ggttagctaaagtactcgtatacagattgggtgttaacaaaacattgaatcggcaatgtagggaactttcccctcagcgaaggccgaaaagaggctagccatgcccttagtaggactagcaaaaggaggggactagcggtagcagtgagttcattggatggccgaatccctgagtacagggaagtcgtcaatggttcgacactccatcagttgaggagtctcgagatgccatgtggacgagggcatgcccacggcacatcttagcctgtgcgggggttgcataggtgaaagcgccattcatggtgctatggacacagcctgatagggtgtagcagagacctgctatcccgctagtaaaaactctgctgtacatggcac

SEQ ID NO: 16599 - DNA, 310 bp, synthetic construct
  source 1..310: mol_type = other DNA
tcctagcgacggccgaaccgggttagccatacccgtagtaggactagcatatgggaggactagctttcgtggtgaggttcctgagtggtctaagtcctgagtacaggatagtcgtcagtagttcgacacaaacggagtttttctcttgtctcgagatgctacgtggacgagggcatgcccaagacccactttaatcctggcgggggtcgccagggtgaaaacgcccaatggcgttgggactacagcctgatagggtgctgcagaggcccacgcaacagctagtataaaaaatctctgctgtacatggcac

SEQ ID NO: 16600 - DNA, 384 bp, synthetic construct
  source 1..384: mol_type = other DNA
gtatacgcccggttagctcatgtcggcgtatatgattgggtatcccaaattaatgatttggtttagggactaaattcccctagcgaaggccgaaataggttaaccatgccttcagtaggacgagcataatgggggactagtggtagcagtgagctccttggattaccgaagccccgagtacggggtagtcgtcaatggttcgacgcatcaaggaatgcctcgagatgccatgtggacgagggcgtgcccacggtgaatcttaactcaagcgggggccgcttgggtgaaagagggtcattatgtggctctttgggagtacagcctgatagggtgttgcagagacctgctacatcactagtataaaaactctgctgtacatggcac

SEQ ID NO: 16601 - DNA, 384 bp, synthetic construct
  source 1..384: mol_type = other DNA
gtatacgcccggttagctcatgtcggcgtatatgattgggtatcccaaattaatgatttggtttagggactaaattcccctagcgaaggccgaaataggttaaccatgcccatagtaggactagcataatgggggactagtggtagcagtgagctccttggattaccgaagccccgagtacggggtagtcgtcaatggttcgacgcatcaaggaatgcctcgagatgccatgtggacgagggcgtgcccacggtgaatcttaactcaagcgggggccgcttgggtgaaagagggtcattatgtggctctttgggagtacagcctgatagggtgttgcagagacctgctacatcactagtataaaaactctgctgtacatggcac

SEQ ID NO: 16602 - DNA, 372 bp, synthetic construct
  source 1..372: mol_type = other DNA
tggcaaattctcgtatacaaaattggacactcaaaaaaaataattagaactagggaacgaaatcctccttagcgaaggccgaaaagaggctagccatgcccttagtaggactagcaaaacaaggggggtagcaacagtggtgagttcgttggatggctgaagccctgagtacagggtagtcgtcagtggttcgacgctttggaggacaagcctcgagatgccacgtggacgagggcatgcccacagcacatcttagcctggacgggggtcgttcaggtaaaaacggtttaaccaaccgctacgaatacagcctgatagggtgctgcagaggcccactgtactgctactgaaaatctctgctgtacatggcac

SEQ ID NO: 16603 - DNA, 365 bp, synthetic construct; identical to SEQ ID NO: 341
  source 1..365: mol_type = other DNA

SEQ ID NO: 16604 - DNA, 372 bp, synthetic construct
  source 1..372: mol_type = other DNA
ctaaagtactcgtatacggattggacgttaacaaatcttttaattggcaacgtagggaaccttcccctcagcgaaggccgaaaagaggctagccatgcccttagtaggactagcaaaaggaggggactagcggtagcagtgagttcgttggatggccgaacccctgagtacaggggagtcgtcaatggttcgacactccattagttgaggagtctcgagatgccatgtggacgagggcatgcccacggcacatcttaacccatgcgggggttgcatgggtgaaagcgctattcgtggcgttatggacacagcctgatagggtgtagcagagacctgctactccgctagtaaaaactctgctgtacatggcac

SEQ ID NO: 16605 - DNA, 340 bp, synthetic construct
  source 1..340: mol_type = other DNA
cccaaattaataatttggtctagggactaattcccctagcgaaggccgaaataggttaaccatacctttagtaggacgagcataatgggggactagtggtagcagtgagctccttggattaccgaagccccgagtacggggtagtcgtcaatggttcgacgcatcaaggaatgcctcgagatgccatgtggacgagggcgtgcccacggtgaatcttaacccaagcgggggccgcttgggtgaaagagggtcattatatggctctttgggagtacagcctgatagggtgttgcagagacctgctacatcactagtataaaaactctgctgtacatggcac

SEQ ID NO: 16606 - DNA, 373 bp, synthetic construct
  source 1..373: mol_type = other DNA
cgctaaagtactcgtatacagattggacgttgacaaatattgaattgacaaggtagggaactttcccctcagcgaaggccgaaaagaggctagccatgcccttagtaggactagcaaaaggaggggactagcggtagcagtgagttcattggatggcctaatccctgagtacagggaagtcgtcaatggttcgacactccatcagttgaggagtctcgagatgccatgtggacgagggcatgcccaaggcacatcttaacctatgcgggggttgcataggcgaaagcactattcacggtgttatggacacagcctgatagggtgtagcagagacctgctattccgctagtaaaaactctgctgtacatggcac

SEQ ID NO: 16607 - DNA, 337 bp, synthetic construct
  source 1..337: mol_type = other DNA
attttaaattggcaacacagggaaccttcccctcggcgaaggccgaaaagaggctagccatgcccttagtaggactagcaaaaggaggggactagcggtagcagtgagttcattggatggccgaacccctgagtacaggggagtcgtcaatggttcgacactcctttagtcgaggagtctcgagatgccatgtggacgagggcatgcccacggcacatcttaacccacgcgggggttgcatgggtgaaagcgccattcgtggcgtcatggacacagcctgatagggtgtagcagagacctgctactccgctagtaaaaactctgctgtacatggcac

SEQ ID NO: 16608 - DNA, 372 bp, synthetic construct
  source 1..372: mol_type = other DNA
ctaaagtactcgtatacagattggatgttgacaaaatattgaattggctaagtagggaattctcccctcagcgaaggccgaaaagaggctagccatgcccttagtaggactagcaaaaggaggggactagcggtaacagtgagttcattggatggccgaatccctgagtacagggaagtcgtcaatggttcgacactccatcaaccgaggagtctcgagatgccatgtggacgagggcatgcccacggcacatcttaacctatgcgggggttgcatgggtgaaagcaccattcgtggtgttatggacacagcctgatagggtgtagcagagacctgttattccgctagtaaaaactctgctgtacatggcac

SEQ ID NO: 16609 - DNA, 325 bp, synthetic construct
  source 1..325: mol_type = other DNA
ggccgagggaatgaatcccccttagcgaaggccgaaaggaggctagccatgcccttagtaggactagcaaaatgaggggggtagcaacagtggtgagtttgctggatggcttaagccctgagtacagggcagtcgtcagtggttcgacgcctcagtagggaggtctcgagatgccacgtggacgagggcatgcccaaagcacatcttaacctgggcgggggtcgctcaggtgaaagcggttttattaactgctgcaaatacagcctgatagggtgctgcagaggcccactgtactgctactaaaaatctctgctgtacatggcac

SEQ ID NO: 16610 - DNA, 374 bp, synthetic construct
  source 1..374: mol_type = other DNA
attcgcccttctcgtatacgtattggggcaattaaaataataattaggcctagggaacaaaagtccccctcagcgaaggccgaaaagaggctagccatgcccttagtaggactagcataaagaggggggtagcagcagtggtgagttcgttggatggcttaagccctgagtacagggtagtcgtcagtggttcgacgccttggaataaaggtctcgagatgccacgtggacgagggcatgcccaaagcacatcttaacctgagcgggggtcgcccaggtaaaagcagttctaaccgactgttacggatacagcctgatagggtgctgcagaggcccactgttctgctactaaaaatctctgctgtacatggcac

SEQ ID NO: 16611 - DNA, 372 bp, synthetic construct
  source 1..372: mol_type = other DNA
tatacgaggttagctcgtcctcgtgtacaacattggacaaactaaaattccgatttggcctagggtacccctccagcgacggccgaactgggctagccatgcccacagtaggactagcaaacggagggactagccgtagtggcgagctccctgggtggtctaagtcctgagtacaggacagtcgtcagtagttcgacgtgagcaggagcccacctcgagatgctatgtggacgagggcatgcccaagacacaccttaaccctggcgggggtcgccagggtgaaatcacaccatgtgatgggggtacgacctgatagggtgctgcagaggcccactaacaggctagtataaaaatctctgctgtacatggcac

SEQ ID NO: 16612 - DNA, 278 bp, synthetic construct
  source 1..278: mol_type = other DNA
gccatgcccttagtaggactagcaaaaggggggactagccatcgtggtgagatccctgagctgtctaagccctgagtacagggcagtcgtcagtagttcgactcaatcaccgggttgactcgagatgctacgtggacgagggcatgcccaagacaagttttaatcctggcaggggtcgccagggtgaaagtgccgaatggcattggggttacaacctgatagggtgctgcagaggcccacgtataggctagtataaaaatctctgctgtacatggcac

SEQ ID NO: 16613 - DNA, 373 bp, synthetic construct
  source 1..373: mol_type = other DNA
aaggaaagttctcgtatacatattggacactcaaaaaaaaataattaggtctaggggacagaatcctccttagcgaaggccgaaaagaggctagccatgcccttagtaggactagcaaaataaggggggtagcaacagtggtgagttcgttggatggctgaagccctgagtacagggtagtcgtcagtggttcgacgcttcggaggacaagcctcgagatgccacgtggacgagggcatgcccacagcacatcttaacctggacaggggtcgttcaggtgaaaacggtttaaccaaccgctacgaatacagcctgatagggtgctgcagaggcccactgtattgctactaaaaatctctgctgttcatggcac

SEQ ID NO: 16614 - DNA, 375 bp, synthetic construct; identical to SEQ ID NO: 369
  source 1..375: mol_type = other DNA

SEQ ID NO: 16615 - DNA, 371 bp, synthetic construct
  source 1..371: mol_type = other DNA
aagttctcgtatacatattggacactctaaaaaaaaataattaggtataggggacaaaaatcctccttagcgaaggccgaaaagaggctagccatgcccttagtaggactagcaaaataaggggggtagcaacagtggtgagttcgttggatggctgaagccctgagtacagggtagtcgtcagtggttcgacgctttggaggacaagcctcgagatgccacgtggacgagggcatgcccacagcacatcttaacctggacaggggtcgttcgggtgaaaacggttttaaccaaccgctacgaatacagcctgatagggcgctgcagaggcccactgtattgctactaaaaatctctgctgtacatggcac

SEQ ID NO: 16616 - DNA, 377 bp, synthetic construct
  source 1..377: mol_type = other DNA
gtggttaggcaagttctcgtatacatattggacactctaaaaaataattaggtctaggggacaaaaatcctccttagcgaaggccgaaaagaggctagccatgcccttagtaggactagcaaaataaggggggtagcaacagtggtgagttcgttggatggctgaagccctgagtacagggtagtcgtcagtggttcgacgcttcggaggaagagcctcgagatgccacgtggacgagggcatgcccacagcacatcttaacctggacgggggtcgttcaggtgaaagcggtttaaccaaccgctacgaatacagcctgatagggtgctgcagaggcccactgtattgctactaaaaatctctgctgtacatggcac

SEQ ID NO: 16617 - DNA, 371 bp, synthetic construct
  source 1..371: mol_type = other DNA
gcaagttctcgtatacatattggacactcataaaaaaaataattaggtccagggaatcaaatcctccttagcgaaggccgaaaagaggctagccatgcccttagtaggactagcaaaataaggggggtagcaacagtggtgagttcgttggatggctgaagccctgagtacagggtagtcgtcagtggttcgacgctttggagaccaagcctcgagatgccacgtggacgagggcatgcccacagcacatcttaacctgagcgggggtcgttcaggtgaaaacggtttaatcaaccgctacggatacagcctgatagggtgctgcagaggcccactgtattgctactaaaaatctctgctgtacatggcac

SEQ ID NO: 16618 - DNA, 337 bp, synthetic construct
  source 1..337: mol_type = other DNA
taaataattaggcctagggagcgaaattcctccttagcgaaggccgaaaagaggctagccatgcccttagtaggactagcaaaataaggggggtagcaacagtggtgagttcgttggatggctgaagccctgagtacagggtagtcgtcagtggttcgacgctttggaggacaagcctcgagatgccacgtggacgagggcatgcccacagcacatcttaacctggacgggggtcgttcaggtaaaaacggtttaaccaaccgctacgaatacagcctgatagggtgctgcagaggcccactgtattgctactaaaaatctctgctgtacatggcac

SEQ ID NO: 16619 - DNA, 370 bp, synthetic construct
  source 1..370: mol_type = other DNA
gaaaaagctcctgtatacagattgggcaattaaaaattgaagattaggcctagggaaaaatccctctcagcgaaggccgaaaagaggctagccatgcccttagtaggactagcaaaatgagaggggtagcaacagtggtgagttcattggatggctgaagccctgagtacagggtagtcgtcagtggttcgacacctcggaaagaaggtctcgagatgccacgtggacgagggcatgcccacagcacatcttaacctggacgggggtcgcccaggtaaaagcagtttaactaactgttatggacacagcctgatagggtgctgcagaggcccactgcattgctactaaaaatctctgctgtacatggcac

SEQ ID NO: 16620 - DNA, 376 bp, synthetic construct
  source 1..376: mol_type = other DNA
gaattagaaaaagctcctgtatacagattgggcaattaaaaattgaagattaggcctagggaaaaatccctctcagcgaaggccgaaaagaggctagccatgcccttagtaggactagcaaaatgagaggggtagcaacagtggtgagttcattggatggctgaagccctgagtacagggtagtcgtcagtggttcgacacctcggaaagaaggtctcgagatgccacgtggacgagggcatgcccacagcacatcttaacctggacgggggtcgcccaggtaaaagcagtttaactaactgttatggacacagcctgatagggtgctgcagaggcccactgcattgctactaaaaatctctgctgtacatggcac

SEQ ID NO: 16621 - DNA, 322 bp, synthetic construct
  source 1..322: mol_type = other DNA
ggtagggaactttcccctcagcgaaggccgaaaagaggctagccatgcccttagtaggactagcaaaaggaggggactagcggtagcagtgagttcattggatggccgaatccctgagtacagggaagtcgtcaatggttcgacactccgtaagtcgaggagtctcgagatgccatgtggacgagggcttgcccacggcacatcttaacctatgtgggggttgcataggtgaaagcaccatccgtggtgttatggacacagcctgatagggtgtagcagagacctgctattccgctagtaaaaactctgctgtacatggcac

SEQ ID NO: 16622 - DNA, 329 bp, synthetic construct
  source 1..329: mol_type = other DNA
aattaggcatagggaaaatcctcctcagcgaaggccgaaaagaggctagccatgcccttagtaggactagcaaattggggggggtagcagcagtggcgagttcattggatggctgaagccctgagtacagggtagtcgtcagtggttcgacgccttaggatctgaggcctcgagatgccacgtggacgagggcatgcccacagcacatcctattccggacgagggtcgcccggaagaaagcggttgtactaaccgttatggacacggcctgataggatgctgcagaggcccactgtgttgctactaaaaatctctgctgtacatggcac

SEQ ID NO: 16623 - DNA, 330 bp, synthetic construct
  source 1..330: mol_type = other DNA
attaggcctagggaacaaatcctcctcagcgaaggccgaaaagaggctagccatgcccttagtaggactagcacaaagaggggggtagcaacagtggtgagttcgttggatggcttaagccctgagtacagggtagtcgtcagtggttcgacgccttagcatgaaggtctcgagatgccacgtggacgagggcacgcccaaagcacatcttagcctgagcgggggtcgctcaggtaaaagcaggtctaaacaactgctacgaatacagcctgatagggtgctgcagaggcccactgtattgctactaaaaatctctgctgtacatggcac

SEQ ID NO: 16624 - DNA, 374 bp, synthetic construct
  source 1..374: mol_type = other DNA
attagaaaaagctcctgtatacagattgggcaattaaaaattgaagattaggcctagggaaaaatccctctcagcgaaggccgaaaagaggctagccatgcccttagtaggactagcaaaatgagaggggtagcaacagtggtgagttcattggatggctgaagccctgagtacagggtagtcgtcagtggttcgacacctcggaaagaaggtctcgagatgccacgtggacgagggcatgcccacagcacatcttaacctggacgggggtcgcccaggtaaaagcagtttaactaactgttatggacacagcctgatagggtgctgcagaggcccactgcattgctactaaaaatctctgctgtacatggcac

SEQ ID NO: 16625 - DNA, 337 bp, synthetic construct
  source 1..337: mol_type = other DNA
aaaaatgaattaggcctgagggacaaatcctccttagcgaaggccgaaaagaggctagccatgcccttagtaggactagcaaaacaaggagggtagcaacagtggtgagttcgttggatggctgaagccctgagtacagggtagtcgtcagtggttcgacgctttgtgcgacaagcctcgagatgccacgtggacgaggatacgcccacagcacatcttaacctgagcgggggtcgttcaggtgaaaacggtttaaccaaccgctacgaatacagcgtgatagggtgctgcagaggcccactgtatcgctactaaaaatctctgctgtacatggcat

SEQ ID NO: 16626 - DNA, 373 bp, synthetic construct
  source 1..373: mol_type = other DNA
gaggttaggcaagttctcgtatacatattggatactctaaaagataattaggcctagggaaaatcctccttagcgaaggccgaaaagaggctagccatgcccttagtaggactagcaaaataaggggggtagcaacagtggtgagttcgttggatagctgaagccctgagtacagggtagtcgtcagtggttcgacgccttggaggacaggcctcgagatgccacgtggacgagggcatgcccacagcatatcttaacctggacgggggtcgttcaggtgaaagcagtctaactaactgctacgaatacagcctgatagggtgctgcagaggcccactgtattgctactgaaaatctctgctgtacatggcac

SEQ ID NO: 16627 - DNA, 288 bp, synthetic construct
  source 1..288: mol_type = other DNA
aggctagccatgcccttagtaggactagcgatgaggagggactagcaacagtggtgagtttgctggatggtcaaagccctgagtacagggtagtcgtcagtggttcgacacttgaaataacgagtctcgaggtgccacgtggacgagggcatgcccatgacacatcttagcctgagtgggggtcgcccaggcaaatgctcttccctgagaggagttgcaagcacagcctgatagggtgctgcagaggcccactgatttgctagtaaaaatctctgctgtacatggcac

SEQ ID NO: 16628 - DNA, 367 bp, synthetic construct
  source 1..367: mol_type = other DNA
ggcaagttctcgtatacatattggacactctaaaaaataattaggtctagggaaaaatcctccttagcgaaggccgaaaagaggctagccatgcccttagtaggactagcaaaataaggggggtagcaacagtggtgagttcgttggatggctgaagccctgagtacagggtagtcgtcagtggttcgacgcttcggaggacaagcctcgagatgccacgtggacgagggcatgcccacagcacatcttaacctggacgggggtcgttcaggtgaaaacggtttaaccaaccgctacgaatacagcctgatagggtgctgcagaggcccactgtattgctactgaaaatctctgctgtacatggcac

SEQ ID NO: 16629 - DNA, 396 bp, synthetic construct; identical to SEQ ID NO: 432
  source 1..396: mol_type = other DNA

SEQ ID NO: 16630 - DNA, 347 bp, synthetic construct; identical to SEQ ID NO: 329
  source 1..347: mol_type = other DNA

SEQ ID NO: 16631 - DNA, 297 bp, synthetic construct
  source 1..297: mol_type = other DNA
ggccgaaaagaggctagccatgcccttagtaggactagcaaaaggaggggactagcggtagcagtgagttcattggatggcctaatccctgagtacagggaagtcgtcaatggttcgacactccatcagttgaggagtctcgagatgccatgtggacgagggcatgcccaaggcacatcttaacctatgcgggggttgcataggcaaaagcaccactcacggtgttatggacacagcctgatagggtgtagcagagacctgctattccgctagtaaaaactctgctgtacatggcac

SEQ ID NO: 16632 - DNA, 371 bp, synthetic construct; identical to SEQ ID NO: 352
  source 1..371: mol_type = other DNA

SEQ ID NO: 16633 - DNA, 278 bp, synthetic construct
  source 1..278: mol_type = other DNA
tgcccttagtaggactagcataatggaaggggtagcaacagtggtgagttcgttggatggcttaagccctgagtacagggtagtcgtcagtggttcgacaccttggaagaacaaggcctcgagataccacgtggacgagggcatgcccaaagcacaccttagcctgggcgggggtcgctcaggtgaaaacagtctaaacgactgctacgaatacagcctgatagggtgctgcagaggcccactgtattgctactaaaaatctctgctgtacatggcac

SEQ ID NO: 16634 - DNA, 359 bp, synthetic construct
  source 1..359: mol_type = other DNA
gtatacatattggacactctaaaaaataattaggtctaggggacaagaatcccccttagcgaaggccgaaaagaggctagccatgcccttagtaggactagcaaaataaggggggtagcaacagtggtgagttcgttggatggctgaagccctgagtacagggtagtcgtcagtggttcgacgctttggaggacaagcctcgagatgccacgtggacgagggcatgcccacagcacatcttaacctggacgggggtcgttcaggtgaaaacggtttaaccaaccgctacgaatacagcctgatagggtgctgcagaggcccactgtattgctactgaaaatctctgctgtacatggcac

SEQ ID NO: 16635 - DNA, 372 bp, synthetic construct
  source 1..372: mol_type = other DNA
ggttaggcaagttctcgtatacatattggacactctaaaaaataattaggtctagggaaaaatcctccttagcgaaggccgaaaagaggctaaccatgcccttagtaggactagcaaaataaggggggtagcaacagtggtgagttcgttggatggctgaagccctgagtacagggtagtcgtcagtggttcgacgcttcggaggacaagcctcgagatgccacgtggacgagggcatgcccacagcacatcttaacctgggcgggggtcgctcaggtgaaaacggtttaaccaaccgctacgaatacagcctgatagggtgctgcagaggcccactggattgctactaaaaatctctgctgtacatggcac

SEQ ID NO: 16636 - DNA, 277 bp, synthetic construct
  source 1..277: mol_type = other DNA
atgcccttagtaggactagcataatgaagggggtagcaacagtggtgagttcgttggatggcttaagccctgagtacagggtagtcgtcagtggttcgacaccttggtttaaaggtctcgagatgccacgtggacgagggcatgcccaaagcacatcttaacctgagcgggggtcgcccaggtgaaaacagtttaactaactgttacgaatacagcctgatagggtgctgcagaggcccactgatttgctactaaaaatctctgctgtacatggcac

SEQ ID NO: 16637 - DNA, 305 bp, synthetic construct
  source 1..305: mol_type = other DNA
tcagcgaaggccgaaaagaggctagccatgcccttagtaggactagcaaattgaggggggtagcagcagtggcgagttcattggatggctgaagccctgagtacagggtagtcgtcagtggttcgacgccttaggatctaaggcctcgagatgccacgtggacgagggcatgcccacagcacatcttaatccgggcgggggtcgctcgggtgaaagcggttgtattaactgttatgaacacggcctgatagggcgctgcagaggcccactgtgttgctactaaaaatctctgctgtacatggcac

SEQ ID NO: 16638 - DNA, 277 bp, synthetic construct
  source 1..277: mol_type = other DNA
atgcccttagtaggactagcataaagaggggggtagcaacagtggtgagttcgttggatggcttaagccctgagtacagggtagtcgtcagtggttcgacgccttggtataaaggtctcgagatgccacgtggacgagggcacgcccaaagcacatcttaacctgagcgggggtcgctcaggcgaaaacagtttgatcaactgctacgaatacagcctgatagggtgctgcagaggcccactgtattgctactaaaactctctgctgtacatggcac

SEQ ID NO: 16639 - DNA, 361 bp, synthetic construct
  source 1..361: mol_type = other DNA
ttctcgtatacatattggacactctaaaaataaattaggcccaggggacaaatcctccttagcgacggccgaaaagaggctagccatgcccttagtaggactagcaaacgaggagggtagcaacagtggtgagttcgttggatggctgaagccctgagtacagggtagtcgtcagtggttcgacgcttagtatgacgagcctcgagatgccacgtggacgagggcatgcccacagcacatcttaacctgagcgggggtcgctcaggcgaaaacggtttaaccaaccgctacgaatacagcctgatagggtgctgcagaggcccactgtattgctactaaaaatctctgctgtacatggcac

SEQ ID NO: 16640 - DNA, 334 bp, synthetic construct
  source 1..334: mol_type = other DNA
gtttgtgtttggtttagggactaactcccctagcgaaggccgaaatgggttaaccataccttcagtaggacgagcgtaatgggggactagtggtagcagtgagctccttggattaccgaagccccgagtacggggtagtcgtcaatggttcgacgcatcaaggaatgcctcgagatgccatgtggacgagggcgtgcccacggtgaatcttaactcaagcgggggccgcttgggtgaaagagggtcattatatggctctttgggagtacagcctgatagggtgttgcagagacctgctacattactagtataaaaactctgctgtacatggcac

SEQ ID NO: 16641 - DNA, 343 bp, synthetic construct
  source 1..343: mol_type = other DNA
ggcaaaacattgaattgataaggtagggaactttcccctcagcgaaggccgaaaagaggctagccatgcccttagtaggactagcaaaaggaggggactagcggtagcagtgagttcattggatggccgaatccctgagtacagggaagtcgtcaatggttcgacactccatcagtcgaggagtctcgagatgccatgtggacgagggcttgcccacggcacatcttaacctatgcgggggttgcataggtgaaagcaccattcatggtgttatggacacagcctgatagggtgtagcagagacctgctattccgctagtaaaaactctgctgtacatggcac

SEQ ID NO: 16642 - DNA, 361 bp, synthetic construct
  source 1..361: mol_type = other DNA
ctcgtatgcatattgggcaatctaaaataataattagacctagggaacaatccctctcagcgaaggccgaaaggaggctagccatgcccttagtaggactagcaaaatgaggggggtagcatcagtggtgagttcgttggatggctgaagccctgagtacagggcagtcgtcagtggttcgacacctaggatgataggtctcgagatgccacgtggacgagggcatgcccacagcacatcttagcccgagcgggggtcgcccgggtgaaaacggtaaatacagaccgctacgaatacagcctgatagggtgctgcagaggcccactgtaatgctactaaaaatctctgctgtacatggcac

SEQ ID NO: 16643 - DNA, 300 bp, synthetic construct; identical to SEQ ID NO: 279
  source 1..300: mol_type = other DNA

SEQ ID NO: 16644 - DNA, 351 bp, synthetic construct
  source 1..351: mol_type = other DNA
ctcgtatacaaaattgggcatataaatttctgattcgattagggaatccctctagcgacggccgaactgggctagccatgcccatagtaggactagcaaatggagggactagccgtagcggtgagctccctgggtagtctaagccctgagtacagggtagtcgtcagtagttcgacgtggacgagagtccatctcgagatgctacgtggacgagggcatgcccaagacataccttaacccaggcgggggtcgtctgggtgaaatcacttagcgtgatgggggtacaacctgatagggtgctgcagaggcccgctattaggctagtataaaaatctctgctgtacatggcac

SEQ ID NO: 16645 - DNA, 351 bp, synthetic construct
  source 1..351: mol_type = other DNA
ctcgtgtacaaaattgggcatataaatttctgattcgattagggaatccctctagcgacggccgaactgggctagccatgcccatagtaggactagcaaacggagggactagccgtagcggtgagctccctgggaagtctaagccctgagtacagggtagtcgtcagtagttcgacgtggacgagagtccatctcgagatgctacgtggacgagggcatgcccaagacataccttaacccaggcgggggtcgtctgggtgaaatcacttagcgtgatgggggtacaacctgatagggtgctgcagaggcccgctattaggctagtataaaaatctctgctgtacatggcac

SEQ ID NO: 16646 - DNA, 290 bp, synthetic construct
  source 1..290: mol_type = other DNA
aaagaggctagccatgcccttagtaggactagcataaagaggggggtagcaacagtggtgagttcgttggatggcttaagccctgagtacagggtagtcgtcagtggttcgacgccttggcataaaggtctcgagatgccacgtggacgagggcacgcccaaagcacatcttaacctgagcgggggtcgctcgggcgaaaacagtttgatcaactgctacgaatacagcctgatagggtgctgcagaggcccactgtattgctactaaaaatctctgctgtacatggcac

SEQ ID NO: 16647 - DNA, 252 bp, synthetic construct
  source 1..252: mol_type = other DNA
actggttgagcaggtgagtgtgctgcagcggctaagcggtgagtacaccgtattcgtcaacaggtgctactggaaaggatcacccactagcgatgcctgtgtggacgaggacatgtccaagccaatgttatcagtagcgggggtcgttactgagaaagctgcccagattgggtagttgcacatacagtctgataggatgccggcggatgccctgtattttgaccagtataaatattatccgttgtaaagcat

SEQ ID NO: 16648 - DNA, 347 bp, synthetic construct
  source 1..347: mol_type = other DNA
aattccaaaacagaaatcaggcctagggaacaaaatccccctcagcgaaggccgaaaagaggctagccatgcccttagtaggactagcaaatcggggggggtagcaacagtggtgagttcattggatggcagaagccctgagtacagggtagtcgtcagtggttcgacgccttaaggtaactaggtctcgagatgccacgtggacgagggcatgcccactgcatatcttaacctgcgcgggggtcgctcaggtgaaagcggcataaacaaccgttatggacacagcctgatagggtgctgcagaggcccactgtattgctactgaaaatctctgctgtacatggcac

SEQ ID NO: 16649 - DNA, 370 bp, synthetic construct; identical to SEQ ID NO: 349
  source 1..370: mol_type = other DNA

SEQ ID NO: 16650 - DNA, 318 bp, synthetic construct; identical to SEQ ID NO: 303
  source 1..318: mol_type = other DNA

SEQ ID NO: 16651 - DNA, 365 bp, synthetic construct
  source 1..365: mol_type = other DNA
ctcgtatacagattggatattgacaaaatattgaattgacaaggtagggaatatttcccctcagcgaaggccgaaaagaggctagccatgcccttagtaggactagcaaaaggaggggactagcggtagcagtgagttcattggatggcctaatccctgagtacagggaagtcgtcaatggttcgacgctccaccagttgaggagtctcgagatgccatgtggacgagggcatgcccaaggcacatcttaacctatgcgggggttgcataggcaaaagcaccactcacggtgttatggacacagcctgatagggtgtagcagagacctgctattccgctagtaaaaactctgctgtacatggcac

SEQ ID NO: 16652 - DNA, 310 bp, synthetic construct
  source 1..310: mol_type = other DNA
gggcctccctccagcgacggccgaactgggctagccatgcccgcagtaggactagcaaacggagggactagccgtagtggcgagctccctgggtggtctaagtcctgagtacaggacagtcgtcagtagttcgacgtgagcagaagcccacctcgatatgctatgtggacgagggcatgcccaagacacaccctaaccctagcgggggtcgctagggtgaaatcacaccacgtgatgggagtacgacctgatagggtgctgcagaggcccactattaggctagtataaaaatctctgctgtacatggcac

SEQ ID NO: 16653 - DNA, 307 bp, synthetic construct
  source 1..307: mol_type = other DNA
cctccctccagcgacggccgaactgggctagccatgcccgcagtaggactagcaaacggagggactagccgtagtggcgagctccctgggtggtctaagtcctgagtacaggacagtcgtcagtagttcgacgtgagcagaagcccatctcgatatgctatgtggacgagggcatgcccaagacacaccttaaccctagcgggggtcgctagggtgaaatcacaccacgtgatgggagtacgacctgatagggtgctgcagaggcccactattaggctagtataaaaatctctgctgtacatggcac

SEQ ID NO: 16654 - DNA, 307 bp, synthetic construct
  source 1..307: mol_type = other DNA
cctccctccagcgacggccgaactgggctagccatgcccgcagtaggactagcaaacggagggactagccgtggtggcgagctccctgggtggtctaagtcctgagtacaggacagtcgtcagtagttcgacgtgagcagaagcccacctcgatatgctatgtggacgagggcatgcccaagacacaccttaaccctagcgggggtcgctagggtgaaatcacaccacgtgatgggagtacgacctgatagggtgctgcagaggcccactattaggctagtataaaaatctctgctgtacatggcac

SEQ ID NO: 16655 - DNA, 296 bp, synthetic construct
  source 1..296: mol_type = other DNA
cgacggccgaactgggctagccatgcccgcagtaggactagcaaacggagggactagccgtagtggcgagctccctgggtggtctaagtcctgagtacaggacagtcgtcagtagttcgacgtgagcagaagcccacctcgatatgctatgtggacgagggcatgcccaagacacaccttaaccctagcgggggtcgctagggtgaaatcacaccacgtgatgggagtacgacctgatagggtgctgcagaggcccactattaggctagtataaaaatctctgctgtacatggcac

SEQ ID NO: 16656 - DNA, 348 bp, synthetic construct
  source 1..348: mol_type = other DNA
ttgacaaaacattgaattggcgaagtagggaacttttttcccctcagcgaaggccgaaaagaggctagccatgcccttagtaggacgagcaaaatgaggggactagcggtagcagtgagttcattggatggcctaatccctgagtacagggaagtcgtcaatggttcgacactccatcagttgaggagtctcgagatgccatgtggacgagggcatgcccaaggcacatcttaacctatgcgggggttgcataggcaaaagcaccactcacggtgttgtggacacagcctgatagggtgtagcagagacctgctattccgctagtaaaaactctgctgtacatggcac

SEQ ID NO: 16657 - DNA, 254 bp, synthetic construct
  source 1..254: mol_type = other DNA
ggggactagtggtagcagtgagctccttggattaccgaagccccgagtacggggtagtcgtcaatggttcgacgcatcacgtgaatgcctcgagatgccatgtggacgagggcgtgcccacggtgaatcttaactcaagcgggggccgcttgggtgaaagagggtcattatgtggctctttgggagtacagcctgatagggtgttgcagagacctgctacatcactagtataaaaactctgctgtacatggcat

SEQ ID NO: 16658 - DNA, 300 bp, synthetic construct
  source 1..300: mol_type = other DNA
ccagcgacggccgaactgggctagccatgcccgcagtaggactagcaaacggagggactagccgtagtggcgagctccctgggtggtctaagtcctgagtacaggacagtcgtcagtagttcgacgtgagcagaagcccacctcgatatgctatgtggacgagggcatgcccaagacacaccttaaccctagcgggggtcgctagggtgaaatcacaccacgtgatgggagtacgacctgatagggtgctgcagaggcccactattaggctagtataaaaatctctgctgtacatggcac

SEQ ID NO: 16659 - DNA, 291 bp, synthetic construct
  source 1..291: mol_type = other DNA
aaagaggctagccatgcccttagtaggactagcaaaaggaggggactagcggtagcagtgagttcattggatggccgaacccctgagtacaggggagtcgtcaatggttcgacactccattagtcgaggagtctcgagatgccatgtggacgagggcatgcccacggcacatcttaacccatgcgggggttgcatggatgaaagcgctattcgtggcgttatggacacagcctgatagggtgtagcagagacctgctactccgctagtaaaaactctgctgtacatggcac

SEQ ID NO: 16660 - DNA, 297 bp, synthetic construct
  source 1..297: mol_type = other DNA
gcgacggccgaactgggctagccatgcccgcagtaggactagcaaacggagggactagccgtagtggcgagctccctgggtggtctaagtcctgagtacaggacagtcgtcagtagttcgacgtgagcagaagcccacctcgatatgctatgtggacgagggcatgcccaagacacaccttaaccctagcgggggtcgctagggtgaaatcacaccacgtgatgggagtacgacctgatagggtgctgcagaggcccactatcaggctagtataaaaatctctgctgtacatggcac

SEQ ID NO: 16661 - DNA, 311 bp, synthetic construct
  source 1..311: mol_type = other DNA
attcccctagcgaaggccgaaataggttaaccatacctttagtaggacgagcataatgggggactagtggtagcagtgagctccttggattaccgaagccccgagtacggggtagtcgtcagtggttcgacgcattaaggaatgcctcgagatgccatgtggacgagggcgtgcccacggtgaatcttaacccaagcgggggccgcttgggtgaaagggagtcattatatggctctttgggagtacagcctgatagggtgctgcagagacctgctacatcactagtataaaaactctgctgtacatggcac

SEQ ID NO: 16662 - DNA, 376 bp, synthetic construct
  source 1..376: mol_type = other DNA
gtataaagttactcgtatacagattggatattgacaaaacattgaattggcgaagtagggaacttttcccctcagcgaaggccgaaaagaggctagccatgcccttagtaggacgagcaaaatgaggggactagcggtagcagtgagttcattggatggcctaatccctgagtacagggaagtcgtcaatggttcgacactccatcagttgaggagtctcgagatgccatgtggacgagggcatgcccaaggcacatcttaacctatgcgggggttgcatgggcaaaagcaccactcacggtgttgtggacacagcctgatagggtgtagcagagacctgctattccgctagtaaaaactctgctgtacatggcac

SEQ ID NO: 16663 - DNA, 374 bp, synthetic construct
  source 1..374: mol_type = other DNA
gataaagtactcgtatacagattggatattgacaaaacattgaattggcgaagtagggaacttttcccctcagcgaaggccgaaaagaggctagccatgcccttagtaggacgagcaaaatgaggggactagcggtagcagtgagttcattggatggcctaatccctgagtacagggaagtcgtcaatggttcgacactccatcagttgaggagtctcgagatgccatgtggacgagggcatgcccaaggcacatcttaacctatgcgggggttgcataggcaaaagcaccactcacggtgttgtggacacagcctgatagggtgtagcagagacctgctattccgctagtaaaaactctgctgtacatggcac

SEQ ID NO: 16664 - DNA, 379 bp, synthetic construct; identical to SEQ ID NO: 383
  source 1..379: mol_type = other DNA

SEQ ID NO: 16665 - DNA, 276 bp, synthetic construct
  source 1..276: mol_type = other DNA
cctttagtaggacgagcataatgggggactagtggtagcagtgagctccttggattaccgaagccccgagtacggggtagtcgtcaatggttcgacgcatcaaggaatgcctcgagatgccatgtggacgagggcgtgcccacggtgaatcttaactcaagcgggggccgcttgggtgaaagagggtcattatgtggctctttgggagtacagcctgatagggtgttgcagagacctgctacatcactagtataaaaactctgctgtacatggcac

SEQ ID NO: 16666 - DNA, 277 bp, synthetic construct
  source 1..277: mol_type = other DNA
atgcccttagtaggactagcatattggggggggtagcaacagtggtgagttcgttggatggctgaagccctgagtacagggtagtcgtcagtggttcgacgcccaaaaaatgaggtctcgagatgccacgtggacgagggcatgcccacagcacatcttaatctgggcgggggtcgctcagacgaaagcggttgtttcaaccgttgcgaatacagcctgatagggtgctgcagaggcccactgatttgctactaaaaatctctgctgtacatggcac

SEQ ID NO: 16667 - DNA, 290 bp, synthetic construct
  source 1..290: mol_type = other DNA
aaagaggctagccatgcccttagtaggactagcaaaataaggggggtagcaacggtggtgagttcgttggatggctgaagccctgagtacagggtagtcgtcagtggttcgacgccttggaggacaggcctcgagatgccacgtggacgagggcacgcccacagcacatcttaacctggacgggggtcgttcaggtgaaagcggttaaattgaccgctacgaatacagcctgatagggtgctgcagaggcccactgtattgctactaaaaatctctgctgtacatggcac

SEQ ID NO: 16668 - DNA, 284 bp, synthetic construct
  source 1..284: mol_type = other DNA
ctagccatgcccttagtaggactagcaaaatgaggggggtagcagcagtggccagttcgttggatggctgaagccctgagtacagggtagtcgtcagtggttcgacgccttaggatctagggcctcgagatgccacgtggacgagggcatgcccacagcacatcctaatccgggcgggggtcgctcggatgaaagcggttgtattgaccgttatggacacggcctgatagggcgctgcaggggctcactgtgttgctactaaaaatctctgctgtacatggcac

SEQ ID NO: 16669 - DNA, 276 bp, synthetic construct
  source 1..276: mol_type = other DNA
cctttagtaggacgagcataatgggggactagtggtagcagtgagctccttggattaccgaagccccgagtacggggtagtcgtcaatggttcgacgcatcaaggaatgcctcgagatgccatgtggacgagggcgtgcccacggtgaatcttaactcaagcgggggccgcttgggtgaaagagggtcattatgtggctctttgggagtacagcctgatagggtgttgcagagacttgctacaccactagtataaaaactctgctgtacatggcac

SEQ ID NO: 16670 - DNA, 290 bp, synthetic construct
  source 1..290: mol_type = other DNA
cgaaatgggctagccatgcccatagtaggactagcaaacggagggactagccatagtggcgagctccctgggtggtctaagtcctgagtacaggacagtcgtcagtagttcgacgtgagcactagcccacctcgagatgctacgtggacgagggcatgcccaagacacaccttaaccctggcgggggtcgctagggtgaaatcacattatgtgatgggggtacgacctgatagggtgctgcagaggcccactagcaggctagtataaaaaatctctgctgtacatggcac

SEQ ID NO: 16671 - DNA, 290 bp, synthetic construct
  source 1..290: mol_type = other DNA
cgaaatgggctagccatgcccatagtaggactagcaaacggagggactagccatagtggcgagctccctgggtggtctaagtcctgagtacaggacagtcgtcagtagttcgacgtgagcactagcccacctcgagatgctacgtggacgagggcatgcccaagacacaccttaaccctggcgggggtcgctagggtaaaatcacattatgtgatgggggtacgacctgatagggtgctgcagaggcccactagcaggctagtataaaaaatctctgctgtacatggcac

SEQ ID NO: 16672 - DNA, 290 bp, synthetic construct
  source 1..290: mol_type = other DNA
cgaaatgggctagccatgcccatagtaggactagcaaacggagggactagccatagtggcgagctccctgggtggtctaagtcctgagtacaggacagtcgtcagtagttcgacgtgagcactagcccacctcgagatgctacgtggacgagggcatgcccaagacacaccttaaccctggcgggggtcgctagggtaaaatcacattatgtgatgggggtacgacctgatagggtgctgcagaggcccactagcaggctagtataaaaagtctctgctgtacatggcac

SEQ ID NO: 16673 - DNA, 290 bp, synthetic construct
  source 1..290: mol_type = other DNA
cgaaatgggctagccatgcccatagtaggactagcaaacggagggactagccatagtggcgagctccctgggtggtctaagtcctgagtacaggacagtcgtcagtagttcgacgtgagcactagcccacctcgagatgctacgtggacgagggcatgcccaagacacaccttaaccctggcgggggtcgctagggtgaaatcacattatgtgaggggggtacgacctgatagggtgctgcagaggcccactagcaggctagtataaaaaatctctgctgtacatggcac

SEQ ID NO: 16674 - DNA, 346 bp, synthetic construct
  source 1..346: mol_type = other DNA
gggtatcccaaattaataatttggtttagggactaatccccctggcgaaggccgaaataggttaaccataccttcagtaggacgagcataatgggggactagtggtagcagtgagctccttggattaccgaagccccgagtacggggtagtcgtcaatggttcgacgcatcaaggaatgcctcgagatgccatgtggacgagggcgtgcccacggtgaatcttaacccaagcgggggccgcttgggtgaaagagggccattgtatggctctttgggagtacagcctgatagggtgttgcagagacctgctacatcactagtataaaaactctgctgtacatggcac

SEQ ID NO: 16675 - DNA, 253 bp, synthetic construct
  source 1..253: mol_type = other DNA
gatggagggactagccgtagtggcgagctccctgggtggtttaagtcctgagtacaggacagtcgtcagtagttcgacgtgagcaggagcccacctcgagatgctatgtggacgagggcatgcccaaaacacaccttaaccctggcgggggtcgccagggtgaaatcacatcatgtgatgggggtacggcctgatagggtgctgcagaggcccactaacaggctagtataaaaatctctgctgtacatggcac

SEQ ID NO: 16676 - DNA, 255 bp, synthetic construct
  source 1..255: mol_type = other DNA
aataaggggggtagcaacagtggtgagttcgttggatggctgaagccctgagtacagggtagtcgtcagtggttcgacgctttgaagaacaagcctcgagatgccacgtggacgagggcatgcccacagcacatcttaatctggacgggggtcgttcaggtgaaaacggtttaaccaaccgctacgaatacagcctgatagggtgctgcagaggcccactgtattgctactaaaaatctctgctgtacatggcac

SEQ ID NO: 16677 - DNA, 382 bp, synthetic construct; identical to SEQ ID NO: 392
  source 1..382: mol_type = other DNA

SEQ ID NO: 16678 - DNA, 256 bp, synthetic construct
  source 1..256: mol_type = other DNA
ttgtgaggggggtagcaacagtggtgagttcgttggatggcttaagccctgagtacagggtagtcgtcagtggttcgacgccttggcgtaaaggtctcgagatgccacgtggacgagggcacgcccaaagcacatcttaacctgagcgggggtcgctcaggcgaaaacagtcagaccgactgctacgaatacagcctgatagggtgctgcagaggcccactgtattgctactaaaaatctctgctgtacatggcac

SEQ ID NO: 16679 - DNA, 277 bp, synthetic construct
  source 1..277: mol_type = other DNA
accttcagtaggacgagcgtaatgggggactagtggtagcagtgagctccttggattaccgaagccccgagtacggggtagtcgtcaatggttcgacgcatcaaggaatgcctcgagatgccatgtggacgagggcgtgcccacggtgaatcttaactcaagcgggggccgcttgggtgaaagagggtcattatgtggctctttgggagtacagcctgatagggtgttgcagagacctgctacaccactagtataaaaactctgctgtacatggcac

SEQ ID NO: 16680 - DNA, 391 bp, synthetic construct; identical to SEQ ID NO: 427
  source 1..391: mol_type = other DNA

SEQ ID NO: 16681 - DNA, 382 bp, synthetic construct
  source 1..382: mol_type = other DNA
gtatacacaaggttagctcaatccattgtgtgtacgattggatgttgcaaatttataatttgagatatagggacccattcatcacagcgaaggccgaacaagggtagccaatcccttcattaggactagcacaagtgatggactggagacgtggatgagtgagctgtagagaggaagtggtgagtacaccacagtcgtcaagagtactaccggtaaggatcacccgctagttatgctctgtggacgagggcatgcccaccttctctactagataccccgggggttggggtgtcgaaagtcgaaatgtcgattgctcacacagtctgataggatgccggcggatgctccacgtataccagtataaaaatccgttgaatagcac

SEQ ID NO: 16682 - DNA, 382 bp, synthetic construct
  source 1..382: mol_type = other DNA
gtatacacaaggttagctcaatccattgtgtgtacgattggatgttgcaaatttataatttgagacatagggacccattcatcacagcgaaggccgaacaagggtagccaatcccttcattaggactagcacaagtgatggactggagacgtggatgagtgagctgtagagaggaagtggtgagtacaccacagtcgtcaagagtactaccggtaaggatcacccgctagttatgctctgtggacgagggcatgcccaccttttctactagataccccgggggttggggtgtcgaaagtcgaaatatcgattgctcacacagtctgataggatgccggcggatgctccacgtataccagtataaaaatccgttgaatagcac

SEQ ID NO: 16683 - DNA, 253 bp, synthetic construct
  source 1..253: mol_type = other DNA
aacggagggactagccgtagtggcgagctccctgggtgttctaagtcctgagtacaggacagtcgtcagtagttcgacgtgagctgaagcccacctcgagatgctatgtggacgagggcatgcccaagacacaccttaaccctagcgggggtcgctagggtgaaatcacaccacgtgatgggagtacgacctgatagggtgctgcagaggctcactattaggctagtataaaaatctctgctgtacatggcac

SEQ ID NO: 16684 - DNA, 367 bp, synthetic construct; identical to SEQ ID NO: 343
  source 1..367: mol_type = other DNA

SEQ ID NO: 16685 - DNA, 378 bp, synthetic construct
  source 1..378: mol_type = other DNA
gcataatgctttgattggctgcattatgtgtgggacatcctaaattgttataagccctgcggtgagtgggggaaaggggttaaccaggcctctagtaccacaggcacctatggacagggcaactcaaacctgagagagaggtaccgaactcttaagtcccgagtacggggcagacgtcaccgagtagtacacccaaagaccaccatttctaggtgtagggtctactgaggctcgggtggacgtgggcgtgcccaaagagaaatcggtggtggacctgggggtcggggccaccataccccgttatggggtagaccttactgcttgatagagtgccggcggatgcctcgggtaagagtataaaatccgttgtctattaac

SEQ ID NO: 16686 - DNA, 377 bp, synthetic construct; identical to SEQ ID NO: 376
  source 1..377: mol_type = other DNA

SEQ ID NO: 16687 - DNA, 378 bp, synthetic construct
  source 1..378: mol_type = other DNA
gcataatgctttgattggctgcattatgtgtgggacatcctaaattaccatgcgccctgcggtgagtgggggaaaggggttaaccaggcctctagtaccacaggcaccaatagacagggcaactcgaacctgagagagaggtaccgaactcttaagtcccgagtacggggcagacgtcaccgagtagtacacccaaagaccaccacttctaggtgtagggtctactgaggctcgggtggacgtgggcatgcccaaagagaaatcggtggtggacctgggggtcgggcccaccatactcctttatggggtagaccttactgcttgatagagtgccggcggatgcctcgggtaagagtataaaatccgttgtttattaac

SEQ ID NO: 16688 - DNA, 376 bp, synthetic construct
  source 1..376: mol_type = other DNA
cataatgcttagattggctgcattatgtgtgggacatcctaaatttttatgagccctgtggtgagtgggggaaaggggttaaccaggcctctagtaccacaggcaccaatggacagggcaactcgaacctgagagagaggtaccgaactcttaagtcccgagtacggggcagacgtcaccgagtagtacacccaaagaccaccacttttaggtgtagggtctactgaggctcgggtggacgtgggcgtgcccaaagagaaatcggtggtggacccgggggtcgggaccaccatgcccttcacggggcagaccttactgcttgatagagtgccggcggatgcctcgggtgagagtataaaatccgttgtttattaac

SEQ ID NO: 16689 - DNA, 379 bp, synthetic construct; identical to SEQ ID NO: 384
  source 1..379: mol_type = other DNA

SEQ ID NO: 16690 - DNA, 378 bp, synthetic construct; identical to SEQ ID NO: 378
  source 1..378: mol_type = other DNA

SEQ ID NO: 16691 - DNA, 375 bp, synthetic construct
  source 1..375: mol_type = other DNA
ataatgcttagattggctgcattatgtgtgggacatcctaaatttttatgagccctgtggtgagtgggggaaaggggttaaccaggcctctagtaccacaggcaccaatggacagggcaactcgaacctgagagagaggtaccgaactcttaagtcccgagtacggggcagacgtcaccgagtagtacacccaaagaccaccacttttaggtgtagggtctactgaggctcgggtggacgtgggcgtgcccaaagagaaatcggtggtggacccgggggtcgggaccaccatgccctccacggggcagaccttactgcttgatagagtgccggcggatgcctcgggtgagagtataaaatccgttgtttattaac

SEQ ID NO: 16692 - DNA, 377 bp, synthetic construct
  source 1..377: mol_type = other DNA
gcataatgcttagattggctgcattatgtgtgggacatcctaaatttttatgagccctgtggtgagtgggggaaaggggttaaccaggcctctagtaccacaggcaccaatggacagggcaactcgaacctgagagagaggtaccgaactcttaagtcccgagtacggggcagacgtcaccgagtagtacacccaaagaccaccacttctaggtgtagggtctactgaggctcgggtggacgtgggcgtgcccaaagagaaatcggtggtggacccgggggtcgggaccaccatgcccttcacggggcagaccttactgcttgatagagtgccggcggatgcctcgggtgagagtataaaatccgttgtttattaac

SEQ ID NO: 16693 - DNA, 378 bp, synthetic construct
  source 1..378: mol_type = other DNA
gcataatgctttgattggctgcattatgtatgggacatcctaaattgttgtgagccctgtggtgagtgggggaaaggggttaaccaggcctctagtaccacaggcaccaacagacagggcaactcgaacctgagagagaggtaccgagctcttaagccccgagtacggggcagacgtcaccgagtagtacacccaaagaccaccacttctaggtgtagggtctactgaggctcgggtggacgtgggcgtgcccaaagagaaatcggtggtgggcctgggggtcggggccaccatgcccctttatggggtagaccttactgcttgatagagtgccggcggatgcctcgggtaagagtataaaatccgttgtctattaac

SEQ ID NO: 16694 - DNA, 376 bp, synthetic construct
  source 1..376: mol_type = other DNA
taatgctttgattggctgcattatgtgtgggacatcctaaattgttaagcgccctgcggtgagtgggggaaaggggttaaccaggcctctagtaccacaggcaccattggacagggcaactcgaacctgagagagaggtaccgaactcttaagctccgagtacggggcagacgtcaccgagtagtacacccaacgaccaccatgtttaggtgtagggtctactgaagctcgggtggacgtgggcgtgcccaaagagaaatcggtggtggacctgggggtcgggcccaccatgcccctcttacggggtagacctcactgcttgatagagtgccggcggatgcctcaggtgagagtataaaatccgttgttcgttaac

SEQ ID NO: 16695 - DNA, 368 bp, synthetic construct
  source 1..368: mol_type = other DNA
ttagattggctgcattatgtgtgggacatcctaaatttttatgagccctgtggtgagtgggggaaaggggttaaccaggcctctagtaccacaggcaccaatggacagggcaactcgaacctgagagagaggtaccgaactcttaagtcccgagtacggggcagacgtcaccgagtagtacacccaaagaccaccacttttaggtgtagggtctactgaggctcgggtggacgtgggcgcgcccaaagagaaatcggtggtggacccgggggtcgggaccaccatgcccttcacggggcagaccttactgcttgatagagtgccggcggatgcctcgggtgagagtataaaatccgttgtctatcaac

SEQ ID NO: 16696 - DNA, 369 bp, synthetic construct; identical to SEQ ID NO: 346
  source 1..369: mol_type = other DNA

SEQ ID NO: 16697 - DNA, 357 bp, synthetic construct
  source 1..357: mol_type = other DNA
gcattatgtgtgggacatcctaaatttttatgagccctgtggtgagtgggggaaaggggttaaccaggcctctagtaccacaggcaccaatggacagggcaactcgaacctgagagagaggtaccgaactcttaagtcccgagtacggggcagacgtcaccgagtagtacacccaaagaccaccacttctaggtgtagggtctactgaggctcgggtggacgtgggcgtgcccaaagagaaatcggtggtggccccgggggttgggaccaccatgcccttcacggggcagaccttactgcttgatagagtgccggcggatgcctcgggtgagagtataaaatccgttgtttattaac

SEQ ID NO: 16698 - DNA, 359 bp, synthetic construct
  source 1..359: mol_type = other DNA
agcattatgcgtgggacatcctaaattgttactagtcctgcggtgagtgggggaaggggttaaccaggcctctagtaccacaggcaccaatgaacagggcaactcgaacctgagagagaggtaccgaactcttaagtcccgagtacggggcagacgtcactgagtagtacacccaaagaccaccgctcctaggtgtagggtctactgaggctcaggtggacgtgggcgtgcccaaagagaaatcggtggtggacctgggggtcgggtccaccatgcccctttaggggggtagaccttactgcttgatagagtgccggcggatgcctcaggtaagagtataaaatccgttgtttatcaac

SEQ ID NO: 16699 - DNA, 359 bp, synthetic construct
  source 1..359: mol_type = other DNA
gcattatgtgtgggacatcctaaattgttaagcgccctgcggtgagtgggggaaaggggttaaccaggcctctagtaccacaggcaccattggacagggcaactcgaacctgagagagaggtaccgaactcttaagctccgagtacggggcagacgtcaccgagtagtacacccaacgaccaccatgttcaggtgtagggtctactgaagctcgggtggacgtgggcgtgcccaaagagaaatcggtggtggacctgggggtcgggcccaccatacccccttaacggggtagacctcactgcttgatagagtgccggcggatgcctcaggtgagagtataaaatccgttgttcgttaac

SEQ ID NO: 16700 - DNA, 348 bp, synthetic construct
  source 1..348: mol_type = other DNA
tgggacatcctaaattgtcgtgagccctgcggtgagtgggggaaaggggttaaccaggcctctagtaccacaggcaccaatggacagggcaactcgaacctgagagagaggtaccgaactcttaagccccgagtacggggcagacgtcaccgagtagtacacccaacgaccaccacttctaggtgtagggtctactgaggctcgggtggacgtgggcgtgcccaaagagaaatcggtggtggacctgggggtcgggcccaccatgcccctttacggggtagaccttactgcttgatagagtgccggcggatgcctcaggtaagagtataaaatccgttgttcattaac

SEQ ID NO: 16701 - DNA, 385 bp, synthetic construct; identical to SEQ ID NO: 403
  source 1..385: mol_type = other DNA

SEQ ID NO: 16702 - DNA, 385 bp, synthetic construct
  source 1..385: mol_type = other DNA
atatggggcataatgcatagattggctgcattatgtgtataacatcccaaattgccataggctctgtggtgagtgggggaaaggggttaaccaggcctctagtaccacaggcaccatttaacagggcaactcgaacctgagagagaggtaccgaactcttaagcctcgagtacggggcagacgtcaccgagtagtacacccaacgaccaccacatttaggtgtagggtctactgaggctcgggtggacgtgggcatgcccaaagagaaaacggtgggggacctgggggtcgggtccgccatgcccctcaatggggtagaccttactgcttgatagagtgccggcggatgcctcaggtaagagtataaaatccgttgtttattaac

SEQ ID NO: 16703 - DNA, 385 bp, synthetic construct
  source 1..385: mol_type = other DNA
atatggggcataatgcatagattggctgcattatgtgtataacatcccaaattgccaaaggctctgtggtgagtgggggaaaggggttaaccaggcctctagtaccacaggcaccatttaacagggcaactcaaacctgagagagaggtaccgaactcttaagcctcgagtacggggcagacgtcaccgagtagtacacccaacgaccaccacatttaggtgtagggtctactgaggctcgggtggacgtgggcatgcccaaagagaaaacggtgggggacctgggggtcgggtccgccatgcccctcaatggggtagaccttactgcttgatagagtgccggcggatgcctcaggtaagagtataaaatccgttgtttattaac

SEQ ID NO: 16704 - DNA, 385 bp, synthetic construct
  source 1..385: mol_type = other DNA
atatggggcataatgcatagattggctgcattatgtgtataacatcccaaattgccataggctctgtggtgagtgggggaaaggggttaaccaggcctctagtaccacaggcaccatttaacagggcaactcaaacctgagagagaggtaccgaactcttaagcctcgagtacggggcagacgtcaccgagtagtacacccaacgaccaccacatttaggtgtagggtctactgaggctcgggtggacgtgggcatgcccaaagagaaaacggtgggggacctgggggtcgggtccgccatgcccctcaatggggtagaccttactgcttgatagagtgccggcggatgcctcaggtaagagtataaaatccgttgttcattaac

SEQ ID NO: 16705 - DNA, 320 bp, synthetic construct
  source 1..320: mol_type = other DNA
ggtgagtgggggaaaggggttaaccaggcctctagtaccacaggcaccattggacagggcaactcgaacctgagagagaggtaccgaactcttaagctccgagtacggggcagacgtcaccgagtagtacacccaacgaccaccatgtttaggtgtagggtctactgaagctcgggtggacgtgggcgtgcccaaagagaaatcggtggtggacctgggggtcgggcccaccatgcccccctttacggggtagacctcactgcttgatagagtgccggcggatgcctcaggtgagagtataaaatccgttgttcgttaac

SEQ ID NO: 16706 - DNA, 313 bp, synthetic construct
  source 1..313: mol_type = other DNA
agtgggggaaggggttaaccaggcctctagtaccacaggcaccaataaacagggcaactcgaacctgagagagaggtaccgaactcttaagtcccgagtacggggcagacgtcactgagtagtacacccaaagaccaccacatctaggtgtagggtctactgaggctcaggtggacgtgggcgtgcccaaagagaaatcggtggtggacctgggggtcgggtccaccatgcccctttagggggtagaccttactgcttgatagagtgccggcggatgcctcgggtaagagtataaaatccgttgttcattaac

SEQ ID NO: 16707 - DNA, 347 bp, synthetic construct
  source 1..347: mol_type = other DNA
tgggacatcctaaatttttatgagccctgtggtgagtgggggaaaggggttaaccaggcctctagtaccacaggcaccaatggacagggcaactcgaacctgagagagaggtaccgaactcttaagtcccgagtacggggcagacgtcaccgagtagtacacccaaagaccaccatttttaggtgtagggtctactgaggctcgggtggacgtgggcgcgcccaaagagaaatcggtggtggacccgggggtcgggaccaccatgcccttcacggggcagaccttactgcttgatagagtgccggcggatgcctcgggtgagagtataaaatccgttgtctatcaac

SEQ ID NO: 16708 - DNA, 299 bp, synthetic construct
  source 1..299: mol_type = other DNA
ttaaccaggcctctagtaccacaggcaccaatttgcagggcaactcgaacctgagagagaggtaccgaactcttaagcctcgagtacggggcagacgtcaccgagtagtacacccaacgaccaccacatttaggtgtagggtctactgaggctcgggtggacgtgggcttgcccaaagagaaaacggtgggggacctgggggtcgggtccgccatgcccctcaatggggtagaccttactgcttgatagagtgccggcggatgcctcaggtaagagtataaaatccgttgtttattaac

SEQ ID NO: 16709 - DNA, 380 bp, synthetic construct; identical to SEQ ID NO: 385
  source 1..380: mol_type = other DNA

SEQ ID NO: 16710 - DNA, 378 bp, synthetic construct; identical to SEQ ID NO: 379
  source 1..378: mol_type = other DNA

SEQ ID NO: 16711 - DNA, 377 bp, synthetic construct
  source 1..377: mol_type = other DNA
gcataatgctttgattggctgcattatgtgtcggacacctcaaattaccacgcgccctgcggtgagtgggggaaaggggttaaccaggcctctagtaccacaggcaccaatttgcagggcaactcgaacctgagagagaggtaccgaactcttaagccccgagtacggggcagacgtcaccgagtagtacacccaaagaccaccatatttaggtgtagggtctactgaggcttgggtggacgtgggcgtgcccaaagagaaatcggtggtggacctgggggtcgggcccaccacacccctttatagggtggaccttactgcttgatagagtgccggcggatgcctcaggtaagagtataaaatccgttgtttttaac

SEQ ID NO: 16712 - DNA, 370 bp, synthetic construct
  source 1..370: mol_type = other DNA
tcaaagcattatgcattatgtatgggacatcctaaattgctgtgagccccgtggtgagtgggggaaaggggttaaccaggcctctagtaccacaggcaccgatagacggggcaactcgaacctgagagagaggtaccgaactcttaagtcccgagtacggggcagacgtcaccgagtagtacacccaacgaccaccactcctaggtgtagggtctactgaggctcgggtggacgtgggcgcgcccaaagagaaatcggtggtggacctgggggccggggccaccatgccccttcacggggtagaccttactgcttgatagagtgccggcggatgcctcgggtaagagtataaaatccgttgtctattaat

SEQ ID NO: 16713 - DNA, 371 bp, synthetic construct
  source 1..371: mol_type = other DNA
ttcaaagcattatgcattatgtatgggacatcctaaattgctacgagccctgcggtgagtgggggaaaggggttaaccaggcctctagtaccacaggcaccaataaacagggcaactcgaacctgagagagaggtaccgaactcttaagtcccgagtacggggcagacgtcactgagtagtacacccaaagaccaccacatctaggtgtagggtctactgaggctcaggtggacgtgggcgtgcccaaagagaaatcggtggtggacctgggggtcgggtccaccatgcccctttaaggggtagaccttactgcttgatagagtgccggcggatgcctcgggtaagagtataaaatccgttgttcattaac

SEQ ID NO: 16714 - DNA, 280 bp, synthetic construct
  source 1..280: mol_type = other DNA
cacaggcaccaacagacagggcaactcgaacctgagagagaggtaccgaactcttaagccccgagtacggggcagacgtcaccgagtagtacacccaaagaccaccatatttaggtgtagggtctactgaggcttgggtggacgtgggcatgcccaaagagaaatcggtggtggacctgggggtcgggcccaccacacccccacatggggtggaccttactgcttgatagagtgccggcggatgcctcaggtaagagtataaaatccgttgtttatcaac

SEQ ID NO: 16715 - DNA, 358 bp, synthetic construct
  source 1..358: mol_type = other DNA
gcattatgtatgggacatcctaaattgttataagccctgcggtgagtgggggaaaggggttaaccaggcctctagtaccacaggcacctatggacagggcaactcaaacctgagagagaggtaccgaactcttaagtcccgagtacggggcagacgtcaccgagtagtacacccaaagaccaccatttctaggtgtagggtctactgaggctcgggtggacgtgggcgtgcccaaagagaaatcggtggtggacctgggggtcggggccaccataccccgttatggggtagaccttactgcttgatagagtgccggcggatgcctcgggtaagagtataaaatccgttgtctattaac

SEQ ID NO: 16716 - DNA, 355 bp, synthetic construct; identical to SEQ ID NO: 335
  source 1..355: mol_type = other DNA

SEQ ID NO: 16717 - DNA, 349 bp, synthetic construct
  source 1..349: mol_type = other DNA
ttaggacatcctaaattgttataagccctgcggtgagtgggggaaaggggttaaccaggcctctagtaccacaggcacctatggacagggcaactcaaacctgagagagaggtaccgaactcttaagtcccgagtacggggcagacgtcaccgagtagtacacccaaagaccaccatttctaggtgtagggtctactgaggctcgggtggacgtgggcgtgcccaaagagaaatcggtggtggacctgggggtcggggccaccataccccgttatggggtagaccttactgcttgatagagtgccggcggatgcctcgggtaagagtataaaatccgttgtctattaac

SEQ ID NO: 16718 - DNA, 355 bp, synthetic construct
  source 1..355: mol_type = other DNA
gcattatgtatgggacatcctaaattgtagtgagccccgtggtgagtgggggaaaggggttaaccaggcctctagtaccacaggcaccaatgaacggggcaactcgaacccgagagagaggtaccgaactcttaagccccgagtacggggcagacgtcaccgagtagtacacccaaagaccaccactaggtgtagggtctactgaggctcgggtggacgtgggcgtgcccaaagagaaatcggtggtggacctgggggtcggggccaccatacccctaaacagggtagaccttactgcttgatagagtgccggcggatgcctcgggcaagagtataaaatccgctgcctgttaac

SEQ ID NO: 16719 - DNA, 299 bp, synthetic construct
  source 1..299: mol_type = other DNA
ttaaccaggcctctagtaccacaggcaccaatttgcagggcaactcgaacctgagagagaggtaccgaactcttaagcctcgagtacggggcagacgtcaccgagtagtacacccaacgaccaccacatttaggtgtagggtctactgaggctcgggtggacgtgggcttgcccaaagagaaaacggtgggggacctgggggtcgggtccgccatgcccctcaatggggtagaccttactgcttgatagagtgccggcggatgcctcaggtaagagtataaaatccgttgtttattaat

SEQ ID NO: 16720 - DNA, 298 bp, synthetic construct
  source 1..298: mol_type = other DNA
taaccaggcctctagtaccacaggcaccagtggacagggcaactcgaacctgagagagaggtaccgaactcttaagtcccgagtacggggcagacgtcaccgagtagtacacccaacgaccaccatttttaggtgtagggtctacttaggctcgggtggacgtgggcgcgcccaaagagaaatcggtggtggacctgggggacggggccaccatgcccttttacggggtagaccttactgcttgatagagtgccggcggatgcctcgggtaagagtataaaatccgttgcttatcaac

SEQ ID NO: 16721 - DNA, 326 bp, synthetic construct
  source 1..326: mol_type = other DNA
agccccgtggtgagtgggggaaaggggttaaccaggcctctagtaccacaggcaccaataaacagggcaactcgaacctgagagagaggtaccgaactcttaagtcccgagtacggggcagacgtcactgagtagtacacccaaagaccaccacatctaggtgtagggtctactgaggctcaggtggacgtgggcgtgcccaaagagaaatcggtggtggacctgggggtcgggtccgccatgcccctttagggggtagaccttactgcttgatagagtgccggcggatgcctcgggtaagagtataaaatccgttgtatattaac

SEQ ID NO: 16722 - DNA, 358 bp, synthetic construct; identical to SEQ ID NO: 337
  source 1..358: mol_type = other DNA

SEQ ID NO: 16723 - DNA, 326 bp, synthetic construct
  source 1..326: mol_type = other DNA
agctctgcagtacgtgggggaaaggggttaaccaggcctctagtaccacaggcaccaattgacagggcaactcgagcctgggagagaggtaccgaactcttaagtcccgagtacggggcagacgtcaccgagtagtacacccaaagaccaccatgtttaggtgtagggtctactgaggcttgggtggacgtgggcatgcccaaagagaaatcggtggtggacctgggggtcgggcccaccgcacccctttatggggtggacctcactgcttgatagagtgccggcggatgcctcaggtaagagtataaaatccgttgtttattaac

SEQ ID NO: 16724 - DNA, 387 bp, synthetic construct
  source 1..387: mol_type = other DNA
gtatacgagattagctaaagtactcgtatacggattggacgttgacaaaaatattgaattggaaatgtagggaattttcccctcagcgaaggccgaaaagaggctagccatgcccttagtaggactagcaaaaggaggggactagcagtagcagtgagttcattggatggccgaacccctgagtacaggggagtcgtcaatggttcgacactccttcagttgaggagtctcgagatgccatgtggacgagggcatgcccacggcacatcttaacctatgcgggggctgcatgggtgaaagcgccattcttggtgttatggacacagcctgatagggtgtagcagagacctgctattctgctagtaaaaactctgctgtacatggcac

SEQ ID NO: 16725 - DNA, 254 bp, synthetic construct
  source 1..254: mol_type = other DNA
gaagaggggactagccgtcgtggtgagatccctgagtggtctaagtcctgagtacaggacagtcgtcagtagttcgacacaatcacagtattgtctcgagatgctacgtggacgagggcatgcccaagacacactttagccctgacgggggtcgccagggtgaaaacgcctaatggcgttggggttacagcctgatagggtgctgcagaggcccacgcataggctagtataaaaatctctgctgtacatggcac

SEQ ID NO: 16726 - DNA, 260 bp, synthetic construct
  source 1..260: mol_type = other DNA
agcaaaataaggggggtagcagcagtggtgagttcgttggatggctgaagccctgagtacagggtagtcgtcagtggttcgacgctttggaggataagcctcgagatgccacgtggacgagggcatgcccacagcacatcttaacctggacgggggtcgttcaggtgaaaacggtttaaccaaccgctacgaatacagcctgatagggtgctgcagaggcccactgtgttgctactaaaaatctctgctgtacatggcac

SEQ ID NO: 16727 - DNA, 327 bp, synthetic construct
  source 1..327: mol_type = other DNA
gagccctgcggtgagtgggggaaaggggttaaccaggcctctagtaccacaggcaccaataaacagggcaactcgaacctgagagagaggtaccgaactcttaagtcccgagtacggggcagacgtcactgagtagtacacccaaagaccaccacatctaggtgtagggtctactgaggctcaggtggacgtgggcgtgcccaaagagaaatcggtggtggacctgggggtcgggtccgccatgcccctttagggggtagaccttactgcttgatagagtgccggcggatgcctcgggtaagagtataaaatccgttgtatattaac

SEQ ID NO: 16728 - DNA, 281 bp, synthetic construct
  source 1..281: mol_type = other DNA
atgcccatagtaggactagcaaaaagaggggactagcggtagcacgtgagttcattggatggccgaatccctgagtacagggaagtcgtcaatggttcagcactctggcagtgacagagtcctgagatgccatgtggacgagggcatgcccacggcacatcttaatctacgcgggggttgcgtaggtgaaagcaccacttttgtggtgttatgaacacagcctgatagggtgtagcagagacctgctattccgctagtaaaaactctgctgtacatggcac

SEQ ID NO: 16729 - DNA, 257 bp, synthetic construct
  source 1..257: mol_type = other DNA
aaaaggaggggactagcggtacagtgagttcattggatggcctaatccctgagtacagggaagtcgtcaatggttcgacactccatcagttgaggagtctcgagatgccatgtggacgagggcatgcccaaggcacatcttaacctatgcgggggttgcataggcaaaagcaccactcacggtgttatggacacagcctgatagggtgtagcagagacctgctattccgctagtaaaaactctgctgtacatggcac

SEQ ID NO: 16730 - DNA, 379 bp, synthetic construct
  source 1..379: mol_type = other DNA
tgcataatgctttgattggctgcattatgtatgggacatcctaaattgttgtgagccctgtggtgagtgggggaaaggggttaaccaggcctctagtaccacaggcaccaacagacagggcaactcgaacctgagagagaggtaccgagctcttaagccccgagtacggggcagacgtcaccgagtagtacacccaaagaccaccacttctaggtgtagggtctactgaggctcgggtggacgtgggcgtgcccaaagagaaatcggtggtgggcctgggggtcggggccaccatgcccctttatggggtagaccttactgcttgatagagtgccggcggatgcctcgggtaagagtataaaatccgttgtctattaac

SEQ ID NO: 16731 - DNA, 377 bp, synthetic construct
  source 1..377: mol_type = other DNA
cataatgctttgattggctgcattatgtatgggacatcctaaattgttgtgagccctgtggtgagtgggggaaaggggttaaccaggcctctagtaccacaggcaccaacagacagggcaactcgaacctgagagagaggtaccgaactcttaagtcccgagtacggggcagacgtcactgagtagtacacccaaagaccaccacttctaggtgtagggtctactgaggctcaggtggacgtgggcgtgcccaaagagaaatcggtggcggacctgggggtcgggtccaccatgcccctttagggggtagaccttactgcttgatagagtgccggcggatgcctcgggtaagagtataaaatccgttgtttgttaac

SEQ ID NO: 16732 - DNA, 367 bp, synthetic construct
  source 1..367: mol_type = other DNA
tgattggctgcattatgtatgggacatcttaaattgctatgagccccgtggtgagtgggggaaaggggttaaccaggcctctaggtccacaggcaccgatagacggggcaactcaagcctgagagagaggtaccgaactcttaagtcccgagtacggggcagacgtcaccgagtagtacacccaacgaccaccacttctaggtgtagggtctactgaggctcgggtggacgtgggcgcgcccaaagagaaatcggtggtggacctgggggtcggggccaccatgcccctttacggggtagaccttactgcttgatagagtgccggcggatgcctcaggtaagagtataaaatccgttgtctattaac

SEQ ID NO: 16733 - DNA, 367 bp, synthetic construct
  source 1..367: mol_type = other DNA
tgattggctgcattatgtatgggacatcctaaattgttgtgagccctgtggtgagtgggggaaaggggttaaccaggcctctagtaccacaggcaccaacagacagggcaactcgaacctgagagagaggtaccgagctcttaagccccgagtacggggcagacgtcaccgagtagtacacccaaagaccaccacttctaggtgtagggtctactgaggctcgggtggacgtgggcgtgcccaaagagaaatcggtggtgggcctgggggtcggggccaccatgcccctttatggggtagaccttactgcttgatagagtgccggcggatgcctcgggtaagagtataaaatccgttgtctattaac

SEQ ID NO: 16734 - DNA, 290 bp, synthetic construct
  source 1..290: mol_type = other DNA
cctctagtaccacaggcaccgatagacggggcaactcgaacctgagagagaggtaccgaactcttaagtcccgagtacggggcagacgtcaccgagtagtacacccaacgaccaccactcctaggtgtagggtctactgaggctcgggtggacgtgggcgtgcccaaagagaaatcggtggtggacctgggggccggggccaccatgctcctttacggggtagaccttactgcttgatagagtgccggcggatgcctcgggtaagagtataaaatccgttgtctattaat

SEQ ID NO: 16735 - DNA, 378 bp, synthetic construct; identical to SEQ ID NO: 380
  source 1..378: mol_type = other DNA

SEQ ID NO: 16736 - DNA, 333 bp, synthetic construct; identical to SEQ ID NO: 319
  source 1..333: mol_type = other DNA

SEQ ID NO: 16737 - DNA, 326 bp, synthetic construct
  source 1..326: mol_type = other DNA
agccccgtggtgagtgggggaaaggggttaaccaggcctctagtaccacaggcacctatggacagggcaactcaaacctgagagagaggtaccgaactcttaagccccgagtacggggcagacgtcaccgagtagtacacccaaagaccaccatttctaggtgtagggtctactgaggctcgggtggacgtgggcgcgcccaaagagaaatcggtggtggacctgggggtcggggccaccataccccgttatggggtagaccttactgcttgatagagtgccggcggatgcctcaggtaagagtataaaatccgttgtctattaac

SEQ ID NO: 16738 - DNA, 327 bp, synthetic construct
  source 1..327: mol_type = other DNA
gagccctgcggtgagtgggggaaaggggttaaccagacctctagtaccacaggcaccaaaggacagggcaactcgaacctgagagagaggtaccgaactcttaagccccgagtacggggcagacgtcaccgagtagtacacccaaagaccaccacttttaggtgtagggtctactgaggctcgggtggacgtgggcgtgcccaaagagaaatcggtggtggacctgggggtcgggaccaccatgcccatttacggggtagacctcactgcttgatagagtgccggcggatgcctcgggtaagagtataaaatccgttgtttactaac

SEQ ID NO: 16739 - DNA, 359 bp, synthetic construct
  source 1..359: mol_type = other DNA
gttcattctcgtgtacatgattggacaaattaaaatttcaatttggatcagggcctccctccagcgacggccgaactgggctagccatgcccacagtaggactagcaaacggagggactagccgtagtggcgagctccctgggtggtctaagtcctgagtacaggacagtcgtcagtagttcgacgtgagcagaagcccacctcgatatgctatgtggacgagggcatgccaagacacaccttaaccctagcgggggtcgctagggtgaaatcacaccacgtgatgggagtacgacctgatagggtgctgcagaggcccactattaggctagtataaaaatctctgctgtacatggcac

SEQ ID NO: 16740 - DNA, 337 bp, synthetic construct
  source 1..337: mol_type = other DNA
cttaaaattaggcctagggaatgaatccccttcagcgaaggccgaaaagaggctagccatgcccttagtaggactagcataatggagggggtagcaacagtggtgagttcgttggatggcttaagccctgagtacagggcagtcgtcagtggttcgacaccttggaagaacaaggcctcgagatgccacgtggacgagggcgtgcccaaagcacatcttaacctgggcgggggtcgctcaggtgaaagcagtctaatcaactgttacgaatacagcctgatagggtgctgcagaggcccactgtattgctactaaaaatctctgctgtacatggcac

SEQ ID NO: 16741 - DNA, 284 bp, synthetic construct
  source 1..284: mol_type = other DNA
ctagccatgcccttagtaggactagcatagtgaggggggtagcaacagtggtgagttcgttggatggcttaagccctgagtacagggtagtcgtcagtggttcgacgccttggtataaaggtctcgagatgccacgtggacgagggcacgcccaaagcacatcttaacctgagcgggggtcgctcaggctaaagcagattgaccaatctgttacgaatacagcctgatagggtgctgcagaggcccactgtattgctactaaaaatctctgctgtacatggcac

SEQ ID NO: 16742 - DNA, 266 bp, synthetic construct
  source 1..266: mol_type = other DNA
gactagcacaatggagggggtagcaacagtggtgagttcgttggatggcttaagccctgagtacagggcagtcgtcagtggttcgacaccttggaagaacaaggtctcgagatgccacgtggacgagggcatgcccaaagcacatcttagcctgggcgggggtcgctcaggtgaaagcagtttgaacaactgttacgaatacagcctgatagggtgctgcagaggcccactgtattgctactgaaaatctctgctgtacatggcac

SEQ ID NO: 16743 - DNA, 310 bp, synthetic construct; identical to SEQ ID NO: 297
  source 1..310: mol_type = other DNA

SEQ ID NO: 16744 - DNA, 275 bp, synthetic construct
  source 1..275: mol_type = other DNA
atgcccatagtaggactagcagaaggggggactagccgtcgtggtgaaatccctgagtggtctaagtcctgagtacaggacagccgtcagtagttcgacgcagccaccgcgctgtctcgagatgctatgtggacgagggcatgcccaagatacactttaactctggcgggggttgccagggtgaaaacgccttgtggcgttgggattacaacctgatagggtgctgcagaggcccacgatgaggctagtataaaaatctctgctgtacatggcac

SEQ ID NO: 16745 - DNA, 258 bp, synthetic construct
  source 1..258: mol_type = other DNA
ataattggggcatgtggtagcagtgagctccttggattaccgaagccccgagtacggggtagtcgtcaatggttcgacgcatcaaggaatgcctcgagatgccatgtggacgagggcgtgcccacggtgaatcttaacccaagcgggggccgcttgggtgaaagagggtcgttatatggctctttgggagtacaacctgatagggtgttgcagggacctgctacatcactagtataaaaactctgctgtacatggcac

SEQ ID NO: 16746 - DNA, 354 bp, synthetic construct
  source 1..354: mol_type = other DNA
ggattggatgtcgacaaatattgaattggcaacgtagggaaccttcccctcagcgaaggccgaaaagaggctagccatgcccttagtaggagtagcaaaaggaggggactagcggtacgagtgagttcattggatggccgaacccctgagtacaggggagtcgtcaatggttcgacactccattagtcgaggagtctcgagatgccatgtggacgagggcatgcccacggcacatcttaacccacgcgggggttgcatgggtgaaagcgctattcgtggcgttatggacacagcctgatagggtgttgcagaggcccactattccgctagtaaaaactctgctgtacatggcac

SEQ ID NO: 16747 - DNA, 276 bp, synthetic construct
  source 1..276: mol_type = other DNA
tgcccttagtaggactagcaaaatgagaggggtagcaacagtggtgagttcattggatggctgaagccctgagtacagggtagtcgtcagtggttcgacacctcggaaagaaggtctcgagatgccacgtggacgagggcatgcccacagcacatcttaacctggacgggggtcgcccaggtaaaagcagtttaactaactgttatggacacagcctgatagggtgctgcagaggcccactgcattgctactaaaaatctctgctgtacatggcac

SEQ ID NO: 16748 - DNA, 257 bp, synthetic construct
  source 1..257: mol_type = other DNA
aaagaggggactagcggtagcagtgagttcattggatggccgaatccctgagtacagggaagtcgtcaatggttcgacgctctgacaacgaaagggcctcgagatgccatgtggacgagggcatgcccacggcacatcttaacctatgcgggggctgcgtaggtgaaagcaccaacttacggtgttatgagcacagcctgatagggtgtagcagagacctgctattccgctagtaaaaactctgctgtacatggcac

SEQ ID NO: 16749 - DNA, 336 bp, synthetic construct
  source 1..336: mol_type = other DNA
aaaaataaattaggcctaggggacaaatcctccttagcgacggccgaaaagaggctagccatgcccttagtaggactagcaaacaaggagggtagcaacggtggtgagttcgttggatggctgaagccctgagtacagggtagtcgtcagtggttcgacgcttagcatgataagcctcgagatgccacgtggacgagggcatgcccacagcacatcttaacctgagcgggggtcgctcaggcaaaaacggtttaaccaaccgctacgaatacagcctgatagggtgctgcagaggcccactgtattgctactaaaaatctctgctgtacatggcac

SEQ ID NO: 16750 - DNA, 276 bp, synthetic construct
  source 1..276: mol_type = other DNA
ccttcagtaggacgagcataatgggggactagtggtagcagtgagctccttggattaccgaagccccgagtacggggtagtcgtcaatggttcgacgcatcaaggaatgcctcgagatgccatgtggacgagggcgtgcccacggtgaatcttaactcaagcgggggccgcttgggtgaaagagggtcattatgtggctctttgggagtacagcctgatagggtgttgcagagacctgctacatcactagtataaaaactctgctgtacatggcac

SEQ ID NO: 16751 - DNA, 1000 bp, synthetic construct; identical to SEQ ID NO: 1454
  source 1..1000: mol_type = other DNA

SEQ ID NO: 16752 - DNA, 255 bp, synthetic construct
  source 1..255: mol_type = other DNA
aaaacaaggagggtagcagcagtggtgagttcgttggatggctgaagcctgagtacagggtagtcgtcagtggtttgacgctttgtgtgacaagcctcaagatgccacgtggacgagggcatgcccacagcacatcttaacctgggcgggggtcgttcaggtgaaacggtttaaccaaccgccacgaatacagcctgatagggtgctgcagaggcccactgtattgctactaaaaatctctgctgtacatggcac

SEQ ID NO: 16753 - DNA, 385 bp, synthetic construct; identical to SEQ ID NO: 404
  source 1..385: mol_type = other DNA

SEQ ID NO: 16754 - DNA, 255 bp, synthetic construct
  source 1..255: mol_type = other DNA
aaaacaaggagggtagcagcagtggtgaattcgttggatggctgaagcctgagtacggggtagtcgtcagtggtttgacgctttgtgtgacaagcctcaagatgccacgtggacgagggcatgcccacagcacatcttaacctgggcgggggtcgttcaggtgaaacggtttaaccaaccgccacgaatacagcctgatagggtgctgcagaggcccactgtattgctactaaaaatctctgctgtacatggcac

SEQ ID NO: 16755 - DNA, 264 bp, synthetic construct
  source 1..264: mol_type = other DNA
taggactagcaaacggagggactagccatagtggcgagctccctgggtggtctaagtcctgagtacaggacagtcgtcagtagttcgacgtgagcactagcccacctcgagatgctacgtggacgagggcatgcccaagacacaccttaaccctggcgggggtcgctagggtgaaatcacattatgtgatgggggtacgacctgatagggcgctgcagaggcccactagcaggctagtataaaaatctctgctgtacatggcac

SEQ ID NO: 16756 - DNA, 636 bp, synthetic construct; identical to SEQ ID NO: 762
  source 1..636: mol_type = other DNA

SEQ ID NO: 16757 - DNA, 302 bp, synthetic construct
  source 1..302: mol_type = other DNA
ggttaaccaggcctctagtaccacaggcaccattggacagggcaactcgaacctgagagagaggtaccgaactcttaagctccgagtacggggcagacgtcaccgagtagtacacccaacgaccaccatgttcaggtgtagggtctactgaagctcgggtggacgtgggcgtgcccaaagagaaatcggtggtggacctgggggtcgggcccaccatacccccttaacggggtagacctcactgcttgatagagtgccggcggatgcctcaggtgagagtataaaatccgttgttcgttaac

SEQ ID NO: 16758 - DNA, 382 bp, synthetic construct
  source 1..382: mol_type = other DNA
gtatacacaaggttagctcaatccgttgtgtgtacgattggatgttgcaaatttataatttgagacatagggacccattcatcacagcgaaggccgaacaagggtagccaatcccttcattaggactagcacaagtgatggactggagacgtggatgagtgagctgtagaaaggaagtggtgagtacaccacagtcgtcaagagtactaccggtaaggatcacccgctagttatgctctgtggacgagggcatgcccaccttctctactagataccccgggggttggggtgtcgaaagtcgaaatgtcgattgctcacacagtctgataggatgccggcggatgctccacgtataccagtataaaaatccgttgaatagcac

SEQ ID NO: 16759 - DNA, 382 bp, synthetic construct
  source 1..382: mol_type = other DNA
gtatacacaaggttagctcaatccattgtgtgtacgattggatgttgcaaatttatgatttgagacatagggacccattcatcacagcgaaggccgaacaagggtagccaatcccttcattaggactagcacaagtgatggactggagacgtggatgagtgagctgtagagaggaagtggtgagtacaccacagtcgtcaagagtactaccggtaaggatcacccgctagttatgctctgtggacgagggcatgcccaccttctttactagacaccccgggggttggggtgtcgaaagtcgaaatgtcgattgctcacacagtctgataggatgccggcggatgctccacgtataccagtataaaaatccgttgaatagcac

SEQ ID NO: 16760 - DNA, 381 bp, synthetic construct
  source 1..381: mol_type = other DNA
gtatacacaaggttagctcaatcccttgtgtatgcgattggatattgcaaatttatgatttggataaagggactcattcatcacagcgaaggccgaacgagggtagccaatcccttcattaggactagcgtaagtgatggactggagacgtggatgagtgagctgtagaaaggaagtggtgagtacaccacagtcgtcaagagtactaccggtaaggatcacccgctagttatgctctgtggacgagggcatgcccaccttctctactagacaccccgggggttggggtgtcgaaagtcgatatgtcgattgctcacacagtctgataggatgccggcggatgctccacgtgtaccagtataaaaatccgttgaatagcac

SEQ ID NO: 16761 - DNA, 275 bp, synthetic construct
  source 1..275: mol_type = other DNA
catgcccttagtaggactagcaaacggagggactagccgtagtggcgagctccctgggtggtctaagtcctgagtacaggacagtcgtcagtagttcgacgtgggcagaagcccacctcgagatgctacgtggacgagggcatgcccaagacacaccttaaccctggcgggggtcgctagggtgaaatcacacaacgtgatgggagtacgacctgatagggtgctgcagaggcccactaacaggctagtataaaaatctctgctgtacatggcac

SEQ ID NO: 16762 - DNA, 275 bp, synthetic construct
  source 1..275: mol_type = other DNA
catgcccttagtaggactagcaaacggagggactagccgtagtggcgagctccctgggtggtctaagtcctgagtacaggacagtcgtcagtagttcgacgtgggcagaagcccacctcgagatgctacgtggacgagggcatgcccaagacacaccttaaccctggcgggggtcgctagggtgaaatcacacaacgtgatgggagtacgacctgatagggtgctgcagaggcccactgacaggctagtataaaaatctctgctgtacatggcac

SEQ ID NO: 16763 - DNA, 274 bp, synthetic construct
  source 1..274: mol_type = other DNA
atgcccttagtaggactagcaaacggagggactagccgtagtggcgagctccctgggtggtctaagtcctgagtacaggacagtcgtcagtagttcgacgtgggcagaagcccacctcgagatgctatgtggacgagggcatgcccaagacacaccttaaccctggcgggggtcgctagggtgaaatcacacaacgtgatgggggtacgacctgatagggtgctgcagaggcccactaacaggctagtataaaaatctctgctgtacatggcac

SEQ ID NO: 16764 - DNA, 275 bp, synthetic construct
  source 1..275: mol_type = other DNA
catgcccttagtaggactagcaaacggagggactagccgtagtggtgagctccctgggtggtctaagtcctgagtacaggacagtcgtcagtagttcgacgtgggcagaagcccacctcgagatgctacgtggacgagggcatgcccaagacacaccttaaccctggcgggggtcgctagggtgaaatcacacaacgtgatgggagtacgacctgatagggtgctgcagaggcccactaacaggctagtataaaaatctctgctgtacatggcac

SEQ ID NO: 16765 - DNA, 275 bp, synthetic construct
  source 1..275: mol_type = other DNA
catgcccttagtaggactagcaaacggagggactagccgtagtggcgagctccctgggtggtctaagtcctgagtacaggacagtcgtcagtagttcgacgtgggcagaagcccacctcgagatgctacgtggacgagggcatgcccaagacacaccttaaccctggcgggggtcgctagggtgaaatcactcaacgtgatgggagtacgacctgatagggtgctgcagaggcccactaacaggctagtataaaaatctctgctgtacatggcac

SEQ ID NO: 16766 - DNA, 255 bp, synthetic construct
  source 1..255: mol_type = other DNA
aaaacaaggagggtagcagcagtggtgagttcgttggatggctgaagcctgagtacagggtagtcgtcagtggtttgacgctttgtgtgacaagcctcaagatgccacgtggacgagggcatgcccacagcacatcttaacctgggcgggggtcgttcaggtgaaacggtttaaccaaccgctacgaatacagcctgatagggtgctgcagaggcccactgtattgctactaaaaatctctgctgtacatggcac

SEQ ID NO: 16767 - DNA, 259 bp, synthetic construct
  source 1..259: mol_type = other DNA
aaacggagggactagccatcatggtgagcttcctgagaggtctaagtcctgagtacaggacagtcgtcaatagttcgacacgcgcaagtcgcacgtctcgagatgctatgtggacgagggcatgcccaagacactttctctagcctgggcgggggtcgcccaggtgaaagcacctgagtggtgttggaagtacagcctgatagggtgctgcagaggcccatgcataggctagtataaaaatctctgccgtacatggaac

SEQ ID NO: 16768 - DNA, 259 bp, synthetic construct
  source 1..259: mol_type = other DNA
agacggagggactagccatcatggtgagcttcctgaggggtctaagtcctgagtacaggacagtcgtcaatagttcgacacgtgcgagtcgcacgtctcgagatgctatgtggacgagggcatgcccaagacactttctctagcctgggcgggggtcgcccaggtgaaagcacctgataggtgttgggagtacagcctgatagggtgctgcagaggcccatgcataggctagtataaaaatctctgctgtacatggcac

SEQ ID NO: 16769 - DNA, 256 bp, synthetic construct
  source 1..256: mol_type = other DNA
aattggggagggtagcagcagtggtgagttcgttggatggctgaagccctgagtacagggtagtcgtcagtggttcgacacctcaaggttgaggtctcgagatgccacgtggacgagggcatgcccacagcacatcctagtctgggcaggggtcgctcagatgaaagcggttgagtcaaccgttacggacacagcctgatagggtgctgcagaggcccactgtgttgctactaaaaatctctgctgtacatggcac

SEQ ID NO: 16770 - DNA, 258 bp, synthetic construct
  source 1..258: mol_type = other DNA
tgatggagggggtagcaacggtggtgagttcgttggatggcttaagccctgagtacagggcagtcgtcagtggttcgacaccttggaagaacaaggcctcgagatgccacgtggacgagggcatgcccaaagcacatcttagcctgggcgggggtcgctcaggtgaaagcagtctaatcaactgttgcgaatacagcctgatagggtgctgcagaggcccactgtattgctactaaaaatctctgctgtacatggcac

SEQ ID NO: 16771 - DNA, 258 bp, synthetic construct
  source 1..258: mol_type = other DNA
atacggagggggtagcaacagtggtgagttcgttggatggcttaagccctgagtacagggcagtcgtcagtggttcgacaccttgggagaacaaggcctcgagatgccacgtggacgagggcatgcccaaagcacatcttaacctgggcgggggtcgcctaggcgaaagcagtttaactaactgttacgaatacagcctgatagggtgctgcagaggcccactgtattgctactaaaaatctctgctgtacatggcac

SEQ ID NO: 16772 - DNA, 257 bp, synthetic construct
  source 1..257: mol_type = other DNA
aattgaggggggtagcaacagtggtgagttcgttggatggctgaagccctgagtacagggtagtcgtcagtggttcgacacctatggtgcgtaggtctcgagatgccacgtggacgagggcatgcccacagcacatcttagcctgggcgggggtcgctcaggtgaaagcggtttaaccaactgctacgaatacagcctgatagggtgctgcaggggcccactggactgctactaaaaatctctgctgtacatggcac

SEQ ID NO: 16773 - DNA, 257 bp, synthetic construct
  source 1..257: mol_type = other DNA
aattgaggggggtagcaacagtggtgagttcgttggatggctgaagccctgagtacagggtagtcgtcagtggttcgacacctacggcgtgtaggtctcgagatgccacgtggacgagggcatgcccacagcacatcttagcctgggcgggggtcgctcaggtgaaagcggtttaaccaactgctacgaatacagcctgatagggtgctgcaggggcccactggactgctactaaaaatctctgctgtacatggcac

SEQ ID NO: 16774 - DNA, 257 bp, synthetic construct
  source 1..257: mol_type = other DNA
aaaggaggggactagcggtagcagtgagttcattggatggcctaatccctgagtacagggaagtcgtcaatggttcgacactccatcagttgcggagtctcgagatgccatgtggacgagggcatgcccaaggcacatcttaacctatgcgggggttgcataggcgaaagcaccattcgtggtgttatggacacagcctgatagggtgtagcagagacctgctattccgctagtaaaaactctgctgtacatggcac

SEQ ID NO: 16775 - DNA, 256 bp, synthetic construct
  source 1..256: mol_type = other DNA
taatgaggggggtagcaacagtggtgagttcgttggatggcttaagccctgagtacagggtagtcgtcagtggttcgacgccttagtataaaggtctcgagatgccacgtggacgagggcacgcccaaagcacatcttaacctgagcgggggtcgctcaggcgaaagcagtttaaccaactgctacgaatacagcctgatagggtgctgcagaggcccactgtattgctactaaaaatctctgctgtacatggcac

SEQ ID NO: 16776 - DNA, 256 bp, synthetic construct
  source 1..256: mol_type = other DNA
aaataaggggggtagcaacagtggtgagttcgttggatggctgaagccctgagtacagggtagtcgtcagtggttcgacgctttggaggacaagcctcgagatgccacgtggacgagggcacgcccacagcacatcttaacctgagcgggggtcgttcaggtgaaaacggtttaaccaaccgctacgaatacagcctgatagggtgctgcagaggcccactgtattgctactgaaaatctctgctgtacatggcac

SEQ ID NO: 16777 - DNA, 256 bp, synthetic construct
  source 1..256: mol_type = other DNA
aaatgagaggggtagcaacagtggtgagttcattggatggctgaagccctgagtacagggtagtcgtcagtggttcgacacctcggaaagaaggtctcgagatgccacgtggacgagggcatgcccacagcacatcttaacctggacgggggtcgcccaggtaaaagcagtttaactaactgttatggacacagcctgatagggtgctgcagaggcccactgcattgctactaaaaatctctgctgtacatggcac

SEQ ID NO: 16778 - DNA, 256 bp, synthetic construct
  source 1..256: mol_type = other DNA
aaatgagaggggtagcaacagtggtgagttcattggatggctgaagccctgagtacagggtattcgtcagtggttcgacgcctcggaaagaaggtctcgagatgccacgtggacgagggcatgcccacagcacatcttaacctggacgggggtcgcccaggtaaaagcagtttaactaactgttatggacacagcctgatagggtgctgcagaggcccactgtgtagctactaaaaatctctgctgtacatggcac

SEQ ID NO: 16779 - DNA, 257 bp, synthetic construct
  source 1..257: mol_type = other DNA
aaaggaggggactagcggtagcagtgagttcattggatggccgaatccctgagtacagggaagtcgtcaatggttcgacactccaccagttgaggagtctcgagatgccatgtggacgagggcatgcccacggcacatcttaacctatgcgggggttgcatgggtgaaaacgccatttgtggcgctatgaacacagcctgatagggtgtagcagagacctgctattccgctagtaaaaactctgctgtacatggcat

SEQ ID NO: 16780 - DNA, 281 bp, synthetic construct
  source 1..281: mol_type = other DNA
gccatgcccttagtaggactagcaaaaggaggggactagcggtagcagtgagttcattggatggccgaatccctgagtacagggaagtcgtcaatggttcgacactccatcaatcgaggagtctcgagatgccatgtggacgagggcatgcccacggcacatcttaacctatgcgggggttgcatgggtgaaagcaccattcgtggtgttatggacacagcctgatagggtgtagcagagacctgctattccgctagtaaaaactctgctgtacatggcac

SEQ ID NO: 16781 - DNA, 378 bp, synthetic construct
  source 1..378: mol_type = other DNA
gcataatgctttgattggccgcattatgtatgggacatcctaaattgtcgtgagccctgtggtgagtgggggaaaggggtttaccaggcctctagtaccacaggcaccaatggacagggcaactcgaacctgagagagaggtaccgagctcttaagccccgagtacggggcagacgtcaccgagtagtacacccaaagaccaccacttctaggtgtagggtctactgaggctcgggtagacgtgggcgtgcccaaagagaaatcggtggtggacctgggggtcggggccaccatgcccctttatggggtagaccttactgcttgatagagtgccggcggatgcctcaggtaagagtataaaatccgttgtctattaac

SEQ ID NO: 16782 - DNA, 402 bp, synthetic construct
  source 1..402: mol_type = other DNA
gtgtgtgtatgtgtgtgggtgaatgtgtgtgcgtgtgtctgtgtgtgtgtgcgtgtgcgtgtgtgagtgagtgtgtgtgagtgagtgagtgtatgtaggtgtgtgtgtgtgcgtgtgcgtgtgtgtgtgtgttattctgacacgccaatttagtcgctaccaacatttaggtcgctacacagtttaaccactggttcaacgtttcagaatattgttaaattacaccaattcagaattgaacaacacccaatattgaatggtattataaaacaaacacaatataacataatataataaattataataaacaaaaaacacacacatagaacaaacaaacaaaaaacaaaacactcaaacaacatacttagaagaataacccggctgggtccacttctcaagaca

SEQ ID NO: 16783 - DNA, 343 bp, synthetic construct; identical to SEQ ID NO: 325
  source 1..343: mol_type = other DNA

SEQ ID NO: 16784 - DNA, 317 bp, synthetic construct; identical to SEQ ID NO: 302
  source 1..317: mol_type = other DNA

SEQ ID NO: 16785 - DNA, 768 bp, synthetic construct; identical to SEQ ID NO: 1228
  source 1..768: mol_type = other DNA

SEQ ID NO: 16786 - DNA, 891 bp, synthetic construct; identical to SEQ ID NO: 1289
  source 1..891: mol_type = other DNA

SEQ ID NO: 16787 - DNA, 779 bp, synthetic construct; identical to SEQ ID NO: 1239
  source 1..779: mol_type = other DNA

SEQ ID NO: 16788 - DNA, 442 bp, synthetic construct; identical to SEQ ID NO: 484
  source 1..442: mol_type = other DNA

SEQ ID NO: 16789 - DNA, 393 bp, synthetic construct; identical to SEQ ID NO: 429
  source 1..393: mol_type = other DNA

SEQ ID NO: 16790 - DNA, 384 bp, synthetic construct; identical to SEQ ID NO: 399
  source 1..384: mol_type = other DNA

SEQ ID NO: 16791 - DNA, 621 bp, synthetic construct; identical to SEQ ID NO: 723
  source 1..621: mol_type = other DNA

SEQ ID NO: 16792 - DNA, 1000 bp, synthetic construct; identical to SEQ ID NO: 136
  source 1..1000: mol_type = other DNA

SEQ ID NO: 16793 - DNA, 519 bp, synthetic construct; identical to SEQ ID NO: 16
  source 1..519: mol_type = other DNA

SEQ ID NO: 16794 - DNA, 870 bp, synthetic construct
  source 1..870: mol_type = other DNA
tgttacccacctaatttggtggtaccccccggtcccttccctctccccccatacagccggaacggaccacacacctccgggtttgtggcccaaccccgactcggggttgtggcggtggtcacagctccggctgtgacttcctaaccactcctttcacccacccctttcttacatttacttaagtttatgtttgccctctcatcccaaggccttggctcatgtcctttgaggctatctggcacaaacactctttgtttggcgtccggagacccactgagccaccacttatccgcgctcaatgcaacccccattagtaaccacgcaaatctaatagtggttctgcctcggcagcacctaagtgcccagggagcccaactggtgacagttgccctggggcccgaaaggctaggtggtaagggtctggccaagcaaggggcccccaccccaagctgaacccatggccccgaagccaccctttaggtggaggttatgtacccgatcgctattctatttgtttggcgaacctggccggaaacatttagtttgtggattcgttggtttgtggtgattagtagaccccctggaggtacccgttttggatctgaccagggacccgtgactataccgctccggtaattcgggtttaaaaccatgaacgtcaccacttgtcttcttttcccattttattcttcttatagtggtctgtttaaatgctcttagaatttctgttggtgactacggcacttgccatagtggttctttcccccagtgagttgcatcagctgcttgctatttgcgtatataattttgcattaattttcctctggttgctcggaattttggagctgcctagttaccccgctatacagc

SEQ ID NO: 16795 - DNA, 717 bp, synthetic construct; identical to SEQ ID NO: 115
  source 1..717: mol_type = other DNA

SEQ ID NO: 16796 - DNA, 633 bp, synthetic construct; identical to SEQ ID NO: 758
  source 1..633: mol_type = other DNA

SEQ ID NO: 16797 - DNA, 460 bp, synthetic construct; identical to SEQ ID NO: 498
  source 1..460: mol_type = other DNA

SEQ ID NO: 16798 - DNA, 639 bp, synthetic construct; identical to SEQ ID NO: 765
  source 1..639: mol_type = other DNA

SEQ ID NO: 16799 - DNA, 672 bp, synthetic construct; identical to SEQ ID NO: 812
  source 1..672: mol_type = other DNA

SEQ ID NO: 16800 - DNA, 906 bp, synthetic construct; identical to SEQ ID NO: 1295
  source 1..906: mol_type = other DNA

SEQ ID NO: 16801 - DNA, 407 bp, synthetic construct; identical to SEQ ID NO: 444
  source 1..407: mol_type = other DNA

SEQ ID NO: 16802 - DNA, 373 bp, synthetic construct; identical to SEQ ID NO: 360
  source 1..373: mol_type = other DNA

SEQ ID NO: 16803 - DNA, 428 bp, synthetic construct; identical to SEQ ID NO: 472
  source 1..428: mol_type = other DNA

SEQ ID NO: 16804 - DNA, 370 bp, synthetic construct; identical to SEQ ID NO: 350
  source 1..370: mol_type = other DNA

SEQ ID NO: 16805 - DNA, 970 bp, synthetic construct; identical to SEQ ID NO: 1301
  source 1..970: mol_type = other DNA

SEQ ID NO: 16806 - DNA, 380 bp, synthetic construct; identical to SEQ ID NO: 386
  source 1..380: mol_type = other DNA

SEQ ID NO: 16807 - DNA, 640 bp, synthetic construct; identical to SEQ ID NO: 768
  source 1..640: mol_type = other DNA

SEQ ID NO: 16808 - DNA, 975 bp, synthetic construct; identical to SEQ ID NO: 1302
  source 1..975: mol_type = other DNA

SEQ ID NO: 16809 - DNA, 557 bp, synthetic construct; identical to SEQ ID NO: 600
  source 1..557: mol_type = other DNA

SEQ ID NO: 16810 - DNA, 620 bp, synthetic construct; identical to SEQ ID NO: 60
  source 1..620: mol_type = other DNA

SEQ ID NO: 16811 - DNA, 533 bp, synthetic construct; identical to SEQ ID NO: 570
  source 1..533: mol_type = other DNA

SEQ ID NO: 16812 - DNA, 347 bp, synthetic construct; identical to SEQ ID NO: 330
  source 1..347: mol_type = other DNA

SEQ ID NO: 16813 - DNA, 560 bp, synthetic construct; identical to SEQ ID NO: 605
  source 1..560: mol_type = other DNA

SEQ ID NO: 16814 - DNA, 604 bp, synthetic construct; identical to SEQ ID NO: 656
  source 1..604: mol_type = other DNA

SEQ ID NO: 16815 - DNA, 843 bp, synthetic construct; identical to SEQ ID NO: 1286
  source 1..843: mol_type = other DNA

SEQ ID NO: 16816 - DNA, 504 bp, synthetic construct
  source 1..504: mol_type = other DNA
gtctctttagtgtctatgcttcagagagcggtgaactgacaccgttgcttcttgcacagcccttcgtgccggtctttccggttctcgacagcgttgggcatcatggctagttaggctaagatagtggatgatctagtgaacagttttggattgtttggagttttgtagcgatgctagtagtgtgtgtggacctccccacgtggtaacacgtgccccacaggccaaaagccaaggtgttgaaagcacccctactagtcccagactcacccatctgggaactcctctcatgaaaaatcttagtaacttttgattcggctattcatcaacctctctagtcaagggctgaaggatgcccggaaggtacccgcaggtaacgataagctcactgtggatctgatccggggctttggtgcgaccgtctgtccggcgtagccagagttaaaaaacgtctaggcccttccaccccaagggattggggtttccccaatcatttgaaagttcact

SEQ ID NO: 16817 - DNA, 752 bp, synthetic construct; identical to SEQ ID NO: 1208
  source 1..752: mol_type = other DNA

SEQ ID NO: 16818 - DNA, 702 bp, synthetic construct
  source 1..702: mol_type = other DNA
tactatcatcattatcattattttcattataaaattcattttaaatatcaaaattcaaaatataaaatttagaaaaacccaaaaatattataaaatttaataaaatacaaaaatattacaaaattagaaaaacccaaaaatattattaaaatttgaatctcgtcaatatcatttcatacatattctttataatgtcttatttaaactgtctggagaaatcttactgtaaaacttgatacactttgcagtattgtatttttctttggcgggagatgttataaagtcttatgattcaatatttaatccaactcaagttagtagcttgttttacagcatttgtgcttattagatagtggtttacgagagagctaatgccataggaagaggtgtccattgataccatggtgctccgttgttaatcaaactccttatgagtccacaaattatttgataagtataatatgcaatactcaggattaaatgaatcaaatttggaagaaattagaatctcaaatttgaaaccctggttttatcatatttattacctataaattaaatatggctgtgtgataacagtataaactaatctacgtactcacaataatacgtacaaattactgtggctagatacaactagtataaacaatattggtttttctattatgttaccaatcaaataaacataatgagcactaatttaaa

SEQ ID NO: 16819 - DNA, 828 bp, synthetic construct; identical to SEQ ID NO: 1283
  source 1..828: mol_type = other DNA

SEQ ID NO: 16820 - DNA, 644 bp, synthetic construct; identical to SEQ ID NO: 777
  source 1..644: mol_type = other DNA

SEQ ID NO: 16821 - DNA, 721 bp, synthetic construct; identical to SEQ ID NO: 896
  source 1..721: mol_type = other DNA

SEQ ID NO: 16822 - DNA, 713 bp, synthetic construct; identical to SEQ ID NO: 114
  source 1..713: mol_type = other DNA

SEQ ID NO: 16823 - DNA, 704 bp, synthetic construct
  source 1..704: mol_type = other DNA
cgccgcgtgtgtcttgacaccgcgctgctcaggatgcttctgccccgtgctttggacgcctaccagggcgttaaactggtcccccccttaccctttccccgtaactaagtttgtacctcccccacataggctgctaagacgcttgttgctacagcatatgcggatcagggagttctccatgagtaatcttttccaccctctttagtgtctatgctattgagggcgggttggagccccgttgacctagtgtcagagtgtgtcggtagcaggctttctgctctcgccccgtgccggccacacctcccgtcagtaatgtgaagactgcaagttgcatgtgaagaggtttctagtatttgagctgaatgtagcgattacccaaggtgagcggatttccccacgtggtaacacgtgcctctcaggccaaaagccaaggtgttaaaagcaccccttgggtagaccactaccccgtggtctcagttctcttagtagattcacttagtaatgtgcacactggcagctcccaagcagagctggcgagtgggctaaggatgccctgaaggtacccgcaggtaacgttaagacactgtggatctgatcaggggctcgagtgctgaagctttacagaggcagctcgagttaaaaaacgtctatgcccctcccccacgggagtgggggttcccccacaccaattttcagattgcact

SEQ ID NO: 16824 - DNA, 703 bp, synthetic construct
  source 1..703: mol_type = other DNA
cgccacgtgtgtctcgacaccgtgttgctcaggatgcttctgccccgtgctttggacgcctaccagggcgttaaactggtcccccccttgccctttccccgtaacaaagtttgtaccccccccatataggctgccaagacgcttgttgctacagcatatgtggatcagggagttctccataagtaatcttttccaccatctttagtgtctatgctaacgatgacgggttggagccccgttgacctagtgtcagagtgtgtcggtagcaggctttctgctctcgccccatgccggccacacctcccgtcagcaatgtgaagactgcaggttgcacgtgaaaaggtttctgatatttgaactgaatgtagcgattacccaaggtgagcggacttccccacgtggtaacacgtgcctctcaggccaaaagccaaggtgttaaaagcaccccttgggtagaccactaccccgtggtctcagctctcttagaagattcacttagtaatgtgcacactggcagctcccaagcagagctggcgagcgggctaaggatgccctgaaggtacccgcaggtaacgttaagacactgtggatctgatcaggggctcgagtgctgaagctttacagaggtagctcgagttaaaaaacgtctatgcccctcccccacgggagtgggggttcccccacaccaattttagactgcact

SEQ ID NO: 16825 - DNA, 692 bp, synthetic construct
  source 1..692: mol_type = other DNA
tcgacgagtcaccgcccaggattctctctgcccttgctttgaacgcccgccatggcgttaaactggcacttcccctacccctaccccgtaactaagtttgcacctcgcccagacaggctgctaagacgcttgttgctacagtatgtctggaatcgcgagttctccctaagaaatcttttccacctccgccggtgcctatgccggtcgagacgggttaggaccccgttggctcaggccagagacagtcggtagtagtctttctactctcgcccatgccggctgtcacaccctcactagctttatcaagattgtaagctgtctgtgaaagctttgcttgaactttgctgtgttgtagcgatggatgtgttgtgagcggactcccccacgtggtaacacgtgcctctcagaccaaaagtcacggtgttaacagcacccgcacatctggccgcctcccccgcggcccacagctctgtgattgcttagttagtaatggaacaattggcaactctgaattaaagctagtgcaacggctaaggatgccctgaaggtacccgcaggtaacgttaagacactgtggatctgatcaggggccctcggtgcgcgtgctttacacgcgtagccagggttaaaaaacgtctatgccgtttcccccccgggagggggggttccttacccccatcacaattgacatc

SEQ ID NO: 16826 - DNA, 667 bp, synthetic construct
  source 1..667: mol_type = other DNA
cttctgccccgtgttttggacgcccggcatggcgttaaactgtcattccccctaccctttccctatttgtaactaagttgtacctcgcccagacaggctgctaagacgcttgttgctacagcatgtttggactagcgagctctccataagtaaacttttccacccccttgggtgtctttgcccttggggacggtctggagccccgttgtcttagacagagtgtgtcggtgcaggctttctgctctggacccatgccggccacaaactcccatcagtgttgtgaagacggcaggacacaagtgaacaggtacagggaactttcttggaatgtagcgattactgcaagtgagcggacctcccctggtggtaacaccagcctctcaggccaaaagccacggtgttaacagcacccttgcagtaggccactgccccgtggtctccaggatctttctctttactcctagtaatttgtgagtctagctgttctgaagcatactggtgcaaaggctaaggatgccctgaaggtacccacaggtaacgttaagacactgtggatctgatcaggggcctgaatactgaagctttacagaggtagttcaggttaaaaaacgtctatgcctttcccccacgggagtgggggttcccccacacttttatcacaggcact

SEQ ID NO: 16827 - DNA, 776 bp, synthetic construct; identical to SEQ ID NO: 1237
  source 1..776: mol_type = other DNA

SEQ ID NO: 16828 - DNA, 588 bp, synthetic construct
  source 1..588: mol_type = other DNA
tgtgatcctcccccgcccagcgtctaccgttcccccatccccactcctctccgcgcagaacctagtaagactcttgaaagtgatgtagttttgaccccaccatcaatcccggatggaagaaacatgtgatgaggctcgcccactcacctatggtaacataggggcttgcctgcgtggcacatggaacgaccagtcttgtgggaaaaccgctaccctgtctccgaggagactgatgggatatgtttgtacctatgtattggaagttatactacacattagtaaggatatgaagagtcgagtgccgttggagtgtatcctccggacccgtgaatgcggctaactccctccctcaagctcgcaaccagaatccactggtgctgttctccgtttaactacgtggggcacgcgagtcgtaacgcgtaagttgaggacgagaccgactactttcggtgttccgtgtttctataaaatttttattattattgtatggtgacaaattgtgatatatagttttattgctgttcctttgctatttataaaattacaaaaagagtatatagagaaaatttctactacaaatcttttaca

SEQ ID NO: 16829 - DNA, 900 bp, synthetic construct; identical to SEQ ID NO: 1292
  source 1..900: mol_type = other DNA

SEQ ID NO: 16830 - DNA, 899 bp, synthetic construct; identical to SEQ ID NO: 1290
  source 1..899: mol_type = other DNA

SEQ ID NO: 16831 - DNA, 894 bp, synthetic construct; identical to SEQ ID NO: 134
  source 1..894: mol_type = other DNA

SEQ ID NO: 16832 - DNA, 897 bp, synthetic construct; identical to SEQ ID NO: 135
  source 1..897: mol_type = other DNA

SEQ ID NO: 16833 - DNA, 904 bp, synthetic construct; identical to SEQ ID NO: 1293
  source 1..904: mol_type = other DNA

SEQ ID NO: 16834 - DNA, 905 bp, synthetic construct; identical to SEQ ID NO: 1294
  source 1..905: mol_type = other DNA

SEQ ID NO: 16835 - DNA, 667 bp, synthetic construct; identical to SEQ ID NO: 807
  source 1..667: mol_type = other DNA

SEQ ID NO: 16836 - DNA, 982 bp, synthetic construct
  source 1..982: mol_type = other DNA
agttatggctatgcctttgtgcatatgctcgatgtctctcccttttatgaccttttcccgaccaacatctcatgtcggattaaactggatgatcttttaagactccctaacccagaattcctccggggtactcctgtggatctagcttatactggattcccgcccggcgttgttcgatctgaacggcgttagtttcacctgtggtagcctctgcggagggcccacggcgtttagtggttctgcctaaggacaaccacctaacctacccatgtctctatcgtccctactagttttaggcagtattgtacgctctttatacaaatctgtcaaccctttgtataactctaagccgaacaattatagctaggctttttattatataacattaattaggcattagcgttgtcgccaatctcttggtaatcctaaggatacctttcctgttgactaagatgaagcgccttcggttaccgatgcccggtgtccacgaagccatcgtggtcggccgcgtcccccacctctcccaacttggactccatgttttcagtaggtgtaatgattagtattattgattctgctcgttcaatgtgtttatcttcacgatctgggacccaacacatgcttcactcatgtttaaatgttggttccctcattttgaagacacccaaaccatagagtgcgagaatgaggatttctacttccattctggtaacagaaatgaattcctgcgtgtgtctcgtaaatggaatctttaagaacttcagataaatcgaacaatacactaatacaagttgttttctaccaacatgttcaatgcggctaatctgaccgtggagctgtgaagcgctcaaacccgagtgttgtatacagtcgtaatgcgtaagtccatgaggaaccgactactgttacctctgttggtgtgtttctcctttattctcttttattattatttgttattgcaaatactacaactttgatcaac

SEQ ID NO: 16837 - DNA, 588 bp, synthetic construct; identical to SEQ ID NO: 638
  source 1..588: mol_type = other DNA

SEQ ID NO: 16838 - DNA, 584 bp, synthetic construct; identical to SEQ ID NO: 635
  source 1..584: mol_type = other DNA

SEQ ID NO: 16839 - DNA, 982 bp, synthetic construct
  source 1..982: mol_type = other DNA
agttatggctatgcctttgtgcatatgctcgatgtctctcccttttatgaccttttcccgaccaacatctcatgtcggattaaactggatgatcttttaagactccctaacccagaattcctccggggtattcctgtggatctagcttatactggattcccgcccggcgttgttcgatctgaacggcgttagtttcacctgtggtagcctctgcggagggcccacggcgtttagtggttctgcctaaggacaaccacctaacctacccatgtctctatcgtccctactagttttaggcagtattgtacgctctttatacaaatctgtcaaccctttgtataactctaagccgaacaattatagctaggctttttattatataacattaattaggcattagcgttgtcgccaatctcttggtaatcctaaggatacctttcctgttgactaagatgaagcgccttcggttaccgatgcccggtgtccacgaagccatcgtggtcggccgcgtcccccacctctcccaacttggactccatgttttcagtaggtgtaatgattagtattattgattctgctcgttcaatgtgtttatcttcacgatctgggacccaacacatgcttcactcatgtttaaatgttggttccctcattttgaagacacccaaaccatagagtgcgagaatgaggatttctacttccattctggtaacagaaatgaattcctgcgtgtgtctcgtaaatggaatctttaagaacttcagataaatcgaacaatacactaatacaagttgttttctaccaacatgttcaatgcggctaatctgaccgtggagctgtgaagcgctcaaacccgagtgttgtatacagtcgtaatgcgtaagtccatgaggaaccgactactgttacctctgttggtgtgtttctcctttattctcttttattattatttgttattgcaaatactacaactttgatcaac

SEQ ID NO: 16840 - DNA, 588 bp, synthetic construct
  source 1..588: mol_type = other DNA
gttcgtatgccaacggatcgatttccctgttacagcctctttgcttccccaccccactcctctctgtggagagcctagtaggattcttgaaagcaaatatctgttgaccccaccttcaatcccggaaggaagaaaccgagaatgagactcgtctattcccccatggtgacatggagacttgtctgcgtgtgtctcgggctcccttatgagtattgtgggagaaccgctaccctgactccgaggagtctgatgggatatgttagtacctatgaaaataaggtgacaggttttgttagtatggatacgaagagccgactgccgttggagtgtatcctccggacccgtgaatgcggctaaccctaaccctggatcaagtgctcacaaaccagtgagtggcttgtcgtaacgcgcaagtctgggatgggaccgactactttcggtgttccgtgtttctatttattttatcaataaagttttatggtgacaatcttgtgatattaagatataaagcttttatccttttgtttattgattatcttaaatagattgcttggtggtgatttaaaatagagatagttattattagag

SEQ ID NO: 16841 - DNA, 516 bp, synthetic construct; identical to SEQ ID NO: 541
  source 1..516: mol_type = other DNA

SEQ ID NO: 16842 - DNA, 481 bp, synthetic construct; identical to SEQ ID NO: 13
  source 1..481: mol_type = other DNA

SEQ ID NO: 16843 - DNA, 566 bp, synthetic construct; identical to SEQ ID NO: 615
  source 1..566: mol_type = other DNA

SEQ ID NO: 16844 - DNA, 538 bp, synthetic construct; identical to SEQ ID NO: 576
  source 1..538: mol_type = other DNA

SEQ ID NO: 16845 - DNA, 530 bp, synthetic construct; identical to SEQ ID NO: 562
  source 1..530: mol_type = other DNA

SEQ ID NO: 16846 - DNA, 538 bp, synthetic construct
  source 1..538: mol_type = other DNA
cagggagttctccataagtaatcttttccaccatctttagtgtctatgctaacgatgacgggttggagccccgttgacctagtgtcagagtgtgtcggtagcaggctttctgctctcgccccatgccggccacacctcccgtcagcaatgtgaagactgcaggttgcacgtgaaaaggtttctgatatttgaactgaatgtagcgattacccaaggtgagcggacttccccacgtggtaacacgtgcctctcaggccaaaagccaaggtgttaaaagcaccccttgggtagaccactaccccgtggtctcagctctcttagaagattcacttagtaatgtgcacactggcagctcccaagcagagctggcgagcgggctaaggatgccctgaaggtacccgcaggtaacgttaagacactgtggatctgatcaggggctcgagtgctgaagctttacagaggtagctcgagttaaaaaacgtctatgcccctcccccacgggagtgggggttcccccacaccaattttagactgcact

SEQ ID NO: 16847 - DNA, 301 bp, synthetic construct; identical to SEQ ID NO: 280
  source 1..301: mol_type = other DNA

SEQ ID NO: 16848 - DNA, 470 bp, synthetic construct
  source 1..470: mol_type = other DNA
ctgacaccgttgcttcttgcacagcccttcgtgccggtctttccggttctcgacagcgttgggcatcatggctagttaggctaaggtagtaaatgatctagtgaaaagttttggattgtttggagttttgtagcgatgctagtagtgtgtgtggatctccccacgtggtaacacgtgccccacaggccgaaagccaaggtgttaaaagcacccctactagtcccagaccatcccatctgggagctcctctcatgaaaaatcctagtaacttttgatttggctactcatcaacctctctagtcaagggctgaaggatgcccggaaggtacccgcaggtaacgataagctcactgtggatctgatccggggccttggtgcgaccgtctgtccggcgtagccagggttaaaaaacgtctaggcccttctaccccaagggattggggtttccccaatcattttagaggttcaat

SEQ ID NO: 16849 - DNA, 341 bp, synthetic construct; identical to SEQ ID NO: 324
  source 1..341: mol_type = other DNA

SEQ ID NO: 16850 - DNA, 833 bp, synthetic construct; identical to SEQ ID NO: 133
  source 1..833: mol_type = other DNA

SEQ ID NO: 16851 - DNA, 706 bp, synthetic construct; identical to SEQ ID NO: 102
  source 1..706: mol_type = other DNA

SEQ ID NO: 16852 - DNA, 1000 bp, synthetic construct; identical to SEQ ID NO: 1455
  source 1..1000: mol_type = other DNA

SEQ ID NO: 16853 - DNA, 1000 bp, synthetic construct
  source 1..1000: mol_type = other DNA
ccgtgcgtctactaacacagctctcacagaatacttgcccccatccattcaaatccaaacatttcatgatacggatggcgtaactgcatgggaagtgcctggggccctagacatggtgacatgttccccagggtccaaaagactagtgggtcaaaactcacctttcctgacctctttgaggcatccgtatcatgaaatgtttggatttgaatggatgggggcaagtattctgtgagagctgtgttagtagacgcacgggaggtacccttctaggatctgactcgtgttacacttgggtctatccccatgatgtattcaagaaccaacgcacagctctcacagaatacttgcccccatccattcaaatccaaacatttcatgatacggatgcctcaaagaggtcaggaaaggtgagttttgacccactagtcttttggaccctggggaacatgtcaccatgtctagggccccaggcacttcccatgcagttacgccatccgtagcactactaagaatggttcaaacttttgtaagggctttctcccggtttgactgcctgctgaatctgatgttaactttggtgactagacgtgtagcttagcacgagactgggtcttatttataccagtataagccgggagaaagcccttacaaaagtttgaaccattcttagtagtgctacggatggcgtaactgcatgggaagtgcctggggccctagacatggtgacatgttccccagggtccaaaagactagtgggtcaaaactcacctttcctgacctctttgaggcatccgtatcatgaaatgtttggatttgaatggatgggggcaagtattctgtgagagctgtgttagtagacgcacgggaggtacccttctaggatctgactcgtgttacacttgggtctatccccatgatgtattcaagaaccaacgcacagctcgcctcttttttctttattttattctactaattgtgcacttgattgaatctgact

SEQ ID NO: 16854 - DNA, 761 bp, synthetic construct; identical to SEQ ID NO: 1224
  source 1..761: mol_type = other DNA

SEQ ID NO: 16855 - DNA, 624 bp, synthetic construct; identical to SEQ ID NO: 735
  source 1..624: mol_type = other DNA

SEQ ID NO: 16856 - DNA, 1000 bp, synthetic construct; identical to SEQ ID NO: 1456
  source 1..1000: mol_type = other DNA

SEQ ID NO: 16857 - DNA, 651 bp, synthetic construct; identical to SEQ ID NO: 786
  source 1..651: mol_type = other DNA

SEQ ID NO: 16858 - DNA, 1000 bp, synthetic construct
  source 1..1000: mol_type = other DNA
ggtttggatcttggatctctctccttccttcccccgtcttcaatttagcttcgtgattgaagcatctcactgtctctagtatttatgtcgaactgacgattgagtacgttcagattgtgtttgggaggcccaagggaccgatggacaacacttcgaaagagtcacttgtccaccgctcctttcccctaccctagcaactctggatttgctcacgtggagttcgaggtctatactttaactctgacttgcttttcttaccttgctatcttgctgacgtggattggttgtagactggttcacgttcccgttagatgctgacgtggagtacgatcgctgtacattccactactgccaattagctcccccttcccgttgctcccctctataaggagagccttctcttgcaaaggtgaagccttcacccccggtcgaagccgcttggaataagacagggttattttctcctcttctcggcgcttgccttttctaagctgaataggtcctatctattcaggcggatggtctggtccgttcctccttggacagagtgtgtatctgggttttccggatctcgaccgcacactcaccagagctcaggagtgactaagtcaaggcccgatctgcggcgaaaaggaaatgaagtattttgcagctgtagcgacctctcaaggccagcggatctccccacctggtaacaggtgcctctggggccaaaagccacgtgttaatagcacccttgagagcggtggtaccccaccaccctgcaaactatggatttgacttagtaaccaaaagattgacttggcatacctcaacctgagcggcggctaaggatgccctgaaggtacccgtgttgaaatcgcttcggcgaccatggatctgatcaggggccctgcctggagtggttctgtcccacacagcgtagggttaaaaaacgtctaaccgccccacaatgaccccggcagggatgccggtttcctttttaccaaatcttgacact

SEQ ID NO: 16859 - DNA, 797 bp, synthetic construct; identical to SEQ ID NO: 1241
  source 1..797: mol_type = other DNA

SEQ ID NO: 16860 - DNA, 750 bp, synthetic construct; identical to SEQ ID NO: 1201
  source 1..750: mol_type = other DNA

SEQ ID NO: 16861 - DNA, 820 bp, synthetic construct; identical to SEQ ID NO: 1270
  source 1..820: mol_type = other DNA

SEQ ID NO: 16862 - DNA, 712 bp, synthetic construct; identical to SEQ ID NO: 866
  source 1..712: mol_type = other DNA

SEQ ID NO: 16863 - DNA, 712 bp, synthetic construct; identical to SEQ ID NO: 1348
  source 1..712: mol_type = other DNA

SEQ ID NO: 16864 - DNA, 712 bp, synthetic construct; identical to SEQ ID NO: 1349
  source 1..712: mol_type = other DNA

SEQ ID NO: 16865 - DNA, 606 bp, synthetic construct; identical to SEQ ID NO: 41
  source 1..606: mol_type = other DNA

SEQ ID NO: 16866 - DNA, 717 bp, synthetic construct; identical to SEQ ID NO: 1336
  source 1..717: mol_type = other DNA

SEQ ID NO: 16867 - DNA, 735 bp, synthetic construct
  source 1..735: mol_type = other DNA
ggggggcctcggccccctcaccctcttttccggtggtctggtcccggaccaccgttactccattcagcttcttcggaacctgttcggaggaattaaacgggcacccactcatccctacctccccctgtaacttgaagtgtgtgctcgtgaccttgactcctgcgggcttcaccgacccgtccagtgaacaaactgctaggtgatttcttcccctcccctgacctggatgttccacatccaggtcttcctcccccagcccgacatgtcatgggctgtttggaatccccgcgaaagctgctaacgtggcaattgtgggtcccccttccaacaagacaccgagtctttctcccttaaggctagccccgtgtggtgaattccaccgggcaactagtgatgtcaatgcatgcctccgacctcggccgcggagtgctgccccccaagttgcgaaactgaccaaggattgtgctgcctggcaagcatagtctgaggagatgttccgctgtggctgccaaacctggtaacaggtgccccagtgcgcgtagtctccttccggttcgtccggctgtcctttggtaaagacacaatgtaaggggcgtgtgccaacgccctggaaagagtgaacttctactgccctaggaatgccacgcaggtacccctggtctcctaccagggatctgagcgtgggctaattgtctaacgggtagtttcatttctctcctcccttttgttgacacc

SEQ ID NO: 16868 - DNA, 720 bp, synthetic construct; identical to SEQ ID NO: 895
  source 1..720: mol_type = other DNA

SEQ ID NO: 16869 - DNA, 727 bp, synthetic construct; identical to SEQ ID NO: 1308
  source 1..727: mol_type = other DNA

SEQ ID NO: 16870 - DNA, 533 bp, synthetic construct
  source 1..533: mol_type = other DNA
acatgggtaggacctttcactccaaatccctttcccctttttctacttcttagtacgcctcggcttgctcatccgttgtgtgctcaaactcccttctcccacaccctttttccctccccctcccgagtgactcgcacttagtcgtaggtttggtgtctttcaccatttctgtgcctatctatgtgtcctttggatccgccctcgaatgccctctagggtcttctgcgaaagcttgcaaagccgcgccccccctccactgttcttggggaccgtgcgcagccggaacttttgacatctgactgaacagtacagcaatgtagcatgtctcttgtctttgccggttagcccttgtggtcaaactttgtaagttagtacacttaagtactctcctgtggtttctcttgggaccttccaattgtaggaatccttggtatgccttcgaatagggacggacgctctaaatgccccgttcgcgaagtcgacgcctgaatgaccaaggtttttccacctttcctcaaaacccctctttttta

SEQ ID NO: 16871 - DNA, 710 bp, synthetic construct; identical to SEQ ID NO: 1309
  source 1..710: mol_type = other DNA

SEQ ID NO: 16872 - DNA, 710 bp, synthetic construct; identical to SEQ ID NO: 1311
  source 1..710: mol_type = other DNA

SEQ ID NO: 16873 - DNA, 712 bp, synthetic construct; identical to SEQ ID NO: 1306
  source 1..712: mol_type = other DNA

SEQ ID NO: 16874 - DNA, 712 bp, synthetic construct; identical to SEQ ID NO: 1305
  source 1..712: mol_type = other DNA

SEQ ID NO: 16875 - DNA, 677 bp, synthetic construct; identical to SEQ ID NO: 1314
  source 1..677: mol_type = other DNA

SEQ ID NO: 16876 - DNA, 677 bp, synthetic construct; identical to SEQ ID NO: 1312
  source 1..677: mol_type = other DNA

SEQ ID NO: 16877 - DNA, 677 bp, synthetic construct; identical to SEQ ID NO: 1315
  source 1..677: mol_type = other DNA

SEQ ID NO: 16878 - DNA, 664 bp, synthetic construct; identical to SEQ ID NO: 1316
  source 1..664: mol_type = other DNA

SEQ ID NO: 16879 - DNA, 577 bp, synthetic construct
  source 1..577: mol_type = other DNA
tttgaaaagggggtgggggggcctcggccccctcaccctcttttccggtggccactcgcccgggccaccgttactccactccactccttcgggactggtttggaggaacacaacagggcttcccatccctgttcaccctacactccacataccctttccctcaaccaaccctatccaaaccccactgaccgactcccttggattttgacctcagaatgcctacttgacctcccacttgcctctcccttctcggattgccggtggtgcctggcggaaaaagcacaagtgtgttgcaggctatcaaacttctacccgacaaaggcgcgtgtccgcgtgctgagtaatgggataggagatgcctacaacaggctcgcccatgagtagagcatggactgcggtgcatgtgacttcggtcaccacgggcatagcattgctcacccgtgaatcaagtcatcgagatttctctgacctctgaagtgcactgtggttgcgtggctgggaatccatgcttgaccatgtactgcttgatagagtcgcggctggccgactcatgggttaaagtcagttgacaagacac

SEQ ID NO: 16880 - DNA, 679 bp, synthetic construct; identical to SEQ ID NO: 1307
  source 1..679: mol_type = other DNA

SEQ ID NO: 16881 - DNA, 646 bp, synthetic construct; identical to SEQ ID NO: 1350
  source 1..646: mol_type = other DNA

SEQ ID NO: 16882 - DNA, 576 bp, synthetic construct
  source 1..576: mol_type = other DNA
tttgaaaagggggtgggggggcctcggccccctcaccctcttttccggtggccactcgcccgggccaccgttacttcactccactccttcgggactggtttggaggaacacaacagggcttcccaacccctgttacccttactctaattcccttttccctcaaccaaccctttccactccccactgactgactcccttggattttgacctcagaatgcctacttgacctcccacttgcctttcccttctcggattgccggtggtgcctggcggaaaaagcacaagtgtgttgcaggctaccaaactcctacccgacaaaggtgcgtgtccgcgtgctgagtaatgggataggagatgcctacaacaggctcgcccatgagtagagcatggactgcggtgcatgtgacttcggtcaccacgggcatagcattgctcacccgtgaatcaagtcatcgagatttctctgacctctgaagtgcactgtggttgcgtggctgggaatccacgcttgaccatgtactgcttgatagagtcgcggctggccgactcatgggttaaagtcagttgacaagacac

SEQ ID NO: 16883 - DNA, 576 bp, synthetic construct
  source 1..576: mol_type = other DNA
tttgaaaagggggtgggggggcctcggccccctcaccctcttttccggtggccacccgcccgggccaccgttactccactccactccttcgggactggtttggaggaacataacagggcttcccatccctgtttacccttactccactcacccttccccttgaccaaccctatccacaccccactgactgactcctttggatcttgacctcggaatgcctacttgacctcccacttgcctctcccttttcggattgccggtggtgcctggcggaaaaagcacaagtgtgttgttggctaccaaactcctacccgacaaaggtgcgtgtccgcgtgctgagtaatgggataggagatgccaataacaggctcgcccatgagtagagcatggactgcggtgcatgtgacttcggtcaccaggggcatagcattgctcacccctgaatcaagtcatcgagatttctctgacctctgaagtgcactgtggttgcgtggctgggaatccacgcttgaccatgtactgcttgatagagtcgcggctggccgactcatgggttaaagtcagttgacaagacac

SEQ ID NO: 16884 - DNA, 576 bp, synthetic construct
  source 1..576: mol_type = other DNA
tttgaaaagggggtgggggggcctcggccccctcaccctcttttccggtggccacccgcccgggccaccgttactccactccactccttcgggactggtttggaggaacataacagggcttcccatccctgtttacccttactccactcacccctccccttgaccaaccctatccacaccccactgactgactcctttggatcttgacctcggaatgcctacttgacctcccacttgcctctcccttttcggattgccggtggtgcctggcggaaaaagcacaagtgtgttgttggctaccaaactcctacccgacaaaggtgcgtgtccgcgtgctgagtaatgggataggagatgccaataacaggctcgcccatgagtagagcatggactgcggtgcatgtgacttcggtcaccaggggcatagcattgctcacccctgaatcaagtcatcgagatttctctgacctctgaagtgcactgtggttgcgtggctgggaatccacgcttgaccatgtactgcttgatagagtcgcggctggccgactcatgggttaaagtcagttgacaagacac

SEQ ID NO: 16885 - DNA, 576 bp, synthetic construct
  source 1..576: mol_type = other DNA
tttgaaaagggggtgggggggcctcggccccctcaccctcttttccggcggccactcgcccgggccaccgttacttcactccactccctcgggactggtttggaggaacataacagggcttcccatccctgtttacccttactctgacaacccttccccttaatcaaccctatccacaccccactgactgactcctttggattttgacctcagaatgcctacttgacctcccacttgcctctccctcctcggattgccggtggtgcctggcggaaaaagcacaagtgtgttgcaggctaccaaactcctacccgacaaaggtgcgtgtccgcgtgctgagtaatgggataggagatgcctacaacaggctcgcccatgggtagagcatggactgcggtgcatgtgacttcggtcaccacgggcatagcattgctcacccgtgaatcaagtcatcgagatttctctgacctctgaagtgcactgtggttgcgtggctgggaatccacgcttgaccatgtactgcttgatagagtcgcggctggccgactcatgggttaaagtcagttgacaagacac

SEQ ID NO: 16886 - DNA, 576 bp, synthetic construct
  source 1..576: mol_type = other DNA
tttgaaaagggggtgggggggcctcggccccctcaccctcttttccggtggccactcgcccgggccaccgttacttcactccactccttcgggactggtttggaggaacataacagggcttcccatccctgtttaccctcattccactcaccccttccctaaaccaaccctatccacaccccactgactgactcctttggattttgacctcagaatgcctacctgacctcccacttgcctctcccttctcggattgccggtggtgcctggcggaaaaagcacaagtgtgttgcaggctaccaaactcctacccgacaaaggtgcgtgtccgcgtgctgagtaatgggataggagatgtctacaacaggctcgcccatgagtagagcatggactgcggtgcatgtgacttcggtcaccacgggcatagcattgctcacccgtgaatcaagtcatcgagatttctctgacctctgaagtgcactgtggttgcgtggctgggaatccacgcttgaccatgtactgcttgatagagtcgcggctggccgactcatgggttaaagtcagttgacaagacac

SEQ ID NO: 16887 - DNA, 576 bp, synthetic construct
  source 1..576: mol_type = other DNA
tttgaaaagggggtgggggggcctcggccccctcaccctcttttccggtggccacccgcccgggccaccgttactccactccactccttcgggactggtttggaggaacataacagggcttcccatccctgtttacccttactccactcacccttctccttgaccaaccctatccacaccccactgactgactcctttggattttgacctcagaatgcctacctgacctcccacttgcctctcccatctcggactgccggtggtgcctggcggaaaaagcacaagtgtgttgatggctaccaaactcctacccgacaaaggtgcgtgtccgcgtgctgagtaatgggataggagatgccattgacaggctcgcccatgagtagagcatggactgcggtgcatgtgacttcggtcaccaggggcatagcattgctcacccctgaatcaagtcatcgagatttctctgacctctgaagtgcactgtggttgcgtggctgggaatccacgcttgaccatgtactgcttgatagagtcgcggctggccgactcatgggttaaagtcagttgacaagacac

SEQ ID NO: 16888 - DNA, 576 bp, synthetic construct
  source 1..576: mol_type = other DNA
tttgaaaagggggtgggggggcctcggccccctcaccctcttttccggtggccattcgcccgggccaccgttactccactccactccttcgggactggtttggaggaacacaacagggcttcccatccctgtttaccctttattccatcatcctttccccaagtttaccctatccacaccccactgactgactcctttggattttgacctcagaatgcctatttgacctcccactcgcctctcccttttcggattgccggtggtgcctggcggaaaaagcacaagtgtgttgcaggctaccaaactcctacccgacaaaggtgcgtgtccgcgtgctgagtaatgggataggagatgcctacaacaggctcgcccatgagtagagcatggactgcggtgcatgtgacttcggtcaccacgggcatagcattgctcacccgtgaatcaagtcatcgagatttctctgacctctgaagtgcactgtggttgcgtggctgggaatccacgcttgaccatgtactgcttgatagagtcgcggctggccgactcatgggttaaagtcagttgacaagacac

SEQ ID NO: 16889 - DNA, 576 bp, synthetic construct
  source 1..576: mol_type = other DNA
tttgaaaagggggtgggggggcctcggccccctcaccctcttttccggtggccacccgcccgggccaccgttactccactccactccttcgggactggtttggaggaacataacagggcttcccatccctgtttacccttattccacttaccctttcccttaaccaaccctatccacaccccactgactgattcctttggattttgacctcagaatgcctacttgacctcccacttgtctctcccttctcggattgccggtggtgcctggcggaaaaagcacaagtgtgttgcaggctaccaaactcctacccgacaaaggtgcgtgtccgcgtgctgagtaatgggataggagatgcctacaacaggctcgcccatgagtagagcatggactgcggtgcatgtgacttcggtcaccacgggcatagcattgctcacccgtgaatcaagtcatcgagatttctctgacctctgaagtgcactgtggttgcgtggctgggaatccacgcttgaccatgtactgcttgatagagtcgcggctggccgactcatgggttaaagtcagttgacaagacac

SEQ ID NO: 16890 - DNA, 576 bp, synthetic construct
  source 1..576: mol_type = other DNA
tttgaaaagggggtggttgggcctcggccccctcaccctcttttccggtggccacacgcccgggccaccgttactccactccactccctcgggactggtttggaggaacacaacagggcttcccatccctgtttaccctaacttcactcacccttatccttaaccaaccctatccacaccccactgactgattcctttggattttgacctcagaatgcctacctgacctcccacttgcctctcccttttcggattgccggtggtgcctggcggaaaaagcacaagtgtgttgatggctaccaaactcctacccgacaaaggtgcgtgtccgcgtgctgagtaatgggataggagatgccattgacaggctcgcccatgagtagagcatggactgcggtgcatgtgacttcggtcaccaggggcatagcattgctcacccctgaatcaagtcatcgagatttctctgacctctgaagtgcactgtggttgcgtggctgggaatccacgcttgaccatgtactgcttgatagagtcgcggctggccgactcatgggttaaagtcagttgataagacac

SEQ ID NO: 16891 - DNA, 576 bp, synthetic construct
  source 1..576: mol_type = other DNA
tttgaaaagggggtgggggggcctcggccctctcaccctcttttccggtggccattcgcccgggccaccgttactccactccactccctcgggactggtttggaggaacacaacagggcttcccacccctgtttacccttactccacttaccaccccccttaaccaatcctatccacaccccactgactgattcctttggattttgatctcagaatgcctacttgacctcccacttgcctctcccttctcggattgccggtggtgcctggcggaaaaagcacaagtgtgttgttggctaccaaactcctacccgacaaaggtgcgtgtccgcgtgctgagtaatgggataggagatgccaatgacaggctcgcccatgagtagagcatggactgcggtgcatgtgacttcggtcaccaggggcatagcattgctcacccctgaatcaagtcatcgagatttctctgacctctgaagtgcactgtggttgcgtggctgggaatccacgcttgaccatgtactgcttgatagagtcgcggctggccgactcatgggttaaagtcagttgacaagacac

SEQ ID NO: 16892 - DNA, 576 bp, synthetic construct
  source 1..576: mol_type = other DNA
tttgaaaagggggtgggggggcctcggccctctcaccctcttttccggtggccactcgcccgggccaccgttactccactccactccttcgggactggtttggaggaacataacagggcttcccatccctgtttaccctcattccacttacccttttccttaaccaaccctatccacaccccactgactgattcctttggattttgacctcagaacgcctacttgacctcccacttgcttctcccttcccggattgccggtggtgcctggcggaaaaagcacaagtgtgttgttggctaccaaactcctacccgacaaaggtgcgtgtccgcgtgctgagtaatgggataggagatgccaataacaggctcgcccatgagtagagcatggactgcggtgcatgtgactccggtcaccgggggcatagcattgctcacccccgaatcaagtcatcgagatttctctgacctctgaagtgcactgtggttgtgtggctgggaatccacacttgaccatgtactgcttgatagagtcgcggctggccgactcatgggttaaagtcagttgacaagacac

SEQ ID NO: 16893 - DNA, 576 bp, synthetic construct
  source 1..576: mol_type = other DNA
tttgaaaagggggtgggggggcctcggccctctcaccctcttttccggtggccacccgcccgggccaccgttactccactccactccttcgggactggtttggaggaacacaacagggcttcccacccctgtttacctttactccacttacctttctcctaaaccaatcctatccacaccccactgactgattcctttggattttgacctcagaatgcctacatgacctcccactcgtctctcccttcccggattgccggtggtgcctggcggaaaaagcacaagtgtgttgatggctaccaaactcctacccgacaaaggtgcgtgtccgcgtgctgagtaatgggataggagatgccattgacaggctcgcccatgagtagagcatggactgcggtgcatgtgacttcagtcaccaggggcatagcattgctcacccctgaatcaagtcatcgagatttctctgacctctgaagtgcactgtggttgcgtggctgggaatccacgcttgaccatgtactgcttgatagagtcgcggctggccgactcatgggttaaagtcagttgataagacac

SEQ ID NO: 16894 - DNA, 576 bp, synthetic construct
  source 1..576: mol_type = other DNA
tttgaaaagggggtgggggggcctcggccctctcaccctcttttccggtggccacccgcccgggccaccgttactccactccactccttcgggactggtttggaggaacataacagggcttcccacccctgtttacccttattccactcacccttccccttaatcaaccctatccacaccccactgactgactcctttggtttttgacctcagaatgcctacctgacctcccacttacctctcccttttcggattgccggtggtgcctggtggaaaaagcacaagtgtgttgttggctactaaactcctacccgacaaaggtgcgtgtccgcgtgctgagtaatgggataggagatgccaataacaggctcgcccatgagtagagcatggactgcggtgcgtgtgacttcggtcaccaggggcatagcattgctcacccctgaatcaagtcatcgagatttctctgacctctgaagtgcactgtggttgcgtggctgggaatccacgcttgaccatgtactgcttgatagagtcgcggctggccgactcatgggttaaagtcagttgacaagacac

SEQ ID NO: 16895 - DNA, 576 bp, synthetic construct
  source 1..576: mol_type = other DNA
tttgaaaagggggtgggggggcctcggccctctcaccctcttttccggtggccactcgcccgggccaccgttactccactccactccttcgggactggtttggaggaacacaacagggcttcccacccctgtttacccttactccactcacccttccccataaccaaccctatccacaccccactgactgactcctttggattttgacctcagaatgcctatttaacctcccacttgcctctcccctctcggattgccggtggtgcctggcggaaaaagcacaagtgtgttgttggctaccaaactcctacccgacaaaggtgcgtgtccgcgtgctgagtaatgggataggagatgccaatgacaggctcgcccatgagtagagcatggactgtggtgcatgtgacctcggtcaccaggggcatagcattgctcacccctgaatcaagtcatcgagatttctctgacctctgaagtgcactgtggttgcgtggctgggaatccacgcttgaccatgtactgcttgatagagtcgcggctggccgactcatgggttaaagtcagttgacaagacac

SEQ ID NO: 16896 - DNA, 576 bp, synthetic construct
  source 1..576: mol_type = other DNA
tttgaaaagggggtgggggggcctcggccctctcaccctcttttccggtggccactcgcccgggccaccgttactccactccactccttcgggactggtttggaggaacataacagggcttcccacccctgttcaccctaactccacttaccctttcccttaaccaaccctatccacaccccactgattgactcccttggattttgacctcggaatgcctacttgacctcccacttgcctttcccttcccggattgccggtggtgcctggcggaaaaagcacaagtgtgttgttggctaccaaactcctacccgacaaaggtgcgtgtccgcgtgctgagtaatgggataggagatgccaatgacaggctcgcccatgagtagagcatggactgcggtgcatgtgacttcggtcaccaggggcatagcattgctcacccctgaatcaagtcatcgagatttctctgacctctgaagtgcactgtggttgcgtggctgggaatccacgcttgaccatgtactgcttgatagagtcgcggctggccgactcatgggttaaagtcagttgacaagacac

SEQ ID NO: 16897 - DNA, 576 bp, synthetic construct
  source 1..576: mol_type = other DNA
tttgtaaggggggtggggggccctcggccccctcaccctcttttccggtgcccacccgcccgggccaccgttactccactccactccttcgggactggtttggaggaacataacagggcttcccacccctgtttacccttattccactcacccttctccttaatcaaccctatccacaccccattgactgactcctttggattttgacctcagaatgcctacctgacctcccacttgcctctcccttctcggactgccggtggtgcctggcggaaaaagcacaagtgtgttgatggctaccaaactcttacccgacaaaggtgcgtgtccgcgtgctgagtaatgggataagagatgccattgacaggctcgcccatgagtagagcatggactgcggtgcatgtgacttcggtcaccaggggcatagcattgctcacccctgaatcaagtcatcgagatttctctgacctctgaagtgcactgtggttgcgtggctgggaatccacgcttgaccatgtactgcttgatagagtcgcggctggccgactcatgggttaaagtcagttgacaagacac

SEQ ID NO: 16898 - DNA, 576 bp, synthetic construct
  source 1..576: mol_type = other DNA
tttgaaaagggggtgggggggcctcggccctctcaccctcttttccggtggccactcgcccgggccaccgttactccactccactccttcgggactggtttggaggaacataacagggcttcccatccctgtttaccctcattccacttacccttccccttaaccaaccctatccacaccccactgactgattcctttggattttgacctcagaatgcctacctgacctcccacttgcttctcccctctcggattgccggtggtgcctggcggaaaaagcacaagtgtgttgttggctaccaaactcctacccgacaaaggtgcgtgtccgcgtgctgagtaatgggataggagatgccaataacaggctcgcccatgagtagagcatggactgcggtgtatgtgacttcggtcaccaggggcatagcattgctcacccctgaatcaagtcatcgagatttctctgacctctgaagtgcactgtggttgcgtggctgggaatccacgcttgaccatgtactgcttgatagagtcgcggctggccgactcatgggttaaagtcagttgacaagacac

SEQ ID NO: 16899 - DNA, 576 bp, synthetic construct
  source 1..576: mol_type = other DNA
tttgaaaagggggtgggggggcctcggccctctcaccctcttttccggtggccactcgcccgggccaccgttactccattccactccttcgggactggtttggaggaacataacagggcttcccatccctgtttatcctaattccacttacctttctccataattaaccctatccacaccccactgaccgatccctttggattttgacctcagaatgcctacctgacctcccacttgcctttcccttttcggattgccggtggtgcctggcggaaaaagcacaagtgtgttgatggctaccaaactcctacccgacaaaggtgcgtgtccgcgtgctgagtaatgggataggagatgccattgacaggctcgcccatgagtagagcatggactgcggtgcatgtgacttcggtcaccaggggcatagcattgctcacccctgaatcaagtcatcgagatttctctgacctctgaagtgcactgtggttgcgtggctgggaatccacgcttgaccatgtactgcttgatagagtcgcggctggccgactcatgggttaaagtcagttgacaagacac

SEQ ID NO: 16900 - DNA, 576 bp, synthetic construct
  source 1..576: mol_type = other DNA
tttgaaaagggggtggttgggcctcggccccctcaccctcttttccggtggccacacgcccgggccaccgttactccactccactccctcgggactggtttggaggaacacaacagggcttcccatccctgtttaccctcactccacttacccttctccttaaccaaccctatccacacctcactgactgattcctttggattttgacctcagaatgcctacttgacctcccacttgcctttcccttctcggattgccggtggtgcctggcggaaaaagcacaagtgtgttgttggctactaaactcctacccgacaaaggtgcgtgtccgcgcgctgagtaatgggataggagatgccaataacaggctcgcccatgagtagagcatggactgcggtgcatgtgacttcggtcaccaggggcatagcattgctcacccctgaatcaagtcatcgagacttctctgacctctgaagtgcactgtggttgcgtggctgggaatccacgcttgaccatgtactgcttgatagagtcgcggctggccgactcatgggttaaagtcagttgacaagacac

SEQ ID NO: 16901 - DNA, 576 bp, synthetic construct
  source 1..576: mol_type = other DNA
tttgaaaagggggtgggggggcctcggccctctcaccctcttttccggtggccactcgcccgggccaccgttactccactccactccttcgggactggtttggaggaacataacagggcttcccatccctgtttacccttattccacttacccttctcctcaaccaaccctatccacaccccactgactgattcctttggattttgacctcagaatgcctacctgacctcccacttgcctctcccctctcggattgccggtggtgcctggcggaaaaagcacaagtgtgttgttggctaccaaactcctacccgacaaaggtgcgtgtccgcgtgctgagtaatgggataggagatgccaataacaggctcgcccatgagtagagcatggactgcggtgcatgtgacttcggtcaccaggggcatagcattgctcacccctgaatcaagtcatcgagatttctctgacctctgaagtgcactgtggttgcgtggctgggaatccacgcttgaccatgtactgcttgatagagtcgcggctggccgactcatgggttaaagtcagttgacaagacac

SEQ ID NO: 16902 - DNA, 576 bp, synthetic construct
  source 1..576: mol_type = other DNA
tttgaaaagggggtgggggggcctcggccctctcaccctcttttccggtggccactcgcccgggccaccgttactccactccactccttcgggactggtttggaggaacataacagggcttcccacccctgttcacccttactccactcacccttatccttaaccaaccctatccacaccccactgactgattcctttggattttgacctcagaatgcccacctgacctcccacttgcttctcccttctcggattgccggtggtgcctggcggaaaaagcacaagtgtgttgttggctaccaaactcctacccgacaaaggtgcgtgtccgcgtgctgagtaatgggataggagatgccaatgacaggctcgcccatgagtagagcatggactgcggtgcatgtgacttcggtcaccaggggcatagcattgctcacccctgaatcaagtcatcgagacttctctgacctctgaagtgcactgtggttgcgtggctgggaatccacgcttgaccatgtactgcttgatagagtcgcggctgaccgactcatgggttaaagtcagttgacaagacac

SEQ ID NO: 16903 - DNA, 576 bp, synthetic construct; identical to SEQ ID NO: 626
  source 1..576: mol_type = other DNA

SEQ ID NO: 16904 - DNA, 576 bp, synthetic construct
  source 1..576: mol_type = other DNA
tttgaaaagggggtgggggggcctcggccctctcaccctcttttccggtggccactcgcccgggccaccgttactccactccactccttcgggactggtttggaggaacataacagggcttcccacccctgtttaccctcactccacttatccttctcctcaactaaccctatccacaccccactgattgattcctttggatttcgacctcagaatgcctacttgacctcccacttgcctctcccctctcggattgccggtggtgcctggcggaaaaagcacaagtgtgttgttggctaccaaactcctacccgacaaaggtgcgtgtccgcgtgctgagtaatgggatgggagatgccaataacaggctcgcccatgagtagagcatggactgcggtgcatgtgacttcggtcaccaggggcatagcattgctcacccctgaatcaagtcatcgagatttctctgacctctgaagtgcactgtggttgcgtggctgggaatccacgcttgaccatgtactgcttgatagagtcgcggctggccgactcatgggttaaagtcagttgacaagacac

SEQ ID NO: 16905 - DNA, 576 bp, synthetic construct
  source 1..576: mol_type = other DNA
tttgaaaagggggtggttgggcctcggccccctcaccctcttttccggtggccacacgcccgggccaccgttactccactccactccctcgggactggtttggaggaacacaacagggcttcccatccctgtttaccctcactccacccatccttctccttaaccaaccctatccacaccccactgactgactccattggattttgacctcagaatgcctacctgacctcccacttgcctctcccttctcggattgccggtggtgcctggcggaaaaagcacaagtgtgttgttggctaccaaactcctacccgacaaaggtgcgtgtccgcgtgctgagtaatgggataggagatgccaatgacaggctcgcccatgagtagagcatggactgcggtgcatgtgactttggtcaccaggggcatagcattgctcacccctgaatcaagtcatcgagatttctctgacctctgaagtgcgctgtggttgcgtggctgggaatccacgcttgaccatgtactgcttgatagagtcgcggctggccgactcatgggttaaagtcagttgacaagacac

SEQ ID NO: 16906 - DNA, 574 bp, synthetic construct
  source 1..574: mol_type = other DNA
aaaagggggtgggggggcttcggccctctcaccctcttttccggtggccactcgcccgggccaccgttactccactccactccctcgggactggtttggaggaacataacagggcttcctacccctgttcttccctcaattccactcacccttcccctcaaccacccctatccacaccccactgactgattcctttggattttgacctcagaatgcctacttgacctcccacttgcctctcccttttcggactgccggtggtgcctggtggaaaaagcacaagtgtgttgttggctaccaaactcctacccgacaaaggtgcgtgtccgcgtgctgagtaatgggataggagatgcctacaacaggctcgcccatgagtagagcatggactgcggtgcatgtgacttcggtcaccacgggcatagcattgctcacccgtgaatcaagtcatcgagatttctctgacctctgaagtgcactgtggttgcgtggctgggaatccacgcttgaccatgtactgcttgatagagtcgcggctggccgactcatgggttaaagtcagttgataagacac

SEQ ID NO: 16907 - DNA, 591 bp, synthetic construct; identical to SEQ ID NO: 641
  source 1..591: mol_type = other DNA

SEQ ID NO: 16908 - DNA, 625 bp, synthetic construct; identical to SEQ ID NO: 740
  source 1..625: mol_type = other DNA

SEQ ID NO: 16909 - DNA, 506 bp, synthetic construct; identical to SEQ ID NO: 530
  source 1..506: mol_type = other DNA

SEQ ID NO: 16910 - DNA, 567 bp, synthetic construct
  source 1..567: mol_type = other DNA
gggtgggggggcttcggccctctcaccctcttttccggtggccactcgcccgggccaccgttactccactccactccttcgggactggtttggaggaacataacagggcttcccatccctgtttacccttattccactcacccttcccctacaaccaaccctatccacaccccactgactgattcctttggattttgacctcagaatgcctacctgacctcccacttgcctctcccttctcggattgccggtggtgcctggcggaaaaagcacaagtgtgttgttggctaccaaactcctacccgacaaaggtgcgtgtccgcgtgctgagtaatgggataggagatgccaatgacaggctcgcccatgagtagagcatggactgcggtgcatgtgacctcggtcaccaggggcatagcattgctcacccctgaatcaagtcatcgagatttctctgacctctgaagtgcactgtggttgcgtggctgggaatccacgcttgaccatgtactgcttgatagagtcgcggctggccgactcatgggttaaagtcagttgacaagacac

SEQ ID NO: 16911 - DNA, 773 bp, synthetic construct; identical to SEQ ID NO: 1232
  source 1..773: mol_type = other DNA

SEQ ID NO: 16912 - DNA, 558 bp, synthetic construct; identical to SEQ ID NO: 1402
  source 1..558: mol_type = other DNA

SEQ ID NO: 16913 - DNA, 1000 bp, synthetic construct; identical to SEQ ID NO: 1457
  source 1..1000: mol_type = other DNA

SEQ ID NO: 16914 - DNA, 549 bp, synthetic construct; identical to SEQ ID NO: 1434
  source 1..549: mol_type = other DNA

SEQ ID NO: 16915 - DNA, 641 bp, synthetic construct; identical to SEQ ID NO: 770
  source 1..641: mol_type = other DNA

SEQ ID NO: 16916 - DNA, 494 bp, synthetic construct; identical to SEQ ID NO: 520
  source 1..494: mol_type = other DNA

SEQ ID NO: 16917 - DNA, 561 bp, synthetic construct; identical to SEQ ID NO: 1358
  source 1..561: mol_type = other DNA

SEQ ID NO: 16918 - DNA, 576 bp, synthetic construct
  source 1..576: mol_type = other DNA
tttgaaaagggggtgggggggcctcggccccctcaccctcttttccggtggccacccgcccgggccaccgttacttcactccactccctcgggactggtttggaggaacataacagggcttcccatccctgtttacccttatttccaattaccctttcctaaaccaaccctatccacaccccactgactgactcctttggattttgacttcagaatgcctacctgacctcccacttgcctctcccttctcggactgccggtggtgcctggcggaaaaagcacaagtgtgttgttggctaccaaactcctacccgacaaaggtgcgtgtccgcgtgctgagtaatgggataggagataccaataacaggctcgcccatgagtagagcatggactgcggcgcatgtgacctcggtcaccaggggcatagcattgctcacccctgaatcaagtcatcgagacttctctgacctctgaagtgcgctgtggttgcgtggctgggaatccacgcttgaccatgtactgcttgatagagtcgcggctggccgactcatgggttaaagtcagttgacaagacac

SEQ ID NO: 16919 - DNA, 579 bp, synthetic construct; identical to SEQ ID NO: 632
  source 1..579: mol_type = other DNA

SEQ ID NO: 16920 - DNA, 1000 bp, synthetic construct
  source 1..1000: mol_type = other DNA
gacggttggactttcgttcacccacctacggctggactcacggcaccgtgtggctacttgctggactgtgcggacgaacgccgcttgcgcatctcgcgtgaccggttagtactcttaccactttccgccaattggtcgtttgcgctgtcttgggcactcccgttgggggccgttcgacgctccaccgttcaccctgtctgttggactacggtgatggggccgtctcgcgcgggtttgtcgcctgtcgtctaggcgaatacccgaagcctgcctttcacccttacagccctagtaataccgtcttgtccgacgttaaaggactgtaaccacatgcttattaccgtcttgtccgacgttaaagggctgtaaccataagctaccaacgtcttgtccgacgttaaagggctgtaaccacaagaacaaccttcacccggaagtaaaacggcaacgtacacacttttgcccgttttgaagaaatgggacgtcagcgcacgaaacgcgccgtcacttgaggatgacttgtacaaacacgattcacgcaggtatccacaactgacacaaaaccgtgcaacttgaaatcccgcctggtctttccaggtctggaggggtgacactttgtactgtgtttgactccacgctcggtccactagcgggtgttagtagtggtatcgttgtttcgtagcggagcatagtggccgcgggaactcccccttggtgacaaggacccgcggggccgaaagccacgtcctaacggacccactatgtgtgcaatcccagcacggcaactttaccacgaaaaccactttaaggtgacactgaaactggtactcaaccactggtgacaggctaaggatgcccttcaggtaccccgaggtaacaagcgacactcaggatctgagaagggggctggggcttctttaaaagcgcccagtttaaaaagcttctatgcctgaataggcgaccggaggccggcgcctttcctttaaccactactcaccat

SEQ ID NO: 16921 - DNA, 577 bp, synthetic construct
  source 1..577: mol_type = other DNA
tttgaaaagggggtgggggggcctcggccccctcaccctcttttccggtggccacccgcccgggccaccgttacttcactccactccttcgggactggtttggaggaacataacagggcttcccaatcccctgttatccttattccaattaccctttcccttaaccaaccctatccacaccccactgactgactcctttggattttgacctcagaatgcctacctgacctcccacttgcctctcccctctcggattgccggtggtgcctggcggaaaaagcacaagtgtgttgcaggctaccaaactcctacccgacaaaggtgcgtgtccgcgtgctgagtaatgggataggagatgcctacaacaggctcgcccatgagtagagcatggactgcggtgcatgtgacttcggtcaccacgggcatagcattgctcacccgtgaatcaagtcatcgagatttctctgacctctgaagtgcactgtggttgcgtggctgggaatccacgcttgaccatgtactgcttgatagagtcgcggctggccgactcatgggttaaagtcagttgacaagacac

SEQ ID NO: 16922 - DNA, 1000 bp, synthetic construct; identical to SEQ ID NO: 1458
  source 1..1000: mol_type = other DNA

SEQ ID NO: 16923 - DNA, 513 bp, synthetic construct; identical to SEQ ID NO: 1446
  source 1..513: mol_type = other DNA

SEQ ID NO: 16924 - DNA, 578 bp, synthetic construct; identical to SEQ ID NO: 630
  source 1..578: mol_type = other DNA

SEQ ID NO: 16925 - DNA, 665 bp, synthetic construct; identical to SEQ ID NO: 803
  source 1..665: mol_type = other DNA

SEQ ID NO: 16926 - DNA, 509 bp, synthetic construct; identical to SEQ ID NO: 1451
  source 1..509: mol_type = other DNA

SEQ ID NO: 16927 - DNA, 315 bp, synthetic construct; identical to SEQ ID NO: 299
  source 1..315: mol_type = other DNA

SEQ ID NO: 16928 - DNA, 816 bp, synthetic construct; identical to SEQ ID NO: 132
  source 1..816: mol_type = other DNA

SEQ ID NO: 16929 - DNA, 647 bp, synthetic construct; identical to SEQ ID NO: 1351
  source 1..647: mol_type = other DNA

SEQ ID NO: 16930 - DNA, 741 bp, synthetic construct; identical to SEQ ID NO: 968
  source 1..741: mol_type = other DNA

SEQ ID NO: 16931 - DNA, 577 bp, synthetic construct
  source 1..577: mol_type = other DNA
tttgaaaagggggtgggggggcttcggccctctcaccctcttttccggtggccactcgcccgggccaccgttacttcactccactccctcgggactggtttggaggaacataacagggcttcccacccctgtttacccttaattccacttacccttccccttaaccaaccctatccacaccccactgactgattcctttggattttgacctcagaatgcctacttgacctcccacttgcctctcccttctcggattgccggtggtgcctggcggaaaaagcacaagtgtgttgcaggctaccaaactcctacccgacaaaggtgcgtgtccgcgtgctgagtaatgggataggagatgcctacaacaggctcgcccatgagtagagcatggactgcggtgcatgtgacttcggtcaccacgggcatagcattgctcacccgtgaatcaagtcatcgagatttctctgacctctgaagtgcactgtggttgcgtggctgggaatccacgcttgaccatgtactgcttgatagagtcgcggctggccgactcatgggttaaagtcagttgacaagacac

SEQ ID NO: 16932 - DNA, 576 bp, synthetic construct
  source 1..576: mol_type = other DNA
tttgaaaagggggtgggggggcctcggccccctcaccctcttttccggtggccactcgcccgggccaccgttacttcactccactccttcgggactggtttggaggaacataacagggcttcccatccctgtttacccttatttccacttaactttttcccaatctactctaaccacaccccactgactgactcctttggattttgacctcagaatgcctacctggcctcccactcgcctcatccttttcggattgccggtggtgcctggcggaaaaagcacaagtgtgttgcaggctaccaaactcctacccgacaaaggtgcgtgtccgcgtgctgagtaatgggataggagatgcctacaacaggctcgcccatgagtagagcatggactgcggtgcatgtgacttcggtcaccacgggcatagcattgctcacccgtgaatcaagtcatcgagatttctctgacctctgaagtgcactgtggttgcgtggctgggaatccacgcttgaccatgtactgcttgatagagtcgcggctggccgactcatgggttaaagtcagttgacaagacac

SEQ ID NO: 16933 - DNA, 577 bp, synthetic construct
  source 1..577: mol_type = other DNA
tttgaaaagggggtgggggggcctcggccccctcaccctcttttccggtggccactcgcccgggccaccgttactccactccactccttcgggactggtttggaggaacataacagggcttcccatccctgtttacccttaattccatttaccttctcccccaactaaccctatccacaccccactgactgactcctttggattttgacctcagaatgcctacttgacctcccacttgcctctcccttctcggattgccggtggtgcctggcggaaaaagcacaagtgtgttgcaggctaccaaactcctacccgacaaaggtgcgtgtccgcgtgctgagtaatgggataggagatgcctacaacaggctcgcccatgagtagagcatggactgcggtgcatgtgacttcggtcaccacgggcatagcattgctcacccgtgaatcaagtcatcgagatttctctgacctctgaagtgcactgtggttgcgtggctgggaatccacgcttgaccatgtactgcttgatagagtcgcggctggccgactcatgggttaaagtcagttgacaagacac

SEQ ID NO: 16934 - DNA, 577 bp, synthetic construct
  source 1..577: mol_type = other DNA
tttgaaaagggggtgggggggcttcggccctctcaccctcttttccggtggccattcgcccgggccaccgttactccactccactccctcgggactggtttggaggaacacaacagggcttcccatccctgtttacccttaactccactcaccctttcctacaccaaccctatccacaccctactgattgattcctttggattttgacctcagaatgcctacccgacctcccactcgttttcctccttctcggattgccggtggtgcctggcggaaaaagcacaagtgtgttgttggctaccaaactcctacccgacaaaggtgcgtgtccgcgtgctgagtaatgggataggagatgccaataacaggctcgcccatgagtagagcatggactgcggtgcatgtgacttcggtcaccaggggcatagcattgctcacccctgaatcaagtcatcgagatttctctgacctctgaagtgcactgtggttgcgtggctgggaatccacgcttgaccatgtactgcttgatagagtcgcggctggccgactcatgggttaaagtcagttgacaagacac

SEQ ID NO: 16935 - DNA, 1000 bp, synthetic construct; identical to SEQ ID NO: 1459
  source 1..1000: mol_type = other DNA

SEQ ID NO: 16936 - DNA, 576 bp, synthetic construct
  source 1..576: mol_type = other DNA
tttgaaaagggggtgggggggcctcggccccctcaccctcttttccggtggccacacgcccgggccaccgttactccactccactccttcgggactggtttggaggaacacaacagggcttcccatccctgtttaccctttattccatcatcctttccccaagtttaccctatccacaccccactgactgactcctttggattttgacctcagaatgcctatttgacctcccactcgcctctcccttttcggattgccggtggtgcctggcggaaaaagcacaagtgtgttgcaggctaccaaactcctacccgacaaaggtgcgtgtccgcgtgctgagtaatgggataggagatgcctacaacaggctcgcccatgagtagagcatggactgcggtgcatgtgacttcggtcaccacgggcatagcattgctcacccgtgaatcaagtcatcgagatttctctgacctctgaagtgcactgtggttgcgtggctgggaatccacgcttgaccatgtactgcttgatagagtcgcggctggccgactcatgggttaaagtcagttgacaagacac

SEQ ID NO: 16937 - DNA, 577 bp, synthetic construct
  source 1..577: mol_type = other DNA
tttgaaaagggggtggggcggcctcggcccactcaccctctttaccggtggccacccgcccgggccaccgttacttcactccactccttcgggactggtttggaggaacataacagggcttcccatccctgttcaccccttattccaattaccctcacccttgattaaccctacccacaccccactgactgattcctttggattttgacctcagaatgcctacttgacctcctacttgcttctcccttctcggattgccggtggtgcctggcggaaaaagcacaagtgtgttgcaggctaccaaactcctacccgacaaaggtgcgtgtccgcgtgctgagtaatgggataggagatgcctacaacaggctcgcccatgagtagagcatggactgcggtgcatgtgacttcggtcaccacgggcatagcattgctcacccgtgaatcaagtcatcgagatttctctgacctctgaagtgcactgtggttgcgtggctgggaatccacgcttgaccatgtactgcttgatagagtcgcggctggccgactcatgggttaaagtcagttgacaagacac

SEQ ID NO: 16938 - DNA, 576 bp, synthetic construct
  source 1..576: mol_type = other DNA
tttgaaaagggggtgggggggcctcggccccctcaccctcttttccggtggccactcgcccgggccaccgttactccactccactccttcgggactggtttggaggaacacaacagggcttcccatccctgtttacccttactccactcacccttcccttcaaccaaccctatccacaccccactgactgactcttttggactatgacctcagaacgcctacttgacctcccactcgcctctcccttctcggattgccggtggtgcctggcggaaaaagcacaagtgtgttgttggctaccaaactcctacccgacaaaggtgcgtgtccgcgtgctgagtaatgggataggagatgccaataacaggctcgcccatgagtagagcatggactgcggtgcatgtgacctcggtcaccaggggcatagcattgctcacccctgaatcaagtcatcgagacttctctgacctctgaagtgcactgtggttgcgtggctgggaatccacgcttgaccatgtactgcttgatagagtcgcggctggccgactcatgggttaaagtcagttgacaagacac

SEQ ID NO: 16939 - DNA, 576 bp, synthetic construct
  source 1..576: mol_type = other DNA
tttgaaaagggggtgggggggcctcggccccctcaccctcttttccggcggccactcgcccgggccaccgttacttcactccactccttcgggactggtttggaggaacataacagggcttcccatccctgtttacccttcactccaattacccttcccccaatcaaccctatccacaccccattgactgattcctttggattttgacctcagaatgcctacttgacctcccacttgccttccccttctcggactgccggtggtgcctggcggaaaaagcacaagtgtgttgcaggctaccaaactcctacccgacaaaggtgcgtgtccgcgtgctgagtaatgggataggagatgcctacaacaggctcgcccatgagtagagcatggactgcggtgcatgtgacttcggtcaccacgggcatagcattgctcacccgtgaatcaagtcatcgagatttctctgacctctgaagtgcactgtggttgcgtggctgggaatccacgcttgaccatgtactgcttgatagagtcgcggctggccgactcatgggttaaagtcagttgacaagacac

SEQ ID NO: 16940 - DNA, 571 bp, synthetic construct
  source 1..571: mol_type = other DNA
aagggggtgggggggcttcggccctctcaccctcttttccggtggccacccgcccgggccaccgttactccactccactccttcgggactggtttggaggaacataacagggcttcccaatccctgttaccctttactccatttccccatcccccaaacttaccctatccacaccccactgactgattcctttggattttgacctcagaatgcctacttgacctcccactcgcctctccctctccggactgccggtggtgcctggcggaaaaagcacaagtgtgttgcaggctactaaactcctacccgacaaaggtgcgtgtccgcgtgctgagtaatgggataggagatgcctacaacaggctcgcccatgagtagagcatggactgcggtgcatgtgacttcggtcaccacgggcatagcattgctcacccgtgaatcaagtcatcgagaattctctgacctctgaagtgcactgtggttgcgtggctgggaatccacgcttgaccatgtactgcttgatagagtcgcggctggccgactcatgggttaaagtcagttgacaagacac

SEQ ID NO: 16941 - DNA, 564 bp, synthetic construct
  source 1..564: mol_type = other DNA
gtgggggggcttcggccctctcaccctcttttccggtggccactcgcccgggccaccgttactccactccactccttcgggactggtttggaggaacataacagggcttcccatccctgtttaccctcattccactcaccccttcccttgaccaaccccatccacaccccactgactgattcctttggattttgacctcagaatgcctacctgacctcccactcgcctctccctcttcggattgccggtggtgcctggcggaaaaagcacaagtgtgttgctggctaccaaactcctacccgacaaaggtgcgtgtccgcgtgctgagtaatgggataggagatgctaacaacaggctcgcccatgagtagagcatggactgcggtgcatgtgacttcggtcaccacgggcatagcattgctcacccgtgaatcaagtcatcgagatttctctgacctctgaagtgcactgtggttgcgtggctgggaatccacgcttgaccatgtactgcttgatagagtcgcggctggccgactcatgggttaaagtcagttgacaagacac

SEQ ID NO: 16942 - DNA, 569 bp, synthetic construct; identical to SEQ ID NO: 618
  source 1..569: mol_type = other DNA

SEQ ID NO: 16943 - DNA, 570 bp, synthetic construct
  source 1..570: mol_type = other DNA
gggggtgggggggcttcggccctctcaccctcttttccggtggccactcgcccgggccaccgttactccactccactccctcgggactggtctggaggaacacaacagggcttcccatccctgtttaccctcattccaatttacccttcccttacaaccaaccctatccacaccccactgaatgattcctttggattttgacctcagaatgcctacctgaccccccacttgcttctccctcctcggattgccggtggtgcctggcggaaaaagcacaagtgtgttgttggctaccaaactcctacccgacaaaggtgcgtgtccgcgtgctgagtaatgggataggagatgccaataacaggctcgcccatgagtagagcatggactgcggtgcatgtgacttcggtcaccagggacatagcattgctcacccctgaatcaagttattgagatttctctgacctctgaagtgcactgtggttgcgtggccgggaatccacgcttgaccatgtactgcttgatagagtcgcggctggccgactcatgggttaaagtcagttgacaagacac

SEQ ID NO: 16944 - DNA, 568 bp, synthetic construct
  source 1..568: mol_type = other DNA
ggggtgggggggcttcggccctctcaccctcttttccggtggccactcgcccgggccaccgttactccactccactccctcgggactggtttggaggaacataacagggcttcccatccctgtttacccttggttccactcaccctttcccctcaccaaccttatccacaccccactgactgactcctttggattttgacctcagaatgcctacttgacctcccactcgcctctcccttctcggactgccggtggtgcctggcggaaaaagcacaagtgtgttgttggctaccaaactcctacccgacaaaggtgcgtgtccgcgtgccgagtaatgggataggagatgccaataacaggctcgcccatgagtagagcatggactgcggtgcatgtgacttcggtcaccagggacatagcattgctcacccctgaatcaagtcatcgagaattctctgacctctgaagtgcactgtggttgcgtggctgggaatccacgcttgaccatgtactgcttgatagagtcgcggctggccgactcatgggttaaagtcagttgacaagacac

SEQ ID NO: 16945 - DNA, 563 bp, synthetic construct
  source 1..563: mol_type = other DNA
gggggggcttcggccctctcaccctcttttccggtggccacccgcccgggccaccgttactccactccactccttcgggactggtttggaggaacataacagggcttcccaatccctgttaccctttactccatttccccatcccccaaacttaccctatccacaccccactgactgattcctttggattttgacctcagaatgcctacttgacctcccactcgcctctccctctccggactgccggtggtgcctggcggaaaaagcacaagtgtgttgcaggctactaaactcctacccgacaaaggtgcgtgtccgcgtgctgagtaatgggataggagatgcctacaacaggctcgcccatgagtagagcatggactgcggtgcatgtgacttcggtcaccacgggcatagcattgctcacccgtgaatcaagtcatcgagaattctctgacctctgaagtgcactgtggttgcgtggctgggaatccacgcttgaccatgtactgcttgatagagtcgcggctggccgactcatgggttaaagtcagttgacaagacac

SEQ ID NO: 16946 - DNA, 566 bp, synthetic construct
  source 1..566: mol_type = other DNA
tgggggggcttcggccctctcaccctcttttccggtggccactcgcccgggccaccgttactccactccactccctcgggactggtttggaggaacacaacagggcttcccacccctgttctttccttaattccactcaccctttccctttaccaaccctatccacaccccactgactgattcctttggattttgacctcagaatacccatttgacctcccacttgcctctccctttttcggattgccggtggtgcctggcggaaaaagcacaagtgtgttgttggctaccaaactcctacccgacaaaggtgcgtgtccgcgtgccgagtaatgggataggagatgcctacaacaggctcgcccatgagtagagcatggactgcggtgcatgtgacttcggtcaccacgggcatagcattgctcacccgtgaatcaagtcatcgagatttctctgacctctgaagtgcactgtggttgcgtggctgggaatccacgcttgaccatgtactgcttgatagagtcgcggctggccgactcatgggttaaagtcagttgataagacac

SEQ ID NO: 16947 - DNA, 566 bp, synthetic construct
  source 1..566: mol_type = other DNA
ggtgggggggcttcggccctctcaccctcttttccggtggctactcgcccgggccaccgttactccactccactccctcgggactggtttggaggaacataacagggcttcccatccctgtttacccttaattctgcttaccctctccttttaccaaccctgtccacaccccactgactgattcctttggattttgacctcagaatacctacctgacctcccacttgcctctcccttctcggattgccggtggtgcctggcggaaaaagcacaagtgtgttgttggctaccaaactcttacccgacaaaggtgcgtgtccgcgtgctgagtaatgggataggagatgccaatgacaggctcgcccatgagtagagcatggactgcggtgcatgtgacttcggtcaccaggggcatagcgttgctcacccctgaatcaagtcatcgagatttctctgacctctgaagtgcactgtggttgcgtggttgggaatccacgcttgaccatgtactgcttgatagagtcgcggctggccgactcatgggttaaagtcagttgacaagacac

SEQ ID NO: 16948 - DNA, 565 bp, synthetic construct
  source 1..565: mol_type = other DNA
tgggggggcttcggccctctcaccctcttttccggtggccacacgcccgggccaccgttactccactccactccctcgggactggtttggaggaacacaacagggcttcccatccctgttcctccctcaactccacttaccctttccccttaccaaccttatccacaccctattgactgattcctttggattttgacctcagaatgcctatctgacctcccacctgcctcccccttctcggattgccggtggtgcctggcggaaaaagcacaagtgtgttgttggctaccaaactcctacccgacaaaggtgcgtgtccgcgtgctgagtaatgggataggagatgccaataacaggctcgcccatgagtagagcatggactgcggtgcatgtgacttcagtcaccaggggcatagcattgctcacccctgaatcaagtcatcgagatttctctgacctctgaagtgcactgtggttgcgtggctgggaatccacgcttgaccatgtactgcttgatagagtcgcggctggccgactcatgggttaaagtcagttgacaagacac

SEQ ID NO: 16949 - DNA, 561 bp, synthetic construct
  source 1..561: mol_type = other DNA
ggggcttacggccctctcaccctcttttccggtggccattcgcccgggccaccgttactccactccactccctcgggactggtttggaggaacacaacagggcttcccatccctgtttatcctaattctacttaccttttcccttttaccgaccctatccacaccccactgactgattcctttggattttgacctcggaatgcctactagatctcccacttgcctctcccttcccggattgccggtggtgcctggcggaaaaagcacaagtgtgttgcaggctaccaaactcctacccgacaaaggtgcgtgtccgcgtgctgagtaatgggataggagatgcctacaacaggctcgcccatgagtagagcatggactgcggtgcatgtgacttcggtcaccacgggcatagcattgctcacccgtgaatcaagtcatcgagatttctctgacctctgaagtgcactgtggttgcgtggctgggaatccacgcttgaccatgtactgcttgatagagtcgcggctggccgactcatgggttaaagtcagttgacaagacac

SEQ ID NO: 16950 - DNA, 563 bp, synthetic construct
  source 1..563: mol_type = other DNA
gggggggcttcggccctctcaccctcttttccggtggccactcgcccgggccaccgttactccactccactccctcgggactggtttggaggaacataacagggcttcccatccctgtttacccttaattccacttaccctctccttttaccaaccctatccatacctcactgactgattcctttggattttgacctcagaatgcctacctgacctcccacttgcctctcccttctcggattgccggtggtgcctggcggaaaaagcacaagtgtgttgttggctaccaaactcctacccgacaaaggtgcgtgtccgcgtgctgagtaatgggataggagatgcctacaacaggctcgcccatgagtagagcatggactgcggtgcatgtgacttcggtcaccacgggcatagcattgctcacccgtgaatcaagtcatcgagatttctctgacctctgaagtgcactgtggttgcgtggctgggaatccacgcttgaccatgtactgcttgatagagtcgcggctggccgactcatgggttaaagtcagttgacaagacac

SEQ ID NO: 16951 - DNA, 562 bp, synthetic construct
  source 1..562: mol_type = other DNA
ggggggcctcggccctctcaccctcttttccggtggccactcgcccgggccaccgttacttcactccactcccttgggactggtttggaggaacacaacagggcttcccacccctgtttaccctacactccactcaccctctcccttaaccaaccctatccacatcccactgactgattcctttggattttgacttcagaatgcctacttgacctcccacttgcttctcccttcccggattgccggtggtgcctggcggaaaaagcacaagtgtgttgttggctaccaaacccctacccgacaaaagcgcgtgtccgcgtgctgagtaatgggataggggatgccaatgacaggctcgcccatgagtagagcatggactgcggtgcatgtgactttggtcaccaggggcatagcattgctcacccctgaatcaagtcatcgagatttctctgacctctgaagtgcactgtggttgcgtggctgggaatccacgcttgaccatgtactgcttgatagagtcgcggctggccgactcatgggttaaagtcagttgacaagacac

SEQ ID NO: 16952 - DNA, 1000 bp, synthetic construct; identical to SEQ ID NO: 1461
  source 1..1000: mol_type = other DNA

SEQ ID NO: 16953 - DNA, 561 bp, synthetic construct
  source 1..561: mol_type = other DNA
gggggcttcggccctctcaccctcttttccggtggccactcgcccgggccaccgttactccactccactccctcgggactggtttggaggaacataacagggcttcccatccctgtttacccttaattctgcttaccctctccttttaccaaccctgtccacaccccactgactgattcctttggattttgacctcagaatacctacctgacctcccacttgcctctcccttctcggattgccggtggtgcctggcggaaaaagcacaagtgtgttgttggctaccaaactcttacccgacaaaggtgcgtgtccgcgtgctgagtaatgggataggagatgccaatgacaggctcgcccatgagtagagcatggactgcggtgcatgtgacttcggtcaccaggggcatagcgttgctcacccctgaatcaagtcatcgagatttctctgacctctgaagtgcactgtggttgcgtggttgggaatccacgcttgaccatgtactgcttgatagagtcgcggctggccgactcatgggttaaagtcagttgacaagacac

SEQ ID NO: 16954 - DNA, 561 bp, synthetic construct
  source 1..561: mol_type = other DNA
ggggcttacggggctctcaccctcttttccggtggccactcgcccgggccaccgttactccactccactccttcgggactggtttggaggaacacaacagggcttcccacccctgtttacccttaactccactcacccctcccttgaaccaaccctatccacaccccactgactgactcctttggattttgacttcggaatgcctacctaacctcccacttgcctttccctttacggattgccggtggtgcctggcggaaaaagcacaagtgtgttgttggctaccaaactcctacccgacaaaggtgcgtgtccgcgtgctgagtaatgggataggagatgccaatgacaggctcgcccatgagtagagcatggactgcggtgcatgtgacttcggtcaccaggggcatagcattgctcacccctgaatcaagtcatcgagatttctctgacctctgaagtgcactgtggttgcgtggctgggaatccacgcttgaccatgtactgcttgatagagtcgcggctggccgactcatgggttaaagtcagttgacaagacac

SEQ ID NO: 16955 - DNA, 560 bp, synthetic construct
  source 1..560: mol_type = other DNA
ggggcttcggccctctcaccctcttttccggtggccgcccgcccgggccaccgttacttcactccactccctcgggactggtttggaggaacacaacagggcttcccatccctgttttcccttaataccacttaccttttccctaattaaccctacccaccacccaccgactgactccctttggattttgacctcagaatgcccacttgacctcccacttgcctcttcctttttggattgccggtggtgcctggcggaaaaagcacaagtgtgttgcaggctaccaaactcctacccgacaaaggtgcgtgtccgcgtgctgagtaatgggataggagatgcctacaacaggctcgcccatgagtagagcatggactgcggtgcatgtgacctcggtcaccacgggcatagcattgctcacccgtgaatcaagtcatcgagatctctctgacctctgaagtgcactgtggttgcgtggctgggaatccacgcttgaccatgtactgcttgatagagtcgcggctggccgactcatgggttaaagtcagttgacaagacac

SEQ ID NO: 16956 - DNA, 1000 bp, synthetic construct
  source 1..1000: mol_type = other DNA
cccccggtaaccccctttcgacgcgggtactgcgatagtgccaccccagtctttcctactcccgactcccgaccctaacccaggttcctcggtatgggaacacaaatttactcatcccctggatgctgactaatcagaggaacgtcagcattttccggcccaggctaagagaagtagataagttagaatccaaattgatttatcatccccttgacgaattcgcgttggaaaagtacctctcacttgccgctcttcacacccatcatcttaattcggcctctgtgttgagccccttgttgaagtgcttccctccatcgcgacgtggttggagatctaagtcaaccgactccgacgaaactaccatcatgcctccccgattatgtgatgctttccgccctgctgggtggagcatcctcgggttgagaaatccttcttcctttcaccttggaccccggtcccccggtctaagccgcttggaataagacagggttattttcacctctccttcttctactccacagtgctctatactgtggaagggtatgtgttgccccttccttcttggagaacgcgcgcggcggtctttccgtctctcgacaagcgtgcgtgcaacatgcagagtaacgcgaagaaagcagttcttggactagctttagtacctgcaagaaaacagctgtagcgaccacacaaaggcagcggaacccccctcctggcaacaggagcctctgcggccaaaagccacgtggataagatccacctttgtgtgcggtgcaaccccagcaccctggtttcttgaagatactctagtgaacccttgaatggcaatctcaagcgcctctgtaggaaagccaagaatgtccaggaggtaccccttccttgcggaagggatctgacctggagacacgtcacatgtgctttacacctgtgctcgtgtttaaaaactgtcacagctttcccaaaccaagtggtcttggttttcctttttatcactattgtcact

SEQ ID NO: 16957 - DNA, 1000 bp, synthetic construct
  source 1..1000: mol_type = other DNA
cccggttaccccctttcgacgcgggtactgcgatagtgccaccccagtccttcctactcccgactcccgaccccaacccaggttccttggaacaggaacaccaatttattcatcccttggatgctgactaatcagaggaacgtcagcattttccggcccaggctaagagaagtagataagttagaatctaaattatttatcatccccttgacgaattcgcgttggaaaagcacctctcacttgccgctcttcacacccatcattctaattcggcccctgtgttgagccccttgttgaagtgtttccctccatcgcgacgtggttggagatctaagttaaccgactccgacgaaactaccatcatgcctccccgattatgtgatgctttctgccctgctgggtggagcatcctcgggttgagaaatctttcttccttttaccttggactccggtcccccggtctaagccgcttggaataagacagggttatcttcactcctcttcttttctacttcacagtgttctatgctgtgaaagggtatgtgtcgccccttccttcttcggagaacacgcgtggcggttttttccgtctctcgacaagcgcgtgtgcgacatgcagagtctcgcgaagaaagcagttctcggtctagctttagtgcccacaagaaaacagctgtagcgaccacacaaaggcagcggaacccccctcctggtaacaggagcctctgcggccaaaagccacgtggataagatccacctttgtgtgcggtgcaaccccagcaccctgttttcttggtgacactctagtgaacccctgaatggcgatcttaagcgcctctgtagggaagccaggaatgtccaggaggtaccccttccgctcggaagggatctgacctggagacacatcacatgtgctttacacctgtgcttgtgtttaaaaattgtcgcagcttccccaaaccaagtggtcttggttttctctttttattatattgtcaat

SEQ ID NO: 16958 - DNA, 559 bp, synthetic construct
  source 1..559: mol_type = other DNA
gggcttcggccctctcaccctcttttccggtggccactcgcccgggccaccgttacttcactccactccctcgggactggtttggaggaacataacagggcttcccacccctgtttacccttaattccacttacccttccccttaaccaaccctatccacaccccactgactgattcctttggattttgacctcagaacgcctacttgacctcccacttgcctctcccttctcggattgccggtggtgcctggcggaaaaagcacaagtgtgttgcaggctaccaaactcctacccgacaaaggtgcgtgtccgcgtgctgagtaatgggataggagatgcctacaacaggctcgcccatgagtagagcatggactgcggtgcatgtgacttcggtcaccacgggcatagcattgctcacccgtgaatcaagtcatcgagatttctctgacctctgaagtgcactgtggttgcgtggctgggaatccacgcttgaccatgtactgcttgatagagtcgcggctggccgactcatgggttaaagtcagttgacaagacac

SEQ ID NO: 16959 - DNA, 1000 bp, synthetic construct; identical to SEQ ID NO: 1462
  source 1..1000: mol_type = other DNA

SEQ ID NO: 16960 - DNA, 1000 bp, synthetic construct
  source 1..1000: mol_type = other DNA
cccccggtcaccccctttcgacgcgggtactgcgatagtgccaccccagtctctcctactcccgactcccgaccctaacccaggttcctcggaacaggaacacaaatctactcatcccctggatgctgactaatcagaggaacgtcagcattttccggcccaggctaagagaagtagataaattagaatctaaattgatttatcatccccttgacgaattcgcgttggaaaagcacctctcacttgccgctcttcacacccatcattttaattcggcctctgtgttgagccccttgttgaagtgtttccctccatcgcgacgtggttggagatctaagtcaaccgactccgacgaaactaccatcatgcctccccgattatgtgatgctttctgccctgctgggtggagcatcctcgggttgagaaatccttcttccttttttccttggaccccggtcccccggtctaagccgcttggaatatgacagggttattttcacctctcttcttctactccacagtgtcctatactgtggaagggtatgtgttgccccttccttcttggagaacgtgcgcggcggtctttccgtctctcgacaagcgcgcgtgcaacatgcagagtaacgtgaagaaagcagttcttggactagctttagtgcccacaggaaaacagctgtagcgaccacacaaaggcagcggaacccccctcctggtaacaggagcctctgcggccaaaagccacgtggataagatccacctttgtgtgcggtgcaaccccagcaccctggtttcttgttgacactctagtgaacccttgaatggcaatctcaagcgcctctgcagggaagccaagaatgtccaggaggtaccccttcctcttggaagggatctgacctggagacacatcgcacgtgctttacacctgtgcttgtgtttaaaaattgtcacagcttccccaaaccaagtggtcttggttttctctttttaccactatctcaat

SEQ ID NO: 16961 - DNA, 556 bp, synthetic construct; identical to SEQ ID NO: 1423
  source 1..556: mol_type = other DNA

SEQ ID NO: 16962 - DNA, 1000 bp, synthetic construct
  source 1..1000: mol_type = other DNA
tcccccggttaccccctttcgacgcgggtactgcgatagtgccaccccagtctttcctactcccgactcccgaccctaacccaggttcctcggaacaggaacaccaatttactcatcccctggatgctgactaatcagaggaacgtcagcattttccggcccaggctaagagaagtagataagttagaatccaaattgatttatcatccccttgacgaattcgcgttggaaaaacacctctcacttgccgctcttcacacccattaatttaattcggcctctgtgttgagccccttgttgaagtgtttccctccatcgcgacgtggttggagatctaagtcaaccgactccgacgaaactaccatcatgcctccccgattatgtgatgctttctgccctgctgggtggagcaccctcgggttgagaaaaccttcttcctttttccttggactccggtcccccggtctaagccgctcggaatatgacagggttattttcacctcttcttttctactccacagtgttctatactgtggaagggtatgtgttgccccttccttcttggagaacgtgcgcggcggtctttccgtctctcgacaagcgcgcgtgcaacatacagagtaacgcgaagaaagcagttctcggtctagctctagtgcccacaagaaaacagctgtagcgaccacacaaaggcagcggaacccccctcctggtaacaggagcctctgcggccaaaagccacgtggataagatccacctttgtgtgcggtgcaaccccagcaccctggtttcttggtgacactctagtgaacccctgaatggcaatctcaagcgcctctgtagggaagccaagaatgtccaggaggtaccccttcctctcggaagggatctgacctggagacacatcacacgtgctttacacctgtgcttgtgtttaaaaattgttacagcttccccgaaccaagtggtcttggttttcactttttatcacactgtcaat

SEQ ID NO: 16963 - DNA, 1000 bp, synthetic construct; identical to SEQ ID NO: 1464
  source 1..1000: mol_type = other DNA

SEQ ID NO: 16964 - DNA, 1000 bp, synthetic construct
  source 1..1000: mol_type = other DNA
catcccccggtcaccccctttcgacgcgggtactgcgatagtgccaccccagtctctcctactcccgactcccgaccctaacccaggttcctcggaacaggaacaccaatttactcatcccctggatgctgactaatcagaggaacgtcagcattttccggcccaggctaagagaagtagataagttagaatccaaattgatttatcatcccctgacgaattcgcgttggaaaaacacctctcacttgccgctcttcacacccatcaatttaattcggcctctgtgttgagccccttgctgaagtgtttccctccatcgcgacgtggttggagatctaagtcaaccgactccgacgaaaactaccatcatgcctccccgattatgtgatgctttctgccctgctgggtggagcatcctcgggttgagaaatccttcttccttttccttggacctcggtcccccggtctaagccgctcggaatatgacagggttattttcacctcttctcttctactccacagtgctctatactatggaagggtatgtgttgccccttccttcttggagaacgtgcgtggcggtctttccgtctctcgacaagcgcgcgtgcaacatgcagagtaacgtgaagaaagcagttctcggtctagctctagtgcccacaagaaaacagctgtagcgaccacacaaaggcagcggaacccccctcctggtaacaggagcctctgcggccaaaagccacgtggataagatccacctttgtgtgcggtgcaaccccagcaccctggtttcttggtgcactctagtgaacccttgaatggcaatcttaagcgcctctgcaggaaagccaagaatgtccaggaggtaccccttcctttcggaagggatctgacctggagacacatcacatgtgctttacacctgtgcttgtgtttaaaaattgtccagcttccccaaaccaagtggtcttggttttctctttttactaacgttgtcaat

SEQ ID NO: 16965 - DNA, 1000 bp, synthetic construct; identical to SEQ ID NO: 139
  source 1..1000: mol_type = other DNA

SEQ ID NO: 16966 - DNA, 1000 bp, synthetic construct; identical to SEQ ID NO: 1465
  source 1..1000: mol_type = other DNA

SEQ ID NO: 16967 - DNA, 1000 bp, synthetic construct
  source 1..1000: mol_type = other DNA
cccccggtcaccccctttcgacgcgggtactgcgatagtgccaccccagtctctcctactcccgactcccgaccctaacccaggttcctcggaataggaacaccactttactcatcccctggatgctgactaatcagaggaacgtcagcattttccggcccaggctaagagaagtagataagttagaatccaaattgatttatcatccccttgacgaattcgcgttggaaaagcacctctcacttgccgctcttcacacccattaattcatttcggcctctgtgttgagccccttgttgaagtgtttccctccatcgcgacgtggttggagatctaagtcaaccgactccgacgaaactaccatcatgtctccccgattatgtgatgctttctgccctgctgggtggagcatcctcgggttgagaaatccttcttcctttcaccttggaccccggtcccccggtctaagccgcttggaataagacagggttattttcacctctttttcttctactccacagtgctctatactgtggaagggtatgtgttgccccttccttcttggagaacgtgcgcggcggtctttccgtctctcgacaagcgcgcgtgcaacatgcagagtaacgcgaagaaagcagttcttggactagctttagtatctgcaagaagacagctgtagcgaccacacaaaggcagcggaacccccctcctggtaacaggagcctctgcggccaaaagccacgtggataagatccacctttgtgtgcggtgcaaccccagcaccctggtttcttgaagatactctagtgaacccttgaatggcaatctcaagcgcctctgtaggaaagccaagaatgtccaggaggtaccccttcctcgcggaagggatctgacctggagacacgtcgcaagtgctttacacctgtgctcgtgtttaaaaattgtcacagctttcccaaaccaagtggtcttggttttcctttttattactattgacact

SEQ ID NO: 16968 - DNA, 1000 bp, synthetic construct
  source 1..1000: mol_type = other DNA
cccccggtcaccccctttcgacgcgggtactgcgatagtgccaccccagtctctcctactcccgactcccgaccctaacccaggttcctcggaataggaacaccactttactcatcccctggatgctgactaatcagaggaacgtcagcattttccggcccaggctaagagaagtagataagttagaatccaaattgatttatcatccccttgacgaattcgcgttggaaaagcacctctcacttgccgctcttcacacccattaattcatttcggcctctgtgttgagccccttgttgaagtgtttccctccatcgcgacgtggttggagatctaagtcaaccgactccgacgaaactaccatcatgtctccccgattatgtgatgctttctgccctgctgggtggagcatcctcgggttgagaaatccttcttcctttcaccttggaccccggtcccccggtctaagccgcttggaataagacagggttattttcacctctttttcttctactccacagtgctctatactgtggaagggtatgtgttgccccttccttcttggagaacgtgcgcggcggtctttccgtctctcgacaagcgcgcgtgcaacatgcagagtaacgcgaagaaagcagttcttggactagctttagtatctgcaagaagacagctgtagcgaccacacaaaggcagcggaacccccctcctggtaacaggagcctctgcggccaaaagccacgtggataagatccacctttgtgtgcggtgcaaccccagcaccctggtttcttgaagatactctagtgaacccttgaatggcaatctcaagcgcctctgtagggaagccaagaatgtccaggaggtaccccttcctcgcggaagggatctgacctggagacacgtcgcaagtgctttacacctgtgctcgtgtttaaaaattgtcacagctttcccaaaccaagtggtcttggttttcctttttattactattgacact

SEQ ID NO: 16969 - DNA, 370 bp, synthetic construct; identical to SEQ ID NO: 351
  source 1..370: mol_type = other DNA

SEQ ID NO: 16970 - DNA, 412 bp, synthetic construct; identical to SEQ ID NO: 449
  source 1..412: mol_type = other DNA

SEQ ID NO: 16971 - DNA, 471 bp, synthetic construct; identical to SEQ ID NO: 12
  source 1..471: mol_type = other DNA

SEQ ID NO: 16972 - DNA, 1000 bp, synthetic construct; identical to SEQ ID NO: 1466
  source 1..1000: mol_type = other DNA

SEQ ID NO: 16973 - DNA, 562 bp, synthetic construct
  source 1..562: mol_type = other DNA
gggggcttcggccctctcaccctcttttccggtggccacacgcccgggccaccgttactccactccactccctcgggactggtttggaggaacacaacagggcttcccatccctgttcctccctcaactccacttaccctttccccttaccaacctcatccacacctcattgactgattcctttggattttgacttcagaatgcctatctgacctcccacttgcctcccccttctcggattgccggtggtgcctggcggaaaaagcacaagtgtgttgttggctaccaaactcctacccgacaaaggtgcgtgtccgcgtgctgagtaatgggataggagatgccaataacaggctcgcccatgagtagagcatggactgcggtgcatgtgacttcagtcaccaggggcatagcattgctcacccctgaatcaagtcatcgagatttctctgacctctgaagtgcactgtggttgcgtggctgggaatccacgcttgaccatgtactgcttgatagagtcgcggctggccgactcatgggttaaagtcagttgacaagacac

SEQ ID NO: 16974 - DNA, 1000 bp, synthetic construct
  source 1..1000: mol_type = other DNA
agcgtcttcgcggtgaagaacaccccaggggtaccccctttgaacgcgggatctgcgaaagtgccaacccaagtcttttcctgttcttaccctactccctccttgggtccattggaaggaccaactatatcatcccttggatgctggctaatcagaggaaagtcagcattttccggcccaggctaagagaaacatataagttagatatgattttaatcccttgacgaattcaaaacttgatgttctccctcccttgctgcttgatcacacccacctctaaaattcggccttttgtgacaagccccttggtgaaaggacctctcttgtttcgacgtggttggaattaacatcaattccgacgaaagtgctattatgcctccccgattatgtgatgttttctgccctgctgggcggagcaccctcgggttgagataccttgactcttttcttttgggaccttggttcccccggtctaagccgcttggaatacgacagggttattttctatactcttacttctacttttacgggctctatccgtaaaaagggtatgtgttgccccttccatcttcggagaatccacacggcggtctttccgtctctcgaaaagtgtggatgcaacatgccggaaacggtgaagaaagcagttttctgtggaaatttagaatggacatcgaaacagctgtagcgacctcacagtagcagcggattcccctcttggtaacaagagcctctgcggccaaaagccccgtggataagatccactgctgtgagcggtgcaaccccagcaccctggttcgatggctattctctatggaaccagagaatggttttctcaagccctccggtagagaagccaagaatgtcctgaaggtaccccgcgtgcgggatctgatcaggagaccgaatggtaatgctttacattatcactttggtttaaaaattgtcacagcttctccaaaccaagtggtcttggttttccttttatccacatggcaag

SEQ ID NO: 16975 - DNA, 1000 bp, synthetic construct; identical to SEQ ID NO: 1467
  source 1..1000: mol_type = other DNA

SEQ ID NO: 16976 - DNA, 1000 bp, synthetic construct; identical to SEQ ID NO: 1468
  source 1..1000: mol_type = other DNA

SEQ ID NO: 16977 - DNA, 1000 bp, synthetic construct
  source 1..1000: mol_type = other DNA
taggatgatgtgttccaagtcagatgccaacgacttggtaaggacgaatttgcccgcactatgatacagttcccgcccgggacaactgatgccccattaagccacaacatggctgaaaagggtgttgggtccccccggattgtgtctgttcatagtgtgtgtaacgtggtttaccatctccactaacattggactaagcatttcatctttcctccccgattgtgtactcacttggctaacgctgggtggtcgcggttgggtccttgatttactttttctcgtctaagcattccaactgtcctccccgattatgtgctcattcagttaactgctgggtggtcatgactaacatcgaggaatcttctgtctacgcttactttgagctccggtcgcttgacgcttgtagggcgatagggttatcttcctgacaacatctttattctacctccataggctctatctatggagacggagtgtggcacccgtcccttctttgggagcttcggtagtgacgccctttgtcactctcgccagccgaggcatgcctggtgccaggtagcaaagaaagcatatgcttaaggacttgactgatttagcgcaagagtttgtagtgatgtccatagtgtctgcggattccccacacggcgacgtgtgccgcggaggccaaaagccacggtgttcacagcacccctatggatgcccacagaccccagtgggcactcttgttgccggactttcaggaaattaggtataggctcttctcaaactcctggcattggactaggtaagaatgccccggaggtaccccagtactccttcgggagtctgggatctgaccgggggccccacaaacatgctttacgtgtttcgtgcggtcaaaaattgtctaactagtcccaaccttgaacaagggattgttctttcctttttattactgagactggcctatggtgacaacagagattgactgtgaatacagttattttctggtgttcatcat

SEQ ID NO: 16978 - DNA, 1000 bp, synthetic construct
  source 1..1000: mol_type = other DNA
tagcatcttcgcggcaaagaacaccccaggggtaccccctttgaacgcgggacctgcgagagtgccaacccacgtcctttcccactcttaccccgattcccacctcgggtccaatgaaacgaccaatcatttcatcccttgaatgctggctaatcagaggaaagtcagcattttccggcccaggctaagagaaacatataagttagatttgattcaaatcccttgacgaattcggaacgagacgttctccctcccttgccgcttgttcacacccatattcgattcggcccattgtgacaagccccttggtgaaagaacctctctctttccgacgtggttggaattaacatcatttccgacgaaagtgctatcatgcctccccgattatgtgatgttttctgccctgctgggcggagcattctcgggttgagaaaccttgaatcttttcctttggaaccttggttcccccggtctaagccgcttggaatatgacagggttattttcattatcttatttctacttttatgggttctatccataaaaagggtatgtgttgccccttccttcttcggagaatccacacggcggtctttccgtctctcgacaagtgtggatgcaacatgccggaaacggtgaagaaaacagttttctgtggaagttcagagtgcgcatcgaaacagctgtagcgacctcacagtagcagcggactcccctcttggcgacaagagcctctgcggccaaaagccctgtggataagatccactgctgtgagcggtgcaaccccagcaccctgattcgatgaacattctttacggaaccagagaatggttttctcaagccctccggtagagaagccaagaatgtcctgaaggtaccccgctcgcgggatctgatcaggagaccaattgaccgtgctttacactgtcactttggtttaaaaactgtcacagcttctccaaaccaagtggtcttggttttccaattttgttacatggcagt

SEQ ID NO: 16979 - DNA, 1000 bp, synthetic construct
  source 1..1000: mol_type = other DNA
tagcatcttcgcggcaaagaacaccccaggggtaccccctttgaacgcgggtcctgcgaaagtgccaacccatgtctttcctactctttcccgactcccacctcgggtctaatgaaaagaccaaatatttcatcccttgaatgctggctaatcagaggaaagtcagcattttccggcccaggctaagagaaacatataagttagatttgattaaaatcccttgacgaaatcgaaacgagatgttttccctcccttgccgcttgttcacacccacttatctgattcggccttttgtgacaagcccctcggtgaaagaacctctctcttttcgacgtggttggaattgccatcatttccgacgaaagtgctatcatgcctccccgattatgtgatgttttctgccctgctgggcggagcattctcgggttgagaaaccttgaatctttacctttggaaccttggttcccccggtctaagccgcttggaatatgacagggttattttcttaatcttacttctacttttacgggttctatccgtaaaaagggtacgtgctgccccttccttctctggagaattcacacggcggtctttccgtctctcgacaagtgtgaatgcagcatgccggaaacggtgaagaaaacagttttctgtggaagtttagagtgtacatcgaagcagctgtagcgacctcacagtagcagcggattcccctcttggcgacaagagcctctgcggccaaaagccccgtggataagatccactgctgtgagcggtgcaaccccagcaccctgattcgatggccattctctacggaaccaggaaatggttttctcaagccctccggtagagaagccaagaatgtcctgaaggtaccccgcgtgcgggatctgatcaggagaccaattggcggtgctttacactgtcactttggtttaaaaattgtcacagcttctccaaaccaagtggtcttggttttccaattttattgactggcaat

SEQ ID NO: 16980 - DNA, 1000 bp, synthetic construct; identical to SEQ ID NO: 1469
  source 1..1000: mol_type = other DNA

SEQ ID NO: 16981 - DNA, 532 bp, synthetic construct; identical to SEQ ID NO: 1444
  source 1..532: mol_type = other DNA

SEQ ID NO: 16982 - DNA, 1000 bp, synthetic construct; identical to SEQ ID NO: 1470
  source 1..1000: mol_type = other DNA

SEQ ID NO: 16983 - DNA, 1000 bp, synthetic construct
  source 1..1000: mol_type = other DNA
taaaaccgcagggctggggagccggaatcctggggtctttttcgcgggacctgcgaaagtgccaacccaagtcttttcctgttcttaccctatttcctccttgggtccatcgaaaggaccaactacatcatcccttggatgctggctaatcagaggaaagtcagcattttccggcccaggctaagagaaacatataagttagatgtgattttaatcccttgacgaattcaaaacttgatgttctccctcccttgccgcttgatcacacccacctcttaaattcggccttttgtgacaagcccctcggtgaaagaacctctcttgttttgacgtggttggaattaacatcaattccgacgaaagtgctatcatgcctccccgattgtgtgatgttttctgccctgctgggcggagcaccctcgggttgagatatcttgactcttttcttttggaaccttggttcccccggtctaagccgcttggaatacgacagggttattttctatactcttatttctacttttacgggctctatccgtaaaaagggtatgtgttgccccttccatcttcggagaatccacacggcggtctttccgtctctcaaaaagtgtggatgcaacatgccggaaacggtgaagaaaacagttttctgtggaaatttagaatggacatcgaaacagctgtagcgacctcacagtagcagcggactcccctcttggcaacaagagcctctgcggccaaaagccctgtggataagatccactgctgtgagcggtgcaaccccagcaccctggttcgatggctactctctatggaaacagagaatggttttcttaagccctccggtagagaagccaagaatgtcctgaaggtaccccgcgtgcgggatctgatcaggagaccgaatggtaatgctttacattatcactttggtttaaaaattgtcacagcttctccaaaccaagtggtcttggttttccttttttactcatatgacaag

SEQ ID NO: 16984 - DNA, 528 bp, synthetic construct; identical to SEQ ID NO: 1443
  source 1..528: mol_type = other DNA

SEQ ID NO: 16985 - DNA, 957 bp, synthetic construct; identical to SEQ ID NO: 1299
  source 1..957: mol_type = other DNA

SEQ ID NO: 16986 - DNA, 1000 bp, synthetic construct; identical to SEQ ID NO: 1471
  source 1..1000: mol_type = other DNA

SEQ ID NO: 16987 - DNA, 1000 bp, synthetic construct
  source 1..1000: mol_type = other DNA
agcgtcttcgcggtgaagaacaccccaggggtaccccctttgaacgcgggacctgcgaaagtgccaacccaagtcttttcctgttcttaccctactccctccttgggtccattgaaaggaccaactatatcatcccttggatgctggctaatcagaggaaagtcagcattttccggcccaggctaagagaaacatataagttagatatgattttaatcccttgacgaattcaaaacttgatgttctccctcccttgccgcttgatcacacccacttccaaaattcggccttttgtgacaagccccttggtgaaaggacctctcttgtttcgacgtggttggaattaacatcaattccgacgaaagtgctatcatgcctccccgattatgtgatgttttctgccctgctgggcggagcaccctcgggttgagataccttgactcttttcttttggaaccttggttcccccggtctaagccgcttggaatacgacagggttattttctatgctcttacttctacttttacgggctctatccgtaaaaagggtatgtgttgccccttccatcttcggagaatccacacggcggtctttccgtctctcgaaaagtgtggatgcaacatgccggaaacggtgaagaaaacagttttctgtggaaatttagaatggacatcgaaacagctgtagcgacctcacagtagcagcggactcccctcttggtaacaagagcctctgcggccaaaagccccgtggataagatccactgctgtgagcggtgcaaccccagcaccctggttcgatggctattctctatggaaccagaggatggttttctcaagccctccggtagagaagccaagaatgtcctgaaggtaccccgcgtgcgggatctgatcaggagaccgaatggtaatgctttacattatcactttggtttaaaaattgtcacagcttctccaaaccaagtggtcttggttttccttttatccacatgacaag

SEQ ID NO: 16988 - DNA, 493 bp, synthetic construct; identical to SEQ ID NO: 1355
  source 1..493: mol_type = other DNA

SEQ ID NO: 16989 - DNA, 710 bp, synthetic construct; identical to SEQ ID NO: 1310
  source 1..710: mol_type = other DNA

SEQ ID NO: 16990 - DNA, 1000 bp, synthetic construct; identical to SEQ ID NO: 1472
  source 1..1000: mol_type = other DNA

SEQ ID NO: 16991 - DNA, 473 bp, synthetic construct
  source 1..473: mol_type = other DNA
ccatggtgtacatcggtttccgggcaaatacaagaaccccagttttcctggcaattccttgactgggttaaagaaataaggaaccagcccctctaacgccagacgagcggctttaaacttgaacttctggcacacttttctccactacccttttccccaaactcggactgactcactggattttgaccactccccctttgtctgaccactcttttggatctccctccaacatgccggtggtgcctggcggaaaaagcacaagttgtgtgagcaacacccccacaggtcccacggaacggtctgtgcccgcagatctagtacgtgcggatccctggttgcttccactgctcgcctgtgagtagagtaggtgctgggtgtgatgcgtcttcggacgcctcgggcatagcattgctcccccgagaatcaagccatcgagatttctctggcctctgaagtcacgcctggacgcgtag

SEQ ID NO: 16992 - DNA, 1000 bp, synthetic construct
  source 1..1000: mol_type = other DNA
gcatcctcgcggtgaagaacaccccaggggtaccccctttgaacgccggacccgcgaaagtgccaacccaagtcttttcctgttcttaccctactccctccttgggtccatcggaaggaccaactatatcatcccttggatgctggctaatcagaggaaagtcagcattttccggcccaggctaagagaaacatataagttagatatgattttaatcccttgacgaattcaaaacttgatgttctccctcccttgccgcttgatcacacccaccccttgaattcggccttttgtgacaagccccttggtgaaaggacctctcttgttttgacgtggttggaattaacatcaattccgacgaaagtgctaacatgcctccccgattgtgtgatgttttctgccctgctgggcggagcaccctcgggttgagataccttgactcttttcttttggaaccttggttcccccggtctaagccgcttggaatacgacagggttattttctgtactcttatttctacttttacgggctctatccgtaaaaagggtatgtgttgccccttccatcttcggagaatccacacggcggtctttccgtctctcaaaaagtgtggatgcaacatgccggaaacggtgaagaaagcagttttctgtggaaatttagagtggacatcgaaacagctgtagcgacctcacagtagcagcggactcccctcttggtaacaagagcctctgcggccaaaagccccgtggataagatccactgctgtgagcggtgcaaccccagcaccctggttcgatgactactctctatggaaccagagaatggttttctcaagccctccggtagagaagccaagaatgtcctgaaggtaccccgcgtgcgggatctgatcaggagaccgaatggtaatgctttacattatcactttggtttaaaaattgtcacagcttctccgaaccaagtggtcttggttttcctttttatccacatggcaag

SEQ ID NO: 16993 - DNA, 712 bp, synthetic construct; identical to SEQ ID NO: 868
  source 1..712: mol_type = other DNA

SEQ ID NO: 16994 - DNA, 1000 bp, synthetic construct; identical to SEQ ID NO: 1473
  source 1..1000: mol_type = other DNA

SEQ ID NO: 16995 - DNA, 537 bp, synthetic construct; identical to SEQ ID NO: 1442
  source 1..537: mol_type = other DNA

SEQ ID NO: 16996 - DNA, 1000 bp, synthetic construct
  source 1..1000: mol_type = other DNA
cactacgttacggttcccgcccgggacaactggtaccccattaggctacaacatggctgaaaagggtattgggtccccccggattgtgtccgttcgtagtgtgtgtaacgtggtttaccatctccactaacattggactaagcatttcatctttcctccccgattgtgtactcacttggctaacgctgggtggtcgcggttgggtccttgatttactttttctcgtctaagcattccgactgtcctccccgattatgtgctcattcagttaactgctgggtggtcatgactaacatcgaggaaccttctgtccacgcttactttgagctccggtcgcttgacgcttgtagggcgatagggttatcttcctgacaacatctttattctacctccataggctctatctatggagacggagtgtggcacccgtcccttctttgggagcttcggtagtgacgccctttgtcactctcgccagccgaggcatgcctggtgccaggtagcaaagaaagcatatgtttaaggacttgactgatttagcgcaagagtttgtagcgatgtccatagtgtctgcggattccccacacggcgacgtgtgccgcggaggccaaaagccacggtgttcacagcacccctatggatgcccacagaccccagtgggcactcttgttgccggactttcaggaaattaggcataggctcttctcaaactcctggcattggactaggtaagaatgccccggaggtaccccagtactccttcgggagtctgggatctgaccgggggccccacaaacatgctttacgtgtttcgtgcggtcaaaaattgtctaactagtcccaaccttgaacaagggattgttctttcctttttattactgagactggcctatggtgacaacagagattgactgtgaatacagttattttctggtgttcatcatttggtttttctccgtgctcttttacctttgtggtatttgttctttagataggcaaa

SEQ ID NO: 16997 - DNA, 977 bp, synthetic construct; identical to SEQ ID NO: 1453
  source 1..977: mol_type = other DNA

SEQ ID NO: 16998 - DNA, 428 bp, synthetic construct
  source 1..428: mol_type = other DNA
taccctctcctctaaccaaccctatccacaccccactgactgactcctttggattttgacctcagaatgcctacttgacctcccactagcctctccctttccggattgccggtggtgcctggcggaaaaagcacaagtgtgttgatggctaccaaactcctacccgacaaaggtgcgtgtccgcgtgctgagtaatgggataggagatgccattgacaggctcgcccatgagtagagcatggactgcggtgcatgtgacttcggtcaccaggggcatagcattgctcacccctgaatcaagtcatcgagatttctctgacctctgaagtgcactgtggttgcgtggctgggaatccacgcttgaccatgtactgcttgatagagtcgcggctggccgactcatgggttaaagtcagttgataagacac

SEQ ID NO: 16999 - DNA, 725 bp, synthetic construct; identical to SEQ ID NO: 909
  source 1..725: mol_type = other DNA

SEQ ID NO: 17000 - DNA, 673 bp, synthetic construct; identical to SEQ ID NO: 815
  source 1..673: mol_type = other DNA

SEQ ID NO: 17001 - DNA, 1000 bp, synthetic construct; identical to SEQ ID NO: 140
  source 1..1000: mol_type = other DNA

SEQ ID NO: 17002 - DNA, 944 bp, synthetic construct; identical to SEQ ID NO: 1298
  source 1..944: mol_type = other DNA

SEQ ID NO: 17003 - DNA, 1000 bp, synthetic construct; identical to SEQ ID NO: 1474
  source 1..1000: mol_type = other DNA

SEQ ID NO: 17004 - DNA, 951 bp, synthetic construct
  source 1..951: mol_type = other DNA
agtgccatccccccgtctctcctattccaactacccgaccctaacccagggtccaggaaaacggaacaatacaagtcatcccctgaatgctggctaaacagaggaaaggcagcattttccggcccaggctaaaagaaacacaataagttagaatctaaattaatcaccttgacgaattcgcaaagataagtcctccctcccttgccgctcgatcacacccagaactaataattcggcccctcgtgacgagccccttggtgaaaggacctctttcaatgcgacgtggttggagattaaaaccgactccgacgaaagtgctatcatgcctccccgattatgtgatgttttctgccctgctgggcggagcattctcgggttgatataccttgaatccttcatccttggacctcccggtcccccggtctaagccacttggaatatgacagggttattttccaaaattcttatttccactttcatgagttcttttcatgaaaagggtatgtgctgccccttccttcttggagaatccgcgtggcggtctttccgtctctcgaaaaacgtggatgcagcatgctggaaatggtgaagaaagtagttctttgtggaaacttagaacagacatcgaaacagctgtagcgacctcacagtagcagcggaaccccctcctggcgacaggagcctctgcggccaaaagccccgtggataagatccactgctgtgagcggtgcaaccccagcaccctggttcgatggttgttctctgtggaatcagagaatggctttcctaagccctccagtagagaagccaagaatgtcctgaaggtaccccgcgtgcgggatctgatcaggagaccaattgccagtgctctacactggcactttggtttaaaaattgtcacagcttctccaaaccaagtggtcttggttttctacttttaataattggttc

SEQ ID NO: 17005 - DNA, 509 bp, synthetic construct; identical to SEQ ID NO: 1447
  source 1..509: mol_type = other DNA

SEQ ID NO: 17006 - DNA, 509 bp, synthetic construct; identical to SEQ ID NO: 1448
  source 1..509: mol_type = other DNA

SEQ ID NO: 17007 - DNA, 510 bp, synthetic construct; identical to SEQ ID NO: 1445
  source 1..510: mol_type = other DNA

SEQ ID NO: 17008 - DNA, 510 bp, synthetic construct; identical to SEQ ID NO: 1450
  source 1..510: mol_type = other DNA

SEQ ID NO: 17009 - DNA, 708 bp, synthetic construct; identical to SEQ ID NO: 1365
  source 1..708: mol_type = other DNA

SEQ ID NO: 17010 - DNA, 718 bp, synthetic construct; identical to SEQ ID NO: 1367
  source 1..718: mol_type = other DNA

SEQ ID NO: 17011 - DNA, 1000 bp, synthetic construct; identical to SEQ ID NO: 1475
  source 1..1000: mol_type = other DNA

SEQ ID NO: 17012 - DNA, 962 bp, synthetic construct
  source 1..962: mol_type = other DNA
tttgaacgcgggacctgcgaaagtgccaacccacgtctttcccactcctaacccgactcccacctcgggtccaatgaaaggaccaaatatatcatcccttgaatgctggctaatcagaggaaagtcagcattttccggcccaggctaagagaaacacataagttagatttgactcaaatcccttgacgaattcgaaacgagatgttctccctcccttgccgcttgctcacacccacacatttaattcggcctcttgtgacaagccccttggtgaaagaacctctctctttttgacgtggttggaattaacatcatttccgacgaaagtgctatcatgcctccccgattgtgtgatgttttctgccctgctgggcggagcattctcgggttgagaaaccttgaatcttttcctttggaaccttggttcccccggtctaagccgcttggaatatgacagggttattttccttatcttacttctactttcacgggttctatccgtgaaaagggtacgtgttgccccttccttcttcggagaattcacacggcggtctttccgtctctcgacaggtgtgaatgcaacatgccggaaacggtgaagaaaacagttttctgcggaagtcttgagtgcgcatcgaaacagctgtagcgacctcacagtagcagcggactcccctcttggtgacaagagcctctgcggccaaaagccccgtggataagatccactgctgtgagcggtgcaaccccagcaccctgattcgatgaacattctttacggaaccagaagatggttttcttaagccctccggtagagaagccaagaatgtcctgaaggtaccccgcgtgcgggatctgatcaggagaccaattgactgtgctttacactgtcactttggtttaaaaactgtcacagcttctccaaaccaagtggtcttggttttccaattttactaactggcaat

SEQ ID NO: 17013 - DNA, 929 bp, synthetic construct
  source 1..929: mol_type = other DNA
accctaacccaggttcctcggtataggaacaccactttactcatcccctggatgctgactaatcagaggaacgtcagcattttccggcccaggctaagagaagtagataagttagaatccaaattgatttatcatccccttgacgaattcgcgttggaaaagcacctctcacttgccgctcttcacacccatcattttaattcggcctctgtgttgagccccttgttgaagtgtttctctccatcgcgacgtggttggagatctaagtcaaccgactccgacgaaactaccatcatgtctccccgattatgtgatgctttctgccctgctgggtggagtatcctcgggttgagaaatccttcttcctttcaccttggaccccggtcccccggtctaagccgcttggaataagacagggttattttcacctctttttcttctactccacagtgctctatactgtggaagggtatgtgttgccccttccttcttggagaacgtgcgcggcggtctttccgtctctcgacaagcgcgcgtgcaacatgcagagtaacgcgaagaaagcagttcttggactagctttagtatctgcaagaagacagctgtagcgaccacacaaaggcagcggaacccccctcctggtaacaggagcctctgcggccaaaagccacgtggataagatccacctttgtgtgcggtgcaaccccagcaccctggtttcttgaagatactctagtgaacccttgaatggcaatctcaagcgcctctgtaggaaagccaagaatgtccaggaggtaccccttcctcgcggaagggatctgacctggagacacgtcgcaagtgctttacacctgtgctcgtgtttaaaaattgtcacagctttcccaaaccaagtggtcttggttttcctttttattactattgacact

SEQ ID NO: 17014 - DNA, 1000 bp, synthetic construct
  source 1..1000: mol_type = other DNA
gcgtcttcgcggtgaagaacaccccaggggtaccccctttgaacgcgggacctgcgaaagtgccaacccaagtctttccctactcttaccctattccctccttgggtccattggaaggaccaactatatcatcccttggatgctggctaatcagaggaaagtcagcattttccggcccaggctaagagaaacatataagttagatatgattttaatcccttgacgaattcgaaacttgatgttctccctcccttgccgcttgatcacacccatctcttaaattcggccttttgtgacaagccccttggtgaaaggacctctctcgtttcgacgtggttggaattaacatcaattccgacgaaagtgctatcatgcctccccgattgtgtgatgttttctgtcctgctgggcggagcaccctcgggttgagataccttgactcttttcttttggaaccttggttcccccggtctaaaccgcttggaatacgacagggttattttctatactcttatttctacttttacgggctctatccgtaaaaagggtatgtgttgccccttccatcttcggagaatccacacggcggtctttccgtctcttgaaaagtgtggatgcaacatgccggaaacggtgaagaaagcagttttctgtggaaatttagaatggacatcgaaacagctgtagcgacctcacagtagcagcggaatcccctcttggtaacaagagcctctgcggccaaaagccccgtggataagatccactgctgtgagcggtgcaaccccagcaccctggttcgatgactattctctatggaaccagagaatggttttctcaagccctccggtagagaagccaagaatgtcctgaaggtaccccgcgtgcgggatctgatcaggagaccgaatggtaatgctttacattatcactttggtttaaaaattgtcacagcttctccaaaccaagtggtcttggttttcctttttattcatacggcaag

SEQ ID NO: 17015 - DNA, 529 bp, synthetic construct; identical to SEQ ID NO: 557
  source 1..529: mol_type = other DNA

SEQ ID NO: 17016 - DNA, 776 bp, synthetic construct; identical to SEQ ID NO: 1238
  source 1..776: mol_type = other DNA

SEQ ID NO: 17017 - DNA, 954 bp, synthetic construct
  source 1..954: mol_type = other DNA
gggtcctgcgaaagtgccaacccatgtcttttcccaccctttccccgattcccgcctcgggtctaatgaaaagaccaaatatcttatcccttgaatgctggctaatcagaggaaagtcagcattttccggcccaggctaagagaaacatataagttagatttgatttaaatcccttgacgaattcgaaacgagatgttctccctcccttgccgcttgttcacacccacttatttaattcggccttttgtgacaagcccctcggtgaaagaacctctctcttttcgacgtggttggaattgccatcatttccgacgaaagtgctatcatgcctccccgattatgtgatgttttctgccctgctgggcggagcattctcgggttgagaaaccttgaatctttttctttggaaccttggttcccccggtctaagccgcttggaatatgacagggttattttcttgatcttatttctacttttgcgggttctatccgtaaaaagggtacgtgctgccccttccttctctggagaattcacacggcggtctttccgtctctcaacaagtgtgaatgcagcatgccggaaacggtgaagaaaacagttttctgtggaaatttagagtgcacatcgaaacagctgtagcgacctcacagtagcagcggactcccctcttggcgacaagagcctctgcggccaaaagccccgtggataagatccactgctgtgagcggtgcaaccccagcaccctggttcgatgatcattctctatggaaccagaaaatggttttctcaagccctccggtagagaagccaagaatgtcctgaaggtaccccgcgtgcgggatctgatcaggagaccaattggcggtgctttacactgtcactttggtttaaaaattgtcacagcttctccaaaccaagtggtcttggttttccaattttgttgaatggcaat

SEQ ID NO: 17018 - DNA, 546 bp, synthetic construct; identical to SEQ ID NO: 1435
  source 1..546: mol_type = other DNA

SEQ ID NO: 17019 - DNA, 955 bp, synthetic construct
  source 1..955: mol_type = other DNA
acctgcgacagtgccaacccacatctcttcccactattattattccggttcccgccttaggtccattgaaaagaccaaacatgtcatcccttggatgctggctaatcagaggaaagtcagcattttccggcccaggctaagagaaacatataagttagaaatgattctaatcccttgacgaattcggaacgagaagttctccctcccttgccgcttgttcacacccatcatttaattcggccctttgtgacaagcccctcggtgaaaggacctctctctttccgacgtggttggaattaacatcttttccgacgaaagtgctattatgcctccccgattgtgtgatgctttctgccctgctgggcggagcgtcctcgggttgagaaaccttgaatcttttcctttggagccttggctcccccggtctaagccgcttggaatatgacagggttattttccaaactctttatttctactttcatgggttctatccatgaaaagggtatgtgttgccccttccttctttggagaatctgcgcggcggtctttccgtctctcaacaggcgtggatgcaacatgccggaaacggtgaagaaaacagttttctgtggaaatttagagtggacatcgaaacagctgtagcgacctcacagtagcagcggattcccctcttggcgacaagagcctctgcggccaaaagccccgtggataagatccactgctgtgagcggtgcaaccccagcaccctggttcgatggccattctctatggaaccagaaaatggttttctcaagccctccggtagagaagccaagaatgtcctgaaggtaccccgcgcgcgggatctgatcaggagaccaattggcagtgctttacgctgccactttggtttaaaaactgtcacagcttctccaaaccaagtggtcttggttttccaattttgttgactgacaat

SEQ ID NO: 17020 - DNA, 699 bp, synthetic construct; identical to SEQ ID NO: 1359
  source 1..699: mol_type = other DNA

SEQ ID NO: 17021 - DNA, 471 bp, synthetic construct
  source 1..471: mol_type = other DNA
aacacaacagggcttcccatccctgtttacccttttctccacttacccttccctttaaccaatcctatccacaccccactgactgattcctttggattttgacctcagaatgcctacttgacctcccacttgccactccctttccggattgccggtggtgcctggcggaaaaagcacaagtgtgttgatggctaccaaactcctacccgacaaaggtgcgtgtccgcgtgctgagtaatgggataggagatgccattgacaggctcgcccatgagtagagcatggactgcggtgcatgtgacttcggtcaccaggggcatagcattgctcacccctgaatcaagtcatcgagatttctctgacctctgaagtgcactgtggttgcgtggctgggaatccacgcttgaccatgtactgcttgatagagtcgcggctggccgactcatgggttaaagtcagttgataagacac

SEQ ID NO: 17022 - DNA, 891 bp, synthetic construct
  source 1..891: mol_type = other DNA
tttttacttctccctgatgctgactaatcagaggaaagttagcattttccggcccaggctaagagaagtagataagttagactcaaattgatacaacatccccttgacgaattcgcaacgaaaagtcgtccctcacttgccgcttgttcacacccatgaactcacaattcggccccctgtgacaagccccttgttgaaacgacctcttttaatgcgacgtggttggagatttgtcatcctatgactccgacgaaactaccatcatgcctccccgattatgtgatgctatccgccctgctgggtggagcattctcgggttgagtaacctacatcctttctccttggactccggtcccccggtctaagccgcttggaataagacagggttattttccaatcatctcctttctactcttaagtgttctatacttaagaagggtatgtgttgccccttccttcttggagaacgtgcgcggcggtctttccgtctctcgaaaagcgtgcgtgcaacatgcagagacctgtgaagaaagcagtttctgaactaaccttagtgcagacaagaaatcggctgtagcgacctcacactagcagcggacacccctcctggtaacaggagcccctgcggccaaaagccacgtggataagatccactggtgtgagcggtgcaaccccagcaccctggtttcttggttgtactctggtgaacccagagatggcaatcttaagcaactctgtagagaagccaagaatgtccggaaggtaccccgcttcagcgggatctgatccggagactcatctcatctgctatacagttgagcttgggtttaaaaactgtcacagcttctccaaaccaagtggtcttggttttccctttttacttacgatgtc

SEQ ID NO: 17023 - DNA, 734 bp, synthetic construct; identical to SEQ ID NO: 940
  source 1..734: mol_type = other DNA

SEQ ID NO: 17024 - DNA, 904 bp, synthetic construct
  source 1..904: mol_type = other DNA
gatccttttcagggtacctgatgcacatgtctacaaactgccaatcagctatgacaagtggtactagtgctctctgcccatggtcaaatgctacactcttgctatccccactaggggtactagctcacacacaccccaggattgtgttaccacaatgcacccctgggacggctacactctctccggaaagagggacggagggcctgggccccccggccccctttccgcgcgcccgacagcgcgttacgcggctacgactatggcaaacatagaagtcggctgcacagtcgggacttccccttgtgtgtcgtcccgtatcctcgtgtgtcacgagacccctacccctagactcttttgttagggttaagtccatgtgtatgcctagcttttaggtctccaaaacagcacgtggccatgttatgtacatctggtctagcagctactgtaccagtcacttgtgaaactcttgtgaacaggactgcacgtccgtttattgctagtattcccgtcccaggggtgcattgtggtaacacaatcctggggtgtgtgtgagctagtacccctagtggggatagcaagagtgtagcatttgaccatgggcagagagcactagtaccacttgtcatagctgattggcagtctgtagacatgtgcatcaggtaccctgaaaaggatctgagatgtagctaattagtccctgcagactgtcgaagttttcttccctattttatttattagaagatagtgttggtagtagttggtttatgtgcctactattagatttactcttagttttattgattttattggtgatagtaacactatacctatctcttcttgtgtttattgtgtcattggaagattttattttagattttgtcaataaatatcacttgtatacaag

SEQ ID NO: 17025 - DNA, 557 bp, synthetic construct; identical to SEQ ID NO: 601
  source 1..557: mol_type = other DNA

SEQ ID NO: 17026 - DNA, 675 bp, synthetic construct
  source 1..675: mol_type = other DNA
tgcctgagtaggattgtgaatttaggtatgagagggttagccaacccattctgaaccataatagatacgtcaatctgaatccatctaaatctatctcttaggcagtggtgctgaaatattgcaagctactagggatagacgtgatctgattcaagaacctatctaatgtggtgatgagaaggctaggtttatccatagtaatcccttgttctgaacaggcaatgcacatgtgcctgagtaggattgtgaatttaggtatgagagggttagccaacccattctgaaccataatagatacgtcaatctgaatccatctaaatctatctcttaggcagtggtgctgaaatattgcaagctactagggatagacgtgatctgattcaagaacctatctaatgtggtgatgagaaggctaggtttatccatagtaatcccttgttctgaacaggcaatgcacatgctctagtaggatctcgggctctgcgattggctctaaaccgaccaatccaggtagaggcactaagtgtaggacttgccaaaatgtattacatgctggtaccgactcactagtctggaaactccacactgaaagtgactggggggggccccatcacatttgtgctactgcttgatagagttgcggctggtcaacttggattggtataaccagttgaa

SEQ ID NO: 17027 - DNA, 420 bp, synthetic construct; identical to SEQ ID NO: 460
  source 1..420: mol_type = other DNA

SEQ ID NO: 17028 - DNA, 834 bp, synthetic construct
  source 1..834: mol_type = other DNA
cattttccggcccaggctaagagaaacatataagttagatttgatttaaatcccttgacgaattcgaaacgagatgttctccctcccttgccgcttgttcacacccacttatttaattcggccttttgtgacaagcccctcggtgaaagaacctctctcttttcgacgtggttggaattgccatcatttccgacgaaagtgctatcatgcctccccgattatgtgatgttttctgccctgctgggcggagcattctcgggttgagaaaccttgaatctttttctttggaaccttggttcccccggtctaagccgcttggaatatgacagggttattttcttgatcttatttctacttttgcgggttctatccgtaaaaagggtacgtgctgccccttccttctctggagaattcacacggcggtctttccgtctctcaacaagtgtgaatgcagcatgccggaaacggtgaagaaaacagttttctgtggaaatttagagtgcacatcgaaacagctgtagcgacctcacagtagcagcggactcccctcttggcgacaagagcctctgcggccaaaagccccgtggataagatccactgctgtgagcggtgcaaccccagcaccctggttcgatgatcattctctatggaaccagaaaatggttttctcaagccctccggtagagaagccaagaatgtcctgaaggtaccccgcgtgcgggatctgatcaggagaccaattggcggtgctttacactgtcactttggtttaaaaattgtcacagcttctccaaaccaagtggtcttggttttccaattttgttgaatggcaat

SEQ ID NO: 17029 - DNA, 859 bp, synthetic construct
  source 1..859: mol_type = other DNA
ctggctaatcagaggaaagtcagcattttccggcccaggctaagagaaacatataagttagatttgattcaaatcccttgacgaattcggaacgagacgttctccctcccttgccacttgttcacacccatacttttgattcggccttttgtgacaagtcccttggtgaaagaacctctctctttccgacgtggttggaattaacatcatttccgacgaaagtgctatcatgcctccccgattgtgtgatgttttctgccctgctgggcggagcattctcgggttgagaaaccttgaatcttttcctttggaaccctggttcccccggtctaagccgcttggaatacgacagggttattttccttattcttacttctacttttatgggttctatccataaaaagggtatgtgctgccccttccttctttggagaattcacacggcggtctttccgtctctcgacaagtgtgaatgcagcatgccggaaacggtgaagaaaacagttttctgtggaagtttagagtgcacatcgaaacagctgtagcgacctcacagtagcagcggaaccccctcttggcgacaagagcctctgcggccaaaagccccgtggataagatccactgctgtgagcggtgcaaccccagcaccctgattcgatggtcattctctacggaaccagaaaatggttttctcaagccctccggtagagaagccaagaatgtcctgaaggtaccccgcgcgcgggatctgatcaggagaccaattgacagtgctgtacgctgtcactttggtttaaaaactgtcacagcttctccaaaccaagtggtcttggttttccaaattttattgaatggcaat

SEQ ID NO: 17030 - DNA, 859 bp, synthetic construct
  source 1..859: mol_type = other DNA
ctggctaatcagaggaaagtcagcattttccggcccaggctaagagaaacatataagttagatttgattcaaatcccttgacgaattcggaacgagatgttctccctcccttgccacttgttcacacccacacttttgattcggccttttgtgacaagtcccttggtgaaagaacctctctctttccgacgtggttggaattaacatcatttccgacgaaagtgctatcatgcctccccgattgtgtgatgttttctgccctgctgggcggagcattctcgggttgagaaaccttgaatcttttcctttggaaccctggttcccccggtctaagccgcttggaatacgacagggttattttccttattcttacttctacttttatgggttctatccataaaaagggtatgtgctgccccttccttctttggagaattcacacggcggtctttccgtctctcgacaagtgtgaatgcagcatgccggaaacggtgaagaaaacagttttctgtggaagtttagagtgcacatcgaaacagctgtagcgacctcacagtagcagcggaaccccctcttggcgacaagagcctctgcggccaaaagccccgtggataagatccactgctgtgagcggtgcaaccccagcaccctgattcgatggtcattctctacggaaccagaaaatggttttctcaagccctccggtagagaagccaagaatgtcctgaaggtaccccgcgcgcgggatctgatcaggagaccaattgacagtgctgtacgctgtcactttggtttaaaaactgtcacagcttctccaaaccaagtggtcttggttttctaatttttattgaatggcaat

SEQ ID NO: 17031 - DNA, 857 bp, synthetic construct
  source 1..857: mol_type = other DNA
ctggctaatcagaggaaagtcagcattttccggcccaggctaagagaaacatataagttagatttgattcaaatcccttgacgaattcggaacgagatgttctccctcccttgccacttgttcacacccacacttttaattcggccctttgtgcaagtcccttggtgaaagaacctctctcttccgacgtggttggaattaacatcatttccgacgaaagtgctatcatgcctccccgattgtgtgatgttttctgccctgctgggcggagcattctcgggttgagaaaccttgaatcttttcctttggaaccctggttcccccggtctaagccgcttggaatacgacagggttattttccttattcttacttctacttttatgggttctatccataaaaagggtatgtgctgccccttccttctttggagaattcacacggcggtctttccgtctctcgacaagtgtgaatgcagcatgccggaaacggtgaagaaaacagttttctgtggaagtttagagtgcacatcgaaacagctgtagcgacctcacagtagcagcggaaccccctcttggcgacaagagcctctgcggccaaaagccccgtggataagatccactgctgtgagcggtgcaaccccagcaccctgattcgatggtcattctctacggaaccagaaaatggttttctcaagccctccggtagagaagccaagaatgtcctgaaggtaccccgcgcgcgggatctgatcaggagaccaattgacagtgctgtacgctgtcactttggtttaaaaactgtcacagcttctccaaaccaagtggtcttggttttctaatttttattgaatggcaat

SEQ ID NO: 17032 - DNA, 842 bp, synthetic construct
  source 1..842: mol_type = other DNA
gattcagcattttccggcccaggctaagagaaacatataagttagatatgattttaatcccttgacgaattcaaaacttgatgttctccctcccttgccgcttgatcacacccatctcttaaattcggccttttgtgacaagccccttagtgaaaggacctctcttgttttgacgtggttggaattaacatcaattccgacgaaagtgctatcatgcctccccgattgtgtgatgttttctgccctgctgggcggagcatcctcgggttgagataccttgactcttttcttttggaaccttggttcccccggtctaagccgcttggaatacgacagggttattttctatactcttatttctacttttacgggttctatccgtaaaaagaggtatgtgttgccccttccatcttcggagaatctacacggcggtctttccgtctctcaaaaagtgtggatgcaacatgccggaaacggtgaagaaagcagttctctgtggaaatttagagtggacatcgaaacagctgtagcgacctcacaatagcagcggactcccctcttggtaacaagagcctctgcggccaaaagccccgtggataagatccactgctgtgagcggtgcaaccccagcaccctggttcgatggctattctctatggaaccagaaaatggttttctcaagccctccggtagagaagccaagaatgtcctgaaggtaccccgcgtgcgggatctgatcaggagaccgaatgataatgctttacattatcactttggtttaaaaattgtcacagcttctccaaaccaagtggtcttggttttccttttattcacatggcaag

SEQ ID NO: 17033 - DNA, 751 bp, synthetic construct; identical to SEQ ID NO: 126
  source 1..751: mol_type = other DNA

SEQ ID NO: 17034 - DNA, 720 bp, synthetic construct; identical to SEQ ID NO: 1361
  source 1..720: mol_type = other DNA

SEQ ID NO: 17035 - DNA, 731 bp, synthetic construct; identical to SEQ ID NO: 931
  source 1..731: mol_type = other DNA

SEQ ID NO: 17036 - DNA, 724 bp, synthetic construct; identical to SEQ ID NO: 1362
  source 1..724: mol_type = other DNA

SEQ ID NO: 17037 - DNA, 839 bp, synthetic construct
  source 1..839: mol_type = other DNA
cagcattttccggcccaggctaagagaaacatataagttagatttgattcaaatcccttgacgaattcggagcgagacgttctccctcccttgccacttgctcacacccacacttttgattcggccttttgtgacaagtcccttggtgaaagaacctctctctttccgacgtggttggaattaacatcatttccgacgaaagtgctatcatgcctccccgattgtgtgatgttttctgccctgctgggcggagcattctcgggttgagaaaccttgaatcttttcctttggaaccctggttcccccggtctaagccgcttggaatacgacagggttattttccttattcttacttctacttttatgggttctatccataaaaagggtatgtgctgccccttccttctttggagaattcacacggcggtctttccgtctctcgacaagtgtgaatgcagcatgccggaaacggtgaagaaaacagttttctgtggaagtttagagtgcacatcgaaacagctgtagcgacctcacagtagcagcggaaccccctcttggcgacaagagcctctgcggccaaaagccccgtggataagatccactgctgtgagcggtgcaaccccagcaccctgattcgatggtcattctctacggaaccagaaaatggttttctcaagccctccggtagagaagccaagaatgtcctgaaggtaccccgcgcgcgggatctgatcaggagaccaattgacagtgctgtacgctgtcactttggtttaaaaactgtcacagcttctccaaaccaagtggtcttggttttccaatttttattgaatggcaat

SEQ ID NO: 17038 - DNA, 679 bp, synthetic construct; identical to SEQ ID NO: 89
  source 1..679: mol_type = other DNA

SEQ ID NO: 17039 - DNA, 619 bp, synthetic construct; identical to SEQ ID NO: 715
  source 1..619: mol_type = other DNA

SEQ ID NO: 17040 - DNA, 1000 bp, synthetic construct; identical to SEQ ID NO: 141
  source 1..1000: mol_type = other DNA

SEQ ID NO: 17041 - DNA, 468 bp, synthetic construct; identical to SEQ ID NO: 503
  source 1..468: mol_type = other DNA

SEQ ID NO: 17042 - DNA, 775 bp, synthetic construct; identical to SEQ ID NO: 1235
  source 1..775: mol_type = other DNA

SEQ ID NO: 17043 - DNA, 773 bp, synthetic construct
  source 1..773: mol_type = other DNA
ttgaaaggtggtcggagggtttctcaagaccctccgacgcctttcagcgcccggtctacaggggtgtaaatactgtgggcccgtttgccgtgggctacggctgcctgtgtctcaggggtaagtactggggccgcgttgaccgtgcggtacggttatgcttttagattaggatgtccgtctgtccggcactctcttttgcttaaaatggccttaaatccatgggaggcgtaaccatgggccctttgttacctagacatgattgcattgggggccgtccttggggcttaggccccagccatttctcttgactcgtctaagagtttacttcatccttttctttactttattttccaggctctcagcatgccgacggctctgaccactgcgcccggtggggttaactgcatgattagcatgcagctgtaggagttaaaagtgctgacaggccaattctgacgtaagtccactctatattaacttgatcaagtaaggttgattgatctttgtgagagggtaggctacgggtgaaaccctctaggttaatactcatattgagagatacctccagaaggtgaaggttggcggatattggtgagttcttttaggacaaaaacctttcaacgcctgtgggcccacctcactggcacaatgctttcatccccaattgtgatgggtagtttggactgaaatcaggagtaacctgccctacgagtttaggggtagttcaggggtatttaggcttccacatttgatagagtttatgagagtgagcc

SEQ ID NO: 17044 - DNA, 806 bp, synthetic construct
  source 1..806: mol_type = other DNA
tatagttagaaacgattctaatcccttgacgaattcggaacgagaagttctccctcccttgccgcttgttcacacccatcatttaattcggcatcttgtgacaagcccctcggtgaaagaacctctctctttccgacgtggttggaattaacatcctttccgacgaaaatgctatcatgcctccccgattatgtgatgctttctgccctgctgggcggagcgtcctcgggttgagagaccttgactcttttccattggaaccttggttcccccggtctaaaccgcttggaatatgacagggttattttctaaattctttacttctactttcatgggttctatccatgaaaagggtatgtgttgccccttccttctttggagaatctgcgcggcggtctttccgtctctcgacaagcgtggatgcaacatgccggaaacggtgaagaaaacagttttctgtggaaatttagattgtacatcgaaacagctgtagcgacctcacagtagcagcggactcccctcttggcgacaagagcctctgcggccaaaagccccgtggataagatccactgctgtgagcggtgcaaccccagcaccctgattcgatggacattctctatggaaccagaaaatggttttctcaagccttccggtagagaagccaagaatgtcctgaaggtaccccgcgtgcgggatctgatcaggagaccaattggcagtgctttacgctgtcactttggtttaaaaactgtcacagcttctccaaaccaagtggtcttggttttccaattttattgactgacaat

SEQ ID NO: 17045 - DNA, 1000 bp, synthetic construct; identical to SEQ ID NO: 142
  source 1..1000: mol_type = other DNA

SEQ ID NO: 17046 - DNA, 317 bp, synthetic construct
  source 1..317: mol_type = other DNA
cggagcatgttggccgtgggaacacctccttggtaacaaggacccacggggccgaaagccatgtcctaacggacccaacatgtgtgcaaccccagcacggcagctttactgtgaaacccacttcaaggtgacattgatactggtactcaaacactggtgacaggctaaggatgcccttcaggtaccccgaggtaacaagcgacactcgggatctgagaaggggactgggacttctttaaagtgcccagtttaaaaagcttctacgcctgaataggtgaccggaggccggcacctttccttttataaccactgaacac

SEQ ID NO: 17047 - DNA, 624 bp, synthetic construct; identical to SEQ ID NO: 736
  source 1..624: mol_type = other DNA

SEQ ID NO: 17048 - DNA, 624 bp, synthetic construct; identical to SEQ ID NO: 1368
  source 1..624: mol_type = other DNA

SEQ ID NO: 17049 - DNA, 683 bp, synthetic construct; identical to SEQ ID NO: 821
  source 1..683: mol_type = other DNA

SEQ ID NO: 17050 - DNA, 1000 bp, synthetic construct; identical to SEQ ID NO: 1476
  source 1..1000: mol_type = other DNA

SEQ ID NO: 17051 - DNA, 918 bp, synthetic construct
  source 1..918: mol_type = other DNA
ttgaaagggggttgaatgtttgactgtgcagcagggaggccatgggtaccccacttttaggagatgaccaaacgcagtaaccgcaagcaattgcctgtagcgtcagtaaaacgcaatacacaagatttgagcctgtagcgtcagtaaaacgctgcaaccacaagctattgactgtagcgtcagtaaaacgcaaacattcttgtggcgctcgcgtagcgctcaagtgcagagcttcccggctttaagggttactgctcgtaatgagagcacatgacattttgccaagatttcctggcaattgtcacgggagagaggagcccgttctcgggcacttttctctcaaacaatgttggcgcgcctcggcgcgccccccctttttcagccccctgtcattgactggtcgaaggcgctcgcaataagactggtcgttgcttggcttttctattgtttcaggctttagcgcgcccttgcgcggcgggccgtcaagcccgtgtgctgtacagcaccaggtaaccggacagcggcttgctggattttcccggtgccattgctctggatggtgtcaccaagctggcagatgcggagtgaaccttacgaagcgacacacctgtggtagcgctgcccagaagggagcggagctcccccgccgcgaggcggtcctctctggccaaaagcccagcgttaatagcgccttctgggatgcaggaaccccacctgccaggtgtgaagtggactaagtggatctccaatttggcctgttctgaactacaccatctactgctgtgaagaatgtcctgaaggcaagctggttacagccctgatcaggagccccgctcgtgactctcgatcgacgcggggtcaaaaactgtctaagcagcagcagaaacgcgggagcgtttctttttcctcatttgtttc

SEQ ID NO: 17052 - DNA, 1000 bp, synthetic construct; identical to SEQ ID NO: 143
  source 1..1000: mol_type = other DNA

SEQ ID NO: 17053 - DNA, 911 bp, synthetic construct
  source 1..911: mol_type = other DNA
ttgaaagggggttgaatgtttgactgtgcagcagggaggccatgggtaccccacttttgaaagttgaacctgtagcgtcagtaaaacgcagaaaccaaacgcaattgcctgtagcgtcagtaaaacgctgtaactgcatgaattgcacctgtagcgtcagtaaaacgcggaaactgcaagcaaatacctgtagcgtcagtaaaacgcgcacatttacatacagagcttcccggctttaagggttactgctcgtaatgagagcacatgacaatttgtcgagactacggcaactgtcacgggagagaggagcccgttttcgggcacttgtctcctaaacaatattggcgcgcatttgcgcgcccccccccatttcagccccctgtcattgactggtcgaaggcgttcgcaataagactggtcgtcacttggctgttctatcgtttcaggctttagcgcgccctcgcgcggcgggccgtcaagcccgtgcgctgtatagcgccaggtaaccggacagcggcttgctggattttcccggtgccattgctctggatggtgtcaccaagctgacaaatgcggactgaacctcacaaagcgacacacctgtggtagcgctgcccaaaagggagcggaactcccccgccgcgaggcggtcctctctggccaaaagcccagcgttaatagcgccttttgggatgcaggagccccacctgccaggtgtgaagtggagtgagtggatctccaatttggtctgttctgaactacaccatctactgctgtgaagaatgccctggaggcaagctggttacagccctgaccaggggccctgcccgtgactctcgatcggcgcagggtcaaaaattgtctaagcagcagcaggaacgcgggagcgtttcttttccctttgtatcgac

SEQ ID NO: 17054 - DNA, 501 bp, synthetic construct
  source 1..501: mol_type = other DNA
gtttctgagcactggtaagagcttagacaaacgtttttaaaatttattttctctgcaacttttgttcgtgtttatttttatttgttaattttgtgcctaaacatttgttgcgaagtatttgattcattagcaatatttattattgtttatttagatggcattcaaagtggtgggaatatcgaacccaagcgtcgtatgttatcttcttgaacaattttgaatttttgcgacatgatcattgaaaagaataggtgtttaagaactcaaggaatgttaacaatggtgggtgacaggtgtccccatataatttgttaacatgatttggactggttatctagtaagaagaaccatcgaacgcacgagcgagcattgcttgcggggcagttaccctgcgtcgatgtaagtgtgtaccggggggtgcacatgttgattctttatggcctgatagggtgcgtcattcgcgcctagataattagtataatgcgaatggaataaatttac

SEQ ID NO: 17055 - DNA, 610 bp, synthetic construct; identical to SEQ ID NO: 45
  source 1..610: mol_type = other DNA

SEQ ID NO: 17056 - DNA, 410 bp, synthetic construct; identical to SEQ ID NO: 446
  source 1..410: mol_type = other DNA

SEQ ID NO: 17057 - DNA, 718 bp, synthetic construct
  source 1..718: mol_type = other DNA
agggacggagggcctgggccccccggccccctttccgcgcgcccgacagcgcgttacgcggctacgactatggtaaacatagaagtcggctgcacagtcgggacttccctttgtgtgttgtcccgtatcctcgtgtgtcacgagacccctacccctagactcttttgttagggttaagtccacgtgtatgcctagcttttaggtctccaaaacagcacgtggccatgttatgtacatctggtctagcagctactgtaccagtcacttgtgaaactcttgtgaacaggattgcacgtccgcttattgctagtattcccgtcccgggggtgcactgtggtaacacagtcctgggatgtgtgtgagctagtacccctattggggatagcaagagtgtagctcttgactatgggcagaaagcactagtactacttgtcatagctgattggcagtttgtagacatgtgcatcaggtaccctgaaaaggatctgagatgtagctaattggtccctgcaaactgtcgaaattttcttccttcttctttttatttaatacagagtggtattagtaatagttggtttatgtgtttgttactagatctacttttctttgtattgattttattggtaatagtgttgctatactttatcctccttgtggttattttatcattagaagattttattctggattttgttagtagatattatttgtacataag

SEQ ID NO: 17058 - DNA, 534 bp, synthetic construct; identical to SEQ ID NO: 1338
  source 1..534: mol_type = other DNA

SEQ ID NO: 17059 - DNA, 496 bp, synthetic construct; identical to SEQ ID NO: 523
  source 1..496: mol_type = other DNA

SEQ ID NO: 17060 - DNA, 729 bp, synthetic construct
  source 1..729: mol_type = other DNA
cacttatttaattcggccttttgtgacaagcccctcggtgaaagaacctctctcttttcgacgtggttggaattgccatcatttccgacgaaagtgctatcatgcctccccgattatgtgatgttttctgccctgctgggcggagcattctcgggttgagaaaccttgaatctttttctttggaaccttggttcccccggtctaagccgcttggaatatgacagggttattttcttgatcttatttctacttttgcgggttctatccgtaaaaagggtacgtgctgccccttccttctctggagaattcacacggcggtctttccgtctctcaacaagtgtgaatgcagcatgccggaaacggtgaagaaaacagttttctgtggaaatttagagtgcacatcgaaacagctgtagcgacctcacagtagcagcggactcccctcttggcgacaagagcctctgcggccaaaagccccgtggataagatccactgctgtgagcggtgcaaccccagcaccctggttcgatgatcattctctatggaaccagaaaatggttttctcaagccctccggtagagaagccaagaatgtcctgaaggtaccccgcgtgcgggatctgatcaggagaccaattggcggtgctttacactgtcactttggtttaaaaattgtcacagcttctccaaaccaagtggtcttggttttccaattttgttgaatggcaat

SEQ ID NO: 17061 - DNA, 772 bp, synthetic construct
  source 1..772: mol_type = other DNA
ttcaaaacttgatgttctccctcccttgctgcttgatcacacccacctctaaaattcggccttttgtgacaagccccctggtgaaaggacctctcttgtttcgacgtggttggaattaacatcaattccgacgaaagtgctatcatgcctccccgattatgtgatgttttctgccctgctgggcggagcaccctcgggttgagataccttgactcttttcttttggaaccttggttcccccggtctaagccgcttggaatacgacagggttattttctatactcttacttctacttttacgggctctatccgtaaaaagggtatgtgttgccccttccatcttcggagaatccacacggcggtctttccgtctctcgaaaagtgtggatgcaacatgccggaaacggtgaagaaagcagttttctgtggaaatttagaatggacatcgaaacagctgtagcgacctcacagtagcagcggactcccctcttggtaacaagagcctctgcggccaaaagccccgtggataagatccactgctgtgagcggtgcaaccccagcaccctggttcgatggctattctctatggaaccagagaatggttttctcaagccctccggtagagaagccaagaatgtcctgaaggtaccccgcgtgcgggatctgatcaggagaccgaatggtaatgctttacattatcactttggtttaaaaattgtcacagcttctccaaaccaagtggtcttggttttccttttatccacatggcaag

SEQ ID NO: 17062 - DNA, 733 bp, synthetic construct
  source 1..733: mol_type = other DNA
taaccatacccggagttttgacagggtgttccaacctgtcctggccatacattcatctacggatgtttgtatgacccgctttctattgccccaataaccctctttgcaaccacaagctttactcaggctagtagcccgactagctgtttggaagaaaaggttagggcatacgccaacaacaccgaccccactggtcgaaggccacttggcaataagactggtggaacaaggtcgcctgtagttgtttggaacaattctttctaatgacttatgtcagcggtggactcacaccgtaatccttctaccctatccccacgcttgtggaactaggaagggatgagtgattcaagtaagtactgtcagaatggtgaaaataatctgattctgaaacacaatggatccatcgaaagatggggctatacgcctgcggaacaacacatggtaacatgtgccccaggggccgaaagccacggtgataagatcacccgtatagtttgagatcgtatcaatgttcattgtttagtaagatgatttgaaatctaactgagctgatggctaactgcttgtcttattgcggcctaaggatgtcctgcaggtacctttagataaccttaagagactattgatctgagcaggagccaaggtggtctttcccagccttggttaaaaaacgtctaagccgcggcagggggcgggaggccccctttcctcccaaaattataatactgattgt

SEQ ID NO: 17063 - DNA, 501 bp, synthetic construct
  source 1..501: mol_type = other DNA
gtttctgagcactggtaagagcttagacaaacgtttttaaaatttattttctctgcaacttttgtttgtgtttatttttatttgttaattttgcgcctaagcatttgttgcgaagtatttgattcattagtaatattacttattgtttatttagatggtattcaaagtggtgggagtatcgaacccaagcgtcgtatgctatctccttgaacaatttttaatcattgcgaagtgatcattgaaaaggataggtgtttaagaactcaaagagtgttaataatgttgggtgacaggtgtccccatagaatttattaacatgatttggactggttatctagtaagaagaaccatcgaacgcacgagcgagcattgcttgcggggcagttaccctgcgtcgatgtaagtgtgtaccggggggtgcacatgttgattctttatggcctgatagggtgcgtcattcgcgcctagataattagtataatgcgaatggaataaatttac

SEQ ID NO: 17064 - DNA, 501 bp, synthetic construct
  source 1..501: mol_type = other DNA
gtttctgagcactggtaagagcttagacaaacgtttttaaaatttattttctctgcaacttttgtttgtgtttatttttatttgttaattttgcgcctaagcatttgttgcgaagtatttgattcattagtaatattgactattgtttatttagatggtattcaaagtggtgggagtatcgaacccaagcgtcgtatgctatctccttgaacaatttttaattattgcgacctgatcattgaaaaggataagtgtttaagaactcaaggagtgttaataatgttgggtgacaggtgtccccatagaatttgttaacatgatttggactggttatctagtaagaagaaccatcgaacgcacgaacgagcattgctcgtggggcagttaccctgcgtcgatgtaagtgtgtaccggggggtacacatgttgattctttatggcctgatagggtgcgtcattcgcgcctagataattagtataatgcggatggaataaatttac

SEQ ID NO: 17065 - DNA, 487 bp, synthetic construct; identical to SEQ ID NO: 1318
  source 1..487: mol_type = other DNA

SEQ ID NO: 17066 - DNA, 523 bp, synthetic construct; identical to SEQ ID NO: 1337
  source 1..523: mol_type = other DNA

SEQ ID NO: 17067 - DNA, 1000 bp, synthetic construct; identical to SEQ ID NO: 1477
  source 1..1000: mol_type = other DNA

SEQ ID NO: 17068 - DNA, 880 bp, synthetic construct
  source 1..880: mol_type = other DNA
ttaattaaaagttgaacctgtagcgtcagtaaaacgcagtaaccgcaagcaattgcctgtagcgtcagtaaaacgcaatacacaagatttgagcctgtagcgtcagtaaaacgctgcaaccacaagctattgactgtagcgtcagtaaaacgcaaacattcttgtggcgctcgcgtagcgctcaagtgcagagcttcccggctttaagggttactgctcgtaatgagagcacatgacattttgccaagatttcctagcaattgtcacgggagagaggagcccgttctcgggcacttttctctcaaacaatgttggcgcgcctcggcgcgccccccctttttcagccccctgtcattgactggtcgaaggcgctcgcaataagactggtcgttgcttggcttttctattgtttcaggctttagcgcgcccttgcgcggcgggccgtcaagcccgtgtgctgtacagcaccaggtaaccggacagcggcttgctggattttcccggtgccattgctctggatggtgtcaccaagctggcagatgcggagtgaaccttacgaagcgacacacctgtggtagcgctgcccagaagggagcggagctcccccgccgcgaggcggtcctctctggccaaaagcccagcgttaatagcgccttctgggatgcaggaaccccacctgccaggtgtgaagtggactaagtggatctccaatttggcctgttctgaactacaccatctactgctgtgaagaatgtcctgaaggcaagctggttacagccctgatcaggagccccgctcgtgactctcgatcgacgcggggtcaaaaactgtctaagcagcagcagaaacgcgggagcgtttctttttccttatttgtttc

SEQ ID NO: 17069 - DNA, 317 bp, synthetic construct
  source 1..317: mol_type = other DNA
cggagcatggtggccgtgggaactcctccttggtgacaagggcccacggggccgaaagccacgtccaaacggacccaacatgtgtgcaaccccagcacggcaactttactgcgaacaccaccttaaggtgacactggtactggtactcggtcactggtgacaggctaaggatgcccttcaggtaccccgaggtaacacgggacactcgggatctgagaaggggattgggacttctttaaagtgcccagtttaaaaagcttctacgcctgaataggcgaccggaggccggcgcctttccattacccactactaaatcc

SEQ ID NO: 17070 - DNA, 1000 bp, synthetic construct; identical to SEQ ID NO: 1478
  source 1..1000: mol_type = other DNA

SEQ ID NO: 17071 - DNA, 522 bp, synthetic construct; identical to SEQ ID NO: 547
  source 1..522: mol_type = other DNA

SEQ ID NO: 17072 - DNA, 708 bp, synthetic construct
  source 1..708: mol_type = other DNA
ttgaaagccgggggtgggagatccggattgccagtctgctcgatatcgcaggctgggtccgtgactacccactccccctttcaacgtgaaggctacgatagtgccagggcgggtactgccgtaagtgccaccccaaaacaacaacaaaccccccctaacattactggccgacgccgcttggaataaggccggtgtgcgtttgtctatatgttatttcccaccatattgccgtcttttggcaatgtgtgggcccggaaacctggccctgtcttcttgacgagcattcctaggggtctttcccctctcgccaaaggaatgcaaggtctgttgaatgtcgtgaaggaagcagttcctctggaagcttcttgaagacaaacaacgtctgtagcggccctttgcaggcagcggaaccccccacctggcgacaggtgcctctgcggccaaaagccacgtgtataagatacacctgcaaaggcggcacaaccccagtgccacgttgtgagttggatagttgtggaaagagtcaaatggctctcctcaagcgtattcaacaaggggctgaaggatgcccagaaggtaccccattgtatgggatctgatctggggcctcggtgcacatgctttacatgtgtttagtcgaggttaaaaaacgtctaggcccccctaaccacggggacgtggttttcctttgaaaaacacgatgataat

SEQ ID NO: 17073 - DNA, 709 bp, synthetic construct
  source 1..709: mol_type = other DNA
ttgaaagccgggggtgggagatccggattgccagtctgctcgatatcgcaggctgggtccgtgactacccactccccctttcaacgtgaaggctacgatagtgccagggcgggtactgccgtaagtgccaccccaaaacaacaacaaacccccccctaacgttactggccgaagccgcttggaataaggccggtgtgcgtttgtctatatgttattttccaccatattgccgtcttttggcaatgtgagggcccggaaacctggccctgtcttcttgacgagcattcctaggggtctttcccctctcgccaaaggaatgcaaggtctgttgaatgtcgtgaaggaagcagttcctctggaagcttcttgaagacaaacaacgtctgtagcgaccctttgcaggcagcggaaccccccacctggcgacaggtgcctctgcggccaaaagccacgtgtataagatacacctgcaaaggcggcacaaccccagtgccacgttgtgagttggatagttgtggaaagagtcaaatggctctcctcaagcgtattcaacaaggggctgaaggatgcccagaaggtaccccattgtatgggatctgatctggggcctcggtgcacatgctttacatgtgtttagtcgaggttaaaaaacgtctaggcccccctaaccacggggacgtggttttcctttgaaaaacacgatgataat

SEQ ID NO: 17074 - DNA, 708 bp, synthetic construct
  source 1..708: mol_type = other DNA
ttgaaagccgggggtgggagatccggattgccagtctgctcgatatcgcaggctgggtccgtgactacccactccccctttcaacgtgaaggctacgatagtgccagggcgggtactgccgtaagtgccaccccaaaacaacaacaaaccccccctaacattactggccgacgccgcttggaataaggccggtgtgcgtttgtctatatgttatttcccaccacattgccgtcttttggcaatgtgtgggcccggaaacctggccctgtcttcttgacgagcattcctaggggtctttcccctctcgccaaaggaatgcaaggtctgttgaatgtcgtgaaggaagcagttcctctggaagcttcttgaagacaaacaacgtctgtagcggccctttgcaggcagcggaaccccccacctggcgacaggtgcctctgcggccaaaagccacgtgtataagatacacctgcaaaggcggcacaaccccagtgccacgttgtgagttggatagttgtggaaagagtcaaatggctctcctcaagcgtattcaacaaggggctgaaggatgcccagaaggtaccccattgtatgggatctgatctggggcctcggtgcacatgctttacatgtgtttagtcgaggttaaaaaacgtctaggccccccgaaccacggggacgtggttttcctttgaaaaacacgatgataat

SEQ ID NO: 17075 - DNA, 710 bp, synthetic construct; identical to SEQ ID NO: 856
  source 1..710: mol_type = other DNA

SEQ ID NO: 17076 - DNA, 704 bp, synthetic construct; identical to SEQ ID NO: 845
  source 1..704: mol_type = other DNA

SEQ ID NO: 17077 - DNA, 1000 bp, synthetic construct; identical to SEQ ID NO: 1479
  source 1..1000: mol_type = other DNA

SEQ ID NO: 17078 - DNA, 662 bp, synthetic construct; identical to SEQ ID NO: 798
  source 1..662: mol_type = other DNA

SEQ ID NO: 17079 - DNA, 1000 bp, synthetic construct; identical to SEQ ID NO: 1480
  source 1..1000: mol_type = other DNA

SEQ ID NO: 17080 - DNA, 524 bp, synthetic construct; identical to SEQ ID NO: 551
  source 1..524: mol_type = other DNA

SEQ ID NO: 17081 - DNA, 460 bp, synthetic construct; identical to SEQ ID NO: 499
  source 1..460: mol_type = other DNA

SEQ ID NO: 17082 - DNA, 419 bp, synthetic construct; identical to SEQ ID NO: 456
  source 1..419: mol_type = other DNA

SEQ ID NO: 17083 - DNA, 623 bp, synthetic construct; identical to SEQ ID NO: 732
  source 1..623: mol_type = other DNA

SEQ ID NO: 17084 - DNA, 1000 bp, synthetic construct; identical to SEQ ID NO: 1481
  source 1..1000: mol_type = other DNA

SEQ ID NO: 17085 - DNA, 869 bp, synthetic construct
  source 1..869: mol_type = other DNA
ctctctttgaccctggccactggggttcagtggcactacatctctctctcttctttatctatatcgtttctttactttactttactttactatatttcttactttactatatttcttactttacttatctatatatatctaatctttactatcttttctaactttattttcttatttcttatctttattcttttgtaactaataagcaagttttactgcctgcaaactgcttcaatgggaccaccgcttcggcgacccctttgttgagtttgtatgtttttaagtaatctttgcaaccatacgattattttagccgcctctctataatgatcttgttatagtgggacgtgaaacattggtttttctcacacacgtccggtcacccgggcgtgtgttcttccgtaagtcctatccacataccatcgtgggtaggccagcatgtttgcacaggctgtgacagtgtgggtgggctttccacctctcaacaacacactgaattgcaatgcactcacggaggaaatgacaatttggttatagttttgaactgtgctagtaatttctttcacattaagccatgttgcctgcggaatcacatgtggtaacacatgcctcagggcccaaaaggcacgggttagcagccccttcatggtgtgttagaagtgaaaacacatagtatgagctataatatctttgttgtcttctctgtagtgtaccccgccaaatgtaaggatgcccagcaggtacccattttatggatctgagctggggattgatagtgtatctataaatgcactgatcaatttaaaaagcgtctaagtttggcacaaacactggggacagtgtttttcctttattcttttatttgatta

SEQ ID NO: 17086 - DNA, 622 bp, synthetic construct
  source 1..622: mol_type = other DNA
tttgaaagcgggtgcatgcatggccattttccagcacaggttcagctggtatggcatgcatgcatcgactgcttgggggtgtccctgacccccttaattcaacgtctagcccacgatacgggcaccctatccaatttgtatccctttacctcccatggactgacttgtatggacttggatctaaattggattatcctttacttgtggtggttagccaaccatgctctggtgtaatgattccatgtgttcatttggctaagtgccgaccttggaggtgggggtgaaattttgcaagccactagcgtcgtcaactttagcctctggagatgttggattagttgcattctggacagaccaagcctcgtctataccgtgggctaatggtcttcgttgtgaagcggattaccggtagtagcatcttagacttccaaggttgtcatgagtgtgtctgtagagtaggcacacatctgtccaggcacaagcacatctctcgatcgctccagactagttcctgagggacagatgttgtggggggcttgggaaaacccccttaacctacactaccggatagggtcgcggctggtcgagtcccacacactatataccagtagacttttatgca

SEQ ID NO: 17087 - DNA, 696 bp, synthetic construct; identical to SEQ ID NO: 835
  source 1..696: mol_type = other DNA

SEQ ID NO: 17088 - DNA, 1000 bp, synthetic construct
  source 1..1000: mol_type = other DNA
gcatcttcgcggtgtagaacaccccaggggtaccccctttgaacgcgggacctgcgacagtgccaacccacgtcttttcccacttctgccccgattctcacctcgggtccaatgaaaggaccaaatatttcatcccttgagtgctggctaatcagaggaaagtcagcattttccggcccaggctaagagaaacatataagttagatttgattctgatcccttgacgaattcggaacgagacgttctccctcccttgccacttgttcacacccacattttgattcggccttttgtgacaagtcccttggtgaaagaacctctctctttccgacgtggttggaattaacatcatttccgacgaaagtgctatcatgcctccccgattgtgtgatgttttctgccctgctgggcggagcattctcgggttgagaaaccttgaatcttttcctttggaaccttggttcccccggtctaagccgcttggaatatgacagggttattttccttattcttatttctacttttatgggttctatccataaaaagggtatgtgctgccccttccttctttggagaattcacacggcggcctttccgtctctcgacaagtgtgaatgcagcatgccggaaacggtgaagaaaacagttttctgtggaagttcagagtgcacatcgaaacagctgtagcgacctcacagtagcagcggaaccccctcttggcgacaagagcctctgcggccaaaagccccgtggataagatccactgctgtgagcggtgcaaccccagcaccctgattcgatggtcactctttacggaaccagaaaatggttttctcaagcccttcggtagagaagccaagaatgtcctgaaggtaccccgcgtgcgggatctgatcaggagaccaattgacagtgctatacgctgtcactttggtttaaaaactgtcacagcttctccaaaccaagtggtcttggttttccaattttgttgactggcaat

SEQ ID NO: 17089 - DNA, 1000 bp, synthetic construct
  source 1..1000: mol_type = other DNA
ggctcactcctgtacaccgtgggtccgcgcagtgctgacttaacacttaagtaatgtataggccgagaattacaccgctcggctcccacctttcaccaccgtgggattaacaggttcaatgtacaaattcctgtctttggctatgtcaaagcaatacagtgtgtgcacatcgtacacgctcaaggcggagacttaggcctcacagattgtgttttgtgttattggatgctggatggtcacgttggagactgcatgtggcagtcttgaaacgtgtggtttgacgtctatccattatggcagtgggtggagtactgcaaagatgtcaccgtgctttacacggtttttgaaccccacaccggctgtttggcgcttgcaggacagcaggtttattttcttgtgttctctatttctagccaacagggtactatcctgttgggcggagtgatactcccgttcctccttggacagattgcctccacggtctttgtggatctcaaggtgatcaagtcactggtgaatagagcgaaggttgaggagacctgaggaatttccatgtggctttgccaggagttgtagcgatgctgtgtgtgtgtgcggatttcccctcatggcaacatgagcctcacaggccaaaagccctgtccgaaaggacccacacagtggagcaatcccagctccctcctacaaagctttgtgagaatgaactcacgtctattcttctttattctctatttacatcaggccccaaagatgtcctgaaggtaccttgtgtatctgggtatgagcaccatcgactacccggacttgcacttcggtgcagacgcacgtggtgtcccagcccctctgcttcggcaggggggcttttgctcgctcagcacgagatctgatcaggagtcccccccggtgtgctctacacccggcgggggattaaaaattgcccaaggcctggcaaaacaacctaggggactaggttttccttttgttaacaatgtctgtcatt

SEQ ID NO: 17090 - DNA, 424 bp, synthetic construct
  source 1..424: mol_type = other DNA
gttacccgcctcagtacttcgagaaacctagtacgcttgatgattccaaattggtatgatccggtcaaccccagaccagaaactgtggatgggggtcaccattcctagtatggcaacatacaggtgtccccgcgtgtgtcacaggcccttacgggtgccatttcggatgagtctggccgaagagtctattgagctactgttgatacctccggccccctgaatgcggctaatctcaaccccggagccactgggtggtgaaccaaccacttggtggtcgtaatgagcaattctgggacggaaccgactactttggggtgtccgtgtttcttttgttcatattaaactgttttatggtcacaacacaacttggtacgatttgtgattattcactgctcacttgtcacagtaaatatacacaatcatc

SEQ ID NO: 17091 - DNA, 711 bp, synthetic construct; identical to SEQ ID NO: 859
  source 1..711: mol_type = other DNA

SEQ ID NO: 17092 - DNA, 563 bp, synthetic construct; identical to SEQ ID NO: 25
  source 1..563: mol_type = other DNA

SEQ ID NO: 17093 - DNA, 788 bp, synthetic construct; identical to SEQ ID NO: 131
  source 1..788: mol_type = other DNA

SEQ ID NO: 17094 - DNA, 576 bp, synthetic construct; identical to SEQ ID NO: 627
  source 1..576: mol_type = other DNA

SEQ ID NO: 17095 - DNA, 636 bp, synthetic construct; identical to SEQ ID NO: 67
  source 1..636: mol_type = other DNA

SEQ ID NO: 17096 - DNA, 305 bp, synthetic construct; identical to SEQ ID NO: 283
  source 1..305: mol_type = other DNA

SEQ ID NO: 17097 - DNA, 793 bp, synthetic construct
  source 1..793: mol_type = other DNA
taagtaaaacgctgtaactgcatgatttgcgcctgtagcgccagtaaaacgcagaaaccacaagcaaaaacctgtagcgtcagtaaaacgcgcacattcacatacagagcttcccggctttaagggttactgctcgtaatgagagcacatgacaacttgtcgagattacggcaactgtcacgggagagaggagcccgttttcgggcacttgtctcctaaacaatgttggcgcgcatttgcgcgccccccccctttttcagccccctgtcattgactggtcgaagcgttcgcaataagactggtcgtcacttggctgttctatcgtttcaggctttagcgcgcccttgcgcggcgggccgtcaagcccgtgcgctgtatagcgccaggtaaccggacagcggcgtgctggattttcccggtgccattgctctggatggtgtcaccaagctgacaaatgcggagtgaacctcacaaagcgacacgcctgtggtagcgctgcccaaaagggagcggaactccccgccgaggcggtcctctctggccaaaagcccagcgttgatagcgccttttgggatgcaggaaccccacctgccaggtgtgaagtggagtgagcggatctccaatttggtctgttctgaactacaccatttactgctgtgaagaatgccctggaggcaagctggttacagccctgaccaggccctgcccgtgactctcgaccggcgcagggtcaaaaattgtctaagcagcagcaggaacgcgggagcgtttcttttccttttgtactgacatg

SEQ ID NO: 17098 - DNA, 762 bp, synthetic construct; identical to SEQ ID NO: 1225
  source 1..762: mol_type = other DNA

SEQ ID NO: 17099 - DNA, 1000 bp, synthetic construct
  source 1..1000: mol_type = other DNA
ggctcactcctgtacaccgtgagtccgcgcagtgctgacttaacacttaagtaatgtataggccgaggattacaccgctcggctcccacctttcaccaccgtgggattaacaggttcaatgcacaaattcctgtccttggctatgtcaaagcaatacagtgtgtacatggcgtgcacgctcaaagcggagacttaggcctcacagattgtgttttgtgttattggatgctggatggtcacgttggagactgcatgtggcagtcttgaaacgtgtggtttgacgtctatccattatggcagtgggtggagtactgcaaagatgtcaccgtgctttacacggtttttgaaccccacaccggctgtttggcgcttgcaggacagcaggtttattttcttatgttctccatttctagccaacagggttctatcctgttgggcggagtgatactcccgttccttcttggacagattgcctccacgttctttgtggatctcaaggtgatcaagtcactggtgaatagagcgaaggttgaggagacctgaggaatttccatgtggctttgccaggagttgtagcgatgctgtgtgtgtgtgcggatttcccctcatggcaacatgagcctcacaggccaaaagccctgtccgaaaggacccacacagtggagcaaccccagctccctcctacaaagctttgtgagaatgaactcaagtttattctactttattctctatttacatcaggccccaaagatgtcctgaaggtaccttgtgtatctgggcacgagcaccatcagctacccggacttgtatttcggtacagacacatgtggtgacccagcccctctgcttcggcaggggggctttcgctcgctcagcacgagatctgatcaggagcccctcccagtgtgctttacacctggcgaggggttaaaaattgcccaaggcctggcaaaacaacctaggggactaggttttccttttattaataatatctgtcatt

SEQ ID NO: 17100 - DNA, 573 bp, synthetic construct; identical to SEQ ID NO: 622
  source 1..573: mol_type = other DNA

SEQ ID NO: 17101 - DNA, 684 bp, synthetic construct
  source 1..684: mol_type = other DNA
ttctcccctctttggatgcccatagtgcgggggtataaataccgcactccctttggctgttccgagggtatcggaacctatttgtttgttttcagtctgtctgtcagctttatgtgtgctcgtcccctttagggcactcatttcagcttgctttcattcttttcttccccggttctcaccttaccggaggcactggccgttgcgcccggcggggtcaacctagtggttagcactaggctgtaggtgtctaaagtggtgacattaagacttggtgactgattccagcactgttaactgatgttggggatgacttgattgatcttctggaaggggtaggctacgggtgaaaccccttatcttaatactactatgtagagatagattcagtaggttaagggcagtggataaggttgagttcagtttggacaataagccttcaacactggtggacccaatctcactgaccagatgctttcttgtctgaaccttcagaggggtgtttcttctggataggtttccttgacactgatgcctgagacccattgggtcgggccttaaatcatggaactccacaggactttcatggcctagcttctgccttagacagactctggggccccacgaccctctgggcccttcggggtactcaggggcacttaggttttccacattcaaaaagagtta

SEQ ID NO: 17102 - DNA, 557 bp, synthetic construct; identical to SEQ ID NO: 602
  source 1..557: mol_type = other DNA

SEQ ID NO: 17103 - DNA, 331 bp, synthetic construct
  source 1..331: mol_type = other DNA
gcaagtggaaacgcgattttatatgtggctggccaccacggaataacggcaattgtttacatgtgggaagtgcaacctccctagccgatagcccttgaccgggtgtgtaggataggaaaggtgcccactgtgagcgacaggttatggtagagtggatacctagccaggggcaatgggactgctttgcatatccctaatgaagcatcgagagttctctgctcattacccggtgacggttgtgtggggggggccccacacactagatccatactgcctgatagggtcgcggctggccgaccataacctgtatagtcagttgattttaaccaag

SEQ ID NO: 17104 - DNA, 512 bp, synthetic construct
  source 1..512: mol_type = other DNA
ttttctcccctccccctccaactaccttttccccctcttgtaacgctagaagtttgtgcaaaccgcctgtagggtactgcaatccagcagtgcataggctaagcttttcttgttaccccaccccacattatactgaggaggattgtgaaattgtgttagtatgggttagtagcggtgacccgggtaaccccaacccagaaactcacggatgagatgaacaggaccccacatggtaacgtgtgtgttcgtctgccccgcaaggtgaggccgtgagagctttgcacgcgaaaaccttgaaaacccaaaagtaccttgagctcttcgctattttgtgtttcctccaggaccctgaatgcggctaaacctaacccgcgatccgcacgtagcaacccagctagagtgtggtcgtaatgcgcaagttgcgggcggtaccgactactttggtgttcctgtgtttcctttattttattttgaatttttatggtgacaacagctagaaaataagagtgaac

SEQ ID NO: 17105 - DNA, 721 bp, synthetic construct; identical to SEQ ID NO: 897
  source 1..721: mol_type = other DNA

SEQ ID NO: 17106 - DNA, 507 bp, synthetic construct
  source 1..507: mol_type = other DNA
acgaaacgcgccgtcgcttgaggaggacttgtacaaacacgatccattcaggttcccacaaccgacacaaaccgtgcaacttgaaactccgcctggtctttccaggtctggaggggtgacattttgtactgtgcttgactccacgctcggtccactggcgggtgttagtaacagcactgttgcttcgtagcggagcatggtggccgcgggaactcctccttggtaacaaggacccgcggggccgaaagccacgtcttcacggacccaccatgtgtgcaaccccagcacggcaactttactgtgaaaaccactttaaggtgacactgatactggtactcaaccactggtgacaggctaaggatgcccttcaggtaccccgaggtaacacgcgacactcgggatctgagaaggggactggggcttctttaaaagcgcctagtttaaaaagcttctacgcctgaataggtgaccggaggccggcacctttcttttaaacaactattttga

SEQ ID NO: 17107 - DNA, 934 bp, synthetic construct; identical to SEQ ID NO: 1297
  source 1..934: mol_type = other DNA

SEQ ID NO: 17108 - DNA, 966 bp, synthetic construct; identical to SEQ ID NO: 1300
  source 1..966: mol_type = other DNA

SEQ ID NO: 17109 - DNA, 548 bp, synthetic construct; identical to SEQ ID NO: 586
  source 1..548: mol_type = other DNA

SEQ ID NO: 17110 - DNA, 551 bp, synthetic construct; identical to SEQ ID NO: 594
  source 1..551: mol_type = other DNA

SEQ ID NO: 17111 - DNA, 751 bp, synthetic construct; identical to SEQ ID NO: 1207
  source 1..751: mol_type = other DNA

SEQ ID NO: 17112 - DNA, 484 bp, synthetic construct; identical to SEQ ID NO: 1366
  source 1..484: mol_type = other DNA

SEQ ID NO: 17113 - DNA, 818 bp, synthetic construct
  source 1..818: mol_type = other DNA
ctctctctttgaccctggctactggggttcagtagcatctttctttttcttactatactttactttcgacttctttctttacttattctttacttttctatcttcttttatatcttaactttacttattcaaacttttctatttctttctttattttcttatgtaactcttctttttaagttttattttgcctacttgtgagcttatgcgggaccactgtcttagacaaccccacatttgtcatgagtaagtacacgcaaccattacgattactttttaaccgtctgaccttttgataacaactgaagttaggcgtgaaacatgcatttataccaaagtagccccgcatttccccactacggtgggggggctaccctactggctttggaactgtagccattatgtgttgcctggctttcaggatctcacaacacaacagttctctcacaatggaatatgggtgagattgcagtgacatgaacaagtatctagtagtacatagactcaagcctagttgcctgcggaacaacatgtggtaacacatgccccagggtccaaaagacaagggttaacagccccttctaggtgtctgtgtgtgaagaatactttagtagtgttgttatgatctcacctgttagtacagaatgagtatggcttggtgaaggatgtcctacaggtacccattatatggatctgagtaggagaccactagtggtggctttaccgccaggtgagtggtttaaaaagcgtctagccaagccaacagcactagggatagtgctttctatattttatattttcagtgtatatggtgacaa

SEQ ID NO: 17114 - DNA, 718 bp, synthetic construct
  source 1..718: mol_type = other DNA
ggtggggtgggtacactcctcgctcaatgagtgggggtgtggctcattgcccacacctggttggttcccaggttcatacaataaccatcaataaacttctcaacatctaagctactactatcccacactaaactggacgaagccgcttggaataagtctagtttcattctgtgtgtgttttgcactgaaattatttctgtctctggggtgctttacacttcagtaggggctgtacccgggcggtcccactcttcacaggaatctgcacaggtggctttcacctctggacagtgcattccacacccgctccacagtagaagatgatgtgtgtctttgcttgtgaaaagcttgtgaaaatcgtgtgtaggcgtagcggctacttgagtgccagcggactacccctagtggtaacactagcctctgggcccaaaaggcatgtcaattgaccactcaggtacacaaccccagtgatgcacacgtctagtaacggcttagtaacgagcattgattgatcatttgaaaactgctaggaggtttaggtatgacgggctgaaggatgccctgaaggtacccataggtaaccttaagcgactatggatctgatcaggggcccaccatgtactacatgggtagaagtcttcggaccttgggttaaaaaacgtctaggcccgccccccacagggatgtggggtttcccttataaccccaatattgtata

SEQ ID NO: 17115 - DNA, 717 bp, synthetic construct
  source 1..717: mol_type = other DNA
ggtggggtgggtacacttctcgctcgatgagtgggggtgtggctcattgcccacacctggttggttcccaggttcatacaataaccatcaataaacttttaacatctaagatagtattatcccatactagactggacgaagccgcttggaataagtctagtcttatcttgtatgtgtcctgcactgaacttgtttctgtctctggagtgctctacacttcagtaggggctgtacccgggcggtcccactcttcacaggaatctgcacaggtggctttcacctctggacagtgcattccacacccgctccacggtagaagatgatgtgtgtctttgcttgtgaaaagcttgtgaaaatcgtgtgtaggcgtagcggctacttgagtgccagcggattacccctagtggtaacactagcctctgggcccaaaaggcatgtcatttgaccactcaggtacacaaccccagtgatgcacacgcttagtaatggcttagtaacaaacattgattgatcatttgaaagctgttaggaggtttaggtatgacgggctgaaggatgccctgaaggtacccataggtaaccttaagcgactatggatctgatcaggggcccaccatgtaacacatgggtagaagtcttcggaccttgggttaaaaaacgtctaggcccgccccccacagggatgtggggtttcccttataaccccaatattgtata

SEQ ID NO: 17116 - DNA, 715 bp, synthetic construct; identical to SEQ ID NO: 881
  source 1..715: mol_type = other DNA

SEQ ID NO: 17117 - DNA, 489 bp, synthetic construct; identical to SEQ ID NO: 513
  source 1..489: mol_type = other DNA

SEQ ID NO: 17118 - DNA, 732 bp, synthetic construct; identical to SEQ ID NO: 933
  source 1..732: mol_type = other DNA

SEQ ID NO: 17119 - DNA, 480 bp, synthetic construct
  source 1..480: mol_type = other DNA
gtgtggggtacatgcgtattacggtacgcatgtattccacactcatttcccccctccacccttaaggtggttgtatccacataccccaccctcccctccacaaaggatggatctacggacttgaatctttggcaagtaatatggtatgatcattggatacggacaaatggcagtagcgtggcgagctatggaaaaatcgcaattgtcgatagccatgttagtgacgcgcttcggcgtgctcctttggtgattcggcgactggttacaggagagtaggcagtgagctatgggcaaacctctgcagtattactcagagggaatgtgcaattgagacttgacgagcgtttcgtagagacgtggcgcatgctcttggcattaccatagtgagcttccaggttgggaaacctggactgggcctatactacctgatagggtcgcggctggccgcctgtaactagtatagtcagttgaaaccccccc

SEQ ID NO: 17120 - DNA, 489 bp, synthetic construct
  source 1..489: mol_type = other DNA
ttgaaatgggtgtggggtacatgcgtattacggtacgcatatatttcacactcatttcccccctccacccttaaggtggttgtatccccataccttaccctcccttccaaagcggacagacaaacggatttggacttacggcaaatacatatggtatgattttggatacaccttaacggcagtagcgtggcgagctatggaaaaatcgcaattgtcgatagccatgttagtgacgcgcttcggcgtgctcctttggtgattcggcgactggttacaggagagtaggcagtgagctatgggcaaacctctgcagtattactcagagggaatgtgcaattgagacttgacgagcgtctcttcggagatgtggcgcatgctcttggcattaccatagtgagcttccaggttgggaaacctggactgggcctatactacctgatagggtcgcggctggccgcctgtaactagtatagtcagttgaaacccccc

SEQ ID NO: 17121 - DNA, 489 bp, synthetic construct
  source 1..489: mol_type = other DNA
ttgaaatgggtgtggggtacatgcgtattacggtacgcatgtattccacactcatttccccccctccacccttaaggtggttgtatccccataccttaccctcccttctaaaacagatggacaaatggatttgaacttatggcaagtgaatatggtatgactttggatacactttaacggcagtagcgtggcgagctatggaaaaatcgcaattgtcgatagccatgttagtgacgcgcttcggcgtgctcctttggtgattcggcgactggttacaggagagtaggcagtgagctatgggcaaacctctacagtattacttagagggaatgtgcaattgagacttgacgagcgtctcttagagatgtggcgcatgctcttggcattaccatagtgagcttccaggttgggaaacctggactgggcctatactacctgatagggtcgcggctggccgcctgtaactagtatagtcagttgaaacccccc

SEQ ID NO: 17122 - DNA, 465 bp, synthetic construct
  source 1..465: mol_type = other DNA
tattacggtacgcatgtattccacactcatttcccccctccacccttaaggtggttgtatccccataccctaccctcccttccacaaaggacggacaaatggacccgaccttacggcgagtacatatggtatgattctggatacaccttaacggcagtagcgtggcgagctatggaaaaatcgcaattgtcgatagccatgttagtgacgcgcttcggcgtgctcctttggtgattcggcgactggttacaggagagtaggcagtgagctatgggcaaacctctacagtattacttagagggaatgtgcaattgagacttgacgagcgtctcctcggagatgtggcgcatgctcttggcattaccatagtgagcttccaggttgggaaacctggactgggcctatactacctgatagggtcgcggctggccgcctgtaactagtatagtcagttgaaaccccccc

SEQ ID NO: 17123 - DNA, 457 bp, synthetic construct
  source 1..457: mol_type = other DNA
tacgcatgtattccacactcatttcccccctccacccttaaggtggttgtatccccataccttaccctcccttccacaatggacggacaaatggatttgacctcacggcaaacacatatggtatgatttcggatacaccttaacggcagtagcgtggcgagctatggaaaaatcgcaattgtcgatagccatgttagtgacgcgcttcggcgtgctcctttggtgattcggcgactggttacaggagagtaggcagtgagctatgggcaaacctctacagtattacttagagggaatgtgcaattgagacttgacgagcgtctcctcggagatgtggcgcatgctcttggcattaccatagtgagcttccaggttgggaaacctggactgggcctatactacctgatagggtcgcggctggccgcctgtaactagtatagtcagttgaaaccccccc

SEQ ID NO: 17124 - DNA, 527 bp, synthetic construct; identical to SEQ ID NO: 553
  source 1..527: mol_type = other DNA

SEQ ID NO: 17125 - DNA, 713 bp, synthetic construct; identical to SEQ ID NO: 872
  source 1..713: mol_type = other DNA

SEQ ID NO: 17126 - DNA, 713 bp, synthetic construct
  source 1..713: mol_type = other DNA
atttcaaccctctcccttttggacttctctggtctggggaagtaaaataccagactcccgtttgcctagggtataggctattatttatgtttgttttgttatgtatgtcttttaatgttttgtaaatattaattccagcaggttctggtttctgaatttgtcctctttaaggcactcataatgctttctttcatcttcatttccctggctctcaccttgccagatggactgacccatgcgcccgtgggggttaaccacaggactagcctgtggctgtaggttctgaaagaggtgacattaagactatggttgtgattccacatgttttaactggtatgatgtagtagcaattgatctttggtatggggtaggctacgggtgaaaccccataggttaatactaatatttagagatacctccagtaggtgaagtgcacaggataagattgagttgttttgacaaaagatcttcaactgtggtggacaccatctcactgggccaatgcttttgttatgaaaccatattgggcatgtctcttggatgagcattcatggacactgatgcctagactagggtgaatattgccttaaatcatagagttctttgggattttatggccttgcttctgttgaacagacactggggcttatggtattcaccctggcctctggggtaatcaggggcatttaggttttccacatctatataatgct

SEQ ID NO: 17127 - DNA, 480 bp, synthetic construct
  source 1..480: mol_type = other DNA
gtgtggggtacatgcgtattacggtacgcatgtattccacactcatttcccccctccacccttaaggtggttgtatccacataccccaccctcccctccacaaaggatggatctacggacttgaatctttggcaagtaatatggtatgatcattggatacggacaaatggcagtagcgtggcgagctatggaaaaatcgcaattgtcgatagccatgttagtgacgcgcttcggcgtgctcctttggtgattcggcgactggttacaggagagtaggcagtgagctatgggcaaacctctgcagtattactcagagggaatgtgcaattgagacttgacgagcgtctcgtagagacgtggcgcatgctcttggcattaccatagtgagcttccaggttgggaaacctggactgggcctatactacctgatagggtcgcggctggccgcctgtaactagtatagtcagttgaaaccccccc

SEQ ID NO: 17128 - DNA, 465 bp, synthetic construct
  source 1..465: mol_type = other DNA
acatgggggtacgcatgtattccacactcatttcccccctccacccttaaggtggttgtatccccataccttaccctccctcccacaacggtcggactaatggacttggactaatggcaagcacaaatggtatgactctggatacacctcaatggcagtagcgtggcgagctatggaaaaatcgcaattgtcgatagccatgttagtgacgcgcttcggcgtgctcctttggtgattcggcgactggttacaggagagtaggcagtgagctatgggcaaacctctacagtattacttagagggaatgtgcaattgagacttgacgagcgtctctttgagatgtggcgcatgctcttggcattaccatagtgagcttccaggttgggaaacctggactgggcctatactacctgatagggtcgcggctggccgcctgtaactagtatagtcagttgaaaccccccc

SEQ ID NO: 17129 - DNA, 491 bp, synthetic construct; identical to SEQ ID NO: 516
  source 1..491: mol_type = other DNA

SEQ ID NO: 17130 - DNA, 490 bp, synthetic construct
  source 1..490: mol_type = other DNA
ttgaaatgggtgtggggtacatgcgtattacggtacgcatgtattccacactcatttcccccctccacccttaaggtggttgtatccctcataccttaccctcccttccaaacaggacggacaaatggacttggacttacggcaagaacatatggtatggcttttggatacggatgaatggcagtagcgtggcgagctatggaaaaatcgcaattgttgatagccatgttagtgacgcgcttcggcgtgctcctttggtgattcggcgactggttacaggagagtaggcagtgagctatgggcaaacctctgcagtattactcagagggaatgtgcaattgagacttgacgagcgtctctttgagatgtggcgcatgctcttggcattaccatagtgagcttccaggttgggaaacctggactgggcctatactacctgatagggtcgcggctggccgcctgtaactagtatagtcagttgaaacccccc

SEQ ID NO: 17131 - DNA, 475 bp, synthetic construct; identical to SEQ ID NO: 504
  source 1..475: mol_type = other DNA

SEQ ID NO: 17132 - DNA, 711 bp, synthetic construct; identical to SEQ ID NO: 860
  source 1..711: mol_type = other DNA

SEQ ID NO: 17133 - DNA, 455 bp, synthetic construct
  source 1..455: mol_type = other DNA
cgcatgtaatccacactcatttcccccctccacccttaaggtggttgtacccactcaccctaccctcccttccaaagcggatggactttacgtgtttgaaactttggcaaccacaaaaggaatggtatttggatacggatgaatggcagtagcgtggcgagctatggaaaaatcgcaattgtcgatagccatgttagtgacgcgcttcggcgtgctcctttggtgattcggcgactggttacaggagagtaggcagtgagctatgggcaaacctctacagtattacttagagggaatgtgcaattgagacttgacgagcgtctctttgagatgtggcgcatgctcttggcattaccatagtgagcttccaggttgggaaacctggactgggcctatactacctgatagggtcgcggctggccgcctgtaactagtatagtcagttgaaacccccc

SEQ ID NO: 17134 - DNA, 541 bp, synthetic construct
  source 1..541: mol_type = other DNA
aaaatggggtgcatatagcatggttcccatgctgtatgctaccccattttctcccctccccctccaactaccttttccccctctattgtaacttagaagctagtacacatagcccaataggagcaccacacccagtggtgtatagggcaagcacttctgtttccccggcttagccgttaacccccacagtactacgcgactgttagtaggtaacgtaactagtgaaggttgatccggaggtaaaccccagcctccagaaacgtgagatgagggttcagtgaccccctatggtaacatagactgatccctgcgctggctcacgggcttcgtgcactgaatctaggtaaagttactgaagccacgagtgtgctactgtggtttcctccagcgccttgaatgcggctaaccctaaccccggagcacatgcatatgatccaatatgtagtgtgtcgtaatgagcaattctgggacgggaccgactactttaggttgctgtgtttcctttatttttatatatcaatttatggtgacaagttacaag

SEQ ID NO: 17135 - DNA, 541 bp, synthetic construct
  source 1..541: mol_type = other DNA
aaaatggagtgcatatagcatggttcccatgctgtatgctaccccattttcttccctccccctccaactaccttttccccctctattgtaacttagaagctaatacacatagcccaataggggcaccacacccagtggtgtatagggcaagcacttctgtttccccggctttgccgttaacccccacagtactacgcgactgttagtaggtaacgtaactagtgaaggttgatccggaggtaaaccccaacctccagaaacgtgagatgagggttcagtaaccccctatggtaacatagactgatccctgcgctggctcacgggcttcgtgcactgaatctaggtaaagttactgaagccacgagtgtgctactgtggtttcctccagcgccttgaatgcggctaaccctaaccccggagcacatgcatataatccaatatgtagtgtgtcgtaatgagtaattctgggacgggaccgactactttaggttgctgtgtttcctttatttttatatatcaatttatggtgacaagttacaag

SEQ ID NO: 17136 - DNA, 476 bp, synthetic construct
  source 1..476: mol_type = other DNA
ggtacatgcgtattacggtacgcatgtattccacactcatttcccccctccacccttaaggtggttgtatcccacataccccacccttccttccacaaaggacggactaatggactttgacttctggcaagtacatatggtatgattattggatacgactgaatggcagtagcgtggcgagctatggaaaaatcgcaattgtcgatagccatgtcagtgacgcgcttcggcgtgctcctttggtgattcggcgactggttacaggagagtaggcagtgagctatgggcaaacctctgcagtattactcagagggaatgtgcaattgagacttgacgagcgtctcgaaagagatgtggcgcatgctcttggcattaccatagtgagcttccaggttgggaaacctggactgggcctatactacctgatagggtcgcggctggccgcctgtaactagtatagtcagttgaaacccccc

SEQ ID NO: 17137 - DNA, 476 bp, synthetic construct
  source 1..476: mol_type = other DNA
ggggtacatgcgtattacggtacgcatgtattccacactcatttcccccctccacccttaaggtggttgtatccccataccttaacctcccctccacacaggacggataaatggacttggacttttggcaagaacatatggtatgactattggatacgatttaacggcagtagcgtggcgagctatggaaaaatcgcaattgtcgatagccatgttagtgacgcgcttcggcgtgctcctttggtgattcggcgactggttacaggagagtaggcagtgagctatgggcaaacctctgcagtattactcagagggaatgtgcaattgagacttgacgagcgtctctttgagatgtggcgcatgctcttggcattaccatagtgagcttccaggttgggaaacctggactgggcctatactacctgatagggtcgcggctggccgcctgtaactagtatagtcagttgaaacccccc

SEQ ID NO: 17138 - DNA, 528 bp, synthetic construct
  source 1..528: mol_type = other DNA
atagcatggtttcccatgctgtatgctaccccattttctcccctccccctccaactaccttttccccctctattgtaacttagaagctagtacacatagcccaataggagcaccacatccagtggtgtatagggcaagcacttctgtttccccggcctagccgttaccccccacagtactacgcaactgttagtaggtaatgtgactagtgaaggttgatccggaggtaaaccccaacctccagaaacgtgagatgagggttcagtggccccctatggtaacatagactgatccctgcgctggctcacgggcttcgtgcactgaatctaggtaaagttactgaagccacgagtgtgctactgtggtttcctccagcgccttgaatgcggctaaccctaaccccggagcacatgcatataatccaatatgtagtgtgtcgtaatgagtaattctgggacgggaccgactactttaggttgctgtgtttcctttgtttttatatatcaatttatggtgacaagttacaag

SEQ ID NO: 17139 - DNA, 410 bp, synthetic construct
  source 1..410: mol_type = other DNA
ttttctcccctccccctccacttaccttttccccctcttgtaacgctagaagtttgtgcaaatcgcctgtagggtactgcaatccagcagtgcataggcaaagcttttcttgttaccccaccccacattatactgaggaggatggtgaaattgtgttagtatgggttagtagcggtgacccgggtaaccccaacccagaaactcacggatgagatgaacaggaccccacatggtaacgtgtgtgttcgtctgccccgcaaggtgaggccgtgagagctttgcacgcgaaaaccttgaaaacccaaaagtaccttgagctcttcgctattttgtgtttcctccaggaccctgaatgcggctaaacccaacccgcgatccgcacgtagcaacccagctagagtgtggtcgta

SEQ ID NO: 17140 - DNA, 491 bp, synthetic construct
  source 1..491: mol_type = other DNA
ttgaaatgggtgtggggtacacgcgtattacggtacgcatgtattccacactcatttcccccctccacccttaaggtggttgtatccacataccctaccctcccttccacaaaggacggaccctctggacctgaacttttggcaagcacatacggaatggttattggatacgattgaatggcagtagcgtggcgagctatggaaaaatcgcaattgtcgatagccatgttagtgacgcgcttcggcgtgctcctttggtgattcggcgactggttacaggagagtaggcagtgagctatgggcaaacctctgcagtattactcagagggaatgtgcaattgagacttgacgagcgtctcttggagatgtggcgcatgctcttggcattaccatagtgagcttccaggttgggaaacctggactgggcctatactacctgatagggtcgcggctggccgcctgtaactagtatagtcagttgaaaccccccc

SEQ ID NO: 17141 - DNA, 544 bp, synthetic construct; identical to SEQ ID NO: 584
  source 1..544: mol_type = other DNA

SEQ ID NO: 17142 - DNA, 524 bp, synthetic construct
  source 1..524: mol_type = other DNA
gcatggttcccatgctgtatgctaccccattttctcccctccccctccaactaccttttccccctctattgtaacttagaagctagtacacatagcccaataggagcaccacatccagtggtgtatagggcaagcacttctgtttccccggcctagccgttaccccccacagtactacgcaactgttagtaggtaatgtgactagtgaaggttgatccggaggtaaaccccaacctccagaaacgtgagatgagggttcagtggccccctatggtaacatagactgatccctgcgctggctcacgggcttcgtgcactgaatctaggtaaagttactgaagccacgagtgtgctactgtggtttcctccagcgccttgaatgcggctaaccctaaccccggagcacatgcatataatccaatatgtagtgtgtcgtaatgagtaattctgggacgggaccgactactttaggttgctgtgtttcctttgtttttatatatcaatttatggtgacaagttacaag

SEQ ID NO: 17143 - DNA, 476 bp, synthetic construct
  source 1..476: mol_type = other DNA
ggggtacatgcgtattacggtacgcatgtattccacactcatttcccccctccacccttaaggtggttgtatccccataccttaacctcccctccacacaggacggataaatggacttggacttttggcaagaacatatggtatgattattggatacgatttaacggcagtagcgtggcgagctatggaaaaatcgcaattgtcgatagccatgttagtgacgcgcttcggcgtgctcctttggtgattcggcgactggttacaggagagtaggcagtgagctatgggcaaacctctgcagtattactcagagggaatgtgcaattgagacttgacgagcgtctctttgagatgtggcgcatgctcttggcattaccatagtgagcttccaggttgggaaacctggactgggcctatactacctgatagggtcgcggctggccgcctgtaactagtatagtcagttgaaacccccc

SEQ ID NO: 17144 - DNA, 889 bp, synthetic construct
  source 1..889: mol_type = other DNA
tgcacgtacagggaacatagccctgaagacgtgcaccccgctttccgacctgcaagtcgttaaactgcaattggtctttgggatagaccttaaacatcctagtaggacggatttcacggtctgacttggaaatgttaacctggacttgagtttggattgtgattccccgggaatgtggagtacccggttaggcaggacttatttttactgcctctccaccttagtttatcacctccttatgaaggatccattagtactattatgatgaaaatggatgaatgggctagcgccagttagattgcctagagactacctccctggtaacagggactctagggcccaaaaggctaggtggtcggattagcaaccaagaaagggtttatgattaacccaatctgaacttgcgtcctaagccacccgtctaacccctgaccccgaggcgttcgtctattagtagttgtaatgtggaaagtgttggtctcttataaggattgtttaagctaagaaatcttggatccgtgagagtagatgccctggaggttattactgaccaggggaccgtgactatagcgctccgctaaaccggtttaaaaaccatgaaattgtgggtccaagtgcttttcttaattttatttttatttaatggattgcattgacgaagttgattgtgcacagtgtgatcaaccatcaataaccctgagagtggtgttgaaagtgattcaattttttgagtgtgcttttgaatgggtgcatcacctaccaaaaacctcagagacagtggaagaagtcaattgccatcagccagagaatttcgaggattgagttgggaaaataaaccttgtactcagttgacaacggattgttgtaaaggaggtcaattgattggaaa

SEQ ID NO: 17145 - DNA, 477 bp, synthetic construct
  source 1..477: mol_type = other DNA
ggggtacatgcgtattacggtacgcatgtattccacactcatttcccccctccacccttaaggtggttgtatccccataccttaacctcccctccacacaggacggatctatggaatttgacttttggcaagaacatatggtatgattaatggatacgatttaacggcagtagcgtggcgagctatggaaaaatcgcaattgtcgatagccatgttagtgacgcgcttcggcgtgctcctttggtgattcggcgactggttacaggagagtaggcagtgaactgtgggcaaacctctgcagtattactcagagggaatgtgcaattgagacttgacgagcgtctctttgagatgtggcgcatgctcttggcattaccatagtgagcttccaggttgggaaacctggacagggcctatactacctgatagggtcgcggctggccgcctgtaactagtatagtcagttgaaaccccccc

SEQ ID NO: 17146 - DNA, 491 bp, synthetic construct
  source 1..491: mol_type = other DNA
ttgaaatgggtgtggggtacatgcgtattacggtacgcatgtattccacactcatttcccccctccacccttaaggtggttgtatccacataccctaccctcccttccacacaggacggacttttggacttggactttcggcaagcacatatggtatgattgctggatacaccttgaatggcagtagcgtggcgagctatggaaaaatcgcaattgtcgatagccatgttagtgacgcgcttcggcgtgctcctttggtgattcggcgactggttacaggagagtaggcagtgagctatgggcaaacctctgcagtattactcagagggaatgtgcaattgagacttgacgagcgtctctttgagatgtggcgcatgctcttggcgttaccatagtgagcttccaggttgggaaacctggactgggcctatactacctgatagggtcgcggctggccgcctgtaactagtatagtcagttgaaaccccccc

SEQ ID NO: 17147 - DNA, 491 bp, synthetic construct
  source 1..491: mol_type = other DNA
ttgaaatgggtgtggggtacatgcgtattacggtacgcatgtattccacactcatttcccccctccacccttaaggtggttgtatccacataccctaccctcccttccacacaggacggacttttggacttggaccttcggcaagcacatatggtatgattactggatacaccttgaatggcagtagcgtggcgagctatggaaaaatcgcaattgtcgatagccatgttagtgacgcgcttcggcgtgctcctttggtgattcggcgactggttacaggagagtaggcagtgagctatgggcaaacctctgcagtattactcagagggaatgtgcaattgagacttgacgagcgtctcctagagatgtggcgcatgctcttggcattaccatagtgagcttccaggttgggaaacctggactgggcctatactacctgatagggtcgcggctggccgcctgtaactagtatagtcagttgaaaccccccc

SEQ ID NO: 17148 - DNA, 489 bp, synthetic construct; identical to SEQ ID NO: 514
  source 1..489: mol_type = other DNA

SEQ ID NO: 17149 - DNA, 581 bp, synthetic construct; identical to SEQ ID NO: 634
  source 1..581: mol_type = other DNA

SEQ ID NO: 17150 - DNA, 489 bp, synthetic construct
  source 1..489: mol_type = other DNA
gaaatgagtgtggggtacatgcgtattacggtacgcatgtattccacactcatttcccccctccacccttaaggtggttgtatcccacataccttatcctcccctccacacaggacggatctatggactttgacctttggcaagtatatatggtatgattattggatacgattaaacggcagtagcgtggcgagctatggaaaaatcgcaattgtcgatagccatgttagtgacgcgcttcggcgtgctcctttggtgattcggcgactggttacaggagagtaggcagtgagctatgggcaaacctctgcagtattactcagagggaatgtgcaattgagacttgacgagcgtctctttgagatgtggcgcatgctcttggcattaccatagtgagcttccaggttgggaaacctggactgggcctatactacctgatagggtcgcggctggccgcctgtaactagtatagtcagttgaaaccccccc

SEQ ID NO: 17151 - DNA, 468 bp, synthetic construct
  source 1..468: mol_type = other DNA
cgtattacggtacgcatgtattccacactcatttcccccctccacccttaaggtggttgtatcccatataccccacccttccttccacaaaggacggactaatggactttgacttctggcaagtacatatggtatgattattggatacgactgaatggcagtagcgtggcgagctatggaaaaatcgcaattgtcgatagccatgtcagtgacgcgcttcggcgtgctcctttggtgattcggcgactggttacaggagagtaggcagtgagctatgggcaaacctctgcagtattactcagagggaatgtgcaattgagacttgacgagcgtctcgaaagagatgtggcgcatgctcttggcattaccatagtgagcttccaggttgggaaacctggactgggcctatactacctgatagggtcgcggctggccgcctgtaactagtatagtcagttgaaacccccc

SEQ ID NO: 17152 - DNA, 468 bp, synthetic construct
  source 1..468: mol_type = other DNA
gcgtattacggtacgcatgtattccacactcatttcccccctccacccttaaggtggttgtatccccataccttaccctcccttccacactggacggacaaatggacttgaacttatggcaagcacacatggtatgactaatggatacacctaaacggtagtagcgtggcgagctatggaaaaatcgcaattgtcgatagccatgttagtgacgcgcttcggcgtgctcctttggtgattcggcgactggttacaggagagtaggcagtgagctatgggcaaacctctgcagtattactcagagggaatgtgcaattgagacttgacgagcgtctcttggagatgtggcgcatgctcttggcattaccatagtgagcttccaggttgggaaacctggactgggcctatactacctgatagggtcgcggctggccgcctgtaactagtatagtcagttgaaaccccccc

SEQ ID NO: 17153 - DNA, 488 bp, synthetic construct; identical to SEQ ID NO: 14
  source 1..488: mol_type = other DNA

SEQ ID NO: 17154 - DNA, 754 bp, synthetic construct; identical to SEQ ID NO: 129
  source 1..754: mol_type = other DNA

SEQ ID NO: 17155 - DNA, 444 bp, synthetic construct
  source 1..444: mol_type = other DNA
ccacactcatttcccccctccacccttaaggtggttgtatccccataccctaccctcccttccaaagcggatggataaatggacttgacctcacggcgagtacaaatggtatgattttggatgcaccttaatggtagtagcgtggcgagctatggaaaaatcgcaattgtcgatagccatgttagtgacgtgcttcggcgtgctcctttggtgattcggcgactggttacaggagagtaggcagtgagctatgggcaaacctctacagtattacttagagggaatgtgcaattgagacttgacgagcgtctctttgagatgtggcgcatgctcttggcattaccatagtgagcttccaggttgggaaacctggactgggcctatactacctgatagggtcgcggctggccgcctgtaactagtatagtcagttgaaaccccccc

SEQ ID NO: 17156 - DNA, 465 bp, synthetic construct
  source 1..465: mol_type = other DNA
attacggtacgcatgtattccacactcatttcccccctccacccttaaggtggttgtatcccacataccttaccctcccctccacacaggacggatctatggactttgacctttggcaagcatatatggtatgattattggatacgattaaacggcagtagcgtggcgagctatggaaaaatcgcaattgtcgatagccatgttagtgacgcgcttcggcgtgctcctttggtgattcggcgactggttacaggagagtaggcagtgagctatgggcaaacctctgcagtattactcagagggaatgtgcaattgagacttgacgagcgtctctttgagatgtggcgcatgctcttggcattaccatagtgagcttccaggttgggaaacctggactgggcctatactacctgatagggtcgcggctggccgcctgtaactagtatagtcagttgaaaccccccc

SEQ ID NO: 17157 - DNA, 468 bp, synthetic construct
  source 1..468: mol_type = other DNA
gcgtattacggtacgcatgtattccacactcatttcccccctccacccttaaggtggttgtatccccataccttaacctcccctccacacaggacggatctatggaacttgacttttggcaagaacatatggtatgattgatggatacgatttaacggcagtagcgtggcgagctatggaaaaatcgcaattgtcgatagccatgttagtgacgcgcttcggcgtgctcctttggtgattcggcgactggttacaggagagtaggcagtgagctatgggcaaacctctgcagtattactcagagggaatgtgcaattgagacttgacgagcgtctctttgagatgtggcgcatgctcttggcattaccatagtgagcttccaggttgggaaacctggactgggcctatactacctgatagggtcgcggctggccgcctgtaactagtatagtcagttgaaaccccccc

SEQ ID NO: 17158 - DNA, 464 bp, synthetic construct; identical to SEQ ID NO: 500
  source 1..464: mol_type = other DNA

SEQ ID NO: 17159 - DNA, 548 bp, synthetic construct; identical to SEQ ID NO: 587
  source 1..548: mol_type = other DNA

SEQ ID NO: 17160 - DNA, 401 bp, synthetic construct
  source 1..401: mol_type = other DNA
ggaaacttaccctcccttccacacagaacggataaatggacttgaacttatggcaagaacatacggtatgattttggatacacctaaatggcagtagcgtggcgagctatggaaaaatcgcaattgtcgatagccatgttagtgacgcgcttcggtgtgctcctttggtgattcggcgactggttacaggagagtaggcagtgagctatgggcaaacctctgcagtattactcagagggaatgtgcaattgagacttgacgagcgtctctttgagatgtggcgcatgctcttggcattaccatagtgagcttccaggttgggaaacctggactgggcctatactacctgatagggtcgcggctggccgcctgtaactagtatagtcagttgaaaccccccc

SEQ ID NO: 17161 - DNA, 423 bp, synthetic construct
  source 1..423: mol_type = other DNA
ccttaaggtggttgtatcccacataccccaccctcccttccaaagcggatggattgctggaccctgactaatggcaagtctatatggtatgatatttggatacatttgaatggcagtagcgtggcgagctatggaaaaatcgcaattgtcgatagccatgttagtgacgcgcttcggcgtgctcctttggtgattcggcgactggttacaggagagtaggcagtgagctatgggcaaacctctacagtattacttagagggaatgtgcaattgagacttgacgagcgtctctttgagatgtggcgcatgctcttggcattaccatagtgagcttccaggttgggaaacctggactgggcctatactacctgatagggtcgcggctggccgcctgtaactagtatagtcagttgaaaccccccc

SEQ ID NO: 17162 - DNA, 666 bp, synthetic construct; identical to SEQ ID NO: 804
  source 1..666: mol_type = other DNA

SEQ ID NO: 17163 - DNA, 468 bp, synthetic construct
  source 1..468: mol_type = other DNA
gcgtattacggtacgcatgtattccacactcatttccccccctccacccttaaggtggttgtatccacttaccctatcctcccttccaaaacggacggacttttggacttgaaacttcggcaagcaatatggtatgatttttggatacacttgaatggcagtagcgtggcgagctatggaaaaatcgcaattgtcgatagccatgttagtgacgcgcttcggcgtgctcctttggtgattcggcgactggttacaggagagtaggcagtgagctatgggcaaacctctgcagtattactcagagggaatgtgcaattgagacttgacgagcgtctcgtagagatgtggcgcatgctcttggcattaccatagtgagcttccaggttgggaaacctggactgggcctatactacctgatagggtcgcggctggccgcctgtaactagtatagtcagttgaaaccccccc

SEQ ID NO: 17164 - DNA, 477 bp, synthetic construct
  source 1..477: mol_type = other DNA
ggggtacatgcgtattacggtacgcatgtattccacactcatttcccccctccacccttaaggtggttgtatccccataccttaccctcccctccacataggacggataaacggactttgacatatggcaagtacacatggtatgatatttggatacacttgaatggcagtagcgtggcgagctatggaaaaatcgcaattgtcgatagccatgttagtgacgcgcttcggcgtgctcctttggtgattcggcgactggttacaggagagtaggcagtgagctatgggcaaacctctgcagtattactcagagggaatgtgcaattgagacttgacgagcacctcgtagaggtgtggcgcatgctcttggcattaccatagtgagcttccaggttgggaaacctggactgggcctatactacctgatagggtcgcggctggccgcctgtaactagtatagtcagttgaaaccccccc

SEQ ID NO: 17165 - DNA, 1000 bp, synthetic construct
  source 1..1000: mol_type = other DNA
gctcactcctgtacaccgtgagtccgcgcagtgctgacttaacacttaagtaatgtatagaccgagaattacaccgctcggctcccacctttcaccaccgtgggattaacaggttcaatgcacaaattcctgtctttggctatgtcaaagcaatacagtgtgtacgcatcgtacgcgctcaaggcggagacttaggcctcacagattgtgttttgtgttattggatgctggatggtcacgttggagactgcatgtggcagtcttgaaacgtgtggtttgacgtctatccattatggcagtgggtggagtactgcaaagatgtcaccgtgctttacacggtttttgaaccccacaccggctgtttggcgcttgcaggacagcaggtttattttcttgtgttctctatttctagccaacagggtactatcctgttgggcggagtgatactcccgttccttcttggacagattgcctccacggtctttgtggatctcaaggtgatcaagtcactggtgaatagagcgaaggttgaggagacctgaggaatttccatgtggctttgccaggagttgtagcgatgctgtgtgtgtgtgcggatttcccctcatggtaacatgagcctcacaggccaaaagccctgtccgaaaggacccacacagtggagcaacccccagctccctcctacaaagctttgtgagaatgaactcacgtttattcttctttattctctatttacatcaggccccaaagatgtcctgaaggtaccttgtgtatctgggcatgagcaccatcgactacccggacttgtactttggtacagacgcatgtggtgtctcagcccctctgctccggcaggggggcttttgctcgctcagcacgagatctgatcaggagtcccccccggtgtgctttacacccggcgggagattaaaaattgcccaaggcctggcaaaacaacctaggggactaggttttccttttatcaacaatgtctgtcatt

SEQ ID NO: 17166 - DNA, 461 bp, synthetic construct
  source 1..461: mol_type = other DNA
acggtacgcatgtattccacactcatttcccccctccacccttaaggtggttgtatcccacataccttaccctcccctccacataggacggatctatggactttgacctttggcaagcacatatggtatgattattggatacgattaaacggcagtagcgtggcgagctatggaaaaatcgcaattgtcgatagccatgttagtgacgcgcttcggcgtgctcctttggtgattcggcgactggttacaggagagtaggcagtgagctatgggcaaacctctgcagtattactcagagggaatgtgcaattgagacttgacgagcgtctctttgagatgtggcgcatgctcttggcattaccatagtgagcttccaggttgggaaacctggactgggcctatactacctgatagggtcgcggctggccgcctgtaactagtatagtcagttgaaacccccc

SEQ ID NO: 17167 - DNA, 477 bp, synthetic construct
  source 1..477: mol_type = other DNA
ggggtacatgcgtattacggtacgcatgtattccacactcatttcccccctccacccttaaggtggttgtatcccacataccttatcctcccctccacacaggacggatctaaggactttgacctttggcaagtatatatggtatgattattggatacgattgaacggcagtagcgtggcgagctatggaaaaatcgcaattgtcgatagccatgttagtgacgcgcttcggcgtgctcctttggtgattcggcgactggttacaggagagtaggcagtgagctatgggcaaacctctgcagtattactcagagggaatgtgcaattgagacttgacgagcgtctctttgagatgtggcgcatgctcttggcattaccatagcgagcttccaggttgggagacctggactgggcctatactacctgatagggtcgcggctggccgcctgtaactagtatagtcagttgaaacccccc

SEQ ID NO: 17168 - DNA, 452 bp, synthetic construct
  source 1..452: mol_type = other DNA
atgtattccacactcatttcccccctccacccttaaggtggttgtatcccacataccttatcctcccctccacacaggatggatttatggactttgacctttggctagcacatatggtatgattattggatacgattaaacggcagtagcgtggcgagctatggaaaaatcgcaattgtcgatagccatgttagtgacgcgcttcggcgtgctcctttggtgattcggcgactggttacaggagagtaggcagtgagctatgggcaaacctctgcagtgttactcagagggaatgtgcaattgagacttgacgagcgtctcctagagatgtggcgcatgctcttggcattaccatagtgagcttccaggttgggagacctggactgggcctatactacctgatagggtcgcggctggccgcctgtaactagtatagtcagttgaaacccccc

SEQ ID NO: 17169 - DNA, 762 bp, synthetic construct; identical to SEQ ID NO: 130
  source 1..762: mol_type = other DNA

SEQ ID NO: 17170 - DNA, 446 bp, synthetic construct
  source 1..446: mol_type = other DNA
ccacactcatttcccccctccacccttaaggtggttgtatcccacataccttatcctcccttccacacaggacggatctatggactttgacctttggcaagcatatatggtatgattattggatacgattaaacggcagtagcgtggcgagctatggaaaaatcgcaattgtcgatagccatgttagtgacgcgcttcggcgtgctcctttggtgattcggcgactggttacaggagagtaggcagtgagctatgggcaaacctctgcagtattactcagagggaatgtgcaattgagacttgacgagcgtctctttgagatgtggcgcatgctcttggcattaccatagtgagcttccaggttgggaaacctggactgggcctatactacctgatagggtcgcggctggccgcctgtaactagtatagtcagttgaaaccccccc

SEQ ID NO: 17171 - DNA, 467 bp, synthetic construct
  source 1..467: mol_type = other DNA
gtattacggtacgcatgtattccacactcatttcccccctccacccttaaggtggttgtatcccacataccttatcctcccctccacacaggatggatttatggactttgacctttggcaagcacatatggtatgattattggatacgattaaacggcagtagcgtggcgagctatggaaaaatcgcaattgtcgatagccatgttagtgacgcgcttcggcgtgctcctttggtgattcggcgactggttacaggagagtaggcagtgagctatgggcaaacctctgcagtattactcagagggaatgtgcaattgagacttgacgagcgtctctttgagatgtggcgcatgctcttggcattaccatagtgagcttccaggttgggaaacctggactgggcctatactacctgatagggtcgcggctggccgcctgtaactagtatagtcagttgaaaccccccc

SEQ ID NO: 17172 - DNA, 460 bp, synthetic construct
  source 1..460: mol_type = other DNA
cggtacgcatgtattccacactcatttcccccctccacccttaaggtggttgtatccccataccctaccctcccttccacatcggatggataaacggacttggacttaaggcgagcatatatggtatgattgatggatacacttaaatggcagtagcgtggcgagctatggaaaaatcgcaattgtcgatagccatgttagtgacgcgcttcggcgtgctcctttggtgattcggcgactggttacaggagagtaggcagtgagctatgggcaaacctctgcagtattactcagagggaatgtgcaattgagacttgacgagcgtctcctagagatgtggcgcatgctcttggcattaccatagtgagcttccaggttgggaaacctggactgggcctatactacctgatagggtcgcggctggccgcctgtaactagtatagtcagttgaaaccccccc

SEQ ID NO: 17173 - DNA, 455 bp, synthetic construct; identical to SEQ ID NO: 494
  source 1..455: mol_type = other DNA

SEQ ID NO: 17174 - DNA, 441 bp, synthetic construct
  source 1..441: mol_type = other DNA
acactcatttcccccctccacccttaaggtggttgtatccccataccctaccctcccttccaaagcggatggacacaaggacttggactcacggcaagtgcacatggtatgattttggatacaccttaacggcagtagcgtggcgagctatggaaaaatcgcaattgtcgatagccatgttagtgacgcgcttcggcgtgctcctttggtgattcggcgactggttacaggagagtaggcagtgaactatgggcaaacctctgcagtattactcagagggaatgtgcaattgaggcttgacgagcgtctcgtagagatgtggcgcatgctcttggcattaccatagtgagcttccaggttgggaaacctggactgggcctatactacctgatagggtcgcggctggccgcctgtaactagtatagtcagttgaaacccccc

SEQ ID NO: 17175 - DNA, 566 bp, synthetic construct
  source 1..566: mol_type = other DNA
agtaaagcagatagaggttctggactggcaaactttacctcgaaacacgcccgtttttcctgctgtgtttcacagtctgtcctgtcacacttgtggcggcttgcgacactgtgaacatagtgagaccgaccaagacaacaacttcaaatgatgaacctcgaacacctagactggatccgtagctggacatgttagggcaaggatctcccccctggtaacaggagccttgctggccaaaagccccgctctttgagcctagcatgttgttgaccccggactgtccagtttagttagtacatgggattcacttgtcatggttcctctgaactcgatctctagtgcggcagcctaaggatgccctccaggtaccccggggtaacaagcgacacccgggatctgaggaggggactactttacgtagtttaaaaaacgtctaagctgttacggtgaccagaggctggcacctttcatttttaaaacaaactactgattacaattgaagtgataacggttttacagactttcaaactagtaacacaagtactgttttccaacgcacgcatttt

SEQ ID NO: 17176 - DNA, 430 bp, synthetic construct; identical to SEQ ID NO: 473
  source 1..430: mol_type = other DNA

SEQ ID NO: 17177 - DNA, 734 bp, synthetic construct
  source 1..734: mol_type = other DNA
ttcaagaggggtctccggagttttccggaacccctcttggaagtccatggtgaggggacttgatacctcaccgccgtttgcctaggctataggctaaatttccctttccctgtccttcccctatttccttttgttttgtttgtaaatattaattcctgcaggttcagggttctttaatctgtttctctataagaacactcaatttttcacgctttctgtctcctttcttccagggctctccccttgccctaggctctggccgttgcgcccggcggggtcaactccatgattagcatggagctgtaggagtctaaattggggacgcagatgtttgggacgtcgccttgcagtgttaacttggctttcatgaacctctttgatcttccacaaggggtaggctacgggtgaaacctcttaggctaatacttcaatgaagagatgccttggatagggtaacagcggcggatattggtgagttgttaagacaaaaaccattcaacgccggaggactggctctcatccagtggatgcattgagggaattgattgtcagggctgtctctaggtttaatctcagacctctctgtgcttagggcaaacactatttggccttaaatgggatcctgtgagagggggtccctccattgacagctggactgttctttggggccttatgtggtgtttgcctctgaggtactcaggggcatttaggtttttcctcattcttaaataata

SEQ ID NO: 17178 - DNA, 447 bp, synthetic construct
  source 1..447: mol_type = other DNA
tattccacactcatttcccccctccaccattaaggtggttgtatccccataccttaccctcccttccacactggacggataaatggacttggatttatggcaagtacatatggtatgaatctggatacacttgaatggcagtagcgtggcgagctatggaaaaatcgcaactgtcgatagccatgttagtgacgcgcttcggcgtgctcctttggtgattcggcgactggttacaggagagtaggcagtgagctatgggcaaacctctgcagtattactcagagggaatgtgcaattgagacttgacgagcgtctctctgagatgtggcgcatgctcttggcattaccatagtgagcttccaggttgggaaacctggactgggcctatactacctgatagggtcgcggctggccgcctgtaactagtatagtcagttgaaacccccc

SEQ ID NO: 17179 - DNA, 663 bp, synthetic construct; identical to SEQ ID NO: 799
  source 1..663: mol_type = other DNA

SEQ ID NO: 17180 - DNA, 634 bp, synthetic construct; identical to SEQ ID NO: 761
  source 1..634: mol_type = other DNA

SEQ ID NO: 17181 - DNA, 417 bp, synthetic construct
  source 1..417: mol_type = other DNA
ttaaggtggttgtatcccataccctaccctcccttccacaaaggacggataaatggacttgaacttatggcatggacatacggtatgattttggatacaccttaatggcagtagcgtggcgagctatggaaaaatcgcaattgtcgatagccatgttagtgacgcgcttcggcgtgctcctttggtgattcggcgactggttacaggagagtaggcagtgagctatgggcaaacctctgcagtattactcagagggaatgtgcaattgagacttgacgagcgtctcctcgagacgtggcgcatgctcttggcattaccatagtgagcttccaggttgggaaacctggactgggcctatactacctgatagggtcgcggctggccgcctgtaactagtatagtcagttgaaacccccc

SEQ ID NO: 17182 - DNA, 733 bp, synthetic construct
  source 1..733: mol_type = other DNA
ttcaagaggggtctccggagttttccggagcctctcttggaagtccatggtgaggggacttgatacctcaccgccgtttgcctaggctataggctaaacttccctttccctgcctttcccctattttcctttgttttgtttgtaaatattaattcctgcaggttcagggttctttaatctgtttctctataagaacactcaattttcacgctttctgtctcctttcttccagggctctccccttgccctaggctctggccgttgcgcccggcggggtcaactccatgattagcatggagctgtaggagtctaaattggggacgcagatgtttgggacgtcgccttgcagtgttaacttggctttcatgaacctctttgatcttccacaaggggtaggctacgggtgaaacctcttaggctaatacttctatgaagagatgccttggatagggtaacagcggcggatattggtgagttgttaagacaaaaaccattcaacgccggaggactggctctcatccagtggatgcattgagtgaattgactgtcagggctgtctctaggtttaatctcagacctctctgtgcttagggcaaacactatttggccttaaatgggatcctgtgagagggggtccctccattgacagctggactgttctttggggccttatgtggtgtttgcctctgaggtactcaggggcatttaggtttttcctcattctctaataata

SEQ ID NO: 17183 - DNA, 733 bp, synthetic construct
  source 1..733: mol_type = other DNA
ttcaagaggggtgtccggagttttccggagcctctcttggaagtccatggtgaggggacttgatacctcaccgccgtttgcctaggctataggctaaatttccctttccctgtccttcccctattcccctttgttttgtttgtaaatattaattcctgcaggttcagggttctttaatttgtttctctataagaacactcaattttcacgctttctgtcttctttcttccagggctctccccttgccctaggctctggccgttgcgcccggcggggtcaactccatgattagcatggagctgtaggagtctaaattggggacgcagatgtttgggacgtcgccttgcagtgttaacttggctctcatgaacctctttgatcttccacaaggggtaggctacgggtgaaacctcttaggctaatacttctatgaagagatgccttggatagggtaacagcggcggatattggtgagttgttaagacaaaaaccattcaacgccggaggactggctctcatccagtggatgcattgagtgaattgattgtcagggctgtctctaggtttaatcccagacctctctgtgcttagggcaaacactatttggccttaaatgggaccctgtgagagggggtccctccattgacagctggactgttctttggggccttatgtggtgtttgcctctgaggtactcaggggcatttaggtttttcctcattcttaaacaata

SEQ ID NO: 17184 - DNA, 733 bp, synthetic construct
  source 1..733: mol_type = other DNA
ttcaagaggggtgtccggagttttccggagcctctcttggaagtccatggtgaggggacttgatacctcaccgccgtttgcctaggctataggctaaatttccctttccctgtccttcccctattcccctttgttttgtttgtaaatattaattcctgcaggttcagggttctttaatctgtttctctataagaacactcaattttcacgctttctgtcttctttcttccagggctctccccttgccctaggctctggccgttgcgcccggcggggtcaactccatgattagcatggagctgtaggagtctaaattggggacgcagatgtttgggacgtcgccttgcagtgttaacttggctctcatgaacctctttgatctttcacaaggggtaggctacgggtgaaacctcttaggctaatacttctatgaagagatgccttggatagggtaacagcggcggatattggtgagttgttaagacaaaaaccattcaacgccggaggactggctctcatccagtggatgcattgagtgaattgattgtcagggctgtctctaggtttaatcccagacctctctgtgcttagggcaaacactatttggccttaaatgggatcctgtgagagggggtccctccattgacagctggactgttctttggggccttatgtagtgtttgcctctgaggtactcaggggcatttaggtttttcctcattcttaaacaata

SEQ ID NO: 17185 - DNA, 603 bp, synthetic construct; identical to SEQ ID NO: 38
  source 1..603: mol_type = other DNA

SEQ ID NO: 17186 - DNA, 733 bp, synthetic construct
  source 1..733: mol_type = other DNA
ttcaagaggggtctccggagttttccggagcccctcttggaagtccatggtgaggggacttgatacctcaccgccgtttgcctaggctataggctaagtttccctttccctgtcccttccttatttccctttgtcttgtttgtaaatattaattcctgcaggttcagggttctttaatctgtttctctataagaacactcaattttcacgctttctgtcttctttcttccagggctctccccttgccctaggctctggccgttgcgcccggcggggtcaacttcatgattagcatggagctgtaggagtctaaattggggacgcagatgtttgggacgtcgccttgcagtgttaacttggctctcatgaacctctttgatcttccataaggggtaggctacgggtgaaactccttaggctaatacttctatgaagagatgccttggatagggtaacagcggcggatattggtgagttgttaagacaaaaaccattcaacgccggaggactggctctcatccagtggatgcattgagtgaattgattgtcagggctgtctctaggtttaatctcagacctctctgtgcttagggcaaacactatttggccttaaatgggatcctgtgagagggggtccctccattgacagctggactgttctttggggccttatgtagtgtttgcctctgaggtactcaggggcatttaggtttttcctcattcttaaacaata

SEQ ID NO: 17187 - DNA, 733 bp, synthetic construct
  source 1..733: mol_type = other DNA
ttcaagaggggtctccggagttttccggagcccctcttggaagtccgtggtgaggggacttgatacctcaccgccgtttgcctaggctataggctaagtttccctttccctgtcccttccttatttccctttgtcttgtttgtaaatattaattcctgcaggttcagggttctttaatctgtttctctataagaacactcaattttcacgctttctgtcttctttcttccagggctctccccttgccctaggctctggccgttgcgcccggcggggtcaacttcatgattagcatggagctgtaggagtctaaattggggacgcagatgtttgggacgtcgccttgcagtgttaacttggctctcatgaacctctttgatcttccataaggggtaggctacgggtgaaactccttaggctaatacttctatgaagagatgccttggatagggtaacagcggcggatattggtgagttgttaagacaaaaaccattcaacgccggaggactggctctcatccagtggatgcattgagtgaattgattgtcagggctgtctctaggtttaatctcagacctctctgtgcttagggcaaacactatttggccttaaatgggatcctgtgagagggggtccctccattgacagctggactgttctttggggccttatgtagtgtttgcctctgaggtactcaggggcatttaggtttttcctcattcttaaacaata

SEQ ID NO: 17188 - DNA, 733 bp, synthetic construct
  source 1..733: mol_type = other DNA
ttcaagaggggtctccggagttttccggagcccctcttggaagtccatggtgaggggacttgatacctcaccgccgtttgcctaggctataggctaagtttccctttccctgtcccttccttatttccctttgtcttgtttgtaaatattaattcctgcaggttcagggttctttaatctgtttctctataagaacactcaatttttacgctttctgtcttctttcttccagggctctccccttgccctaggctctggccgttgcgcccggcggggtcaacttcatgattagcatggagctgtaggagtctaaattggggacgcagatgtttgggacgtcgccttgcagtgttaacttggctctcatgaacctctttgatcttccataaggggtaggctacgggtgaaactccttaggctaatacttctatgaagagatgccttggatagggtaacagcggcggatattggtgagttgttaagacaaaaaccattcaacgccggaggactggctctcatccagtggatgcattgagtgaattgattgtcagggctgtctctaggtttaatctcagacctctctgtgcttagggcaaacactatttggccttaaatgggatcctgtgagagggggtccctccattgacagctggactgttctttggggccttatgtagtgtttgcctctgaggtactcaggggcatttaggtttttcctcattcttaaacaata

SEQ ID NO: 17189 - DNA, 733 bp, synthetic construct
  source 1..733: mol_type = other DNA
ttcaagaggggtctccggagttttccggagcctctcttggaagtccatggtgaggggacttgatacctcaccgccgtttgcctaggctataggctaaatttccctttccctgtccttcccctattcccctttgttttgtttgtaaatattaattcctgcaggttcagggctctttaatctgtttctctataagaacactcaattttcacgctttctgtcttctttcttccagggctctccccttgccctaggctctggccgttgcgcccggcggggtcaactccatgattagcatggagctgtaggagtctaaattggggacgcagatgtttgggacgtcgccttgcagtgttaacttggctctcatgaacctctttgatcttccacaaggggtaggctacgggtgaaacctcttaggctaatacttctatgaagagatgccttggatagggtaacagcggcggatattggtgagttgttaagacaaaaaccattcaacgccggaggactggctctcatccagtggatgcattgagtgaattgattgtcagggctgtctctaggtttaatcccagacctctctgtgcttagggcaaacactatttggccttaaatgggaccctgtgagagggggtccctccattgacagctggactgttctttggggccttatgtggtgtttgcctctgaggtactcaggggcatttaggtttttcctcattcttaaacaata

SEQ ID NO: 17190 - DNA, 734 bp, synthetic construct
  source 1..734: mol_type = other DNA
ttcaagaggggtttccggagttttccggaacccctcttggaagtccatggtgaggggacttgatacctcaccgccgtttgcctaggctataggctaaatttccctttccctgtccttcccctatttccttttgttttgtttgtaaatattaattcctgcaggttcagggttctttaatctgtttctctataagaacactcaatttttcacgctttctgtctcctttcttccagggctctccccttgccctaggctctggccgttgcgcccggcggggtcaactccatgattagcatggagctgtaggagtctaaattggggacgcagatgtttgggacgtcgccttgcagtgttaacttggctctcatgaacctctttgatcttccacaaggggtaggctacgggtgaaacctcttaggctaatacttcaatgaagagatgccttggatagggtaacagcggcggatattggtgagttgttaagacaaaaaccattcaacgccggaggactggctctcatccagtggatgcattgagggaattgattgtcagggctgtctctaggtttaatctcagacctctctgtgcttagggcaaacactatttggccttaaatgggatcctgtgagagggggtccctccattgacagctggactgttctttggggccttatgtggtgtttgcctctgaggtactcaggggcatttaggtttttcctcattcttaaataata

SEQ ID NO: 17191 - DNA, 418 bp, synthetic construct
  source 1..418: mol_type = other DNA
taaggtggttgtatccccatacctcgccctcccttccacacaggacggataaatgaacttgaacttatggcaagaataaatggtatgattctggatacacttgaatggcagtagcgtggcgagctatggaaaaatcgcaattgtcgatagccatgtcagtgacgcgcttcggtgtgctcctttggtgattcggcgactggttacaggagagtaggcagtgagctatgggcaaacctctgcagtattactcagagggaatgtgcaattgagacttgacgagcgtctctttgagatgtggcgcatgctcttggcattaccatagtgagcttccaggttgggaaacctggactgggcctatactacctgatagggtcgcggctggccgcctgtaactagtatagtcagttgaaaccccccc

SEQ ID NO: 17192 - DNA, 716 bp, synthetic construct; identical to SEQ ID NO: 886
  source 1..716: mol_type = other DNA

SEQ ID NO: 17193 - DNA, 716 bp, synthetic construct
  source 1..716: mol_type = other DNA
ttcaagaggggtctccggagatttcctgagtccctcttgggagtccatggtgaggggacttgatacctcaccgccgtttgcctaggctataggctaaatttccctttcccctttccctttacttttgtaagtattaattcctgcaggttcaggtctcttggatttgttccactttatggacactcatttcacgctttctgtctgcttttcttccagggctctccccttgccctaggctctggccgttgcgcccggcggggtcaactccatgattagcatggagctgtaggagtctaaattggggacgcagatgttgggaacgtcaccttgcagtgttaacttggctttcatgaagctttttgatcttccacaagaggtaggctacgggtgaaacctcttaagctaatacttctatgaagagatgctttggatagggtaacagcggcggatattggtgagttgtttgacaaaaaccattcaacgccggaggactggctctcatccagtggatgcattaagtggattgtctgtcagggctgtctctaggtttaattcctgacctctctgtgcttagggcaaacaaaacttggtcttaaatgaggtcctgtgagaggggacctcgccattgaatgctggacatttctttggggccttatgttttgtttgcctctgaggtactcaggggcatttaggtttttcctcatcaattaataatt

SEQ ID NO: 17194 - DNA, 733 bp, synthetic construct
  source 1..733: mol_type = other DNA
ttcaagaggggtctccggagttttccggagcctctcttggaagtccatggtgaggggacttgatacctcaccgccgtttgcctaggctataggctaaacctccctttccctgccctccccctatttccctttgttttgtttgtaaatattaattcctgcaggttcaggcttctttaatctgtttctctataagaacactcaattttcacgctttctgtctcctttcttccagggctctccccttgccctaggctctggccgttgcgcccggcggggtcaactccatgattagcatggagctgtaggagtctaaattggggacgcagatgtttgggacgtcaccttgcagtgttaacttggctttcatgaacctctttgatcttccataaggggtaggctacgggtgaaacctcttaggctaatacttctatgaagagatgctttggatagggtaacagcggcggatattggtgagttgttaagacaaaaaccattcaacgccggaggactggctctcatccagtggatgcattgagtggattgactgtcagggctgtctctaggtttaatctcagacctctctgtgcttagggcaaacactatttggccttaaatgggatcctgtgagagggggtccctccattgacagctggactgttctttggggccttatgtggtgtttgcctctgaggtactcaggggcatttaggtttttcctcattctttaataata

SEQ ID NO: 17195 - DNA, 733 bp, synthetic construct
  source 1..733: mol_type = other DNA
ttcaagaggggtttccggagttttccggagcccctcttggaagtccatggtgaggggacttgatacctcaccgccgtttgcctaggctataggctaaatttccctttccctgtccttcccccattccccttcgttttatttgtaaatattaattcctgcaggttcagggttctttaatctgtttctctataagaacactcacctttcacgctttctgtcttctttcttccagggctctccccttgccctaggctctggccgttgcgcccggcggggtcaactccatgattagcatggagctgtaggagtctaaattggggacgcagatgtttgggacgtcgccttgcagtgttaacttggctctcatgaacctctttgatcttccacaaggggtaggctacgggtgaaacctcttaggctaatacttctatgaagagatgccttggatagggtaacagcggcggatattggtgagttgttaagacaaaaaccattcaacgccggaggactgactctcatccagtggatgcattgagtgaattgattgtcagggctgtctctaggtttaatctcagacctctctgtgcttagggcaaacactatttggccttaaatgggattctgtgagagggggtccctccattgacagctggactgttctttggggccttatgtggtgtttgcctctgaggtactcaggggcatttaggtttttcctcattcttaaacaata

SEQ ID NO: 17196 - DNA, 733 bp, synthetic construct
  source 1..733: mol_type = other DNA
ttcaagaggggtttccggagttttccggagcccctcttggaagtccatggtgaggggacttgatacctcaccgccgtttgcctaggctataggctaaatttccctttccctgtccttcccctattcccttttgttttgtttgtaaatattaattcctgcaggttcagggttctttaatttgtttctctgtaagaacactcacctttcacgctttctgtcttctttcttccagggctctccccttgccctaggctctggccgttgcgcccggcggggtcaactccatgattagcatggagctgtaggagtctaaattggggacgcagatgtttgggacgtcgccttgcagtgttaacttggctctcatgaacctctttgatcttccacaaggggtaggctacgggtgaaacctcttaggctaatacttctatgaagagatgccttggatagggtaacagcggcggatattggtgagttgttaagacaaaaaccattcaacgccggaggactgactctcatccagtggatgcattgagtgaattgattgtcagggctgtctctaggtttaatctcagacctctctgtgcttagggcaaacactatttggccttaaatgggatcctgtgagagggggtccctccattgacagctggactgttctttggggccttatgtggtgtttgcctctgaggtactcaggggcatttaggtttttcctcattcttaaacaata

SEQ ID NO: 17197 - DNA, 733 bp, synthetic construct
  source 1..733: mol_type = other DNA
ttcaagaggggtttccggagttttccggagcccctcttggaagtccatggtgaggggacttgatacctcaccgccgtttgcctaggctataggctaaatttccctttccctgtccttacccccttccccttcgttttatttgtaaatattaattcctgcaggttcagggttctttaatctgtttctctataagaacactcacctttcacgctttctgtcttctttcttccagggctctccccttgccctaggctctggccgttgcgcccggcggggtcaactccatgattagcatggagctgtaggagtctaaattggggacgcagatgtttgggacgtcgccttgcagtgttaacttggctctcatgaacctctttgatcttccacaaggggtaggctacgggtgaaacctcttaggctaatacttctatgaagagatgccttggatagggtaacagcggcggatattggtgagttgttaagacaaaaaccattcaacgccggaggactgactctcatccagtggatgcattgagtgaattgattgtcagggctgtctctaggtttaatctcagacctctctgtgcttagggcaaacactatttggccttaaatgggatcctgtgagagggggtccctccattgacagctggactgttctttggggccttatgtggtgtttgcctctgaggtactcaggggcatttaggtttttcctcattcttaaataata

SEQ ID NO: 17198 - DNA, 733 bp, synthetic construct
  source 1..733: mol_type = other DNA
ttcaagaggggtttccggagttttccggagcccctcttggaagtccatggtgaggggacttgatacctcaccgccgtttgcctaggctataggctaaatttccctttccctgtccttcccctattcccctttgttttatttgtaaatattaattcctgcaggttcagggttctttaatctgtttctctataagaacactcatttttcacgctttctgtcttctttcttccagggctctccccttgccctaggctctggccgttgcgcccggcggggtcaactccatgattagcatggagctgtaggagtctaaattggggacgcagatgtttgggacgtcgccttgcagtgttaacttggctctcatgaacctctttgatcttccacaaggggtaggctacgggtgaaacctcttaggctaatacttctatgaagagatgccttggatagggtaacagcggcggatattggtgagttgttaagacaaaaaccattcaacgccggaggactgactctcatccagtggatgcattgagtgaattgattgtcagggctgtctctaggtttaatctcagacctctctgtgcttagggcaaacactatttggccttaaatgggatcctgtgagagggggtccctccattgacagctggactgttctttggggccttatgtggtgtttgcctctgaggtactcaggggcatttaggtttttcctcattcttaaacaata

SEQ ID NO: 17199 - DNA, 733 bp, synthetic construct
  source 1..733: mol_type = other DNA
ttcaagaggggtttccggagttttccggagcccctcttggaagtccatggtgaggggacttgatacctcaccgccgtttgcctaggctataggctaaatttccctttccctgtccttcccctattcccctttgttttgtttgtaaatattaattcctgcaggttcagggttctttaatctgtttctctataagaacactcacctttcacgctttctgtctcctttcttccagggctctccccttgccctaggctctggccgttgcgcccggcggggtcaactccatgattagcatggagctgtaggagtctaaattggggacgcagatgtttgggacgtcgccttgcagtgttaacttggctctcatgaacctctttgatcttccacaaggggtaggctacgggtgaaacctcttaggctaatacttctatgaagagatgccttggatagggtaacagcggcggatattggtgagttgttaagacaaaaaccattcaacgccggaggactgactctcatccagtggatgcattgagtgaattgattgtcagggctgtctctaggtttaatctcagacctctctgtgcttagggcaaacactatttggccttaaatgggatcctgtgagagggggtccctccattgacagctggactgttctttggggccttatgtggtgtttgcctctgaggtactcaggggcatttaggtttttcctcatttttaaacaata

SEQ ID NO: 17200 - DNA, 733 bp, synthetic construct
  source 1..733: mol_type = other DNA
ttcaagaggggtttccggagttttccggagcccctcttggaagtccatggtgaggggacttgatacctcaccgccgtttgcctaggctataggctaaatttccctttccctgtccttcccctattcccctttgttttgtttgtaaatattaattcctgcaggttcagggttctttaatctgtttctctataagaacactcacttttcacgctttctgtcttctcttttccagggctctccccttgccctaggctctggccgttgcgcccggcggggtcaactccatggttagcatggagctgtaggagtctaaattggggacgcagatgtttgggacgtcgccttgcagtgttaacttggctctcatgaacctctttgatcttccacaaggggtaggctacgggtgaaacctcttaggctaatacttctaagaagagatgccttggatagggtaacagcggcggatattggtgagttgttaagacaaaaaccattcaacgccggaggactgactctcatccagtggatgcattgagtgaattgattgtcagggctgtctctaggtttaatctcagacctctctgtgcttagggcaaacactatttggccttaaatgggatcctgtgagagggggtccctccattgacagctggactgttctttggggccttatgtggtgtttgcctctgaggtactcaggggcatttaggtttttcctcattctcaaacaata

SEQ ID NO: 17201 - DNA, 733 bp, synthetic construct
  source 1..733: mol_type = other DNA
ttcaagaggggtctccggagttttccggagcctctcttggaagtccatggtgaggggacttgatacctcaccgccgtttgcctaggctataggctaaatttccctctccctgtccttcccctattcccctttgttttgtttgtaaatattaattcctgcaggttcagggttctttaatctgtttctctataagaacactcgattttcacgctttctgtcttctttcttccagggctctccccttgccctaggctctggccgttgcgcccggcggggtcaactccatgattagcatggagctgtaggagtctaaattggggacgcagatgtttgggacgtcgccttgcagtgttaacttggctctcatgaacctctttgatcttccacaaggggtaggctacgggtgaaacctcttaggctaatacttctatgaagagatgccttggatagggtaacagcggcggatattggtgagttgttaagacaaaaaccattcaacgccggaggactggctctcatccagtggatgcattgagtgaattgattgtcagggctgtctctaggtttaatcccagacctctctgtgcttagggcaaacactatttggccttaaatgggatcctgtgagagggggtccctccattggcagctggactgttctttggggccttatgtggtgtttgcctctgaggtactcaggggcatttaggtttttcctcattcttaaacaata

SEQ ID NO: 17202 - DNA, 733 bp, synthetic construct
  source 1..733: mol_type = other DNA
ttcaagaggggtctccggagttttccggagcccctcttggaagtccatggtgaggggacttgatacctcaccgccgtttgcctaggctataggctaaatttccctttccctgtccttcccctcttcccttttgttttatttgtaaatattaattcctgcaggttcagggttctttaatctgtttctctataagaacactcaagtttcacgctttctgtcttctttcttccagggctctccccttgccctaggctctggccgttgcgcccggcggggtcaactccatgattagcatggagctgtaggagtctaaattggggacgcagatgtttgggacgtcgccttgcagtgttaacttggctctcatgaacctctttgatcttccacaaggggtaggctacgggtgaaacctcttaggctaatacttctatgaagagatgccttgggtagggcaacagcggcggatattggtgagttgttaagacaaaaaccattcaacgccggaggactggctctcatccagtggatgcattgagtgaattgattgtcagggctgtctctaggtttaatctcagacctctctgtgcttagggcaaacaccatttggccttaaatgggatcctgtgagagggggtccctccattgacagctggactgttcttcggggccttatgtggtgtttgcctctgaggtactcaggggcatttaggtttttcctcattcttaaacaata

SEQ ID NO: 17203 - DNA, 733 bp, synthetic construct
  source 1..733: mol_type = other DNA
ttcaagaggggtttccggagttttccggagcccctcttggaagtccatggtgaggggacttgatacctcaccgccgtttgcctaggctataggctaaatttccctttccctgtccttcccttatttccctttatcttgtttgtaaatattaattcctgcaggttcagggttctttaatctgtttctctataagaacactcaattttcacgctttctgtcttctttcttccagggctctccccttgccctaggctctggccgttgcgcccggcggggtcaactccatgattagcatggagctgtaggagtctaaattggggacgcagatgtttgggacgtcgccttgcagtgttaacttggctctcatgaacctctttgatctttcacaaggggtaggctacgggtgaaaccccttaggctaatacttctatgaagagatgccttggatagggtaacagcggcggatattggtgagttgttaagacaaaaaccattcaacgccggaggactggctctcatccagtggatgcattgagtgaattgattgtcagggctgtctttaggtttaatctcagacctctctgtgcttagggcaaacactatttggccttaaatgggatcctgtgagagggggtccctccattgacagctggactgttctttggggccttatgtagtgtttgcctctgaggtactcaggggcatttaggtttttcctcactcttaaacaata

SEQ ID NO: 17204 - DNA, 733 bp, synthetic construct
  source 1..733: mol_type = other DNA
ttcaagaggggtctccggagttttccggagcccctcttggaagtccatggtgaggggacttgatacctcaccgccgtttgcctaggctataggctaaatttccctttccctgtcctttccctattcccctttgttttgtttgtaaatattaattcctgcaggttcagggttctttaatctgtttctctataagaacactcaattttcacgctttctgtcttctttcttccagggctctccccttgccctaggctctggccgttgcgcccggcggggtcaactccatgattagcatggagctgtaggagtctaaattggggacgcagatgtttgggacgtcgccttgcagtgttaacttggctctcatgaacctctttgatcttccacaaggggtaggctacgggtgaaacctcttaggctaatacttctatgaagagatgccttggatagggtaacagcggtggatattggtgagttgttaagacaaaaaccattcaacgccggaggactggctctcatccagtggatgcattgagtgaattgattgtcagggctgtctctaggtttaatcccagacctctctgtgcttagggcaaacactatttggccttaaatgggatcctgtgagagggggtccctccattgacagttggactgttctttggggccttatgtggtgtttgcctctgaggtactcaggggcatttaggtttttcctcattcttaaacaata

SEQ ID NO: 17205 - DNA, 443 bp, synthetic construct; identical to SEQ ID NO: 485
  source 1..443: mol_type = other DNA

SEQ ID NO: 17206 - DNA, 733 bp, synthetic construct
  source 1..733: mol_type = other DNA
ttcaagaggggtctccggagttttccggagcctctcttggaagtccatggtgaggggacttgatacctcaccgccgtttgcctaggctataggctaaatttccctttccctgtccttcccctattcccctttgttttgtttgtaaatattaattcctgcaggttcagggttctttaatctgtttctctataagaacactcaattttcacgctttctgtcttctttcttccagggctctccccttgccctaggctctggccgttgcgcccggcggggtcaactccatgattagcatggagctgtaggagtctaaattggggacgcagatgtttgggacgtcgccttgcagtgttaacttggctctcatgaacctctttgatctttcacaaggggtaggctacgggtgaaacctcttaggctaatacttctatgaagagatgccttggatagggtaacagcggcggatattggtgagttgttaagacaaaaaccattcaacgccggaggactggctctcatccagtggatgcattgagtgaattgattgtcagggctgtctctaggtttaatcccagacctctctgtgcttagggcaaacactatttggccttaaatgggatcctgtgagagggggtccctccattgacagctggactgttctttggggccttatgtagtgtttgcctctgaggtactcaggggcatttaggtttttcctcattcttaaacaata

SEQ ID NO: 17207 - DNA, 443 bp, synthetic construct; identical to SEQ ID NO: 486
  source 1..443: mol_type = other DNA

SEQ ID NO: 17208 - DNA, 527 bp, synthetic construct; identical to SEQ ID NO: 554
  source 1..527: mol_type = other DNA

SEQ ID NO: 17209 - DNA, 750 bp, synthetic construct
  source 1..750: mol_type = other DNA
ttcaagagaggtctccgggaattccggagtccctcttggaagtccatggtgaggggacttgatacctcaccgccgtttgcctaggctataggctaaattttccctttcccttttccctttcctattccctttgttttgtttgtaaatgttgattttgtaaatattagttcctgcaggttcagggttcttagatctgtttctctataagaacactcattttcacgctttctgtcttctttcttccagggctctccccttgccctaggctctggccgttgcgcccggcggggtcaactccatgattagcatggagctgtaggagtctaaattggggacacagatgtttggaacgtcaccttgcagtgttaacttggctttcatgaatctctttgatcttccacaaggggtaggctacgggtgaaacctcttaggctaatacttctatgaagagatgccttggatagggtaacagcggcggatattggtgagttgttaagacaaaaaccattcaacgccggaggactgactctcatccagtggatgcattgagtggattgactgtcagggctgtctttaggcttaattccagacctctctgtgcttggggcaaacatcatttggccttaaatgggattctgtgagaggggatccctccattaacagctggactgttctttggggccttatgtggtgtttgccgctgaggtactcaggggcatttaggtttttcctcattcttaaataataata

SEQ ID NO: 17210 - DNA, 749 bp, synthetic construct
  source 1..749: mol_type = other DNA
ttcaagaggggtctccggaggtttccggagcccctcttggaagtccatggtgaggggacttgatacctcaccgccgtttgcctaggctataggctaaatttccctttccctgtccttcccttatttccctttgttttgcttgtaaatattgattgtaaatattgattcctgcaggttcagggttctttaatcatgtttctctataagaacactcaattttcacgctttctgtcttctttcttccagggctctccccttgccctaggctctggccgttgcgcccggcggggtcaactccatgattagcatggagctgtaggagtctaaattggggacgcagatgtttgggacgtcaccttgcagtgttaacttggctctcatgaacctctttgatcttccacaaggggtaggctacgggtgaaacctcttaggctaatacttctatgaagagatgctttggatagggtaacagcggcggatattggtgagttgttaagacaaaaaccattcaacgccggaggactggctctcatccagtggatgcattgagtggattgattgtcagggctgtctctaggtttaatctcaagacctctctgtgcttagggcaaacaccatttggccttaaatgggatcctgtgagagggggtcccctccattgacagctggactgttctttggggccttatgtggtgtttgcctctgaggtactcaggggcatttaggtttttcctcattcttaaacaata

SEQ ID NO: 17211 - DNA, 749 bp, synthetic construct
  source 1..749: mol_type = other DNA
ttcaagaggggtttccggagatttccggagcccctcttggaagtccatggtgaggggacttgatacctcaccgccgtttgcctaggctataggctaaatttccctttccctgtccttcccttatttccctttgttttgcttgtaaatattgattgtaaatattgattcctgcaggttcagggttctttaatcatgtttctctataagaacactcaattttcacgctttctgtcttctttcttccagggctctccccttgccctaggctctggccgttgcgcccggcggggtcaactccatgattagcatggagctgtaggagtctaaattggggacgcagatgtttgggacgtcaccttgcagtgttaacttggctctcatgaacctctttgatcttccacaaggggtaggctacgggtgaaacctcttaggctaatacttctatgaagagatgctttggatagggtaacagcggcggatattggtgagttgttaagacaaaaaccattcaacgccggaggactggctctcatccagtggatgcattgagtggattgattgtcagggctgtctctaggtttaatctcaagacctctctgtgcttagggcaaacaccatttggccttaaatgggatcctgtgagagggggtcccctccattgacagctggactgttctttggggccttatgtggtgtttgccgctgaggtactcaggggcatttaggtttttcctcattcttaaacaata

SEQ ID NO: 17212 - DNA, 746 bp, synthetic construct
  source 1..746: mol_type = other DNA
ttcaagaagggtctccgggaatttccggagtccctcttggaagtccatggtgaggggacttgatacctcaccgccgtttgcctaggctataggctaaattttccctttcccttttccctttcctattccctttgttttgcttgtaaatattgatttgtaaatattgattcctgcaggttcagggttcttaaatctgtttctctataagaacactcatttcacgctttctgtcttctttcttccagggctctccccttgccctaggctctggccgttgcgcccggcggggtcaactccatgattagcatggagctgtaggagtctaaattggggacacagatgtttggaacgtcaccttgcagtgttaacttggctttcatgaatctctttgatcttccacaaggggtaggctacgggtgaaacctcttaggctaatacttctatgaagagatgccttggatagggtaacagcggcggatattggtgagttgttaagacaaaaaccattcaacgccggaggactgactctcatccagtggatgcattgagtggattgactgtcggggctgtctttaggcttaattccagacctctctgtgcttggggcaaacatcatttggccttaaatgggattctgtgagaggggatccctccattgccagctggactgttctttggggccttatgtggtgtttgccgctgaggtactcaggggcatttaggtttttcctcattcttaaataata

SEQ ID NO: 17213 - DNA, 707 bp, synthetic construct; identical to SEQ ID NO: 103
  source 1..707: mol_type = other DNA

SEQ ID NO: 17214 - DNA, 558 bp, synthetic construct; identical to SEQ ID NO: 604
  source 1..558: mol_type = other DNA

SEQ ID NO: 17215 - DNA, 625 bp, synthetic construct; identical to SEQ ID NO: 64
  source 1..625: mol_type = other DNA

SEQ ID NO: 17216 - DNA, 715 bp, synthetic construct
  source 1..715: mol_type = other DNA
ttcaagaggggcctccgggttttccggagcccctcttgggagtccatggtgaggggacttgatacctcaccgccgtttgcctaggctataggctaattttcccttttccctttccctgtgttattgtaaatattaattcctgcaggttcagggttcttgaatttgttctgctgtacagacactcatttcacgctctctgtctgcttttcttccagggctctccccttgccctaggctctggccgttgcgcccggcggggtcaactccatgattagcatggagctgtaggagtctaaattggggacacagatgttgggaacgtcaccttgcagtgttaacttggctttcatgaaactccttgatcttccacaagaggtaggctacgggtgaaacctcttaagctaatacttctatgaagagatgctttggatagggtaacagcggcggatattggtgagttgtatgacaaaaaccattcaacgccggaggactggctctcatccagtggatgcattgagtgaattgactgtcagggctgtctttaggcttaattcctgacctctctgtgcttagggcaaacaaaatttggccttaaatgaggctctgtgagagggggcctcgccattgaatgctggacatttctttggggccttatgttttgtttgcctctgaggtactcaggggcatttaggtttttcctcatcaataaataaat

SEQ ID NO: 17217 - DNA, 715 bp, synthetic construct
  source 1..715: mol_type = other DNA
ttcaagaggggcctccgggattcccggaatccctcttgggagtccatggtgaggggacttgatacctcaccgccgtttgcctaggctataggctaaacttccctttcccctttccctttattgttgtaaatattaattcctgcaggttcaggtctcttggatttgttccactttatggacactcatttcacgctttctgtctgcttttcttccagggctctccccttgccctaggctctggccgttgcgcccggcggggtcaactccatgactagcatggagctgtaggagtctaaattggggacacagatgttgggaacgtcaccttgcagtgttaacttggctttcatgaagctttttgatcttccacaagaggtaggctacgggtgaaacctcttaagctaatacttctatgaagagatgctttggatagggtaacagcggtggatattggtgagttgtttgacaaaaaccattcaacgccggaggactggctctcatccagtggatgcattaagtggattgtctgtcagggctgtctctaggtttaattcctgacctctctgtgcttagggcaaacaaaacttggccttaaatgaggtcctgtgagaggggacctcgccattgaatgctggacatttctttggggccttatgttttgtttgcctctgaggtactcaggggcatttaggtttttcctcatcaataaataatt

SEQ ID NO: 17218 - DNA, 416 bp, synthetic construct
  source 1..416: mol_type = other DNA
gtggttgtatcccacataccttaccctcccctccacacaggacggatcaatggactttgacctttggcaagcatatatggtatgattattggatacgattaaacggcagtagcgtggcgagctatggaaaaatcgcaattgtcgatagccatgttagtgacgcgcttcggcgtgctcctttggtgattcggcgactggttacaggagagtaggcagtgagctatgggcaaacctctgcagtattactcagagggaatgtgcaattgagacttgacgagcgtctctttgagatgtggcgcatgctcttggcattaccatagtgagcttccaggttgggaaacctggactgggcctatactacctgatagggtcgcggctggccgcctgtaactagtatagtcagttgaaaccccccc

SEQ ID NO: 17219 - DNA, 734 bp, synthetic construct
  source 1..734: mol_type = other DNA
ttcaagaggggtctccgggaatttccggagtccctcttggaagtccatggtgaggggacttgatacctcaccgccgtttgcctaggctataggctaaattttccctttcccttttccctttcctattccctttgttttgcttgtaaatattaattcctgcaggttcagggttcttaaatctgtttctctataagaacactcatttttcacgctttctgtcttctttcttccagggctctccccttgccctaggctctggccgttgcgcccggcggggtcaactccatgattagcatggagctgtaggagtctaaattggggacacagatgtttggaacgtcaccttgcagtgttaacttggctttcatgaatctctttgatcttccacaaggggtaggctacgggtgaaacctcttaggctaatacttctatgaagagatgccttggatagggtaacagcggcggatattggtgagttgttaagacaaaaaccattcaacgccggaggactgactctcatccagtggatgcattgagtggattgactgtcagggctgtctttaggcttaattccagacctctctgtgcttagggcaaacatcatttggccttaaatgggattctgtgagaggggatccctccattgacagctggactgttctttggggccttatgtggtgtttgcctctgaggtactcaggggcatttaggtttttcctcattcttaaataata

SEQ ID NO: 17220 - DNA, 733 bp, synthetic construct
  source 1..733: mol_type = other DNA
ttcaagaggggtctccggaggtttccggagcccctcttggaagtccatggtgaggggacttgatacctcaccgccgtttgcctaggctataggctaaatttccctttccctgtccctcccttatttccctttgttttgcttgtaaatattaattcctgcaggttcagggttctttaatctgtttctctataagaacactcaattttcacgctttctgtcttctttcttccagggctctccccttgccctaggctctggccgttgcgcccggcggggtcaactccatgattagcatggagctgtaggagtctaaattggggacgcagatgtttgggacgtcaccttgcagtgttaacttggctctcatgaacctctttgatcttccacaaggggtaggctacgggtgaaacctcttaggctaatacttctatgaagagatgctttggatagggtaacagcggcggatattggtgagttgttaagacaaaaaccattcaacgccggaggactggctctcatccagtggatgcattgagtggattgattgtcagggctgtctctaggtttaatctcagacctctctgtgcttagggcaaacaccatttggccttaaatgggatcctgtgagagggggtccctccattgacagctggactgttctttggggccttatgtggtgtttgcctctgaggtactcaggggcatttaggtttttcctcattcttaaacaata

SEQ ID NO: 17221 - DNA, 734 bp, synthetic construct
  source 1..734: mol_type = other DNA
ttcaagaggggtctccggagttttccggagcccctcttgggagtccatggtgaggggacttgatacctcaccgccgtttgcctaggctataggctaaatttccctttccctatccttctcctattcccctttgttttgtttgtaaatattaattcctgcaggttcagggttctttaatctgtttctctataagaacactcaattttcacgctttctgtcttctttcttccagggctctccccttgccctaggctctggccgttgcgcccggcggggtcaactccatgattagcatggagctgtaggagtctaaattggggacgcagatgtttgggacgtcaccttgcagtgttaacttggctctcatgaacctctttgatcttccacaaggggtaggctacgggtgaaacctcttaggctaatacttctatgaagagatgccttggatagggtaacagcggcggatattggtgagttgttaagacaaaaaccattcaacgccgaaggactggctctcatccagtggatgcattgagtgaattgattgtcagggctgtctctaggtttaatcccagacctctctgtgcttagggcaaacactcatttggccttaaatgggatcctgtgagagggggtccctccattggcagctggactgttctttggggccttatgtggtgtttgcctctgaggtactcaggggcatttaggtttttcctcattcttaaacaata

SEQ ID NO: 17222 - DNA, 715 bp, synthetic construct
  source 1..715: mol_type = other DNA
ttcaagaggggtctccggaattcccggagtccctcttgggagtccatggtgaggggacttgatacctcaccgccgtttgcctaggctataggctaaatttccctttcccctttccctttattgttgtaaatattaattcctgcaggttcaggtttcttggatttgttccactttatggacactcatttcacgctttctgtctgcttttcttccagggctctccccttgccctaggctctggccgttgcgcccggcggggtcaactccatgattagcatggagctgtaggagtctaaattggggacacagatgttgggaacgtcaccttgcagtgttaacttggctttcatgaagctttttgatcttccacaaggggtaggctacgggtgaaacctcttaagctaatacttctatgaagagatgctttggatagggtaacagcggcggatattggtgagttatttgacaaaaaccattcaacgccggaggactggctctcatccagtggatgcattaagtggattgtctgtcagggctgtctctaggtttaattcctgacctctctgtgcttagggcaaacaaaacttggccttaaatgaggtcctgtgagagggggcctcgccattgaatgctggacatttctttggggccttttgttttgtttgcctctgaggtactcaggggcatttaggtttttcctcatcaataaataatt

SEQ ID NO: 17223 - DNA, 716 bp, synthetic construct
  source 1..716: mol_type = other DNA
ttcaagaggggcctccgggattcccggagtccctcttgggagtccatggtgaggggacttgatacctcaccgccgtttgcctaggctataggctaaattttcccttttccctttccctttattattgtaaatattaattcctgcaggttcagggctcttggatttgttccactatatggacactcatttcacgctttctgtctgctatttttccagggctctccccttgccctaggctctggccgttgcgcccggcggggtcaactccatgattagcatggagctgtaggagtctaaattggggacacagatgttgggaacgtcaccttgcagtgttaacttggctttcatgaagctttttgatcttccacaagaggtaggctacgggtgaaacctcttaagctaatacttctatgaagagatgctttggatagggtaacagcggcggatattggtgagttgtttgacaaaaaccattcaacgccggaggactggctctcatccagtggatgcattaagtggattgtctgtcagggctgtctctaggcttaattcctgacctctctgtgcttagggcaaacaaaacttggccttaaatgaggtcctgtgagaggggacctcgccattgaatgctggacatttctttggggccttatgttttgtttgcctctgaggtactcaggggcatttaggtttttcctcattaattaattatt

SEQ ID NO: 17224 - DNA, 715 bp, synthetic construct
  source 1..715: mol_type = other DNA
ttcaagaggggcctccgggttttccggagcccctcttgggagtccatggtgaggggacttgatacctcaccgccgtttgcctaggctataggctaattttcccttttccctttccctgtgttattgtaaatattaattcctgcaggttcagggttcttgaatttgttctgctgtacggacactcatttcacgctctctgtctgcttttcttccagggctctccccttgccctaggctctggccgttgcgcccggcggggtcaactccatgattagcatggagctgtaggagtctaaattggggacacagatgttgggaacgtcaccttgcagtgttaacttggctttcatgaaactccttgatcttccacaagaggtaggctacgggtgaaacctcttaagctaatacttctatgaagagatgctttggatagggtaacagcggcggatattggtgagttgtatgacaaaaaccattcaacgccggaggactggctctcatccagtggatgcattgagtgaattgactgtcagggctgtctttaggcttaattcctgacctctctgtgcttagggcaaacaaaatttggccttaaatgaggctctgtgagagggggcctcgccattgaatgctggacatttctttggggccttatgttttgtttgcctctgaggtactcaggggcatttaggtttttcctcatcaataaataaat

SEQ ID NO: 17225 - DNA, 715 bp, synthetic construct
  source 1..715: mol_type = other DNA
ttcaagaggggcctccgggattcccggaatccctcttgggagtccatggtgaggggacttgatacctcaccgccgtttgcctaggctatgggctaaatttccctttcccctttccctttattgttgtaaatattaattcctgcaggttcaggtctcttgaatttgttccactttatggacactcatttcacgctttctgtctgctcttcttccagggctctccccttgccctaggctctggccgttgcgcccggcggggtcaactccatgattagcatggagctgtaggagtctaaattggggacacagatgttgggaacgtcaccttgcagtgttaacttggctttcatgaagctttttgatcttccacaagaggtaggctacgggtgaaacctcttaagctaatacttctatgaagagatgctttggatagggtaacagcggcggatattggtgagttgtttgacaaaaaccattcaacgccggaggactggctctcatccagtggatgcattaagtggattgtctgtcagggctgtctctaggtttaattcctgacctctctgtgcttagggcaaacaaaacttggccttaaatgaggtcctgtgagaggggacctcgccattgaatgctggacatttctttggggccttatgttttgtttgcctctgaggtactcaggggcatttaggtttttcctcatcaataaataatt

SEQ ID NO: 17226 - DNA, 733 bp, synthetic construct
  source 1..733: mol_type = other DNA
ttcaagaggggtctccggagttttccggagcccctcttggaagtccatggtgaggggacttgatacctcaccgccgtttgcctaggctataggctaaatttccctttccctgtccttcccctattcccctttgttttgtttgtaaatattaattcctgcaggttcagggttctttaatctgtttctctataagaacactcaattttcacgctttctgtcttctttcttccagggctctccccttgccctaggctctggccgttgcgcccggcggggtcaactccatgattagcatggagctgtaggagtctaaattggggacgcagatgtttgggacgtcaccttgcagtgttaacttggctttcatgaacctctttgatctttcacaagaggtaggctacgggtgaaacctcttaggctaatacttctatgaagagatgccttggatagggtaacagcggcggatattggtgagttgttaagacaaaaaccattcaacgccgaaggactggttctcatccagtggatgcattgagtgaattgattgtcaaggctgtctctaggtttaatcccagacctctctgtgcttagggcaaacactatttggccttaaatgggatcctgtgagagggggtccctccattgacagctggactgttctttggggccttatgtggtgtttgcctctgaggtactcaggggcatttaggtttttcctcattcttaaacaata

SEQ ID NO: 17227 - DNA, 733 bp, synthetic construct
  source 1..733: mol_type = other DNA
ttcaagaggggtctccggagttttccggagcccctcttggaagtccatggtgaggggacttgatacctcaccgccgtttgcctaggctataggctaaatttccctttccctgtcctttccctatttccctttgtcttgtttgtaaatataaatgcctgcaagttcagggttcttcaatctgtttctctataagaacactcaaatttcacgctttctgtcttctttcttccatggctctccccttgccctaggcacagggcgtcgcgcccggcggggtcaactccatcattagcatggagctgtaggagtctaaattggggacgcagatgtttgggacgtcaccttgcagtgttaacttggctttcatgaacctctttgatcttccacaaggggtaggctacgggtgaaaccccttaggctaatacttctatgaagagatgccttggatatggtaacagcggcggatattggtgaattgttaagacaaaaaccattcaacgccgaaggactggctctcatccagtggatgcattgagtgaattgattgtcagggctgtctctaggtttaatctcagacctctctgtgcttagggcaaacactatttggccttaaatgggatcctgtgagagggggtccctccattgacagctggactgttctttggggccttatgtagtgtttgcctctgaggtactcaggggcatttaggtttttcctcactcttaaacaaca

SEQ ID NO: 17228 - DNA, 733 bp, synthetic construct
  source 1..733: mol_type = other DNA
ttcaagaggggtctccggagatttccggagcccctcttggaagtccatggtgaggggacttgatacctcaccgccgtttgcctaggctataggctaaatttccctttccctgtcctttccctatttccttttgttttgtttgtaaatattaattcctgcaggttcagggttctttaatctgtttctctataagaacactcaattttcacgctttctgtctcctttcttccagggctctccccttgccctaggctctggccgttgcgcccggcggggtcaactccatgattagcatggagctgtaggagtctaaattggggacgcagatgtttgggacgtcgccttgcagtgttaacttggctttcatgaacctctttgatcttccacaaggggtaggctacgggtgaaacctcttaggctaatacttctatgaagagatgccttggatagggtaacagcggcggatattggtgagttgttaagacaaaaaccattcaacgccgaaggactggctctcatccagtggatgcattgagggaattgattgtcagggctgtctctaggtttaatctcagacctctctgtgcttagggcaaacactatttggccttaaatgggatcctgtgagagggggtccctccattgacagctggactgttctttggggccttatgtggtgtttgcctctgaggtactcaggggcatttaggtttttcctcattcttaaacaata

SEQ ID NO: 17229 - DNA, 733 bp, synthetic construct
  source 1..733: mol_type = other DNA
ttcaagaggggtctccggagttttccggagtccctcttggaagtccatggtgaggggacttgatacctcaccgccgtttgcctaggctataggctaaatttcccattccctgtccttcccctatttccctttgttttgtttgtaaatattaattcctgcaggttcagggttctttaatctgtttctctataagaacactcaattttcacgctttctgtcttctttcttccagggctctccccttgccctaggctctggccgttgcgcccggcggggtcaactccatgattagcatggagctgtaggagtctaaattggggacgcagatgtttgggacgtcaccttgcagtgttaacttggctttcatgaacctctttgatcttccacaaggggtaggctacgggtgaaaccccttaggctaatacttctatgaagagatgccttggatagggtaacagcggcggatattggtgagttgttaagacaaaaaccattcaacgccgaaggactggctctcatccagtggatgcattgagtgaattgattgtcagggctgtctctaggtttaatctcagacctctctgtgcttagggcaaacactatttggccttaaatgggatcctgtgagagggggtccctccattgacagctggactgttctttggggccttatgtggtgtttgcctctgaggtactcaggggcatttaggtttttcctcattcttaaatgata

SEQ ID NO: 17230 - DNA, 733 bp, synthetic construct
  source 1..733: mol_type = other DNA
ttcaagaggggtgtccggagttttccggagtccctcttggaagtccatggtgaggggacttgatacctcaccgccgtttgcctaggctataggctaaattttcccttccctgtccttcccctatttccccttgttttgtttgtaaatattaattcctgcaggttcagggttctttaatctgtttctctataagaacactcaattttcacgctttctgtcttctttcttccagggctctccccttgccctaggctctggccgttgcgcccggcggggtcaactccatgattagcatggagctgtaggagtctaaattggggacgcagatgtttgggacgtcgccttgcagtgttaacttggctctcatgaacctctttgatcttccacaaggggtaggctacgggtgaaacctcttaggctaatacttctatgaagagatgccttggatagggtaacagcggcggatattggtgagttgttaagacaaaaaccattcaacgccggaggactggctctcatccagtggatgcattgagtgaattgattgtcagggctgtctctaggtttaatctcagacctctctgtgcttagggcaaacactatttggccttaaatgggatcctgtgagagggggtccctccattgacagctggactgttctttggggccttatgtggtgtttgcctctgaggtactcaggggcatttaggtttttcctcattcttaaataata

SEQ ID NO: 17231 - DNA, 733 bp, synthetic construct
  source 1..733: mol_type = other DNA
ttcaagaggggtgtccggagttttccggagcctctcttggaagtccatggtgaggggacttgatacctcaccgccgtttgcctaggctataggctaaatttccctttccctgtccttcccctatttccctttgttttgtttgtaaatattaattcctgcaggttcagggttctttaatctgtttctctataagaacactcaattttcacgctttctgtcttctttcttccagggctctccccttgccctaggctctggccgttgcgcccggcggggtcaactccatgattagcatggagctgtaggagtctaaattggggacgcagatgtttgggacgtcaccttgcagtgttaacttggctctcatgaacctctttgatcttccacaaggggtaggctacgggtgaaacctcttaggctaatacttctatgaagagatgccttggatagggtaacagcggcggatattggtgagttgttaagacaaaaaccattcaacgccggaggactggctctcatccagtggatgcattgagtgaattgattgtcagggctgtctctaggtttaatcccagacctctctgtgcttagggcaaacactatttggccttaaatgggatcctgtgagagggggtccctccattgccagctggactgttctttggggccttatgtggtgtttgcctctgaggtactcaggggcatttaggtttttcctcattcttaaataata

SEQ ID NO: 17232 - DNA, 715 bp, synthetic construct
  source 1..715: mol_type = other DNA
ttcaagaggggcctccgggattcccagagttcctcttgggagtccatggtgaggggacttgatacctcaccgccgtttgcctaggctataggctaaacttccctttcccctttccctttattgttgtaaatattaattcctgcaggttcaggtctcttggatttgttccactttatggacactcatttcacgctttctgtctgcttttcttccagggctctccccttgccctaggctctggccgttgcgcccggcggggtcaactccatgattagcatggagctgtaggagtctaaattggggacacagatgttgggaacgtcaccttgcagtgttaacttggctttcatgaagctttttgatcttccacaagaggtaggctacgggtgaaacctcttaggctaatacttctatgaagagatgctttggatagggtaacagcggcggatattggtgagttgtttgacaaaaaccattcaacgccggaggactggctctcatccagtggatgcattaagtggattgtctgtcagggctgtctctaggtttaattcctgacctctctgtgcttagggcaaacaaaactcggccttaaatgaggtcctgtgagaggggacctcgccattgaatgctggacgtttctttggggccttatgttttgtttgcctctgaggtactcaggggcatttaggtttttcctcatcaataaataatt

SEQ ID NO: 17233 - DNA, 733 bp, synthetic construct
  source 1..733: mol_type = other DNA
ttcaagaggggtctccggagttttccggagcccctcttggaagtccatggtgaggggacttgatacctcaccgccgtttgcctaggctataggctaaatttccctttccctgtcccttccctatttccctttgttttgtttgtaaatattaattcctgcaggttcagggttctttaatctgtttctctataagaacactcaattttcacgctttctgtcttctttcttccagggctctccccttgccctaggctctggccgttgcgcccggcggggtcaactccatgattagcatggagctgtaggagtctaaattggggacgcagatgtttgagacgtcgccttgcagtgttaacttggctctcatgaatctctttgatcttccacaaggggtaggctacgggtgaaacctcttaggctaatacttctatgaagagatgctttggatagggtaacagcggcggatattggtgagttgttaagacaaaaaccattcaacgccggaggactggctctcatccagtggatgcattgagtggattgattgtcagggctgtctctaggtttaatctcggacctctctgtgcttagggcaaacaccatttggccttaaatgggatcctgtgagagggggtccctccattgacagctggactgttctttggggccttatgtggtgtttgcctctgaggtactcaggggcatttaggtttttcctcattcttaaacaata

SEQ ID NO: 17234 - DNA, 732 bp, synthetic construct
  source 1..732: mol_type = other DNA
ttcaagaggggtgtccggagttttccgagcctctcttggaagtccatggtgaggggacttgatacctcaccgccgttcgcctaggctataggctaaatttccctttccctgtccttcccctatttccctttgttttgtttgtaaatattaattcctgcgggttcagggttctttaatctgtttctctataagaacactcaattttcacgctttctgtcttctttcttccagggctctccccttgccctaggctctggccgttgcgcccggcggggtcaactccatgattagcatggagctgtaggagtctaaattggggacgcagatgtttgggacgtcaccttgcagtgttaacttggctctcatgaacctctttgatcttccacaaggggtaggctacgggtgaaacctcttaggctaatacttctatgaagagatgccttggatagggtaacagcggcggatattggtgagttgttaagacaaaaaccattcaacgccggaggactggctctcatccagtggatgcattgagtgaattgattgtcagggctgtctctaggtttaatcccagacctctctgtgcttagggcaaacactatttggccttaaatgggatcctgtgagagggggtccctccattgccagctggactgttctttggggccttatgtggtgtttgcctctgaggtactcaggggcatttaggtttttcctcattcttaaataata

SEQ ID NO: 17235 - DNA, 715 bp, synthetic construct
  source 1..715: mol_type = other DNA
ttcaagaggggcctccgggattcccggagtccctcttgggagtccatggtgaggggacttgatacctcaccgccgtttgcctaggctataggctaaacttcccttttccctttccctttattattgtaaatattaattcctgcaggctcagggttcttggatttgttccactatatggacactcatttcacgctttctgtcttcttttcttccagggctctccccttgccctaggctctggccgttgcgcccggcggggtcaactccatgattagcatggagctgtaggagtctaaattggggacacagatgttgggaacgtcaccttgcagtgttaacttggctttcatgaagctttttgatcttccacaagaggtaggctacgggtgaaacctcttaagctagtacttctatgaagagatgctttggatagggtaacagcggcggatattggtgagttatttgacaaaagccattcaacgccggaggactggctctcatccagtggatgcattaagtggattgtctgtcagggctgtctctaggtttaattcctgacctctctgtgcttagggcaaacaaaacttggccttaaatgaggtcctgtgagaggggacctcgccattgaatgctggacatttctttggggccttatgttttgtttgcctctgaggtactcaggggcatttaggtttttcctcatcaataaataatt

SEQ ID NO: 17236 - DNA, 715 bp, synthetic construct
  source 1..715: mol_type = other DNA
ttcaagaggggtctccgggattcccggagtccctcttgggagtccatggtgaggggacttgatacctcaccgccgtttgcctaggctataggctaaattttcctttcccctttccctttattgttgtaaatattaattcctgcaggttcaggtctcttggatttgttccactttatggacactcatttcacgctttctgtctgcttttcttccagggctctccccttgccctaggctctggccgttgcgcccggcggggtcaactccatgattagcatggagctgtaggagtctaaattggggacacagatgttgggaacgtcaccttgcagtgttaacttggctttcatgaagctttttgatcttccacaagaggtaggctacgggtgaaacctcttaagctaatacttctatgaagagatgctttggatagggtaacagcggcggatattggtgagttgcttgacaaaaaccattcaacgccggaggactggctctcatccagtggatgcattaagtggattgtctgtcagggctgtctctaggtttaattcctggcctctctgtgcttagggcaaacaaaacttggccttaaatgaggtcctgtgagaggggacctcgccattgaatgctggacatttctttggggccttatgttttgtttgcctctgaggtactcaggggcatttaggtttttcctcatcaataaataatt

SEQ ID NO: 17237 - DNA, 732 bp, synthetic construct
  source 1..732: mol_type = other DNA
ttcaagaagggtctccgggaatttccggagtccctcttggaagtccatggtgaggggacttgatacctcaccgccgtttgcctaggctataggctaaattttccctttcccttttccctttcctattccctttgttttgcttgtaaatattgattcctgcaggttcagggttcttaaatctgtttctctataagaacactcatttcacgctttctgtcttctttcttccagggctctccccttgccctaggctctggccgttgcgcccggcggggtcaactccatgattagcatggagctgtaggagtctaaattggggacacagatgtttggaacgtcaccttgcagtgttaacttggctttcatgaatctctttgatcttccacaaggggtaggctacgggtgaaacctcttaggctaatacttctatgaagagatgccttggatagggtaacagcggcggatattggtgagttgttaagacaaaaaccattcaacgccggaggactgactctcatccagtggatgcattgagtggattgactgtcagggctgtctttaggcttaattccagacctctctgtgcttagggcaaacatcatttggccttaaatgggattctgtgagaggggatccctccattgacagctggactgttctttggggccttatgtggtgtttgccgctgaggtactcaggggcatttaggtttttcctcattcttaaataata

SEQ ID NO: 17238 - DNA, 638 bp, synthetic construct; identical to SEQ ID NO: 764
  source 1..638: mol_type = other DNA

SEQ ID NO: 17239 - DNA, 589 bp, synthetic construct; identical to SEQ ID NO: 27
  source 1..589: mol_type = other DNA

SEQ ID NO: 17240 - DNA, 600 bp, synthetic construct; identical to SEQ ID NO: 650
  source 1..600: mol_type = other DNA

SEQ ID NO: 17241 - DNA, 600 bp, synthetic construct
  source 1..600: mol_type = other DNA
agctttcttatccttcatttgtgaacccactagtctaagccgcttggaatacgatgagtggaaacgttcattctaaatggagtgaaacatgcttaattttctagctcgtgctggtctttccagtgcggggcggccctgtctggccgtaactctacagagtgtcacgccgtgcttgcggatctcacgtggcacatgacaaggctctcgctggaattgtgagtctgatgtatgtggagtaacagtgaaaagtgcatgatcacacatctgtgtgggctatgagcctgcggaacaacaactggtaacagttgcctcaggggccgaaagccacggtgttaacagcaccctcatagtttgatctatcccaggatagtgatgttgtgtacctagtaattgccaatccccatgccttggtatcacggcataccggagagttcgcgggtgaaggatgcccagaaggtacccgtaggtaaccttaagagactatggatctgatctggggccctgtctggagtgctttacacacagctcagggttaaaaaacgtctagcccgccaagacccgagggattcgggttttcccttaaaaacccgactagagcat

SEQ ID NO: 17242 - DNA, 440 bp, synthetic construct
  source 1..440: mol_type = other DNA
tcatttcccccctccacccttaaggtggttgtatcccacataccttatcctcccctccacacaggatggatctatggactttgacctttggcaagcatatatggtatgattattggatacgattaaacggcagtagcgtggcgagctatggaaaaatcgcaattgtcgatagccatgttagtgacgcgcttcggcgtgctcctttggtgattcggcgactggttacaggagagtaggcagtgagctatgggcaaacctctgcagtattactcagagggaatgtgcaattgagacttgacgagcgtctctttgagatgtggcgcatgctcttggcattaccatagtgagcttccaggttgggaaacctggactgggcctatactacctgatagggtcgcggctggccgcctgtaactagtatagtcagttgaaaccccccc

SEQ ID NO: 17243 - DNA, 734 bp, synthetic construct
  source 1..734: mol_type = other DNA
ttcaagaggggtctccgggaatttccggagtccctcttggaagtccatggtgaggggacttgatacctcaccgccgtttgcctaggctataggctaaattttccctttcccttttccctttcctattccctttgttttgcttgtaaatattgattcctgcaggttcagggttcttaaatctgtttctctataagaacactcatttttcacgctttctgtcttctttcttccagggctctccccttgccctaggctctggccgttgcgcccggcggggtcaactccatgattagcatggagctgtaggagtctaaattggggacacagatgtttggaacgtcaccttgcagtgttaacttggctttcatgaatctctttgatcttccacaaggggtaggctacgggtgaaacctcttaggctaatacttctatgaagagatgccttggatagggtaacagcggcggatattggtgagttgttaagacaaaaaccattcaacgccggaggactgactctcatccagtggatgcattgagtggattgactgtcagggctgtctctaggcttaattccagacctctctgtgcttggggcaaacatcatttggccttaaatgggattctgtgagaggggatccctccattgccagctggactgttctttggggccttaggtggtgtttgccgctgaggtactcaggggcatttaggtttttcctcattcttaaataata

SEQ ID NO: 17244 - DNA, 726 bp, synthetic construct
  source 1..726: mol_type = other DNA
ttcaagaggggtctccggggatttccggagtccctcttggaagtccatggtgaggggacttgatacctcaccgccgtttgcctaggctataggctaaattttccctttccccttccccttccttgttttgattgtaaatattaattcctgcaggttcagggttcttaaatctgtttctctataagcaacactgaattttcacgctttctgtcttttttcttccagggctctccccttgccctaggctctggccgttgcgcccggcggggtcaagtccatgattagcatggagctgaaggagtctaaattggggacacagatgtttggaacgtcaccttgcagtgttaacttggctttcatgaatctctttgatcttccacaagaggtaggctacgggtgaaacctcttaggctaatacttctatgaagagatgctttggatagggtaacagcggcggatattggtgagttgttaagacaaaaaccattcaacgccggaggactgactctcatccagtggatgcattgagtggattgactgtcagggctgtctctaggcttaattccagacctctctgtgcttagggcaaacatcatttggccttaaatggggttctgtgagaggggatccctccattgacagctggactgttctttggggccttatgtggtgtttgcctctgaggtactcaggggcatttaggtttttcctcattctcaaataata

SEQ ID NO: 17245 - DNA, 587 bp, synthetic construct
  source 1..587: mol_type = other DNA
tgcgggtttgctgctttcacagagtaaagcagatagagattttgtactggcacacttaatctcgaaacgcgctcgttctgctgtgtagttcagtctgtcctgtcacacttgtgacggctcgcgacactgtacacatagtgaaaccgaccaagacaaaagcttcaaataatgaacctcgaaatcccaaactggatccgtagctggacatgttagggtaaggaacacccccctggtgacagggaccttactggccaaaagccccgctctctgagcctagcatgttgttgatcccgaactgttcagtttggttagtacagggaatttctttgctgtctttgttcagaactcggtttctagtgagacagcctaaggatgccctccaggtaccccggggtaacaagcgacacccaggatctgaggaggggaccgccctgcgcggtttaaaaaacttctaagctgttatggtgaccagaggctggcacctttcactttaaaacacttattaactggtcacaaacaaaagaatcccgttttacagactttcaaactagttacacaagtactgtttcacttacaacaattgttat

SEQ ID NO: 17246 - DNA, 729 bp, synthetic construct
  source 1..729: mol_type = other DNA
ttcaagaggggtctccgggaatttccggagtccctcttggaagtccatggtgaggggacttgatacctcaccgccgtttgcctaggctataggctaaattttccctttcccttttccctttcccattcccttttgcttgtaaatattgattcctgcaggttcagggttcttaaatctgtttctctataagaacactcattttcacgctttctgtcttctttcttccagggctctccccttgccctaggctctggccgttgcgcccggcggggtcaactccatgattagcatggagctgtaggagtctaaattggggacacagatgtttggaacgtcaccttgcagtgttaacttggctttcatgaatctctttgatcttccacaaggggtaggctacgggtgaaacctcttaggctaatacttctatgaagagatgccttggatagggtaacagcggcggatattggtgagttgttaagacaaaaaccattcaacgccggaggactgactctcatccagtggatgcattgagtggattgactgtcagggctgtctttaggcttaattccagacctctctgtgcttagggcaaacatcatttggccttaaatgggattctgtgagaggggatccctccattgacagctggactgttctttggggccttatgtggtgtttgcctctgaggtactcaggggcatttaggtttttcctcattcttaaataata

SEQ ID NO: 17247 - DNA, 729 bp, synthetic construct
  source 1..729: mol_type = other DNA
ttcaagaggggtctccgggaatttccagagtccctcttggaagtccatggtgaggggacttgatacctcaccgccgtttgcctaggccataggctaaattttccccttcccttttccctttcccattcccttttgcttgtaaatattgattcctgcaggttcagggttcttaaatctgtttctctataagaacactcattttcacgctttctgtcttctttcttccagggctctccccttgccctaggctctggccgttgcgcccggcggggtcaactccatgattagcatggagctgtaggagtctaaattggggacacagatgtttggaacgtcaccttgcagtgttaacttggctttcatgaatctctttgatcttccacaaggggtaggctacgggtgaaacctcttaggctaatacttctatgaagagatgccttggatagggtaacagcggcggatattggtgagttgttaagacaaaaaccattcaacgccggaggactgactctcatccagtggatgcattgagtggattgactgtcagggctgtctttaggcttaattccagacctctctgtgcttggggcaaacatcatttggccttaaatgggattctgtgagaggggatccctccattaacagctggactgttctttggggccttatgtggtgtttgccgctgaggtactcaggggcatttaggtttttcctcattcttaaataata

SEQ ID NO: 17248 - DNA, 715 bp, synthetic construct
  source 1..715: mol_type = other DNA
ttcaagaggggcctccgggattcccggagttcctcttgggagtccatggtgaggggacttgatacctcaccgccgtttgcctaggctataggctaaacttccctttcccctttccctttattgttgtaaatattaattcctgcaggttcaggtttcttggatttgttccactttatggacactcatttcacgctttctgtctgcttttcttccagggctctccccttgccctaggctctggccgttgcgcccggcggggtcaactccatgattagcatggagctgtaggagtctaaattggggacacagatgttgggaacctcaccttgcattgttaacttggctttcatgaagctttttgatcttccacaagaggtaggctacgggtgaaacctcttaagctaatacttctatgaagagatgctttggatagggtaacagcggcggatattggtgagttgtttgacaaaaaccattcaacgccggaggactggctctcatccagtggatgcattaagtggattgtctgtcagggctgtctctaggtttaattcctgacctctctgtgcttagggcaaacaaaacttggccttaaatgaggtcctgtgagaggggacctcgccattgaatgctggacatttctttggggccttatgttttgtttgcctctgaggtactcaggggcatttaggtttttcctcatcaataaataatt

SEQ ID NO: 17249 - DNA, 663 bp, synthetic construct; identical to SEQ ID NO: 80
  source 1..663: mol_type = other DNA

SEQ ID NO: 17250 - DNA, 503 bp, synthetic construct
  source 1..503: mol_type = other DNA
ttattttcttgatcttatttctacttttgcgggttctatccgtaaaaagggtacgtgctgccccttccttctctggagaattcacacggcggtctttccgtctctcaacaagtgtgaatgcagcatgccggaaacggtgaagaaaacagttttctgtggaaatttagagtgcacatcgaaacagctgtagcgacctcacagtagcagcggactcccctcttggcgacaagagcctctgcggccaaaagccccgtggataagatccactgctgtgagcggtgcaaccccagcaccctggttcgatgatcattctctatggaaccagaaaatggttttctcaagccctccggtagagaagccaagaatgtcctgaaggtaccccgcgtgcgggatctgatcaggagaccaattggcggtgctttacactgtcactttggtttaaaaattgtcacagcttctccaaaccaagtggtcttggttttccaattttgttgaatggcaat

SEQ ID NO: 17251 - DNA, 601 bp, synthetic construct
  source 1..601: mol_type = other DNA
agctttcctacccttcatttgtgaacccactagtccaagccgcttggaatacgatgagtggaaatgttcattctaaatggagtgaaacatgcttaattttctagtccatgctggtctttccagtgtggagcggccctgtctggccgtaattctccagagcgtcacgccatacttgtggacctcacgtgccgcatgacagcgctgcagctggaactgggtgcgcggtgcccatagagtaacagcgaaaagtgttagatcaagctttgcttgggctatgagcctgcggaataacaactggtaacagttgcctcaggggccgaaagccacggtgttaacagcaccctcatagtttgatccaccccagggtggtgatgtttaacagttagtagttgccaatctgtgttcactgaaatctcggcataccgtgcagtgtacaggggtgaaggatgcccagaaggtacccgtaggtaaccttaagagactatggatctgatctggggccttgtccggagtgctttacacacggctcaaggttaaaaaacgtctagccccacagagcccgagggattcgggttttcccttaaaaacccgactagagctt

SEQ ID NO: 17252 - DNA, 418 bp, synthetic construct
  source 1..418: mol_type = other DNA
ttaaggtggttgtatccccataccttaccctcccttccacactggacggataaatggacttggatttatggcaagtacatatggtatgaatctggatacacttgaatggcagtagcgtggcgagctatggaaaaatcgcaactgtcgatagccatgttagtgacgcgcttcggcgtgctcctttggtgattcggcgactggttacaggagagtaggcagtgagctatgggcaaacctctgcagtattactcagagggaatgtgcaattgagacttgacgagcgtctctttgagatgtggcgcatgctcttggcattaccatagtgagcttccaggttgggaaacctggactgggcctatactacctgatagggtcgcggctggccgcctgtaactagtatagtcagttgaaacccccc

SEQ ID NO: 17253 - DNA, 724 bp, synthetic construct
  source 1..724: mol_type = other DNA
gtctccgggaatttccggagtccctcttggaagtccatggtgaggggacttgatacctcaccgccgtttgcctaggctataggctaaattttccctttcccttttccctttcctattccctttgttttgcttgtaaatattgattcctgcaggttcagggttcttaaatctgtttctctataagaacactcatttttcacgctttctgtcttctttcttccagggctctccccttgccctaggctctggccgttgcgcccggcggggtcaactccatgattagcatggagctgtaggagtctaaattggggacacagatgtttggaacgtcaccttgcagtgttaacttggctttcatgaatctctttgatcttccacaaggggtaggctacgggtgaaacctcttaggctaatacttctatgaagagatgccttggatagggtaacagcggcggatattggtgagttgttaagacaaaaaccattcaacgccggaggactgactctcatccagtggatgcattgagtggattgactgtcagggctgtctttaggcttaattccagacctctctgtgcttagggcaaacatcatttggccttaaatgggattctgtgagaggggatccctccattgacagctggactgttctttggggccttatgtggtgtttgccgctgaggtactcaggggcatttaggtttttcctcattcttaaataata

SEQ ID NO: 17254 - DNA, 417 bp, synthetic construct
  source 1..417: mol_type = other DNA
ttaaggtggttgtatcccataccctaccctcccttccacaaaggacggataaatggacttgaacttatggcacgaacgtatggtatgattctggatacaccttaatggtagtagcgtggcgagctatggaaaaatcgcaattgtcgatagccatgttagtgacgcgcttcggcgtgctcctttggtgattcggcgactggttacaggagagtaggcagtgagctatgggcaaacctctgcagtattactcagagggaatgtgcaattgagacttgacgagcgtctctttgagatgtggcgcatgctcttggcattaccatagtgagcttccaggttgggaaacctggactgggcctatactacctgatagggtcgcggctggccgcctgtaactagtatagtcagttgaaacccccc

SEQ ID NO: 17255 - DNA, 717 bp, synthetic construct
  source 1..717: mol_type = other DNA
ggaaatttccggagtccctcttggaagtccatggtgaggggacttgatacctcaccgccgtttgcctaggctataggctaaattttcccttcccctttcccttccctattccctttattttgtttgtaaatattaattcctgcaggttcagggttctcaaatctgtttctctataagaacactcatttttcacgctttctgtcttctttcttccagggctctccccttgccctaggctctggccgttgcgcccggcggggtcaactccatgattagcatggagctgtaggagtctaaattggggacacagatgtttgggacgtcaccttgcagtgttaacttggctttcatgaatctctttgatcttccacaaggggtaggctacgggtgaaacctcttaggctaatacttctatgaagagatgctttggatagggtaacagcggcggatattggtgagttgttaagacaaaaaccattcaacgccggaggactgactctcatccagtggatgcattgagtggattgactgtcagggctgtctctaggcttaattccagacctctctgtgcttagggcaaacatcatttggccttaaatgggattctgtgagaggggatccctccattgactgctggactgttctttggggccttatgtggtgtttgcctctgaggtactcaggggcatttaggtttttcctcattctcaaataatg

SEQ ID NO: 17256 - DNA, 715 bp, synthetic construct
  source 1..715: mol_type = other DNA
ttcaagaggggcctccgggattcccggagtctctcttgggagtccatggtgaggggacttgatacctcaccgccgtgtgcctaggctataggctaaatttccctttcccctctccctttattcttgtatatattaattcctgcaggttcaggtctcttggatttgttccactttatggacactcatttcacgctttctgtctgcttttcttccagggctctccccttgccctaggctctggccgttgcgcccggcggggtcaactccatgattagcatggagctgtaggagtctaaattggggacacagatgttgggaacgtcaccttgcagtgttaacttggctttcatgaagctttttgatcttccacaagaggtaggctacgggtgaaacctcttaagctaatacttctatgaagagatgctttggatagggtaacagcggcggatattggtgagttgtttgacaaaaaccattcaacgccggaggactggctctcatccagtggatgcattaagtggattgtctgtcagggctgtctctaggtttaattcctgacctctctgtgcttagggcaaacaaaacttggccttaaatgaggtcctgtgagaggggacctcgccatcgaatgctggacatttctttggggccttatgttttgtttgcctctgaggtactcaggggcatttaggtttttcctcatcaataaataatt

SEQ ID NO: 17257 - DNA, 716 bp, synthetic construct; identical to SEQ ID NO: 887
  source 1..716: mol_type = other DNA

SEQ ID NO: 17258 - DNA, 717 bp, synthetic construct
  source 1..717: mol_type = other DNA
ggaaatttccggagtccctcttggaagtccatggtgaggggacttgatacctcaccgccgtttgcctaggctataggctaaattttcccttcccctttcccttccctattccctttattttgtttgtaaatattaattcctgcaggttcagggttctcaaatctgtttctctataagaacactcatttttcacgctttctgtcttctttcttctagggctctccccttgccctaggctctggccgttgcgcccggcggggtcaactccatgattagcatggagctgtaggagtctaaattggggacacagatgtttgggacgtcaccttgcagtgttaacttggctttcatgaatctctttgatcttccacaaggggtaggctacgggtgaaacctcttaggctaatacttctatgaagagatgctttggatagggtaacagcggcggatattggtgagttgttaagacaaaaaccattcaacgccggaggactgactctcatccagtggatgcattgagtggattgactgtcagggctgtctctaggcttaattccagacctctctgtgcttagggcaaacatcatttggccttaaatgggattctgtgagaggggatccctccattgactgctggactgttctttggggccttatgtggtgtttgcctctgaggtactcaggggcatttaggtttttcctcattctcaaataata

SEQ ID NO: 17259 - DNA, 715 bp, synthetic construct
  source 1..715: mol_type = other DNA
ttcaagaggggtctccgggttttctggagcccctcttgggagtccatggtgaggggacttgatacctcaccgccgtttgcctaggctataggctaattttcccttttccttttccctgtgttattgtaaatattaattcctgcaggttcagggttcttgaatttgttctgctgtacggacactcttttcacgctctctgtctgcttttcttccagggctctccccttgccctaggctctggccgttgcgcccggcggggtcaactccatgattagcatggagctgtaggagtctaaattggggacacagatgttgggaacgtcaccttgcagtgttaacttggctttcatgaaactccttgatcttccacaagaggtaggctacgggtgaaacctcttaagctaatacttctatgaagagatgctttggatagggtaacagcggcggatattggtgagttgtatgacaaaaaccattcaacgccggaggactggctctcatccagtggatgcattgagtgaattgactgtcagggctgtctttaggcttaattcctgacctctctgtgcttagggcaaacaaaatttggccttaaatgaggctctgtgagagggggcctcgccattgaatgctggacatttctttggggccttatgttttgtttgccgctgaggtactcaggggcatttaggtttttcctcatcaataaataaat

SEQ ID NO: 17260 - DNA, 716 bp, synthetic construct
  source 1..716: mol_type = other DNA
gggaatttccggagtccctcttggaagtccatggtgaggggacttgatacctcaccgccgtttgcctaggctataggctaaattttccccttccctttccctttcctattcccttgttttgcttgtaaatattaattcctgcaggttcagggttcttaaatctgtttctctataagaacactcatttttcacgctttctgtcttctttcttccagggctctccccttgccctaggctctggccgttgcgcccggcggggtcaactccatgattagcatggagctgtaggagtctaaattggggacacagatgtttggaacgtcaccttgcagtgttaacttggctttcatgaatctctttgatcttccacaaggggtaggctacgggtgaaacctcttaggctaatacttctatgaagagatgctttggatagggtaacagcggcggatattggtgagttgttaagacaaaaaccattcaacgccggaggactgactctcatccagtggatgcattgagtggattgactgtcagggctgtctctaggcttaattccagacctctctgtgcttagggcaaacatcatttggccttaaatgggattctgtgagaggggatccctccattgactgctggaccgttctttggggccttatgtggtgtttgcctctgaggtactcaggggcatttaggtttttcctcatttttaaataata

SEQ ID NO: 17261 - DNA, 703 bp, synthetic construct
  source 1..703: mol_type = other DNA
cccctcttggaagtccatggtgaggggacttgatacctcaccgccgtttgcctaggctataggctaaatttccctttccctgtccttcccttatttccctttgttttacttgtaaatattaattcctgcaggttcagggttctttaatctgtttctctataagaacactcaattttcacgctttctgtcttctttcttccagggctctccccttgccctaggctctggccgttgcgcccggcggggtcaactccatgattagcatggagctgtaggagtctaaattggggacgcagatgtttgggacgtcaccttgcagtgttaacttggctctcatgaacctctttgatcttccacaaggggtaggctacgggtgaaacctcttaggctaatacttctatgaagagatgctttggatagggtaacagcggcggatattggtgagttgttgagacaaaaaccattcaacgccggaggactggctctcatccagtggatgcattgagtggattgattgtcagggctgtctctaggtttaatctcagacctctctgtgcttagggcaaacaccatttggccttaaatgggatcccgtgagagggggtccctccattgacagctggactgttctttggggccttatgtggtgtttgcctctgaggtactcaggggcatttaggtttttcctcatttttaaacaata

SEQ ID NO: 17262 - DNA, 411 bp, synthetic construct
  source 1..411: mol_type = other DNA
tggttgtatcccataccctaccctcccttccacaaaggacggataaatggacttgaacttatggcacgaacgtatggtatgattctggatacaccttaatggtagtagcgtggcgagctatggaaaaatcgcaattgtcgatagccatgttagtgacgcgcttcggcgtgctcctttggtgattcggcgactggttacaggagagtgggcagtgagctatgggcaaacctctgcagtattactcagagggaatgtgcaattgagacttgacgagcgtctctttgagatgtggcgcatgctcttggcattaccatagtgagcttccaggttgggaaacctgggctgggcctatactacctgatagggtcgcggctggccgcctgtaactagtatagtcagttgaaacccccc

SEQ ID NO: 17263 - DNA, 411 bp, synthetic construct
  source 1..411: mol_type = other DNA
tggttgtatcccataccctaccctcccttccacaaaggacggataaatggacttgaacttatggcacgaacgtatggtatgattctggatacaccttaatggtagtagcgtggcgagctatggaaaaatcgcaattgtcgatagccatgttagtgacgcgcttcggcgtgctcctttggtgattcggcgactggttacaggagagtaggcagtgagctatgggcaaacctctgcagtattactcagagggaatgtgcaattgagacttgacgagcgtctctttgagatgtggcgcatgctcttggcattaccatagtgagcttccaggttgggaaacctggactgggcctatactacctgatagggtcgcggctggccgcctgtaactagtatagtcagttgaaacccccc

SEQ ID NO: 17264 - DNA, 717 bp, synthetic construct
  source 1..717: mol_type = other DNA
ggagatttccggagcccctcttggaagtccatggtgaggggacttgatacctcaccgccgtttgcctaggctataggctatatttccctttccctgtccttcccttatttccctttgttttgtttgtaaatattaattcctgcaggttcagggttctttaatctgtttctctataagaacactcaattttcacgctttctgtcttctttcttccagggctctccccttgccctaggctctggccgttgcgcccggcggggtcaactccatgattagcatggagctgtaggagtctaaattggggacgcagatgtttgggacgtcaccttgcagtgttaacttggctctcatgaacctctttgatcttccacaaggggtaggctacgggtgaaacctcttaggctaatacttctatgaagagatgctttggatagggtaacagcggcggacattggtgagttgttaagacaaaaaccattcaacgccggaggactggctctcatccagtggatgcattgagtggattgattgtcagggctgtctctaggcttaatctcagacctctctgtgcttagggcaaacaccatttggccttaaatgggatcctgtgagagggggtccctccattgacagctggactgttctttggggccttatgtggtgtttgcctctgaggtactcaggggcatttaggtttttcctcattcttaaacaata

SEQ ID NO: 17265 - DNA, 717 bp, synthetic construct
  source 1..717: mol_type = other DNA
ggaaatttccggagtccctcttggaagtccatggtgaggggacttgatacctcaccgccgtttgcctaggctataggctaaattttcccttcccctttcccttccctattccctttattttgtttgtaaatattaattcctgcaggttcagggttctcaaatctgtttctctataagaacactcatttttcacgctttctgtcttctttcttccagggctctccccttgccctaggctctggccgttgcgcccggcggggtcaactccatgattagcatggagctgtaggagtctaaattggggacacagatgtttgggacgtcaccttgcagtgttaacttggctttcatgaatctctttgatcttccacaaggggtaggctacgggtgaaacctcttaggctaatacttctatgaagagatgctttggatagggtaacagcggcggatattggtgagttgttaagacaaaaaccattcaacgccggaggactgactctcatccagtggatgcattgagtggattgactgtcagggctgtctctaggcttaattccagacctctctgtgcttagggcaaacatcatttggccttaaatgggattctgtgagaggggatccctccattgactgctggactgttctttggggccttatgtggtgtttgcctctgaggtactcaggggcatttaggtttttcctcattctcaaataata

SEQ ID NO: 17266 - DNA, 717 bp, synthetic construct
  source 1..717: mol_type = other DNA
ggagatttccggagcccctcttggaagtccatggtgaggggacttgatacctcaccgccgtttgcctaggctataggctaaatttccctttccctgtccttcccttatttccctttgttttgcttgtaaatattaattcctgcaggttcagggttctttaatctgtttctctataagaacactcaattttcacgctttctgtcttctttcttccagggctctccccttgccctaggctctggccgttgcgcccggcggggtcaactccatgattagcatggagctgtaggagtctaaattggggacgcagatgtttgggacgtcaccttgcagtgttaacttggctctcatgaacctctttgatcttccacaagaggtaggctacgggtgaaacctcttaggctaatacttctatgaagagatgctttggatagggtaacagcggcggacattggtgagttgttaagacaaaaaccattcaacgccggaggactggctctcatccagtggatgcattgagtggattgattgtcagggctgtctctaggtttaatctcagacctctctgtgcttagggcaaacaccatttggccttaaatgggatcctgtgagagggggtccctccattgacagctggactgttctttggggccttatgtggtgtttgcctctgaggtactcaggggcatttaggtttttcctcattcttaaacaata

SEQ ID NO: 17267 - DNA, 697 bp, synthetic construct
  source 1..697: mol_type = other DNA
ttggaagtccatggtgaggggacttgatacctcaccgccgtttgcctaggctataggctaaatttccctttccctgtccttcccctatttccttttgttttgtttgtaaatattaattcctgcaggttcagggttctttaatctgtttctctataagaacactcaattttcacgctttctgtcttctttcttccagggctctccccttgccctaggctctggccgttgcgcccggcggggtcaactccatgattagcatggagctgtaggagtctaaattggggacgcagatgtttgggacgtcgccttgcagtgttaacttggctctcatgaacctctttgatcttccacaaggggtaggctacgggtgaaacctcttaggctaatacttctatgaagagatgccttggatagggtaacagcggcggatattggtgagttgttaagacaaaaaccattcaacgccggaggactggctctcatccagtggatgcattgagtggattgattgtcagggctgtctctaggtttaatctcagacctctctgtgcttagggcaaacactatttggccttaaatgggatcctgtgagagggggtccctccattgacagctggactgttctttggggccttatgtggtgtttgcctctgaggtactcaggggcatttaggtttttcctcattcttaaacaata

SEQ ID NO: 17268 - DNA, 737 bp, synthetic construct; identical to SEQ ID NO: 117
  source 1..737: mol_type = other DNA

SEQ ID NO: 17269 - DNA, 430 bp, synthetic construct; identical to SEQ ID NO: 474
  source 1..430: mol_type = other DNA

SEQ ID NO: 17270 - DNA, 719 bp, synthetic construct
  source 1..719: mol_type = other DNA
ccggagatttccggagcccctcttggaagtccatggtgaggggacttgatacctcaccgccgtttgcctaggctataggctatatttccctttccctgtccttcccttatttccctttgttttgtttgtaaatattaattcctgcaggttcagggttctttaatctgtttctctataagaacactcaattttcacgctttctgtcttctttcttccagggctctccccttgccctaggctctggccgttgcgcccggcggggtcaactccatgattagcatggagctgtaggagtctaaattggggacgcagatgtttgggacgtcaccttgcagtgttaacttggctctcatgaacctctttgatcttccacaaggggtaggctacgggtgaaacctcttaggctaatacttctatgaagagatgctttggatagggtaacagcggcggacattggtgagttgttaagacaaaaaccattcaacgccggaggactggctctcatccagtggatgcattgagtggattgattgtcagggctgtctctaggcttaatctcagacctctctgtgcttagggcaaacaccatttggccttaaatgggatcctgtgagagggggtccctccattgacagctggactgttctttggggccttatgtggtgtttgcctctgaggtactcaggggcatttaggtttttcctcattcttaaacaata

SEQ ID NO: 17271 - DNA, 407 bp, synthetic construct
  source 1..407: mol_type = other DNA
tgtatcccataccctaccctcccttccacaaaggacggataaatggacttgaacttatggcacgaacgtatggtatgattctggatacaccttaatggtagtagcgtggcgagctatggaaaaatcgcaattgtcgatagccatgttagtgacgcgcttcggcgtgctcctttggtgattcggcgactggttacaggagagtaggcagtgagctatgggcaaacctctgcagtattactcagagggaatgtgcaattgagacttgacgagcgtctctttgagatgtggcgcatgctcttggcattaccatagtgagcttccaggttgggaaacctggactgggcctatactacctgatagggtcgcggctggccgcctgtaactagtatagtcagttgaaacccccc

SEQ ID NO: 17272 - DNA, 656 bp, synthetic construct; identical to SEQ ID NO: 794
  source 1..656: mol_type = other DNA

SEQ ID NO: 17273 - DNA, 694 bp, synthetic construct
  source 1..694: mol_type = other DNA
gaagtccatggtgaggggacttgatacctcaccgccgtttgcctaggctataggctaaaccttcctttccctgcccttcccttatttccctttgttttgtttgtaaatattaattcctgcaggttcagggttctttaatctgtttctctataagaacactcaattttcacgctttctgtctcctttcttccagggctctccccttgccctaggctctggccgttgcgcccggcggggtcaactccatgattagcatggagctgtaggagtctaaattggggacgcagatgtttgggacgtcgccttgcagtgttaacttggctttcatgaacctctttgatcttccacaaggggtaggctacgggtgaaaccccttaggctaatacttctatgaagagatgccttggatagggtaacagcggcggatattggtgagttgttaagacaaaaaccattcaacgccggaggactggctctcatccagtggatgcattgagtggattgactgtcagggctgtctctaggtttaatctcagacctctctgtgcttagggcaaacaccatttggccttaaatgggatcctgtgagagggggtccctccattgacagctggactgttctttggggccttatgtggtgtttgcctctgaggtactcaggggcatttaggtttttcctcattctctaacaata

SEQ ID NO: 17274 - DNA, 679 bp, synthetic construct
  source 1..679: mol_type = other DNA
tggaagtccatggtgaggggacttgatacctcaccgccgtttgcctaggctataggctaaatttccctttcccctttccctttattgttgtaaatattaattcctgcaggttcaggtctcttggatttgttccactttatggacactcatttcacgctttctgtctgcttttcttccagggctctccccttgccctaggctctggccgttgcgcccggcggggtcaactccatgactagcatggagctgtaggagtctaaattggggacacagatgttgggaacgtcaccttgcagtgttaacttggctttcatgaagctttttgatcttccacaagaggtaggctacgggtgaaacctcttaagctaatacttctatgaagagatgctttggatagggtaacagcggcggatattggtgagttgcttgacaaaaaccattcaacgccggaggactggctctcatccagtggatgcattaagtggattgtctgtcagggctgtctctaggtttaattcctgacctctctgtgcttagggcaaacaaaacttggccttaaatgaggtcctgtgagaggggacctcgccattgaatgctggacatttctttggggccttatgttttgtttgcctctgaggtactcaggggcatttaggtttttcctcatcaataaataatt

SEQ ID NO: 17275 - DNA, 734 bp, synthetic construct
  source 1..734: mol_type = other DNA
ttcaagaggggtctccgggaatttccggagtccctcttggaagtccatggtgaggggacttgatacctcaccgccgtttgcctaggctataggctaaattttccctttcccttttccctttcctattccctttgttttgcttgtaaatattaattcctgcaggttcagggttctttaatctgtttctctataagaacactcaattttcacgctttctgtcttctttcttccagggctctccccttgccctaggctctggccgttgcgcccggcggggtcaactccatgattagcatggagctgtaggagtctaaattggggacacagatgtttgggacgtcgccttgcagtgttaacttggctctcatgaacctttttgatcttccacaaggggtaggctacgggtgaaacctcttaggctaatacttctatgaagagatgccttggatagggtaacagcggcggatattggtgagttgttaagacaaaaaccattcaacgccggaggactgactctcatccagtggatgcattgagtggattgattgtcagggctgtctctaggtttaatctcagacctctctgtgcttagggcaaacaccatttggccttaaatgggatcctgtgagagggggtccctccattgacagctggactgttctttggggccttatgtggtgtttgcctctgaggtactcaggggcatttaggtttttcctcatttttaaataatt

SEQ ID NO: 17276 - DNA, 617 bp, synthetic construct; identical to SEQ ID NO: 57
  source 1..617: mol_type = other DNA

SEQ ID NO: 17277 - DNA, 732 bp, synthetic construct
  source 1..732: mol_type = other DNA
ttcaagaggggtctccgggaatttccggagtccctcttggaagtccatggtgaggggacttgatacctcaccgccgtttgcctaggctataggctaaatttccctttccctgtcccttccctatttccctttatttgtttgtaaatattaattcctgcaggttcagggttctttaatctgtttctctataagaacactcaattttcacgctttctgtcttctttcttccagggctctccccttgccctaggctctggccgttgcgcccggcggggtcaactccatgattagcatggagctgtaggagtctaaattggggacacagatgtttgggacgtcgccttgcagtgttaacttggctctcatgaacctttttgatcttccacaaggggtaggctacgggtgaaacctcttaggctaatacttctatgaagagatgccttggatagggtaacagcggcggatattggtgagttgttaagacaaaaaccattcaacgccggaggactgactctcatccagtggatgcattgagtggattgattgtcagggctgtctctaggtttaatctcagacctctctgtgcttagggcaaacaccatttggccttaaatgggatcctgtgagagggggtccctccattgacagctggactgttctttggggccttatgtggtgtttgcctctgaggtactcaggggcatttaggtttttcctcatttttaaataatt

SEQ ID NO: 17278 - DNA, 687 bp, synthetic construct
  source 1..687: mol_type = other DNA
atggtgaggggacttgatacctcaccgccgtttgcctaggctataggctaaatttccctttccctgtcccttccctatttccctttgttttatttgtaaatattagttcctgcaggttcagggttctttagtctgtttctctataagaacactcaattttcacgctttctgtcttctttcttccagggctctccccttgccctaggctctggccgttgcgcccggcggggtcaactccatgattagcatggagctgtaggagtctaaattggggacgcagatgtttgagacgtcgccttgcagtgttaacttggctctcatgaacctctttgatcttccacaaggggtaggctacgggtgaaacctcttaggctaatacttctatgaagagatgctttggatagggtaacagcggcggatattggtgagttgttaagacaaaaaccattcaacgccggaggactggctctcatccagtggatgcattgagtggattgattgtcagggctgtctctaggtttaatctcagacctctctgtgcttagggcaaacaccatttggccttaaatgggatcctgtgagagggggtccctccatttacagctggactgtactttggggccttatgtggtgtttgccgctgaggtactcaggggcatttaggtttttcctcattcttaaacaata

SEQ ID NO: 17279 - DNA, 632 bp, synthetic construct; identical to SEQ ID NO: 757
  source 1..632: mol_type = other DNA

SEQ ID NO: 17280 - DNA, 513 bp, synthetic construct; identical to SEQ ID NO: 540
  source 1..513: mol_type = other DNA

SEQ ID NO: 17281 - DNA, 687 bp, synthetic construct
  source 1..687: mol_type = other DNA
atggtgaggggacttgatacctcaccgccgtttgcctaggctataggctaaatttccctttccctgtcccttccctatttccctttgttttatttgtaaatattaattcctgcaggttcagggttctttaatctgtttctctataagaacactcaattttcacgctttctgtcttctttcttccagggctctccccttgccctaggctctggccgttgcgcccggcggggtcaactccatgattagcatggagctgtaggagtctaaattggggacgcagatgtttgagacgtcgccttgcagtgttaacttggctctcatgaacctctttgatcttccacaaggggtaggctacgggtgaaacctcttaggctaatacttctatgaagagatgctttggatagggtaacagcggcggatattggtgagttgttaagacaaaaaccattcaacgccggaggactggctctcatccagtggatgcattgagtggattgattgtcagggctgtctctaggtttaatctcagacctctctgtgcttagggcaaacaccatttggccttaaatgggatcctgtgagagggggtccctccattgacagctggactgtactttggggccttatgtggtgtttgcctctgaggtactcaggggcatttaggtttttcctcattcttaaacaata

SEQ ID NO: 17282 - DNA, 838 bp, synthetic construct
  source 1..838: mol_type = other DNA
ccacacatccccgctttcaacgtctggcccacgaaacgggccacctttcggactgaccattggtttattattgaaattggcttggaaatgctgacactgtaagttggtttgtgatttaaacaatggttgatctggactctctttgagagatttacctggtggcttggcacagcctccttaaggacatctggtccagaaaggcccggtcaagacttatattggactggtcccctgtccactgagtattctgttctgaaccgtgtaggcagggctagcgccaccatgattgccaagggactacctccctggtgacagggacccttgggcccaaaaggctaggtggcaactctcatgtcaagagaggggtatccaccccaatctgaatcatgtggtgtgaagccactcgtcatggctctgaccccgagactgtctacatttagtaagatggatgaaaactggatttggagaccactctgattgtcttgatgagaaagtccgctatttgactgagtagatgccctccagctacccttactggatgtgaggaggggaccgtgactatagcgttccgctaaaccggtttaaaaaacatgaaaggtcaaatatgtggcgccattttccatttttatcaataaccatatgcctgacgaagttgattgtgctgagtgttctaagccttcctggactgtcagattaaaattggcttttctgcaatattttggttgccagtttgtatgggtttatcactcaggaaagaatcaagagaaagattgaaaatcttggattgtgcaactaaagctcatttttgtccttgtgaaggcaaccagagattgcagtc

SEQ ID NO: 17283 - DNA, 734 bp, synthetic construct
  source 1..734: mol_type = other DNA
ttcaagaggggtctccggagttttccggagcccctcttggaagtccatggtgaggggacttgatacctcaccgccgtttgcctaggctataggctaaacttccctttccctgtccttcccctatttccctttgttttgtttgtaaatattaattcctgcaagttcagggtcctttaatctgtatctctataagaacactcaattttcacgctttctgtcttctttcttccagggctctccccttgccctaggctctggccgttgcgcccggcggggtcaactccatgattagcatggagctgtaggagtctaaattggggacacagatgtttgggacgtctccttgcagtgttaacttggctcttcataaacctctttgatcttccacaagaagtacgctacgggtgaaacctcttaggctaatacttctatgaaaagataccttggatagggtaacaccggcggatattggtgagttgttaagacaaaaaccattcaacgccgaaggactggctctcatccagtggatgcattgagtgaattgattgtcagggctgtctctaggtttaatctcagacctctctgtgcttagggcaaacactatttggccttaaatgggatcctgtgagagggggtccctccattgacagctggactgttctttggggccttatgtggtgtttgcctctgaggtactcaggggcatttaggtttttcctcactcttaaacaata

SEQ ID NO: 17284 - DNA, 687 bp, synthetic construct
  source 1..687: mol_type = other DNA
tggtgaggggacttgatacctcaccgccgtttgcctaggctataggctaaatttccctttccctgtccttcccctatttccttttgttttgtttgtaaatattaattcctgcaggttcagggttctttaatctgtttctctgtaagaacactcaatttttcacgctttctgtctcctttcttccagggctctccccttgccctaggctctggccgttgcgcccggcggggtcaactccatgattagcatggagctgtaggagtctaaattggggacgcagatgtttgggacgtcgccttgcagtgttaacttggctctcatgaacctctttgatcttccacaaggggtaggctacgggtgaaacctcttaggctaatacttcaatgaagagatgccttggatagggtaacagcggcggatattggtgagttgttaagacaaaaaccattcaacgccggaggactggctctcatccagtggatgcattgagggaattgattgtcagggctgtctctaggtttaatctcagacctctctgtgcttagggcaaacactatttggccttaaatgggatcctgtgagagggggtccctccattgacagctggactgttctttggggccttatgtggtgtttgcctctgaggtactcaggggcatttaggtttttcctcattcttaaataata

SEQ ID NO: 17285 - DNA, 703 bp, synthetic construct
  source 1..703: mol_type = other DNA
ctccgggattcccggagtccctcttgggagtccatggtgaggggacttgatacctcaccgccgtttgcctaggctataggctaaatttccctttcccctttccctttattgttgtaaatattaattcctgcaggttcaggttccttggatttgttccactttatggacactcatttcacgctttctgtctgcttttcttccagggctctccccttgccctaggctctggccgttgcgcccggcggggtcaactccatgattagcatggagctgtaggagtctaaattggggacacagatgttgggaacgtcaccttgcagtgttaacttggctttcatgaagctttttgatcttccacaagaggtaggctacgggtgaaacctcttaagctaatacttctatgaagagatgctttggatagggtaacagcggcggacattggtgagttgtttgacaaaaaccattcaacgccggaggactggctctcatccagtggatgcattaagtggattgtctgtcagggctgtctctaggtttaattcctgacctctctgtgcttagggcaaacaaaacttggccttaaatgaggtcctgtgagaggggacctcgccattgaatgctggacatttctttggggccttatgttttgtttgcctctgaggtactcaggggcatttaggtttttcctcatcaataaataatt

SEQ ID NO: 17286 - DNA, 576 bp, synthetic construct
  source 1..576: mol_type = other DNA
aatattggcgcgcgcatttgcgcgcccccccccatttcagccccctgtcattgactggtcgaaggcgttcgcaataagactggtcgtcacttggctgttctatcgtttcaggctttagcgcgccctcgcgcggcgggccgtcaagcccgtgcgctgtatagcgccaggtaaccggacagcggcttgctggattttcccggtgccattgctctggatggtgtcaccaagctgacaaatgcggactgaacctcacaaagcgacacacctgtggtagcgctgcccaaaagggagcggaactcccccgccgcgaggcggtcctctctggccaaaagcccagcgttaatagcgccttttgggatgcaggagccccacctgccaggtgtgaagtggagtgagtggatctccaatttggtctgttctgaactacaccatctactgctgtgaagaatgccctggaggcaagctggttacagccctgaccaggggccctgcccgtgactctcgatcggcgcagggtcaaaaattgtctaagcagcagcaggaacgcgggagcgtttcttttccctttgtatcgac

SEQ ID NO: 17287 - DNA, 571 bp, synthetic construct; identical to SEQ ID NO: 619
  source 1..571: mol_type = other DNA

SEQ ID NO: 17288 - DNA, 574 bp, synthetic construct
  source 1..574: mol_type = other DNA
aatattggcgcgcatttgcgcgcccccccccatttcagccccctgtcattgactggtcgaaggcgttcgcaataagactggtcgtcacttggctgttctatcgtttcaggctttagcgcgccctcgcgcggcgggccgtcaagcccgtgcgctgtatagcgccaggtaaccggacagcggcttgctggattttcccggtgccattgctctggatggtgtcaccaagctgacaaatgcggactgaacctcacaaagcgacacacctgtggtagcgctgcccaaaagggagcggaactcccccgccgcgaggcggtcctctctggccaaaagcccagcgttaatagcgccttttgggatgcaggagccccacctgccaggtgtgaagtggagtgagtggatctccaatttggtctgttctgaactacaccatctactgctgtgaagaatgccctggaggcaagctggttacagccctgaccaggggccctgcccgtgactctcgatcggcgcagggtcaaaaattgtctaagcagcagcaggaacgcgggagcgtttcttttccctttgtatcgac

SEQ ID NO: 17289 - DNA, 693 bp, synthetic construct
  source 1..693: mol_type = other DNA
gagtccatggtgaggggacttgatacctcaccgccgtttgcctaggctataggctaaatttccctttccctgtccttcccctattcccctttgttttggttgtaaatattaattcctgcaggttcagggttctttaatctgtttctctataagaacactcacctttcacgctttctgtcttctttcttccagggctctccccttgccctaggctctggccgttgcgcccggcggggtcaactccatgattagcatggagctgtaggagtctaaattggggacgcagatgtttgggacgtcgccttgcagtgttaacttggctctcatgaacctctttgatcttccacaaggggtaggctacgggtgaaacctcttaggctaatacttctatgaagagatgccttggatagggtaacagcggcggatattggtgagttgttaagacaaaaaccattcaacgccggaggactgactctcatccagtggatgcattgagtgaattgattgtcagggctgtctctaggtttaatctcagacctctctgtgcttagggcaaacatcatttggccttaaatgggatcctgtgagagggggtccctccattgacagctggactgttctttggggccttatgtggtgtttgcctctgaggtactcaggggcatttaggtttttcctcattcttaaacaata

SEQ ID NO: 17290 - DNA, 458 bp, synthetic construct
  source 1..458: mol_type = other DNA
cttgccgtaattcttcagaccgtcacgccgtgcttgcggatctcacgtgccggatgacagggctgtagctggaactgagtgtctagtgcacattgtgtaacagtgaaaactttgtgatcaccgaaaggtgggctagtagcctgcggaacaacaactggtaacagttgcctcaggggccaaaagccacggtgttaacagcaccctactagtttgatggaagtaattcctgatgttgcagagctagtaattgccaaactctgtgcattggtatcttggcataccgtgcagtctacgccagtgaaggatgccctgaaggtacccgtaggtaaccttaagagactatggatctgatcaggggctctctccgtactgctttacaggcggctgagagttaaaaaacgtctagctggccccagcccaagggattgggctttccctttaaagcccacaacttgcat

SEQ ID NO: 17291 - DNA, 419 bp, synthetic construct; identical to SEQ ID NO: 457
  source 1..419: mol_type = other DNA

SEQ ID NO: 17292 - DNA, 718 bp, synthetic construct
  source 1..718: mol_type = other DNA
gtccctcttggaagtccatggtgaggggacttgatacctcaccgccgtttgcctaggctataggctaaattttccctttcccttttctcctttcctattccctttgttttgcttgtaaatattgatttgtaaatattgattcctgcaggttcagggttcttaaatctgtttctctataagaacactcatttcacgctttctgtcttctttcttccagggctctccccttgccctaggctctggccgttgcgcccggcggggtcaactccatgattagcatggagctgtaggagtctaaattggggacacagatgtttggaacgtcaccttgcagtgttaacttggctttcatgaatctctttgatcttccacaaggggtaggctacgggtgaaacctcttaggctaatacttctatgaagagatgccttggatagggtaacagcggcggatattggtgagttgttaagacaaaaaccattcaacgccggaggactgactctcatccagtggatgcattgagtggattgactgtcggggctgtctttaggcttaattccagacctctctgtgcttggggcaaacatcatttggccttaaatgggattctgtgagaggggatccctccattgccagctggactgttctttggggccttatgtggtgtttgccgctgaggtactcaggggcatttaggtttttcctcattcttaaataata

SEQ ID NO: 17293 - DNA, 685 bp, synthetic construct; identical to SEQ ID NO: 822
  source 1..685: mol_type = other DNA

SEQ ID NO: 17294 - DNA, 680 bp, synthetic construct
  source 1..680: mol_type = other DNA
tatagggagatacctcaccgccgtttgcctaggctataggctaaatttccctttccctgtccttcccctatttccttttgttttgtttgtaaatattaattcctgcaggttcagggttctttaatctgtttctctataagaacactcaattttcacgctttctgtcttctttcttccagggctctccccttgccctaggctctggccgttgcgcccggcggggtcaactccatgattagcatggagctgtaggagtctaaattggggacgcagatgtttgggacgtcaccttgcagtgttaacttggctctcatgaacctctttgatcttccacaaggggtaggctacgggtgaaacctcttaggctaatacttctatgaagagatgccttggatagggtaacagcggcggatattggtgagttgttaagacaaaaaccattcaacgccggaggactggctctcatccagtggatgcattgagtgaattgattgtcagggctgtctctaggtttaatctcagacctctctgtgcttagggcaaacactatttggccttaaatgggatcctgtgagagggggtccctccattgacagctggactgttctttggggccttatgtggtgtttgcctctgaggtactcaggggcatttaggtttttcctcattcttaaacaata

SEQ ID NO: 17295 - DNA, 251 bp, synthetic construct
  source 1..251: mol_type = other DNA
ccgcactttcgaaacttgggctcaagaaggccaacttggaagaaaccctgctcgtcgtttcaaaagaatacaatggatggtctcggtttaggacttcctgcatcatccgtgttacgggtggtgttggtcgtgtcatctaccttcgccagatcatcacgactgagcatgctgtaccatcatggcaccacgctcctgcgactacaaacgtctcccaccgtagacgcaggaatgttggtctcactcaatccatc

SEQ ID NO: 17296 - DNA, 730 bp, synthetic construct; identical to SEQ ID NO: 926
  source 1..730: mol_type = other DNA

SEQ ID NO: 17297 - DNA, 316 bp, synthetic construct; identical to SEQ ID NO: 301
  source 1..316: mol_type = other DNA

SEQ ID NO: 17298 - DNA, 551 bp, synthetic construct
  source 1..551: mol_type = other DNA
ccgaccccactggtcgaaggccacttggcaataagactggtggaacaaggtcgcctgtagttgattggaaccttctttctaatgacttatgtcagcggtgctactcacaccgtaactctcctaccctatccccacgcttgtggaactaggaggggatgagtgattcaagtaagtactgtcagaatggtgaaaataatctgattctgaaacgctatggatccatcgaaagatggggctacacgcctgcggaacaacacatggtaacatgtgccccaggggccgaaagccacggtgataggatcacccgtgtagtttgagatcatatcaatgttcatagtctagtaagatgatttgaaatctaactggtctgatggctaactgcttgtcttattgcggcctaaggatgtcctgcaggtacctttagagaaccttaagagactattgatctgagcaggagccaaggtggtctttcccagccttggttaaaaagcgtctaagccgcggcagggggcgggaggccccctttcctcccaaactataatatagattgt

SEQ ID NO: 17299 - DNA, 683 bp, synthetic construct
  source 1..683: mol_type = other DNA
tatagggagatacctcaccgccgtttgcctaggctataggctaaattttccctttccccttccccttccttgttttgattgtaaatataaattcctgcaggttcagggttcttgaattggcattaaatttgtttctctataagaacactcaattttcacgctttctgtcttctttcttccagggctctccccttgccctaggctctggccgttgcgcccggcggggtcaactccatgattagcatggagctgtaggagtctaaattggggacacagatgtttggaacgtcaccttgcagtgttaacttggctttcatgaatctctttgatcttccacaagaggtaggctacgggtgaaacctcttaggctaatacttctatgaagagatgctttggatagggtaacagcggcggatattggtgagttgttaagacaaaaaccattcaacgccggaggactgactctcatccagtggatgcattgagtggattgactgtcagggctgtctctaggcttaattccagacctctctgtgcttggggcaaacatcatttggccttaaaaggggttctgtgagaggggatccctccattaacagctggactgttctttggggccttatgtggtgtttgccgctgaggtactcaggggcatttaggtttttcctcattctcaaataata

SEQ ID NO: 17300 - DNA, 683 bp, synthetic construct
  source 1..683: mol_type = other DNA
tatagggagatacctcaccgccgtttgcctaggctataggctaaattttccctttccccttccccttccttgttttgattgtaaatataaattcctgcaggttcagggttctttaaattggcattgaatttgtttctctataagaacactcattttcacgctttctgtcttctttcttccagggctctccccttgccctaggctctggccgttgcgcccggcggggtcaactccatgattagcatggagctgtaggagtctaaattggggacacagatgtttggaacgtcaccttgcagtgttaacttggctttcatgaatctctttgatcttccacaagaggtaggctacgggtgaaacctcttaggctaatacttctatgaagagatgctttggatagggtaacagcggcggatattggtgagttgttaagacaaaaaccattcaacgccggaggactgactctcatccagtggatgcattgagtggattgactgtcagggctgtctctaggcttaattccagacctctctgtgcttagggcaaacatcatttggccttaaaaggggttctgtgagaggggatccctccattaacagctggactgttctttggggccttatgtggtgtttgccgctgaggtactcaggggcatttaggtttttcctcattctcaaataata

SEQ ID NO: 17301 - DNA, 687 bp, synthetic construct
  source 1..687: mol_type = other DNA
atggtgaggggacttgatacctcaccgccgtttgcctaggctataggctaaatttccctttccctgtcctttccctatttccctttgttttgtttgtaaatattaattcctgcaggttcaggattctttaatctgtttctctataagaacactcaattttcacgctttctgtcttctttcttccagggctctccccttgccctaggctctggccgttgcgcccggcggggtcaactccatgattagcatggagctgtaggagtctaaattggggacgcagatgtttgggacgtcgccttgcagtgttaacttggctctcatgaacctctttgatcttccacaaggggtaggctacgggtgaaacctcttaggctaatacttctatgaagagatgccttggatagggtaacagcggcggatattggtgagttgttaagacaaaaaccattcaacgccggaggactggctctcatccagtggatgcattgagtgaattgattgtcagggctgtctctaggtttaatctcagacctctctgtgcttagggcaaacactatttggccttaaatgggatcctgtgagaggggatccctccattgacagctggactgttctttggggcctaaggtagtgtttgcctctgaggtactcaggggcatttaggtttttcctcatttttaaacaata

SEQ ID NO: 17302 - DNA, 682 bp, synthetic construct
  source 1..682: mol_type = other DNA
tatagggagatacctcaccgccgtttgcctaggctataggctaaattttccctttccccttccccttccttgttttgattgtaaatataaattcctgcaggttcagggttcttaaattggcattgaatttgtttctctataagaacactcattttcacgctttctgtcttctttcttccagggctctccccttgccctaggctctggccgttgcgcccggcggggtcaactccatgattagcatggagctgtaggagtctaaattggggacacagatgtttggaacgtcaccttgcagtgttaacttggctttcatgaatctctttgatcttccacaagaggtaggctacgggtgaaacctcttaggctaatacttctatgaagagatgctttggatagggtaacagcggcggatattggtgagttgttaagacaaaaaccattcaacgccggaggactgactctcatccagtggatgcattgagtggattgactgtcagggctgtctctaggcttaattccagacctctctgtgcttagggcaaacatcatttggccttaaaaggggttctgtgagaggggatccctccattaacagctggactgttctttggggccttatgtggtgtttgccgctgaggtactcaggggcatttaggtttttcctcattctcaaataata

SEQ ID NO: 17303 - DNA, 532 bp, synthetic construct; identical to SEQ ID NO: 566
  source 1..532: mol_type = other DNA

SEQ ID NO: 17304 - DNA, 716 bp, synthetic construct
  source 1..716: mol_type = other DNA
gggaatttccggagtccctcttggaagtccatggtgaggggacttgatacctcaccgccgtttgcctaggctataggctaaattttccccttccctttccctttcctattcccttgttttgcttgtaaatattaattcctgcaggttcagggttcttaaatctgtttctctataagaacactcatttttcacgctttctgtcttctttcttccagggctctccccttgccctaggctctggccgttgcgcccggcggggtcaactccatgattagcatggagctgtaggagtctaaattggggacacagatgtttggaacgtcaccttgcagtgttaacttggctttcatgaatctctttgatcttccacaaggggtaggctacgggtgaaacctcttaggctaatacttctatgaagagatgctttggatagggtaacagcggcggatattggtgagttgttaagacaaaaaccattcaacgccggaggactgactctcatccagtggatgcattgagtggattgactgtcagggctgtctctaggcttaattccagacctctctgtgcttagggcaaacatcatttggccttaaatgggattctgtgagaggggatccctccattgactgctggactgttctttggggccttatgtggtgtttgcctctgaggtactcaggggcatttaggtttttcctcatttttaaataata

SEQ ID NO: 17305 - DNA, 373 bp, synthetic construct
  source 1..373: mol_type = other DNA
gatcaatggaccttgacttctggcaagtacatatggtatgattattggatacgactgaatggcagtagcgtggcgagctatggaaaaatcgcaattgtcgatagccatgttagtgacgcgcttcggcgtgctcctttggtgattcggcgactggttacaggagagtaggcagtgagctatgggcaaacctctgcagtattactcagagggaatgtgcaattgagacttgacgagcgtctcgttagagatgtggcgcatgctcttggcattaccatagtgagcttccaggttgggaaacctggactgggcctatactacctgatagggtcgcggctggccgcctgtaactagtatagtcagttgaaaccccccc

SEQ ID NO: 17306 - DNA, 685 bp, synthetic construct
  source 1..685: mol_type = other DNA
ccctcttggaagtccatggtgaggggacctgatacctcaccgccgtttgcctaggctataggctatttctccccttcccttttccctgttttgtgtaaatattaattcctgcaggttcagggttctttaatctgtttctctataagaacactcattttcacgctttctgtcttgtttgttccagggctgtccccttgccctaggctctggccgttgcttcccgcggggtcaactccatgattagcatggagctgtaggagtctaaattggggacgcagatgtttgggacgtcaccttgcagtattaacttggctctcatgaagctctttgatcttccacaagaggtaggctacgggtgaaacctcttaagctagtacttctatgaagagatgctttggatagggtaacagcggcgcatattggtgagttgttaagacaaaaacctttcaacgccggaggactggctctcatccagtggatgcattgagtggattgtttgtcagggctgtctctaggcttaatctcagacctctctgtgcttagggcaaacattacttggccttaaatgggattctgtgagaggggatccctccattgattgctggacttttctttggggccttaggtggtgtttgcctctgaggtactcaggggcatttaggtttttcctcactctcaaataact

SEQ ID NO: 17307 - DNA, 350 bp, synthetic construct
  source 1..350: mol_type = other DNA
ggcgagcatatatggtatgattgatggatacacttaaatggcagtagcgtggcgagctatggaaaaatcgcaattgtcgatagccatgttagtgacgcgcttcggcgtgctcctttggtgattcggcgactggttacaggagagtaggcagtgagctatgggcaaacctctgcagtattactcagagggaatgtgcaattgagacttgacgagcgtctcctagagatgtggcgcatgctcttggcattaccatagtgagcttccaggttgggaaacctggactgggcctatactacctgatagggtcgcggctggccgcctgtaactagtatagtcagttgaaacccccc

SEQ ID NO: 17308 - DNA, 717 bp, synthetic construct
  source 1..717: mol_type = other DNA
gtccctcttggaagtccatggtgaggggacttgatacctcaccgccgtttgcctaggctataggctaaattttccctttcccttttccctttcctattccctttgttttgcttgtaaatattgatttgtaaatattgattcctgcaggttcagggttcttaaatctgtttctctataagaacactcatttcacgctttctgtcttctttcttccagggctctccccttgccctaggctctggccgttgcgcccggcggggtcaactccatgattagcatggagctgtaggagtctaaattggggacacagatgtttggaacgtcaccttgcagtgttaacttggctttcatgaatctctttgatcttccacaaggggtaggctacgggtgaaacctcttaggctaatacttctatgaagagatgccttggatagggtaacagcggcggatattggtgagttgttaagacaaaaaccattcaacgccggaggactgactctcatccagtggatgcattgagtggattgactgtcggggctgtctttaggcttaattccagacctctctgtgcttggggcaaacatcatttggccttaaatgggattctgtgagaggggatccctccattgccagctggactgttctttggggccttatgtggtgtttgccgctgaggtactcaggggcatttaggtttttcctcattcttaaataata

SEQ ID NO: 17309 - DNA, 717 bp, synthetic construct
  source 1..717: mol_type = other DNA
gtccctcttggaagtccatggtgaggggacttgatacctcaccgccgtttgcctaggctataggccaaattttccctttcccttttccctttcctattccctttgttttgcttgtaaatattgatttgtaaatattgattcctgcaggttcagggttcttaaatctgtttctctataagaacactcatttcacgctttctgtcttctttcttccagggctctccccttgccctaggctctggccgttgcgcctggcggggtcaactccatgattagcatggagctgtaggagtctaaattggggacacagatgtttggaacgtcaccttgcagtgttaacttggctttcatgaatctctttgatcttccacaaggggtaggctacgggtgaaacctcttaggctaatacttctatgaagagatgccttggatagggtaacagcggcggatattggtgagttgttaagacaaaaaccattcaacgccggaggactgactctcatccagtggatgcattgagtggattgactgtcggggctgtctttaggcttaattccagacctctctgtgcttggggcaaacatcatttggccttaaatgggattctgtgagaggggatccctccattgccagctggactgttctttggggccttatgtggtgtttgccgctgaggtactcaggggcatttaggtttttcctcattcttaaataata

SEQ ID NO: 17310 - DNA, 668 bp, synthetic construct; identical to SEQ ID NO: 810
  source 1..668: mol_type = other DNA

SEQ ID NO: 17311 - DNA, 687 bp, synthetic construct
  source 1..687: mol_type = other DNA
gtggtgaggggacttgatacctcaccgccgtttgcctaggctataggctaaatttccctttccctgtcccttccctatttccctttgttttatttgtaaatattagttcctgcaggttcagggttctttagtctgtttctctataagaacactcaattttcacgctttctgtcttctttcttccagggctctcccctagccctaggctctggccgttgcgcccggcggggtcaactccatgattagcatggagctgtaggagtctaaattggggacgcaaatgtttgagacgtcgccttgcagtgttaacttggctctcatgaacctctctgatcttccacaaggggtaggctacgggtgaaacctcttaggctaatacttctatgaagagatgctttggatagggtaacagcggcggatattggtgagttgttaagacaaaaaccattcaacgccggaggactggctctcatccagtggatgcattgagtggattgattgtcagggctgtctctaggtttaatctcagacctctctgtgcttagggcaaacaccatttggccttaaatgggatcctgtgagagggggtccctccatttacagctggactgtactttggggccttatgtggtgtttgccgctgaggtactcaggggcatttaggtttttcctcattcttaaacaata

SEQ ID NO: 17312 - DNA, 705 bp, synthetic construct
  source 1..705: mol_type = other DNA
cggagcccctcttggaagaccatggtgaggggacttgatacctcaccgccgtttgcctaggctataggctaaatttccctttccctttccctttcctatttccctttgttttgcttgtaaatattaattcctgcaggttcagggttctttaatctgtttctctataagaacactcaatttcacgcttctgtcttctttcttccagggctctccccttgccctaggctctggccgttgcgcccggcggggtcaactccatgattagcatggagctgtaggagtctaaattggggacgcagatgtttggaacgtcgccttgcagtgttaacttggctctcatgaacctctttgatcttccacaaggggtaggctacgggtgaaacctcttaggctaatacttctatgaagagatgccttggatagggtaacagcggcggatattggtgagttgttaagacaaaaaccattcaacgccggaggctggctctcatccagtggatgcattgagtggattgattgtcagggctgtctctaggtttaatctcagacctctctgtgcttagggcaaacaccatttggccttaaatgggatcctgtgagaggggatccctccatttacagctggactgtactttggggccttatgtggtgtgtgccactgaggtacccaggggcatttaggtttttcctcattcttaaacaata

SEQ ID NO: 17313 - DNA, 736 bp, synthetic construct; identical to SEQ ID NO: 116
  source 1..736: mol_type = other DNA

SEQ ID NO: 17314 - DNA, 686 bp, synthetic construct
  source 1..686: mol_type = other DNA
catggtgaggggacttgatacctcaccgccgtttgcctaggctataggctaaattttccccttccctccctttcctatttcccttgttttgtttgtaaatattaattcctgcaggttcagggtccttaaatctgtttctctataagaacactcaattttcacgctttctatcttctttcttccagggctctccccttgccctaggctctggccgttgcgcccggcggggtcaactccatgattagcatggagctgtaggagtctaaattggggacacagatgtttggaacgccaccttgcagtgttaacttggccttcatgaatctctttgatcttccacaagaggtaggctacgggtgaaacctcttaggctaatacttctatgaagagatgccttggatagggtaacagcggcggatattggtgagttgttaagacaaaaaccattcaacgccggaggactggctctcatccagtggatgcattgagtggattgattgtcagggctgtctctaggcttaattccagacctctctgtgcttagggcaaacatcacttggccttaaatgggattctgtgagaggggatccctccattgacagctggactgttctttggggccttatgtggtgtttgcctctgaggtactcaggggcatttaggtttttcctcattctcaaataata

SEQ ID NO: 17315 - DNA, 303 bp, synthetic construct; identical to SEQ ID NO: 281
  source 1..303: mol_type = other DNA

SEQ ID NO: 17316 - DNA, 717 bp, synthetic construct
  source 1..717: mol_type = other DNA
gtccctcttggaagtccatggtgaggggacttgatacctcaccgccgtttgcctaggctataggctaaattttccctttcccttttccctttcctattccctttgttttgcttgtaaatattgatttgtaaatattgattcctgcaggttcagggttcttaaatctgtttctctataagaacactcatttcacgctttctgtcttctttcttccagggctctccccttgccctaggctctggccgttgcgcccggcggggtcaactccatgattagcatggagctgtaggagtctaaattggggacacagatgtttggaacgtcaccttgcagtgttaacttggctttcatgaatctctttgatcttccacaaggggtaggctacgggtgaaacctcttaggctaatacttctatgaagagatgccttggatagggtaacagcggcggatattggtgagttgttaagacaaaaaccattcaacgccggaggactgactctcatccagtggatgcattgagtggattgactgtcggggctgtctttaggcttaattccagacctctctgtgcttggggcaaacatcatttggccttaaatgggattctgtgagaggggatccctccattgacagctggactgttctttggggccttatgtggtgtttgccgctgaggtactcaggggcatttaggtttttcctcattcttaaataata

SEQ ID NO: 17317 - DNA, 717 bp, synthetic construct
  source 1..717: mol_type = other DNA
gtccctcttggaagtccatggtgaggggacttgatacctcaccgccgtttgcctaggctataggctaaattttccctttcccttttccctttcctattccctttgttttgtttgtaaatattgatttgtaaatattgattcctgcaggttcagggttcttaaatctgtttctctataagaacactcatttcacgctttctgtcttctttcttccagggctctccccttgccctaggctctggccgttgcgcccggcggggtcaactccatgattagcatggagctgtaggagtctaaattggggacacagatgtttggaacgtcaccttgcagtgttaacttggctttcatgaatctctttgatcttccacaaggggtaggctacgggtgaaacctcttaggctaatacttctatgaagagatgccttggatagggtaacagcggcggatattggtgagttgttaagacaaaaaccattcaacgccggaggactgactctcatccagtggatgcattgagtggattgactgtcggggctgtctttaggcttaattccagacctctctgtgcttggggcaaacatcatttggccttaaatgggattctgtgagaggggatccctccattgacagctggactgttctttggggccttatgtggtgtttgccgctgaggtactcaggggcatttaggtttttcctcattcttaaataata

SEQ ID NO: 17318 - DNA, 717 bp, synthetic construct
  source 1..717: mol_type = other DNA
gtccctcttggaagtccatggtgaggggacttgatacctcaccgccgtttgcctaggctataggctaaattttccctttcccttttccctttcctattccctttgttttgtttgtaaatgttgatttgtaaatattgattcctgcaggttcagggttcttaaatctgtttctctataagaacactcatttcacgctttctgtcttctttcttccagggctctccccttgccctaggctctggccgttgcgcccggcggggtcaactccatgattagcatggagctgtaggagtctaaattggggacacagatgtttggaacgtcaccttgcagtgttaacttggctttcatgaatctctttgatcttccacaaggggtaggctacgggtgaaacctcttaggctaatacttctatgaagagatgccttggatagggtaacagcggcggatattggtgagttgttaagacaaaaaccattcaacgccggaggactgactctcatccagtggatgcattgagtggattgactgtcggggctgtctttaggcttaattccagacctctctgtgcttggggcaaacatcatttggccttaaatgggattctgtgagaggggatccctccattgacagctggactgttctttggggccttatgtggtgtttgccgctgaggtactcaggggcatttaggtttttcctcattcttaaataata

SEQ ID NO: 17319 - DNA, 717 bp, synthetic construct
  source 1..717: mol_type = other DNA
gtccctcttggaagtccatggtgaggggacttgatacctcaccgccgtttgcctaggctataggctaaattttccctttcccttttccctttcctattccctttgttttgtttgtaaatgttgatttgtaaatattgattcctgcaggttcagggttcttaaatctgtttctctataagaacactcatttcacgctttctgtcttctttcttccagggctctccccttgccctaggctctggccgttgcgcccggcggggtcaactccatgattagcatggagctgtaggagtctaaattggggacacagatgtttggaacgtcaccttgcagtgttaacttggctttcatgaatctctttgatcttccacaaggggtaggctacgggtgaaacctcttaggctaatacttctatgaagagatgccttggatagggtaacagcggcggatattggtgagttgttaagacaaaaaccattcaacgccggaggactggctctcatccagtggatgcattgagtggattgactgtcggggctgtctttaggcttaattccagacctctctgtgcttggggcaaacatcatttggccttaaatgggattctgtgagaggggatccctccattgacagctggactgttctttggggccttatgtggtgtttgccgctgaggtactcaggggcatttaggtttttcctcattcttaaataata

SEQ ID NO: 17320 - DNA, 717 bp, synthetic construct
  source 1..717: mol_type = other DNA
gtccctcttggaagtccatggtgaggggacttgatacctcaccgccgtttgcctaggctataggctaaattttccctttcccttttccctttcctattccctttgttttgtttgtaaatgttgatttgtaaatattgattcctgcaggttcagggttcttaaatctgtttctctataagaacactcatttcacgctttctgtcttctttcttccagggctctccccttgccctaggctctggccgttgcgcccggcggggtcaactccatgattagcatggagctgtaggagtctaaattggggacacagatgtttggaacgtcaccttgcagtgttaactcggctttcatgaatctctttgatcttccacaaggggtaggctacgggtgaaacctcttaggctaatacttctatgaagagatgccttggatagggtaacagcggcggatattggtgagttgttaagacaaaaaccattcaacgccggaggactgactctcatccagtggatgcattgagtggattgactgtcggggctgtctttaggcttaattccagacctctctgtgctcggggcaaacatcatttggccttaaatgggattctgtgagaggggatccctccattgacagctggactgttctttggggccttatgtggtgtttgccgctgaggtactcaggggcatttaggtttttcctcattctcaaataata

SEQ ID NO: 17321 - DNA, 684 bp, synthetic construct
  source 1..684: mol_type = other DNA
cctcttggaagtccatggtgaggggacctgatacctcaccgccgtttgcctaggctataggctatttgtccctttccctctcccctgttttgtgtaaatattaattcctgcaggttcagggttctttaatctgtttctctataagaacactcattttcacgctttctgtctgctttcttccagggctctccccttgccctaggctctggccgttgcgcccggcggggtcaactccatgattagcatggagctgtaggagtctaaattggggacgcagatgtttgggacgtcaccttgcagtgttaacttggctctcatgaaactctttgatcttccacaagaggtaggctacgggtgaaacctcttaagctagtacttctatgaagagatgctttggatagggtaacagcggcggatattggtgagttgttaagacaaaaacctttcaacgccggaggactggctctcatccagtggatgcattgagtggattgtttgtcagggctgtctctaggcttaatctcagacctctctgcgcttagggcaaacattacttggccttaaatgggatcctgtgagaggggatccctccattgactgctggacttttctttggggccttaggtagtgtttgcctctgaggtactcaggggcatttaggtttttcctcactcttaaataatt

SEQ ID NO: 17322 - DNA, 512 bp, synthetic construct; identical to SEQ ID NO: 537
  source 1..512: mol_type = other DNA

SEQ ID NO: 17323 - DNA, 712 bp, synthetic construct
  source 1..712: mol_type = other DNA
ttgggcaaccatgatgaggggttgtaaattacctcatccccgtttgcctagggtgataggctttttatgttttatgtttgttagtatgttttatgtttattggtctagtttgttaactgtaaatattaatttctgcaggttcagagttcttaatcatgttcctctataaggacactctctttaagtctaggccataagtgatcctagagataggtgaacctttcatatctggtctatgttagggcctttatatccctgggggcaatctttgtgccccttatttctcctgtctttcttcttttcttccgggctctcacggtgccaatggaacgaccggtgcgcccgccggggttaactccaaggatagcttggagctgtagttgctaaaagccgtgatgaaggaagcagactatcaagttagttaggtatcaactgaaacatgaattccactatgatctttgtgagtgggtaggctacgggtgaaacccactaggttaatactcatattgagagatacctccattaggctaaggttggcggtaaaggtgagtttaacgacgtatcctttcaacgcctgtggaccagtctcaatggcacaatgcgtagtggatgaagtgtgtagggcctactaaggagatgctctgtggaattcaccctcccgaaaggtcgtaggggtactcaggggcatttaggtttccacactttaaatttc

SEQ ID NO: 17324 - DNA, 323 bp, synthetic construct; identical to SEQ ID NO: 309
  source 1..323: mol_type = other DNA

SEQ ID NO: 17325 - DNA, 684 bp, synthetic construct
  source 1..684: mol_type = other DNA
ccctcttggaagtccactgtgagggacctgatacctcaccgccgtttgcctaggctttaggctatttttccctttccctttcccctgttttgtgtaaatattaattcctgcaggttcaggtttctttaatctgtttctctataagaacactcattttcacgctttctgtctgctttcttccagggctctccccttgccctaggctctggccgttgcgcccggcggggtcaactccatgattagcatggagctgtaggagtctaaattggggacgcagatgtttgggacgtcaccttgcagtgttaacttggctctcatgaagctctttgatcttccacaagaggtaggctacgggtgaaacctcttaagctagtacttctatgaagagatgctttggatagggtaacagcggcggatattggtgagttgttaagacaaaaacctttcaacgccggaggactggctctcatccagtggatgcattgagtggattgtttgtcagggctgtctctaggcttaatctcagacctctctgtgcttagggcaaacactacttggccttaaatgggattctgtgagaggggatccctccattgactgctggacttttctttggggccttaggtagagtttgcctctgaggtactcaggggcatttaggtttttcctcatttttatataact

SEQ ID NO: 17326 - DNA, 563 bp, synthetic construct
  source 1..563: mol_type = other DNA
gcagatagaggttctggattggcaaactttacctcgaaacacgcccgtttttcctgctgtgttttacagactgtcctgccacacttgtggcggcttgtggcactgtgaacatagtgagaccgaccaagacaacagtttcaagtgctgaacatcgaacgtctaaactggatccgtagctggacatgttagggcaagggtctcccccctggtaacaggagccttgctggccaaaagccccgctctttgagcctagcatgttgtcgaccccggactgttcagtttagttagtacatgggattcacttgtcacggttcctctgaactcggtctctagtgcggcagcctaaggatgccctccaggtaccccgaggtaacaagcgacactcgggatctgaggaggggactactttacgtggtttaaaaaacgtctaagctgctacggtgaccagaggctggcacctttcacttttaaaaatacactactgactacaattgaagtgataacggttttacagactttcaaactagttacacaagtactgtttttccaacacacacaatttt

SEQ ID NO: 17327 - DNA, 712 bp, synthetic construct
  source 1..712: mol_type = other DNA
atttccggagtccctcttggaagtccatggtgaggggacttgatacctcaccgccgtttgcctaggctataggctaaatttccttgcccttttcccttccctattccctttgttttgtttgtaaatattaattcctgcaggttcagggttcttaaatctgtttctctataagaacactcatttttcacgctttctgtctcctttcttccagggctctccccttgccctaggctctggccgttgcgcccggcggggtcaactccatgattagcatggagctgtaggagtctaaattggggacacagatgtttggaacgtcaccttgcagtgttaacttggctttcatgaatctctttgatcttccacaaggggtaggctacgggtgaaacctcttaggctaatacttctatgaagagatgctttggatagggtaacagcggcggatattggtgagttgttaagacaaaaaccattcaacgccggaggactgactctcatccagtggatgcattgagtggattgactgtcagggctgtctttaggcttaattccagacctctctgtgcttagggcaaacatcatttggccttaaatgggattctgtgagagggaatccctccattgacagctggactgttctttggggccttatgtgatgtttgcctctgaggtactcaggggcatttaggtttttcctcatttttaaacaata

SEQ ID NO: 17328 - DNA, 665 bp, synthetic construct
  source 1..665: mol_type = other DNA
gaggggacctgatacctcaccgccgtttgcctaggctataggctatttgtccctttccctctcccctgttttgtgtaaatattaattcctgcaggttcagggttctttaatctgtttctctataagaacactcattttcacgctttctgtctgctttcttccagggctctccccttgccctaggctctggccgttgcgcccggcggggtcaactccatgattagcatggagctgtaggagtctaaattggggacgcagatgtttgggacgtcaccttgcagtgttaacttggctctcatgaaactctttgatcttccacaagaggtaggctacgggtgaaacctcttaagctagtacttctatgaagagatgctttggatagggtaacagcggcggatattggtgagttgttaagacaaaaacctttcaacgccggaggactggctctcatccagtggatgcattgagtggattgtttgtcagggctgtctctaggcttaatctcagacctctctgcgcttagggcaaacattacttggccttaaatgggatcctgtgagaggggatccctccattgactgctggacttttctttggggccttaggtagtgtttgcctctgaggtactcaggggcatttaggtttttcctcactcttaaataatt

SEQ ID NO: 17329 - DNA, 697 bp, synthetic construct
  source 1..697: mol_type = other DNA
ccctctgggaagtccatggtgaggggacttgatacctcaccgccgtttgcctaggctataggctaaattttccctttccctttccctttcctattccctttgtttgtaaatattaattcctgcaggttcagggttcttaaatctgtttctctataagaacactcatttttcacgctttctgtcttctttcttccagggctctccccttgccctaggctctggccgttgcgcccggcggggtcaactccatgattagcatggagctgtaggagtctaaattggggacacagatgtttgggacgtcaccttgcagtgttaacttggctttcatgaatctctttgatcttccacaaggggtaggctacgggtgaaacctcttaggctaatacttctatgaagagatgccttggatagggtaacagcggcggacattggtgagttgttaagacaaaaaccattcaacgccggaggactgactctcatccagtggatgcattgagtggattgactgtcaaggctgtctctaggcttaattccagacctctctgtgcttagggcaaacatcatttggccttaaatgggatcctgtgagaggggatccctccattgacagctggactgtcctttggggccttatgtggtgtttgcctctgaggtactcaggggcatttaggtttttcctcactctcaaacaata

SEQ ID NO: 17330 - DNA, 664 bp, synthetic construct
  source 1..664: mol_type = other DNA
ccgccgtttgcctaggctataggctaaattttccctttcccttttccctttcctattccctttgttttgcttgtaaatattaattcctgcaggttcagggttcttaaatctgtttctctataagaacactcatttttcacgctttctgtcttctttcttccagggctctccccttgccctaggctctggccgttgcgcccggcggggtcaactccatgattagcatggagctgtaggagtctaaattggggacacagatgtttggaacgtcaccttgcagtgttaacttggctttcatgaatctctttgatcttccacaaggggtaggctacgggtgaaacctcttaggctaatacttctatgaagagatgccttggatagggtaacagcggcggatattggtgagttgttaagacaaaaaccattcaacgccggaggactgactctcatccagtggatgcattgagtggattgactgtcagggctgtctttaggcttaattccagacctctctgtgcttagggcaaacatcatttggccttaaatgggattctgtgagaggggatccctccattgacagctggactgttctttggggccttatgtggtgtttgcctctgaggtactcaggggcatttaggtttttcctcattcttaaataata

SEQ ID NO: 17331 - DNA, 684 bp, synthetic construct
  source 1..684: mol_type = other DNA
tgaggggacttgatacctcaccgccgtttgcctaggctataggctaaatttccctttccctgtccttcccctatttccttttgttttgtttgtaaatattaattcctgcaggttcagggttctttaatctgtttctctataagaacactcaatttttcacgctttctgtctcctttcttccagggctctccccttgccctaggctctggccgttgcgcccggcggggtcaactccatgattagcatggagctgtaggagtctaaattggggacgcagatgtttgggacgtcgccttgcagtgttaacttggctttcatgaacctctttgatcttccacaaggggtaggctacgggtgaaacctcttaggctaatacttcaatgaagagatgccttggatagggtaacagcggcggatattggtgagttgttaagacaaaaaccattcaacgccggaggactggctctcatccagtggatgcattgagggaattgattgtcagggctgtctctaggtttaatctcagacctctctgtgcttagggcaaacactatttggccttaaatgggatcctgtgagagggggtccctccattgacagctggactgttctttggggccttatgtggtgtttgcctctgaggtactcaggggcatttaggtttttcctcattcttaaataata

SEQ ID NO: 17332 - DNA, 549 bp, synthetic construct
  source 1..549: mol_type = other DNA
ttcaaagaggggtccgggattttcctggtccccctctttgggcacccttggctcgggggtgtgaataccgtgctcgcgtttgccgtgcgttaacggcttcatttatgtttgtttgtctgttttattatgtttgtttgtctgtttgttatgttggtattgttcgtgtttaatgttatgaccacattacactccagccaatgaagaacagatggtgcggttattgctggcggaattcctaacgtcctggatccgttggtacgcatcacaaaacaatttgcagagagagtggtgaaacggcttgggaatccctgagtacagggaaatcacactgatagctcatcttggctgttttcagtcatggaccttatgcagtgtaatttgggtgtaccccccatagcttaggaggaatgttctgtcttggcactagagtgggacgctgatgcctccgtgtctaggatggtctaagggacagaatggggtgcctctgatgccatactacctgatagggtgctctcacggcctctgcatcttagtgagaagttcaatttt

SEQ ID NO: 17333 - DNA, 675 bp, synthetic construct
  source 1..675: mol_type = other DNA
ggtccatggtgaggggacctgatacctcaccgccgtttgcctaggctataggctatttctccctttccctttcccttgttttgtgtaaatattaattcctgcaggttcagggttctttaatctgtttctctataagaacactcattttcacgctttctgtctgctttcttccagggctctccccttgccctaggctctggccgttgcgcccggcggggtcaactccatggctagcatggagctgtaggagtctaaattggggacgcagatgtttgggacgtcaccttgcagtgttaacttggctctcatgaagctctttgatcttccacaagaggtaggctacgggtgaaacctcttaagctagtacttctatgaagagatgctttggatagggtaacagcggcggatattggtgagttgttaagacaaaaacctttcaacgccggaggactggctctcatccagtggatgcattgagtggattgtttgtcagggctgtctctaggcttaatctcagacctctctgtgcttagggcaaacattacttggccttaaatgggatcctgtgagaggggatccctccattgactgctggacttttctttggggccttaggtggtgtttgcctctgaggtactcaggggcatttaggtttttcctcactctcaaataatt

SEQ ID NO: 17334 - DNA, 504 bp, synthetic construct
  source 1..504: mol_type = other DNA
tctagcatggaaaatcacacatgcagcccgatttcgggcttgggaacccgttcatcaagatcccataacctttcttttcttttgtctatcccttgagtagctaggctcgcggcagggtcttgtatatacctgcactagctgccacgaagtgctacagaaaccattagtatatatttagaaaccacctgttgacgtaactgtgattgattgcctggggctgagggcatggtaacatgcaccccaggggccaaaagcctagtgggtaacaacccaccattcatgatgcccttcttggcacaacaagtggatctctctatctatagaacatgggagtatggtatggagtggtgtaaggagcacgctagtagatgccccataggtacccttctggatctgagtgggggccatgaggaggtctttccctctgaattggttaaaaaccatgaacgtttgctccgcccatctttcttctaattttatcaacttacttgaattctgatcaca

SEQ ID NO: 17335 - DNA, 487 bp, synthetic construct; identical to SEQ ID NO: 511
  source 1..487: mol_type = other DNA

SEQ ID NO: 17336 - DNA, 723 bp, synthetic construct; identical to SEQ ID NO: 901
  source 1..723: mol_type = other DNA

SEQ ID NO: 17337 - DNA, 668 bp, synthetic construct
  source 1..668: mol_type = other DNA
ctcaccgccgtttgcctaggctataggctaaatttccctttccctgtccttcccctatttccctttgttttgcttgtaaatatcaattcctgcaggttcagggctctttaatctgtttctctataagaacactcaattttcacgctttctgtcttcttttcttccagggctctccccttgccctaggctctggccgttgcgcccggcggggtcaactccatgattagcatggagctgtaggagtctaaattggggacgcagatgtttgggacgtcgccttgcagtgttaacttagctctcatgaacctctttgatcttccacaaggggtaggctacgggtgaaacctcttaggctaatacttctatgaagagatgctttggatagggtaacagcggcggatattggtgagttgttaagacaaaaaccattcaacgccggaggactggctctcatccagtggatgcattgagtggattgattgttagggctgtctctaggtttaatctcggacctctctgtgcttagggcaaacaccatttggccttaaatgggatcctgtgagagggggtccctcctttgacagcaggactgttctttggggccttatgtggtgtttgcctctgaggtactcaggggcatttaggtttttcctcattcttaaataata

SEQ ID NO: 17338 - DNA, 696 bp, synthetic construct; identical to SEQ ID NO: 96
  source 1..696: mol_type = other DNA

SEQ ID NO: 17339 - DNA, 684 bp, synthetic construct
  source 1..684: mol_type = other DNA
cctcttggaagtccatggtgaggggacctgatacctcaccgccgtttgcctaggctataggctatttgtccctttccctctcccctgttttgtgtaaatattaattcctgcaggttcagggttctttaatctgtttctctataagaacactcattttcacgctttctgtctgctttcttccagggctctccccttgccctaggctctggccgttgcgcccggcggggtcaactccatgattagcatggagctgtaagagtctaaattggggacgcagatgtttgggacgtcaccttgcagtgttaacttggctctcatgaagctctttgatcttccacaagaggtaggctacgggtgaaacctcttaagctagtacttctatgaagagatgctttggatagggtaacagcggcggatattggtgagttgtcaagacaaaaacctttcaacgccggaggactggctctcatccagtggatgcattgagtggattgtttgtcagggctgtctctaggcttaatctcagacctctctgcgcttagggcaaacattacttggccttaaatgggatcctgtgagaggggatccctccattgactgctggacttttctttggggccttaggtagtgtttgcctctgaggtactcaggggcatttaggtttttcctcactctcaaataatt

SEQ ID NO: 17340 - DNA, 684 bp, synthetic construct
  source 1..684: mol_type = other DNA
cctcttggaagtccatggtgaggggacctgatacctcaccgccgtttgcctaggctataggctatttgtccctttccctctcccctgttttgtgtaaatattaattcctgcaggttcagggttctttaatctgtttctctataagaacactcattttcacgctttctgtctgctttcttccagggctctccccttgccctaggctctggccgttgcgcccggcggggtcaactccatgattagcatggagctgtaggagtctaaattggggacgcagatgtttgggacgtcaccttgcagtgttaacttggctctcatgaagctctttgatcttccacaagaggtaggctacgggtgaaacctcttaagctagtacttctatgaagagatgctttggatagggtaacagcggcggatattggtgagttgttaagacaaaaacctttcaacgccggaggactggctctcatccagtggatgcattgagtggattgtttgtcagggctgtctctaggcttaatctcagacctctctgcgcttagggcaaacattacttggccttaaatgggatcctgtgagaggggatccctccattgactgctggacttttctttggggccttaggtagtgtttgcctctgaggtactcaggggcatttaggtttttcctcactcttaaataatt

SEQ ID NO: 17341 - DNA, 663 bp, synthetic construct
  source 1..663: mol_type = other DNA
ccgccgtttgcctaggctataggctaaatttcccttccctgtccttcccctatttccctttgttttgcttgtaaatatcaattcctgcaggttcagggctctttaatctgtttctctataagaacactcaattttcacgctttctgtcttcttttcttccagggctctccccttgccctaggctctggccgttgcgcccggcggggtcaactccatgattagcatggagctgtaggagtctaaattggggacgcagatgtttgggacgtcgccttgcagtgttaacttagctctcatgaacctctttgatcttccacaaggggtaggctacgggtgaaacctcttaggctaatacttctatgaagagatgctttggatagggtaacagcggcggatattggtgagttgttaagacaaaaaccattcaacgccggaggactggctctcatccagtggatgcattgagtggattgattgttagggctgtctctaggtttaatctcggacctctctgtgcttagggcaaacaccatttggccttaaatgggatcctgtgagagggggtccctcctttgacagcaggactgttctttggggccttatgtggtgtttgcctctgaggtactcaggggcatttaggtttttcctcattcttaaataata

SEQ ID NO: 17342 - DNA, 299 bp, synthetic construct
  source 1..299: mol_type = other DNA
tggccaccggggaagaacggcaattgtgcacctcctctacaacccacgccgaccctgcctaaccatggcaccagtaggagtgggcccctgtagtgggtcaaggtgtgcgacagtcagtggtagagtagacaatcctgaccgggcaataggactgcattgcatatccttaggtggtattgagaaacctctgccacccaccggcgtggatctctatggggggggccccatagactgggtctatactgcctgatagggtcgcggctggtcgaccactgactgtataaccagttgtactcaac

SEQ ID NO: 17343 - DNA, 299 bp, synthetic construct
  source 1..299: mol_type = other DNA
tggccaccggggaaaaacggctattgtgcacctcctctacaacctacgccgaccatgcctaaccatggcatcaataggagtgggcccctgtagtgggtcaaggtgtgcgacagtcagtggtagagtagacaatcctaaccgggcaataggactgcattgcatatccttaggtggtattgagaagcctctgccacccaccggcatggatttctatggggggggccccatagactgggtctatactgcctgatagggtcgcggctggtcgaccactgactgtataaccagttgtgcataac

SEQ ID NO: 17344 - DNA, 413 bp, synthetic construct; identical to SEQ ID NO: 450
  source 1..413: mol_type = other DNA

SEQ ID NO: 17345 - DNA, 700 bp, synthetic construct
  source 1..700: mol_type = other DNA
gtccctcttggaagtccatggtgaggggacttgatacctcaccgccgtttgcctaggctataggctaaattttccctttcccttttccctttcccattcccttttgcttgtaaatattgattcctgcaggttcagggttcttaaatctgtttctctataagaacactcattttcacgctttctgtcttctttcttccagggctctccccttgccctaggctctggccgttgcgcccggcggggtcaactccatgattagcatggagctgtaggagtctaaattggggacacagatgtttggaacgtcaccttgcagtgttaacttggctttcatgaatctctttgatcttccacaaggggtaggctacgggtgaaacctcttaggctaatacttctatgaagagatgccttggatagggtaacagcggcggatattggtgagttgttaagacaaaaaccattcaacgccggaggactgactctcatccagtggatgcattgagtggattgactgtcagggctgtctttaggcttaattccagacctctctgtgcttggggcaaacatcatttggccttaaatgggattctgtgagaggggatccctccattaacagctggactgttctttggggccttatgtggtgtttgccgctgaggtactcaggggcatttaggtttttcctcattcttaaataata

SEQ ID NO: 17346 - DNA, 643 bp, synthetic construct
  source 1..643: mol_type = other DNA
gcctaggctataggctaaatttccctttcccctttccctttattgttgtaaatattaattcctgcaggttcaggtttcttggatttgttccactttatggacactcatttcacgctttctgtctgcttttcttccagggctctccccttgccctaggctctggccgttgcgcccggcggggtcaactccatgattagcatggagctgtaggagtctaaattggggacacagatgttgggaacgtcaccttgcagtgttaacttggctttcatgaagctttttgatcttccacaagaggtaggctacgggtgaaacctcttaagctaatacttctatgaagagatgctttggatagggtaacagcggcggatattggtgagttattcgacaaaaaccattcaacgccggaggactggctctcatccagtggatgcattaagtggattgtctgtcagggctgtctctaggtttaattcctgacctctctgtgcttagggcaaacaaaacttggccttaaatgaggtcctgtgagaggggacctcgccattgaatgctgaacatttctttggggccttatgttttgtttgcctctgaggtactcaggggcatttaggtttttcctcatcaataaataattatgaat

SEQ ID NO: 17347 - DNA, 656 bp, synthetic construct
  source 1..656: mol_type = other DNA
gcctaggctataggctaaattttccctttcccccttttccctttcctattccccttgttttgtttgtaaatattaattcctgcaggttcagggttctcaaatctgtttctctataagaacactctttttcacgctttctgtctcctttcttccagggctctccccttgccctaggctctggccgttgcgcccggcggggtcaactccatgactagcatggagctgtaggagtctaaattggggacacagatgtttggaacgtcaccttgcagtattaacttggctttcatgaatctctttgatcttccacaaggggtaggctacgggtgaaacctcttaggctaatacttctatgaagagatgctttggatagggtaacagcggcggatattggtgagttgttaagacaaaaaccattcaacgccggaggactgactctcatccagtggatgcattgagtggattgactgtcagggctgtctctaggcttaattccagacctctctgtgcttagggcaaacatcatttggccttaaatgggattctgtgagaggggatccctccattgacagctggactgttctttggggccttatgtggtgtttgcctctgaggtactcaggggcatttaggtttttcctcattctcaaataaca

SEQ ID NO: 17348 - DNA, 666 bp, synthetic construct
  source 1..666: mol_type = other DNA
tcaccgccgtttgcctaggctataggctaaatttcccttcccctgtcctttccctgtctccctttgtcttgtttgtaaatattaattcctgcaggctcagggttctttaatctgtttctctataagaacactcagttttcacgctttctgtcttctttcttccagggctctccccttgccctaggctctggccgttgcgcccggcggggtcaactccatgattagcatggagctgtaggagtctaaattggggacgcagatgtttgagacgtcgccttgcagtgttaacttggctctcatgaacctctttgatcttccacaaggggtaggctacgggtgaaacctcttaggctaatacttctatgaagagatgctttggatagggtaacagcggcggatattggtgagttgttaagacaaaaaccattcaacgccggaggactggctctcatccagtggatgcattgagtggattgattgtcagggctgtctctaggtttaatctcagacctctctgtgcttagggcaaacaccatttggccttaaatgggatcctgtgagagggggtccctccattgacagctggactgttctttggggccttaagtggtgtttgcctctgaggtactcaggggcatttaggtttttcctcattctcaaataata

SEQ ID NO: 17349 - DNA, 643 bp, synthetic construct
  source 1..643: mol_type = other DNA
gcctaggctataggctaaatttccctttcccctttccctttattgctgtagatattaattcctgcaggttcaggtctcttggatttgttccactttatggacactcatttcacgctttctgtctgcttttcttccagggctctccccttgccctaggctctggccgttgcgcccggcggggtcaactccatgattagcatggagctgtaggagcctaaattggggacacagatgttgggaacgtcaccttgcagtgttaacttggctttcatgaagctttttgatcttccacaagaggtaggctacgggtgaaacctcttaagctaatacttctatgaagagatgctttggatagggtaacagcggcggatattggtgagttatttgacaaaaaccattcaacgccggaggactggctctcatccagtggatgcattaagtggattgtctgtcagggctgtctctaggtttaattcctgacctctctgtgcttagggcaaacaaaacttggccttaaatgaggtcctgtgagaggggacctcgccattgaatgctggacatttctttggggccttatgttttgtttgcctctgaggtactcaggggcatttaggtttttcctcatcaataaatagttatgaat

SEQ ID NO: 17350 - DNA, 518 bp, synthetic construct; identical to SEQ ID NO: 543
  source 1..518: mol_type = other DNA

SEQ ID NO: 17351 - DNA, 349 bp, synthetic construct
  source 1..349: mol_type = other DNA
aagaacatatggtatgactattggatacaccttgaatggcagtagcgtggcgagctatggaaaaatcgcaattgtcgatagccatgttagtgacgcgcttcggcgtgctcctttggtgattcggcgactggttacaggagagtaggcagtgagctatgggcaaacctctgcagtattactcagagggaatgtgcaattgagacttgacgagcgtctctttgagatgtggcgcatgctcttggcattaccatagtgagcttccaggttgggaaacctggactgggcctatactacctgatagggtcgcggctggccgcctgtaactagtatagtcagttgaaaccccccc

SEQ ID NO: 17352 - DNA, 665 bp, synthetic construct
  source 1..665: mol_type = other DNA
gaggggacctgatacctcaccgccgtttgcctaggctataggctatttgtccctttccctctcccctgttttgtgtaaatattaattcctgcaggttcagggttctttaatctgtttctctataagaacactcattttcacgctttctgtctgctttcttccagggctctccccttgccctaggctctggccgttgcgcccggcggggtcaactccatgattagcatggagctgtaggagtctaaattggggacgcagatgtttgggacgtcaccttgcagtgttaacttggctctcatgaagctctttgatcttccacaagaggtaggctacgggtgaaacctcttaagctagtacttctatgaagagatgctttggatagggtaacagcggcggatattggtgagttgttaagacaaaaacctttcaacgccggaggactggctctcatccagtggatgcattgagtggattgtttgtcagggctgtctctaggcttaattccagacctctctgcgcttagggcaaacattacttggccttaaatgggatcctgtgagaggggatccctccattgactgctggacttttctttggggccttaggtagtgtttgcctctgaggtactcaggggcatttaggtttttcctcactcttaaataatt

SEQ ID NO: 17353 - DNA, 665 bp, synthetic construct
  source 1..665: mol_type = other DNA
gaggggacctgatacctcaccgccgtttgcctaggctataggctatttgtccctttccctctcccctgttttgtgtaaatattaattcctgcaggttcagggttctttaatctgtttctctataagaacactcattttcacgctttctgtctgctttcttccagggctctccccttgccctaggctctggccgttgcgcccggcggggtcaactccatgattagcatggagctgtaggagtctaaattggggacgcagatgtttgggacgtcaccttgcagtgttaacttggctctcatgaagctctttgatcttccacaagaggtaggctacgggtgaaacctcttaagctagtacttctatgaagagatgctttggatagggtaacagcggcggatattggtgagttgttaagacaaaaacctttcaacgccggaggactggctctcatccagtggatgcattgagtggattgtttgtcagggctgtctctaggcttaatctcagacctctctgcgcttagggcaaacattacttggccttaaatgggatcctgtgagaggggatccctccattgactgctggacttttctttggggccttaggtagtgtttgcctctgaggtactcaggggcatttaggtttttcctcactcttaaataatt

SEQ ID NO: 17354 - DNA, 708 bp, synthetic construct; identical to SEQ ID NO: 105
  source 1..708: mol_type = other DNA

SEQ ID NO: 17355 - DNA, 676 bp, synthetic construct
  source 1..676: mol_type = other DNA
acttgatacctcaccgccgtttgcctaggctataggctaaaccttcctttccctgcccttcccttatttccctttgttttgtttgtaaatattaattcctgcaggttcagggttctttaatctgtttctctataagaacactcaattttcacgctttctgtctcctttcttccagggctctccccttgccctaggctctggccgttgcgcccggcggggtcaactccatgattagcatggagctgtaggagtctgaattggggacgcagatgtttgggacgtcgccttgcagtgttaacttggctttcatgaacctctttgatcttccacaaggggtaggctacgggtgaaaccccttaggctaatacttctatgaagagatgccttggatagggtaacagcggcggatattggtgagttgttaagacaaaaaccattcaacgccggaggactggctctcatccagtggatgcattgagtggattgactgtcagggctgtctctaggtttaatctcagacctctctgtgcttagggcaaacaccatttggccttaaatgggatcctgtgagagggggtccctccattgacagctggactgttctttggggccttatgtggtgtttgcctctgaggtactcaggggcatttaggtttttcctcattctctaacaata

SEQ ID NO: 17356 - DNA, 609 bp, synthetic construct; identical to SEQ ID NO: 44
  source 1..609: mol_type = other DNA

SEQ ID NO: 17357 - DNA, 522 bp, synthetic construct
  source 1..522: mol_type = other DNA
gggacgtcagcgcacgaaacgcgcggttgctctttgcgttcttgtacaaacacgatcttgacgcaggaatcttagaccaacccaacccgtgcacctgcaagtttcgcccggtctttccgggtcttgagagacaaacagatgtactgagatcaactccacgattggtctactagcgggtactagtaacacccactttgcttcgtagcggagcacatgagcggtgggacctcccccatggtaacatggacccaccgggccaaaagccacgcctcacggcctcatgtgtgtgcaaccccagcacggcaacttgtttgtgaaacataccttaaggtaacactgagactggtacttgatttctggagacaggctaaggatgcccttcaggtaccctgaggtaacaagagacacttcgggatctgagaaggggaccaggagttctatcaaactgccggtttaaaaagcttctatgcctggataggtgaccggaggccggcaccttttcctttactttaaacttacttt

SEQ ID NO: 17358 - DNA, 301 bp, synthetic construct; identical to SEQ ID NO: 1340
  source 1..301: mol_type = other DNA

SEQ ID NO: 17359 - DNA, 641 bp, synthetic construct
  source 1..641: mol_type = other DNA
gtttgcctaggctataggctaaatttcccttttccctttccctttattgttgtaaatattaattcctgcaggttcaggtttcttggatttgttccactttatggacactcatttcacgctttctgtctgcttttcttccagggctctccccttgccctaggctctggccgttgcgcccggcggggtcaactccatgattagcatggagctgtaggagtctaaattggggacacagatgttgggaacgtcaccttgcagtgttaacttggctttcatgaagctttttgatcttccacaagaggtaggctacgggtgaaacctcttaagctaatacttctatgaagagatgctttggatagggtaacagcggcggatattggtgagttatttgacaaaaaccattcaacgccggaggactggctctcatccagtggatgcattaagtggattgtctgtcagggctgtctctaggtttaattcctgacctctctgtgcttagggcaaacaaaacttggccttaaatgaggtcctgtgagaggggacctcgccattgaatgctggacatttctttggggccttatgttttgtttgcctctgaggtactcaggggcatttaggtttttcctcatcaataaataatt

SEQ ID NO: 17360 - DNA, 525 bp, synthetic construct
  source 1..525: mol_type = other DNA
aaacgggacgtcagcgcacgaaacgcgccgccactttcggaacacttgtacaaacacgatctgacgcaggtatccctaactggcattctcgtgcaacttggagtctcgcctggtctttccaggtctagggaggcaacactttgtactgaaaccaactccacaactggtctactggcgggtgctagtaacgactttgttgcttcgtagcggagcatgcgagccgcgggaactcccccctggtaacagggacccgcggggccgaaagccacgtccctcggacctcgcatgtgtgcaaccccagcacggcaacactgtagtgaaacacactttaaggtaacactgagactggtacttggtttctggggacaggctaaggatgccctccaggtaccccgaggtaacaagcgacactcgggatctgaggaggggactggggcttctataaaagcgcccagtttaaaaagcttctatgcctgaataggtgaccggaggccggcaccttttcttttgtacacgaatcacttt

SEQ ID NO: 17361 - DNA, 713 bp, synthetic construct; identical to SEQ ID NO: 873
  source 1..713: mol_type = other DNA

SEQ ID NO: 17362 - DNA, 419 bp, synthetic construct
  source 1..419: mol_type = other DNA
ggtgaacatcgaacgtctgaactggatccgtagctggacatgttagggcaagggtctcccccctggtaacaggagccttgctggccaaaagccccgctctctgagcctagcatgttgtcgaccccggactgttcagtttagttagtacatgggattcacttgtcatggttcctctgaactcggtctctagtgcggcagcctaaggatgccctccaggtaccccgaggtaacaagcgacactcgggatctgaggaggggactactttacgtggtttaaaaaacgtctaagctgctacggtgaccagaggctggcacctttcactttttaaacacactattgactacaattgaagtgataacggttttacagactttcaaactagttacacaagtactgtttttccaacacacacaatttt

SEQ ID NO: 17363 - DNA, 663 bp, synthetic construct
  source 1..663: mol_type = other DNA
aggggggggctgggccctcatgcccagtccttcctttccccttccggggggtaaaccggctgtgtttgctagaggcacagaggagcaacacccaacctgcttttgtggggaacggtgcggctccgattcctgcgtcgccaaaggtgttagcgcacccaaacggcgcatctaccaatgctattggtgtggtctgcgagttctagcctactcgtttctcccctatccattcactcacgcacaaaaagtgtgttgtaactacaagatttagccctcgcacgagatgtgcgataaccgcaagactgactcaagcgcggaaagcgctgtaaccacatgctgttagtccctttatggctgcgagatggctatccacctcggatcactgaactggagctcgaccctccttagtaagggaaccgagaggccttcttgcaacaagctccgacacagagtccacgtgattgctaccaccatgagtacatggttctcccctctcgacccaggacttctttttgaatatccacggctcgatccagagggtggggcatgatccccctagcatagcgagctacagcgggaactgtagctaggccttagcgtgccttggatactgcctgatagggcgacggcctagtcgtgtcggttctataggtagcacatataaat

SEQ ID NO: 17364 - DNA, 1000 bp, synthetic construct; identical to SEQ ID NO: 144
  source 1..1000: mol_type = other DNA

SEQ ID NO: 17365 - DNA, 604 bp, synthetic construct; identical to SEQ ID NO: 39
  source 1..604: mol_type = other DNA

SEQ ID NO: 17366 - DNA, 695 bp, synthetic construct; identical to SEQ ID NO: 95
  source 1..695: mol_type = other DNA

SEQ ID NO: 17367 - DNA, 695 bp, synthetic construct
  source 1..695: mol_type = other DNA
tctcctagagagcttggccgtcgggccttataccccgacttgctgagtttctttaggagagcccctttcccagccttgaggcggctggtcaataaaagcctcaaatgtaacgaacatctaagaccattaaacttaccctatgcctggtctccacttttcgaaggcaacttgcaataagaagagtggaatcaagacgcttaaagcatggagacagtttccttttttaacccacattagtgtggggtggcagatggcgtgccataactctaatagtgagataccacgcttgtggaccttatgctcacacagccatcctctagtaagtttgtaagacgtctggtgacgtgtgggaatttattggatacaacattctgctgtaaagcatcctaatgccagcggaacaacacctggtaacaggtgcctctggggccaaaagccaaggtttaacagaccctttaggattggttcaaacctggaatgttgtggaaaatacttagtacctgccgatctggtagtagtgcaaacactagttgtaaggcccacgaaggatgcccagaaggtacccgtaggtaacaagtgacactatggatctgatctggggctggatacctctatcttggtgattcagttaaaaaacgtctagtgggccaaacccaggggggatccctggtttctttttattttataatgtcact

SEQ ID NO: 17368 - DNA, 696 bp, synthetic construct; identical to SEQ ID NO: 97
  source 1..696: mol_type = other DNA

SEQ ID NO: 17369 - DNA, 709 bp, synthetic construct; identical to SEQ ID NO: 110
  source 1..709: mol_type = other DNA

SEQ ID NO: 17370 - DNA, 683 bp, synthetic construct; identical to SEQ ID NO: 93
  source 1..683: mol_type = other DNA

SEQ ID NO: 17371 - DNA, 633 bp, synthetic construct
  source 1..633: mol_type = other DNA
ctttcccagccttgaggtggctggtcaataaaaacctcaactgtaactaacatccaagctgattttatagataccccatgcctggtccccactagtcgaaagcacctggcaataagatgagtggaaaagggcgcttaaagcatggtgttagtatacatttctaacctgtgactatcacggggtggcagatggcgtgccataactctattagtgagataccacgtttgtggaccttatgctcacacagccatcctctagtaagcttgcaaggcgtctgatgacgtgtgggaactaattggaaatgacagtttgctgctaagcatcctattgccagcggatcaacacctggtaacaggtgcctctggggccaaaagccaaggtttaacagaccctttaggattggttcaaacctgaactgttgtggaagattctcagtacctgctaatttggtagttaggcaagcactagttgtaaggcccacgaaggatgcccagaaggtacccgtaggtaacaagtgacactatggatctgatctggggccagctacctctttcatggtgagttggttaaaaaacgtctagtgggccaaacccaggggggatccctggtttcctttattttatcatagtcatt

SEQ ID NO: 17372 - DNA, 707 bp, synthetic construct
  source 1..707: mol_type = other DNA
tttgaaagggtctcctagagagcttggccgtcgggccttataccccgacttgctgagcttctctaggagagtccctttcccagccttgaggcggctggtcaataaaagcctcaattgtaacaaacatctaagattattatattaaccccatgcctggtctccactggttgaaggcaacttgcaataaaatgagtgggaacaagacgcttaaagcatggtgtgaactaactttctaacccacattttgtgtggggtggcagatggcgtgccataattctactagtgagataccacgcttgtggaccttatgctcacacagccatcctctagtaagtttgtgagacgtctggtgacgtgtgggaacttattggaagcaacattttgctgcaaagcatcctattgccagcggaacaacacctggtaacaggtgcctctggggccaaaagccaaggtctaacaaaccctttaggattggttctaaacctgagatgttgtggaagatacttagtacctgccgatctggtagtactgcaaacactagttgtaaggcccacgaaggatgcccagaaggtacccataggtaacaagtgacactatggatctgatctggggccaggtacctctatcttggtgacctggttaaaaagcgtctagtgggccaaacccgggggggatccccggtttccttttattttatcaatgctaca

SEQ ID NO: 17373 - DNA, 709 bp, synthetic construct; identical to SEQ ID NO: 111
  source 1..709: mol_type = other DNA

SEQ ID NO: 17374 - DNA, 590 bp, synthetic construct
  source 1..590: mol_type = other DNA
gtaaatattaattcctgcaggttcaggtctcttggatttgttccactttatggacactcatttcacgctttctgtctgcttttcttccagggctctccccttgccctaggctctggccgttgcgcccggcggggtcaactccatgattagcatggagctgtaggagtctaaattggggacgcagatgttgggaacgtcaccttgcagtgttaacttggctttcatgaagctttttgatcttccacaagaggtaggctacgggtgaaacctcttaagctaatacttctatgaagagatgctttggatagggtaacagcggcggatattggtgagttgtttgacaaaaaccattcaacgccggaggacgggctctcatccagtggatgcattaagtggattgtctgtcagggctgtctctaggtttaattcctgacctctctgtgcttagggcaaacaaaatttggccttaaatgaggtcctgtgagaggggacctcgccattgaatgctggacatttctttggggccttatgttttgtttgcctctgaggtactcaggggcatttaggtttttcctcatcaattaataatt

SEQ ID NO: 17375 - DNA, 319 bp, synthetic construct
  source 1..319: mol_type = other DNA
cttgaatggcagtagcgtggcgagctatggaaaaatcgcaattgtcgatagccatgttagtgacgcgcttcggcgtgctcctttggtgattcggcgactggttacaggagagtaggcagtgagctatgggcaaacctctgcagtattactcagagggaatgtgcaattgagacttgacgagcgtctctttgagatgtggcgcatgctcttggcattaccatagtgagcttccaggttgggaaacctggactgggcctatactacctgatagggtcgcggctggccgcctgtaactagtatagtcagttgaaaccccccc

SEQ ID NO: 17376 - DNA, 707 bp, synthetic construct; identical to SEQ ID NO: 104
  source 1..707: mol_type = other DNA

SEQ ID NO: 17377 - DNA, 673 bp, synthetic construct; identical to SEQ ID NO: 86
  source 1..673: mol_type = other DNA

SEQ ID NO: 17378 - DNA, 518 bp, synthetic construct; identical to SEQ ID NO: 544
  source 1..518: mol_type = other DNA

SEQ ID NO: 17379 - DNA, 712 bp, synthetic construct; identical to SEQ ID NO: 113
  source 1..712: mol_type = other DNA

SEQ ID NO: 17380 - DNA, 651 bp, synthetic construct
  source 1..651: mol_type = other DNA
aggctataggctaaatttccctttccctgttcctttccctatctccctttgttttgcttgtaaatattaattcctgcaggttcagggttctttaatctgtttctctataagaacactcaattttcacgctttctgtcttctttcttccagggctctccccttgccctaggctctggccgttgcgcccggcggggtcaactccatgattagcatggagctgtaggagtctaaattggggacgcagatgtttgggacgtcaccttgcagtgttaacttggctctcatgaacctctttgatcttccacaaggggtaggctacgggtgaaacctcttaggctaatacttctatgaagagatgctttggatagggtaacagcggcggatattggtgagttgttaagacaaaaaccattcaacgccggaggactggctctcatccagtggatgcattgagtggattgattgtcagggctgtctctaggcttaatctcagacctctctgtgcttagggcaaacaccatttggccttaaatgggatcctgtgagagggggtccctccattgacagctggactgttctttggggccttatgtggtgtttgcctctgaggtactcaggggcatttaggtttttcctcattctttaaaaata

SEQ ID NO: 17381 - DNA, 651 bp, synthetic construct
  source 1..651: mol_type = other DNA
aggctataggctaaatttccctttccctgttcctttccctatttccctttgttttgcttgtaaatattaattcctgcaggttcagggttctttaatctgtttctctataagaacactcaattttcacgctttctgtcttctttcttccagggctctccccttgccctaggctctggccgttgcgcccggcggggtcaactccatgattagcatggagctgtaggagtctaaattggggacgcagatgtttgggacgtcaccttgcagtgttaacttggctctcatgaacctctttgatcttccacaaggggtaggctacgggtgaaacctcttaggctaatacttctatgaagagatgctttggatagggtaacagcggcggacattggtgagttgttaagacaaaaaccattcaacgccggaggactggctctcatccagtggatgcattgagtggattgattgtcagggctgtctctaggtttaatctcagacctctctgtgcttagggcaaacaccatttggccttaaatgggatcctgtgagagggggtccctccattgacagctggactgttctttggggccttatgtggtgtttgcctctgaggtactcaggggcatttaggttcttcctcattcttaaacaata

SEQ ID NO: 17382 - DNA, 651 bp, synthetic construct
  source 1..651: mol_type = other DNA
aggctataggctaaatttccctttccctgttcctttccctatctccctttgttttgcttgtaaatattaattcttgcaggttcagggttctttaatctgtttctctataagaacactcaattttcacgctttctgtcttctttcttccagggctctccccttgccctaggctctggccgttgcgcccggcggggtcaactccatgattagcatggagctgtaggagtctaaattggggacgcagatgtttgggacgtcaccttgcagtgttaacttggctctcatgaacctctttgatcttccacaaggggtaggctacgggtgaaacctcttaggctaatacttctatgaagagatgctttggatagggtaacagcggcggatattggtgagttgttaagacaaaaaccattcaacgccggaggactggctctcatccagtggatgcattgagtggattgattgtcagggctgtctctaggcttaatctcagacctctctgtgcttagggcaaacaccatttggccttaaatgggatcctgtgagagggggtccctccattgacagctggactgttctttggggccttatgtggtgtttgcctctgaggtactcaggggcatttaggtttttcctcattctttaaaaata

SEQ ID NO: 17383 - DNA, 713 bp, synthetic construct
  source 1..713: mol_type = other DNA
gctcctctgtgcctctagcaaacacagccggtttaccccccggaaggggaaaggaaggactgggcatgagggcccagccccccctttccccttccggggggtaaaccggctgtgtttgctagaggcacagaggagcaacatccaacctgcttttgtggggaacggtgcggctccaattcctgcgtcgccaaaggtgttagcgcacccaaacggcgcatctaccaatgctattggtgtggtctgcgagttctagcctactcgtttctcccctactcactcattcacgcacaaaaactgtgttgtaactacaagatttagccctcgcacgggatgtgcgataaccgcaagattgactcaagcgcggaaagcgctgtaaccacatgctgttagtccctttatggctgcgagatggctgtccacctcggatcactgaactggagctcgaccctccttagtaagggaaccgagaggccttcttgcaacaagctccgacacagagtccacgtgattgctaccaccatgagtacatggttctcccctctcgacccaggacttctttttgaatatccacggctcgatccagagggtggggcatgatccccctagcatagcgagctacagcgggaactgtagctaggccttagcgtgccttggatactgcctgatagggcgacggcctagtcgtgtcggttctataggtagcacatacaaat

SEQ ID NO: 17384 - DNA, 858 bp, synthetic construct
  source 1..858: mol_type = other DNA
atgtcaaagcaatacagtatgtacacagtgtacacgctcaaggcggagatttaggcctcacagattgtgttttgtgttattggatgctggatggtcacgttggagactgcatgtggcagtcttgaaacgtgtggtttgacgtctatccgttatggcagtgggtggagcactgcaaagacgtcaccgtgctttacacggtttttgaaccccacaccggctgtttggcgcttgcaggacagcaggtttattttcatatgttctttatttctagccaacagggttctatcctgttgggcggagtgatactcccgttccttcttggacagattgcctccacgatctttgtggaccttaaggtgatcaagtcactggtgaattgagcgaaggttgaggaagcctgaggaatttccatgtggctttgccaggagttgtagcgatgctgtgtgtgtgtgcggatttcccctcatggcaacatgagcctcacaggccaaaagccccgtccgaaaggacccacacagtggagcaaccccagctccctcctacaaagctttgtgtgaatgaactcatgtttattcttctttattctctatttacatcaggccccaaagatgtcctgaaggtaccttgtgtatctgggcgtgagcaccatcaactacccggacttgcactttggtgcagacgcatgtggtgacccagcccctctgcttcggcggaggggcttttgctcgctcagcacgagatctgatcaggagtccctcccagtgtgctttacacctggcgaggggttaaaaattgcccaaggcctggcacaacaacctaggggactaggttttccttttattaacaatgtctgtcaat

SEQ ID NO: 17385 - DNA, 700 bp, synthetic construct
  source 1..700: mol_type = other DNA
tttgaaaggggtctcctagagagcttggccgtcgggccttataccccgatttgctgagcttctctaggagagcccttttcccagccagaggtggctggttaaacaatacctattgtaacaaaacatctaagacacaacaaccgcacacctggtctccactggccgaaggcaactagcaataaggtaggtgggttcagacgcttaaagtgtgttgtacatattcttttctaacctgtgttttacacagggtggcagatggcgtgccataaccctaatagtgagataccacgcttgtggaccttatgctcacacagccatcctctagtaagtttgtaagacgtctgatgacgtgtgggaacttgttggagataacattttgctgcaaagcatcccattgccagcggatccacatctggtaacagatgcctctggggccaaaagccaaggtttaacagaccctttgggattggttcaaacctgaattgttatggaagacatttagtacctgctgatttggtagtagtgcaaacactagttgtaaggcccacgaaggatgcccagaaggtacccgtaggtaacaagtgacactatggatctgatctggggctaactacctctatctaggtgagttggttaaaaaacgtctagtgggccaaatccaggggggatccctggtttcttttttatttgaataatcact

SEQ ID NO: 17386 - DNA, 700 bp, synthetic construct
  source 1..700: mol_type = other DNA
tttgaaaggggtctcctagagagcttggccgtcgggccttataccccgatttgctgagcttctctaggagagcccttttcccagccagaggtggctggttaaacaatacctattgtaacaaaacatctaagacacaacaaccgcacacctggtctccactggccgaaggcaactagcaataaggtaggtgggttcagacgcttaaagtgtgttgtacatattcttttctaacctgtgttttacacagggtggcagatggcgtgccataaccctaatagtgagataccacgcttgtggaccttatgctcacacagccatcctctagtaagtttgtaagacgtctgatgacgtgtgggaacttgttggagataacattttgctgcaaagcatcccattgccagcggatccacatctggtaacagatgcctctggggccaaaagccaaggtttaacagaccctttgggattggttcaaacctgaattgttatggaagacatttagtacctgctgatttggtagtagtgcaaacactagttgtaaggcccacgaaggatgcccagaaggtacccgtaggtaacaagtgacactatggatctgatctggggctaactacctctatctaggtgagttggttaaaaaacgtctagtgggccaaacccaggggggatccctggtttcttttttatttgaataatcact

SEQ ID NO: 17387 - DNA, 700 bp, synthetic construct
  source 1..700: mol_type = other DNA
tttgaaaggggtctcctagagagcttggccgtcgggccttataccccgatttgctgagcttctctaggagagcccttttcccagccagaggtggctggttaaacaatacctattgtaacaaaacatctaagacacaacaaccgcacacctggtctccactggccgaaggcaactagcaataaggtaggtgggttcagacgcttaaagtgtgttgtacatattcttttctaacctgtgttttacacagggtggcagatggcgtgccataaccctaatagtgagataccacgcttgtggaccttatgctcacacagccatcctctagtaagtttgtaagacgtctgatgacgtgtgggaacttgttggagataacattttgctgcaaagcatcccattgccagcggatccacatctggtaacagatgcctctggggccaaaagccaaggtttaacagaccctttgggattggttcaaacctgaattgttatggaagacatttagtacctgctgatttggtagtagtgcaaacactagttgtaaggcccacgaaggatgcccagaaggtacccgtaggtaacaagtgacactatggatctgatctggggctaactacctctatctaggtgagttggttaaaaaacgtctagtgggccaaacccaggggggatccctggtttctttttaatttgaataatcact

SEQ ID NO: 17388 - DNA, 700 bp, synthetic construct
  source 1..700: mol_type = other DNA
tttgaaaggggtctcctagagagcttggccgtcgggccttataccccgatttgctgagcttctctaggagagcccttttcccagccagaggtggctggttaaacaatacctattgtaacaaaacatctaagacacaacaaccgcacacctggtctccactggccgaaggcaactagcaataaggtaggtgggttcagacgcttaaagtgtgttgtacatattcttttctaacctgtgttttacacagggtggcagatggcgtgccataaccctaatagtgagataccacgcttgtggaccttatgctcacacagccatcctctagtaagtttgtaagacgtctgatgacgtgtgggaacttgttggagataacattttgctgcaaagcatcccattgccagcggatccacatctggtaacagatgcctctggggccaaaagccaaggtttaacagaccctttgggattggttcaaacctgaattgttatggaagacatttagtacctgctgatttggtagtagtgcaaacactagttgtaaggcccacgaaggatgcccagaaggtacccgtaggtaacaagtgacactatggatctgatctggggctaactacctctatctaggtgagttggttaaaaaacgtctagtgggccaaatccaggggggatccctggtttcctttttatttgaataatcact

SEQ ID NO: 17389 - DNA, 700 bp, synthetic construct
  source 1..700: mol_type = other DNA
tttgaaaggggtctcctagagagcttggccgtcgggccttataccccgatttgctgagcttctctaggagagcccttttcccagccagaggtggctggttaaataatacctattgtaacaaaacatctaagacacaacaaccgcacacctggtctccactggccgaaggcaactagcaataaggtaggtgggttcagacgcttaaagtgtgttgtacatattcttttctaacctgtgtttcacacagggtggcagatggcgtgccataaccctaatagtgagataccacgcttgtggaccttatgctcacacagccatcctctagtaagtttgtaagacgtctgatgacgtgtgggaacttgttggagataacattttgctgcaaagcatcccattgccagcggatccacatctggtaacagatgcctctggggccaaaagccaaggtttaacagaccctttgggattggttcaaacctgaattgttatggaagacatttagtacctgctgatttggtagtagtgcaaacactagttgtaaggcccacgaaggatgcccagaaggtacccgtaggtaacaagtgacactatggatctgatctggggctaactacctctatctaggtgagttggttaaaaaacgtctagtgggccaaacccaggggggatccctggtttctttttaatttgaataatcact

SEQ ID NO: 17390 - DNA, 700 bp, synthetic construct
  source 1..700: mol_type = other DNA
tttgaaaggggtctcctagagagcttggccgtcgggccttataccccgatttgctgagcttctctaggagagcccttttcccagccagaggtggctggttaaataatacctattgtaacaaaacatctaagacacaacaaccgcacacctggtctccactggccgaaggcaactagcaataaggtaggtgggttcagacgcttaaagtgtgttgtacatattcttttctaacctgtgttttacacagggtggcagatggcgtgccataaccctaatagtgagataccacgcttgtggaccttatgctcacacagccatcctctagtaagtttgtaagacgtctgatgacgtgtgggaacttgttggagataacattttgctgcaaagcatcccattgccagcggatccacatctggtaacagatgcctctggggccaaaagccaaggtttaacagaccctttgggattggttcaaacctgaattgttatggaagacatttagtacctgctgatttggtagtagtgcaaacactagttgtaaggcccacgaaggatgcccagaaggtacccgtaggtaacaagtgacactatggatctgatctggggctaactacctctatctaggtgagttggttaaaaaacgtctagtgggccaaacccaggggggatccctggtttcttttttatttgaataatcact

SEQ ID NO: 17391 - DNA, 700 bp, synthetic construct
  source 1..700: mol_type = other DNA
tttgaaaggggtctcctagagagcttggccgtcgggccttataccccgatttgctgagcttctctaggagagcccttttcccagccagaggtggctggctaaataatacctattgtaacaaaacatctaagacacaacaaccgcacacctggtctccactggccgaaggcaactagcaataaggtaggtgggttcagacgcttaaagtgtgttgtgcatattcttttctaacctgtgttttacacggggtggcagatggcgtgccataaccctaatagtgagataccacgcttgtggaccttatgctcacacagccatcctctagtaagtttgtaagacgtctgatgacgtgtgggaacttgttggagataacattttgctgcaaagcatcccattgccagcggatccacatctggtaacagatgcctctggggccaaaagccaaggtttaacagaccctttgggattggttcaaacctgaattgttatggaagacatttagtacctgctgatttggtagtagtgcaaacactagttgtaaggcccacgaaggatgcccagaaggtacccgtaggtaacaagtgacactatggatctgatctggggctaactacctctatctaggtgagttggttaaaaaacgtctagtgggccaaacccaggggggatccctggtttcttttttatttgaataatcact

SEQ ID NO: 17392 - DNA, 700 bp, synthetic construct
  source 1..700: mol_type = other DNA
tttgaaaggggtctcctagagagcttggccgtcgggccttataccccgatttgctgagcttctctaggagagcccttttcccagccagaggtggctggctaaataatacctattgtaacaaaacatctaagacacaacaaccgcacacctggtctccactggccgaaggcaactagcaataaggtaggtgggttcagacgcttaaagtgtgttgtacatattcttttctaacctgtgttttacacagggtggcagatggcgtgccataaccctaatagtgagataccacgcttgtggaccttatgctcacacagccatcctctagtaagtttgtaagacgtctgatgacgtgtgggaacttgttggagataacattttgctgcaaagcatcccattgccagcggatccacatctggtaacagatgcctctggggccaaaagccaaggtttaacagaccctttgggattggttcaaacctgaattgttatggaagacatttagtacctgctgatttggtagtagtgcaaacactagttgtaaggcccacgaaggatgcccagaaggtacccgtaggtaacaagtgacactatggatctgatctggggctaactacctctatctaggtgagttggttaaaaaacgtctagtgggccaaacccaggggggatccctggtttcttttttatttgaataatcact

SEQ ID NO: 17393 - DNA, 560 bp, synthetic construct; identical to SEQ ID NO: 606
  source 1..560: mol_type = other DNA

SEQ ID NO: 17394 - DNA, 517 bp, synthetic construct
  source 1..517: mol_type = other DNA
gggacgtcagcgcacgaaacgcgccgttgcttgaggaggacttgtacaaacacggttcacacgagttcccacaaccaacacaaaccgtgcaacttggaatcccgcctggtctttccaggtctggaggggtaacactttgtactgtgattgactccacgctcggtccactggcgagtgttagtagtagaactgttgtttcgcagcggagcatggtggccgcgggacttcctccttggtaacaaggacccgcggggccgaaagccacgtctttgacccaccatgtgtgcaaccccagcacggcaaccttactacgaaaaccactttaaggtgacactgacactggtactcaaccactggtgacaggctaaggatgcccttcaggtaccccgaggtaacacgcgacactcgggatctgagaaggggactggggcttctgtaaaagcgcccagtttaaaaagcttctatgcctgaataggcgaccggaggccggcgcctttccttacctaccactgtttac

SEQ ID NO: 17395 - DNA, 681 bp, synthetic construct; identical to SEQ ID NO: 92
  source 1..681: mol_type = other DNA

SEQ ID NO: 17396 - DNA, 848 bp, synthetic construct
  source 1..848: mol_type = other DNA
caacacagtgtgtacttggcgtacacgctcaaggcggagacttaggcctcacagattgtgtcttgtgttattgaatgctggatggtcacgttggagactgcatgtggcagtcttgaaacgtgtggtttgacgtctatccattatggcagtgggtggagtactgcaaagatgtcaccgtgctttacacggtttttgaaccccacaccggctgtttggcgcttgcaggacagcaggtttattttcttatattctctatttctagccaacagggcgctatcctgttgggcggagtgatactcccgttccttcttggacagattgcctccacgtcctttgtggatctcaaggtgatcaagtcactggtggatagagcgaaggttgaggagacctgagagatttccatgtggctttgccaggagttgtagcgatgctgtgtgtgtgtgcggatctcccctcatggtaacatgagcctcacaggccgaaagccctgtccgaaaggacccacacagtggagcaatcccagctccctcctacaaagctttgtgagaatgaactcacgtttattcttctttattctctatttacatcaggccccagagatgtcctgaaggtaccttgtgtatctgggcatgagcaccatcaactacccggacttgcactttggtgcagatgcatgtggtgacccagcccctctgcttcggcagaggggcttttgctcgctcagcacaagatctgatcaggagcccctctcagtgtgctttacacctggcgaggggttaaaaattgcccaaggcctggcaaaacaacctaggggactaggttttcttttattaacaatgtctgtcatt

SEQ ID NO: 17397 - DNA, 701 bp, synthetic construct; identical to SEQ ID NO: 99
  source 1..701: mol_type = other DNA

SEQ ID NO: 17398 - DNA, 596 bp, synthetic construct
  source 1..596: mol_type = other DNA
actgtaactaacatctaagctgattaaccagccacctcaaggctggtccccactcgtcgaaggcatctagcaataagataagtggaagaaggatgcttaaagcatagtgctagtatgcatttctaacctgtgattatcacggggtggcaggtggcgtgccataactctattagtgagataccacgcttgtggaccttatgctcacacagccatcctctagtaagcttgcaaggcgtctaatgacgtgtgggaacttattggaaacaacagtttgctgcaaagcatcctattgccagcggaacaacacctggtaacaggtgcctctggggccaaaagccaaggtttaacagaccctttaggattggttcacacctgaactgttgtggaagatatttagtacctactgacttggtagttaggcaaacactagttgtaaggcccacgaaggatgcccagaaggtacccgtaggtaacaagagacactatggatctgatctggggccaactaccactatcatggtgagttggttaaaaaacgtctagtgggccaaacccaggggggatccctggtttccttttactttaatacaatcatt

SEQ ID NO: 17399 - DNA, 663 bp, synthetic construct
  source 1..663: mol_type = other DNA
gaaagggggggctgggccctgatgcccagtccttcctttccccttccggggggttaaccggctgtgtttgctagaggcacagaggggcaacatccaacctgtttttgcggggaacggtgcggctccgattcctgcgtcgccaaaggtgttagcgcacccaaacggcgcacctaccaatgttattggtgtggtctgcgagttctagcctactcgtttctcccccgaccattcactcacccacgaaaagtgtgttgtaaccataagatttaacccccgcacgggatgtgcgataaccgtaagactggctcaagcgcggaaagcgctgtaaccacatgctgttagtccctttatggctgcaagatggctacccacctcggatcactgaactggagctcgaccctccttagtaagggaaccgagaggccttcgtgcaacaagctccgacacagagtccacgtgactgctaccaccatgagtacatggttctcccctctcgacccaggacttctttttgaatatccacggctcgatccagagggtggggcatgacccctagcatagcgagctacagcgggaactgtagctaggccttagcgtgccttggatactgcctgatagggcgacggcctagtcgtgtcggttctataggtagcacatacaaat

SEQ ID NO: 17400 - DNA, 517 bp, synthetic construct
  source 1..517: mol_type = other DNA
acgtcagcgcacgaaacgcgccgtcgcttgaggaggacttgtacaaacacgatccattcaggttcccacaaccgacacaaaccgtgcaacttgaaactccgcctggtctttccaggtctggaggggtgacattttgtactgtgcttgactccacgctcggtccactggcgggtgttagtaacagcactgttgcttcgtagcggagcatggtggccgcgggaactcctccttggtaacaagaacccgcggggccgaaagccacgtcttcacggacccaccatgtgtgcaaccccagcacggcaactttactgtgaaaaccactttaaggtgacactgatactggtactcaaccactggtgacaggctaaggatgcccttcaggtaccccgaggtaacacgcgacactcgggatctgagaaggggactggggcttctttaaaagcgcctagtttaaaaagcttctatgcctgaataggtgaccggaggccggcacctttcttttaaacaactatttaaa

SEQ ID NO: 17401 - DNA, 687 bp, synthetic construct
  source 1..687: mol_type = other DNA
ggacttgatacctcaccgccgtttgcctaggctataggctaatttttcccctccctcccctttccctttcctatttcccttgttttgtttgtaaatattaattcctgcaggttcagggttcttaaatctgtttctctataagaacactctttttcacgctttctgtcttctttcttccagggctctccccttgccctaggctctggccgttgcgcccggcggggtcaactccatgattagcatggagctgtaggagtctaaattggggacacagatgtttggaacgtcaccttgcagtgttaacttggctttcatgaatctctttgatcttccacaaggggtaggctacgggtgaaacctcttaggctaatacttctatgaagagatgctttggatagggtaacagcggcggatattggtgagttgttaagacaaaaaccattcaacgccggaggactgactctcatccagtggatgcattgagtggattgactgtcagggctgtctctaggcttaattccagacctctctgtgcttagggcaaacatcatttggccttaaatgggattctgtgagaggggatccctccattgacagctggactgttctttggggccttatgtggtgtttgcctctgaggtactcaggggcatttaggtttttcctcattctcaaacaataatgaat

SEQ ID NO: 17402 - DNA, 618 bp, synthetic construct
  source 1..618: mol_type = other DNA
cctttcctattccctttgttttgtttgtaaatattaattcctgcaggttcagggttcttaaatctgtttctctataaaaacactcatttttcacgctttctgtcttctttcttccagggctctccccttgccctaggctctggccgttgcgcccggcggggtcaactccatgactagcatggagctgtaggagtctaaattggggacacaaatgtttggaacgtcaccttgcagtgttaacttggctttcatgaatctctttgatcttccacaaggggtaggctacgggtgaaacctcttaggctaatacttctatgaagagatgctttggatagggtaacagcggcggatattggtgagttgttaagacaaaaaccattcaacgccggaggactgactctcatccagtggatgcattgagtggattgactgtcagggctgtctctaggcttaattccagacctctctgtgcttagggcaaacatcatttggccttaaatgggattctgtgagaggggatccctccattgactgctggactgttctttggggccttatgtggtgtttgcctgtgaggtactcggggtcatttgggtttttccttattctcaaataata

SEQ ID NO: 17403 - DNA, 713 bp, synthetic construct
  source 1..713: mol_type = other DNA
gctcctctgtgcctctagcaaacacagccggtttaccccccggaaggggaaaggaaggactgggcatgagggcccggccccccctttccccttccggggggtaaaccggctgtgtttgctagaggcacagaggagcaacatccaacctgcttttgtggggaacggtgcggctccaattcctgcgtcgccaaaggtgttagcgcacccaaacggcgcatctaccaatgctattggtgtggtctgcgagttctagcctactcgtttctcccctactcactcattcacgcacaaaaactgtgttgtaactacaagatttagccctcgcacgggatgtgcgataaccgcaagattgactcaagcgcggaaagcgctgtaaccacatgctgttagtccctttatggctgcgagatggctgtccacctcggatcactgaactggagctcgaccctccttagtaagggaaccgagaggccttcttgcaacaagctccgacacagagtccacgtgattgctaccaccatgagtacatggttctcccctctcgacccaggacttctttttgaatatccacggctcgatccagagggtggggcatgatccccctagcatagcgagctacagcgggaactgtagctaggccttagcgtgccttggatactgcctgatagggcgacggcctagtcgtgtcggttctataggtagcacatacaaat

SEQ ID NO: 17404 - DNA, 700 bp, synthetic construct
  source 1..700: mol_type = other DNA
tttgaaaggggtctcctagagagcttggccgtcgggccttataccccgatttgctgagcttctctaggagagcccttttcccagccagaggtggctggttaaataatacctattgtaacgaaacatctaagatacaataaccacacacctggtttccactggccgaaggcaactagcaataaggcaggtgggttcagacgcttaaagtgtgttgtacatattcttttctaacctgtgttctacacagggtggcagatggcgtgccataactctaatagtgagataccacgcttgtggaccttatgctcacacagccatcctctagtaagtttgtaagacgtctgatgacgtgtgggaacttgttggagataacagtttgctgcaaagcatcccactgccagcggatccacatctggtaacagatgcctctggggccaaaagccaaggtttaacaaaccctttgggattggttcaaacctgaactgttatggaagacatttagtacctgctgatttggtagtaatgcaaacactagttgtaaggcccacgaaggatgcccagaaggtacccgtaggtaacaagtgacactatggatctgatctggggccagctacctctatctaggtgagttggttaaaaaacgtctagtgggccaaacccaggggggatccctggtttcctttttatttgagtagtcact

SEQ ID NO: 17405 - DNA, 692 bp, synthetic construct; identical to SEQ ID NO: 94
  source 1..692: mol_type = other DNA

SEQ ID NO: 17406 - DNA, 700 bp, synthetic construct
  source 1..700: mol_type = other DNA
tttgaaaggggtctcctagagagcttggccgtcgggccttataccccgatttgctgagcttctctaggagagcccttttcccagccagaggtggctggttaaataatacctattgtaacaaaacatctaagatacaacaaccacacacctggtttccactggctgaaggcaactagcaataaggcaggtgggttcaaacgcttaaagtgtgttgtatatattcttttctaacctgtgttctacacagggtggcagatggcgtgccataactctaatagtgagataccacgcttgtggaccttatgctcacacagccatcctctagtaagtttgtaagacgtctgatgacgtgtgggaacttgttggagataacattttgctgcaaagcatcccattgccagcggatccacatctggtaacagatgcctctggggccaaaagccaaggtttaacagaccctttgggattggttcaaacctgaattgttatggaagacatttagtacctgctgatttggtagtagtgcaaacactagttgtaaggcccacgaaggatgcccagaaggtacccgtaggtaacaagtgacactatggatctgatctggggccaactacctctatctaggtgagttggttaaaaaacatctagtgggccaaacccaggggggatccctggtttcctttttatttgaataatcact

SEQ ID NO: 17407 - DNA, 617 bp, synthetic construct
  source 1..617: mol_type = other DNA
gagggttaaccggctgtgtttgctagaggcacagaggggcaacatccaacctgcttttgcggggaacggtgcggctccgattcctgcgtcgccaaaggtgttagcgcacccaaacggcgcatctaccaatgctattggtgtggtctgcgagttctagcctactcgtttctcccctatccattcactcactcacgaaaagtgtgttgtaaccacaagatttagcccccgcacgagatgtgcgataaccgtaagactgactcaagcgcggaaagcgctgtaaccacatgctgttagtccctttatggctgcaagatggctatccacctcggatcactgaactggagctcgaccctccttagtaagggaaccgagaggccttcgtgcaacaagctccgacacagagtccacgtgattgctaccaccatgagtacatggttctcccctctcgacccaggacttctttttgaatatccacggctcgatccagagggtggggcatgatccccctagcatagcgagctacagcgggaactgtagctaggccttagcgtgccttggatactgcctgatagggcgacggcctagtcgtgtcggttctataggtagcacatacaaat

SEQ ID NO: 17408 - DNA, 595 bp, synthetic construct
  source 1..595: mol_type = other DNA
tttgtaaatattaattcctgcaggttcagggttcttaaatctgtttctctataagaacactcatttttcacgctctctgtcttctttcttccagggctctccccttgccctaggctctggccgttgcgcccggcggggtcaactccatgattagcatggagctgtaggagtctaaattggggacacagatgtttgggacgtcaccttgcagtgttaacttggctttcatgaatctctttgatcttccacaaggggtaggctacgggtgaaacctcttaggctaatacttctatgaagagatgctttggatagggtaacagcggcggatattggtgagttgttaagacaaaaaccattcaacgccggaggactgactctcatccagtggatgcattgagtggattgactgtcagggctgtctctaggcttaattccagacctctctgtgcttagggcaaacatcatttggccttaaatgggattctgtgagaggggatccctccattgactgctggactgttctttggggccttatgtggtgtttgcctctgaggtactcaggggcatttaggtttttcctcattctcaaataata

SEQ ID NO: 17409 - DNA, 517 bp, synthetic construct; identical to SEQ ID NO: 542
  source 1..517: mol_type = other DNA

SEQ ID NO: 17410 - DNA, 669 bp, synthetic construct; identical to SEQ ID NO: 84
  source 1..669: mol_type = other DNA

SEQ ID NO: 17411 - DNA, 680 bp, synthetic construct
  source 1..680: mol_type = other DNA
cgtcgggccttataccccgacttgctgagcttctctaggagagtccctttcccagccctgaggcggctggtcaataaaagcctcaattgtaacaaacatctaagcttattacattaaccccatgcctggtctccactagttgaaggcaacttgcaataaaatgagtggaaacaagacgcttaaagcatggtgtaaactaacttttctagcccacactttgtgtggggtggcagatggcgtgccataattctattagtgagataccacgcttgtggaccttatgctcacacagccatcctctagtaagtttgtgtgacgtctggtgacgtgtgggaacttattggaaacaacattttgctgtaaagcatcctattgccagcggaacaacgcctggtaacaggtgcctctggggccgaaagccgaggtttagcagaccctttaggattggtttgaaacctgaaatgttgtggaagatacttagtacctaccgatctggtagtagtgcaaacactagttgtaaggcccacgaaggatgcccagaaggtacctgtaggtaacaagcgacactatggatctgatctggggccaggtacctctatcttggtgacctggttaaaaaacgtctagtgggccaaacccgggggggatccccggtttcctattattttatcaatgctact

SEQ ID NO: 17412 - DNA, 680 bp, synthetic construct
  source 1..680: mol_type = other DNA
cgtcgggccttataccccgacttgctgagcttctctaggagagtccctttcccagccctgaggcggctggtcaataaaagcctcaattgtaacaaacatctaagattattaaattaaccccatgcctggtctccactagttgaaggcaacttgcaataaaatgagtggaaacaagacgcttaaagcatggtgtaaattaatttttctagcccacactttgtgtggggtggcagatggcgtgccataattctattagtgagataccacgcttgtggaccttatgctcacacagccatcctctagtgagtttgtgcgacgtctggtgacgtgtgggaacttattggaaacaacattttgctgtaaagcatcctattgccagcggaacaacacctggtaacaggtgcctctggggccaaaagccaaggtttaacagaccctttaggattggttataaacctgaaatgttgtggaagatacttagtacctaccgatctggtagtagtgcaaacactagttgtaaggcccacgaaggatgcccagaaggtacccataggtaacaagtgacactatggatctgatctggggtcaggtacctctatcttggtgacctggttaaaaaacgtctagtgggccaaacccgggggggatccccggtttccttttgttttactaatgctact

SEQ ID NO: 17413 - DNA, 674 bp, synthetic construct; identical to SEQ ID NO: 87
  source 1..674: mol_type = other DNA

SEQ ID NO: 17414 - DNA, 862 bp, synthetic construct
  source 1..862: mol_type = other DNA
ggctatgtcaaagcaatacagtgtgtgcaaggcgtacacgctcaaggcggagacttaggcctcacagattgtgttttgtgttattggatgctggatggtcacgttggagactgcatgtggcagtcttgaaacgtgtggtttgacgtctatccattacggcagtgggtggagtactgcaaagatgtcaccgtgctttacacggtttttgaaccccacaccggctgtttggcgcttgcaggacagcaggtttattttcttatgttctttatttctagccagcagggttctatcctgttgggcggagtgatactcccgttccttcttggacagattgcctccacgacctttgtggatctcaaggtgatcaagtcactggtgaatagagcgaaggttgaggagacctgaggaatttccatgtggctttgccaggagttgtagcgatgctgtgtgtgtgtgcggatttcccctcatggcaacatgagcctcacaggccgaaagccctgtccgaaaggacccacacagtggagcaaccccagctccctcctacaaagctttgtgagaatgaactcacgtttattcttctttattctctatttacatcaggccccaaagatgtcctgaaggtaccttgtgtatctgggcatgagcaccatcaactacccggacttgcactttggtgcagacgcatgtggtgacccagcccctctgcttcggcagaggggctttcgctcgctcagcacgagatctgatcaggagcccctcccagtgtgctttacacctggcggggggttaaaaattgcccaaggcctggcacaataacctaggggactaggtttaccttttgttaacaatgtctgtcatt

SEQ ID NO: 17415 - DNA, 668 bp, synthetic construct
  source 1..668: mol_type = other DNA
tttgaaagggggggctgggccctcatgcccagtccttcctttccccttccggggggtaaaccggctgtgtttgctagaggcacagaggagcaacatccaacctgcttttgtggggaacggtgcggctccaattcctgcgtcgccaaaggtgttagcgcacccaaacggcgcatctaccaatgctattggtgtggtctgcgagttctagcctactcgtttctcccctactcactcatttacacacaaaaactgtgttgtaactacaagatttggccctcgcacgggatgtgcgacaaccgcaagattgactcaagcgcggaaagcgctgtaaccacatgctgttagtccctttatggctgcgagatggctatccacctcggatcactgaactggagctcgaccctccttagtaagggaaccgagaggccttcctgcaacaagctccgacacagagtccacgtgattgctaccaccatgagtacatggttctcccctctcgacccaggacttctttttgaatatccacggctcgatccagagggtggggcatgatccccctagcatagcgagctacagcgggaactgtagctaggccttagcgtgccttggatactgcctgatagggcgacggcctagtcgtgtcggttctataggtagcacatacaaat

SEQ ID NO: 17416 - DNA, 594 bp, synthetic construct; identical to SEQ ID NO: 33
  source 1..594: mol_type = other DNA

SEQ ID NO: 17417 - DNA, 560 bp, synthetic construct; identical to SEQ ID NO: 607
  source 1..560: mol_type = other DNA

SEQ ID NO: 17418 - DNA, 668 bp, synthetic construct; identical to SEQ ID NO: 83
  source 1..668: mol_type = other DNA

SEQ ID NO: 17419 - DNA, 668 bp, synthetic construct
  source 1..668: mol_type = other DNA
tttgaaatggggggctgggccctcatgcccagtccttcctttccccttccggggggtaaaccggccgtgtttgctagaggcacggaggagcaacatccaacctgcttttgtggggaacggtgcggctccaattcctgcgtcgccaaaggtgttagcgcacccaaacggcgcatctaccaatgctattggtgtggtctgcgagttctagcctactcgtttctcccctatccactcactcacccacgaaaagtgtgttgtaactacaagatttagccctcgcacgagatgtgcgataaccgcaagattgactcaagcgcggaaagcgctgtaaccacatgctgttagtccctttatggctgcgagatggctatccacctcggatcactgaactggagctcgaccctccttagtaagggaaccgagaggccttcttgcaacaagctccgacacagagtccacgtgattgctaccaccatgagtacatggttctcccctctcgacccaggacttctttttgaatatccacggctcgatccagagggtggggcatgatccccctagcatagcgagctacagcgggaactgtagctaggccttagcgtgccttggatactgcctgatagggcgacggcctagtcgtgtcggttctataggtagcacatacaaat

SEQ ID NO: 17420 - DNA, 395 bp, synthetic construct; identical to SEQ ID NO: 431
  source 1..395: mol_type = other DNA

SEQ ID NO: 17421 - DNA, 668 bp, synthetic construct
  source 1..668: mol_type = other DNA
tttgaaatggggggctgggccctgatgcccagtccttcctttccccttccggggggttaaccggctgtgtttgctagaggcacagaggagcaacatccaacctgcttttgtggggaacggtgcggctccaattcctgcgtcgccaaaggtgttagcgcacccaaacggcgcatctaccaatgccattggtgtggtctgcgagttctagcctactcgtttttcccctactcactcattcacgcacaaaaagcgtgttgtaactacaagacttagccctcgcacgggatgtgcggtaaccgcaagattgactcaagcgcggaaagcgctgtaaccacatgctgttagtccctttatggctgcaagatggctatccacctcggatcactgaactggagctcgaccctccttagtaagggaaccgagaggccttcttgcaacaagctccgacacagagtccacgtgattgctaccaccatgagtacatggttctcccctctcgacccaggacttctttttgaatatccacggctcgatccagagggtggggcatgatccccctagcatagcgaactacagcgggaactgtagttaggccttagcgtgccttggatactgcctgatagggcgacggcctagtcgtgtcggttctataggtagcacatacaaat

SEQ ID NO: 17422 - DNA, 615 bp, synthetic construct
  source 1..615: mol_type = other DNA
gggttaaccggctgtgtttgctagaggcacagaggggcaacatccaacctgcttttgcggggaacggtgcggctccgattcctgcgtcgccaaaggtgttagcgcacccaaacggcgcatctaccaatgctattggtgtggtctgcgagttctagcctactcgtttctcccctatccattcactcactcacgaaaagtgtgttgtaaccacaagatttagcccccgcacgagatgtgcgataaccgtaagactgactcaagcgcggaaagcgctgtaaccacatgctgttagtccctttatggctgcaagatggctatccacctcggatcactgaactggagctcgaccctccttagtaagggaaccgagaggccttcgtgcaacaagctccgacacagagtccacgtgattgctaccaccatgagtacatggttctcccctctcgacccaggacttctttttgaatatccacggctcgatccagagggtggggcatgatccccctagcatagcgagctacagcgggaactgtagctaggccttagcgtgccttggatactgcctgatagggcgacggcctagtcgtgtcggttctataggtagcacatacaaat

SEQ ID NO: 17423 - DNA, 668 bp, synthetic construct
  source 1..668: mol_type = other DNA
tttgaaatggggggctgggccctgatgcccagtccttcctttccccttccggggggttaaccggctgtgtttgctagaggcacagaggagcaacatccaacctgcttttgtggggaacggtgcggctccgattcctgcgtcgccaaaggtgttagcgcacccaaacggcgcatctaccaatgctattggtgtggtctgcgagttctagcctactcgtttctcccctgctcactcatttacacacaaaaactgtgttgtaactacaagatttggccctcgcacgggatgtgcgataaccgcaagactgactcaagcgcggaaggcgctgtaaccacatgctgttagtccttttatggctgcgagatggctatccacctcggatcactgaactggagctcgaccctccttagtaagggaaccgagaggccttcctgcaacaagctccgacacagagtccacgtgattgctaccaccatgagtacatggttctcccctctcgacccaggacttctttttgaatatccacggctcgatccagagggtggggcatgatccccctagcatagcgagctacagcgggaactgtagctaggccttagcgtgccttggatactgcctgatagggcgacggcctagtcgtgtcggttctataggtagcacatacaaat

SEQ ID NO: 17424 - DNA, 674 bp, synthetic construct
  source 1..674: mol_type = other DNA
ggccttataccccgacttgccgagtttctctaggagagtccctttcccagccttgaggcggctggtcaataaaagcctcaaacgtaactaacatctaagattgattcaataaccccatgcctgatccccaccagtcgaagacaacttgtaataagacgggtggaataaggatgcttaaagcatggtgtaaatattcttttctaacccatggtttcatggggtggcagatggcgtgccataactctattagtgagataccacgcttgtggaacttatgctcacacagccatcctctagtaagtttgtgagatgtctaatgacgtgtgggaacttattggaagcaacaatttgccatacggcatcctactgccagcggatccacacctggtaacaggtgcccctggggccgaaagccaaggtttaacagaccctttaggattggttaaaacctgaattgttgtggaagatactcagtacctgctgatttggtagtaatgcaaacactagttgtaaggcccacgaaggatgcccagaaggtacccgtaggtaacaagtgacactatggatctgatctggggccaactacttctatcatggtgagttggttaaaaaacgtctagtgggccaaacccaggggggatccctggtttcctttttattttactacagccaat

SEQ ID NO: 17425 - DNA, 666 bp, synthetic construct; identical to SEQ ID NO: 805
  source 1..666: mol_type = other DNA

SEQ ID NO: 17426 - DNA, 492 bp, synthetic construct; identical to SEQ ID NO: 518
  source 1..492: mol_type = other DNA

SEQ ID NO: 17427 - DNA, 680 bp, synthetic construct; identical to SEQ ID NO: 91
  source 1..680: mol_type = other DNA

SEQ ID NO: 17428 - DNA, 636 bp, synthetic construct
  source 1..636: mol_type = other DNA
tccctttcccagccctgaggtggctggttaataatagcctcaaacgtaaccaacatctaagaagattgtataaaccctatgcctggcccccactattcgaaggcaacttgcaataagaagagtggaatcagggtgcttaaagcatagagacagttttcatttctaacccacatgattgtggggtggcagatggcgtgccataattctaatagtgagataccacgcttgtggaccttatgctcacacagccatcctctagtaagtttgtgagacgtctggtgacgtgtgggaacttattggaaacaacattttgctgcaaagcatcctactgccagcggaacaacacctggtaacaggtgcctctggggccaaaagccaaggtttaacagaccctttaggattggttctgaacctgagatgttgtggaaaatatttagtacctgctgatctggtagtaatgcaagcactagttgtaaggcccacgaaggatgcccagaaggtacccgtaggtaacaagtgacactatggatctgatctggggccaactacctctatcttggtgagttggttaaaaaacgtctagtgggccaaacccaggggggatccctggtttccttttattttatcatagttaat

SEQ ID NO: 17429 - DNA, 665 bp, synthetic construct
  source 1..665: mol_type = other DNA
gggggggctgggccctcatgcccagtccttcctttccccttccggggggtaaaccggctgtgtttgctagaggcacagaggagcaacatccaacctgcttttgtggggaacggtgcggctccaattcctgcgtcgccaaaggtgttagcgcacccaaacggcgcatctaccaatgctattggtgtggcctgcgagttctagcctactcgtttctcccctattcactcactcacgcacgcacaaaaagtgtgttgtaactacaagatttagccctcgcacgggatgtgcgataaccgcaagattgactcaagcgcggaaagcgctgtaaccacatgctgttagtccctttatggctgcgagatggctatccacctcggatcactgaactggagctcgaccctccttagtaagggaaccgagaggccttcttgcaacaagctccgacacagagtccacgtgattgctaccaccatgagtacatggttctcccctctcgacccaggacttctttttgaatatccacggctcgatccagagggtggggcatgatccccctagcatagcgagctacagcgggaactgtagctaggccttagcgtgccttggatactgcctgatagggcgacggcctagtcgtgtcggttctataggtagcacatacaaat

SEQ ID NO: 17430 - DNA, 664 bp, synthetic construct
  source 1..664: mol_type = other DNA
aaagggggggctgggccctcatgcccagtccttcctttccccttccggggggttaaccggctgtgtttgctagaggcacagaggggcaacatccaacctgcttttgcggggaatggtgcggctccgattcctgcgtcgccaaaggtgttagcgcacccaaacggcgcacctaccaatgttattggtgtggtctgcgagttctagcctactcgtttctcccccaaccattcactcacccacgaaaagtgtgttgtaaccacaagatttgacccccgcacgagatgtgcgataaccgtaagactggctcaagcgcggaaagcgctgtaaccacatgctgttagtccctttatggctgcaagatggctacccacctcggatcactgaactggagctcgaccctccttagtaagggaaccgagaggccttcgtgcaacaagctccgacacagagtccacgtgactgctaccaccatgagtacatggttctcccctctcgacccaggacttctttttgaatatccacggctcgatccagagggtggggcatgatccccctagcatagcgagctacagcgggaactgtagctaggccttagcgtgccttggatactgcctgatagggcgacggcctagtcgtgtcggttctataggtagcacatacaaat

SEQ ID NO: 17431 - DNA, 673 bp, synthetic construct
  source 1..673: mol_type = other DNA
cgtcgggccttataccccgacttgctgagcttctctaggagagcccttttcccagccagaggtggctggttaaataatacctactgtaacaaaacatctaagatgcaacaaccacacacctggtttccactggccgaaggcaactagcaataaggcaggtgggttcagacgcttaaagtgtgttgtacatattcttttctaacctgtgttctacacagggtggcagatggcgtgccataactctaatagtgagataccatgcttgtggaccttatgctcacacagccatcctctagtaagtttgtaagacgtctgatgacgtgtgggaacttgttggagataacagtttgctgcaaagcatcccattgccagcggatctacatctggtaacagatgcctctggggccaaaagccacggtttaatagaccctttgggattggttcaaacctgaactgctatggaagacacttagtacctgctgatttggtagtaatgcaaacactagttgtaaggcccacgaaggatgcccagaaggtacccgtaggtaacaagtgacactatggatctgatctggggccaactacctctatctaggtgagttggttaaaaaacgtctagtgggccaaacccaggggggatccctggtttccttttttaatttaagtaatcact

SEQ ID NO: 17432 - DNA, 673 bp, synthetic construct
  source 1..673: mol_type = other DNA
cgtcgggccttataccccgacttgctgagcttctctaggagagcccttttcccagccagaggtggctggttaaataatacctactgtaacaaaacatctaagatgcaacaaccacacacctggtttccactggccgaaggcaactagcaataaggcaggtgggttcagacgcttaaagtgtgttgtacatattcttttctaacctgtgttctacacagggtggcagatggcgtgccataactctaatagtgagataccatgcttgtggaccttatgctcacacagccatcctctagtaagtttgtaagacgtctgatgacgtgtgggaacttgttggagataacagtttgctgcaaagcatcccattgccagcggatctacatctggtaacagatgcctctggggccaaaagccacggtttaatagaccctttgggattggttcaaacctgaactgctatggaagacacttagtacctgctgatttggtagtaatgcaaacactagttgtaaggcccacgaaggatgcccagaaggtacccgtaggtaacaagtgacactatggatctgatctggggccaactacctctatctaggtgagttggttaaaaaacgtctagtgggccaaacccaggggggatccctggtttcctttttaaatttaagtaatcact

SEQ ID NO: 17433 - DNA, 673 bp, synthetic construct
  source 1..673: mol_type = other DNA
cgtcgggccttataccccgatttgctgagcttctctaggagagcccttttcccagccagaggtggctggttaaataatacctactgtaacaaaacatctaagatacaacaaccacacacctggtttccactggccgaaggcaactagcaataaggcaggtgggttcagacgcttaaagtgtgttgtacatattcttttctaacctgtgttctacacagggtggcagatggcgtgccataactctaatagtgagataccacgcttgtggaccttatgctcacacagccatcctctagtaagtttgtaagacgtctgatgacgtgtgggaacttgttggagataacagtttgctgcaaagcatcccactgccagcggatctacatctggtaacagatgcctctggggccaaaagccaaggtttaacagaccctttgggattggttcaaacctgaactgttatggaagacatttagtacctgctgatttggtagtaatgcaaacactagttgtaaggcccacgaaggatgcccagaaggtacccgtaggtaacaagtgacactatggatctgatctggggccagctacctctatctaggtgagttggttaaaaaacgtctagtgggccaaacccgggggggatccctgatttccttttttagtttgagtaatcact

SEQ ID NO: 17434 - DNA, 672 bp, synthetic construct
  source 1..672: mol_type = other DNA
cgtcgggccttataccccgacttgctgagcttctctaggagagcccttttcccagccagaggtggctggttaaataatacctactgtaacaaaacatctaagatacaacaaccacacacctggtttccactggccgaaggcaactagcaataaggcaggtgggttcagacgcttaaagtgtgttgtacatattcttttctaacctgtgttctacacggggtggcagatggcgtgccataactctaatagtgagataccacgcttgtggaccttatgctcacacagccatcctctagtaagtttgtaagacgtctgatgacgtgtgggaacttgttggagataacagtttgctgcaaagcatcccattgccagcggatctacatctggtaacagatgcctctggggccaaaagccaaggtttaacagaccctttgggattggttcaaacctgaactgttatggaagacacttagtacctgctgatttggtagtaatgcaaacactagttgtaaggcccacgaaggatgcccagaaggtacccgtaggtaacaagtgacactatggatctgatctggggccagctacctctatctaggtgagttggttaaaaaacgtctagtgggccaaacccaggggggatccctggtttccttttttatttaagtaatcact

SEQ ID NO: 17435 - DNA, 594 bp, synthetic construct
  source 1..594: mol_type = other DNA
gatgttagttacagttgaggcttttattatacaaccttgtacctggtccccactagtcgaaggctacttgcaataagataagtggactaaggacgcttaaagtacaatgtaaacaatcttttctaatccacaattttgtggagtggcagatggcgtgccataaccctattagtgagataccacgcttgtggaccttatgctcacacagccatcctctagtaagtttgtgagatgtctggtgatgtgtgggaacttatgggaagtaatgtcttgctgtaaagcatccattagccagcgggtaaacacctggtaacaggtgcctctggggccaaaagccaaggtttaacagaccctaatggattggttcaaacctgggacattgtggaacatacttagtacctgctgatctggtagttatgcaaacactagttgtaaggcccacgaaggatgcccagaaggtacccgtaggtaacaagagacactatggatctgatctggggctgagtacttctatcttagtgactcagttaaaaaacgtctagtgggccaaacccgggggggatccccggtttcctttattttacaactaccatc

SEQ ID NO: 17436 - DNA, 664 bp, synthetic construct; identical to SEQ ID NO: 81
  source 1..664: mol_type = other DNA

SEQ ID NO: 17437 - DNA, 661 bp, synthetic construct
  source 1..661: mol_type = other DNA
gggggggctgggccctcatgcccagtccttcctttccccttccggggggttaaccggctgtgtttgctagaggcacagaggggcaacatccaacctgcttttgcggggaacggtgcggctccgattcctgcgtcgccaaaggtgttagcgcacccaaacggcgcatctaccaatgctattggtgtggtctgcgagttctagcctactcgtttctcccctatccattcactcactcacgaaaagtgtgttgtaaccacaagatttagcccccgcacgagatgtgcgataaccgtaagactgactcaagcgcggaaagcgctgtaaccacatgctgttagtccctttatggctgcaagatggctatccacctcggatcactgaactggagctcgaccctccttagtaagggaaccgagaggccttcgtgcaacaagctccgacacagagtccacgtgattgctaccaccatgagtacatggttctcccctctcgacccaggacttctttttgaatatccacggctcgatccagagggtggggcatgatccccctagcatagcgagctacagcgggaactgtagctaggccttagcgtgccttggatactgcctgatagggcgacggcctagtcgtgtcggttctataggtagcacatacaaat

SEQ ID NO: 17438 - DNA, 661 bp, synthetic construct
  source 1..661: mol_type = other DNA
gggggggctgggccctgatgcccagtccttcctttccccttccggggggttaaccggctgtgtttgctagaggcacagaggggcaacatccaacctgtttttgcggggaacggtgcggctccgattcctgcgtcgccaaaggtgttagcgcacccaaacggcgcacctaccaatgttattggtgtggtctgcgagttctagcctactcgtttctcccccgaccattcactcacccacgaaaagtgtgttgtaaccataagatttaacccccgcacgggatgtgcgataaccgtaagactggctcaagcgcggaaagcgctgtaaccacatgctgttagtccctttatggctgcaagatggctacccacctcggatcactgaactggagctcgaccctccttagtaagggaaccgagaggccttcgtgcaacaagctccgacacagagtccacgtgactgctaccaccatgagtacatggttctcccctctcgacccaggacttctttttgaatatccacggctcgatccagagggtggggcatgatccccctagcatagcgagctacagcgggaactgtagctaggccttagcgtgccttggatactgcctgatagggcgacggcctagtcgtgtcggttctataggtagcacatacaaat

SEQ ID NO: 17439 - DNA, 667 bp, synthetic construct; identical to SEQ ID NO: 82
  source 1..667: mol_type = other DNA

SEQ ID NO: 17440 - DNA, 594 bp, synthetic construct
  source 1..594: mol_type = other DNA
ataatcttagatgtttgttacagttgcattaaccccatgcctggtctccactagttgaaggcaacttgcaataaaatgagtggaaacaagacgcttaaagcatggtgtaaattaacttttctaacccacaccttgtgtggggtggcagatggcgtgccataactctattagtgagataccacgcttgtggaacttatgctcacacagccatcctctagtaagtctgtgagatgtctggtgacgtgtgggaacttattggaaacaacattttgctgtaaagcatcctattgccagcggaacaacacctggtaacaggtgcctctggggccaaaagccaaggtttagcagaccctttaggattggtttaaaacctgaaatgttgtggaagatacttagtacctaccgatctggtagtattgcagactctagttgtaaggcccacgaaggatgcccagaaggtacccgtaggtaacaagagacactatggatctgatctggggccaggtacctctatttcggtgacctggttaaaaaacgtctagtgggccaaacccgggggggatccccggtttcctttatcttacaactgctatc

SEQ ID NO: 17441 - DNA, 660 bp, synthetic construct
  source 1..660: mol_type = other DNA
ggggggctgggccctcatgcccagtccttcctttccccttccggagggttaaccggctgtgtttgctagaggcacagaggggcaacatccaacctgcttttgcggggaacggtgcggctccgattcctgcgtcgccaaaggtgttagcgcacccaaacggcgcatctaccaatgctattggtgtggtctgcgagttctagcctactcgtttctcccctatccattcactcactcacgaaaagtgtgttgtaaccacaagatttagcccccgcacgagatgtgcgataaccgtaagactgactcaagcgcggaaagcgctgtaaccacatgctgttagtccctttatggctgcaagatggctatccacctcggatcactgaactggagctcgaccctccttagtaagggaaccgagaggccttcgtgcaacaagctccgacacagagtccacgtgattgctaccaccatgagtacatggttctcccctctcgacccaggacttctttttgaatatccacggctcgatccagagggtggggcatgatccccctagcatagcgagctacagcgggaactgtagctaggccttagcgtgccttggatactgcctgatagggcgacggcctagtcgtgtcggttctataggtagcacatacaaat

SEQ ID NO: 17442 - DNA, 660 bp, synthetic construct
  source 1..660: mol_type = other DNA
ggggggctgggccctgacgcccagcccttcctttccccttccggggggttaaccggctgtgtttgctagaggcacagaggggcaacatccaacctgcttttgtggggaacggtgcggctccgattcccgcgtcgccaaaggtgttagcgcacccaaacggcgcatctaccaatgttattggtgtggtctgcgagttctagcctactccgtttctcccccgaccattcactcgcccacgaaaaagtgtgttgtaaccataagatttaacccccgcacgggatgtgcgataaccgtaagactgactcaagcgcggaaggcgctgtaaccacatgctgttagttcctttatggctgcaagatggctaccaacctcggatcactgaactggagctcgaccccccttagtaagggaaccgagaggccttcgtgcaaaaagctccgacacagagtccacgtgactgctaccaccatgagtacatggttctcccctctcgacccaggacttctttttgaatatccacggctcgatacagagggtggggcatgacccctagcatagcgagctacagcgggaactgtagctaggtcttagcgcaccttggatactgcctgatagggcgacggcctagtcgtgtcggttctataggtagcacatataaat

SEQ ID NO: 17443 - DNA, 666 bp, synthetic construct
  source 1..666: mol_type = other DNA
tttgaaagggggggccgggccctcatgcccagtctttcctttccccttccggggggtaaaccggctgtgtttgctagaggcacagaggagcaacatccaacctgcttttgtggggaacggtgcggctccaattcctgcgtcgccaaaggtgttagcgcacccaaacggcgcatctaccaatgctattggtgtggtctgcgagttctagcctactcgtttctcccctactcactcattcacgcacaaaaattgtgttgtaactacaagatttagccctcgcacgggatgtgcgataaccgcaagattgactcaagcgcggaaagcgctgtaaccacatgctgttagtccctatatggctgcgagatggctatccacctcggatcactgaactggagctcgaccctccttagtaagggaaccgagaggccttcttgcaacaagctccgacacagagtccacgtgattgctaccaccatgagtacatggttctcccctctcgacccaggacttctttttgaatatccacggctcgatccagagggtggggcatgacccctagcatagcgagctacagcgggaactgtagctaggccttagcgtgccttggatactgcctgatagggcgacggcctagtcgtgtcggttctataggtagcacatacaaat

SEQ ID NO: 17444 - DNA, 671 bp, synthetic construct; identical to SEQ ID NO: 811
  source 1..671: mol_type = other DNA

SEQ ID NO: 17445 - DNA, 661 bp, synthetic construct
  source 1..661: mol_type = other DNA
gggggggctgggccctcatgcccagtccttcctttccccttccggggggttaaccggctgtgtttgctagaggcacagaggggcaacatccaacctgctcttgcggggaacggtgcggctccaattcctgcgtcgccaaaggtgttggcgcacccaaacggcgcatctaccaatgctattggtgtggtctgcgagttctagcctactcgtttctcccctatccattcactcactcacgaaaagtgtgttgtaaccacaagatttagcccccgcacgagatgtgcgataaccgtaagactgactcaagcgcggaaagcgctgtaaccacatgctgttagtccctttatggctgcaagatggctatccacctcggatcactgaactggagctcgaccctccttagtaagggaaccgagaggccttcgtgcaacaagctccgacacagagtccacgtgattgctaccaccatgagtacatggttctcccctctcgacccaggacttctttttgaatatccacggctcgatccagagggtggggcatgatccccctagcatagcgagctacagcgggaactgtagctaggccttagcgtgccttggatactgcctgatagggcgacggcctagtcgtgtcggttctataggtagcacatacaaat

SEQ ID NO: 17446 - DNA, 658 bp, synthetic construct
  source 1..658: mol_type = other DNA
ggggggctggggcctgacgcccagcccttcctttccccttccggggggttaaccggctgtgtttgctagaggcacagaggggcaacatccaacctgcttttgcggggaacggtgcggctccgattcctgcgccgccacaggtgttagcgcacccaaacggcgcacctaccaatgttattggtgtggtctgcgagttctagcctactcgtttctcccccgaccattcattcgttcacgaaaagtgtgttgtaaccataagatttaacccccgcacgggatgtgcgacaaccgtaagactggctcaagcgcggaaggcgctgtaaccacaagctgttagtccctttatggctgcaagatggctacccacctcggatcactgaactggagctcgaccctccttagtaagggaaccgagaggccttcgtgcaaaaagctccgacacagagtccacgtgactgctaccaccatgagtacatggttctcccctctcgacccaggacttctttttgaatatccacggctcgatccagagggtggggcatgacccctagcatagcgagctacagcgggaactgtagctaggtcttagcgtaccttggatactgcctgatagggcgacggcctagtcgtgtcggttctataggtagcacatacaaat

SEQ ID NO: 17447 - DNA, 592 bp, synthetic construct; identical to SEQ ID NO: 29
  source 1..592: mol_type = other DNA

SEQ ID NO: 17448 - DNA, 668 bp, synthetic construct
  source 1..668: mol_type = other DNA
tttgaaatggggggctgggccctcatgcccagtccttcctttccccttccggggggtaaaccggctgtgtttgctagaggcacagaggagcaacatccaacctgctcttgtggggaacggtgcggctccaattcctgcgtcgccaaaggtgttagcgcacccaaacggcgcatctaccaatgctattggtgtggtctgcgagttctagcctactcgtttctcccctatccactcactcacgcacaaaaagtgtgttgtaactacaagacttagccctcgcacgagatgtgcgataaccgcaagattgactcaagcgcggaaagcgctgtaaccacatgctgttagtccctttatggctgcgagatggctatccacctcggatcactgaactggagctcgaccctccttagtaagggaaccgagaggccttcttgcaacaagctccgacacagagtccacgtgattgctaccaccatgagtacatggttctcccctctcgacccaggacttctttttgaatatccacggctcgatccagagggtggggcatgatccccctagcatagcgagctacagcgggaactgtagctaggccttagcgtgctttggatactgcctgatagggcgacggcctagtcgtgtcggttctataggtagcacatacaaat

SEQ ID NO: 17449 - DNA, 374 bp, synthetic construct
  source 1..374: mol_type = other DNA
ggacacttggattgggactttcagcgagcacaaatggtatgattactggatacaccttgaacggcagtagcgtggcgagctatggaaaaatcgcaattgtcgatagccatgtcagtgacgcgcttcggcgtgctcctttggtgattcggcgactggttacaggagagtaggcagtgagctatgggcaaacctctacagtattacttagagggaatgtgcaattgagacttgacgagcgtctctttgagatgtggcgcatgctcttggcattaccatagtgagcttccaggttgggaaacctggactgggcctatactacctgatagggtcgcggctggccgcctgtaactagtatagtcagttgaaaccccccc

SEQ ID NO: 17450 - DNA, 596 bp, synthetic construct
  source 1..596: mol_type = other DNA
actgtaactaacatctaagctgaatatacagacaccctatgcctggtccccactcgtcgaaggcatctagcaataagataagtggaagaaggatgcttaaagcatagtgttagtatgcatttctaacctgtgattatcacggggtggcagatggcgtgccataactctattagtgagataccacgcttgtggaccttatgctcacacagccatcctctagtaagtttgcaaggcatctgatgacgtgtgggaacttattggaaacaacagtttgctgcaaagcatcctattgccagcggaacaacacctggtaacaggtgcctctggggccaaaagccaaggtttaacagaccctttaggattggttcacacctgaactgtcgtggaagatatttagtacctactgacttggtagttaggcaaacactagttgtaaggcccacgaaggatgcccagaaggtacccgtaggtaacaagagacactatggatctgatctggggccaactaccactatcatggtgagttggttaaaaaacgtctagtgggccaaacccaggggggatccctggtttccttttactttaatacaatcatt

SEQ ID NO: 17451 - DNA, 594 bp, synthetic construct
  source 1..594: mol_type = other DNA
tagaggcacagaggagcaacatccaacctgcttttgtggggaacggtgcggttccaattcctgcgtcgccaaaggtgttagcgcacccaaacggcgcatctaccaatgctattggtgtggtctgcgagttctagcctactcgtttcttccctatccactcactcacgcacaaaaagtgagttgtaactacgagattcagccctcgcacgagatgtgcggtaaccgcaagattgactcaagcgcggaaagcgctgcaaccacatgcagttagtccctttatggctgcgagatggctatccacctcggatcactgaactggagctcgaccctccttagtaagggaaccgagaggccttcttgcaacaagctccgacacagagtccacgtgattgctaccaccatgagtacatggttctcccctctcgacccaggacttctttttgaatatccacggctcgatccagagggtggggcatgatccccctagcatagcgagctacagcgggaactgtagctaggccttagcgtgccttggatactgcctgatagggcgacggcctagtcgtgtcggttctataggtagcacatacaaat

SEQ ID NO: 17452 - DNA, 594 bp, synthetic construct
  source 1..594: mol_type = other DNA
tagaggcacagaggagcaacacccaacctgctcttgtggggaacggtgcggctccaattcctgcgtcgccaaaggtgttagcgcacccaaacggcgcatctaccaatgctattggtgtggtctgcgagttctagcctactcgtttctcccctattcattcactcacgcacaaaaagtgtgttgtaactacaagatttagccctcgcacgggatgtgcgataaccgcaagactgactcaagcgcggaaagcgctgtaaccgcatgctgttagtccctttatggctgcgagatggctatccacctcggatcactgaactggagctcgaccctccttagtaagggaaccgagaggccttcttgcaacaagctccgacacagagtccacgtgattgctaccaccatgagtacatggttctcccctctcgacccaggacttctttttgaatatccacggctcgatccagagggtggggcatgatccccctagcatagcgagctacagcgggaactgtagctaggccttagcgtgccttggatactgcctgatagggcgacggcctagtcgtgtcggttctataggtagcacatacaact

SEQ ID NO: 17453 - DNA, 594 bp, synthetic construct
  source 1..594: mol_type = other DNA
tagaggcacagaggagcaacatccaacctgcttttgtggggaacggtgcggctccaattcctgcgtcgccaaaggtgttagcgcacccaaacggcgcatctaccaatgctattggtgtggtctgcgagttctagcctactcgtttctcccctactcactcattcacgcacaaaaactgtgttgtaactacaagatttagccctcgcacgggatgtgcgataaccgcaagattgactcaagcgcggaaagcgctgtaaccacatgctgttagtccctttatggctgcgagatggctatccacctcggatcactgaactggagctcgaccctccttagtaagggaaccgagaggccttcttgcaacaagctccgacacagagtccacgtgattgctaccaccatgagtacatggttctcccctctcgacccaggacttctttttgaatatccacggctcgatccagagggtggggcatgatccccctagcatagcgagctacagcgggaactgtagctaggccttagcgtgccttggatactgcctgatagggcgacggcctagtcgtgtcggttctataggtagcacatacaaat

SEQ ID NO: 17454 - DNA, 653 bp, synthetic construct; identical to SEQ ID NO: 78
  source 1..653: mol_type = other DNA

SEQ ID NO: 17455 - DNA, 595 bp, synthetic construct
  source 1..595: mol_type = other DNA
actgtaacaaacatctaagattattgcattaaccccatgcctggtctccattagttgaaggcaacttgcaataaaatgagtggaaacaagacgcttaaagcatggtgtaaattaacttttctaacccacatctcatgtggggtggcagatggcgtgccataactctattagtgagataccacgcttgtggaccttatgctcacacagccatcctctagtaagtttgtgagacgtctggtgacgtgtgggaacttattggaaacaacattttgctgtaaagcatcctactgccagcggaacaacacctggtaacaggtgcctctggggccaaaagccaaggtttaacagaccctttaggattggtttaaaacctgaaatgttgtggaagatactcagtacctaccaatctggtagtattgcaaacactagttgtaaggcccacgaaggatgcccagaaggtacccgtaggtaacgagagacactatggatctgatctggggccaggtacctctatcttggtgacctggttaaaaaacgtctagtgggccaaacccgggggggatccccggtttccttttattttaccaatgccatt

SEQ ID NO: 17456 - DNA, 596 bp, synthetic construct; identical to SEQ ID NO: 36
  source 1..596: mol_type = other DNA

SEQ ID NO: 17457 - DNA, 593 bp, synthetic construct
  source 1..593: mol_type = other DNA
agaggcacagaggagcaacatccaacctgcttttgtggggaacggtgcggttccaattcctgcgtcgccaaaggtgttagcgcacccaaacggcgcatctaccaatgctattggtgtggtctgcgagttctagcctactcgtttctcccctatccactcactcacgcacaaaaagtgtgttgtaactacgagattcagccctcgcacgagatgtgcggtaaccgcaagattgactcaagcgcggaaagcgctgcaaccacatgcagttagtccctttatggctgcgagatggctatccacctcggatcactgaactggagctcgaccctccttagtaagggaaccgagaggccttcttgcaacaagctccgacacagagtccacgtgattgctaccaccatgagtacatggttctcccctctcgacccaggacttctttttgaatatccacggctcgatccagagggtggggcatgatccccctagcatagcgagctacagcgggaactgtagctaggccttagcgtgccttggatactgcctgatagggcgacggcctagtcgtgtcggttctataggtagcacatacaaat

SEQ ID NO: 17458 - DNA, 616 bp, synthetic construct
  source 1..616: mol_type = other DNA
ggggtaaaccggctgtgtttgctagaggcacagaggagcaacatccaacctgcttttgtggggaacggtgcggctccaattcctgcgtcgccaaaggtgttagcgcacccaaacggcgcatctaccaatgctattggtgtggtctgcgagttctagcctactcgtttctcccctactcactcattcacgcacaaaaactgtgttgtaactacaagatttagccctcgcacgggatgtgcgataaccgcaagattgactcaagcgcggaaagcgctgtaaccacatgctgttagtccctttatggctgcgagatggctatccacctcggatcactgaactggagctcgaccctccttagtaagggaaccgagaggccttcttgcaacaagctccgacacagagtccacgtgattgctaccaccatgagtacatggttctcccctctcgacccaggacttctttttgaatatccacggctcgatccagagggtggggcatgatccccctagcatagcgagctacagcgggaactgtagctaggccttagcgtgccttggatactgcctgatagggcgacggcctagtcgtgtcggttctataggtagcacatacaaat

SEQ ID NO: 17459 - DNA, 597 bp, synthetic construct
  source 1..597: mol_type = other DNA
gctgagactaacatctaagctgattaaccagtcaccccatgcctggtccccactcgtcgaaggcatctagcaataagataagtggaagaaggatgcttaaagcatagtgttaatatgcatttctaacctgtgattatcacggggtggcagatggcgtgccataactctattagtgagataccacgcttgtggaccttatgctcacacagccatcctctagtaagtttgcaaggcatctgatgacgtgtgggaacttattggaaacaacagtttgctgcaaagcatcctactgccagcggaacaacacctggtaacaggtgcctctggggccaaaagccaaggtttaacagaccctttaggattggttcacacctgaactgttgtgaaagatatttagtacctactgacttggtagttaggcaaacactagttgtaaggcccacgaaggatgcccagaaggtacccgtaggtaacaagagacactatggatctgatctggggccaactaccactatcatggtgagttggccccagatcagatccttaagcgaaacccaggggggatccctggtttccttttactttaatacaatcatt

SEQ ID NO: 17460 - DNA, 642 bp, synthetic construct
  source 1..642: mol_type = other DNA
gcccagccccccctttccccttccggggggtaaaccggctgtgtttgctagaggcacagaggggcaacatccaacctgcttttgtggggaacggtgcggctccaattcctgcgtcgccaaaggtgttagcgcacccaaacggcgcatctaccaatgctattggtgtggtctgcgagttctagcctactcgtttctcccctatccattcactcacgcacaaaaagtgtgttgtaactacaagatttggccctcgcacgagatgtgcgataaccgcaagactgactcaagcgtggaaagcgctgtaaccacatgctgttagtccctttatggctgcgagatggctatccacctcggatcactgaactggagctcgaccctccttagtaagggaaccgagaggccttcttgcaacaagctccgacacagagtccacgtgattgctaccaccatgagtacatggttctcccctctcgacccaggacttctttttgaatatccacggctcgatccagagggtggggcatgatccccctagcatagcgagctacagcgggaactgtagctaggccttagcgtgccttggatactgcctgatagggcgacggcctagtcgtgtcggttctataggtagcacatacaaat

SEQ ID NO: 17461 - DNA, 642 bp, synthetic construct
  source 1..642: mol_type = other DNA
gcccagccccccctttccccttccggggggtaaaccggctgtgtttgctagaggcacagaggagcaacatccaacctgcttttgtggggaacggtgcggctccaattcctgcgtcgccaaaggtgttagcgcacccaaacggcgcatctaccaatgctattggtgtggtctgcgagttctagcctactcgtttctcccctatccactcactcacgcacaaaaagtgtgttgtaactacaagatttagccctcgcacgagatgtgcggtaaccgcaagattgactcaagcgcggaaagcgctgtaaccacatgctgttagtccctttatggctgcgagatggctatccacctcggatcactgaactggagctcgaccctccttagtaagggaaccgagaggccttcttgcaacaagctccgacacagagtccacgtgattgctaccaccatgagtacatggttctcccctctcgacccaggacttctttttgaatatccacggctcgatccagagggtggggcatgatccccctagcatagcgagctacagcgggaactgtagctaggccttagcgtgccttggatactgcctgatagggcgacggcctagtcgtgtcggttctataggtagcacatacaaat

SEQ ID NO: 17462 - DNA, 668 bp, synthetic construct
  source 1..668: mol_type = other DNA
taccccgacttgctgagcttctctaggagagtccctttcccagccttgaggcggctggtcaataaaagcctcaattgtaacaaacatctaagattattacattaaccccatgcctggtctccactagttgaaggcaacttgcaataaaatgagtggaaacaagacgcttaaagtatggtgtaaattaacatttctaactcacattttgtgtggggtggcagatggcgtgccataattctattagtgagataccatgcttgtggaccttatgctcacacagccatcctctagtaagtttgtaagacgtctggtgacgtgtgggaacttattggaaacaacattttgctgtaaagcatcctattgccagcggaataacacctggtaacaggtgcctctggggccaaaagccaaggtttaacaaaccctttaggattggttctaaacctgagatgttgtggaagatacttagtacctaccgatctggtagtagtgcaaacactagttgtaaggcccacgaaggatgcccagaaggtacccataggtaacaagtgacactatggatctgatctggggccaggtacctctatcttggtgacctggttaaaaaacgtctagtgggccaaacccgggggggaaccccggtttccttttattttgtcagtgccact

SEQ ID NO: 17463 - DNA, 668 bp, synthetic construct
  source 1..668: mol_type = other DNA
tttgaaatggggggctgggccctcatgcccagtccttcctttccccttccggggggtaaaccggctgtgtttgctagaggcacagaggagcaacatccaacctgcttttgtggggaacggtgcggctccgattcctgcgtcgccaaaggtgttagcgcacccaaacggcgcatctaccaatgctattggtgtggtctgcgagttctagcctactcgtttctcccccatccactcactcgcgcacaaaaagtgtgttgtaactacaagatttagccctcgcacgggatgtgtgataaccacaagattgactcaagcgcggaaagcgatgtaaccacatgctgttagtccctttatggctgcgagagggctatccacctcggatcactgaactggagctcgaccctccttagtaagggaaccgagaggccttcttgcaacaagctccgacacagagtccacgtgattgctaccaccatgagtacatggttctcccctctcgacccaggacttctttttgaatatccacggctcgatccagagggtggggcatgatccccctagcatagcgagctacagcgggaactgtagctaggccttagcgtgccttggatactgcctgatagggcgacggcctagtcgtgtcggttctataggtagcacatacaaat

SEQ ID NO: 17464 - DNA, 668 bp, synthetic construct
  source 1..668: mol_type = other DNA
tttgaaatggggggctgggccctcatgcccagtccttcctttccccttccggggggtaaaccggctgtgtttgctagaggcacagaggagcaacatccaacctgctcttgtggggaacggtgcggctccaattcctgcgtcgccaaaggtgttagcgcacccaaacggcgcatctaccaatgctattggtgtggtctgcgagttctagcctactcgtttctcccctactcactcattcacgcacaaaaactgtgttgtaactacaagatttagccctcgcacgggatgtgcgataaccgcaagattgactcaagcgcggaaagcgctgtaaccacatgctgttagtccctttatggctgcgagatggctatccacctcggatcactgaactggagctcgaccctccttagtaagggaaccgagaggccttcttgcaacaagctccgacacagagtccacgtgattgctaccaccatgagtacatggttctcccctctcgacccaggacttctttttgaatatccacggctcgatccagagggtggggcatgatccccctagcatagcgagctacagcgggaactgtagctaggccttagcgtgccttggatactgcctgatagggcgacggcctagtcgtgtcggttctataggtagcacatacaaat

SEQ ID NO: 17465 - DNA, 668 bp, synthetic construct
  source 1..668: mol_type = other DNA
tttgaaatggggggctgggccctcatgcccagtccttcctttccccttccggggggtaaaccggctgtgtttgctagaggcacagaggagcaacacccaacctgcttttgtggggaacggtgcggctccgattcctgcgtcgccaaaggtgttagcgcacccaaacggcgcatctaccaatgctattggtgtggtctgcgagttctagcctactcgtttctcccccatccactcactcgcgcacaaaaagtgtgttgtaactacaagatttagccctcgcacgggatgtgcgataaccacaagattgactcaagcgcggaaagcgctgtaaccacatgctgttagtccctttatggctgcgggatggctatccacctcgggtcactgaactggagctcgaccctccttagtaagggaactgagaggccttcttgcaacaagctccgacacagagtccacgtgattgctaccaccatgagtacatggttctcccctctcgacccaggacttctttttgaatatccacggctcgatccagagggtggggcatgatccccctagcatagcgagctacagcgggaactgtagctaggccttagcgtgccttggatactgcctgatagggcgacggcctagccgtgtcggttctataggtagcacatacaaat

SEQ ID NO: 17466 - DNA, 668 bp, synthetic construct
  source 1..668: mol_type = other DNA
tttgaaatggggggctgggccctcatgcccagtccttcctttccccttccggggggtaaaccggctgtgtttgctagaggcacagaggagcaacatccaacctgcttttgtggggaacggtgcggctccaattcctgcgtcgccaaaggtgttagcgcacccaaacggcgcatctaccaatgccattggtgtggtctgcgagttctagcctactcgtttctcccctactcactcattcacgcacaaaaactgtgttgtaactacaagatttggccctcgcacgggatgtgcgataaccgcaagattgactcaagcgcggaaagcgctgtaaccacatgctgttagtccctttatggctgcgagatggctatccacctcggatcactgaactggagctcgaccctccttagtaagggaaccgagaggccttcttgcaacaagctccgacacagagtccacgtgattgctaccaccatgagtacatggttctcccctctcgacccaggacttctttttgaatatccacggctcgatccagagggtggggcatgatccccctagcatagcgagctacagcgggaactgtagctaggccttagcgtgccttggatactgcctgatagggcgacggcctagtcgtgtcggttctataggtagcacatacaaat

SEQ ID NO: 17467 - DNA, 668 bp, synthetic construct
  source 1..668: mol_type = other DNA
tttgaaatggggggctgggcccttatgcccagtccttcctttccccttccggggggtaaaccggctgtgtttgctagaggcacagaggagcaacatccaacctgcttgtgtggggaacggtgcggctccaattcctgcgtcgccaaaggtgttagcgcacccaaacggcgcatctaccaatgctattggtgtggtctgcgagttctagcctactcgtttctcccctactcactcattcacgcacaaaaactgtgttgtaattacaagatttagccctcgcacgggatgtgcgataaccgcaagattgactcaagcgcggaaagcgctgtaaccacatgctgttagtccctttatggctgcgagatggctatccacctcggatcactgaactggagctcgaccctccttagtaagggaaccgagaggccttcttgcaacaagctccgacacagagtccacgtgattgctaccaccatgagtacatggttctcccctctcgacccaggacttctttttgaatatccacggctcgatccagagggtggggcatgatccccctagcatagcgagctacagcgggaactgtagctaggccttagcgtgccttggatactgcctgatagggcgacggcctagtcgtgtcggttctataggtagcacatacaaat

SEQ ID NO: 17468 - DNA, 668 bp, synthetic construct
  source 1..668: mol_type = other DNA
tttgaaatggggggctgggccctcatgcccagtccttcctttccccttccggggggtaaaccggctgtgtttgctagaggcacagaggagcaacatccaacctgcttttgtggggaacggtgcggctccgactcctgcgtcgccaaaggtgttagcgcacccaaacggcgcatctaccaatgctattggtgtggtctgcgagttctagcctactcgtttctcccccatccactcactcgcgcacaaaaagtgtgttgcgactacaagatttagccctcgcacgggatgtgcgataaccacaagattgactcaagcgcggaaagcgctgtaaccacatgctgttagtccctttatggctgcgagatggctatccacctcggatcactgaactggagctcgaccctccttagtaagggaaccgagaggccttcttgcaacaagctccgacacagagtccacgtgattgctaccaccatgagtacatggttctcccctctcgacccaggacttctttttgaatatccacggctcgatccagagggtggggcatgatccccctagcatagcgagctacagcgggaactgtagctaggccttagcgtgccttggatactgcctgatagggcgacggcctagtcgtgtcggttctataggtagcacatacaaat

SEQ ID NO: 17469 - DNA, 668 bp, synthetic construct
  source 1..668: mol_type = other DNA
tttgaaatggggggctgggccctcatgcccagtccttcctttccccttccggggggtaaaccggctgtgtttgctagaggcacagaggagcaacatccaacctgctcttgtggggaacggtgcggctccaattcctgcgtcgccaaaggtgttagcgcacccaaacggcgcatctaccaatgctattggtgtggtctgcgagttctagcctactcgtttctcccctatccactcactcacgcacaaaaagtgtgttgtaactacaagacttagccctcgcacgagatgtgcgataaccgcaagattgactcaagcgcggaaagcgctgtaaccacatgctgttagtccctttatggctgcgagatggctatccacctcggatcactgaactggagctcgaccctccttagtaagggaaccgagaggccttcttgcaacaagctccgacacagagtccacgtgattgctaccaccatgagtacatggttctcccctctcgacccaggacatctttttgaatatccacggctcgatccagagggtggggcatgatccccctagcatagcgagctacagcgggaactgtagctaggccttagcgtgctttggatactgcctgatagggcgacggcctagtcgtgtcggttctataggtagcacatacaaat

SEQ ID NO: 17470 - DNA, 593 bp, synthetic construct; identical to SEQ ID NO: 32
  source 1..593: mol_type = other DNA

SEQ ID NO: 17471 - DNA, 668 bp, synthetic construct
  source 1..668: mol_type = other DNA
tttgaaatggggggctgggccctcatgcccagtccttcctttccccttccggggggtaaaccggctgtgtttgctagaggcacagaggagcaacatccaacctgctcttgtggggaacggtgcggctccaattcctgcgtcgccaaaggtgttagcgcacccaaacggcgcatctaccaatgctattggtgtggtctgcgagttctagcctactcgtttctcccctatccactcactcacgcacaaaaagtgtgttgtaactacaagatttagccctcgcacgagatgtgcgataaccgcaagattgactcaagcgcggaaagcgctgtaaccacatgctgttagtccctttatggctgcgagatggctatccacctcggatcactgaactggagctcgaccctccttagtaagggaaccgagaggccttcttgcaacaagctccgacacagagtccacgtgattgctaccaccatgagtacatggttctcccctctcgacccaggacttctttttgaatatccacggctcgacccagagggtggggcatgatccccctagcatagcgagctacagcgggaactgtagctaggccttagcgtgctttggatactgcctgatagggcgacggcctagtcgtgtcggttctataggtagcacatacaaat

SEQ ID NO: 17472 - DNA, 595 bp, synthetic construct
  source 1..595: mol_type = other DNA
actgtaacaaacatctaagattgttgcattaaccccatgcctggtctccactagttgaaggcaacttgcaataaaatgagtggaaacaagacgcttaaagcatggtgtaaattaacttttctaacccacaccttgtgtggggtggcagatggcgtgccataactctattagtgagataccacgcttgtggaacttatgctcacacagccatcctctagtaagtttgtgagatgtctggtgacgtgtgggaacttattggaaacaacattttgctgtaaagcatcctattgccagcggaactacacctggtaacaggtgcctctggggccaaaagccaaggtttaacagaccctttaggattggtttaaaacctgaaatgttgtggaagatacttagtacctaccgatctggtagtattgcagacactagttgtaaggcccacgaaggatgcccagaaggtacccgtaggtaacaagagacactatggatctgatctggggccaggtacctctatcttggtgacctggttaaagcatccttcgtgggccaaacccgggggggatccccggtttcattttgttttaccaatgccact

SEQ ID NO: 17473 - DNA, 595 bp, synthetic construct
  source 1..595: mol_type = other DNA
actgtaacaaacatctaagattgttgcattaaccccatgcctggtctccactagttgaaggcaacttgcaataaaatgagtggaaacaagacgcttaaagcatggtgtaaattaacttttctaacccacaccttgtgtggggtggcagatggcgtgccataactctattagtgagataccacgcttgtggaacttatgctcacacagccatcctctagtaagtttgtgagatgtctggtgacgtgtgggaacttattggaaacaacattttgctgtaaagcatcctattgccagcggaactacacctggtaacaggtgcctctggggccaaaagccaaggtttaacagaccctttaggattggttttaaacctgaaatgttgtggaagatacttagtacctaccgatctggtagtattgcagacactagttgtaaggcccacgaaggatgcccagaaggtacccgtaggtaacaagagacactatggatctgatctggggccaggtacctctatcttggtgacctggttaaaaaacgtctagtgggccaaacccgggggggatccccggtttcattttgttttaccaatgccact

SEQ ID NO: 17474 - DNA, 672 bp, synthetic construct; identical to SEQ ID NO: 85
  source 1..672: mol_type = other DNA

SEQ ID NO: 17475 - DNA, 668 bp, synthetic construct
  source 1..668: mol_type = other DNA
tttgaaggggggggctgggccctcatgcccagtccttcctttccccttccggggggtaaaccggctgtgtttgctagaggcacagaggagcaacacccaacctgcttttgtggggaacggtgcggctccgattcctgcgtcgccaaaggtgttagcgcacccaaacggcgcatctaccaatgctattggtgtggtctgcgagttctagcctactcgtttctcccctatccattcactcacgcacaaaaagtgtgttgtaactacaagatttagccctcgcacgagatgtgcgataaccgcaagactgactcaagcgcggaaagcgctgtaaccacatgctgttagtccctttatggctgcgagatggctatccacctcggatcactgaactggagctcgaccctccttagtaagggaaccgagaggccttcttgcaacaagctccgacacagagtccacgtgattgctaccaccatgagtacatggttctcccctctcgacccaggacttctttttgaatatccacggctcgatccagagggtggggcatgatccccctagcatagcgagctacagcgggaactgtagctaggccttagcgtgccttggatactgcctgatagggcgacggcctagtcgtgtcggttctataggtagcacatataaat

SEQ ID NO: 17476 - DNA, 672 bp, synthetic construct
  source 1..672: mol_type = other DNA
gatttttgaaatggggggctgggccctcatgcctagtccttcctttccccttccggggggtaaaccggctgtgtttgctagaggcacagaggagcaacatccaacctgctcttgtggggaacggtgcggctccaattcctgcgtcgccaaaggtgttagcgcacccaaacggcgcatctaccaatgctattggtgtggtctgcgagttctagcctactcgtttctcccctatccactcactcacgcacaaaaagtgggttgtaaccgcaagatttagccctcgcacgagatgtgcgataaccgcaagattgactcaagcgcggaaagcgctgtaaccacatgctgttagtccctttatggctgcgagatggctatccacctcggatcactgaactggagctcgaccctccttagtaagggaaccgagaggccttcttgcaacaagctccgacacagagtccacgtgattgctaccaccatgagtacatggttctcccctctcgacccaggacttctttttgaatatccacggctcggctcagagggtggggcatgatccccctagcatagcgagctacagcgggaactgtagctaggccttagcgtgctttggatactgcctgatagggcgacggcctagtcgtgtcggttctataggtagcacatacaaat

SEQ ID NO: 17477 - DNA, 595 bp, synthetic construct; identical to SEQ ID NO: 34
  source 1..595: mol_type = other DNA

SEQ ID NO: 17478 - DNA, 595 bp, synthetic construct
  source 1..595: mol_type = other DNA
actgtaacaaacatctaagattgttacattaaccccatgcctggtctccactagttgaaggcaacttgcaataaaatgagtggaaacaagacgcttaaagcatggtgtaaattaacttttctaacccacaccttgtgtggggtggcagatggcgtgccataactctattagtgagataccacgcttgtggaacttatgctcacacagccatcctctagtaagtttgtgagatgtctggtgacgtgtgggaacttattggaaacaacattttgctgtaaagcatcctattgccagcggaactacacctggtaacaggtgcctctggggccaaaagccaaggtttaacagaccctttaggattggtttaaaacctgaaatgttgtggaagatacttagtacctaccgatctggtagtattgcagacactagttgtaaggcccacgaaggatgcccagaaggtacccgtagggaacaagagacactatggatctggtctggggccaggtacctctatcttggtgacctggttaaaaaacgtctagtgggccaaacccgggggggatccccggtttcattttgttttaccaatgccact

SEQ ID NO: 17479 - DNA, 595 bp, synthetic construct; identical to SEQ ID NO: 35
  source 1..595: mol_type = other DNA

SEQ ID NO: 17480 - DNA, 666 bp, synthetic construct
  source 1..666: mol_type = other DNA
tttgaaatggggggctgggccctgacgcccagcccttcctttccccttccggggggttaaccggctgtgtttgctagaggcacagaggggcaacatccaacctgcttttgcggggaacggtgcggctccgattcctgcgccgccaaaggtgttagcgcacccaaacggcgcacctaccaatgttattggtgtggtctgcgagttctagcctactcgtttctcccccgaccattcactcgccctcgaaaagtgtgttgtaaccataagatttaacccccgcacgggatgtgtgataaccgtaagactggctcaagcgcggaaggcgctgtaaccacatgctgttagtccctttatggctgcaagatggctacccacctcggatcactgaactggagctcgaccctccttagtaagggaaccgagaggccttcgtgcaaaaagctccgacacagagtccacgtgactgctaccaccatgagtacatggttctcccctctcgacccaggacttctttttgaatatccacggctcgatccagagggtggggcatgacccctagcatagcgagctacagcgggaactgtagctaggtcttagcgtaccttggatactgcctgatagggcgacggcctagtcgtgtcggttctataggtagcacatacaaat

SEQ ID NO: 17481 - DNA, 645 bp, synthetic construct
  source 1..645: mol_type = other DNA
gatgcccagtccttcctttccccttccggggggttaaccggctgtgtttgctagaggcacagaggggcaacatccaacctgtttttgcggggaacggtgcggctccgattcctgcgtcgccaaaggtgttagcgcacccaaacggcgcatctaccaatgctattggtgtggtctgcgagttctagcctactcgtttctcccccaaccattcactcacccacgaaaagtgtgttgtaaccacaagatttaacccccgcacgagatgtgcgataaccgtaagattggctcaagcgcggaaagcgctgtaaccacatgctgttagtccctttatggctgcaagatggctacccacctcggatcactgaactggagctcgaccctccttagtaagggaaccgagaggccttcgtgcaacaagctccgacacagagtccacgtgactgctaccaccatgagtacatggttctcccctctcgacccaggacttctttttgaatatccacggctcgatccagagggtggggcatgatccccctagcatagcgagctacagcgggaactgtagctaggccttagcgtgccttggatactgcctgatagggcgacggcctagtcgtgtcggttctataggtagcacatacaaat

SEQ ID NO: 17482 - DNA, 636 bp, synthetic construct
  source 1..636: mol_type = other DNA
tccctttcccagccctgaggtggctggttaataatagcctcaagcgtaaccaacatctaagaagattgtataaaccctatgcctggcccccactattcgaaggcaacttgcaataagaagagtggaatcagggtgcttaaagcatagagacagttttcatttctaacccacatgattgtggggtggcagatggcgtgccataattctaatagtgagataccacgcttgtggaccttatgctcacacagccatcctctagtaagtttgtgagacgtctggtgacgtgtgggaacttattggaaacaacattttgctgcaaagcatcctactgccagcggaacaacacctggtaacaggtgcctctggggccaaaagccaaggtttaacagaccctttaggattggttctgaacctgagatgttgtggaaaatatttagtacctgctgatctggtagtaatgcaagcactagttgtaaggcccacgaaggatgcccagaaggtacccgtaggtaacaagtgacactatggatctgatctggggccaactacctctatcttggtgagttggttaaaaaacgtctagtgggccaaacccaggggggatccctggtttccttttattttatcatagttaat

SEQ ID NO: 17483 - DNA, 672 bp, synthetic construct; identical to SEQ ID NO: 813
  source 1..672: mol_type = other DNA

SEQ ID NO: 17484 - DNA, 672 bp, synthetic construct
  source 1..672: mol_type = other DNA
ccctttttgaatggggggctgggccctcatgtccagcccttcctttccccttccggggggtaaaccggctgtgtttgctagaggcacagaggagcaacatccaacctgcttttgtggggaacggtgcggctccaattcctgcgtcgccaaaggtgttagcgcacccaaacggcgcatctaccaatgctattggtgtggtctgcgagttctagcctactcgtttctcccctgctcactcatttacacacaaaaactgcgttgtaactacaagatttggccctcgcacgggatgtgcgataaccgcaagactgactcaagcgcggaaggcgctgtaaccacatgctgttagtccctttatggctgcgagatggctatccacctcggatcactgaactggagttcgaccctccttagtaagggaaccgagaggccttcccgcaacaagctccgacacagagtccacgtgattgctaccaccatgagtacatggttctcccctctcgacccaggacttctttttgaatatccacggctcgatccagagggtggggcatgatccccctagcatagcgagctacagcgggaactgtagctaggccttagcgtgccttggatactgcctgatagggcgacggcctagtcgtgtcggttctataggtagcacatacaaat

SEQ ID NO: 17485 - DNA, 672 bp, synthetic construct
  source 1..672: mol_type = other DNA
ccctttttgaatggggggctgggccctcatgtccagcccttcctttccccttccggggggtaaaccggctgtgtttgctagaggcacagaggagcaacatccaacctgcttttgtggggaacggtgcggctccaattcctgcgtcgccaaaggtgttagcgcacccaaacggcgcatctaccaatgctattggtgtggtctgcgagttctagcctactcgtttctcccctgctcactcatttacacacaaaaactgtgttgtaactacaagatttggccctcgcacgggatgtgcgataaccgcaagactgactcaagcgcggaaggcgctgtaaccacatgctgttagtccctttatggctgcgagatggctatccacctcggatcactgaactggagttcgactctccttagtaagggaaccgagaggccttcccgcaacaagctccgacacacagtccacgtgattgctaccaccatgagtacatggttctcccctctcgacccaggacttctttttgaatatccacggctcgatccagagggtggggcatgatccccctagcatagcgagctacagcgggaactgtagctaggccttagcgtgccttggatactgcctgatagggcgacggcctagtcgtgtcggttctataggtagcacatacaaat

SEQ ID NO: 17486 - DNA, 665 bp, synthetic construct
  source 1..665: mol_type = other DNA
tttgaaatggggggctgggcgtgacgcccagcccttcctttccccttccggggggttaaccggctgtgtttgctagaggcacagaggggcaccatccaacctgcttttgcggggaacggtgcggctccgattcctgcgccgccaaaggtgttagcgcacccaaacggcgcacctaccaatgttattggtgtggtctgcgagttctagcctactcgtttctcccctgaccatttactcgcccacgaaaagtgtgttgcaaccataagatttaacccccgcacgggatgtgcgataaccgtaagactggctcaagcgcggaaggcgctgtaaccacatgctgttagtccctttatggctgcaagatggctacccacctcggatcactgaactggagctcgaccctccttagtaagggaaccgagaggccttcgcgcaaaaagctccgacacagagtccacgtgattgctaccaccatgagtacatggttctcccctctcgacccaggacttctttttgaatatccacggctcgatccagagggtggggcatgacccctagcatagcgagctacagcgggaactgtagctaggtcttagcgtaccttggatactgcctgatagggcgacggcctagtcgtgtcggttctataggtagcacatacaaat

SEQ ID NO: 17487 - DNA, 667 bp, synthetic construct
  source 1..667: mol_type = other DNA
gggaaagggggggctgggccctcatgcccagtccttcctttccccttccggggggtaaaccggctgtgtctgctagaggcacagaggagcaacatccaacctgctcttgtggggaacggtgcggctccaattcctgcgtcgccaaaggtgttagcgcacccaaacggcgcatctaccaatgctattggtgtggtctgcgagttctagcctactcgtttctcccctatccactcactcacgcacaaaaagtgtgttgtaactacaagacttagccctcgcacgatatgtgcggtaaccgcaagattgactcaagcgcggaaagcgctgtaaccacatgctgttagtccctttatggctgcgggatggctatccacctcggatcactgaactggagctcgaccctccttagtaagggaaccgagaggccttcttgcaacaagctccgacacagagtccacgtgattgctaccaccatgagtacatggttctcccctctcgacccaggacttctttttgaatatccacggctcgacccagagggtggggcatgatccccctagcatagcgagctacagcgggaactgtagctaggccttagcgtgctttggatactgcctgatagggtgacggcctagtcgtgtcggttctataggtagcacatacaaat

SEQ ID NO: 17488 - DNA, 668 bp, synthetic construct
  source 1..668: mol_type = other DNA
tttgaaatggggggctgggccctcatgcccagtccttcctttccccttccggggggtaaaccggctgtgcttgctagaggcacagaggagcaacatccaacctgcttttgtggggaacggtgcggctccaattcctgcgtcgccaaaggtgctagcgcacccaaacggcgcatctaccaatgctattggtgtggtctgcgagttctagcctactcgtttctcccctactcactcattcacgcacaaaaactgtgttgtaactacaagattcagcccacgcacgggatgtgcgacaaccgcaagattgactcaagcgcggaaagcgctgtaaccacatgctgttagtccctttatggctgcgaaatggctatccacctcggatcactgaactggagctcgaccctccttagtaagggaaccgagaggccttcttgcaacaagctccgacacagagtccacgtgattgctaccaccatgagtacatggttctcccctctcgacccaggacttctttttgaatatccacggctcgatccagagggtggggcatgatccccctagcatagcgagctacagcgggaactgtagctaggccttagcgtgccttggatactgcctgatagggcgacggcctagtcgtgtcggttctataggtagcacatacaaat

SEQ ID NO: 17489 - DNA, 670 bp, synthetic construct
  source 1..670: mol_type = other DNA
tttgaaatggggggctgggcccttatgcccagtccttcctttccccttccggggggtaaaccggctgtgtttgctagaggcacagaggagcaacatccaacctgcttttgtggggaacggtgcggctccaattcctgcgtcgccaaaggtgttagcgcacccaaacggcgcatctaccaatgctattggtgtggtctgcgagttctagcctactcgttttcttcccctactcactcattcacgcacaaaaagtgtgttgtaactacaagatttagccctcgcacgggatgtgcgataaccgcaagattgactcaagcgcggaaagcgctgtaaccacatgctgttagtccctccgtggctgcgagatggctatccacctcggatcactgaactggagctcgaccctccttagtaagggaaccgagaggccttcttgcaacaagctccgacacagagtccacgtgattgctaccaccatgagtacatggttctcccctctcgacccaggacttctttttgaatatccacggctcgatccagagggtggggcatgatccccctagcatagcgagctacagcgggaactgtagctaggccttagcgtgccttggatactgcctgatagggcgacggcctagtcgtgtcggttctataggtagcacatacaaat

SEQ ID NO: 17490 - DNA, 669 bp, synthetic construct
  source 1..669: mol_type = other DNA
tttgaaatggggggctgggccctcatgtccagtccttcctttccccttccggggggtaagccggctgtgtttgctagaggcacagaggagcaacatccaacctgcttttgtgggaaacggtgcggctccaattcctgcgtcgccaaaggtgttagcgcacccaaacggcgcatctaccaatgctattggtgtggtctgcgagttctagcctactcgttttctcccctatcaatccactcacgcacaaaaattgtgttgtgactacaagatttagccctcgcacgagatatgcgataaccacaagactgactcaagcgcggaaagcgctgtaaccacatgctgttagtccctttatggctgcgagatggctatccacctcggatcactgaactggagctcgaccctccttagtaagggaaccgagaggccttcttgcaacaagctccgacacagagtccacgtgattgctaccaccatgagtacatggttctcccctctcgacccaggacttctttttgaatatccacggctcgatccagagggtggggcatgatccccctagcatagcgagctacagcgggaactgtagctaggccttagcgtgccttggatactgcctgatagggcgacggcctagtcgtgtcggttctataggtagcacatacaaat

SEQ ID NO: 17491 - DNA, 668 bp, synthetic construct
  source 1..668: mol_type = other DNA
tttgaaatggggggctgggccctcatgcccagtccttcctttccccttccggggggtaaaccggctgtgtttgctagaggcacagaggagcaacatccaacctgctttcgtggggaacggtgcggctccaattcctgcgtcgccaaaggtgttagcgcacccaaacggcgcatctaccaatgccattggtgtggtctgcgagttctagcctactcgtttttcccctactcactcattcacgcacaaaaagtgtgttgtaactacaagatttagccctcgcacgagatgtgtggtaaccgtaagattgactcaagcgcggaaagcgctgtaaccacatgctgttagtccctttatggctgcgagatggctatccacctcggatcactgaactggagctcgaccctccttagtaagggaaccgagaggccttcttgcaacaagctccgacacagagtccacgtgattgctaccaccatgagtacatggttctcccctctcgacccaggacttctttttgaatatccacggctcgatccagagggtggggcatgatccccctagcatagcgagctacagcgggaactgtagctaggccttagcgtgccttggatactgcctgatagggcgacggcctagtcgtgtcggttctataggtagcacatacaaat

SEQ ID NO: 17492 - DNA, 668 bp, synthetic construct
  source 1..668: mol_type = other DNA
tttgaaatggggggctgggccctcatgcccagtccttcctttccccttccggggggtaaaccggctgtgtttgctagaggcacagaggagcaacatccaacctgcttttgtggggaacggtgcggctccaatttctgcgtcgccaaaggtgttagcgcacccaaacggcgcatctaccaatgccattggtgtggtctgcgggttctagcctactcgtttttcccctactcactcattcacgcacaaaaagtgtgttgtaactacaagatttagccctcgcacgagatgtgcggtaaccgtaagattgactcaagcgcggaaagcgctgtaaccacatgctgttagtccctttatggctgcgagatggctatccacctcggatcactgaactggagttcgaccctccttagtaagggaaccgagaggccttcttgcaacaagctccgacacagagtccacgtgactgctaccaccatgagtacatggttctcccctctcgacccaggacttctttttgaatatccacggctcgatccagagggtggggcatgatccccctagcatagcgagctacagcgggaactgtagctaggccttagcgtgccttggatactgcctgatagggcgacggcctagtcgtgtcggttctataggtaacacatacaaat

SEQ ID NO: 17493 - DNA, 668 bp, synthetic construct
  source 1..668: mol_type = other DNA
tttgaaatggggggctgggccctcatgtccagtccttcctttccccttccggggggtaaaccggctgtgtttgctagaggcacagaggagcaacatccaacctgcttttgtggggaacggtgcggctccaattcctgcgtcgccaaaggtgttagcgcacccaaacggcgcatctaccaatgctattggtgtggtctgcgagttctagcctactcgtttctcccttactcactcattcacgcacaaaaactgcgttgtaactacaagatttagccctcgcacgggatgtgcgataaccgcaagattgactcaagcgcggaaagcgctgtaaccacatgctgttagtccctttatggctgcgagatggctatccacctcggatcactgaactggagctcgaccctccttagtaagggaaccgagaggccttcttgcaacaagctccgacacagagtccacgtgattgctaccaccatgagtacatggttctcccctctcgacccaggacttctttttgaatatccacggctcgatccagagggtggggcatgatccccctagcatagcgagctgcagcgggaactgtagctaggccttagcgtgccttggatactgcctgatagggcgacggcctagtcgtgtcggttctataggtagcacatacaaat

SEQ ID NO: 17494 - DNA, 668 bp, synthetic construct
  source 1..668: mol_type = other DNA
tttgaaatggggggctgggccctcatgtccagtccttcctttccccttccggggggtaaaccggctgtgtttgctagaggcacagaggagcaacatccaacctgcttttgtggggaacggtgcggctccaattcctgcgtcgccaaaggtgttagcgcacccaaacggcgcatctaccaatgctattggtgtggtctgcgagttctagcctactcgtttctcccttactcactcattcacgcacaaaaactgtgttgtaactacaagatttagccctcgcacgggatgtgcgataaccgcaagattgactcaagcgcggaaagcgctgtaaccacatgctgttagtccctttatggctgcgagatggctatccacctcggatcactgaactggagctcgaccctccttagtaagggaaccgagaggccctcttgcaacaagctccgacacagagtccacgtgattgctaccaccatgagtacatggttctcccctctcgacccaggacttctttttgaatatccacggctcgatccagagggtggggcatgatccccctagcatagcgagctgcagcgggaactgtagctaggccttagcgtgccttggatactgcctgatagggcgacggcctagtcgtgtcggttctataggtagcacatacaaat

SEQ ID NO: 17495 - DNA, 668 bp, synthetic construct
  source 1..668: mol_type = other DNA
tttgaaatggggggctgggccctcatgtccagtccttcctttccccttccggggggtaaaccggctgtgtttgctagaggcacagaggagcaacatccaacctgcttttgtggggaacggtgcggctccaattcctgcgtcgccaaaggtgttagcgcacccaaacggcgcatctaccaatgctattggtgtggtctgcgagttctagcctactcgtttctcccttactcactcattcacgcacaaaaactgtgttgtaactacaagatttagccctcgcacgggatgtgcgataaccgcaagattgactcaagcgcggaaagcgctgtaaccacatgctgttagtccctttatggctgcgagatggctatccacctcggatcactgaactggagctcgaccctccttagtaagggaaccgagaggccttcttgcaacaagctccgacacagagtccacgtgattgctaccaccatgagtacatggttctcccctctcgacccaggacttctttttgaatatccacggctcgatccagagggtggggcatgatccccctagcatagcgagctgcagcgggaactgtagctaggccttagcgtgccttggataccgcctgatagggcgacggcctagtcgtgtcggttctataggtagcacatacaaat

SEQ ID NO: 17496 - DNA, 668 bp, synthetic construct
  source 1..668: mol_type = other DNA
tttgaaatggggggctgggccctcatgtccagtccttcctttccccttccggggggtaaaccggctgtgtttgctagaggcacagaggagcaacatccaacctgcttttgtggggaacggtgcggctccaattcctgcgtcgccaaaggtgttagcgcacccaaacggcgcatctaccaatgctattggtgtggtctgcgagttctagcctactcgtttctcccttactcactcattcacgcacaaaagctgtgttgtaactacaagatttagccctcgcacgggatgtgcgataaccgcaagattgactcaagcgcggaaagcgctgtaaccacatgctgttagtccctttatggctgcgagatggctatccacctcggatcactgaactggagcccgaccctccttagtaagggaaccgagaggccttcttgcaacaagctccgacacagagtccacgtgattgctaccaccatgagtacatggttctcccctctcgacccaggacttctttttgaatatccacggctcgatccagagggtggggcatgatccccctagcatagcgagctgcagcgggaactgtagctaggccttagcgtgccttggatactgcctgatagggcgacggcctagtcgtgtcggttctataggtagcacatacaaat

SEQ ID NO: 17497 - DNA, 668 bp, synthetic construct
  source 1..668: mol_type = other DNA
tttgaaatggggggctgggccctcatgcccagtccttcctttccccttccggggggtaaaccggctgtgtttgctagaggcacagaggagcaacatccaacctgcttttgtggggaacggtgcggctccgattcctgcgtcgccaaaggtgttagcgcacccaaacggcgcatctaccaatgctattggtgtggtctgcgagttctagcctactcgtttctcccccatccactcactcgcgcacaaaaagtgtgttgtgactacaagatttagccctcgcacgggatgtgcgataaccacaagattgactcaagcgcggaaagcgctgtaaccacatgctgttagtccctttatggctgcgagatggctatccacctcggatcactgaactggagctcgaccctccttagtaagggaaccgagaggccttcttgcaacaagctccgatacagagtccacgtgattgctaccaccatgagtacatggttctcccctctcgacccaggacttctttttgaatatccacggctcgatccagagggtggggcatgatccccctagcatagcgagctacagcgggaactgtagctaggccttagcgtgccttggatactgcctgatagggcgacggcctagtcgtgtcggttctataggtagcacatacaaat

SEQ ID NO: 17498 - DNA, 668 bp, synthetic construct
  source 1..668: mol_type = other DNA
tttgaaatggggggctgggccctcatgcccagtccttcctttccccttccggggggtaaaccggctgtgtttgctagaggcacagaggagcaacatccaacctgcttttgtggggaacggtgcggctccgattcctgcgtcgccaaaggtgttagcgcacccaaacggcgcatctaccaatgctattggtgtggtctgcgagttctagcctactcgtttctcccccatccactcactcgcgcacaaaaagtgtgttgtgactacaagatttagccctcgcacgggatgtgcgataaccacaagattgactcaagcgcggaaagcgctgtaaccacatgctgttagtccctttatggctgcgagacggctatccacctcggatcactgaactggagctcgaccctctttagtaagggaaccgagaggccttcttgcaacaagctccgacacagagtccacgtgattgctaccaccatgagtacatggttctcccctctcgacccaggacttctttttgaatatccacggctcgatccagagggtggggcatgatccccctagcatagcgagctacagcgggaactgtagctaggccttagcgtgccttggatactgcctgatagggcgacggcctagtcgtgtcggttctataggtagcacatataaat

SEQ ID NO: 17499 - DNA, 668 bp, synthetic construct
  source 1..668: mol_type = other DNA
tttgaaatggggggctgggccctcatgcccagtctttcctttccccttccggggggtaaaccggctgtgtttgctagaggcacagaggagcaacatccaacctgcttttgtggggaacggtgcggctccgattcctgcgtcgccaaaggtgttagcgcacccaaacggcgcatctaccaatgctattggtgtggtctgcgagttctagcctactcgtttctcccccatccactcactcgcgcacaaaaagtgtgttgtgactacaagatttagccctcgcacgggatgtgcgataaccacaagattgactcaagcgcggaaagcgctgtaaccacatgctgttagtccctttatggctgcgagatggctatccacctcggatcactgaactggagctcgaccctccttagtaagggaaccgagaggccttcttgcaacaagctccgacacagagtccacgtgattgctaccaccatgagtacatggttctcccctctcgacccaggacttctttttgaatatccacggctcgatccagagggtggggcatgatccccctagcatagcgagctacagcgggaactgtagctaggccttagcgtgccttggatactgcctgatagggcgacggcctagtcgtgtcggttctataggtagcacatataaat

SEQ ID NO: 17500 - DNA, 668 bp, synthetic construct
  source 1..668: mol_type = other DNA
tttgaaatggggggctgggccctcatgcctagtccttcctttccccttccggggggtaaaccggctgtgtttgctagaggcacagaggagcaacatccaacctgctcttgtggggaacggtgcggctccaattcctgcgtcgccaaaggtgttagcgcacccaaacggcgcatctaccaatgctattggtgtggtctgcgagttctagcctactcgtttctcccctatccactcactcacgcacaaaaagtgtgttgtaaccgcaagatttagccctcgcacgagatgtgcgataaccgcaagattgactcaagcgcggaaagcgctgtaaccacatgctgttagtccctttatggctgcgagatggctatccacctcggatcactgaactggagctcgaccctccttagtaagggaaccgagaggccttcttgcaacaagctccgacacagagtccacgtgattgctaccaccatgagtacatggttctcccctctcgacccaggacttctttttgaatatccacggctcggctcagagggtggggcatgatccccctagcatagcgagctacagcgggaactgtagctaggccttagcgtgctttggatactgcctgatagggcgacggcctagtcgtgtcggttctataggtagcacatacaaat

SEQ ID NO: 17501 - DNA, 668 bp, synthetic construct
  source 1..668: mol_type = other DNA
tttgaaatggggggctgggccctcatgcctagtccttcctttccccttccggggggtaaaccggctgtgtttgctagaggcacagaggagcaacatccaacctgctcttgtggggaacggtgcggctccaattcctgcgtcgccaaaggtgttagcgcacccaaacggcgcatctaccaatgctattggtgtggtctgcgagttctagcctactcgtttctcccctatccactcactcacgcacaaaaagtgtgttgtaaccgcaagatttagccctcgcacgagatgtgcgataaccgcaagattgtctcaagcgcggaaagcgctgtaaccacatgctgttagtccctttatggctgcgagatggctatccacctcggatcactgaactggagctcgaccctccttagtaagggaaccgagaggccttcttgcaacaagctccgacacagagtccacgtgattgctaccaccatgagtacatggttctcccctctcgacccaggacttctttttgaatatccacggctcgacccagagggtggggcatgatccccctagcatagcgagctacagcgggaactgtagctaggccttagcgtgctttggatactgcctgatagggcgacggcctagtcgtgtcggttctataggtagcacatacaaat

SEQ ID NO: 17502 - DNA, 668 bp, synthetic construct
  source 1..668: mol_type = other DNA
tttgaaatggggggctgggccctcatgcctagtccttcctttccccttccggggggtaaaccggctgtgtttgctagaggcacagaggagcaacatccaacctgctcttgtggggaacggtgcggctccaattcctgcgtcgccaaaggtgttagcgcacccaaacggcgcatctaccaatgctattggtgtggtctgcgagttctagcctactcgtttctcccctatccactcactcacgcacaaaaagtgtgttgtaaccgcaagatttagccctcgcacgagatgtgcgataaccgcaagattgactcaagcgcggaaagcgctgtaaccacatgctgttagtccctttatggctgcgagatggctatccacctcggatcactgaactggagctcgaccctccttagtaagggaaccgagaggccttcttgcaacaagctccgacacagagtccacgtgattgctaccaccatgagtacatggttctcccctctcgacccaggacttctttttgaatatccacggctcgacccagagggtggggcatgatccccctagcatagcgagctacagcgggaactgtagctaggccttagcgtgctttggatactgcctgatagggcgacggcctagtcgtgtcggttctataggtagcacatacaaat

SEQ ID NO: 17503 - DNA, 668 bp, synthetic construct
  source 1..668: mol_type = other DNA
tttgaaatggggggctgggccctcatgcccagtccttcctttccccttccggggggtaaaccggctgtgtttgctagaggcacagaggagcaacacccaacctgcttttgtggggaacggtgcggctccaattcctgcgtcgccaaaggtgttagcgcacccaaacggcgcatctaccaatgctattggtgtggtctgcgagttctagcctactcgtttctcccctatccactcactcacgcacaaaaagtgtgttgtaactacaagacttagccctcgcacgagatgtgcgataaccgcaagattgactcaagcgcggaaagcgctgtaaccacatgctgttagtccctttatggctgcgagatggctatccacctcggatcactgaactggagctcgaccctccttagtaagggaaccgagaggccttcttgcaacaagctccgacacagagtccacgtgattgctaccaccatgagtacatggttctcccctctcgacccaggacttctttttgaatatccacggctcgacccagagggtggggcatgatccccctagcatagcgagctacagcgggaactgtagctaggccttagcgtgctttggatactgcctgatagggcgacggcctagtcgtgtcggttctataggtagcacatacaaat

SEQ ID NO: 17504 - DNA, 668 bp, synthetic construct
  source 1..668: mol_type = other DNA
tttgaaatggggggctgggccctcatgcccagtccttcctttccccttccggggggtaaaccggctgtgtttgctagaggcacagaggagcaacacccaacctgcttttgtggggaacggtgcggctccaattcctgcgtcgccaaaggtgttagcgcacccaaacggcgcatctaccaatgctattggtgtggtctgcgagttctagcctactcgtttctcccctatccactcactcacgcacaaaaagtgtgttgtaactacaagacttagccctcgcacgagatgtgcgataaccgcaagattgactcaagcgcggaaagcgctgtaaccacatgctgttagtccctttatggctgcgagatggctatccacctcggatcactgaactggagctcgaccctccttagtaagggaaccgagaggccttcttgcatcaagctccgacacagagtccacgtgattgctaccaccatgagtacatggttctcccctctcgacccaggacttctttttgaatatccacggctcgacccagagggtggggcatgatccccctagcatagcgagctacagcgggaactgtagctaggccttagcgtgctttggatactgcctgatagggcgacggcctagtcgtgtcggttctataggtagcacatacaaat

SEQ ID NO: 17505 - DNA, 668 bp, synthetic construct
  source 1..668: mol_type = other DNA
tttgaaatggggggctgggccctcatgcccagtccttcctttccccttccggggggtaaaccggctgtgtttgctagaggcacagaggagcaacatccaacctgctcttgtggggaacggtgcggctccaattcctgcgtcgccaaaggtgttagcgcacccaaacggcgcatctaccaatgctattggtgtggtctgcgagttctagcctactcgtttctcccctattcactcactcacgcacaaaaagtgtgttgtaactacaaggcttagccctcgcacgagaagtgcgataaccgcaagattgactcaagcgcggaaagcgctgtaaccacatgctgttagtccctttatggctgcgagatggctatccacctcggatcactgaactggagctcgaccctccttagtaagggaaccgagaggccttcttgcaacaagctccgacacagagtccacgtgattgctaccaccatgagtacatggttctcccctctcgacccaggacttctttttgaatatccacggctcgacccagagggtggggcatgatccccctagcatagcgagctacagcgggaactgtagctaggccttagcgtgctttggatactgcctgatagggcgacggcctagtcgtgtcggttctataggtagcacatacaaat

SEQ ID NO: 17506 - DNA, 668 bp, synthetic construct
  source 1..668: mol_type = other DNA
tttgaaatggggggctgggccctcatgcccagtccttcctttccccttccggggggtaaaccggctgtgtttgctagaggcacagaggagcaacatctaacctgcttttgtggggaacggtgcggctccgattcctgcgtcgccaaaggtgttagcgcacccaaacggcgcatctaccaatgctattggtgtggtctgcgagttctagcctactcgtttctcccccatccactcactcgcgcacaaaaagtgtgttgtgactacaagatttagccctcgcacgggatgtgcgataaccacaagattgactcaagcgcggaaagcgctgtaaccacatgctgttagtccctttatggctgcgagatggctatccacctcggatcactgaactggagctcgaccctccttagtaagggaaccgagaggccttcttgcaacaagctccgacacagagtccacgtgattgctaccaccatgagtacatggttctcccctctcgacccaggacttctttttgaatatccacggctcgatccagagggtggggcatgatccccctagcatagcgagctacagcgggaactgtagctaggccttagcgtgccttggatactgcctgatagggcgacggcctagtcgtgtcggttctataggtagcacatacaaat

SEQ ID NO: 17507 - DNA, 668 bp, synthetic construct
  source 1..668: mol_type = other DNA
tttgaaatggggggctgggccctcatgcccagtccttcctttccccttccggggggtaaaccggctgtgtttgctagaggcacagaggagcaacatccaacctgcttttgtggggaacggtgcggctccaattcctgcgtcgccaaaggtgttagcgcacccaaacggcgcatctaccaatgctattggtgtggtctgcgagttctagcctactcgtttctcccctactcactcattcacacacaagaactgtgttgtgactacaagatttggccctcgcacgggatgtgcgataaccgcaagattgactcaagtgcggaaagcgctgtaaccacatgctgttagtccctttatggctgcgagatggctatccacctcgggtcactgaactggagctcgaccctccttagtaagggaaccgagaggccttcctgcaacaagctccgacacagagtccacgtgattgctaccaccatgagtacatggttctcccctctcgacccaggacttctttttgaatatccacggctcgatccagagggtggggcatgatccccctagcatagcgagctacagcgggaactgtagctaggccttagcgtgccttggatactgcctgatagggcgacggcctagtcgtgtcggttctataggtagcacatacaaat

SEQ ID NO: 17508 - DNA, 668 bp, synthetic construct
  source 1..668: mol_type = other DNA
tttgaaatggggggctgggccctcaagcccagtccttcctttccccttccggggggtaaaccggctgtgtttgctagaggcacagaggagcaacatccaacctgcttttgtggggaacggtgcggctccaattcctgcgtcgccaaaggtgttagcgcacccaaacggcgcatctaccaatgctattggtgtggtctgcgagttctagcctactcgtttctcccctactcactcattcacgcacaaaaactgtgttgtaactacaagatttagccctcgcacgggatgtgcgataaccgcaagattgactcaagcgcggaaagcgctgtaaccacatgctgttagtccctttatggctgcgagatggctatccacctcggatcactgaactggagctcgaccctccttagtaagggaaccgagaggccttcttgcaacaagctccgacacagagtccacgtgattgctaccaccatgagtacatggttctcccctctcgacccaggacttctttttgaatatccacggctcgatccagagggtggggcatgatccccctagcatagcgagctacagcgggaactgtagctaggccttagcgtgccttggatactgcctgatagggcgacggcctagtcgtgtcggttctataggtagcacatacaaat

SEQ ID NO: 17509 - DNA, 661 bp, synthetic construct
  source 1..661: mol_type = other DNA
aattgggggctgggccctgacgcccaacccttcctttccccttccggggggttaaccggctgtgtttgctagaggcacagaggggcaacatccaacctgcttttgtggggaacggtgcggctccgattcccgcgtcgccaaaggtgttagcgcacccaaacggcgcatctaccaatgttattggtgtggtctgcgagttctagcctactcgtttctcccccgaccattcactcgcccacgaaaagtgtgttgtaaccataagatttaacccccgcacgggatgtgcgataaccgtaagactgactcaagcgcggaaggcgctgtaaccacatgctgttagttcctttatggctgcaagatggctaccaacctcggatcactgaactggagctcgaccccccttagtaagggaaccgagaggccttcgtgcaaaaagctccgacacagagtccacgtgactgctaccaccatgagtacatggttctcccctctcgacccaggacttctttttgaatatccacggctcgatacagagggtggggcatgacccctagcatagcgagctacagcgggaactgtagctaggtcttagcgcaccttggatactgcctgatagggcgacggcctagtcgtgtcggttctataggtagcacatataaat

SEQ ID NO: 17510 - DNA, 668 bp, synthetic construct
  source 1..668: mol_type = other DNA
tttttgatggggggctgggccctcacgcccagtccttcctttccccttccggggggtaaaccggctgtgtttgctagaggcacagaggagcaacacccaacctgcttttgtggggaacggtgcggctccaattcctgcgtcgccaaaggtattagcgcacccaaacggcgcatctaccaatgctattggtgtggtctgcgagttctagcctactcgtttctcccctactcactcattcacgcacaaaaactgtgttgtaactacaagatttagccctcgcacgggatgtgcgacaaccgcaagattgactcaagcgcggaaagcgctgtaaccacacgttgttagtccctttatggctgcgagatggctatccacctcggatcactgaactggagctcgaccctccttagtaagggaaccgagaggccttcttgcaacaagctccgacacagagtccacgtgattgctaccaccatgagtacatggttctcccctctcgacccaggacttctttttgaatatccacggctcgatccagagggtggggcatgatccccctagcatagcgagctacagcgggaactgtagctaggccttagcgtgccttggatactgcctgatagggcgacggcctagtcgtgtcggttctataggtagcacatacaaat

SEQ ID NO: 17511 - DNA, 668 bp, synthetic construct
  source 1..668: mol_type = other DNA
tttgaaatggggggctgggccctcacgcccagtccttcctttccccttccggggggtaaaccggctgtgtttgctagaggcacagaggagcaacacccaacctgcttttgtggggaacggtgcggctccaattcctgcgtcgccaaaggtattagcgcacccaaacggcgcatctaccaatgctattggtgtggtctgcgagttctagcctactcgtttctcccctactcactcattcacgcacaaaaactgtgttgtaactacaagatttagccctcgcacgggatgtgcgacaaccgcaagattgactcaagcgcggaaagcgctgtaaccacacgttgttagtccctttatggctgcgagatggctatccacctcggatcactgaactggagctcgaccctccttagtaagggaaccgagaggccttcttgcaacaagctccgacacagagtccacgtgattgctaccaccatgagtacatggttctcccctctcgacccaggacttctttttgaatatccacggctcgatccagagggtggggcatgatccccctagcatagcgagctacagcgggaactgtagctaggccttagcgtgccttggatactgcctgatagggcgacggcctagtcgtgtcggttctataggtagcacatacaaat

SEQ ID NO: 17512 - DNA, 667 bp, synthetic construct
  source 1..667: mol_type = other DNA
ttgaaatggggggctgggccctcatgcccagtccttcctttccccttccggggggtaaaccggctgtgtttgctagaggcacagaggagcaacatccaacctgcttttgtggggaacggtgcggctccaattcctgcgtcgccaaaggtgttagcgcacccaaacggcgcatctaccaatgctattggtgtggtctgcgagttctagcctactcgtttctcccctactcactcattcacgcacaaaaactgtgttgtaactacaagatttagccctcgcacgggatgtgcgataaccgcaagattgactcaagcgcggaaagcgctgtaaccacatgctgttagtccctttatggctgcgagatggctatccacctcggatcactgaactggagctcgaccctccttagtaagggaaccgagaggccttcttgcaacaagctccgacacagagtccacgtgattgctaccaccatgagtacatggttctcccctctcgacccaggacttctttttgaatatccacggctcgatccagagggtggggcatgatccccctagcatagcgagctacagcgggaactgtagctaggccttagcgtgccttggatactgcctgatagggcgacggcctagtcgtgtcggttctataggtagcacatacaaat

SEQ ID NO: 17513 - DNA, 668 bp, synthetic construct
  source 1..668: mol_type = other DNA
tttgaaatggggggctgggccctcatgtccagtccttcctttccccttccggggggtaaaccggctgtgtttgctagaggcacagaggagcaacatccaacctgcttttgtggggaacggtgcggctccaattcctgcgtcgccaaaggtgttagcgcacccaaacggcgcatctaccaatgctattggtgtggtctgcgagttctagcctactcgtttctcccttactcactcattcacgcacaaaaactgtgttgtaactacaagatttagccctcgcacgggatgtgcgataaccgcaagattgactcaagcgcggaaagcgctgtaaccacatgctgttagtccctttatggctgcgagatggctatccacctcggatcactgaactggagctcgaccctccttagtaagggaaccgagaggccttcttgcaacaagctccgacacagagtccacgtgattgctaccaccatgagtacatggttctcccctctcgacccaggacttctttttgaatatccacggctcgatccagagggtggggcatgatccccctagcatagcgagctgcagcgggaactgtagctaggccttagcgtgccttggatactgcctgatagggcgacggcctagtcgtgtcggttctataggtagcacatacaaat

SEQ ID NO: 17514 - DNA, 668 bp, synthetic construct
  source 1..668: mol_type = other DNA
tttgaaatggggggctgggccctcatgtccagtccttcctttccccttccggggggtaaaccggctgtgtttgctagaggcacagaggagcaacatccaacctgcttttgtggggaacggtgcggctccaattcctgcgtcgccaaaggtgttagcgcacccaaacggcgcatctaccaatgctattggtgtggtctgcgagttctagcctactcgtttctcccttactcactcattcacgcacaaaaactgtgttgtaactacaagatttagccctcgcacgggatgtgcgataaccgcaagattgactcaagcgcggaaagcgctgtaaccacatgctgttagtccctttatggctgcgagatggctatccacctcggatcactgaactggagctcgaccctccttagtaagggaaccgagaggccttcttgcaacaagctccgacacagagtccacgtgattgctaccaccatgagtacatggttctcccctctcgacccaggacttctttttgaatatccacggctcgatccagagggtggggcatgatccccctagcatagcgagctgcagcgggaactgtagctaggccttagcgtgccttggatactgcctgatagggcgacggcctagtcgtgtcggttctatgggtagcacatacaaat

SEQ ID NO: 17515 - DNA, 668 bp, synthetic construct
  source 1..668: mol_type = other DNA
tttgaaatggggggctgggccctcatgcccagtccttcctttccccttccggggggtaaaccggctgtgtttgctagaggcacagaggagcaacatccaacctgcttttgtggggaacggtgcggctccaattcctgcgtcgccagaggtgttagcgcacccaaacggcgcatctaccaatgctattggtgtggtctgcgagttctagcctactcgtttctcccttactcactcattcgcgcacaaaaactgtgttgtaactacaagatttagccctcgcacgggatgtgcgataaccgcaagattgactcaagcgcggaaagcgctgtaaccacatgctgttagtccctttatggctgcgagatggctatccacctcggatcactgaactggagctcgaccctccttagtaagggaaccgagaggccttcttgcaacaagctccgacacagagtccacgtgattgctaccaccatgagtacatggttctcccctctcgacccaggacttctttttgaatatccacggctcgatccagagggtggggcatgatccccctagcatagcgagctgcagcgggaactgtagctaggccttagcgtgccttggatactgcctgatagggcgacggcctagtcgtgtcggttctataggtagcacatacaaat

SEQ ID NO: 17516 - DNA, 668 bp, synthetic construct
  source 1..668: mol_type = other DNA
tttgaaatggggggctgggccctcatgcccaacccttcctttccccttccggggggtaaaccggctgtgtttgctagaggcacagaggagcaacatccaacctgcttttgtggggaacggtgcggctccaattcctgcgtcgccaaaggtgttagcgcacccaaacggcgcatctaccaatgctattggtgtggtctgcgagttctagcctactcgtttcttccctgctcactcatttacacacaaaaactgtgttgtaactacaagatttggccctcgcacgggatgtgcgataatcgcaagactgactcaagcgcggaaagcgctgtaaccacatgctgttagtccctttatggctgcgagatggctatccacctcggatcactgaactggagctcgaccctccttagtaagggaaccgagaggccttcctgcaacaagctccgacacagagtccacgtgattgctaccaccatgagtacatggttctcccctctcgacccaggacttctttttgaatatccacggctcgatccagagggtggggcatgatccccctagcatagcgagctacagcgggaactgtagctaggccttagcgtgccttggatactgcctgatagggcgacggcctagtcgtgtcggttctataggtagcacatacaaat

SEQ ID NO: 17517 - DNA, 668 bp, synthetic construct
  source 1..668: mol_type = other DNA
tttgaaatggggggctgggccctcatgcccagtccttcctttccccttccggggggtaaaccggctgtgtttgctagaggcacagaggagcaacatccaacctgcttttgtggggaacggtgcggctccaattcctgcgtcgccaaaggtgttagcgcacccaaacggcgcatctaccaatgctattggtgtggtctgcgagttctagcctactcgtttctcccctactcactcattcacgcacaaaaactgtgttgtaaccacaagatttagccctcgcacgggatgtgcgataaccgcaagattgactcaagcgcggaaagcgctgtaaccacatgctgttagtccctttatggctgcgagatggctatccacctcggatcactgaactggagctcgaccctccttagtaagggaaccgagaggccttcttgcaacaagctccgacacagagtccgcgtgattgctaccaccatgagtacatggttctcccctctcgacccaggacttctttttgaatatccacggctcgatccagagggtggggcatgatccccctagcatagcgagctacagcgggaactgtagctaggccttagcgtgccttggatactgcctgatagggcgacggcctagtcgtgtcggttctataggtagcacatacaaat

SEQ ID NO: 17518 - DNA, 667 bp, synthetic construct
  source 1..667: mol_type = other DNA
ttgaaatggggggctgggccctcatgcccagtccttcctttccccttccggggggtaaaccggctgtgtttgctagaggcacagaggagcaacatccaacctgcttttgtggggaacggtgcggctccaattcctgcgtcgccaaaggtgttagcgcacccaaacggcgcatctaccaatgctattggtgtggtctgcgagttctagcctactcgtttctcccctactcactcattcacgcacaaaaactgtgttgtaactacaagatttagccctcgcacgggatgtgcgataaccgcaagattgactcaagcgcggaaagcgctgtaaccacatgctgttagtccctttatggctgcgagatggctatccacctcggatcactgaactggagctcgaccctccttagtaagggaaccgagaggccttcttgcaacaagctccgacacagagtccacgtgattgctaccaccatgagtacatggttctcccctctcgacccaggatttctttttgaatatccacggctcgatccagagggtggggcatgatccccctagcatagcgagctacagcgggaactgtagctaggccttagcgtgccttggatactgcctgatagggcgacggcctagtcgtgtcggttctataggtagcacatacaaat

SEQ ID NO: 17519 - DNA, 667 bp, synthetic construct
  source 1..667: mol_type = other DNA
tttgaaatggggggctgggccctcatgcccagtccttcctttccccttccggggggtaaaccggctgtgtttgctagaggcacagaggagcaacatccaacctgcttttgtggggaacggtgcggctccaattcctgcgtcgccaaaggtgttagcgcacccaaacggcgcatctaccaatgctattggtgtggtctgcgagttctagcctactcgtttctcccttactcactcattcacgcacaaaaactgtgttgtaactacaagatttagccctcgcacgggatgtgcgataaccgcaagattgactcaagcgcggaaagcgctgtaaccacatgctgttagtccctttatggctgcgagatggctatccacctcggatcactgaactggagctcgaccctccttagtaagggaaccgagaggccttcttgcaacaagctccgacacagagtccacgtgattgctaccaccatgagtacatggttctcccctctcgacccaggacttctttttgaatatccacggctcgatccagagggtggggcatgatccccctagcatagcgagctgcagcgggaactgtagctaggccttagcgtgccttgatactgcctgatggggcgacggcctagtcgtgtcggttctataggtagcacatacaaat

SEQ ID NO: 17520 - DNA, 649 bp, synthetic construct
  source 1..649: mol_type = other DNA
tgctgagcttctctaggagagcccttttcccagccagaggtggctggttaaataatacctattgtaacaagacatctaagatacaacaaccacacacctggtttccactggccgaaggcaactagcaataaggtaggtgggttcagacgcttaaagtgtgttgtacatattcttttctaacctgtgttctacacagggtggcagatggcgtgccataactctaatagtgagataccacgcttgtggaccttatgctcacacagccatcctctagtaagtttgtaagacgtctgatgacgtgtgggaacttgttggagataacagtttgctgcaaagcatcccactgccagcggatccacatctggtaacagatgcctctggggccaaaagccaaggtttaacagaccctttgggattggttcaaacctgaactgttatggaagacatttagtacctgctgatttggtagtaatgcaaacactagttgtaaggcccacgaaggatgcccagaaggtacccgtaggtaacaagtgacactatggatctgatctggggccagctacctctatctaggtgagttggttaaaaaacgtctagtgggccaaacccaggggggatccctggtttcctttttatttagataaccact

SEQ ID NO: 17521 - DNA, 667 bp, synthetic construct
  source 1..667: mol_type = other DNA
ttgaaagggggggctgggccctcatgcccagtccttcctttccccttccggggggtaaaccggctgtgtttgctagaggcacagaggagcaacatccaacctgcttttgtggggaacagtgcggctccaattcctgcgtcgccaaaggtgttagcgcacccaaacggcgcatctaccaatgctattggtgtggtctgcgagttctagcctactcgtttctcccctactcactcatttacacacaaaaactgtgttgtaactacaggatttggccctcgcacgggatgtgcgataaccgcaagattgactcaagcgcggaaagcgttgtaaccacatgctgttagtccctttatggctgtgagatggctatccacctcggatcactgaactggagctcgaccctccttagtaagggaaccgagaggccttcctgcaacaagctccgacacagagtccacgtgattgctaccaccatgagtacatggttctcccctctcgacccaggacttctttttgaatatccacggctcgatccagagggtggggcatgatccccctagcatagcgagctacagcgggaactgtagctaggccttagcgtgccttggatactgcctgatagggcgacggcctagtcgtgtcggttctataggtagcacatacaaat

SEQ ID NO: 17522 - DNA, 667 bp, synthetic construct
  source 1..667: mol_type = other DNA
ttgaaagggggggctgggccctcatgcccagtccttcctttccccttccggggggtaaaccggctgtgtttgctagaggcacagaggagcaacatccaacctgcttttgtggggaacagtgcggctccaattcctgcgtcgccaaaggtgttagcgcacccaaacggcgcatctaccaatgctattggtgtggtctgcgagttctagcctactcgtttctcccctactcactcatttacacacaaaaactgtgttgtaactacaagatttggccctcgcacgggatgtgcgataaccgcaagattgactcaagcgcggaaagcgttgtaaccacatgctgttagtccctttatggctgtgagatggctatccacctcggatcactgaactggagctcgaccctccttagtaagggaaccgagaggccttcctgcaacaagctccgacacagagtccacgtgattgctaccaccatgagtacatggttctcccctctcgacccaggacttctttttgaatatccacggctcgatccagagggtggggcatgatccccctagcatagcgagctacagcgggaactgtagctaggccttagcgtgccttggatactgcctgatagggcgacggcctagtcgtgtcggttctataggtagcacatacaaat

SEQ ID NO: 17523 - DNA, 667 bp, synthetic construct
  source 1..667: mol_type = other DNA
ttgaaagggggggctgggccctcatgcccagtccttcctttccccttccggggggtaaaccggctgtgtttgctagaggcacaggggagcaacatccaacctgcttttgtggggaacagtgcggctccaattcctgcgtcgccaaaggtgttagcgcacccaaacggcgcacctaccaatgctattggtgtggtctgcgagttctagcctactcgtttctcccctactcactcatttacacacaaaaactgtgttgtaactacaagatttggccctcgcacgggatgtgcgataaccgcaagattgactcaagcgcggaaagcgttgtaaccacatgctgttagtccctttatggctgtgagatggctatccacctcggatcactgaactggagctcgaccctccttagtaagggaaccgagaggccttcctgcaacaagctccgacacagagtccacgtgattgctaccaccatgagtacatggttctcccctctcgacccaggacttctttttgaatatccacggctcgatccagagggtggggcatgatccccctagcatagcgagctacagcgggaactgtagctaggccttagcgtgccttggatactgcctgatagggcgacggcctagtcgtgtcggttctataggtagcacatacaaat

SEQ ID NO: 17524 - DNA, 669 bp, synthetic construct
  source 1..669: mol_type = other DNA
tttgaaatggggggctgggccctcatgcccagtccttcctttccccttccggggggtaaaccggctgtgtttgctagaggcacagaggagcaacatccaacctgcttttgtggggaacggtgcggctccaatccctgcgtcgccaaaggtgttagcgcacccaaacggcgcatctaccaatgctattggtgtggtctgcgagttctagcctactcgtttcccccctactcactcattcacgcacaaaaagtgtgttgtaactacaagatttagccctcgcacgggatgtgcgataaccgcaagattgactcaagcgcggaaagcgctgtaaccacatgctgttagtcccttttaaggctgcgagatggctatccacctcggatcactgaactggagctcgaccctccttagtaagggaaccgagaggccttcttgcaacaagctccgacacagagtccacgtgattgctaccaccatgagtacatggttctcccctctcgacccaggacttctttttgaatatccacggctcgatccagagggtggggcatgatccccctagcatagcgagctacagcgggaactgtagctaggccttagcgtgccttggatactgcctgatagggcgacggcctagtcgtgtcggttctataggtagcacatacaaat

SEQ ID NO: 17525 - DNA, 667 bp, synthetic construct
  source 1..667: mol_type = other DNA
ttgaaagggggggctgggccctcatgcccagtccttcctttccccttccggggggtaaaccggctgtgtttgctagaggcacagaggagcaacatccaacctgcttttgtggggaacggtgcggctccaattcctgcgtcgccaaaggtgttagcgcacccaaacggcgcatctaccaatgctattggtgtggtctgcgagttctagcctactcgtttctcccctactcactcattcacgcacaaaaactgtgttgtaactacaagatttagccctcgcacgggatgtgcgataaccgcaagatcgactcaagcgcggaaagcgctgtaaccacatgctgttagtccctttatggctgcgagatggctatccacctcggatcactgaactggagctcgaccctccttagtaagggaaccgagaggccttcttgcaacaagctccgacacagagtccacgtgattgctaccaccatgagtacatggttctcccctctcgacccaggacttctttttgaatatccacggctcgatccagagggtggggcatgatccccctagcatagcgagctacagcgggaactgtagctaggccttagcgtgccttggatactgcctgatagggcgacggcctagtcgtgtcggttctataggtagcacatacaaat

SEQ ID NO: 17526 - DNA, 662 bp, synthetic construct
  source 1..662: mol_type = other DNA
aggaaggactgggcatgagggcccggccccccctttccccttccggggggtaaaccggctgtgtttgctagaggcacagaggagcaacatccaacctgcttttgtggggaacggtgcggctccaattcctgcgtcgccaaaggtgttagcgcacccaaacggcgcatctaccaatgctattggtgtggtctgcgagttctagcctactcgtttctcccctactcactcattcacgcacaaaaactgtgttgtaactacaagatttagccctcgcacgggatgtgcgataaccgcaagattgactcaagcgcggaaagcgctgtaaccacatgctgttagtccctttatggctgcgagatggctgtccacctcggatcactgaactggagctcgaccctccttagtaagggaaccgagaggccttcttgcaacaagctccgacacagagtccacgtgattgctaccaccatgagtacatggttctcccctctcgacccaggacttctttttgaatatccacggctcgatccagagggtggggcatgatccccctagcatagcgagctacagcgggaactgtagctaggccttagcgtgccttggatactgcctgatagggcgacggcctagtcgtgtcggttctataggtagcacatacaaat

SEQ ID NO: 17527 - DNA, 668 bp, synthetic construct
  source 1..668: mol_type = other DNA
ggggaaagggggggctgggccctcatgcccagtccttcctttccccttccggggggtaaaccggctgtgtttgctagaggcacagaggagcaacatccaacctgcttttgtggggaacggtgcggctccaattcctgcgtcgccaaaggtgttaacgcacccaaacggcgcatctaccaatgctattggtgtggtctgcgagttctagcctactcgtttctcccctactcactcattcacgcacaaaaactgtgttgtaactacaagatttagccctcgcacgggatgtgcgataaccgcaagattaactcaagcgcggaaagcgctgtaaccacatgctgttagtccctttatggctgcgagatggctatccacctcggatcactgaactggagctcgaccctccttagtaagggaaccgagaggccttcttgcaacaagctccgacacagagtccacgtgattgctaccaccatgagtacatggttctcccctctcgacccaggacttctttttgaatatccacggctcgatccagagggtggggcatgatccccctagcatagcgagctacagcgggaactgtagctaggccttagcgtgccttggatactgcctgatagggcgacggcctagtcgtgtcggttctataggtagcacatacaaac

SEQ ID NO: 17528 - DNA, 666 bp, synthetic construct
  source 1..666: mol_type = other DNA
tgaaagggggggctgggccctcatgcccagtccttcctttccccttccggggggtaaaccggctgtgtttgctagaggcacagaggagcaacatccaacctgcttttgtggggaacggtgcggctccaattcctgcgtcgccaaaggtgttaccgcacccaaacggcgcatctaccaatgcaattggtgtggtctgcgagttctagcctactcgtttctcccctactcactcattcacgcacaaaaactgtgttgtaactacaagatttagccctcgcacgagatgtgcgataaccgcaagattgactcaagcgcggaaagcgctgtaaccacatgctgttagtccctttatggctgcgagatggctatccacctcggatcactgaactggagctcgaccctccttagtaagggaaccgagaggccttcttgcaacaagctccgacacagagtccacgtgattgctaccaccatgagtacatggttctcccctctcgacccaggacttctttttgaatatccacggctcgatccagagggtggggcatgatccccctagcatagcgagctacagcgggaactgtagctaggccttagcgtgccttggatactgcctgatagggcgacggcctagtcgtgtcggttctataggtagcacatacaaat

SEQ ID NO: 17529 - DNA, 667 bp, synthetic construct
  source 1..667: mol_type = other DNA
ttgaaatggggggctgggccctcatgcccagtccttcctttccccttccggggggtaaaccggctgtgtttgctagaggcacagaggagcaacatccaacctgcttttgtggggaacggtgcggctccaattcctgcgtcgccaaaggtgttagcgcacccaaacggcgcatctaccaatgctattggtgtggtctgcgagttctagcctactcgtttctcccctactcactcattcacgcacaaaaactgtgttgtaactacaagatttagccctcgcacgggatgtgcgataaccgcaagatcgactcaagcgcggaaagcgctgtaaccacatgctgttagtccctttatggctgcgagatggctatccacctcggatcactgaactggagctcgaccctccttagtaagggaaccgagaggccttcttgcaacaagctccgacacagagtccacgtgattgctaccaccatgagtacatggttctcccctctcgacccaggacttctttttgaatatccacggctcgatccagagggtggggcatgatccccctagcatagcgagctacagcgggaactgtagctaggccttagcgtgccttggatactgcctgatagggcgacggcctagtcgtgtcggttctataggtagcacatacaaat

SEQ ID NO: 17530 - DNA, 667 bp, synthetic construct
  source 1..667: mol_type = other DNA
ttttgatggggggctgggccctcacgcccagtccttcctttccccttccggggggtaaaccggctgtgtttgctagaggcacagaggagcaacacccaacctgcttttgtggggaacggtgcggctccaattcctgcgtcgccaaaggtattagcgcacccaaacggcgcatctaccaatgctattggtgtggtctgcgagttctagcctactcgtttctcccctactcactcattcacgcacaaaaactgtgttgtaactacaagatttagccctcgcacgggatgtgcgacaaccgcaagattgactcaagcgcggaaagcgctgtaaccacacgttgttagtccctttatggctgcgagatggctatccacctcggatcactgaactggagctcgaccctccttagtaagggaaccgagaggccttcttgcaacaagctccgacacagagtccacgtgattgctaccaccatgagtacatggttctcccctctcgacccaggacttctttttgaatatccacggctcgatccagagggtggggcatgatccccctagcatagcgagctacagcgggaactgtagctaggccttagcgtgccttggatactgcctgatagggcgacggcctagtcgtgtcggttctataggtagcacatacaaat

SEQ ID NO: 17531 - DNA, 668 bp, synthetic construct
  source 1..668: mol_type = other DNA
tttgaaatggggggctgggccctcatgcccagtccttccttcccccttccggggggtaaaccggctgtgtttgctagaggcacagaggagtaacatccaacctgctcttgtggggaacggtgcggctccaattcctgcgtcgccaaaggtgttagcgcacccaaacggcgcatctaccaatgctattggtgtggtctgcgagttctagcctactcgtttctcccctatccactcattcacgcacaaaaagtgtgttgtaactacaagacttagcccccgcacgagatgtgcgataaccgcaagattgactcaagcgcggaaagcgctgtaaccacatgctgttagttcctttatggctgcgagatggctatccacctcggatcactgaactggagctcgaccctccttagtaagggaaccgagaggccttcttgcaacaagctccgacacagagtccacgtgactgctaccaccatgagtacatggttctcccctctcgacccaggacttctttttgaatatccacggctcgacccagagggtggggcatgatccccctagcatagcgagctacagcgggaactgtagctaggccttagcgtgctttggatactgcctgatagggcgacggcctagtcgtgtcggttctataggtagcacatacaaat

SEQ ID NO: 17532 - DNA, 666 bp, synthetic construct
  source 1..666: mol_type = other DNA
ttgaatggggggctgggccctcatgcccagtccttcctttccccttccggggggtaaaccggctgtgtttgctagaggcacagaggagcaacatccaacctgcttttgtggggaacggtgcggctccaattcctgcgtcgccaaaggtgttagcgcacccaaacggcgcatctaccaatgccattggtgtggtctgcgagttctagcctactcgtttttcccctactcactcattcacgcacaaaaagtgtgttgtaactacaagatttagccctcgcacgggatgtgcggtaaccacaagattgactcaagcgcggaaagcgctgtaaccacatgctgttagtccctttatggctgcgagatggctatccacctcggatcactgaactggagctcgaccctccttagtaagggaaccgagaggccttcttgcaacaagctccgacacagagtccacgtgattgctaccaccatgagtacatggttctcccctctcgacccaggacttctttttgaatatccacggctcgatccagagggtggggcatgatccccctagcatagcgagctacagcgggaactgtagctaggccttagcgtgccttggatactgcctgatagggcgacggcctagtcgtgtcggttctataggtagcacatacaaat

SEQ ID NO: 17533 - DNA, 668 bp, synthetic construct
  source 1..668: mol_type = other DNA
tttgaaatggggggctgggccctcatgcccagtccttccttcccccttccggggggtaaaccggctgtgtttgctagaggcacagaggagtaacatccaacctgctcttgtggggaacggtgcggctccaattcctgcgtcgccaaaggtgttagcgcacccaaacggcgcatctaccaatgctattggtgtggtctgcgagttctagcctactcgtttctcccctactcactcattcacgcacaaaaactgtgttgtaactacaagatttagccctcgcacgggatgtgcgataaccgcaagattgactcaagcgcggaaagcgctgtaaccacatgctgttagtccctttatggctgcgagatggctatccacctcggatcactgaactggagctcgaccctccttagtaagggaaccgagaggccttcttgcaacaagctccgacacagagtccacgtgattgctaccaccatgagtacatggttctcccctctcgacccaggacttctttttgaatatccacggctcgatccagagggtggggcatgatccccctagcatagcgagctacagcgggaactgtagctaggccttagcgtgccttggatactgcctgatagggcgacggcctagtcgtgtcggttctataggtagcacatacaaat

SEQ ID NO: 17534 - DNA, 620 bp, synthetic construct; identical to SEQ ID NO: 61
  source 1..620: mol_type = other DNA

SEQ ID NO: 17535 - DNA, 663 bp, synthetic construct
  source 1..663: mol_type = other DNA
ggggggctgggccctcatgcccagtccttcctttccccttccggggggtaaaccggctgtgtttgctagaggcacagaggagcaacatccaacctgcttttgtggggaacggtgcggctccaattcctgcgtcgccaaaggtgttagcgcacccaaacggcgcatctaccaatgctattggtgtggtctgcgagttctagcctactcgtttctcccctactcactcatttacgcacaaaaactgtgttataactacaagatttagccctcgcacgggatgtgcgataaccgcaagactgactcaagcgcggaaagcgctgtaaccacatgctgttagtccctttatggctgcgagatggctatccacctcggatcactgaactggagctcgaccctccttagtaagggaaccgagaggccttcttgcaacaagctccgacacagagtccacgtgattgctaccaccatgagtacatggttctcccctctcgacccaggacttcttttttgaatatccacggctcgatccagagggtgggggcatgatcccccctagcatagcgagctacagcgggaactgtagctaggccttagcgtgccttggatactgcctgatagggcgacggcctagtcgtgtcggttctataggtagcacatacaaat

SEQ ID NO: 17536 - DNA, 669 bp, synthetic construct
  source 1..669: mol_type = other DNA
tttgaaatggggggctgggccctcatgcccagtccttcctttccccttccggggggtaaaccggctgtgtttgctagaggcacagaggagcaacatccaacctgcttttgtggggaacggtgcggctccaattcctgcgtcgccaaaggtgttagcgcacccaaacggcgcatctaccaatgctattggtgtggtctgcgagttctagcctactcgtttctcccctactcactcattcacgcacaaaaagctgtgttgtaactacaagatttagccctcgcacgggatgtgcgataaccgcaagattgactcaagcgcggaaagcgctgtaaccacatgctgttagtccctttatggctgcgagatggctatccacctcggatcactgaactggagctcgaccctccttagtaagggaatcgagaggccttcttgcaacaagctccgacacagagtccacgtgactgctaccaccatgagtacatggttctcccctctcgacccaggacttctttttgaatatccacggctcgatccagagggtggggcatgatccccctagcatagcgagctacagcgggaactgtagctaggccttagcgtgccttggatactgcctgatagggcgacggcctagtcgtgtcggttctataggtagcgcatacaaat

SEQ ID NO: 17537 - DNA, 636 bp, synthetic construct
  source 1..636: mol_type = other DNA
agtccttcctttccccttccggggggtaaaccggctgtgtttgctagaggcacagaggagcaacatccaacctgcttttgtggggaacggtgcggctccaattcctgcgtcgccaaaggtgttagcgcacccaaacggcgcatctaccaatgctattggtgtggtctgcgagttctagcctactcgtttctcccctactcactcattcacacacaaaaactgtgttgtaactacaagatttggccctcgcacgggatgtgcgataaccgcaagattgactcaagcgcggaaagcgctgtaaccacatgctgttagtccctttatggctgcgagatggctatccacctcggatcactgaactggagctcgaccctccttagtaagggaaccgagaggccttcctgcaacaagctccgacacagagtccacgtgattgctaccaccatgagtacatggttctcccctctcgacccaggacttctttttgaatatccacggctcgatccagagggtggggcatgacccctagcatagcgagctacagcgggaactgtagctaggccttagcgtgccttggatactgcctgatagggcgacggcctagtcgtgtcggttctataggtagcacatacaaat

SEQ ID NO: 17538 - DNA, 638 bp, synthetic construct
  source 1..638: mol_type = other DNA
tccctttcccagccttgaggcggctggtcaataaaaacctcaatcgtaacaaacatctaagattattacattaaccccatgcctggtctccactagttgaaggcaacttgcaataaaatgagtggaaacaagacgcttaaagcatggtgtaaattaacttttctaacccgcattttgtgtggggtggcagatggcgtgccataattctattagtgagataccacgcttgtggaccttatgctcacacagccatcctctagtaagtttgtgagacgtctggtgacgtgtgggaacttattggaaacaacattttgctgtgaagcatcctattgccggcggaacaacacctggtaacaggtgcctccggggccaaaagccaaggtttagcagacccattaggattggttttcaaacctgaaatgttgtggaaaatacttagtacctaccgatctggtagtagtgcagacactagttgtaaggcccacgaaggatgcccagaaggtacccgtaggtaacaagtgacactatggatctgatctggggtcaggtacctctatcttggtggcctggttaaaaaacgtctagtgggccaaacccgggggggatccccggtttccttttattttatcactgccact

SEQ ID NO: 17539 - DNA, 678 bp, synthetic construct
  source 1..678: mol_type = other DNA
gcttggccgtcgggccttataccccgatttgctgagcttctctaggagagtccttttcccagccagaggtggctggtcaaataatacctattgtaacgaaacatctaagatacaacaaccacacacctggtctccactggctgaaggcaactagcaataaggcaggtgggttcagacgcttaaagtgtgttgtatatattcttttctaacctgtgttctacgcagggtggcagatggcgtgccataactctaatagtgagataccacgcttgtggaccttatgctcacacagccatcctctagtaagtttgtaagacgtctgatgacgtgtgggaacttgttggagataacagtttgctgcaaagcatcccactgccagcggatccacatctggtaacagatgcctctggggccaaaagccaaggtttaacagaccctttgggattggttcaaacctgaactgttatggaagacatttagtacctgctgatttggtagtaatgcaaacactagttgtaaggcccacgaaggatgcccagaaggtacccgtaggtaacaagtgacactatggatctgatctggggccagctacctctatctaggtgagttggttaaaaaacgtctagtgggccaaacccaggggggatccctggtttcctttttatttgagtagtcact

SEQ ID NO: 17540 - DNA, 257 bp, synthetic construct
  source 1..257: mol_type = other DNA
atgagctatccacaacccccacctggtgacaggagtggacgctgcgctggcacaggagttcattgaacagttcactgtcaagtaatgaagatgaagagcctattgtgctacggaggtttcctccggccctgtgaatgcggctaatcccaaccactggtccagtatccccaatccaggggatggctggtcgtaacgggtaacccggtggcggaaccgactactttcaggtgtccgtgtttccaatttattataatttc

SEQ ID NO: 17541 - DNA, 661 bp, synthetic construct
  source 1..661: mol_type = other DNA
ggggggctgggccctcatgcccagtccttcctttccccttccggggggttaaccggctgtgtttgctagaggcacagaggggcaacatccaacctgtttttgcggggaacggtgcggctccgattcctgcgtcgccaaaggtgttagcgcacccaaacggcgcatctaccaatgctattggtgtggtctgcgagttctagcctactcgtttctcccccaaccattcactcacccacgaaaagtgtgttgtaaccacaagatttaacccccgcacgagatgtgcgataaccgtaagattggctcaagcgcggaaagcgctgtaaccacatgctgttagtccctttatggctgcaagatggctacccacctcggatcactgaactggagctcgaccctccttagtaagggaaccgagaggccttcgtgcaacaagctccgacacagagtccacgtgactgctaccaccatgagtacatggttctcccctctcgacccaggacttctttttgaatatccacggctcgatccagagggtggggcatgatcccccctagcatagcgagctacagcgggaactgtagctaggccttagcgtgccttggatactgcctgatagggcgacggcctagtcgtgtcggttctataggtagcacatacaaat

SEQ ID NO: 17542 - DNA, 663 bp, synthetic construct
  source 1..663: mol_type = other DNA
gggggggggctgggccctcatgcccagtccttcctttccccttccggggggtaaaccggctgtgtttgctagaggcacagaggagcaacatccaacctgcttttgtggggaacggtgcggctccaattcctgcgttgccaaaggtgttagcgcacccaaacggcgcatctaccaatgctattggtgtggtctgcgagttctagcctactcgtttctcccctactcacttattcacacacaaaaactgtgttgtaactacaagatttggccttcgcacgggatgtgcgataaccgcaagattgactcaagcgcggaaagcgctgtaaccacatgctgttagtccctttatggctgcgagatggctatccacctcggatcactgaactggagctcgaccctccttagtaagggaaccgagaggccttcctgcaacaagctccgacacagagtccacgtgattgctaccaccatgagtacatggttctcccctctcgacccaggacttctttttgaatatccacggctcgatccagagggtggggcatgatccccctagcatagcgagctacagcgggaactgtagctaggccttagcgtgccttggatactgcctgatagggcgacggcctagtcgtgtcggttctataggtagcacatacaaat

SEQ ID NO: 17543 - DNA, 668 bp, synthetic construct
  source 1..668: mol_type = other DNA
tttgaaatggggggctgggccctcatgcccagtccttcctttccccttccggggggtaaaccggctgtgtttgctagaggcacagaggagtaacatccaacctgctcttgtggggaacggtgcggctccaattcctgcgtcgccaaaggtgttagcgcacccaaacggcgcatctaccaatgctattggtgtggtctgcgagttctagcctactcgtttctcccctatccactcattcacgcacaaaaagtgtgttgtaactacaagacttagcccccgcacgagatgtgcgataaccgcaagattgactcaagcgcggaaagcgctgtaaccacatgctgttagttcctttatggctgcgagatggctatccacctcggatcactgaactggagctcgaccctccttagtaagggaaccgagaggccttcttgcaacaagctccgacacagagtccacgtgactgctaccaccatgagtacatggttctcccctctcgacccaggacttctttttgaatatccacggctcgacccagagggtggggcatgatccccctagcatagcgagctacagcgggaactgtagctaggccttagcgtgctttggatactgcctgatagggcgacggcctagtcgtgtcggttctataggtagcacatacaaat

SEQ ID NO: 17544 - DNA, 643 bp, synthetic construct
  source 1..643: mol_type = other DNA
gcttctctaggagagcccttttcccagccagaggtggctggttaaatactacctatagtaacaaaacatctaagatacaacaaccacacacctggtttccactggccgaaggcaactagcaataaggcaggtgggttcagacgcttaaagtgtgttgtacatattcttttctaacctgtgttctacacagggtggcagatggcgtgccataactctaatagtgagataccacgcttgtggaccttatgctcacacagccatcctctagtaagtttgtgagacgtctgatgacgtgtgggaacttgttggagataacagtttgctgcaaagcatcccactgccagcggattcacatctggtaacagatgcctctggggccaaaagccaaggtttaacagaccctttgggattggttcaaacctgaactgttatggaagacatttagtacctgctgatttggtagtaatgcaaacactagttgtaaggcccacgaaggatgcccagaaggtacccgtaggtaacaagtgacactatggatctgatctggggccagctacctctatctaggtgagttggttaaaaaacgtctagtgggccaaacccaggggggatccctggtttcctttttatttagataaccact

SEQ ID NO: 17545 - DNA, 662 bp, synthetic construct
  source 1..662: mol_type = other DNA
aggaaggactgggcatgagggcccagccccccctttccccttccggggggtaaaccggctgtgtttgctagaggcacagaggagcaacatccaacctgcttttgtggggaacggtgcggctccaattcctgcgtcgccaaaggtgttagcgcacccaaacggcgcatctaccaatgctattggtgtggcctgcgagttctagcctactcgtttctcccctattcactcactcacgcacaaaaagtgtgttgtaactacaagatttagccctcgcacgggatgtgcgataaccgcaagattgactcaagcgcggaaagcgctgtaaccacatgctgttagtccctttatggctgcgagatggctatccacctcggatcactgaactggagctcgaccctccttagtaagggaaccgagaggccttcttgcaacaagctccgacacagagtccacgtgattgctaccaccatgagtacatggttctcccctctcgacccaggacttctttttgaatatccacggctcgatccagagggtggggcatgatccccctagcatagcgagctacagcgggaactgtagctaggccttagcgtgccttggatactgcctgatagggcgacggcctagtcgtgtcggttctataggtagcacatacaaat

SEQ ID NO: 17546 - DNA, 667 bp, synthetic construct
  source 1..667: mol_type = other DNA
tttgaaatgggggctgggccctcatgcccagtccttcctttccccttccggggggtaaaccggctgtgtttgctagaggcacagaggagtaacatccaacctgctcttgtggggaacggtgcggctccaattcctgcgtcgccaaaggtgttagcgcacccaaacggcgcatctaccaatgctattggtgtggtctgcgagttctagcctactcgtttctcccctatccactcattcacgcacaaaaagtgtgttgtaactacaagacttagcccccgcacgagatgtgcgataaccgcaagattgactcaagcgcggaaagcgctgtaaccacatgctgttagttcctttatggctgcgagatggctatccacctcggatcactgaactggagctcgaccctccttagtaagggaaccgagaggccttcttgcaacaagctccgacacagagtccacgtgactgctaccaccatgagtacatggttctcccctctcgacccaggacttctttttgaatatccacggctcgacccagagggtggggcatgatccccctagcatagcgagctacagcgggaactgtagctaggccttagcgtgctttggatactgcctgatagggcgacggcctagtcgtgtcggttctataggtagcacatacaaat

SEQ ID NO: 17547 - DNA, 660 bp, synthetic construct
  source 1..660: mol_type = other DNA
gggggggctgggccctgacgcccagcccttcctttcccccttccggggggttaaccggctgtgtttgctagaggcacagaggggcaccatccaacctgcttttgcggggaacggtgcggctccgattcctgcgccgccaaaggtgttagcgcacccaaacggcgcacctaccaatgttattggtgtggtctgcgagttctagcctactcgtttctcccctgaccatttactcgcccacgaaaagtgtgttgcaaccataagatttaacccccgcacgggatgtgcgataaccgtaagactggctcaagcgcggaaggcgctgtaaccacatgctgttagtccctttatggctgcaagatggctacccacctcggatcactgaactggagctcgaccctccttagtaagggaaccgagaggccttcgcgcaaaaagctccgacacagagtccacgtgattgctaccaccatgagtacatggttctcccctctcgacccaggacttctttttgaatatccacggctcgatccagagggtggggcatgacccctagcatagcgagctacagcgggaactgtagctaggtcttagcgtaccttggatactgcctgatagggcgacggcctagtcgtgtcggttctataggtagcacatacaaat

SEQ ID NO: 17548 - DNA, 662 bp, synthetic construct
  source 1..662: mol_type = other DNA
ggggggggctgggccctcatgcccagtccttcctttccccttccggggggtaaaccggctgtgtttgctagaggcacagaggagcaacatccaacctgcttttgtgtggaacggtgcggctccacttcctgcgtcgccaaaggtgttagcgcacccaaacggcgcatctaccaatgctattggtgtggtctgcgagttctagcctactcgtttctcccctactcactcattcacgcacaaaaactgtgttgtaactacaagatttagccctcgcacgggatgtgcgataaccgcaagattgactcaagcgcggaaagcgctgtaaccacatgctgttagtccctttatggctgcgagatggctatccacctcggatcactgaactggagctcgaccctccttagtaagggaaccgagaggccttcttgcaacaagctccgacacagagtccacgtgattgctaccaccatgagtacatggttctcccctctcgacccaggacttctttttgaatatccacggctcgatccagagggtggggcatgatccccctagcatagcgagctacagcgggaactgtagctaggccttagcgtgccttggatactgcctgatagggcgacggcctagtcgtgtcggttctataggtagcacatacaaat

SEQ ID NO: 17549 - DNA, 643 bp, synthetic construct
  source 1..643: mol_type = other DNA
cttctctaggagagcccttttcccagccagaggtggctggttaaataatacctattgtaacaaaacatctaagatacaacaaccacacacctggtttccactggccgaaggcaactagcaataaggcaggtgggttcagacgcttaaagtgtgttgtacatattcttttctaacctgtgttttacacagggtggcagatggcgtgccataactctaatagtgagataccacgcttgtggaccttatgctcacacagccatcctctagtaagtttgtgagacgtctgatgacgtgtgggaacttgttggagataacagtttgctgcaaagcatcccactgccagcggattcacatctggtaacagatgcctctggggccaaaagccaaggtttaacagaccctttgggattggttcaaacctgaactgttatggaagacatttagtacctgctgatttggtagtaatgcaaacactagttgtaaggcccacgaaggatgcccagaaggtacccgtaggtaacaagtgacactatggatctgatctggggccagctacctctatctaggtgagttggttaaaaaacgtctagtgggccaaacccaggggggatccctggtttcctttttaatttgagtaatcact

SEQ ID NO: 17550 - DNA, 668 bp, synthetic construct
  source 1..668: mol_type = other DNA
tttgaaatggggggctgggccctcatgcctagcccttcctttccccttccggggggtaaaccggctgtgtttgctagaggcacagaggagcaacacccaacctgcttttgtggggaacggtgcggctccaattcctgcgtcgccaaaggtgttagcgcacccaaacggcgcatctaccaatgctattggtgtggtctgcgagttctagcctactcgtttctcccctgctcactcatttacacacaaaaactgtgttgtaattacaagatttggccctcgcacgggatgtgcgataaccgtaagactgactcaagcgcggaaagcgctgtaaccacatgctgttagtccctttatggctgcgagatggctatccacctcggatcactgaactggagctcgaccctccttagtaagggaaccgagaggccttcctgcaacaagctccgacacagagtccacgtgactgctaccaccatgagtacatggttctcccctctcgacccaggacttctttttgaatatccacggctcgatccagagggtggggcatgatccccctagcatagcgagctacagcgggaactgtagctaggccttagcgtgccttggatactgcctgatagggcgacggcctagtcgtgtcggttctataggtagcacatacaaat

SEQ ID NO: 17551 - DNA, 658 bp, synthetic construct
  source 1..658: mol_type = other DNA
ggggctgggccctcatgcccagtctttcctttccccttccggggggtaaaccggctgtgtttgctagaggcacagtggagcaacatccaacctgcttttgtggggaacggtgcggctccaattcctgcgtcgccaaaggtgttagcgcacccaaacggcgcgtctaccaatgctattggtgtggtctgcgagttctagcctactcgtttctcccctactcactcattcacgcacaaaaactgtgttgtaactacaaggtttagccctcgcacgggatgtgcgataaccgcaagatcgactcaagcgcggaaagcgctgtaaccacatgctgttagtccctttatggctgcgagatggctacccacctcggatcactgaactggagctcgaccctccttagtaagggaaccgagaggccttcttgcaacaagctccgacacagagtccacgtgattgctaccaccatgagtacatggttctcccctctcgacccaggacttctttttgaatatccacggctcgatccagagggtggggcatgatccccctagcatagcgagctacagcgggaactgtagctaggccttagcgtgccttggatactgcctgatagggcgacggcctagtcgtgtcggttctataggtagcacatacaaat

SEQ ID NO: 17552 - DNA, 668 bp, synthetic construct
  source 1..668: mol_type = other DNA
tttgaaatggggggctgggccctcatgccaagcccttcctttccccttccggggggtaaaccggctgtgtttgctagaggcacagaggagcaacacccaacctgcttttgtggggaacggtgcggctccaattcctgcgtcgccaaaggtgttagcgcacccaaacggcgcatctaccaatgctattggtgtggtctgcgagttctagcctactcgtttctcccctgctcactcatttacacacaaaaactgtgttgtaactacaaggtttggccctcgcacgggatgtgcgataaccgtaagactgactcaagcgcggaaagcgctgtaaccacatgctgttagtccctttatggctgcgagatggctatccacctcggatcactgaactggagctcgaccctccttagtaagggaaccgagaggccttcctgcaacaagctccgacacagagtccacgtgattgctaccaccatgagtacatggttctcccctctcgacccaggacttctttttgaatatccacggctcgatccagagggtggggcatgatccccctagcatagcgagctacagcgggaactgtagctaggccttagcgtgccttggatactgcctgatagggcgacggcctagtcgtgtcggttctataggtagcacatacaaat

SEQ ID NO: 17553 - DNA, 658 bp, synthetic construct
  source 1..658: mol_type = other DNA
ggggggctgggccctgatgcccagtccttcctttccccttccggggggttaaccggctgtgtttgctagaggcacagaggggcaacatccaacctgtttttgcggggaacggtgcggctccgattcctgcgtcgccaaaggtgttagcgcacccaaacggcgcacctaccaatgttattggtgtggtctgcgagttctagcctactcgtttctcccccgaccattcactcacccacgaaaagtgtgttgtaaccataagatttaacccccgcacgggatgtgcgataaccgtaagactggctcaagcgcggaaagcgctgtaaccacatgctgttagtccctttatggctgcaagatggctacccacctcggatcactgaactggagctcgaccctccttagtaagggaaccgagaggccttcgtgcaacaagctccgacacagagtccacgtgactgctaccaccatgagtacatggttctcccctctcgacccaggacttctttttgaatatccacggctcgatccagagggtggggcatgacccctagcatagcgagctacagcgggaactgtagctaggccttagcgtgccttggatactgcctgatagggcgacggcctagtcgtgtcggttctataggtagcacatacaaat

SEQ ID NO: 17554 - DNA, 667 bp, synthetic construct; identical to SEQ ID NO: 809
  source 1..667: mol_type = other DNA

SEQ ID NO: 17555 - DNA, 655 bp, synthetic construct
  source 1..655: mol_type = other DNA
gctgggccctcatgcccagtccttcctttccccttccggggggtaaaccggctgtgtttgctagaggcacagaggagcaacatccaacctgcttttgtggggaacggtgcggctccaattcctgcgtcgccaaaggtgttaacgcacccaaacggcgcatctaccaatgctattggtgtggtctgcgagttctagcctactcgtttctcccctactcactcattcacgcacaaaaactgtgttgtaactacaagatttagccctcgcacgggatgtgcgataaccgcaagattaactcaagcgcggaaagcgctgtaaccacatgctgttagtccctttatggctgcgagatggctatccacctcggatcactgaactggagctcgaccctccttagtaagggaaccgagaggccttcttgcaacaagctccgacacagagtccacgtgattgctaccaccatgagtacatggttctcccctctcgacccaggacttctttttgaatatccacggctcgatccagagggtggggcatgatccccctagcatagcgagctacagcgggaactgtagctaggccttagcgtgccttggatactgcctgatagggcgacggcctagtcgtgtcggttctataggtagcacatacaaac

SEQ ID NO: 17556 - DNA, 637 bp, synthetic construct
  source 1..637: mol_type = other DNA
agtccctttcccagccctgaggcggctggtcaataaaagcctcaaatgtaactaacatctaagattgatttaataaccccatgcctgatccccaccagtcgaagacaactagtaataagacgggtggaataaggatgcttaaagcatggcgtaaatattcttttctaacccatgattccatggggtggcagatggcgtgccataactctattagtgagataccatgcttgtggaacttatgctcacacagccatcctctagtaagtttgtgagatgtctaatgacgtgtgggaacttatcggaagcaacaatttgccgtacggcatcctactgccagcggattcacacctggtaacaggtgcccctggggccaaaagccaaggtttaacagaccctttaggattggttaaaacctgaattgttgtggaagatactcagtacctgctgatttggtaataatgcaaacactagttgtaaggcccacgaaggatgcccagaaggtacccgtaggtaacaagtgacactatggatctgatctggggccaactacttctatcatggtgagttggtttaaaaacgtctagtgggccaaacccaggggggatccctggtttctttttatttcactactgccaat

SEQ ID NO: 17557 - DNA, 659 bp, synthetic construct
  source 1..659: mol_type = other DNA
gggggctgggccctgatgcccagtccttcctttccccttccggggggtaaaccggctgtgtttgctagaggcacagaggagcaacatccaacctgcttttgtggggaacggtgcggctccaattcctgcgtcgccaaaggtgttagcgcacccaaacggcgcatctaccaatgctattggtgtggtctgcgagttctagcctactcgtttctcccctactcactcattcacgcacaaaaactgtgttgtaactacaagatttagccctcgcacgggatgtgcgataaccgcaagattgactcaagcgcggaaagcgctgtaaccacatgctgttagtccctttatggctgcgagatggctatccacctcggatcactgaactggagctcgaccctccttagtaagggaaccgagaggccttcttgcaacaagctccgacacagagtccacgtgattgctaccaccatgagtacatggttctcccctctcgacccaggacttctttttgaatatccacggctcgatccagagggtggggcatgatccccctagcatagcgagctacagcgggaactgtagctaggccttagcgtgccttggatactgcctgatagggcgacggcctagtcgtgtcggttctataggtagcacatacaaat

SEQ ID NO: 17558 - DNA, 655 bp, synthetic construct
  source 1..655: mol_type = other DNA
gctgggccctcatgcccagtccttcctttccccttccggggggtaaaccggctgtgtttgctagaggcacagaggagcaacatccaacctgcttttgtggggaacggtgcggctccaattcccgcgtcgccaaaggtgttagcgcacccaaacggcgcatctaccaatgctattggtgtggtctgcgagttctagcctactcgtttctcccctactcactcattcacgcacaaaaactgtgttgtaactacaagatttagccctcgcacgggatgtgcgataaccgcaagattgactcaagcgcggaaagcgctgtaaccacatgctgttagtccctttatggctgcgagatggctatccacctcggatcactgaactggagctcgaccctccttagtaagggaaccgagaggccttcttgcaacaagctccgacacagagtccacgtgattgctaccaccatgagtacatggttctcccctctcgacccaggacttctttttgaatatccacggctcgatccagagggtggggcatgatccccctagcatagcgagctacagcgggaactgtagctaggccttagcgtgccttggatactgcctgatagggcgacggcctagtcgtgtcggttctataggtagcacatacaaat

SEQ ID NO: 17559 - DNA, 500 bp, synthetic construct; identical to SEQ ID NO: 527
  source 1..500: mol_type = other DNA

SEQ ID NO: 17560 - DNA, 637 bp, synthetic construct
  source 1..637: mol_type = other DNA
cagtccttcctttccccttccggggggtaaaccggctgtgtttgctagaggcacagaggagcaacatccaacctgcttttgtggggaacggtgcggctccaattcctgcgtcgccaaaggtgttagcgcacccaaacggcgcatctaccaatgctattggtgtggtctgcgagttctagcctactcgtttctcccctactcactcattcacgcacaaaaactgtgttgtaactacaagatttagccctcgcacgggatgtgcgataaccgcaagattgactcaagcgcggaaagcgctgtaaccacatgctgttagtccctttatggctgcgagatggctatccacctcggatcactgaactggagctcgaccctccttagtaagggaaccgagaggccttcttgcaacaagctccgacacagagtccacgtgattgctaccaccatgagtacatggttctcccctctcgacccaggacttctttttgaatatccacggctcgatccagagggtggggcatgacccctagcatagcgagctacagcgggaactgtagctaggccttagcgtgccttggatactgcctgatagggcgacggcctagtcgtgtcggttctataggtagcacatacaaat

SEQ ID NO: 17561 - DNA, 544 bp, synthetic construct; identical to SEQ ID NO: 22
  source 1..544: mol_type = other DNA

SEQ ID NO: 17562 - DNA, 654 bp, synthetic construct
  source 1..654: mol_type = other DNA
gccctcatgcccagtccttcctttccccttccggggggtaaaccggctgtgtttgctagaggcacagaggagcaacatctaacctgcttttgcggggaacggtgcggctccgattcctgcgtcgccaaaggtgttagcgcacccaaacggcgcatctaccaacgctattggtgtggtctgcgagttctagcctactcgtttctcccccatccactcactcgcgcacaaaaaaaaagtgtgttgtgactacaagatttagccctcgcacgggatgtgcgataaccacaggatcgactcaagcgcggaaagcgctgtaaccacatgctgttagtccctttatggctgcgagatggctatccacctcgggtcactgaactggagctcgaccctccttagtaagggaaccgagaggccttcttgcaacaagctccgacacagagtccacgtgattgctaccaccatgagtacatggttctcccctctcgacccaggacttctttttgaatatccacggctcgatccagagggtggggcatgatccccctagcatagcgagctacagcgggaactgtagctaggccttagcgtgccttggatactgcctgatagggcgacggcctagtcgtgtcggttctataggtagcacatacaaat

SEQ ID NO: 17563 - DNA, 654 bp, synthetic construct
  source 1..654: mol_type = other DNA
ctgggccctcatgcccagtccttcctttccccttccggggggtaaaccggctgtgtttgctagaggcacagaggagcaacatccaacctgcttttgtggggaacggtgcggctccaattcctgcgtcgccaaaggtgttagcgcacccaaacggcgcatctaccaatgctattggtgtggtctgcgagttctagcctactcgtttctcccctatccactcactcacgcacaaaaagtgtgctgtaattacaagatttagccctcgcacgagatgtgcgataaccgcaagattgactcaagcgcggaaagcgctgtaaccacatgctgttagtcccttcatggctgcgagatggctatccacctcggatcactgaactggagctcgaccctccttagtaagggaaccgagaggccttcttgcaacaagctccgacacagagtccacgtgattgctaccaccatgagtacatggttctcccctctcgacccaggacttctttttgaatatccacggctcgatccagagggtggggcatgatccccctagcatagcgagctacagcgggaactgtagctaggccttagcgtgccttggatactgcctgatagggcgacggcctagtcgtgtcggttctataggtagcacatacaaat

SEQ ID NO: 17564 - DNA, 654 bp, synthetic construct
  source 1..654: mol_type = other DNA
ctgggccctcatgcccagtccttcctttccccttccggggggtaaaccggctgtgtttgctagaggcacagaggagcaacatccaacctgcttttgtggggaacggtgcggctccaattcctgcgtcgccaaaggtgttagcgcacccaaacggcgcatctaccaatgctattggtgtggtctgcgagttctagcctactcgtttctcccttatccactcactcacgcacaaaaagtgtgctgtaactacaagatttagccctcgcacgagatgtgcgataaccgcaagattgactcaagcgcggaaagcgctgtaaccacatgctgttagtcccttcatggctgcgagatggctatccacctcggatcactgaactggagctcgaccctccttagtaagggaaccgagaggccttcttgcaacaagctccgacacagagtccacgtgattgctaccaccatgagtacatggttctcccctctcgacccaggacttctttttgaatatccacggctcgatccagagggtggggcatgatccccctagcatagcgagctacagcgggaactgtagctaggccttagcgtgccttggatactgcctgatagggcgacggcctagtcgtgtcggttctataggtagcacatacaaat

SEQ ID NO: 17565 - DNA, 561 bp, synthetic construct; identical to SEQ ID NO: 610
  source 1..561: mol_type = other DNA

SEQ ID NO: 17566 - DNA, 663 bp, synthetic construct
  source 1..663: mol_type = other DNA
aaggaaggactgggcatgagggcccagcccttcctttccccttccggggggtaaaccggctgtgtttgctagaggcacagaggagcaacatccaacctgcttttgtggggaacggtgcggctccaattcctgcgtcgccaaaggtgttagcgcacccaaacggcgcatctaccaatgctattggtgtggtctgcgagttctagcctactcgtttctcccctactcactcattcacgcacaaaaactgtgttgtaattacaagatttagccctcgcacgggatgtgcgataaccgcaagattgactcaagcgcggaaagcgctgtaaccacatgctgttagtccctttatggctgcgagatggctatccacctcggatcactgaactggagctcgaccctccttagtaagggaaccgagaggccttcttgcaacaagctccgacacagagtccacgtgattgctaccaccatgagtacatggttctcccctctcgacccaggacttctttttgaatatccacggctcgatccagagggtggggcatgatccccctagcatagcgagctacagcgggaactgtagctaggccttagcgtgccttggatactgcctgatagggcgacggcctagtcgtgtcggttctataggtagcacatataaat

SEQ ID NO: 17567 - DNA, 663 bp, synthetic construct
  source 1..663: mol_type = other DNA
aaggaaggactgggcatgagggcccagcccttcctttccccttccggggggtaaaccggctgtgtttgctagaggcacagaggagcaacatccaacctgcttttgtggggaacggtgcggctccaattcctgcgtcgccaaaggtgttagcgcacccaaacggcgcatctaccaatgctattggtgtggtctgcgagttctagcctactcgtttctcccctactcactcattcacacacaaaaactgtgttgtaactacaagatgtagccctcgcacgggatgtgcgataaccgcaagattgactcaagcgcggaaagcgctgtaaccacatgctgttagtccctttatggctgcgagatggctatccacctcggatcactgaactggagctcgaccctccttagtaagggaaccgagaggccttcttgcaacaagctccgacacagagtccacgtgattgctaccaccatgagtacatggttctcccctctcgacccaggacttctttttgaatatccacggctcgatccagagggtggggcatgatccccctagcatagcgagctacagcgggaactgtagctaggccttagcgtgccttggatactgcctgatagggcgacggcctagtcgtgtcggttctataggtagcacatacaaat

SEQ ID NO: 17568 - DNA, 663 bp, synthetic construct
  source 1..663: mol_type = other DNA
aaggaaggactgggcatgagggcccagcccttcctttccccttccggggggtaaaccggctgtgtttgctagaggcacagaggagcaacatccaacctgcttttgtggggaacggtgcggctccaattcctgcgtcgccaaaggtgttagcgcacccaaacggcgcatctaccaatgctattggtgtggtctgcgagttctagcctactcgtttttcccctactcactcattcacacacaaaaactgtgttgtaactacaagatttggccctcgcacgggatgtgcgataaccgcaagattgactcaagcgcggaaagcgctgtaaccacatgctgttagtccctttatggctgcgagatggctatccacctcggatcactgaactggagctcgaccctccttagtaagggaaccgagaggccttcctgcaacaagctccgacacagagtccacgtgattgctaccaccatgagtacatggttctcccctctcgacccaggacttctttttgaatatccacggctcgatccagagggtggggcatgatccccctagcatagcgagctacagcgggaactgtagctaggccttagcgtgccttggatactgcctgatagggcgacggcctagtcgtgtcggttctataggtagcacatacaaat

SEQ ID NO: 17569 - DNA, 663 bp, synthetic construct
  source 1..663: mol_type = other DNA
aaggaaggactgggcatgagggcccagcccttcctttccccttccggggggtaaaccggctgtgtttgctagaggcacagaggagcaacatccaacctgcttttgtggggaacggtgcggctccaattcctgcgtcgccaaaggtgttagcgcacccaaacggcgcatctaccaatgctattggtgtggtctgcgagttctagcctactcgtttctcccctactcactcattcacgcacaaaaactgtgttgtaactacaagatttagccctcgcacgggatgtgcgataaccgcaagattgactcaagcgcggaaagcgctgtaaccacatgctgttagtccctttatggctgcgggatggctatccacctcggatcactgaactggagctcgaccctccttagtaagggaaccgagaggccttcttgcaacaagctccgacacagagtccacgtgattgctaccaccatgagtacatggttctcccctctcgacccaggacttctttttgaatatccacggctcgatccagagggtggggcatgatccccctagcatagcgagctacagcgggaactgtagctaggccttagcgtgccttggatactgcctgatagggcgacggcctagtcgtgtcggttctataggtagcacatacaaat

SEQ ID NO: 17570 - DNA, 677 bp, synthetic construct; identical to SEQ ID NO: 88
  source 1..677: mol_type = other DNA

SEQ ID NO: 17571 - DNA, 663 bp, synthetic construct
  source 1..663: mol_type = other DNA
aaggaaggactgggcatgagggcccagcccttcctttccccttccggggggtaaaccggctgtgtttgctagaggcacagaggagcaacatccaacctgcttttgtggggaacggtgcggctccaattcctgcgtcgccaaaggtgttagcgcacccaaacggcgcatctaccaatgctattggtgtggtctgcgagttctagcctactcgtttctcccctattcactcactcacgcacaaaaagtgtgttgtaactacaagatttagccctcgcacgggatgtgcgataaccgcaagattgactcaagcgcggaaagcgctgtaaccacatgctgttagtccctttatggctgcgagatggctatccacctcggatcactgaactggagctcgaccctccttagtaagggaaccgagaggccttcttgcaacaagctccgacacagagtccacgtgattgctaccaccatgagtacatggttctcccctctcgacccaggacttctttttgaatatccacggctcgatccagagggtggggcatgatccccctagcatagcgagctacagcgggaactgtagctaggccttagcgtgccttggatactgcctgatagggcgacggcctagtcgtgtcggttctataggtagcacatacaaat

SEQ ID NO: 17572 - DNA, 654 bp, synthetic construct
  source 1..654: mol_type = other DNA
ctgggccctcatgcccagtccttcctttccccttccggggggtaaaccggctgtgtttgctagaggcacagaggagcaacatccaacctgcttttgtggggaacggtgcggctccaattcccgcgtcgccaaaggtgttagcgcacccaaacggcgcatctaccaatgctattggtgtggtctgcgagttctagcctactcgtttctcccctactcactcattcacgcacaaaaactgtgttgtaactacaagatttagccctcgcacgggatgtgcgataaccgcaagattgactcaagcgcggaaagcgctgtaaccacatgctgttagtccctttatggctgcgagatggctatccacctcggatcactgaactggagctcgaccctccttagtaagggaaccgagaggccttcttgcaacaagctccgacacagagtccacgtgattgctaccaccatgagtacatggttctcccctctcgacccaggacttctttttgaatatccacggctcgatccagagggtggggcatgatccccctagcatagcgagctacagcgggaactgtagctaggccttagcgtgccttggatactgcctgatagggcgacggcctagtcgtgtcggttctataggtagcacatacaaat

SEQ ID NO: 17573 - DNA, 650 bp, synthetic construct
  source 1..650: mol_type = other DNA
gccctcatgcccagtccttcctttccccttccggggggtaaaccggctgtgtttgctagaggcacagaggagcaacatccaacctgcttttgtggggaacggtgcggctccaattcctgcgtcgccaaaggtgttagcgcacccaaacggcgcatctaccaatgccattggtgtggtctgcgagttctagcctactcgtttttcccctactcactcattcacgcacaaaaagtgtgttgtaactacaagatttagccctcgcacgggatgtgcggtaaccgcaagattgactcaagcgcggaaagcgctgtaaccacatgctgttagtccctttatggctgcgagatggctatccacctcggatcactgaactggagctcgaccctccttagtaagggaaccgagaggccttcttgcaacaagctccgacacagagtccacgtgattgctaccaccatgagtacatggttctcccctctcgacccaggacttctttttgaatatccacggctcgatccagagggtggggcatgatccccctagcatagcgagctacagcgggaactgtagctaggccttagcgtgccttggatactgcctgatagggcgacggcctagtcgtgtcggttctataggtagcacatacaaat

SEQ ID NO: 17574 - DNA, 662 bp, synthetic construct
  source 1..662: mol_type = other DNA
aggaaggactgggcatgagggcccagtcccccctttccccttccggggggtaaaccggctgtgtttgctagaggcacagaggagcaacatccaacctgcttttgtggggaacggtgcggctccaattcctgcgtcgccaaaggtgttagcgcacccaaacggcgcatctaccaatgctattggtgtggtctgcgagttctagcctactcgtttctcccctactcactcattcacacacaaaaactgtgttgtaactacaagatttagccctcgcacgggatgtgcgataaccgcaagattgactcaagcgcggaaagcgctgtaaccacatgctgttagtccctttatggctgcgagatggctatccacctcggatcactgaactggagctcgaccctccttagtaagggaaccgagaggccttcttgcaacaagctccgacacagagtccacgtgattgctaccaccatgagtacatggttctcccctctcgacccaggacttctttttgaatatccacggctcgatccagagggtggggcatgatccccctagcatagcgagctacagcgggaactgtagctaggccttagcgtgccttggatactgcctgatagggcgacggcctagtcgtgtcggttctataggtagcacatacaaat

SEQ ID NO: 17575 - DNA, 650 bp, synthetic construct
  source 1..650: mol_type = other DNA
gccctcatgcccagtccttcctttccccttccggggggtaaaccggctgtgtttgctagaggcacagaggagcaacatccaacctgcttttgtggggaacggtgcggctccaattcctgcgtcgccaaaggtgttagcgcacccaaacggcgcatctaccaatgctattggtgtggtctgcgagttctagcctactcgtttcttccctgctcactcaattagacacaaaaactgtgttgtagctacaagatttggccctcgcacgggatgtgcgataaccgcaagactgactcaagcgcggaaagcgctgtaaccacatgctgttagtccctttatggctgcgagatggctatccacctcggatcactgaactggagctcgaccctccttagtaagggaaccgagaggccttcctgcaacaagctccgacacagagtccacgtgattgctaccaccatgagtacatggttctcccctctcgacccaggacttctttttgaatatccacggctcgatccagagggtggggcatgatccccctagcatagcgagctacagcgggaactgtagctaggccttagcgtgccttggatactgcctgatagggcgacggcctagtcgtgtcggttctataggtagcacatacaaat

SEQ ID NO: 17576 - DNA, 650 bp, synthetic construct
  source 1..650: mol_type = other DNA
gccctcatgcccagtccttcctttccccttccggggggtaaaccggctgtgtttgctagaggcacagaggagcaacatccaacctgcttttgtggggaacggtgcggctccaattcctgcgccgccaaaggtgttagcgcacccaaacggcgcatctaccaatgctattggtgtggtctgcgagttctagcctactcgtttctcccctactcactcattcacgcacaaaaactgtgttgtaactacaagatttagccctcgcacgggatgtgcgataaccgcaagattgactcaagcgcggaaagcgctgtaaccacatgctgttagtccctttatggctgtgagatggctatccacctcggatcactgaactggagctcgaccctccttagtaagggaaccgagaggccttcttgcaacaagctccggcacagagtccacgtgattgctaccaccatgagtacatggttctcccctctcgacccaggacttctttttgaatatccacggctcgatccagagggtggggcatgatccccctagcatagcgagctacagcgggaactgtagctaggccttagcgtgccttggatactgcctgatagggcgacggcctagtcgtgtcggttctataggtagcacatacaaat

SEQ ID NO: 17577 - DNA, 650 bp, synthetic construct
  source 1..650: mol_type = other DNA
gccctcatgcccagtccttcctttccccttccggggggtaacccggctgtgtttgctagaggcacagaggagcaacatccaacctgcttttgtggggaacggtgcggctccaattcctgcgtcgccaaaggtgttagcgcacccaaacggcgcatctaccaatgctattggtgtggtctgcgagttctagcctactcgtttctcccctactcactcatttacgcacaaaaactgtgttataactacaagatttagccctcgcacgggatgtgcgataaccgcaagattgactcaagcgcggaaagcgctgtaaccacatgctgttagtccctttatggctgcgagatggctatccacctcggatcactgaactggagctcgaccctccttagtaagggaaccgagagaccttcttgcaacaagctccgacacagagtccacgtgattgctaccaccatgagtacatggttctcccctctcgacccaggacttctttttgaatatccacggctcgatccagagggtggggcatgatccccctagcatagcgagctacagcgggaactgtagctaggccttagcgtgccttggatactgcctgatagggcgacggcctagtcgtgtcggttctataggtagcacatataaat

SEQ ID NO: 17578 - DNA, 650 bp, synthetic construct
  source 1..650: mol_type = other DNA
gccctcatgcccagtccttcctttccccttccggggggtaacccggctgtgtttgctagaggcacagaggagcaacatccaacctgcttttgtggggaacggtgcggctccaattcctgcgtcgccaaaggtgttagcgcacccaaacggcgcatctaccaatgctattggtgtggtctgcgagttctagcctactcgtttctcccctactcactcatttacgcacaaaaactgtgttataactacaagatttagccctcgcacgggatgtgcgataaccgcaagattgactcaagcgcggaaagcgctgtaaccacatgctgttagtccctttatggctgcgagatggctatccacctcggatcactgaactggagcccgaccctccttagtaagggaaccgagaggccttcttgcaacaagctccgacacagagtccacgtgattgctaccaccatgagtacatggttctcccctctcgacccaggacttctttttgaatatccacggctcgatccagagggtggggcatgatccccctagcatagcgagctacagcgggaactgtagctaggccttagcgtgccttggatactgcctgatagggcgacggcctagtcgtgtcggttctataggtagcacatataaat

SEQ ID NO: 17579 - DNA, 663 bp, synthetic construct
  source 1..663: mol_type = other DNA
aaggaaggactgggcatgagggcccagccccccctttccccttccggggggtaaaccggctgtgtttgctagaggcacagaggagcaacatccaacctgcttttgtggggaacggtgcggctccaattcctgcgtcgccaaaggtgttagcgcacccaaacggcgcatctaccaatgctattggtgtggtctgcgagttctagcctactcgtttctcccctactcactcactcacgcacaaaaagtgtgttgtaactacaagatttagccctcgcacgggatgtgcgataaccgcaagattgactcaagcgcggaaagcgctgtaaccacatgctgttagtccctttatggctgcgagatggctatccacctcggatcactgaactggagctcgaccctccttagtaagggaaccgagaggccttcttgcaacaagctccgacacagagtccacgtgattgctaccaccatgagtacatggttctcccctctcgacccaggacttctttttgaatatccacggctcgatccagagggtggggcatgatccccctagcatagcgagctacagcgggaactgtagctaggccttagcgtgccttggatactgcctgatagggcgacggcctagtcgtgtcggttctataggtagcacatacaaat

SEQ ID NO: 17580 - DNA, 663 bp, synthetic construct
  source 1..663: mol_type = other DNA
aaggaaggactgggcatgagggcccagccccccctttccccttccggggggtaaaccggctgtgtttgctagaggcacagaggagcaacatccaacctgcttttgtggggaacggtgcggctccaattcctgcgtcgccaaaggtgttagcgcacccaaacggcgcatctaccaatgctattggtgtggtctgcgagttctagcctactcgtttctcccctactcactcattcacacacaaaaactgtgttgtaactacaagatttggccctcgcacgggatgtgcgataaccgcaagattgactcaagcgcggaaagcgctgtaaccacatgctgttagtccctttatggctgcgagatggctatccacctcggatcactgaactggagctcgaccctccttagtaagggaaccgagaggccttcctgcaacaagctccgacacagagtccacgtgattgctaccaccatgagtacatggttctcccctctcgacccaggacttctttttgaatatccacggctcgatccagagggtggggcatgatccccctagcatagcgagctacagcgggaactgtagctaggccttagcgtgccttggatactgcctgatagggcgacggcctagtcgtgtcggttctataggtagcacatacaaat

SEQ ID NO: 17581 - DNA, 663 bp, synthetic construct
  source 1..663: mol_type = other DNA
aaggaaggactgggcatgagggcccagcccttcctttccccttccggggggtaaaccggctgtgtttgctagaggcacagaggagcaacatccaacctgcttttgtggggaacggtgcggctccaattcctgcgtcgccaaaggtgttagcgcacccaaacggcgcatctaccaatgctattggtgtggtctgcgagttctagcctactcgtttctcccctattcactcattcacgcacaaaaagtgtgttttaactacaagatttagccctcgcacgggatgtgcgataaccgcaagattgactcaagcgcggaaagcgctgtaaccacatgctgttagtccctttatggctgcgagatggctatccacctcggatcactgaactggagctcgaccctccttagtaagggaaccgagaggccttcttgcaacaagctccgacacagagtccacgtgattgctaccaccatgagtacatggttctcccctctcgacccaggacttctttttgaatatccacggctcgatccagagggtggggcatgatccccctagcatagcgagctacagcgggaactgtagctaggccttagcgtgccttggatactgcctgatagggcgacggcctagtcgtgtcggttctataggtagcacatacaaat

SEQ ID NO: 17582 - DNA, 663 bp, synthetic construct
  source 1..663: mol_type = other DNA
aaggaaggactgggcatgagggcccagtccttcctttccccttccggggggtaaaccggctgtgtttgctagaggcacagaggagcaacatccaacctgcttttgtggggaacggtgcggctccaattcctgcgtcgccaaaggtgttagcgcacccaaacggcgcatctaccaatgctattggtgtggtctgcgagttctagcctactcgtttctcccctactcactcattcacacacaaaaactgtgttgtaactacaagatttggccctcgcacgggatgtgcgataaccgcaagattgactcaagcgcggaaagcgctgtaaccacatgctgttagtccctttatggctgcgagatggctatccacctcggatcactgaactggagctcgaccctccttagtaagggaaccgagaggccttcctgcaacaagctccgacacagagtccacgtgattgctaccaccatgagtacatggttctcccctctcgacccaggacttctttttgaatatccacggctcgatccagagggtggggcatgatccccctagcatagcgagctacagcgggaactgtagctaggccttagcgtgccttggatactgcctgatagggcgacggcctagtcgtgtcggttctataggtagcacatacaaat

SEQ ID NO: 17583 - DNA, 663 bp, synthetic construct
  source 1..663: mol_type = other DNA
aaggaaggactgggcatgagggcccagcccttcctttccccttccggggggtaaaccggctgtgtttgctagaggcacagaggagcaacatccaacctgcttttgtggggaacggtgcggctccaattcctgcgtcgccaaaggtgttagcgcacccaaacggcgcatctaccaatgctattggtgtggtctgcgagttctagcctactcgtttctcccctactcactcattcacgcacaaaaagtgtgttgtaactacaagatttagccctcgcacgggatgtgcgataaccgcaagattgactcaagcgcggaaagcgctgtaaccacatgctgttagtccctttatggctgcgagatggctatccacctcggatcactgaactggagctcgaccctccttagtaagggaaccgagaggccttcttgcaacaagctccgacacagagtccacgtgattgctaccaccatgagtacatggttctcccctctcgacccaggacttctttttgaatatccacggctcgatccagagggtggggcatgatccccctagcatagcgagctacagcgggaactgtagctaggccttagcgtgccttggatactgcctgatagggcgacggcctagtcgtgtcggttctataggtagcacatacaaat

SEQ ID NO: 17584 - DNA, 663 bp, synthetic construct
  source 1..663: mol_type = other DNA
aaggaaggactgggcatgagggcccagcccttcctttccccttccggggggtaaaccggctgtgtttgctagaggcacagaggagcaacatccaacctgcttttgtggggaacggtgcggctccaattcctgcgtcgccaaaggtgttagcgcacccaaacggcgcatctaccaatgctattggtgtggtctgcgagttctagcctactcgtttctcccctactcactcactcacgcacaaaaagtgtgttgtaactacaagatttagccctcgcacgggatgtgcgataaccgcaagattgactcaagcgcggaaagcgctgtaaccacatgctgttagtccctttatggctgcgagatggctatccacctcggatcactgaactggagctcgaccctccttagtaagggaaccgagaggccttcttgcaacaagctccgacacagagtccacgtgattgctaccaccatgagtacatggttctcccctctcgacccaggacttctttttgaatatccacggctcgatccagagggtggggcatgatccccctagcatagcgagctacagcgggaactgtagctaggccttagcgtgccttggatactgcctgatagggcgacggcctagtcgtgtcggttctataggtagcacatacaaat

SEQ ID NO: 17585 - DNA, 675 bp, synthetic construct
  source 1..675: mol_type = other DNA
ccgtcgggccttataccccgatttgctgagcttctctaggagagcccttttcccagccagaggtggctggttaaacaatacctattgtaacaaaacatctaagacataacaaccgcacacctggtctccactggccgaaggcaactagcaataaggtaggtgggttcagacgcttaaagtgtgttgtatatattcttttctaacctgtgttttacacagggtggcagatggcgtgccataaccctaatagtgagataccacgcttgtggaccttatgctcacacagccatcctctagtaagtttgtaagacgtctgatgacgtgtgggaacttgttggagataacattttgctgcaaagcatcccattgccagcggatccacatctggtaacagatgcctctggggccaaaagccaaggtttaacagaccctttgggattggttcaaacctgaattgttatggaagacatttagtacctgctgatttggtagtagtgcaaacactagttgtaaggcccacgaaggatgcccagaaggtacccgtaggtaacaagtgacactatggatctgatctggggccaactacctctatctaggtgagttggttaaaaaacgtctagtgggccaaacccaggggggatccctggtttccttttttaaatttgaataatcact

SEQ ID NO: 17586 - DNA, 675 bp, synthetic construct
  source 1..675: mol_type = other DNA
ccgtcgggccttataccccgatttgctgagcttctctaggagagcccttttcccagccagaggtggctggttaaacaatacctattgtaacaaaacatctaagacataacaaccgcacacctggtctccactggccgaaggcaactagcaataaggtaggtgggttcagacgcttaaagtgtgttgtatatattcttttctaacctgtgttttacacagggtggcagatggcgtgccataaccctaatagtgagataccacgcttgtggaccttatgctcacacagccatcctctagtaagtttgtaagacgtctgatgacgtgtgggaacttgttggagataacattttgctgcaaagcatcccattgccagcggatccacatctggtaacagatgcctctggggccaaaagccaaggtttaacagaccctttgggattggttcaaacctgaattgttatggaagacatttagtacctgctgatttggtagtagtgcaaacactagttgtaaggcccacgaaggatgcccagaaggtacccgtaggtaacaagtgacactatggatctgatctggggctaactacctctatctaggtgagttggttaaaaaacgtctagtgggccaaacccaggggggatccctggtttccttttttttatttgaataatcact

SEQ ID NO: 17587 - DNA, 663 bp, synthetic construct
  source 1..663: mol_type = other DNA
aaggaaggactgggcatgagggcccagtccttcctttccccttccggggggtaaaccggctgtgtttgctagaggcacagaggagcaacatccaacctgcttttgtggggaacggtgcggctccaattcctgcgtcgccaaaggtgttagcgcacccaaacggcgcatctaccaatgctattggtgtggtctgcgagttctagcctactcgtttctcccctactcactcattcacgcacaaaaactgtgttgtaactacaagatttagccctcgcacgggatgtgcgataaccgcaagattgactcaagcgcggaaagcgctgtaaccacatgctgttagtccctttatggctgcgagatggctattcacctcggatcactgaactggagctcgaccctccttagtaagggaaccgagaggccttcttgcaacaagctccgacacagagtccacgtgattgctaccaccatgagtacatggttctcccctctcgacccaggacttctttttgaatatccacggctcgatccagagggtggggcatgatccccctagcatagcgagctacagcgggaactgtagctaggccttagcgtgccttggatactgcctgatagggcgacggcctagtcgtgtcggttctataggtagcacatacaaat

SEQ ID NO: 17588 - DNA, 663 bp, synthetic construct
  source 1..663: mol_type = other DNA
aaggaaggactgggcatgagggcccagccccccctttccccttccggggggtaaaccggctgtgtttgctagaggcacagaggagcaacatccaacctgcttttgtggggaacggtgcggctccaattcctgcgtcgccaaaggtgttagcgcacccaaacggcgcatctaccaatgctattggtgtggtctgcgagttctagcctactcgtttctcccctactcactcattcacgcacaaaaactgtgttgtaactacaagatttagccctcgcacgggatgtgcgataaccgcaagattgactcaagcgcggaaagcgctgtaaccacatgctgttagtccctttatggctgcgagatggctattcacctcggatcactgaactggagctcgaccctccttagtaagggaaccgagaggccttcttgcaacaagctccgacacagagtccacgtgattgctaccaccatgagtacatggttctcccctctcgacccaggacttctttttgaatatccacggctcgatccagagggtggggcatgatccccctagcatagcgagctacagcgggaactgtagctaggccttagcgtgccttggatactgcctgatagggcgacggcctagtcgtgtcggttctataggtagcacatacaaat

SEQ ID NO: 17589 - DNA, 663 bp, synthetic construct
  source 1..663: mol_type = other DNA
aaggaaggactgggcatgagggcccagcccttcctttccccttccggggggtaaaccggctgtgtttgctagaggcacagaggagcaacatccaacctgcttttgtggggaacggtgcggctccaattcctgcgtcgccaaaggtgttagcgcacccaaacggcgcatctaccaatgctattggtgtggtctgcgagttctagcctactcgtttctcccctactcactcattcacacacaaaaactgtgttgtaactacaagatttagccctcgcacgggatgtgcgataaccgcaagattgactcaagcgcggaaagcgctgtaaccacatgctgttagtccctttatggctgcgagatggctatccacctcggatcactgaactggagctcgaccctccttagtaagggaaccgagaggccttcttgcaacaagctccgacacagagtccacgtgattgctaccaccatgagtacatggttctcccctctcgacccaggacttctttttgaatatccacggctcgatccagagggtggggcatgatccccctagcatagcgagctacagcgggaactgtagctaggccttagcgtgccttggatactgcctgatagggcgacggcctagtcgtgtcggttctataggtagcacatacaaat

SEQ ID NO: 17590 - DNA, 663 bp, synthetic construct
  source 1..663: mol_type = other DNA
aaggaaggactgggcatgagggcccagtccttcctttccccttccggggggtaaaccggctgtgtttgctagaggcacagaggagcaacatccaacctgcttttgtggggaacggtgcggctccaattcctgcgtcgccaaaggtgttagcgcacccaaacggcgcatctaccaatgctattggtgtggtctgcgagttctagcctactcgtttctcccctactcactcattcacgcacaaaaactgtgttgtaactacaagatttagccctcgcacgggatgtgcgataaccgcaagattgactcaagcgcggaaagcgctgtaaccacatgctgttagtccctttatggctgcgagatggctatccgcctcggatcactgaactggagctcgaccctccttagtaagggaaccgagaggccttcctgcaacaagctccgacacagagtccacgtgattgctaccaccatgagtacatggttctcccctctcgacccaggacttctttttgaatatccacggctcgatccagagggtggggcatgatccccctagcatagcgagctacagcgggaactgtagctaggccttagcgtgccttggatactgcctgatagggcgacggcctagtcgtgtcggttctataggtagcacatacaaat

SEQ ID NO: 17591 - DNA, 663 bp, synthetic construct
  source 1..663: mol_type = other DNA
aaggaagggctgggcatgagggcccagtccttcctttccccttccggggggtaaaccggctgtgtttgctagaggcacagaggagcaacatccaacctgcttttgtggggaacggtgcggctccaattcctgcgtcgccaaaggtgttagcgcacccaaacggcgcatctaccaatgctattggtgtggtctgcgagttctagcctactcgtttctcccctactcactcattcacacacaaaaactgtgttgtgactataagatttggccctcgcacgggatgtgcgataaccgcaagattgactcaagcgcggaaagcgctgtaaccacatgctgttagtccctttatggctgcgagatggctatccacctcggatcactgaactggagctcgaccctccttagtaagggaaccgagaggccttcctgcaacaagctccgacacagagtccacgtgattgctaccaccatgagtacatggttctcccctctcgacccaggacttctttttgaatatccacggctcgatccagagggtggggcatgatccccctagcatagcgagctacagcgggaactgtagctaggccttagcgtgccttggatactgcctgatagggcgacggcctagtcgtgtcggttctataggtagcacatacaaat

SEQ ID NO: 17592 - DNA, 663 bp, synthetic construct
  source 1..663: mol_type = other DNA
aaggaaggactgggcatgagggcccagtccttcctttccccttccggggggtaaaccggctgtgtttgctagaggcacagaggagcaacatccaacctgcttttgtggggaacggtgcggctccaattcctgcgtcgccaaaggtgttagcgcacccaaacggcgcatctaccaatgctattggtgtggtctgcgagttctagcctactcgtttctcccctactcactcattcacacacaaaaactgtgttgtaactacaagatttggccctcgcacgggatgtgcgataaccgtaagattgactcaagcgcggaaagcgctgtaaccacatgctgttagtccctttatggctgcgagatggctatccacctcggatcactgaactggagctcgaccctccttagtaagggaaccgagaggccttcctgcaacaagctccgacacagagtccacgtgattgctaccaccatgagtacatggttctcccctctcgacccaggacttctttttgaatatccacggctcgatccagagggtggggcatgatccccctagcatagcgagctacagcgggaactgtagctaggccttagcgtgccttggatactgcctgatagggcgacggcctagtcgtgtcggttctataggtagcacatacaaat

SEQ ID NO: 17593 - DNA, 663 bp, synthetic construct
  source 1..663: mol_type = other DNA
aaggaaggactgggcatgagggcccagcccttcctttccccttccggggggtaaaccggctgtgtttgctagaggcacagaggagcaacatccaacctgctttcgtggggaacggtgcggctccaattcctgcgtcgccacaggtgttaacgcacccaaacggcgcatctaccaatgctattggtgtggtctgcgagttctagcctactcgtttctcccctactcactcattcacgcacaaaaactgtgttgtaactacaagatttagccctcgcacgggatgtgcgataaccgcaagattgactcaagcgcggaaagcgctgtaaccacatgctgttagtccctttatggctgcgagatggctatccacctcggatcactgaactggagctcgaccctccttagtaagggaaccgagaggccttcttgcaacaagctccgacacagagtccacgtgattgctaccaccatgagtacatggttctcccctctcgacccaggacttctttttgaatatccacggctcgatccagagggtggggcatgatccccctagcatagcgagctacagcgggaactgtagctaggccttagcgtgccttggatactgcctgatagggcgacggcctagtcgtgtcggttctataggtagcacatacaaat

SEQ ID NO: 17594 - DNA, 663 bp, synthetic construct
  source 1..663: mol_type = other DNA
aaggaaggactgggcatgagggcccagcccttcctttccccttccggggggtaaaccggctgtgtttgctagaggcacagaggagcaacatccaacctgctttcgtggggaacggtgcggctccaattcctgcgtcgccacaggtgttagcgcacccaaacggcgcatctaccaatgctattggtgtggtctgcgagttctagcctactcgtttctcccctactcactcattcacgcacaaaaactgtgttgtaactacaagatttagccctcgcacgggatgtgcgataaccgcaagattgactcaagcgcggaaagcgctgtaaccacatgctgttagtccctttatggctgcgagatggctatccacctcggatcactgaactggagctcgaccctccttagtaagggaaccgagaggccttcttgcaacaagctccgacacagagtccacgtgattgctaccaccatgagtacatggttctcccctctcgacccaggacttctttttgaatatccacggctcgatccagagggtggggcatgatccccctagcatagcgagctacagcgggaactgtagctaggccttagcgtgccttggatactgcctgatagggcgacggcctagtcgtgtcggttctataggtagcacatacaaat

SEQ ID NO: 17595 - DNA, 663 bp, synthetic construct
  source 1..663: mol_type = other DNA
aaggaaggactgggcatgagggcccagccccccctttccccttccggggggtaaaccggctgtgtttgctagaggcacagaggagcaacatccaacctgcttttgtggggaacggtgcggctccaattcctgcgtcgccaaaggtgttagcgcacccaaacggcgcatctaccaatgctattggtgtggtctgcgagttctagcctactcgtttctcccctactcactcattcacgcacaaaaactgtgttgtaactacaagatttagccctcgcacgggatgtgcgataaccgcaagattgactcaagcgcggaaagcgctgtaaccacatgctgttagtccctttatggctgcgagatggctatccacctcggatcactgaactggagctcgaccctccttagtaagggaaccgagaggccttcttgcaacaagctccgacacagagtccacgtgattgctaccaccatgagtacatggttctcccctctcgacccaggacttctttttgaatatccacggctcgatccagagggtggggcatgatccccctagcatagcgagctacagcgggaactgtagctaggccttagcgtgccttggatactgcctgatagggcgacggcctagtcgtgtcggttctataggtagcacatacaaat

SEQ ID NO: 17596 - DNA, 663 bp, synthetic construct
  source 1..663: mol_type = other DNA
aaggaaagactgggcatgagggcccagtctttcctttccccttccggggggtaaaccggctgtgtttgctagaggcacagaggagcaacatccaacctgcttttgtggggaacggtgcggctccgattcctgcgtcgccaaaggtgttagcgcacccaaacggcgcatctaccaatgctattggtgtggtctgcgagttctagcctactcgtttctcccctattcactcactcacgcacaaaaagtttgttgtaactacaagatttagccctcgcacgggatgtgcgataaccgcaagattgactcaagcgcggaaagcgctgtaaccacatgctgttagtccctttatggctgcgagatggctatccacctcggatcactgaactggagctcgaccctccttagtaagggaaccgagaggccttcttgcaacaagctccgacacagagtccacgtgattgctaccaccatgagtacatggttctcccctctcgacccaggacttctttttgaatatccacggctcgatccagagggtggggcatgatccccctagcatagcgagctacagcgggaactgtagctaggccttagcgtgccttggatactgcctgatagggcgacggcctagtcgtgtcggttctataggtagcacatacaaat

SEQ ID NO: 17597 - DNA, 663 bp, synthetic construct
  source 1..663: mol_type = other DNA
aaggaaggactgggcatgagggcccagtccttcctttccccttccggggggtataccggctgtgtttgctagaggcacagaggagcaacatccaacctgcttttgtggggaacggtgcgactccaattcctgcgtcgccaaaggtgttagtgcacccaaacggcgcatctaccaatgctattggtgtggtctgcgagttctagcctactcgtttttcccctactcactcattcacgcacaaaaagtgtgttgtaactacaagatttagccctcgcacgggatgtgcgataaccgcaagattgactcaagcgcggaaagcgctgtaaccacatgctgttagtccctttatggctgcgagatggctatccacctcggatcactgaactggagctcgaccctccttagtaagggaaccgagaggccttcttgcaacaagctccgacacagagtccacgtgattgctaccaccatgagtacatggttctcccctctcgacccaggacttctttttgaatatccacggctcgatccagagggtggggcatgatccccctagcatagcgagctacagcgggaactgtagctaggccttagcgtgccttggatactgcctgatagggcgacggcctagtcgtgtcggttctataggtagcacatacaaat

SEQ ID NO: 17598 - DNA, 663 bp, synthetic construct
  source 1..663: mol_type = other DNA
aaggaaggactgggcatgagggcccagtcccccctttccccttccggggggtaaaccggctgtgtttgctagaggcacagaggagcaacatccaacctgcttttgtggggaacggtgcggctccaattcctgcgtcgccaaaggtgttagcgcactcaaacggcgcatctaccaatgctattggtgtggtctgcgagttctagcctactcgtttctcccctattcactcactcacgcacaaaaagtgtgttgtaactacaagatttagccctcgcacgggatgtgcgataaccgcaagattgactcaagcgcggaaagcgctgtaaccacatgctgttagtccctttatggctgcgagatggctatccacctcggatcactgaactggagctcgaccctccttagtaagggaaccgagaggccttcttgcaacaagctccgacacagagtccacgtgattgctaccaccatgagtacatggttctcccctctcgacccaggacttctttttgaatatccacggctcgatccagagggtggggcatgatccccctagcatagcgagctacagcgggaactgtagctaggccttagcgtgccttggatactgcctgatagggcgacggcctagtcgtgtcggttctataggtagcacatacaaat

SEQ ID NO: 17599 - DNA, 663 bp, synthetic construct
  source 1..663: mol_type = other DNA
aaggaaggactgggcatgagggcccagtccttcctttccccttccggggggtaaaccggctgtgtttgctagaggcacagaggagcaacatccaacctgcttttgtggggaacggtgcggctccaattcctgcgtcgccaaaggtgttagcgcacccaaacggcgcatctaccaatgctattggtgtggtctgcgagttctagcctactcgtttctcccctactcactccttcacgcacaaaaactgtgttgtgactacaagatttagccctcgcacgggatgtgcgataaccgcaagattgactcaagcgcggaaagcgctgtaaccacatgctgttagtccctttatggctgcgagatggctatccacctcggatcactgaactggagctcgaccctccttagtaagggaaccgagaggccttcctgcaacaagctccgacacagagtccacgtgattgctaccaccatgagtacatggttctcccctctcgacccaggacttctttttgaatatccacggctcgatccagagggtggggcatgatccccctagcatagcgagctacagcgggaactgtagctaggccttagcgtgccttggatactgcctgatagggcgacggcctagtcgtgtcggttctataggtagcacatacaaat

SEQ ID NO: 17600 - DNA, 674 bp, synthetic construct
  source 1..674: mol_type = other DNA
ccgtcgggccttataccccgatttgctgagcttctctaggagagcccttttcccagccagaggtggctggttaaacaatacctattgtaacaaaacatctaagacataacaaccgtacacctggtctccactggccgaaggcaactagcaataaggtaggtgggttcagacgcttaaagtgtgttgtatatattcttttctaacctgtgttttacacagggtggcagatggcgtgccataaccctaatagtgagataccacgcttgtggaccttatgctcacacagccatcctctagtaagtttgtaagacgtctgatgacgtgtgggaacttgttggagataacattttgctgcaaagcatcccattgccagcggatccacatctggtaacagatgcctctggggccaaaagccaaggtttaacagaccctttgggattggttcaaacctgaattgttatggaagacatttagtacctgctgatttggtagtagtgcaaacactagttgtaaggcccacgaaggatgcccagaaggtacccgtaggtaacaagtgacactatggatctgatctggggccaactacctctatctaggtgagttggttaaaaaacgtctagtgggccaaacccaggggggatccctggtttcctttttaaatttgaataatcact

SEQ ID NO: 17601 - DNA, 674 bp, synthetic construct
  source 1..674: mol_type = other DNA
ccgtcgggccttataccccgatttgctgagcttctctaggagagcccttttcccagccagaggtggctggttaaacaatacctattgtaacaaaacatctaagacataacaaccgcacacctggtctccactggccgaaggcaactagcaataaggtaggtgggttcagacgcttaaagtgtgttgtatatattcttttctaacctgtgttttatacagggtggcagatggcgtgccataaccctaatagtgagataccacgcttgtggactttatgctcacacagccatcctctagtaagtttgtaagacgtctgatgacgtgtgggaacttgttggagataacattttgctgcaaagcatcccattgccagcggatccacatctggtaacagatgcctctggggccaaaagccaaggtttaacagaccctttgggattggttcaaacctgaattgttatggaagacatttagtacctgctgatttggtagtagtgcaaacactagttgtaaggcccacgaaggatgcccagaaggtacccgtaggtaacaagtgacactatggatctgatctggggccaactacctctatctaggtgagttggttaaaaaacgtctagtgggccaaacccaggggggatccctggtttccttttttaatttgaataatcact

SEQ ID NO: 17602 - DNA, 478 bp, synthetic construct; identical to SEQ ID NO: 506
  source 1..478: mol_type = other DNA

SEQ ID NO: 17603 - DNA, 661 bp, synthetic construct
  source 1..661: mol_type = other DNA
aaggaaggactgggcatcagggcccagcccttcctttccccttccggggggttaaccggctgtgtttgctagaggcacagaggggcaacatccaacctgcttttgcggggaacggtgcggctccgattcctgcgtcgccaaaggtgttagcgcacccaaacggcgcacctaccaatgttattggtgtggtctgcgagttctagcctactcgtttctcccccgaccattcactcacccacgaaaagtgtgttgtaaccataagatttaacccccgcacgggatgtgcgataaccgtaagactggctcaagcgcggaaagcgctgtaaccacatgctgttagtccctttatggctgcaagatggctacccacctcggatcactgaactggagctcgaccctccttagtaagggaaccgagaggccttcgtgcaacaagctccgacacagagtccacgtgactgctaccaccatgagtacatggttctcccctctcgacccaggacttctttttgaatatccacggctcgatccagagggtggggcatgacccctagcatagcgagctacagcgggaactgtagctaggccttagcgtgccttggatactgcctgatagggcgacggcctagtcgtgtcggttctataggtagcacatacaaat

SEQ ID NO: 17604 - DNA, 673 bp, synthetic construct
  source 1..673: mol_type = other DNA
ccgtcgggccttataccccgatttgctgagcttctctaggagagcccttttcccagccagaggtggctggttaaacaatacctattgtaacaaaacatctaagacataacaaccgcacacctggtctccactggccgaaggcaactagcaataaggtaagtgggttcagacgcttaaagtgtgttgtatatattcttttctaacctgtgttttacacagggtggcagatggcgtgccataaccctaatagtgagataccacgcttgtggaccttatgctcacacagccatcctctagtaagtttgtaagacgtctgatgacgtgtgggaacttgttggagataacattttgctgcaaagcatcccattgccagcggatccacatctggtaacagatgcctctggggccaaaagccaaggtttaacagaccctttgggattggttcaaacctgaattgttatggaagacatttagtacctgctgatttggtagtagtgcaaacactagttgtaaggcccacgaaggatgcccagaaggtacccgtaggtaacaagtgacactatggatctgatctggggccaactacctctatctaggtgagttggttaaaaaacgtctagtgggccaaacccaggggggatccctggtttcttttttaatttgaataatcact

SEQ ID NO: 17605 - DNA, 673 bp, synthetic construct
  source 1..673: mol_type = other DNA
ccgtcgggccttataccccgatttgctgagcttctctaggagagcacttttcccagccagaggtggctggttaaacaatacctattgtaacaaaacatctaagacataacaaccgcacacctggtctccactggccgaaggcaactagcaataaggtaggtgggtttagacgcttaaagtgtgttgtatatattcttttctaacctgtgttttacacagggtggcagatggcgtgccataaccctaatagtgagataccacgcttgtggaccttatgctcacacagccatcctctagtaagtttgtaagacgtctgatgacgtgtgggaacttgttggagataacattttgctgcaaagcatcccattgccagcggatccacatctggtaacagatgcctctggggccaaaagccaaggtttaacagaccctttgggattggttcaaacctgaattgttatggaagacatttagtacctgctgatttggtagtagtgcaaacactagttgtaaggcccacgaaggatgcccagaaggtacccgtaggtaacaagtgacactatggatctgatctggggccaactacctctatctaggtgagttggttaaaaaacgtctagtgggccaaacccaggggggatccctggtttcctttttaatttgaataatcact

SEQ ID NO: 17606 - DNA, 642 bp, synthetic construct
  source 1..642: mol_type = other DNA
cttctctaggagagcccttttcccagccagaggtggctggttaaataatacctattgtaacaaaacatctaagatacaacaaccacacacctggtttccactggctgaaggcaactagcaataaggcaggtgggttcaaacgcttaaagtgtgttgtatatattcttttctaacctgtgttctacacagggtggcagatggcgtgccataactctaatagtgagataccacgcttgtggaccttatgctcacacagccatcctctagtaagtttgtaagacgtctgatgacgtgtgggaacttgttggagataacattttgctgcaaagcatcccattgccagcggatccacatctggtaacagatgcctctggggccaaaagccaaggtttaacagaccctttgggattggttcaaacctgaattgttatggaagacatttagtacctgctgatttggtagtagtgcaaacactagttgtaaggcccacgaaggatgcccagaaggtacccgtaggtaacaagtgacactatggatctgatctggggccaactacctctatctaggtgagttggttaaaaaacatctagtgggccaaacccaggggggatccctggtttcctttttatttgaataatcact

SEQ ID NO: 17607 - DNA, 447 bp, synthetic construct
  source 1..447: mol_type = other DNA
tccacactcatttcccccctccacccctaaggtggttgtatcctcataccctaccctcccttccacaacggacggacaaatggacttggacttttggcaagagcacatggtatgactattggatacaccttgaatggcagtagcgtggcgagctatggaaaaatcgcaactgtcgatagccatgttagtgacgcgcttcggcgtgctcctttggtgattcggcgactggttacaggagagtaggcagcgagctatgggcaaactcctgcagtattactcagggggaatgtgcaattgagacttgacgagcgtctctttgagatgtggcgcatgctcttggcattaccatagtgagcttccaggttgggaaacctggactgggcctatactacctgatagggtcgcggctggccgcctgtaactagtatagtcagttgaaaccccccc

SEQ ID NO: 17608 - DNA, 254 bp, synthetic construct
  source 1..254: mol_type = other DNA
tataagatacacctgcaaaggcggcacaaccccagtgccacgttgtgagttggatagttgtggaaagagtcaaatggctctcctcaagcgtattcaacaaggggctgaaggatgcccagaaggtaccccattgtatgggatctgatctggggcctcggtgcacatgctttacatgtgtttagtcgaggttaaaaaacgtctaggccccccgaaccacggggacgtggttttcctttgaaaaacacgatgataat

SEQ ID NO: 17609 - DNA, 802 bp, synthetic construct
  source 1..802: mol_type = other DNA
cctccagatggtgttttgtgttattggatgctggatggtcacgttggagactgcacgtggcagtcttgaaacgtgtggtttgacgtctatccattatggcagtgggtggagtactgcaaagatgttaccgtgctttacacggtttttgaaccccacaccggctgtttggcgcttgcaggacagcaggtttattttcttatgctctttatttctagccaacagggttctatcctgttgggcggagtgatactcccgttccttcttggacagattgcctccacgatctttgtggatctcaaggtgatcaagtcactggtaaatagagcgaaggttgaggaaacctgaggaatttccatgtggttttgccaggagttgtagcgatgctgtgtgtgtgtgcggatttcccctcatggcaacatgagcctcacaggccaaaagccctgtccgaaaggacccacacagtggagcaatcccagctccctcctacaaagctttgtgagaatgaactcacgtttattcttctttattctctgtttacatcaggccccaaagatgtcctgaaggtaccttgtgtatctgggcatgagcaccatcaactacccggacttgcatttcggtgcagacacatgtggttacccagcccctctgctttggcagaggggcttttgctcgctcagcacgagatctgatcaggagcccttcccagtgtgctttacacctggcggggggttaaaaattgcccaaggcctggcaaaataacctaggggactaggttttccttttattaacaatgtctgtcatt

SEQ ID NO: 17610 - DNA, 662 bp, synthetic construct
  source 1..662: mol_type = other DNA
gccctcatgcccagtccttcctttccccttccggggggtaaaccggctgtgtttgctagaggcacagaggagcaacatccaacctgcttttgtggggaacggtgcggctccgattcctgcgtcgccaaaggtgttagcgcacccaaacggcgcatctaccaatgctattggtgtggtctgcgagttctagcctactcgtttctcccccatccactcactcgcgcacaaaaagtgtgttgtgactacaagatttagccctcgcacgggatgtgcgataaccgcaagattgcacgcctgccgatagacgattcggaaagcgctgtaaccacatgctgttagtccctttatggctgcgagatggctatccacctcggatcactgaactggagctcgaccctccttagtaagggaaccgagaggccttcttgcaacaagctccgacacagagtccacgtgattgctaccaccatgagtacatggttctcccctctcgacccaggacttctttttgaatatccacggctcgatccagagggtggggcatgatccccctagcatagcgagctacagcgggaactgtagctaggccttagcgtgccttggatactgcctgatagggcgacggcctagtcgtgtcggttctataggtagcacatacaaat

SEQ ID NO: 17611 - DNA, 616 bp, synthetic construct
  source 1..616: mol_type = other DNA
cggctggtcaataaaagcctcaaacgtaactaacatctaagattgattcaataaccccatgcctgatccccaccagtcgaagacaactagtaataagacgggtggaacaaggatgcttaaagcatggcgtaaatattcttttctaacccatgattctatggggtggcagatggcgtgccataactctattagtgagataccatgcttgtggaacttatgctcacacagccatcctctagtaagtttgtgagatgtctaatgacgtgtgggaacttattggaagcaacaatttgccgtacggcatcctactgccagcggatccacacctggtaacaggtgcccctggggccaaaagccaaggtttaatagaccctttaggattggttaaaacctgaattgttgtggaagatccttagtacctgctgatttggtagtaatgcaaacactagttgtaaggcccacgaaggatgcccagaaggtacccgtaggtaacaagtgacactatggatctgatctggggccaactacttctatcatggtgagttggttaaaaaacgtctagtgggccaaacccaggggggatccctggtttcctttttattttactacagccaat

SEQ ID NO: 17612 - DNA, 647 bp, synthetic construct
  source 1..647: mol_type = other DNA
ctcatgcccagtccttcctttccccttccggggggtaaaccggctgtgtttgctagaggcacagaggagcaacatccaacctgcttttgtggggaacggtgcggctccaattcccgcgtcgccaaaggtgttagcgcacccaaacggcgcatctaccaatgctattggtgtggtctgcgagttctagcctactcgtttctcccctactcactcattcacgcacaaaaactgtgttgtaactacaagatttagccctcgcacgggatgtgcgataaccgcaagattgactcaagcgcggaaagcgctgtaaccacatgctgttagtccctttatggctgcgagatggctatccacctcggatcactgaactggagctcgaccctccttagtaagggaaccgagaggccttcttgcaacaagctccgacacagagtccacgtgattgctaccaccatgagtacatggttctcccctctcgacccaggacttctttttgaatatccacggctcgatccagagggtggggcatgatccccctagcatagcgagctacagcgggaactgtagctaggccttagcgtgccttggatactgcctgatagggcgacggcctagtcgtgtcggttctataggtagcacatacaaat

SEQ ID NO: 17613 - DNA, 634 bp, synthetic construct
  source 1..634: mol_type = other DNA
tccttcctttccccttccggggggtaaaccggctgtgtttgctagaggcacagaggagcaacatccaacctgcttttgtggggaacggtgcggctccaattcctgcgtcgccaaaggtgttagcgcacccaaacggcgcatctaccaatgctattggtgtggtctgcgagttctagcctactcgtttctcccctactcactcattcacgcacaaaaactgtgttgtaactacaagatttagccctcgcacgggatgtgcgataaccgcaagattgactcaagcgcggaaagcgctgtaaccacatgctgttagtccctttatggctgcgagatggctatccacctcggatcactgaactggagctcgaccctccttagtaagggaaccgagaggccttcttgcaacaagctccgacacagagtccacgtgattgctaccaccatgagtacatggttctcccctctcgacccaggacttctttttgaatatccacggctcgatccagagggtggggcatgacccctagcatagcgagctacagcgggaactgtagctaggccttagcgtgccttggatactgcctgatagggcgacggcctagtcgtgtcggttctataggtagcacatacaaat

SEQ ID NO: 17614 - DNA, 642 bp, synthetic construct
  source 1..642: mol_type = other DNA
ttctctaggagattccttttcccagccagaggtggctggttaaataatacctattgtaacaaaacatgtaagacacaacaaccgcacacctggtctccactggccgaaggcaactagcaataaggcaggtgggttcagacgcttaaagtgtgttgtgcatattcttttctaacctgtgttctacacagggtggcagatggcgtgccataaccctaatagtgagatatccacgcttgtggatcttatgctcacacagccatcctctagtaagtttgtaagacatctgatgacgtgtgggaacttgttggagataacattttgctgcaaagcatcccattgccagcggatccacatctggtaacagatgcctctggggccaaaagccaaggtttaacagaccctttgggattggttcaaacctgaattgttatggaagacatttagtacctgctgatttggtggtagtgcaaacactagttgtaaggcccacgaaggatgcccagaaggtacccgtaggtaacaagtgacactatggatctgatctggggccaactacctctatctaggtgagttggttaaaaaacgtctagtgggccaaacccaggggggatccctggtttcctttttatttgaataatcact

SEQ ID NO: 17615 - DNA, 637 bp, synthetic construct
  source 1..637: mol_type = other DNA
agccctttcctttccccttccggggggttaaccggctgtgtttgctagaggcacagaggggcaacatccaacctgtttttgcggggaacggtgcggctccgattcctgcgccgccaaaggtgttagcgcacccaaacggcgcacctaccaatgttattggtgtggtctgcgagttctagcctactcgtttctcccccgaccattcactcgcccacgaaaagtgtgttgtaaccataagatttaacccccgcacgggacgtgcgataaccgtaagactggctcaagcgcggaaagcgctgtaaccacatgctgttagtccctttatggctgcaagatggctacccacctcggatcactgaactggagctcgaccctccttagtaagggaaccgagaggccttcgtgcaaaaagctccgacacagagtccacgtgactgctaccaccatgagtacatggttctcccctctcgacccaggacttctttttgaatatccacggctcgatccagagggtggggcatgacccctagcatagcgagctacagcgggaactgtagctaggtcttagcgtaccttggatactgcctgatagggcgacggcctagtcgtgtcggttctataggtagcacatacaaat

SEQ ID NO: 17616 - DNA, 534 bp, synthetic construct
  source 1..534: mol_type = other DNA
ttttgagaaaggggacgtctgcgcacgaaacgcgccgtcacttgaggatgacttgtacaaacaccgatccacgcaggtatccacaactgacacaaaaccgtgcaatttgaaaccccacctggtctttccaggtctggaggggtaacactttgtactgtggttgactccacgctcggtccactagcgggtactagtagtggtaccgttgtttcgtagcggagcatagtggccgcgggaactcctccttggtaacaaggacccgcggggccgaaagccacgtcctaacggacccactatgtgtgcaaccccagcacggcaactttaccacgaaaaccactttaaggtgacactgaaactggtactcaaccactggtgacaggctaaggatgcccttcaggtaccccgaggtaacaagcgacactcgggatctgagaaggggactggggcttctttaaaagcgcccagtttaaaaaacttctatgcctgaataggcgaccggaggccggcgccttttctttaactactactcaccat

SEQ ID NO: 17617 - DNA, 650 bp, synthetic construct
  source 1..650: mol_type = other DNA
gggccctgacgcccagcccttcctttccccttccggggggttaaccggctgtgtttgctagaggcacagaggggcaacatccaacctgcttttgcggggaacggtgcggctccgattcctgcgccgccaaaggtgttagcgcacccaaacggcgcacctaccaatgttattggtgtggtctgcgagttctagcctactcgtttctcccccgaccattcactcgcccacgaaaagtgtgttgtaaccataagatttaacccccgcacgggatgtgtgataaccgtaagactggctcaagcgcggaaggcgctgtaaccacatgctgttagtccctttatggctgcaagatggctacccacctcggatcactgaactggagctcgaccctccttagtaagggaaccgagaggccttcgtgcaaaaagctccgacacagagtccacgtgactgctaccaccatgagtacatggttctcccctctcgacccaggacttctttttgaatatccacggctcgatccagagggtggggcatgacccctagcatagcgagctacagcgggaactgtagctaggtcttagcgtaccttggatactgcctgatagggcgacggcctagtcgtgtcggttctataggtagcacatacaaat

SEQ ID NO: 17618 - DNA, 638 bp, synthetic construct
  source 1..638: mol_type = other DNA
tccttttcccagccctgaggcggctggacaataaaagcctcaattgtaacaaacatctaagattattacattaaccccatgcctggtctccattagttgaaggcaacttgcaataaaatgagtggaaacaagacgcttaaagcatggtgtaaattaacttttctaacccacactttgtctggggtggcagatggcgtgccataattctattagtgagataccacgcttgtggaccttatgctcacacagccatcctctagtaagtttgtgagatgtctggtgacgtgtgggaacttatcggaaacaacgttttgctgtgaagcatcctattgccagcggaacaacacctggtaacaggtgcccctggggccaaaagccaaggtttaacagaccctttaggattggttttaaaacctgaaatgttgtggaagatacttagtacctaccgatctggtagtaatgcaaacactagttgtaaggcccacgaaggatgcccagaaggtacccgtaggtaacaagtgacactatggatctgatctggggctaggtacctctatcttggtgacctggttaaaaaacatctagtgggccaaacccgggggggatccccggtttccttttattttatcaatgtcact

SEQ ID NO: 17619 - DNA, 646 bp, synthetic construct
  source 1..646: mol_type = other DNA
tcatgcccagtccttcctttccccttccggggggtaaaccggctgtgtttgctagaggcacagaggagcaacatccaacctgcttttgtggggaacggtgcggctccaattcctgcgtcgccaaaggtgttagcgcacccaaacggcgcatctaccaatgctattggtgtggtctgcgagttctagcctactcgtttctctcctattcactcactcacgcacaaaaagtgtgttgtaactacaagatttagccctcgcacgggacgtgcgataaccgcaagattgactcaagcgcggaaagcgctgtaaccacatgctgttagtccctttgtggctgcgagatggctatccacctcggatcactgaactggagctcgaccctccttagtaagggaaccgagaggccttcttgcaacaagctccgacacagagtccacgtgattgctaccaccatgagtacatggttctcccctctcgacccaggacttctttttgaatatccacggctcgatccagagggtggggcatgatccccctagcatagcgagctacagcgggaactgtagctaggccttagcgtgccttggatactgcctgatagggcgacggcctagtcgtgtcggttctataggtagcacatacaaat

SEQ ID NO: 17620 - DNA, 542 bp, synthetic construct; identical to SEQ ID NO: 582
  source 1..542: mol_type = other DNA

SEQ ID NO: 17621 - DNA, 637 bp, synthetic construct
  source 1..637: mol_type = other DNA
taggagattccttttcccagccagaggtggctggttaaataatacctattgtaacaaaacatgtaagacacaacaaccgcacacctggtctccactggccgaaggcaactagcaataaggcaggtgggttcagacgcttaaagtgtgttgtgcatattcttttctaacctgtgttctacacagggtggcagatggcgtgccataaccctaatagtgagatatccacgcttggtgatcttatgctcacacagccatcctctagtaagtttgtaagacatctgatgacgtgtgggaacttgttggagataacattttgctgcaaagcatcccattgccagcggatccacatctggtaacagatgcctctggggccaaaagccaaggtttaacagaccctttgggattggttcaaacctgaattgttatggaagacatttagtacctgctgatttggtggtagtgcaaacactagttgtaaggcccacgaaggatgcccagaaggtacccgtaggtaacaagtgacactatggatctgatctggggccagctacctctatctaggtgagttggttaaaaaacgtctagtgggccaaacccaggggggatccctggtttcctttttatttgaataatcact

SEQ ID NO: 17622 - DNA, 636 bp, synthetic construct
  source 1..636: mol_type = other DNA
taggagattccttttcccagccagaggtggctggttaaataatacctattgtaacaaaacatgtaagacacaacaaccgcacacctggtctccactggccgaaggcaactagcaataaggcaggtgggttcagacgcttaaagtgtgttgtgcatattcttttctaacctgtgttctacacagggtggcagatggcgtgccataaccctaatagtgagatatccacgcttgtggatcttatgctcacacagccatcctctagtaagtttgtaagacatctgatgacgtgtgggacttgttggagataacattttgctgcaaagcatcccattgccagcggatccacatctggtaacagatgcctctggggccaaaagccaaggtttaacagaccctttgggattggttcaaacctgaattgttatggaagacatttagtacctgctgatttggtggtagtgcaaacactagttgtaaggcccacgaaggatgcccagaaggtacccgtaggtaacaagtgacactatggatctgatctggggccaactacctctatctaggtgagttggttaaaaaacgtctagtgggccaaacccaggggggatccctggtttcctttttatttgaataatcact

SEQ ID NO: 17623 - DNA, 528 bp, synthetic construct; identical to SEQ ID NO: 555
  source 1..528: mol_type = other DNA

SEQ ID NO: 17624 - DNA, 650 bp, synthetic construct
  source 1..650: mol_type = other DNA
gccctcatgcccagtccttcctttccccttccggggggtaaaccggctgtgtttgctagaggcacagaggagcaacatccaacctgctcttgtggggaacggtgcggctccaattcctgcgtcgccaaaggtgttagcgcacccaaacggcgcatctaccaatgctattggtgtggtctgcgagttctagcctactcgtttctcccctatccactcactcacgcacaaaaagtgtgttgtaaccgcaagatttagccctcgcacgagatgtgcgataaccgcaagattgactcaagcgcggaaagcgctgtaaccacatgctgttagtccctttatggctgcgagatggctatccacctcggatcactgaactggagctcgaccctccttagtaagggaaccgagaggccttcttgcaacaagctccgacacagagtccacgtgattgctaccaccatgagtacatggttctcccctctcgacccaggacttctttttgaatatccacggctcgacccagagggtggggcatgatccccctagcatagcgagctacagcgggaactgtagctaggccttagcgtgctttggatactgcctgatagggcgacggcctagtcgtgtcggttctataggtagcacatacaaat

SEQ ID NO: 17625 - DNA, 539 bp, synthetic construct; identical to SEQ ID NO: 577
  source 1..539: mol_type = other DNA

SEQ ID NO: 17626 - DNA, 650 bp, synthetic construct
  source 1..650: mol_type = other DNA
gccctcatgcccagtccttcctttccccttccggggggtaaaccggctgtgtttgctagaggcacagaggagcaacatccaacctgctttcgtggggaacggtgcggctccaattcctgcgtcgccaaaggtgttagcgcacccaaacggcgcatctaccaatgccattggtgtggtctgcgagttctagcctactcgtttttcccctactcactcattcacgcacaaaaagtgtgttgtaactacaagatttagccctcgcacgagatgtgtggtaaccgtaagattgactcaagcgcggaaagcgctgtaaccacatgctgttagtccctttatggctgcgagatggctatccacctcggatcactgaactggagctcgaccctccttagtaagggaaccgagaggccttcttgcaacaagctccgacacagagtccacgtgattgctaccaccatgagtacatggttctcccctctcgacccaggacttctttttgaatatccacggctcgatccagagggtggggcatgatccccctagcatagcgagctacagcgggaactgtagctaggccttagcgtgccttggatactgcctgatagggcgacggcctagtcgtgtcggttctataggtagcacatacaaat

SEQ ID NO: 17627 - DNA, 650 bp, synthetic construct
  source 1..650: mol_type = other DNA
gccctcatgcccagtccttcctttccccttccggggggtaaaccggctgtgtttgctagaggcacagaggagcaacatccaacctgcttttgtggggaacggtgcggctccaattcctgcgtcgccaaaggtgttagcgcacccaaacggcgcatctaccaatgccattggtgtggtctgcgagttctagcctactcgtttttcccctactcactcattcacgcacaaaaagtgtgttgtaactacaagatttagccctcgcacgggatgtgcggtaaccgcaagattgactcaagcgcggaaagcgctgtgaccacatgctgttagtccctttatggctgcgagatggctatccacctcggatcactgaactggagctcgaccctccttagtaagggaaccgagaggccttcttgcaacaagctccgacacagagtccacgtgattgctaccaccatgagtacatggttctcccctctcgacccaggacttctttttgaatatccacggctcgatccagagggtggggcatgatccccctagcatagcgagctacagcgggaactgtagctaggccttagcgtgccttggatactgcctgatagggcgacggcctagtcgtgtcggttctataggtagcacatacaaat

SEQ ID NO: 17628 - DNA, 650 bp, synthetic construct
  source 1..650: mol_type = other DNA
gccctcatgcccagtccttcctttccccttccggggggtaaaccggctgtgtttgctagaggcacagaggagcaacatccaacctgcttttgtggggaacggtgcggctccgattcctgcgtcgccaaaggtgttagcgcacccaaacggcgcatctaccaatgctattggtgtggtctgcgagttctagcctactcgtttctcccccatccactcactcgcgcacaaaaagtgtgttgtgactacaagatttagccctcgcacgggatgtgcgataaccacaagattgactcaagcgcggaaagcgctgtaaccacatgctgttagtccctttatggctgcgagacggctatccacctcggatcactgaactggagctcgaccctctttagtaagggaaccgagaggccttcttgcaacaagctccgacacagagtccacgtgattgctaccaccatgagtacatggttctcccctctcgacccaggacttctttttgaatatccacggctcgatccagagggtggggcatgatccccctagcatagcgagctacagcgggaactgtagctaggccttagcgtgccttggatactgcctgatagggcgacggcctagtcgtgtcggttctataggtagcacatataaat

SEQ ID NO: 17629 - DNA, 650 bp, synthetic construct
  source 1..650: mol_type = other DNA
gccctcatgcccagtccttcctttccccttccggggggtaaaccggctgtgtttgctagaggcacagaggagcaacatccaacctgcttttgtggggaacggtgcggctccgattcctgcgtcgccaaaggcgttagcgcacccaaacggcgcatctaccaatgctattggtgtggtctgcgagttctagcctactcgtttctcccccatccactcactcgcgcacaaaaagtgtgttgtgactacaagatttagccctcgcacgggatgtgcgataaccacaagattgactcaagcgcggaaagcgctgtaaccacatgctgttagtccctttatggctgcgagatggctatccacctcggatcactgaactggagctcgaccctccttagtaagggaaccgagaggccttcttgcaacaagctccgacacagagtccacgtgattgctaccaccatgagtacatggttctcccctctcgacccaggacttctttttgaatatccacggctcgattcagagggtggggcatgatccccctagcatagcgagctacagcgggaactgtagctaggtcttagcgtgccttggatactgcctgatagggcgacggcctagtcgtgtcggttctataggtagcacatacaaat

SEQ ID NO: 17630 - DNA, 650 bp, synthetic construct
  source 1..650: mol_type = other DNA
gccctcatgcccagtccttcctttccccttccggggggtaaaccggctgtgtttgctagaggcacagaggagcaacatccaacctgcttttgtggggaacggtgcggctccaattcctgcgtcgccaaaggtgttagcgcacccaaacggcgcatctaccaatgctattggtgtggtctgcgagttctagcctactcgtttctcccccactcactcattcacgcacaaaaactgtgttgtaactacaagatttagccctcgcacgggatgtgcgacaaccgcaagattgactcaagcgcggaaagcgctgtaaccacatgctgttagtccctttatggctgcgagatggctatccacctcggatcactgaactggagctcgaccctccttagtaagggaaccgagaggccttcttgcaacaagctccgacacagagtccacgtgattgctaccaccatgagtacatggttctcccctctcgacccaggacttctttttgaatatccacggctcgatccagagggtggggcatgatccccctagcatagcgagctacagcgggaactgtagctaggccttagcgtgccttggatactgcctgatagggcgacggcctagtcgtgtcggttctataggtagcacatacaaat

SEQ ID NO: 17631 - DNA, 650 bp, synthetic construct
  source 1..650: mol_type = other DNA
gccctcatgcccagtccttcctttccccttccggggggtaaaccggctgtgtttgctagaggcacagaggagcaacatccaacctgcttttgtggggaacggtgcggctccaattcctgcgtcgccaaaggtgttagcgcacccaaacggcgcatctaccaatgctattggtgtggtctgcgagttctagcctactcgtttctcccttactcactcattcacgcacaaaaactgtgttgtaactacaagatttagccctcgcacgggatgtgcgataaccgcaagattgactcaagcgcggaaagcgctgtaaccacatgctgttagtccctttatggctgcgagatggctatccacctcggatcactgaactggagctcgaccctccttagtaagggaaccgagaggccttcttgcaacaagctccgacacagagtccacgtgattgctaccaccatgagtacatggttctcccctctcgacccaggacttctttttgaatatccacggctcgatccagagggtggggcatgatccccctagcatagcgagctgcagcgggaactgtagctaggccttagcgtgccttggatactgcctgatagggcgacggcctagtcgtgtcggttctataggtagcacatacaaat

SEQ ID NO: 17632 - DNA, 650 bp, synthetic construct
  source 1..650: mol_type = other DNA
gccctcatgcccagtccttcctttccccttccggggggtaaaccggctgtgtttgctagaggcacagaggagcaacatccaacctgcttttgtggggaacggtgcggctccaattcctgcgtcgccaaaggtgttagcgcacccaaacggcgcatctaccaatgctattggtgtggtctgcgagttctagcctactcgtttctcccctactcactcattctcgcacaaaaactgtgttgtaactacaagatttagccctcgcacgggatgtgagataaccgcaagattgactcaagcgcggaaagcgctgtaaccacatgctgttagtccctttaaggctgcgagatggctatccacctcggatcactgaactggagctcgaccctccttagtaagggaaccgagaggccttcttgcaacaagctccgacacagagtccacgtgattgctaccaccatgagtacatggttctcccctctcgacccaggacttctttttgaatatccacggctcgatccagagggtggggcatgatccccctagcatagcgagctacagcgggaactgtagctaggccttagcgtgccttggatactgcctgatagggcgacggcctagtcgtgtcggttctataggtagcacatacaaat

SEQ ID NO: 17633 - DNA, 638 bp, synthetic construct; identical to SEQ ID NO: 72
  source 1..638: mol_type = other DNA

SEQ ID NO: 17634 - DNA, 640 bp, synthetic construct
  source 1..640: mol_type = other DNA
gcccagcccttcctttccccttccggggggttaaccggctgtgtttgctagaggcacagaggggcaacatccaacctgcttttgcggggaacggtgcggctccgattcctgcgccgccaaaggtgttagcgcacccaaacggcgcacctaccaatgttattggtgtggtctgcgagttctagcctactcgtttctcccccgaccattcactcgcccacgaaaagtgtgttgtaaccataagatttaacccccgcacgggatgtgcgataaccgtaagactggctcaagcgcggaaggcgctgtaaccacatgctgttagtccctttatggctgcaagatggctacccacctcggatcactgaactggagctcgaccctccttagtaagggaaccgagaggccttcgtgcaaaaagctccgacacagagtccacgtgactgctaccaccatgagtacatggttctcccctctcgacccaggacttctttttgaatatccacggctcgatccagagggtggggcatgacccctagcatagcgagctacagcgggaactgtagctaggtcttagcgtaccttggatactgcctgatagggcgacggcctagtcgtgtcggttctataggtagcacatacaaat

SEQ ID NO: 17635 - DNA, 625 bp, synthetic construct
  source 1..625: mol_type = other DNA
ttttcccagccagaggtggctggttaaataatacctattgtaacaaaacatctaagatacaacaaccacacacctggtttccactggctgaaggcaactagcaataaggcaggtgggttcaaacgcttaaagtgtgttgtatatattcttttctaacctgtgttttacacagggtggcagatggcgtgccataactctaatagtgagataccacgcttgtggaccttatgctcacacagccatcctctagtaagtttgtaagacgtctgatgacgtgtgggaacttgttggagataacattttgctgcaaagcatcccattgccagcggatccacatctggtaacagatgcctctggggccaaaagccaaggtttaacagaccctttgggattggttcaaacctgaattgttatggaagacatttagtacctgctgatttggtagtagtgcaaacactagttgtaaggcccacgaaggatgcccagaaggtacccgtaggtaacaagtgacactatggatctgatctggggccaactacctctatctaggtgagttggttaaaaaacatctagtgggccaaacccaggggggatccctggtttcctttttatttgaataatcact

SEQ ID NO: 17636 - DNA, 610 bp, synthetic construct
  source 1..610: mol_type = other DNA
ttaaccggctgtgtttgctagaggcacagaggggcaacatccaacctgcttttgtggggaacggtgcggctccgattcccgcgtcgccaaaggtgttagcgcacccaaacggcgcatctaccaatgttattggtgtggtctgcgagttctagcctactcgtttctcccccgaccattcactcgcccacgaaaagtgtgttgtaaccataagatttaacccccgcacgggatgtgcgataaccgtaagactgactcaagcgcggaaggcgctgtaaccacatgctgttagttcctttatggctgcaagatggctaccaacctcggatcactgaactggagctcgaccccccttagtaagggaaccgagaggccttcgtgcaaaaagctccgacacagagtccacgtgactgctaccaccatgagtacatggttctcccctctcgacccaggacttctttttgaatatccacggctcgatacagagggtggggcatgacccctagcatagcgagctacagcgggaactgtagctaggtcttagcgcaccttggatactgcctgatagggcgacggcctagtcgtgtcggttctataggtagcacatataaat

SEQ ID NO: 17637 - DNA, 624 bp, synthetic construct; identical to SEQ ID NO: 737
  source 1..624: mol_type = other DNA

SEQ ID NO: 17638 - DNA, 537 bp, synthetic construct
  source 1..537: mol_type = other DNA
ttttgcggctctgccgccgttcgggttttacctgttttcacagagcaaaacaggacctctagtttcgtgcttaaacgagatcatgctcgaactagaactataacgctggtcactggacccgtgccgcgccttgcggatctttgcgggaatggtggctagtgggctgtggaagtgactctaaccacacgcccctcaagtgtgggaaaacacgaactggtgtagcgacgacgataggccttgggacaccctctccagtgatggagacccaaggggccaaaagccacgccttgtgccctgtcgttcacaaccccagtgcagttcgtgccagtacctgcttttgggaagtgtgctttggacagctgaaaacagtcctagtgggagactaaggatgcccaggaggtacccggaggtaacaagtgacactctggatctgacttggggagagcgggtctgctttacagacgccactctttaaaaaacttctatgtctcgtcaggcaccggaggccgggccttttcctttaaaacaatacacttt

SEQ ID NO: 17639 - DNA, 252 bp, synthetic construct
  source 1..252: mol_type = other DNA
ttcggcgtgctcctttggtgattcggcgactggttacaggagagtaggcagtgagctatgggcaaacctctgcagtattactcagagggaatgtgcaattgagacttgacgagcgtctctttggagatgtggcgcatgctcttggcattaccatagtgagcttccaggttgggaaacctggactgggcctatactacctgatagggtcgcggctggccgcctgtaactagtatagtcagttgaaacccctcc

SEQ ID NO: 17640 - DNA, 642 bp, synthetic construct
  source 1..642: mol_type = other DNA
gcccagtccttcctttccccttccggggggtaaaccggctgtgtttgctagaggcacagaggagcaacatccaacctgcttttgtggggaacggtgcggctccaattcctgcgtcgccaaaggtgttagcgcacccaaacggcgcatctaccaatgctattggtgtggtctgcgagttctagcctactcgtttctcccctactcactcattcacacacaaaaactgtgttgtaactacaagatttagccctcgcacgggatgtgcgataaccgcaagattgactcaagcgcggaaagcgctgtaaccacatgctgttagtccctttatggctgcgagatggctatccacctcggatcactgaactggagctcgaccctccttagtaagggaaccgagaggccttcttgcaacaagctccgacacagagtccacgtgattgctaccaccatgagtacatggttctcccctctcgacccaggacttctttttgaatatccacggctcgatccagagggtggggcatgatccccctagcatagcgagctacagcgggaactgtagctaggccttagcgtgccttggatactgcctgatagggcgacggcctagtcgtgtcggttctataggtagcacatacaaat

SEQ ID NO: 17641 - DNA, 642 bp, synthetic construct
  source 1..642: mol_type = other DNA
gcccagcccttcctttccccttccggggggtaaaccggctgtgtttgctagaggcacagaggagcaacatccaacctgcttttgtggggaacggtgcggctccaattcctgcgtcgccaaaggtgttagcgcacccaaacggcgcatctaccaatgctattggtgtggtctgcgagttctagcctactcgtttctcccctactcactcattcacacacgaaaactgtgttgtaactacaagatttggccctcgcacgggatgtgcgataaccgcaagattgactcaagcgcggaaagcgctgtaaccacatgctgttagtccctttatggctgcgagatggctatccacctcggatcactgaactggagctcgaccctccttagtaagggaaccgagaggccttcctgcaacaagctccgacacagagtccacgtgattgctaccaccatgagtacatggttctcccctctcgacccaggacttctttttgaatatccacggctcgatccagagggtggggcatgatccccctagcatagcgagctacagcgggaactgtagctaggccttagcgtgccttggatactgcctgatagggtgacggcctagtcgtgtcggttctataggtagcacatacaaat

SEQ ID NO: 17642 - DNA, 642 bp, synthetic construct
  source 1..642: mol_type = other DNA
gcccagcccttcctttccccttccggggggtaaaccggctgtgtttgctagaggcacagaggagcaacatccaacctgcttttgtggggaacggtgcggctccaattcctgcgtcgccaaaggtgttagcgcacccaaacggcgcatctaccaatgctattggtgtggtctgcgagttctagcctactcgtttctcccctactcactcattcacacacaaaaactatgttgtaactacaagatttggccctcgcacgggatgtgcgataaccgtaagattgactcaagcgcggaaagcgctgtaaccacatgctgttagtccctttatggctgcgagatggctatccacctcggatcactgaactggagctcgaccctccttagtaagggaaccgagaggccttcctgcaacaagctccgacacagagtccacgtgattgctaccaccatgagtacatggttctcccctctcgacccaggacttctttttgaatatccacggctcgatccagagggtggggcatgatccccctagcatagcgagctacagcgggaactgtagctaggccttagcgtgccttggatactgcctgatagggcgacggcctagtcgtgtcggttctataggtagcacatacaaat

SEQ ID NO: 17643 - DNA, 619 bp, synthetic construct
  source 1..619: mol_type = other DNA
tccggggggttaaccggctgtgtttgctagaggcacagaggggcaacatccaacctgcttttgcggggaacggtgcggctccgattcctgcgccgccaaaggtgttagcgcacccaaacggcgcacctaccaatgttattggtgtggtctgcgagttctagcctactcgtttctcccccgaccattcactcgcccacgaaaagtgtgttgtaaccataagatttaacccccgcacgggatgtgcgataaccgtaagactggctcaagcgcggaaggcgctgtaaccacatgctgttagtccctttatggctgcaagatggctacccacctcggatcactgaactggagctcgaccctccttagtaagggaaccgagaggccttcgtgcaaaaagctccgacacagagtccacgtgactgctaccaccatgagtacatggttctcccctctcgacccaggacttctttttgaatatccacggctcgatccagagggtggggcatgacccctagcatagcgagctacagcgggaactgtagctaggtcttagcgtaccttggatactgcctgatagggcgacggcctagtcgtgtcggttctataggtagcacatacaaat

SEQ ID NO: 17644 - DNA, 627 bp, synthetic construct
  source 1..627: mol_type = other DNA
ccttttcctagccagaggtggctggttaaacaatacctattgtaacaaaacatctaagacacaacaaccgcacacctggtctccactggccgaaggcaactagcaataaggcaggtgggttcagacgcttaaagtgtgttgtgcatattcttttctaacctgtgttctacacagggtggcagatggcgtgccataaccctaatagtgagataccacgcttgtggaccttatgctcacacagccatcctctagtaagtttgtaagacatctgatgacgtgtgggaacttgttggagataacattttgctgcaaagcatcccattgccagcggatccacatctggtaacagatgcctctggggccaaaagccaaggtttaacagaccctttgggattggttcaaacctgaattgttatggaagacatttagtacctgctgatttggtggtagtgcaaacactagttgtaaggcccacgaaggatgcccagaaggtacccgtaggtaacaagtgacactatggatctgatctggggccaactacctctatctaggtgagttggttaaaaaacgtctagtgggccaaacccaggggggatccctggtttcctttttatttgaataatcact

SEQ ID NO: 17645 - DNA, 642 bp, synthetic construct
  source 1..642: mol_type = other DNA
gcccagtccttcctttccccttccggggggtaaaccggctgtgtttgctagaggcacagaggagcaacatccaacctgcttttgtggggaacggtgcggctccaattcctgcgtcgccaaaggtgttagcgcacccaaacggcgcatctaccaatgctattggtgtggtctgcgagttctagcctactcgtttctcccctactcactcattcacacacaaaaactgtgttgtaactacaagatttggccctcgcacgggatgtgcgataaccgtaagattgactcaagcgcggaaagcgctgtaaccacatgctgttagtccctttatggctgcgagatggctatccacctcggatcactgaactggagctcgaccctccttagtaagggaaccgagaggccttcctgcaacaagctccgacacagagtccacgtgattgctaccaccatgagtacatggttctcccctctcgacccaggacttctttttgaatatccacggctcgatccagagggtggggcatgatccccctagcatagcgagctacagcgggaactgtagctaggccttagcgtgccttggatactgcctgatagggcgacggcctagtcgtgtcggttctataggtagcacatacaaat

SEQ ID NO: 17646 - DNA, 642 bp, synthetic construct
  source 1..642: mol_type = other DNA
gcccagtccttcctttccccttccggggggtaaaccggctgtgtttgctagaggcacagaggagcaacatccaacctgcttttgtggggaacggtgcggctccaattcctgcgtcgccaaaggtgttagcgcacccaaacggcgcatctaccaatgctattggtgtggtctgcgagttctagcctactcgtttctcccctactcactcattcacacacaaaaactatgttgtaactacaagatttggccctcgcacgggatgtgcgataaccgtaagattgactcaagcgcggaaagcgctgtaaccacatgctgttagtccctttatggctgcgagatggctatccacctcggatcactgaactggagctcgaccctccttagtaagggaaccgagaggccttcctgcaacaagctccgacacagagtccacgtgattgctaccaccatgagtacatggttctcccctctcgacccaggacttctttttgaatatccacggctcgatccagagggtggggcatgatccccctagcatagcgagctacagcgggaactgtagctaggccttagcgtgccttggatactgcctgatagggcgacggcctagtcgtgtcggttctataggtagcacatacaaat

SEQ ID NO: 17647 - DNA, 637 bp, synthetic construct
  source 1..637: mol_type = other DNA
tccctttcccagccttgaggcggctggtcaataaatgcctcaaatgtaactaacatctaagattaacttagacaaccctatgcctggtctccgctagtcgaaggcgccttgcaataagacgagtggaacaaagacgcttaaagcatagtgaaaatatacatttctaacctgtggcctccacagggtggcagatggcgtgccataactctattagtgagataccacacttgtggaccttatgctcacacagccatcctctagtaagtttgtaagacgtctgatgacgtgtgggaagttattggaagtaacaatttgccgtaaggcatcctagagccagtggattaacacctggtaacaggtgcccctggggccaaaagccaaggtttaacagaccctttaggattggttcaaacctgggttgttatggaagatatttagtacctgctgatttggtagtaatacaaacactagttgtaaggcccacgaaggatgcccagaaggtacccgtaggtaacaagtgacactatggatctgatttggggttgactacctctgtcctggtgagtcaattaaaaaacgtctagtgggccaaacccaggggggatccctggtttccttttattttattacaaccatt

SEQ ID NO: 17648 - DNA, 487 bp, synthetic construct
  source 1..487: mol_type = other DNA
tttgctttgcggctctgccgccgttcgggttttacctgttttcacagagcaaaacaggacgtctagtttcgtgcttaaacgagatcatgctcgagctagaactacaatgctggttgctgaacccgtaccacaccttgtggaacttcgcgggggaagtgactagtgggctgtggaagtgactccgaccacacgccccatgagcgtgggaaaccacaaatcggtgtagcgacgacaacaggccttgggacaccctctccagtgatggagacccaaggggccaaaagccacgccttgtgccctgttgttcacaaccccagtgcgatttgtattagtacctactcatgggaactgtgcttggacagctgaacacaaccctagtgggagactaaggatgcccaggaggtacccggaggtaacaagtgacactctggatctgacctggggagagggggcctgctgtacaggcgcccctctttaaaaagcttct

SEQ ID NO: 17649 - DNA, 631 bp, synthetic construct
  source 1..631: mol_type = other DNA
cctttccccttccggggggtaaaccggctgtgtttgctagaggcacagaggagcaacatccaacctgcttttgtggggaacggtgcggctccaattcctgcgtcgccaaaggtgttagcgcacccaaacggcgcatctaccaatgctattggtgtggtctgcgagttctagcctactcgtttctcccctactcactcattcacgcacaaaaagtgtgttgtaactacaagatttagccctcgcacgggatgtgcgataaccgcaagattgactcaagcgcggaaagcgctgtaaccacatgctgttagtccctttatggctgcgagatggctatccacctcggatcactgaactggagctcgaccctccttagtaagggaaccgagaggccttcttgcaacaagctccgacacagagtccacgtgattgctaccaccatgagtacatggttctcccctctcgacccaggacttctttttgaatatccacggctcgatccagagggtggggcatgatccccctagcatagcgagctacagcgggaactgtagctaggccttagcgtgccttggatactgcctgatagggcgacggcctagtcgtgtcggttctataggtagcacatacaaat

SEQ ID NO: 17650 - DNA, 631 bp, synthetic construct
  source 1..631: mol_type = other DNA
cctttccccttccggggggtaaaccggctgtgtttgctagaggcacagaggagcaacatccaacctgcttttgtggggaacggtgcggctccaattcctgcgtcgccaaaggtgttagcgcacccaaacggcgcatctaccaatgctattggtgtggtctgcgagttctagcctactcgtttctcccctactcactcactcacgcacaaaaagtgtgttgtaactacaagatttagccctcgcacgggatgtgcgataaccgcaagattgactcaagcgcggaaagcgctgtaaccacatgctgttagtccctttatggctgcgagatggctatccacctcggatcactgaactggagctcgaccctccttagtaagggaaccgagaggccttcttgcaacaagctccgacacagagtccacgtgattgctaccaccatgagtacatggttctcccctctcgacccaggacttctttttgaatatccacggctcgatccagagggtggggcatgatccccctagcatagcgagctacagcgggaactgtagctaggccttagcgtgccttggatactgcctgatagggcgacggcctagtcgtgtcggttctataggtagcacatacaaat

SEQ ID NO: 17651 - DNA, 631 bp, synthetic construct
  source 1..631: mol_type = other DNA
cctttccccttccggggggtaaaccggctgtgtttgctagaggcacagaggagcaacatccaacctgcttttgtggggaacggtgcggctccaattcctgcgtcgccaaaggtgttagcgcacccaaacggcgcatctaccaatgctattggtgtggtctgcgagttctagcctactcgtttctcccctactcactcattcacacacaaaaactgtgttgtaactacaagatttggccctcgcacgggatgtgcgataaccgcaagattgactcaagcgcggaaagcgctgtaaccacatgctgttagtccctttatggctgcgagatggctatccacctcggatcactgaactggagctcgaccctccttagtaagggaaccgagaggccttcctgcaacaagctccgacacagagtccacgtgattgctaccaccatgagtacatggttctcccctctcgacccaggacttctttttgaatatccacggctcgatccagagggtggggcatgatccccctagcatagcgagctacagcgggaactgtagctaggccttagcgtgccttggatactgcctgatagggcgacggcctagtcgtgtcggttctataggtagcacatacaaat

SEQ ID NO: 17652 - DNA, 687 bp, synthetic construct
  source 1..687: mol_type = other DNA
agagcttggccgtcgggccttataccccgacttgctgagcttctctgggagagcccctttcccagccctgaggcggctggtcaataaagcctcaatagtaacaaacatctaagattattatactaaccccatgcctggtctccactagttgaaggcaacttgcaataaaatgagtggaaataagacgcttaaagcatggtgtaaattaacctttccaacccacacgctgtgtggggtggcagatggcgtgccataattctattagtgagataccacgcttgtggaccttatgctcacacagccatcctctagtaagtttgtaagacgtctggtgacgtgtgggaacttattggaaacaacattttgctgcaaagcatcctattgccagcggaacaacacctggtaacaggtgcctctggggccaaaagccaaggtttgacagaccctttaggattggtttaaacctggaatgttgcggaagatacttagtacctgccgatctggtagtaatgcagacactagttgtaaggcccacgaaggatgcccagaaggtacccgtaggtaacaagcgacactatggatctgatctggggctaggtacctctatcttggtgacctagtaaaaaacgtctagtgggccagacccgggggggatccccggtttccttttattttatcaatgtcact

SEQ ID NO: 17653 - DNA, 592 bp, synthetic construct; identical to SEQ ID NO: 30
  source 1..592: mol_type = other DNA

SEQ ID NO: 17654 - DNA, 636 bp, synthetic construct; identical to SEQ ID NO: 68
  source 1..636: mol_type = other DNA

SEQ ID NO: 17655 - DNA, 604 bp, synthetic construct
  source 1..604: mol_type = other DNA
ggttaaataatacctattgtaacaaaacatctaagatacaacaaccacacacctggtttccactggctgaaggcaactagcaataaggcaggtgggttcaaacgcttaaagtgtgttgtatatattcttttctaacctgtgttctacacagggtggcagatggcgtgccataactctaatagtgagataccacgcttgtggaccttatgctcacacagccatcctctagtaagtttgtaagacgtctgatgacgtgtgggaacttgttggagataacattttgctgcaaagcatcccattgccagcggatccacatctggtaacagatgcctctggggccaaaagccaaggtttaacagaccctttgggattggttcaaacctgaattgttatggaagacatttagtacctgctgatttggtagtagtgcaaacactagttgtaaggcccacgaaggatgcccagaaggtacccgtaggtaacaagtgacactatggatctgatctggggccaactacctctatctaggtgagttggttaaaaaacatctagtgggccaaacccaggggggatccctggtttcctttttatttgaataatcact

SEQ ID NO: 17656 - DNA, 601 bp, synthetic construct
  source 1..601: mol_type = other DNA
agcctcaactgtaacaaacatctaagattttacattaaccccatgcctggtctccactagttgaaggcaacttgcaataaaatgagtggaaataagacgcttaaagcatggtgtaaactaacttttctaacccacactttgtgtggggtggcaggtggcgtgccataattctattagtgagataccacgcttgtggaccttatgctcacacagccatcctctagtaagtttgtgagatgtctggtgacgtgtgggaacttattggaaataacattatgctgtaaagcatcctattgccagcgggacaacacctggtaacaggtgcctctggggccaaaagccaaggtttaacagaccctttaggattggttttaaaacctgtgatgttatggaagatacttagtacctgccgatctggtagtagtgcaaacactagttgtaaggcccacaaaggatgcccagaaggtacccgtaggtaacaagtgacactatggatctgatctggggccaggtacctctatcttggtgacctggttaaaaaacgtctagtgggccaaacccgggggggatccccggtttcttttaatttaccactatcact

SEQ ID NO: 17657 - DNA, 654 bp, synthetic construct; identical to SEQ ID NO: 79
  source 1..654: mol_type = other DNA

SEQ ID NO: 17658 - DNA, 591 bp, synthetic construct; identical to SEQ ID NO: 28
  source 1..591: mol_type = other DNA

SEQ ID NO: 17659 - DNA, 618 bp, synthetic construct; identical to SEQ ID NO: 58
  source 1..618: mol_type = other DNA

SEQ ID NO: 17660 - DNA, 747 bp, synthetic construct; identical to SEQ ID NO: 1143
  source 1..747: mol_type = other DNA

SEQ ID NO: 17661 - DNA, 636 bp, synthetic construct
  source 1..636: mol_type = other DNA
tccttcctttccccttccggggggtaaaccggctgtgtttgctagaggcacagaggagcaacatccaacctgcttttgtggggaacggtgcggctccaattcctgcgtcgccaaaggtgttagcgcacccaaacggcgcatctaccaatgctattggtgtggtctgcgagttctagcctactcgtttctcccctactcactcattcacgcacaaaaagtgtgttgtaactacaagatttagccctcgcacgggatgtgcgataaccgcaagattgactcaagcgcggaaagcgctgtaaccacatgctgttagtccctttacggctgcgagatggctatccacctcggatcactgaactggagctcgaccctccttagtaagggaaccgagaggccttcttgcaacaagctccgacacagagtccacgtgattgctaccaccatgagtacatggttctcccctctcgacccaggacttctttttgaatatccacggctcgatccagagggtggggcatgatccccctagcatagcgagctacagcgggaactgtagctaggccttagcgtgccttggatactgcctgatagggcgacggcctagtcgtgtcggttctataggtagcacatacaaat

SEQ ID NO: 17662 - DNA, 759 bp, synthetic construct; identical to SEQ ID NO: 1222
  source 1..759: mol_type = other DNA

SEQ ID NO: 17663 - DNA, 612 bp, synthetic construct
  source 1..612: mol_type = other DNA
gacaataaaagcctcaactgtaacaaacacctaagattattatattaaccccatgcctggtctccactggttgaaggcaacttgcaataaaatgagtggaaataagacgcttgaagcatggtgtaaatttacttttctaacccgcactttgtgtggggtggcagatggcgtgccataattctattagtgagataccacgcttgtggaccttatgctcacacagccatcctctagtaagtttgtgaggcgtctggtgacgtgtgggaacttattggaaacaacattttgctgcaaagcatcctatcgccagcggaacaacgcctggtaacaggcgcctctggggccaaaagccaaggtttgacagaccctttaggattggtttagaacctgagatgttgtggaaaatatttagtacctaccgacctggtagtaatgcaaacactagttgtaaggcccacgaaggatgcccagaaggtacccgtaggtaacaagtgacactatggatctgatctggggccaggtacttctatcatagtgagttggttaaaaaacgtctagtgggccaaacccaggggggatccctggtttccttttactttaatagttcacatt

SEQ ID NO: 17664 - DNA, 601 bp, synthetic construct
  source 1..601: mol_type = other DNA
gcctcaattgtaacaaacatctaagattattacattaaccccatgcctggtctccactagttgaaggcaacttgcaataaaatgagtggaaacaagacgcttaaagcatggtgtaaactaactcttctaacccacactttgtgtggggtggcagatggcgtgccataactctattagtgagataccacgcttgtggaccttatgctcacacagccatcctctagtaagtttgtgagacgtctggtgacgtgtgggaacttattggaaacaacattttgctgcaaagcatcctattgccagtggaacaacacctggtaacaggtgcctctggggccaaaagccaaggtttaacagaccctttaggattggtttaaaacctgaaatgttgtggaagatacttagtacctaccgatctggtagtagcgcaaacactagttgtaaggcccacgaaggatgcccagaaggtacccataggtaacaagagacactatggatctgatctggggccaggtacctctatctcggtgacctggttaaaaaacgtctagtgggccaaacccgggggggatccccggtttccttttattttatcaatgccact

SEQ ID NO: 17665 - DNA, 590 bp, synthetic construct
  source 1..590: mol_type = other DNA
taacaaacatctaagattattacattaaccccatgcctggtctccactagttgaaggcaacttgcaataaaatgagtggaaacaagacgcttaaagcatggtgtaaattaattttctaacccacattaagtgtggggtggcagatggcgtgccataactctactagtgagataccatgcttgtggaccttatgctcacacagccatcctctagtaagtttgtgagacgtctggtgacgtgtgggaacttattggaaacaacaccttgctgtaaagcatcctattgccagcggaacaacacctggtaacaggtgcctctggggccaaaagccaaggtttaacagaccctttaggattggttctgaacctgagatgttgcggaagatatttagtacctgccgatctggtagtaatgcaaacactagttgtaaggcccacgaaggatgcccagaaggtacccgtaggtaacaagagacactatggatctgatctggggtcaggtacctctatcttggtgacctggttaaaaaacgtctagtgggccaaacccgggggggatccccggtttccttttactttatcaatgccact

SEQ ID NO: 17666 - DNA, 610 bp, synthetic construct
  source 1..610: mol_type = other DNA
aaccggctgtgtttgctagaggcacagaggagcaacatccaacctgcttttgtggggaacggtgcggctccaattcctgcgtcgccaaaggtgttagcgcacccaaacggcgcatctaccaatgctattggtgtggtctgcgagttctagcctactcgtttctcccctattcattcactcacgcacaaaaagtgtgttgtaactacaagatttagccctcacacgggatgtgtgataaccgcaagactgactcaagcgcggaaagcgctgtaaccgcatgctgttagtccctttatggctgcgagatggctatccacctcggatcactgaactggagctcgaccctccttagtaagggaaccgagaggccttcttgcaacaagctccgacacagagtccacgtgattgctaccaccatgagtacatggttctcccctctcgacccaggacttctttttgaatatccacggctcgatccagagggtggggcatgatccccctagcatagcgagctacagcgggaactgtagctaggccttagcgtgccttggatactgcctgatagggcgacggcctagtcgtgtcggttctataggtagcacatacaaat

SEQ ID NO: 17667 - DNA, 610 bp, synthetic construct
  source 1..610: mol_type = other DNA
aaccggctgtgtttgctagaggcacagaggagcaacatccaacctgcttttgtggggaacggtgcggctccaattcctgcgtcgccaaaggtgttagcgcacccaaacggcgcatctaccaatgctattggtgtggtctgcgagttctagcctactcgtttctcccctattcattcactcacgcacaaaaagtgtgttgtaactacaagatttagccctcgcacgggatgtgcgataaccgcaagactgactcaagcgcggaaagcgctgtaaccgcatgctgttagtccctttatggctgcgagatggctatccacctcggatcactgaactggagctcgaccctccttagtaagggaaccgagaggccttcttgcaacaagctccgacacagagtccacgtgattgctaccaccatgagtacatggttctcccctctcgacccaggacttctttttgaatatccacggctcgatccagagggtggggcatgatccccctagcatagcgagctacagcgggaactgtagctaggccttagcgtgccttggatactgcctgatagggcgacggcctagtcgtgtcggttctataggtagcacatacaaat

SEQ ID NO: 17668 - DNA, 610 bp, synthetic construct
  source 1..610: mol_type = other DNA
aaccggctgtgtttgctagaggcacagaggagcaacatccaacctgcttttgtggggaacggtgcggctccaattcctgcgtcgccaaaggtgttagcgcacccaaacggcgcatctaccaatgctattggtgtggtctgcgagttctagcctactcgtttctcccctattcattcactcacgcacaaaaagtgtgttgtaactacaagatttagccctcgcacgggatgtgtgataaccgcaagactgactcaagcgcggaaagcgctgtaaccgcatgctgttagtccctttatggctgcgagatggctatccacctcggatcactgaactggagctcgaccctccttagtaagggaaccgagaggccttcttgcaacaagctccgacacagagtccacgtgattgctaccaccatgagtacatggttctcccctctcgacccaggacttctttttgaatatccacggctcgatccagagggtggggcatgatccccctagcatagcgagctacagcgggaactgtagctaggccttagcgtgccttggatactgcctgatagggcgacggcctagtcgtgtcggttctataggtagcacatacaaat

SEQ ID NO: 17669 - DNA, 610 bp, synthetic construct
  source 1..610: mol_type = other DNA
aaccggctgtgtttgctagaggcacagaggagcaacacccaacctgctcttgtggggaacggtgcggctccaattcctgcgtcgccaaaggtgttagcgcacccaaacggcgcatctaccaatgctattggtgtggtctgcgagttctagcctactcgtttctcccctattcattcactcacgcacaaaaagtgtgttgtaactacaagatttagccctcgcacgggatgtgcgataaccgcaagactgactcaagcgcggaaagcgctgtaaccgcatgctgttagtccctttatggctgcgagatggctatccacctcggatcactgaactggagctcgaccctccttagtaagggaaccgagaggccttcttgcaacaagctccgacacagagtccacgtgattgctaccaccatgagtacatggttctcccctctcgacccaggacttctttttgaatatccacggctcgatccagagggtggggcatgatccccctagcatagcgagctacagcgggaactgtagctaggccttagcgtgccttggatactgcctgatagggcgacggcctagtcgtgtcggttctataggtagcacatacaact

SEQ ID NO: 17670 - DNA, 621 bp, synthetic construct
  source 1..621: mol_type = other DNA
ggacacaggtggctggttaaacaatacctattgtaacaaaacatctaagacataacaaccgcacacctggtctccactggccgaaggcaactagcaataaggtaggtgggttcagacgcttaaagtgtgttgtatatattcttttctaacctgtgttttacacagggtggcagatggcgtgccataaccctaatagtgagataccacgcttgtggaccttatgctcacacagccatcctctagtaagtttgtaagacgtctgatgacgtgtgggaacttgttggagataacattttgctgcaaagcatcccattgccagcggatccacatctggtaacagatgcctctggggccaaaagccaaggtttaacagaccctttgggattggttcaaacctgaattgttatggaagacatttagtacctgctgatttggtagtagtgcaaacactagttgtaaggcccacgaaggatgcccagaaggtacccgtaggtaacaagtgacactatggatctgatctggggccaactacctctatctaggtgagttggttaaaaaacgtctagtgggccaaacccaggggggatccctggtttccttttttaaatttgaataatcact

SEQ ID NO: 17671 - DNA, 579 bp, synthetic construct
  source 1..579: mol_type = other DNA
aactaacatctatgacaactatcacacaaccttgtacctggtctccactagtcgaaggcaacttgcaataagataagtggaatgaagacgcttaaagtacaatgtaagtaatcttttctaatccacaattttgtggagtggcagatggcgtgccataactctaatagtgagataccatacttgtggacctcatgctcacacagccatcctctagtaagtttataagacgtctggtgacgtgtgggaacttatgggaatcaatgttttgctgcaaggcatctattagccagcggataaacacctggtaacaggtgcctctggggccaaaagccaaggtttgacagaccctaatagattggtttaaacctgaaacattgtggaacatattcagtacctgccgatctggtagtaatgtaaacactagttgtaaggcccacgaaggatgcccagaaggtacccgtaggcaacaagggacactatggatctgatctggggctgagtacctctatcttggtgactcagttaaaaagcgtctagtgggccaaacccaggggggatccctggtttcttttattttaa

SEQ ID NO: 17672 - DNA, 567 bp, synthetic construct
  source 1..567: mol_type = other DNA
gggttcttaaatctgtttctctataagaacactcatttttcacgctctctgtcttctttcttccagggctctccccttgccctaggctctggccgttgcgcccggcggggtcaactccatgattagcatggagctgtaggagtctaaattggggacacagatgtttggaacgtcaccttgcagtgttaacttggctttcatgaatctctttgatcttccataaggggtaggctacgggtgaaacctcttaggctaatacttctatgaagagatgctttggatagggtaacagcggcggatattggtgagttgttaagacaaaaaccattcaacgccggaggactgactctcatccagtggatgcattgagtggattgactgtcagggctgtctctaggcttaattccagacctctctgtgcttagggcaaacatcatttggccttaaatgggattctgtgagaggggatccctccattgacagctggactgttctttggggccttatgtggtgtttgcctctgaggtactcaggggcatttaggtttttcctcattcttaaataata

SEQ ID NO: 17673 - DNA, 511 bp, synthetic construct
  source 1..511: mol_type = other DNA
gttttacctgttttcacagagcaaaacaggacgtctagtttcgtgcttaaacgagatcatgctcgaactagaactacaacgctggtcactgaacccgtaccacaccttgtggaactccgcggggaaagtggctagtgggctgtagaagtgactctgaccacacgccccacgagcgtgggaaatcacaaatcggtgtagcgacgacaacaggccttgggacaccctctccagtgatggagacccaaggggccaaaagccacgccttgtgccctgttgttcacaaccccagtgcgatttgtgttagtacctactcatgggaactgtgcttggacagctgaacacagccctagtgggagactaaggatgcccaggaggtacccggaggtaacaagtgacactctggatctgacttggggagagggggcctgctttacaggcgcccctctttaaaaagcttctatgtctcatcaggcaccggaggccgggccttttccttttaaaacaacatttt

SEQ ID NO: 17674 - DNA, 511 bp, synthetic construct
  source 1..511: mol_type = other DNA
gttttacctgttttcacagagcaaaacaggacgtctagtttcgtgcttaaacgatatcatgctcgaactagaactacaacgctggtcactgaacccgtaccacaccttgtggaactccgcggggaaagtgactagtgggctgtagaagtgactctgaccacacgccccatgagcgtgggaaaccacaaatcggtgtagcgacgacaacaggccttgggacaccctctccagtgatggagacccaaggggccaaaagccacgccttgtgccctgttgttcacaaccccagtgcgatttgtgttagtacctactcacgggaactgtgcttggacagctgaacacagccctggtgggagactaaggatgcccaggaggtacccggaggcaacaagcgacactctggatctgacctggggagagggggcctgctttacaggcgcccctctttaaaaagcttctatgtctcatcaggcaccggaggccgggccttttccttttaaaacaacatttt

SEQ ID NO: 17675 - DNA, 749 bp, synthetic construct; identical to SEQ ID NO: 1190
  source 1..749: mol_type = other DNA

SEQ ID NO: 17676 - DNA, 435 bp, synthetic construct
  source 1..435: mol_type = other DNA
taagtagggaacatattcaattcatattgttcatctcactgaacccgcatgaaggactgcattgcatatcctggacgaggtgacgtggaatatttggacatttatggattggacactataacgctttgtgcctctacggagatgtaaccataatcttaagtagtagtaccccagcacaagaggataaagtggcatacacgacaacgggtgttgctcgcaccttagtaatgtggatgtccacccttggagcgtgctgaaactctgtgggtaaagacacatattagtacaaatgtgggggaactcactgaaagggcatgtcccgtgtactggtgtgccggaaagtgggggtcgctttctggagaacttagtagttcttgttattgggtgatagccttgcggcggatcaacccacagttttaatccgttgttttgcat

SEQ ID NO: 17677 - DNA, 639 bp, synthetic construct
  source 1..639: mol_type = other DNA
agagtccctttcccagccctgaggtggctggttaataatagcctcaaacgtaaccaacatctaagaagattgtataaaccctatgcctggcccccactattcgaaggcaactcgcaataagagagtggaatcagggtgcttaaagcatagagacagttttcatttctaacccacatgattgtggggtggcagatggcgtgccataattctaatagtgagataccacgcttgtggaccttatgctcacacagccaccctctagtaagtttgtgagacgtctggtgacgtgtgggaactcattggaaacaacattttgctgcaaagcatcctactgccagcggaacaacacctggtaacaggtgcctctggggccaaaagccaaggtttaacagaccctttaggattggttctgaacctgagatgttgtggaaaatatttagtacctgctgatctggtagtaatgcaagcactagttgtaaggcccacgaaggatgcccagaaggtacccgtaggtaacaagtgactctatggatctgatctggggccaactacctctatcttggtgagttggttaaaaaacgtctagtgggccaaacccgggggggatccctggtttccttttattttatcatagttaat

SEQ ID NO: 17678 - DNA, 570 bp, synthetic construct; identical to SEQ ID NO: 26
  source 1..570: mol_type = other DNA

SEQ ID NO: 17679 - DNA, 611 bp, synthetic construct
  source 1..611: mol_type = other DNA
ggctggttaaacaatacctattgtaacaaaacatctaagactgtacaaccgcacacctggtctccactggccgaaggcaactagcaataaggtaggtgggttcagacgcttaaagtgtgttgtatatattcttttctaacctgtgttttacacagggtggcagatggcgtgccataaccctaatagtgagataccacgcttgtggaccttatgctcacacagccatcctctagtaagtttgtaagacgtctgatgacgtgtgggaacttgttggagataacattttgctgcaaagcatcccattgccagcggatccacatctggtaacagatgcctctggggccaaaagccaaggtttaacagaccctttgggattggttcaaacctgaattgttatggaagacatttagtacctgctgatttggtagtagtgcaaacactagttgtaaggcccacgaaggatgcccagaaggtacccgtaggtaacaagtgacactatggatctgatctggggccaactacctctatctaggtgagttggttaaaaaacgtctagtgggccaaacccaggggggatccctggtttccttttttaaatttgaataatcact

SEQ ID NO: 17680 - DNA, 605 bp, synthetic construct
  source 1..605: mol_type = other DNA
ttaaacaatacctattgtaacaaaacatctaagacataacaaccgcacacctggtctccactggccgaaggcaactagcaataaggtaggtgggttcagacgcttaaagtgtgttgtatatattcttttctaacctgtgttttacacagggtggcagatggcgtgccataaccctaatagtgagataccacgcttgtggaccttatgctcacacagccatcctctagtaagtttgtaagacgtctgatgacgtgtgggaacttgttggagataacattttgctgcaaagcatcccattgccagcggatccacatctggtaacagatgcctctggggccaaaagccaaggtttaacagaccctttgggattggttcaaacctgaattgttatggaagacatttagtacctgctgatttggtagtagtgcaaacactagttgtaaggcccacgaaggatgcccagaaggtacccgtaggtaacaagtgacactatggatctgatctggggccaactacctctatctaggtgagttggttaaaaaacgtctagtgggccaaacccaggggggatccctggtttccttttttaaatttgaataatcact

SEQ ID NO: 17681 - DNA, 609 bp, synthetic construct
  source 1..609: mol_type = other DNA
ttccctttgttttgcttgtaaatattaattcctgcaggttcagggttctttgatctgtttctctataagaacactcaattttcacgctttctgtcttctttcttccagggctctccccttgccctaggctctggccgttgcgcccggcggggtcaactccatgattagcatggagctgtaggagtctaaattggggacgcagatgtttgggacgtcgccttgcagtgttaacttggctctcatgaacctctttgatcttccacaaggggtaggctacgggtgaaacctcttaggctaatacttctatgaagagatgccttggatagggtaacagcggcggatattggtgagttgttaagacaaaaaccattcaacgccggaggactggctctcatccagtggatgcattgagtggattgattgtcagggctgtctttaggtttaatctcagacctctctgtgcttagggcaaacactatttggccttaaatgggaccctgtgagagggggtccctccattgacagctggactgttctttggggccttatgtggtgtttgcctctgaggtactcaggggcatttaggtttttcctcattcttaaacaata

SEQ ID NO: 17682 - DNA, 473 bp, synthetic construct
  source 1..473: mol_type = other DNA
ggcggcggggggcctctcccgcccgtcgcccgcgcgcgcgcgcgcccctctctccctccccctttgaatttgtaactggtaagtgatgatccttggaaactaggtacttgctacgctagttttggattatcttgtgcccaacattagtcctcggacttctgttgtgtttaaacacagaaatttggatgtctggctatagattcatgggaacaacccctctgaaagacctgctctggcgcgagctaaagcgcaattgtcaccaggtattgcaccaatggtggcgacagggtacagaagagcaagtactcctgactgggcaatgggactgcgttgcatatccctaggtacctattgagatttctctggggcccaccagcgtggagttcctgtatgggaatgcaggactggacttgtgctacctgacagggtcgcggctggccgtctgtactttgtatagtcagttgaaactcacc

SEQ ID NO: 17683 - DNA, 344 bp, synthetic construct
  source 1..344: mol_type = other DNA
catatggtatgattattggatacaccttgaacggcagtagcgtggcgagctatggaaaaatcgcaattgtcgatagccatgttagtgacgcgcttcggcgtgctcctttggtgattcggcgactggttacaggagagtaggcagtgagctatgggcaaacctctgcagtattactcagagggaatgtgcaattgagacttgacgagcgtctcttcgagatgtggcgcatgctcttggcattaccatagtgagcttccaggttgggaaacctggactgggcctatactacctgatagggtcgcggctggccgcctgtaactagtatagtcagttgaaaccccccc

SEQ ID NO: 17684 - DNA, 604 bp, synthetic construct; identical to SEQ ID NO: 40
  source 1..604: mol_type = other DNA

SEQ ID NO: 17685 - DNA, 581 bp, synthetic construct
  source 1..581: mol_type = other DNA
gcaacaacatccaacctgcttttgtggggaacggtgcggctccattcctgcgtcgccaaaggtgttagcgcacccaaacggcgcatctaccaatgctattggtgtggtctgcgagttctagcctactcgtttctcccctgctcactcatttacacacaaaaactgtgttgtaactacaagatttggccctcgcacgggatgtgcgataaccgtaagactgactcaagcgcggaaagcgctgtaaccacatgctgttagtccctttatggctgcgagatggctatccacctcggatcactgaactggagctcgaccctccttagtaagggaaccgagaggccttcctgcaacaagctccgacacagagtccacgtgattgctaccaccatgagtacatggttctcccctctcgacccaggacttctttttgaatatccacggctcgatccagagggtggggcatgatccccctagcatagcgagctacagcgggaactgtagctaggccttagcgtgccttggatactgcctgatagggcgacggcctagtcgtgtcggttctataggtagcacatacaaat

SEQ ID NO: 17686 - DNA, 407 bp, synthetic construct; identical to SEQ ID NO: 445
  source 1..407: mol_type = other DNA

SEQ ID NO: 17687 - DNA, 609 bp, synthetic construct
  source 1..609: mol_type = other DNA
accggctgtgtttgctagaggcacagaggagcaacatccaacctgcttttgtggggaacggtgcggctccaattcctgcgtcgccaaaggtgttagcgcacccaaacggcgcatctaccaatgctattggtgtggtctgcgagttctagcctactcgtttctcccctatccactcactcacgcacaaaaagtgtgctgtaactacaagatttagccctcgcacgagatgtgcgataaccgcaagattgactcaagcgcggaaagcgctgtaaccacatgctgttagtcccttcatggctgcgagatggctatccacctcggatcactgaactggagctcgaccctccttagtaagggaaccgagaggccttcttgcaacaagctccgacacagagtccacgtgattgctaccaccatgagtacatggttctcccctctcgacccaggacttctttttgaatatccacggctcgatccagagggtggggcatgatccccctagcatagcgagctacagcgggaactgtagctaggccttagcgtgccttggatactgcctgatagggcgacggcctagtcgtgtcggttctataggtagcacatacaaat

SEQ ID NO: 17688 - DNA, 607 bp, synthetic construct
  source 1..607: mol_type = other DNA
cggctgtgtttgctagagacacagaggaccaacatccaacctgcttttgtggggaacggtgcggctccaattcctgcgtcgccaaaggtgttagcgcactcaaacggcgcatctaccaatgctattggtgtggtctgcgagttctagcctactcgtttctcccttatccactcactcacgcacaaaaagtgtgctgcaactacaagatttagccctcgcacgagatgtgcgataaccgcaagattgactcaagcgcggaaagcgctgaaaccacatgctgttagtcccttcatggctgtgagatggctatccacctcggatcactgaactggagctcgaccctccttagtaagggaaccgagaggccttcttgcaacaagctccgacacagagtccacgtgattgctaccaccatgagtacatggttctcccctctcgacccaggacttctttttgaatatccacggctcgatccagagggtggggcatgatccccctagcatagcgagctacagcgggaactgtagctaggccttagcgtgccttggatactgcctgatagggcgacggcctagtcgtgtcggttctataggtagcacatacaaat

SEQ ID NO: 17689 - DNA, 499 bp, synthetic construct
  source 1..499: mol_type = other DNA
ctctccccttgccctaggctctggccgttgcgcccggcggggtcaactccatgactagcatggagctgtaggagtctaaattggggacacaaatgtttggaacgtcaccttgcagtgttaacttggctttcatgaatctctttgatcttccacaaggggtaggctacgggtgaaacctcttaggctaatacttctatgaagagatgctttggatagggtaacagcggcggatattggtgagttgttaagacaaaaaccattcaacgccggaggactgactctcatccagtggatgcattgagtggattgactgtcagggctgtctctaggcttaattccagacctctctgtgcttagggcaaacatcatttggccttaaatgggattctgtgagaggggatccctccattgactgctggactgttctttggggccttatgtggtgtttgcctctgaggtactcaggggcatttaggtttttcctcattcttaaataata

SEQ ID NO: 17690 - DNA, 499 bp, synthetic construct
  source 1..499: mol_type = other DNA
ctctccccttgccctaggctctggccgttgcgcccggcggggtcaactccatgactagcatggagctgtaggagtctaaattggggacacaaatgtttggaacgtcaccttgcagtgttaacttggctttcatgaatctctttgatcttccacaaggggtaggctacgggtgaaacctcttaggctaatacttctatgaagagatgctttggatagggtaacagcggcggatattggtgagttgttaagacaaaaaccattcaacgccggaggactgactctcatccagtggatgcattgagtggattgactgtcagggctgtctctaggcttaattccagacctctctgtgcttagggcaaacatcatttggccttaaatgggattctgtgagaggggatccctccattgactgctggactgtactttggggccttatgtggtgtttgcctctgaggtactcaggggcatttaggtttttcctcattcttacataata

SEQ ID NO: 17691 - DNA, 601 bp, synthetic construct
  source 1..601: mol_type = other DNA
agcctcaatcgtaacaaacatctaagattttacatcaaccctatgcctggtctccactagttgaaggcaacttgcaataaaatgagtggaaataagacgcttaaagcatagtgtgaactaacttttctagcccacactttgtgtggggtggcagatggcgtgccataatcctattagtgagataccacgcttgtggaccttatgctcacacagccatcctctagtaagtttgtgagacgtctggtgacgtgtgggaacttattggaaataacattatgctataaagcatcctaatgccagcggaacaacacctggtaacaggtgcctctggggccaaaagccaaggtttaacagaccctttaggattggtttaaaaacctgtaatgttatggaaaatacttagtacctaccgatctggtagtagtgcaaacactagttgtaaggcccacgaaggatgcccagaaggtacccgtaggtaacaagtgacactatggatctgatctggggccaggtacctctatcttggtgacctggttaaaaaacgtctagtgggccaaacccgggggggatccccggtttcttttaatttaccaatgtcact

SEQ ID NO: 17692 - DNA, 608 bp, synthetic construct
  source 1..608: mol_type = other DNA
ccggctgtgtttgctagaggcacagtggagcaacatccaacctgcttttgtggggaacggtgcggctccaattcctgcgtcgccaaaggtgttagcgcacccaaacggcgcgtctaccaatgctattggtgtggtctgcgagttctagcctactcgtttctcccctactcactcattcacgcacaaaaactgtgttgtaactacaaggtttagccctcgcacgggatgtgcgataaccgcaagatcgactcaagcgcggaaagcgctgtaaccacatgctgttagtccctttatggctgcgagatggctacccacctcggatcactgaactggagctcgaccctccttagtaagggaaccgagaggccttcttgcaacaagctccgacacagagtccacgtgattgctaccaccatgagtacatggttctcccctctcgacccaggacttctttttgaatatccacggctcgatccagagggtggggcatgatccccctagcatagcgagctacagcgggaactgtagctaggccttagcgtgccttggatactgcctgatagggcgacggcctagtcgtgtcggttctataggtagcacatacaaat

SEQ ID NO: 17693 - DNA, 343 bp, synthetic construct; identical to SEQ ID NO: 326
  source 1..343: mol_type = other DNA

SEQ ID NO: 17694 - DNA, 583 bp, synthetic construct
  source 1..583: mol_type = other DNA
aaacatctaagacataacaaccgcacacctggtctccactggccgaaggcaactagcaataaggtaggtgggttcagacgcttaaagtgtgttgtatatattcttttctaacctgtgttttacacagggtggcagatggcgtgccataaccctaatagtgagataccacgcttgtggaccttatgctcacacagccatcctctagtaagtttgtaagacgtctgatgatgtgtgggaacttgttggagataacattttgctgcaaagcatcccattgccagcggatccacatctggtaacagatgcctctggggccaaaagccaaggtttaacagaccctttgggattggttcaaacctgaattgttatggaagacatttagtacctgctgatttggtagtagtgcaaacactagttgtaaggcccacgaaggatgcccagaaggtacccgtaggtaacaagtgacactatggatctgatctggggccaactacctctatctaggtgagttggttaaaaaacgtctagtgggccaaacccaggggggatccctggtttccttttttaaatttgaataatcact

SEQ ID NO: 17695 - DNA, 610 bp, synthetic construct; identical to SEQ ID NO: 46
  source 1..610: mol_type = other DNA

SEQ ID NO: 17696 - DNA, 457 bp, synthetic construct; identical to SEQ ID NO: 497
  source 1..457: mol_type = other DNA

SEQ ID NO: 17697 - DNA, 670 bp, synthetic construct
  source 1..670: mol_type = other DNA
atggtgaggggacttgatacctcaccgccgtttgcctaggctataggctaaacttccctttcccctttccctttattgttgtaaatattaattcctgcaggttcaggtctcttggatttgttccactttatggacactcatttcacgctttctgtctgcttttcttccagggctctccccttgccctaggctctggccgttgcgcccggcggggtcaactccatgactagcatggagctgtaggagtctaaattggggacacagatgttgggaacgtcaccttgcagtgttaacttggctttcatgaagctttttgatcttccacaagaggtaggctacgggtgaaacctcttaagctaatacttctatgaagagatgctttggatagggtaacagcggcggatattggtgagttgcttgacaaaaaccattcaacgccggaggactggctctcatccagtggatgcattaagtggattgtctgtcagggctgtctctaggtttaattcctgacctctctgtgcttagggcaaacaaaacttggccttaaatgaggtcctgtgagaggggacctcgccattgaatgctggacatttctttggggccttatgttttgtttgcctctgaggtactcaggggcatttaggtttttcctcatcaataaataatt

SEQ ID NO: 17698 - DNA, 614 bp, synthetic construct; identical to SEQ ID NO: 52
  source 1..614: mol_type = other DNA

SEQ ID NO: 17699 - DNA, 580 bp, synthetic construct
  source 1..580: mol_type = other DNA
agcaacatccaacctgcttttgtggggaacggtgcggctccaattcctgcgtcgccaaaggtgttagcgcacccaaacggcgcatctaccaatgctattggtgtggtctgcgagttctagcctactcgtttctcccttatccactcactcacgcacaaaaagtgtgctgtaactacaagatttagccctcgcacgagacgtgcgataaccgcaagattgactcaagcgcggaaagcgctgtaaccacatgctgttagtcccttcacggctgcgagatggctatccacctcggatcactgaactggagctcgaccctccttagtaagggaaccgagaggccttcttgcaacaagctccgacacagagtccacgtgattgctaccaccatgagtacatggttctcccctctcgacccaggacttctttttgaatatccacggctcgatccagagggtggggcatgatccccctagcatagcgagctacagcgggaactgtagctaggccttagcgtgccttggatactgcctgatagggcgacggcctagtcgtgtcggttctataggtagcacatacaaat

SEQ ID NO: 17700 - DNA, 597 bp, synthetic construct
  source 1..597: mol_type = other DNA
tgctagaggcacagaggagcaacatccaacctgcttttgtggggaacggtgcggctccaattcctgcgtcgccaaaggtgttagcgcacccaaacggcgcatctaccaatgctattggtgtggtctgcgagttctagcctactcgtttctcccttatccactcactcacgcacaaaaagtgtgctgtaactacaagatttagccctcgcacgagacgtgcgataaccgcaagattgactcaagcgcggaaagcgctgtaaccacatgctgttagtcccttcacggctgcgagatggctatccacctcggatcactgaactggagctcgaccctccttagtaagggaaccgagaggccttcttgcaacaagctccgacacagagtccacgtgattgctaccaccatgagtacatggttctcccctctcgacccaggacttctttttgaatatccacggctcgatccagagggtggggcatgatccccctagcatagcgagctacagcgggaactgtagctaggccttagcgtgccttggatactgcctgatagggcgacggcctagtcgtgtcggttctataggtagcacatacaaat

SEQ ID NO: 17701 - DNA, 416 bp, synthetic construct; identical to SEQ ID NO: 455
  source 1..416: mol_type = other DNA

SEQ ID NO: 17702 - DNA, 583 bp, synthetic construct
  source 1..583: mol_type = other DNA
aggagcaacatccaacctgcttctgtggggaacggtgcggctccaattcctgcgtcgccaaaggtgttagcgcacccaaacggcgcatctaccaatgctattggtgtggtctgcgagttctagcctactcgtttctcccttatccactcactcacgcacaaaaagtgtgctgtaactacaagatttagccctcgcacgagatgtgcgataaccgcaagattgactcaagcgcggaaagcgctgtaaccacatgctgttagtcccttcgtggctgcgagatggctatccacctcggatcactgaactggagctcgaccctccttagtaagggaaccgagaggccttctagcaacaagctccgacacagagtccacgtgattgctaccaccatgagtacatggttctcccctctcgacccaggacttctttttgaatatccacggctcgatccagagggtggggcatgatccccctagcatagcgagctacagcgggaactgtagctaggccttagcgtgccttggatactgcctgatagggcgacggcctagtcgtgtcggttctataggtagcacatacaaat

SEQ ID NO: 17703 - DNA, 426 bp, synthetic construct; identical to SEQ ID NO: 466
  source 1..426: mol_type = other DNA

SEQ ID NO: 17704 - DNA, 426 bp, synthetic construct
  source 1..426: mol_type = other DNA
ccccccccctccccctctgaacttgtaactggtaagtgatgatccttggaagctaggtacctgttacgctagttttggattatcttgtgcccaacactagtctttggacttctgttgtgtttaaacacagaaatctgattgcttggttatgaattcactggactaacccttttgaaagacctgctctggcgcgagctaaagcgcaattgtcaccgggtattgcaccaatggtggcgacagggtacagaagagcaagtactcctgactgggcaatgggactgcattgcatatccctaggcacctattgagatttctctggggcccaccagcgtggagttcctgtatgggaatgcaggactggacttgcgctgcctgacagggtcgcggctggccgtctgtactttgtatagtcagttgaaactcacc

SEQ ID NO: 17705 - DNA, 675 bp, synthetic construct
  source 1..675: mol_type = other DNA
ccgtcgggccttataccccgatttgctgagcttctctaggagagcccttttcccagccagaggtggctggttaaacaatacctattgtaacaaaacatctaagacataacaaccgcacacctggtctccactggccgaaggcaactagcaataaggtaggtgggttcagacgcttaaagtgtgttgtatatattcttttctaacctgtgttttaaacagggtggcagatggcgtgccataaccctaatagtgagataccacgcttgtggaccttatgctcacacagccatcctctagtaagtttgtaagacgtctgatgacgtgtgggaacttgttggagataacattttgctgcaaagcatcccattgccagcggatccacatctggtaacagatgcctctggggccaaaagccaaggtttaacagaccctttgggattggttcaaacctgaattgttatggaagacatttagtacctgctgatttggtagtagtgcaaacactagttgtaaggcccacgaaggatgcccagaaggtacccgtaggtaacaagtgacactatggatctgatctggggccaactacctctatctaggtgagttggttaaaaaacgtctagtgggccaaacccaggggggatccctggtttccttttttaaatttgaataatcact

SEQ ID NO: 17706 - DNA, 368 bp, synthetic construct
  source 1..368: mol_type = other DNA
atttgttacgctagttttggattatcttgtgcccaacatttgttttcgaacatatgttgtgtttaaacacagaaatctagtttctttggttatgagtttaatggaatatccttttgaaagacttgccttggcgcgggctagagcgcaattgtcaccaggtattgcaccaatggtggcgacagggtacagaagagcaagtactcctgactgggtaatgggactgcattgcatatccctaggcatctattgagatttctctggagcccaccagcatggagttcctgtatgggaatgcaggactggacttgtgctgcctgacagggtcgcggctggccgtctgtactttgtatagtcagttgaaactcatt

SEQ ID NO: 17707 - DNA, 543 bp, synthetic construct
  source 1..543: mol_type = other DNA
actggccgaaggcagctagcaataaggcaggtgggtttagacgcttaaagtgtgttgtacatattcttttctaacctgtgttctacacagggtggcagatggcgtgccataactctaatagtgagataccacacttgtggaccttatgctcacacagccatcctctagtaagtttgtaagacgtctgatgacgtgtgggaacttgttggaaataacagtttgctgcaaggcatcccactgccagcgggttcacatctggtaacagatgcctctggggccaaaagccaaggtttaatagaccctttgggattggttcaaacctgaactgttatggaagacatttagtacctgctgatttggtagtaatgcaaacactagttgtaaggcccacgaaggatgcccagaaggtacccgtaggtaacaagtgacactatggatctgatctggggccggctacctctatctaggtgagttggttaaaaaacgtctagtgggccaaacccaggggggatccctggtttctttttaatttgagtagtcact

SEQ ID NO: 17708 - DNA, 562 bp, synthetic construct
  source 1..562: mol_type = other DNA
accctgtgcctggtctccactattcgaaggcaacttgcaataagaagagtggaattaagacgcttaaagcatagtgacagttttcttttctaacccacattcgtgtggggtggcagatggcgtgccataactctattagtgagataccacacttgtggaccttatgctcacacagccatcctctagtaagtttatgagacgtctggtgacgtgtgggaacttattggaaacaatattttgctgcaaagcatcctattgccagcggaacaacacctggtaacaggtgcctctggggccaaaagccaaggttttacagaccctttaggattggttctaaacctgaaatgttgtggaaaatatttagtacctgctgatctggtagtaatgtgaacactagttgtaaggcccacgaaggatgcccagaaggtacccgtaggtaacaagtgacactatggatctgatctggggccgactacctctatcttggtgagttggttaaaaaacgtctagtgggccaaacccaggggggatccctggtttcttttattttaacacagccaat

SEQ ID NO: 17709 - DNA, 424 bp, synthetic construct; identical to SEQ ID NO: 465
  source 1..424: mol_type = other DNA

SEQ ID NO: 17710 - DNA, 488 bp, synthetic construct
  source 1..488: mol_type = other DNA
agacaacctatttttctaacccgcaaattattgtggggtggtagatggcgtaccataattctactagtgagataccatgcttgtggatcttatgctcacacagccatcctctagtaagtttgcaaggcgtctggtgacgtgtgggaacttattggaaataacatcttgctgcaaggcatccattagccagcggaataacacctggtaacaggtgcctctggggccaaaagccaaggtttagcagaccctaatggattggttcaaacctgggatgttgtggaagatacttagtacctaccgatctggtagcaatgcaaacactagttgtaaggcccacgaaggatgcccagaaggtacccgtaggtaacaagagacactatggatctgatttggggccaactacctctatcctggtgagttggttaaaaaacgtctagtgggccaaacccaggggggatccctggtttcttttacttatcactgtcatt

SEQ ID NO: 17711 - DNA, 571 bp, synthetic construct
  source 1..571: mol_type = other DNA
caacctgctgttgtggggaacggtgcggctccaattcctgcgtcgccaaaggtgttagcgcactcaaacggcgcatctaccaatgctattggtgtggtctgcgagttctagcctactcgtttctcccttatccactcactcacgcacaaaaagtgtgccgtaactacaagatttagccctcgcacgagatgtgcgataaccgcaagattgactcaagcgcggaaagcgctgtaaccacatgctgttagtcccttcatggctgcgagatggctatccacctcggatcactgaactggagctcgaccctccttagtaagggaaccgagaggccttcttgcaacaagctccgacacagagtccacgtgattgctaccaccatgagtacatggttctcccctctcgacccaggacttctttttgaatatccacggctcgatccagagggtggggcatgatccccctagcatagcgagctacagcgggaactgtagctaggccttagcgtgccttggatactgcctgatagggcgacggcctagtcgtgtcggttctataggtagcacatacaaat

SEQ ID NO: 17712 - DNA, 511 bp, synthetic construct
  source 1..511: mol_type = other DNA
ggttcagacgcttaaagtgtgttgtacatattcttttctaacctatgtttcacatagggtggcagatggcgtgccataactctaatagtgagataccacgcttgtggaccttatgctcacacagccatcctctggtaagtttgtaagacgtctgatgacgtgtgggaacttgttggaaataacagtttgctgcaaagcatcccattgccagcggattaacatctggtaacagatgcctctggggccaaaagccaaggtttaacagaccctttgggattggttcaaacctgaattgttatggaagacacttagtacctgctaacttggtagtaatgcaaacactagttgtaaggcccacgaaggatgcccagaaggtacccgtaggtaacaagagacactatggatctgatctggggccagctacctctatcttggtgagttggttaaaaaacgtctagtgggccaaacccaggggggatccctggtttccttttattttaaaatattcact

SEQ ID NO: 17713 - DNA, 422 bp, synthetic construct
  source 1..422: mol_type = other DNA
ctccctccccctttgaatttgtaactggtaagtgatgatccttggaaactaggtgcttgctacgctagttttggattatcttgtgcccaacattagtcctcggacttctgttgtgtttaaacacagaaatttggatgtctggctatagattcatgggaacaacccctctgaaagacctgctctggcgcgagctaaagcgcaattgtcaccaggtattgcaccaatggtggcgacagggtacagaagagcaagtactcctgactgggcaatgggactgcgttgcatatccctaggtacctattgagatttctctggggcccaccagcgtggagttcctgtatgggaatgcaggactggacttgtgctacctgacagggtcgcggctggccgtctgtactttgtatagtcagttgaaactcacc

SEQ ID NO: 17714 - DNA, 396 bp, synthetic construct; identical to SEQ ID NO: 433
  source 1..396: mol_type = other DNA

SEQ ID NO: 17715 - DNA, 312 bp, synthetic construct
  source 1..312: mol_type = other DNA
ggcagtagcgtggcgagctatggaaaaatcgcaattgtcgatagccatgttagtgacgcgcttcggcgtgctcctttggtgattcggcgactggttacaggagagtaggcagtgagctatgggcaaacctctgcagtattactcagagggaatgtgcaattgagacttgacgagcgtctccttgagatgtggcgcatgctcttggcattaccatagtgagcttccaggttgggaaacctggactgggcctatactacctgatagggtcgcggctggccgcctgtaactagtatagtcagttgaaaccccccc

SEQ ID NO: 17716 - DNA, 542 bp, synthetic construct
  source 1..542: mol_type = other DNA
ggccgaaggcaactagcaataaggtaagtgggttcagacgcttaaagtgtgttgtatatattcttttctaacctgtgttttacacagggtggcagatggcgtgccataaccctaatagtgagataccacgcttgtggaccttatgctcacacagccatcctctagtaagtttgtaagacgtctgatgacgtgtgggaacttgttggagataacattttgctgcaaagcatcccattgccagcggatccacatctggtaacagatgcctctggggccaaaagccaaggtttaacagaccctttgggattggttcaaacctgaattgttatggaagacatttagtacctgctgatttggtagtagtgcaaacactagttgtaaggcccacgaaggatgcccagaaggtacccgtaggtaacaagtgacactatggatctgatctggggccaactacctctatctaggtgagttggttaaaaaacgtctagtgggccaaacccaggggggatccctggtttctttttttaatttgaataatcact

SEQ ID NO: 17717 - DNA, 691 bp, synthetic construct; identical to SEQ ID NO: 828
  source 1..691: mol_type = other DNA

SEQ ID NO: 17718 - DNA, 539 bp, synthetic construct
  source 1..539: mol_type = other DNA
cgaaggcaactagcaataaggtaggtgggttcagacgcttaaagtgtgttgtatatattcttttctaacctgtgttttacacagggtggcagatggcgtgccataaccctaatagtgagataccacgcttgtggaccttatgctcacacagccatcctctagtaagtttgtaagacgtctgatgacgtgtgggaacttgttggagataacattttgctgcaaagcatcccattgccagcggatccacatctggtaacagatgcctctggggccaaaagccaaggtttaacagaccctttgggattggttcaaacctgaattgttatggaagacatttagtacctgctgatttggtagtagtgcaaacactagttgtaaggcccacgaaggatgcccagaaggtacccgtaggtaacaagtgacactatggatctgatctggggccaactacctctatctaggtgagttggttaaaaaacgtctagtgggccaaacccaggggggatccctggtttccttttttaatttgaataatcact

SEQ ID NO: 17719 - DNA, 426 bp, synthetic construct; identical to SEQ ID NO: 467
  source 1..426: mol_type = other DNA

SEQ ID NO: 17720 - DNA, 528 bp, synthetic construct; identical to SEQ ID NO: 19
  source 1..528: mol_type = other DNA

SEQ ID NO: 17721 - DNA, 548 bp, synthetic construct; identical to SEQ ID NO: 588
  source 1..548: mol_type = other DNA

SEQ ID NO: 17722 - DNA, 421 bp, synthetic construct; identical to SEQ ID NO: 461
  source 1..421: mol_type = other DNA

SEQ ID NO: 17723 - DNA, 546 bp, synthetic construct; identical to SEQ ID NO: 23
  source 1..546: mol_type = other DNA

SEQ ID NO: 17724 - DNA, 415 bp, synthetic construct; identical to SEQ ID NO: 452
  source 1..415: mol_type = other DNA

SEQ ID NO: 17725 - DNA, 523 bp, synthetic construct
  source 1..523: mol_type = other DNA
aaggtaggtgggttcagacgcttaaagtgtgttgtatatattcttttctaacctgtgttttacacagggtggcagatggcgtgccataaccctaatagtgagataccacgcttgtggaccttatgctcacacagccatcctctagtaagtttgtaagacgtctgatgacgtgtgggaacttgttggagataacattttgctgcaaagcatcccattgccagcggatccacatctggtaacagatgcctctggggccaaaagccaaggtttaacagaccctttgggattggttcaaacctgaattgttatggaagacatttagtacctgctgatttggtagtagtgcaaacactagttgtaaggcccacgaaggatgcccagaaggtacccgtaggtaacaagtgacactatggatctgatctggggccaactacctctatctaggtgagttggttaaaaaacgtctagtgggccaaacccaggggggatccctggtttccttttttaaatttgaataatcact

SEQ ID NO: 17726 - DNA, 578 bp, synthetic construct
  source 1..578: mol_type = other DNA
caccatccaacctgcttttgtggggaacggtgcggctccaattcctgcgtcgccaaaggtgttagcgcacccaaacggcgcatctaccaatgctattggtgtggtctgcgagttctagcctactcgtctctcccctattcactcactcacgcacaaaaactgtgttgtaactacaagatttagccctcgcacgggatgtgcgataaccgcaagattgactcaagcgcggaaagcgctgtaaccacatgctgttagtccctttatggctgcgagatggctatccacctcggatcactgaactggagctcgaccctccttagtaagggaaccgagaggccttcttgcaacaagctccgacacagagtccacgtgattgctaccaccatgagtacatggttctcccctctcgacccaggacttctttttgaatatccacggctcgatccagagggtggggcatgatccccctagcatagcgagctacagcgggaactgtagctaggccttagcgtgccttggatactgcctgatagggcgacggcctagtcgtgtcggttctataggtagcacatacaaat

SEQ ID NO: 17727 - DNA, 522 bp, synthetic construct
  source 1..522: mol_type = other DNA
aaggtaggtgggttcagacgcttaaagtgtgttgtatatattcttttctaacctgtgttttacacagggtggcagatggcgtgccataaccctaatagtgggataccacgcttgtggaccttatgctcacacagccatcctctagtaagtttgtaagacgtctgatgacgtgtgggaacttgttggagataacattttgctgcaaagcatcccattgccagcggatccacatctggtaacagatgcctctggggccaaaagccaaggtttaacagaccctttgggattggttcaaacctgaattgttatggaagacatttagtacctgctgatttggtagtagtgcaaacactagttgtaaggcccacgaaggatgcccagaaggtacccgtaggtaacaagtgacactatggatctgatctggggccaactacctctatctaggtgagttggttaaaaaacgtctagtgggccaaacccaggggggatccctggtttcctttttaaatttgaataatcact

SEQ ID NO: 17728 - DNA, 522 bp, synthetic construct
  source 1..522: mol_type = other DNA
aaggtaggtgggttcagacgcttaaagtgtgttgtatatattcttttctaacctgtgttttacacagggtggcagatggcgtgccataaccctaatagtgagataccacgcttgtggaccttatgctcacacagccatcctctagtaagtttgtaagacgtctgatgacgtgtgggaacttgttggagataacattttgctgcaaagcatcccattgccagcggatccacatctggtaacagatgcctctggggccaaaagccaaggtttaacagaccctttgggattggttcaaacctgaattgttatggaagacatttagtacctgctgatttggtagtagtgcaaacactagttgtaaggcccacgaaggatgcccagaaggtacccgtaggtaacaagtgacactatggatctgatctggggccaactacctctatctaggtgagttggttaaaaaacgtctagtgggccaaacccaggggggatccctggtttcctttttaaatttgaataatcact

SEQ ID NO: 17729 - DNA, 522 bp, synthetic construct
  source 1..522: mol_type = other DNA
aaggtaagtgggttcagacgcttaaagtgtgttgtatatattcttttctaacctgtgttttacacagggtggcagatggcgtgccataaccctaatagtgagataccacgcttgtggaccttatgctcacacagccatcctctagtaagtttgtaagacgtctgatgacgtgtgggaacttgttggagataacattttgctgcaaagcatcccattgccagcggatccacatctggtaacagatgcctctggggccaaaagccaaggtttaacagaccctttgggattggttcaaacctgaattgttatggaagacatttagtacctgctgatttggtagtagtgcaaacactagttgtaaggcccacgaaggatgcccagaaggtacccgtaggtaacaagtgacactatggatctgatctggggccaactacctctatctaggtgagttggttaaaaaacgtctagtgggccaaacccaggggggatccctggtttcttttttaaatttgaataatcact

SEQ ID NO: 17730 - DNA, 522 bp, synthetic construct
  source 1..522: mol_type = other DNA
aaggtaagtgggttcagacgcttaaagtgtgttgtatatattcttttctaacctgtgttttacacagggtggcagatggcgtgccataaccctaatagtgagataccacgcttgtggaccttatgctcacacagccatcctctagtaagtttgtaagacgtctgatgacgtgtgggaacttgttggagataacattttgctgcaaagcatcccattgccagcggatccacatctggtaacagatgcctctggggccaaaagccaaggtttaacagaccctttgggattggttcaaacctgaattgttatggaagacatttagtacctgctgatttggtagtagtgcaaacactagttgtaaggcccacgaaggatgcccagaaggtacccgtaggtaacaagtgacactatggatctgatctggggccaactacctctatctaggtgagttggttaaaaaacgtctagtgggccaaacccaggggggatccctggtttctttttttaatttgaataatcact

SEQ ID NO: 17731 - DNA, 521 bp, synthetic construct
  source 1..521: mol_type = other DNA
aaggtaggtgggttcagacgcttaaagtgtgttgtatatattcttttctaacctgtgttttacacagggtggcagatggcgtgccataaccctaatagtgagataccacgcttgtggaccttatgctcacacagccatcctctagtaagtttgtaagacgtctgatgacgtgtgggaacttgttggagataacattttgctgcaaagcatcccattgccagcggatccacatctggtaacagatgcctctggggccaaaagccaaggtttaacagaccctttgggattggttcaaacctgaattgttatggaagacatttagtacctgctgatttggtagtagtgcaaacactagttgtaaggcccacgaaggatgcccagaaggtacccgtaggtaacaagtgacactatggatctgatctggggccaactacctctatctaggtgagttggttaaaaaacgtctagtgggccaaacccaggggggatccctggtttcctttttaatttgaataatcact

SEQ ID NO: 17732 - DNA, 407 bp, synthetic construct
  source 1..407: mol_type = other DNA
aacttgtaattggtaagtgatgatccttggaagctaggtacctgttacgctagttttggattatcttgtgcccaacactagtctttggacttctgttgtgtttaaacacagaaatctgattgcttggttatgaattcactggactaacccttttgaaagacctgctctggcgcgagctaaagcgcaattgtcaccgggtattgcaccaatggtggcgacagggtacagaagagcaagtactcctgactgggcaatgggactgcattgcatatccctaggcacctattgagatttctctggggcccaccagcgtggagttcctgtatgggaatgcaggactggacttgcgctgcctgacagggtcgcggctggccgtctgtactttgtatagtcagttgaaactcacc

SEQ ID NO: 17733 - DNA, 644 bp, synthetic construct; identical to SEQ ID NO: 73
  source 1..644: mol_type = other DNA

SEQ ID NO: 17734 - DNA, 538 bp, synthetic construct
  source 1..538: mol_type = other DNA
attcctgcgtcgccaaaggtgttagcgcactcaaacggcgcatctaccaatgctattggtgtggtctgcgagttctagcctactcgtttctcccttatccactcactcacgcacaaaaagtgtgccgtaactacaagatttagccctcgcacgagatgtgcgataaccgcaagattgactcaagcgcggaaagcgctgtaaccacatgctgttagtcccttcatggctgcgagatggctatccacctcggatcactgaactggagctcgaccctccttagtaagggaaccgagaggccttcttgcaacaagctccgacacagagtccacgtgattgctaccaccatgagtacatggttctcccctctcgacccaggacttctttttgaatatccacggctcgatccagagggtggggcatgatccccctagcatagcgagctacagcgggaactgtagctaggccttagcgtgccttggatactgcctgatagggcgacggcctagtcgtgtcggttctataggtagcacatacaaat

SEQ ID NO: 17735 - DNA, 545 bp, synthetic construct
  source 1..545: mol_type = other DNA
ctggttgaaggcaacttgcaataagattagtgggaacaagacgcttaaagcatggtgcaaaataacttttctaactcacattctatgtggggtggcagatggcgtgccataattctatcagtgagataccacgcttgtggaccttatgctcacacagccatcctctagtaagtttgtgagacgtctggtgacgtgtgggaacttattggaaacaacattttgctgtaaagcatccaattgccagcggaacaacacctggtaacaggtgcctctggggccaaaagccaaggtttaacagacccttttggattggttctaaacctgagatgttgtggaagatacttagtacctaccaatctggtagtagtgcaaacactagttgtaaggcccacgaaggatgcccagaaggtacccgtaggtaacaagtgacactatggatctgatctggggctaggtgcctctatcttggtgacctggttaaaaaacgtctagtgggccaaacccaggggggatccctggtttccctttattttatcaatgccact

SEQ ID NO: 17736 - DNA, 420 bp, synthetic construct
  source 1..420: mol_type = other DNA
ccccctccctttgaatttgtaattgataagtgatgatccttggaagctaggtacttgatacgctagttttggattgtcttgtgcccaacattagtctttggacttctgttgtgtttaaacacagaaattttgttatctggctacgaattcattggattaatccctctgaaagacctgctctggcgcgagcgaaagcgcaattgtcaccgggtattgcaccaatggtggcgacagagtacagaagagcaagtactcctgactgggcaatgggactgcattgcatatccctaggtacctattgagatttctctggggcccaccagcgtggagttcctgtatgggaatgcaggactggacttgtgctgcctgacagggtcgcggctggccgtctgtactttgtatagtcagttgaaactcact

SEQ ID NO: 17737 - DNA, 537 bp, synthetic construct; identical to SEQ ID NO: 575
  source 1..537: mol_type = other DNA

SEQ ID NO: 17738 - DNA, 426 bp, synthetic construct; identical to SEQ ID NO: 468
  source 1..426: mol_type = other DNA

SEQ ID NO: 17739 - DNA, 537 bp, synthetic construct
  source 1..537: mol_type = other DNA
aggctacttgcaataagattagtgggaacaagacgcttaaagcatggtgcaaaataacttttctaactcacattctatgtggggtggcagatggcgtgccataattctatcagtgagataccacgcttgtggaccttatgctcacacagccatcctctagtaagtttgtgagacgtctggtgacgtgtgggaacttattggaaacaacattttgctgtaaagcatccaattgccagcggaacaacacctggtaacaggtgcctctggggccaaaagccaaggtttaacagacccttttggattggttctaaacctgagatgttgtggaagatacttagtacctaccaatctggtagtagtgcaaacactagttgtaaggcccacgaaggatgcccagaaggtacccgtaggtaacaagtgacactatggatctgatctggggctaggtgcctctatcttggtgacctggttaaaaaacgtctagtgggccaaacccaggggggatccctggtttccctttattttatcaatgccact

SEQ ID NO: 17740 - DNA, 415 bp, synthetic construct; identical to SEQ ID NO: 453
  source 1..415: mol_type = other DNA

SEQ ID NO: 17741 - DNA, 436 bp, synthetic construct; identical to SEQ ID NO: 9
  source 1..436: mol_type = other DNA

SEQ ID NO: 17742 - DNA, 329 bp, synthetic construct; identical to SEQ ID NO: 314
  source 1..329: mol_type = other DNA

SEQ ID NO: 17743 - DNA, 419 bp, synthetic construct
  source 1..419: mol_type = other DNA
cctctccttttggactcgtaactgataagtggtagtccttggaagctaggtactcgttacgctagttttggattatcttgtgcccaacattggacctcggtcctgtgttgtgtttaaacacagaaatcttgacacttggttatgaattcattgtatcaacccttttgaaagacctgctctggcgcgagcaaaagcgcaattgtcaccaggtattgcaccaatggtggcgacagggtacagaagagcaagtactcctgactgggtaatgggactgcattgcatatccctaggcacctattgagatttctctggggcccaccagcatggagttcctgtatgggaatgcaggactggacttgtgctgcctgacagggtcgcggctggccgtctgtactttgtatagtcagttgaaaagcacc

SEQ ID NO: 17744 - DNA, 393 bp, synthetic construct; identical to SEQ ID NO: 430
  source 1..393: mol_type = other DNA

SEQ ID NO: 17745 - DNA, 416 bp, synthetic construct
  source 1..416: mol_type = other DNA
ctccctttgaatttgtaattgataagtgatgatccttggaagctaggtacttgataacttcgttttggattgtcttgtgcccaacattagtctttggacttctgttgtgtttaaacacagaaattttgttatctggctacgaattcattggattaatccctctgaaagacctgctctggcgcgagcgaaagcgcaattgtcaccgggtattgcaccaatggtggcgacagagtacagaagagcaagtactcctgactgggcaatgggactgcattgcatatccctaggtacctattgagatttctctggggcccaccagcgtggagttcctgtatcggaatgcaggactggacttgtgctgcctgacagggtcgcggctggccgtctgtactttgtatagtcagttgaaactcact

SEQ ID NO: 17746 - DNA, 411 bp, synthetic construct
  source 1..411: mol_type = other DNA
tctggacttgtaactggtaagtgatagtccttggaagctaggtacttgttacgctagttttggattatcttgtgcccaacactagaccttggtcttttgttgtgtttaaacacagaaatcttgttacttggttatgaattcattgtattaacccctctgaaagacctgctctggcgcgagctaaagcgcaattgtcaccaggtattgcaccaatggtggcgacagggtacagaagagcaagtactcctgactgggtaatgggactgcattgcatatccctaggcacctattgagatttctctggggcccaccagcgtggagttcctgtatgggaatgcaggactggacttgtgctgcctgacagggtcgcggctggccgtctgtactttgtatagtcagttgaaactcacc

SEQ ID NO: 17747 - DNA, 508 bp, synthetic construct; identical to SEQ ID NO: 532
  source 1..508: mol_type = other DNA

SEQ ID NO: 17748 - DNA, 433 bp, synthetic construct; identical to SEQ ID NO: 478
  source 1..433: mol_type = other DNA

SEQ ID NO: 17749 - DNA, 416 bp, synthetic construct
  source 1..416: mol_type = other DNA
ctccctttgaatttgtaactgataagtgatgatccttggaagctaggtacttgttacgctagttttggattatcttgtgcccaacattagtctttggacttctgttgtgtttaaacacagaaattttgttatttggttattgattcactggatcaacccttttgaaagacttgctctggcgcgagctaaagcgcaattgtcaccgggtattgcaccaatggtggcgacagagtacagaagagcaagtactcctgactgggcaatgggactgcgttgcatatccctaggcacctattgagatttctctggggcccaccagcgtggagttcctgtatgggaatgcaggactggacttgtgctgcctgacagggtcgcggctggccgtctgtactttgtatagtcagttgaaactcact

SEQ ID NO: 17750 - DNA, 609 bp, synthetic construct
  source 1..609: mol_type = other DNA
gaatcagtccaaagggtcctgcgtaaaacacgcagggccctttgaactgattcggtccagctgaccgacacgctgctggccaggtgctatggccggccctagccggggaggctgccccggcccctcttctacggggattagtaggtttatttctacttttatttctttattttcatggttgtcgtcataccaagagctgctaccgctgcgcccggcggggttaactggtggattagccaccagctgtggccgccaaaagtgacgaaagtgtgactatcagatggatctggtcccactgtgatccctctgtttgtgtaaccccgatcgtctatctagggtaggctacgggtgaaaccctagacctatagatcttgtatcaagattgatggtgtgtgtacgttaacaccacggataagggtgagttaatgaggacgagaacccttcaacgtggaggccatggacgtcaccacatagccgcggggtgtaacaagcagaggtatatagcagtggtgttagaaccatactgtaagcacttccctatgagtttagggctaatcaggggcatgttaggttttaaaggccaataattatatgcgtatgagtgtgaaa

SEQ ID NO: 17751 - DNA, 423 bp, synthetic construct
  source 1..423: mol_type = other DNA
cccccccctccctttgaatttgtaattgataagtgatgatccttggaagctaggtacttgatacgctagttttggattgtcttgtgcccaacattagtctttggacttctgttgtgtttaaacacagaaattttgttatctggctacgaattcattggattaatccctctgaaagacctgctctggcgcgagcgaaagcgcaattgtcaccgggtattgcaccaatggtggcgacagagtacagaagagcaagtactcctgactgggcaatgggactgcattgcatatccctaggtacctattgagatttctctggggcccaccagcgtggagttcctgtatgggaatgcaggactggacttgtgctgcctgacagggtcgcggctggccgtctgtactttgtatagtcagttgaaactcact

SEQ ID NO: 17752 - DNA, 398 bp, synthetic construct; identical to SEQ ID NO: 5
  source 1..398: mol_type = other DNA

SEQ ID NO: 17753 - DNA, 421 bp, synthetic construct; identical to SEQ ID NO: 7
  source 1..421: mol_type = other DNA

SEQ ID NO: 17754 - DNA, 601 bp, synthetic construct
  source 1..601: mol_type = other DNA
tgtttgctagaggcacagaggagcaacatccaacctgcttttgtggggaacggtgcggctccaattcctgcgtcgccaaaggtgttagcgcacccaaacggcgcatctaccaatgctattggtgtggtctgcgagttctagcctactcgtttctcccttatccactcactcacgcacaaaaagtgtgctgtaactgcaagatttagccctcgcacgagatgtgcggtaaccgcaagattgactcaagcgcggaaagcgctgcaaccacacgctgttagtcccttcatggctgcgagatggctatccacctcggatcactgaactggagctcgaccctccttagtaagggaaccgagaggccttcttgcaacaagctccgacacagagtccacgtgaatgctaccaccatgagtacatggttctcccctctcgacccaggacttctttttgaatatccacggctcgatccagagggtggggcatgatccccctagcatagcgagctacagcgggaactgtagctaggccttagcgtgccttggatactgcctgatagggcgacggcctagtcgtgtcggttctataggtagcacatacaaat

SEQ ID NO: 17755 - DNA, 664 bp, synthetic construct; identical to SEQ ID NO: 801
  source 1..664: mol_type = other DNA

SEQ ID NO: 17756 - DNA, 494 bp, synthetic construct; identical to SEQ ID NO: 521
  source 1..494: mol_type = other DNA

SEQ ID NO: 17757 - DNA, 439 bp, synthetic construct; identical to SEQ ID NO: 10
  source 1..439: mol_type = other DNA

SEQ ID NO: 17758 - DNA, 494 bp, synthetic construct
  source 1..494: mol_type = other DNA
tttgaaagaggcctccggagtgtccggaggctctctttcgacccaacccatactggggggtgtgtgggaccgtacctggagtgcacggtatatatgcattcccgcatggcaagggcgtgctaccttgccccttgacgcatggtatgcgtcatcatttgccttggttaagccccatagaaacgaggcgtcacgtgccgaaaatccctttgcgtttcacagaaccatcctaaccatgggtgtagtatgggaatcgtgtatggggatgattaggatctctcgtagagggataggtgtgccattcaaatccagggagtactctggctctgacattgggacatttgatgtaaccggacctggttcagtatccgggttgtcctgtattgttacggtgtatccgtcttggcacactgaaagggtatttttgggtaatcctttcctactgcctgatagggtggcgtgcccggccacgagagattaagggtagcaatttaaac

SEQ ID NO: 17759 - DNA, 507 bp, synthetic construct
  source 1..507: mol_type = other DNA
agacgcttaaagcatggtgtaaatcaacttttctaactcacattttatgtggggtggcagatggcgtgccataactctattagtgagataccacgcttgtggaccttatgctcacacagccatcctctagtaagtttgtgagacgtctggtgacgtgtgggaacttattggaaacaacattttgctgcaaagcatcctatcgccagcggaataacatctggtaacagatgcctctggggccaaaagccaaggtttaacagaccctttaggattggttcaaaacctggaatgttgtggaagatacttagtacctgctgatctggtagtagtgcaaacactagttgtaaggcccacgaaggatgcccagaaggtacccgtaggtaacaagtgacactatggatctgatctggggccaggtacctctatcttggtgacctggttaaaaaacgtctagtgggccaaacccgggggggatccccggtttccttttattttatcaatgccaca

SEQ ID NO: 17760 - DNA, 380 bp, synthetic construct; identical to SEQ ID NO: 387
  source 1..380: mol_type = other DNA

SEQ ID NO: 17761 - DNA, 337 bp, synthetic construct; identical to SEQ ID NO: 321
  source 1..337: mol_type = other DNA

SEQ ID NO: 17762 - DNA, 493 bp, synthetic construct; identical to SEQ ID NO: 519
  source 1..493: mol_type = other DNA

SEQ ID NO: 17763 - DNA, 734 bp, synthetic construct; identical to SEQ ID NO: 941
  source 1..734: mol_type = other DNA

SEQ ID NO: 17764 - DNA, 569 bp, synthetic construct
  source 1..569: mol_type = other DNA
acctgcttttgtggggaacggtgcggctccaattcctgcgtcgccaaaggtgttagcgcacccaaacggcgcatctaccaatgctattggtgtggtctgcgagttctagcctactcgtttctcccctattcactcactcacgcacaaaaagtgtgttgtaactacaagatttagccctcgcacgggatgtgcgataaccgcaagattgactcaagcgcggaaagcgctgtaaccacatgctattagtccctttatggctgcgagatggctatccacctcggatcactgaactggagctcgaccctccttagtaagggaaccgagaggccttcttgcaacaagctccgacacagagtccacgtgattgctaccaccatgagtacatggttctcccctctcgacccaggacttctttttgaatatccacggctcgatccagagggtggggcatgatccccctagcatagcgagctacagcgggaactgtagctaggccttagcgtgccttggatactgcctgatagggcgacggcctagtcgtgtcggttctataggtagcacatacaaat

SEQ ID NO: 17765 - DNA, 494 bp, synthetic construct
  source 1..494: mol_type = other DNA
tctgaaggaggtctccggagtatccggaggttctctttcgacccaacccatactggggggtgtgtgggaccgtacctggagtgcacggtatatatgcattcccgcatggcaagggcgtgctaccttgccccttgacgcatggtatgcgtcatcatttgccttggttaagccccatagaaacgaggcgccacgtgccgaaaatccctttgcgtttcacagaaccatcctaaccatgggtgtagtatgggaatcgtgtatggggatgattaggatctctcgtagagggataggtgtgccattcaaatccagggagtactctggctctgacattgggacatttgatgtaaccggacctggttcagtatccgggttgtcctgtattgttacggtgtatccgtcttggcacactgaaagggtatttttgggtaatcctttcctactgcctgatagggtggcgtgcccggccacgagagattaagggtagcaatttaaac

SEQ ID NO: 17766 - DNA, 488 bp, synthetic construct; identical to SEQ ID NO: 512
  source 1..488: mol_type = other DNA

SEQ ID NO: 17767 - DNA, 493 bp, synthetic construct
  source 1..493: mol_type = other DNA
tttgaaagaggcctccggggaatccggaggttctctttcgacccaacccatactggggggtgtgtggggccgtatttggagtgcacggtatatatgcattcccgcatggcaagggcgtgccaccttgccccttgacgcatggtatgtgtcatcatttgccttggttaaaccccataaaacgaggcgccacgtgccgaaaatccctttgcgtttcacagaaccatcctaaccatgggtgtagtatgggaatcgtgtatgggggtgattaggatctctcgtagagggataggtgtgtcattcaaatccagggagtactctggctctgacattgggacatttgatgtaaccggacctggttcagtatccgggttgtcctgtattgttacggtgtatccgtcttgacacactgaaagggtattcttgggtaatcccttcctactgcctgatagggcggcgtgcccggccacgagagattaagggtagcaatttaaac

SEQ ID NO: 17768 - DNA, 539 bp, synthetic construct; identical to SEQ ID NO: 578
  source 1..539: mol_type = other DNA

SEQ ID NO: 17769 - DNA, 381 bp, synthetic construct
  source 1..381: mol_type = other DNA
tagtaagtttgtaagacgtccgatgaagtgtgggaacttgttggaaatagcagtttgctgcaaagcatcccattgccagcggatcaacatctggtgacagatgcctctggggccaaaagccaaggtttaacagaccccttgggattggttcaaacctgaactgctatggaaaacatttagtacctgccgatttggtagtaatgcagacactagttgtagggcccacgaaggatgcccagaaggtacccgtaggtaacaagtgacactatggatctgatctggggccagctacttctatctaagtgagttggttaaaaaacgtctagtgggccaaacccaggggggatccctggtttccttattttattttatacagtcatt

SEQ ID NO: 17770 - DNA, 331 bp, synthetic construct
  source 1..331: mol_type = other DNA
attggtcttcggacttctgttgtgtttaaacacagaaatttgatttcctgactatgaattcattggatcaatccttttgaaagacctgctctggcgcgagctaaagcgcaattgtcaccaggtactgcaccaacggtggcgacagggtacagaagagcaagtactcctgactgggcaatgggactgcattgcatatccctaggcacctattgagatttctctggggcccaccagcgtggagttcctgtatgggaatgcaggactggacttgtgctgcctgacagggtcgcggctggccgtctgtactttgtatagtcagttgaaactcacc

SEQ ID NO: 17771 - DNA, 332 bp, synthetic construct; identical to SEQ ID NO: 317
  source 1..332: mol_type = other DNA

SEQ ID NO: 17772 - DNA, 331 bp, synthetic construct
  source 1..331: mol_type = other DNA
actagactccggacttctgttgtgtttaaacacagaaatttgaatgtctggctatgaattcattggatcaatccttctgaaagacctgctctggcgcgagctaaagcgcaattgtcaccaggtattgcaccaatggtggcgacagggtacagaagagcaagtactcctgactgggtaatgggactgcattgcatatccctaggcacctattgagatttctctggggcccaccagcgtggagttcctgtatgggaatgcaggactggacttgtgctgcctgacagggtcgcggctggccgtctgtactttgtatagtcagttgaaactcacc

SEQ ID NO: 17773 - DNA, 331 bp, synthetic construct
  source 1..331: mol_type = other DNA
attggtcttcggactcttgttgtgtttaaacacagaaatttgattgtctggctatgaattcaatggattaacccacctgaaagacctgctctggcgcgagctaaagcgcaattgtcaccaggtattgcaccaatggtggcgacagggtacagaagagcaagtactcctgactgggcaatgggactgcattgcatatccctaggcacctattgagatttctctggggcccaccagcgtggagttcctgtatgggaatgcaggactggacttgtgctgcctgacagggtcgcggctggccgtctgtactttgtatagtcagttgaaactcacc

SEQ ID NO: 17774 - DNA, 331 bp, synthetic construct; identical to SEQ ID NO: 315
  source 1..331: mol_type = other DNA

SEQ ID NO: 17775 - DNA, 331 bp, synthetic construct
  source 1..331: mol_type = other DNA
actagactttggactgctgttgtgtttaaacacagaaatttgattgcttggttatgaattcactggattaaccctcttgaaagacctgctctggcgcgagccaaagcgcaattgtcaccaggtattgcaccaatggtggcgacagggtacagaagagcaagtactcctgactgggtaatgggactgcattgcatatccctaggcacctattgagatttctctggggcccaccagcatggagttcctgtatgggaatgcaggactggacttgtgctgcctgacagggtcgcggctggccgtctgtactttgtatagtcagttgaaatgcacc

SEQ ID NO: 17776 - DNA, 331 bp, synthetic construct
  source 1..331: mol_type = other DNA
attagtcctaggacttctgttgtgtttaaacacagaaatttgattacttggttatgaattcattggatcaaccctcttgaaagacctgctctggcgcgagctaaagcgcaattgtcaccgggtattgcaccaatggtggcgacagggtacagaagagcaagtactcctgactgggtaatgggactgcattgcatatccctaggcacctattgagatttctctggggcccaccagcatggagttcctgtatgggaatgcaggactggacttgtgctgcctgacagggtcgcggctggccgtctgtactttgtatagtcagttgaaacgcacc

SEQ ID NO: 17777 - DNA, 331 bp, synthetic construct
  source 1..331: mol_type = other DNA
actagacctcggtctcttgttgtgttcaaacacagaaatcttgctgcttggttatgaattcattggaccaatccctctgaaagacctgctctggcgcgagctaaagcgcaattgtcaccgggtattgcaccaatggtggcgacagggtacagaagagcaagtactcctgactgggcaatgggactgcattgcatatccctaggcacctattgagaattctctggggcccaccagcatggagttcctgtatgggaatgcaggactggacttgtgctgcctgacagggtcgcggctggccgtctgtactttgtatagtcagttgaaactcact

SEQ ID NO: 17778 - DNA, 330 bp, synthetic construct
  source 1..330: mol_type = other DNA
actagacttcggtcttttgttgtgtttaaacacagaaatcttgatacttggttatgaattcattggatcaaccctctgaaagacctgctctggcgcgagcaaaagcgcaattgtcaccaggtattgcaccaatggtggcgacagggtacagaagagcaagtactcctgactgggcaatgggactgcattgcatatccctaggcacctattgagatttctctggggcccaccagcatggagttcctgtatgggaatgcaggactggacttgtgctgcctgacagggtcgcggctggccgtctgtgctttgtatagtcagttgaaactcact

SEQ ID NO: 17779 - DNA, 331 bp, synthetic construct
  source 1..331: mol_type = other DNA
actagaccttggtcttttgttgtgtttaaacacagaaatcttgttatttggttatgaattcatcggatcaatccctctgaaagacctgctctggcgcgagctaaagcgcaactgtcaccgggtattgcaccaatggtggcgacagggtacagaagagcaagtactcctgactgggcaatgggactgcattgcatatccctaggcacctattgagatttctctggggcccaccagcgtggagttcctgtatgggaatgcaggactggacttgtgctgcctgacagggtcgcggctggccgtctgtactttgtatagtcagttgaaactcacc

SEQ ID NO: 17780 - DNA, 331 bp, synthetic construct
  source 1..331: mol_type = other DNA
actagaccttggtctcttgttgtgtttaaacacagaaatcttgctgcttggttatgaattcactggattaatccctctgaaagacctgctctggcgcgagctaaagcgcaattgtcaccgggtattgcaccaatggtggcgacagggtacagaagagcaagtactcctgactgggtaatgggactgcattgcatatccctaggcacctattgagatttctctggggcccaccagcatggagttcctgtatgggaatgcaggactggacttgtgctgcctgacagggtcgcggctggccgtctgtactttgtatagtcagttgaaacttacc

SEQ ID NO: 17781 - DNA, 331 bp, synthetic construct
  source 1..331: mol_type = other DNA
actagaccttggtctcttgttgtgtttaaacacagaaatcttgctatttggttatgaattcattggatcaacccccctgaaagacctgctctggcgcgagcaaaagcgcaaatgtcaccaggtattgcaccaatggtggcgacagggtacagaagagcaagtactcctgactgggaaatgggactgcattgcatatccctaggcacctattgagatttctctggggcccaccagcgtggagttcctgtatgggaatgcaggactggacttgtgctgcctgacagggtcgcggctggccgtctgtactttgtatagtcagttgaaactcacc

SEQ ID NO: 17782 - DNA, 331 bp, synthetic construct
  source 1..331: mol_type = other DNA
attagtctttggacttctgttgtgtttaaacacagaaatttgattgcctggctatgaattcactggattaatccttttgaaagacctgctctggcgcgagctaaagcgcaattgtcaccaggtattgcaccaatggtggcgacagggtacagaagagcaagtactcctgactgggtaatgggactgcattgcatatccctaggcacctattgagatttctctggggcccaccagcgtggagttcctgtatgggaatgcaggactggacttgtgctgcctgacagggtcgcggctggccgtctgtactttgtatagtcagttgaaactcact

SEQ ID NO: 17783 - DNA, 331 bp, synthetic construct
  source 1..331: mol_type = other DNA
actagtcttcggactcttgttgtgttcaaacacagaaatattgttgtctggttatgaattcattgggtcaacccccttgaaagacctgctctggcgcgagctaaagcgcaattgtcaccaggtattgcaccaatggtggcgacagggtacagaagagcaagtactcctgactgggcaatgggactgcattgcatatccctaggcacctattgagatttctctggggcccaccagcgtggagttcctgtatgggaatgcaggactggacttgtgctgcctgacagggtcgcggctggccgtctgtactttgtatagtcagttgaaactcacc

SEQ ID NO: 17784 - DNA, 335 bp, synthetic construct; identical to SEQ ID NO: 320
  source 1..335: mol_type = other DNA

SEQ ID NO: 17785 - DNA, 406 bp, synthetic construct
  source 1..406: mol_type = other DNA
gaccttatgctcacacagccatcctctagtaagtttgtgaggcatctggtgacgtgtgggaacttattggaagcaacattttgctgtaaagcatcctatcgccagcggaacaacgcctggtaacaggcgcctctggggccaaaagccaaggtttaacagaccctttaggattggttttaaacctgagatgttgtggaaaatatttagtacctaccgacctggtagtaatgcaaacactagttgtaaggcccacgaaggatgcccagaaggtacccgtaggtaacaagtgacactatggatctgatctggggccaggtacttctatcttagtgacctggttaaaaaacgtctagtgggccaaacccgggggggatccccggtttccttttattttattaatgccatt

SEQ ID NO: 17786 - DNA, 331 bp, synthetic construct
  source 1..331: mol_type = other DNA
actagtctccggacttctgttgtgtttaaacacagaaatttgactatctggctatgaattcattggaatgacccctttgaaagacctgctctggcgcgagctaaagcgcaattgtcaccgggtattgcaccaatggtggcgacagggtacagaagagcaagtactcctgactgggcaatgggactgcattgcatatccctaggcacctattgagatttctctggggcccaccagcgtggagttcctgtatgggaatgcaggactggacttgtgctgcctgacagggtcgcggctggccgtctgtactttgtatagtcagttgaaactcact

SEQ ID NO: 17787 - DNA, 436 bp, synthetic construct
  source 1..436: mol_type = other DNA
taattctattagtgagataccacgcttgtggaccttatgctcacacagccatcctctagtaagtttgtaagacgtctggtgacgtgtgggaacttattggaaacaacattttgctgcaaagcatcctattgccagcggaacaacacctggtaacaggtgcctctggggccaaaagccaaggtttgacagaccctttaggattggtttaaaacctggaatgttgcggaagatacttagtacctgccgatctggtagtaatgcagacactagttgtaaggcccacgaaggatgcccagaaggtacccgtaggtaacaagcgacactatggatctgatctggggctaggtacctctatcttggtgacctagttaaaaaacgtctagtgggccagacccgggggggatccccggtttccttttattttatcaatgtcact

SEQ ID NO: 17788 - DNA, 331 bp, synthetic construct
  source 1..331: mol_type = other DNA
actagacttcggtctcttgttgtgtttaaacacagaaatcttgctacttggttatgaattcattggatcaacccctctgaaagacctgctctggtgcgagcaaaagcgcaattgtcaccaggtattgcaccaatggtggcgacagggtacagaagagcaagtactcctgactgggtaatgggactgcattgcatatccctaggcacctattgagatttctctggggcccaccagcgtggagttcctgtacgggaatgcaggactggacttgtgctgcctgacagggtcgcggctggccgtctgtactttgtatagtcagttgaaactcacc

SEQ ID NO: 17789 - DNA, 331 bp, synthetic construct
  source 1..331: mol_type = other DNA
actagtctttggacttttgttgtgtttaaacacagaaattttgctatttggctatgaattcattggatcaatccctctgaaagacctgctctggcgcgagctaaagcgcaattgtcaccgggtactgcaccaatggtggcgacagggtacagaagagcaagtactcctgactgggcaatgggactgcattgcatatccctaggcacctattgagatttctctggggcccaccagcatggagttcctgtatgggaatgcaggactggacttgtgctgcctgacagggtcgcggctggccgtctgtactttgtatagtcagttgaaactcacc

SEQ ID NO: 17790 - DNA, 331 bp, synthetic construct
  source 1..331: mol_type = other DNA
actagacttcggtctcttgttgtgtttaaacacagaaatcttgctacttggttatgaattcattggatcaacccctctgaaagacctgctctggcgcgagcaaaagcgcaattgtcaccaggtattgcaccaatggtggcgacagggtacagaagagcaagtactcctgactgggtaatgggactgcattgcatatccctaggcacctattgagatttctctggggcccaccagcgtggagttcctgtacgggaatgcaggactggacttgtgctgcctgacagggtcgcggctggccgtctgtactttgtatagtcagttgaaactcacc

SEQ ID NO: 17791 - DNA, 331 bp, synthetic construct; identical to SEQ ID NO: 316
  source 1..331: mol_type = other DNA

SEQ ID NO: 17792 - DNA, 331 bp, synthetic construct
  source 1..331: mol_type = other DNA
attagtcttcggacttctgttgtgtttaaacacagaaatttgattatttggttatggatttactggattaaccctactgaaagacctgctccggcgcgagctaaagcgcaaatgtcaccaggtattgcaccaatggtggcgacagggtacagaagagcaagtactcctgactgggcaatgggactgcgttgcatatccctaggcacctattgagatttctctggggcccaccagcgtggagttcctgtatgggaatgcaggactggacttgtgctgcctgacagggtcgcggctggccgtctgtactttgtatagtcagttgaaactcacc

SEQ ID NO: 17793 - DNA, 331 bp, synthetic construct
  source 1..331: mol_type = other DNA
attagactccggtcttctgttgtgtttaaacacagaaatcttgctatctggctatgaattcataggattgacccctttgaaagacctgctctggcgcgagcaaaagcgcaattgtcaccaggtattgcaccaatggtggcgacagggtacagaagagcaagtactcctgactgggtaatgggactgcattgcatatccctaggcacctattgagatttctctggggcccaccagcgtggagttcctgtatgggaatgcaggactggacttgtgctgcctgacagggtcgcggctggccgtctgtactttgtatagtcagttgaaactcacc

SEQ ID NO: 17794 - DNA, 331 bp, synthetic construct
  source 1..331: mol_type = other DNA
actagacctcggtctcttgttgtgtttaaacacagaaatcttgccacttggttacgacttcatgggaacaatcctcctgaaagacctgctctggcgcgagcaaaagcgcaattgtcaccaggtattgcaccaatggtggcgacagggtacagaagagcaagtactcctgactgggcaatgggactgcgttgcatatccctaggcacctattgagatttctctggggcccaccagcgtggagttcctgtatgggaatgcaggactggacttgtgctacctgacagggtcgcggctggccgtctgtactttgtatagtcagttgaaactcact

SEQ ID NO: 17795 - DNA, 435 bp, synthetic construct
  source 1..435: mol_type = other DNA
ataaccctaatagtgagataccacgcttgtggaccttatgctcacacagccatcctctagtaagtttgtaagacgtctgatgacgtgtgggaacttgttggagataacattttgctgcaaagcatctcattgccagcggatccacatctggtaacagatgcctctggggccaaaagccaaggtttaacagaccctttgggattggttcaaacctgaattgttatggaagacatttagtacctgctgatttggtagtagtgcaaacactagttgtaaggcccacgaaggatgcccagaaggtacccgtaggtaacaagtgacactatggatctgatctggggccaactacctctatctaggtgagttggttaaaaaacgtctagtgggccaaacccaggggggatccctggtttcctttttatttgaataatcact

SEQ ID NO: 17796 - DNA, 414 bp, synthetic construct
  source 1..414: mol_type = other DNA
tgcttgtggatcttatgctcacacagccatcctctagtaagtttgtaagacgtctggtgacgtgtgggaacttattggaaacaacattttgctgtaaagcatcctattgccagcgggacaacacctggtaacaggtgcctctggggccaaaagccaaggtttaacaaaccctttaggattggttctaaacctgagatgttgcggaagatacttagtacctaccgatctggtagtagtgcaaacactagttgtaaggcccacgaaggatgcccagaaggtacccgtaggtaacaagtgacactatggatctgatctggggccagatacctctatcttggtgatctggttaaaaaacgtctagtgggccaaacccgggggggatccctggtttctttttattttaccaatgccact

SEQ ID NO: 17797 - DNA, 418 bp, synthetic construct
  source 1..418: mol_type = other DNA
accacgcttgtggaccttatgctcacacagccatcctctagtaagtttgtgagacgtctggtgacgtgtgggaacttattggaaacaacattttgctgtaaagcatcctattgccagcggaatgacgcctggtaacaggtgcctctggggccaaaagccaaggtttaacagaccctttaggattggttctaaacctgaaatgttgtggaagataattagtacctgccgatctggtagtagtgcaaacactagttgtaaggcccacgaaggatgcccagaaggtacctgtaggtaacaagtgacactatggatctgatctggggccaagtacctctatcttggtgacttggttaaaaaacgtctagtgggccaaacctgggggggatccccagtttccttttattacatcaatgctact

SEQ ID NO: 17798 - DNA, 441 bp, synthetic construct; identical to SEQ ID NO: 11
  source 1..441: mol_type = other DNA

SEQ ID NO: 17799 - DNA, 636 bp, synthetic construct
  source 1..636: mol_type = other DNA
tccttcctttccccttccggggggtaaaccggctgtgtttgctagaggcacagaggagcaacatccaacctgcttttgtggggaacggtgcggctccaattcctgcgtcgccaaaggtgttagcgcacccaaacggcgcatctaccaatgctattggtgtggtctgcgagttctagcctactcgtttctcccctattcactcactcacgcacaaaaagtgtgttgtaactacaagatttagccctcgcacgggatgtgcgataaccgcaagattgactcaagcgcggaaagcgctgtaaccacatgctgttagtccctttatggctgcgagatggctatccacctcggatcactgaactggagctcgaccctccttagtaagggaaccgagaggccttcttgcaacaagctccgacacagagtccacgtgattgctaccaccatgagtacatggttctcccctctcgacccaggacttctttttgaatatccacggctcgatccagagggtggggcatgatccccctagcatagcgagctacagcgggaactgtagctaggccttagcgtgccttggatactgcctgatagggcgacggcctagtcgtgtcggttctataggtagcacatacaaat

SEQ ID NO: 17800 - DNA, 300 bp, synthetic construct
  source 1..300: mol_type = other DNA
acagaaattttgacacttggttatggattcactggattaacccttttgaaagacctgctctggcgcgagcaaaagcgcaaatgtcaccaggtattgcaccaatggtggcgacagagtgcagaagagcaagtactcctgactgggcaatgggactgcattgcatatccctaggcacctatcgagatttctctggggcccaccagcgtggagttcctgtatgggaatgcaggactggacttgtgctgcctgacagggtcgcggctggccgtctgtactttgtatagtcagttgaaactcact

SEQ ID NO: 17801 - DNA, 648 bp, synthetic construct; identical to SEQ ID NO: 75
  source 1..648: mol_type = other DNA

SEQ ID NO: 17802 - DNA, 433 bp, synthetic construct
  source 1..433: mol_type = other DNA
ctctattagtgagataccacgcttgtggaacttatgctcacacagccatcctctagtaagtttgtgagatgtctggtgacgtgtgggaacttattggaaacaacattttgctgtagagcatcctattgccagcggaacaacacctggtaacaggtgcctctggggccaaaagccaaggtttaacagaccctttaggattggtttaaaacctgaaatgttgtggaagatacttagtacctaccgatctggtagtattgcaggcactagttgtaaggcccacgaaggatgcccagaaggtacccgtaggtaacaagagacactatggatctgatctggggccaggtacctctatcttggtgacctggttaaaaaacatctagtgggccaaacccgggggggatccccggtttctttttattttacaactgctact

SEQ ID NO: 17803 - DNA, 537 bp, synthetic construct; identical to SEQ ID NO: 21
  source 1..537: mol_type = other DNA

SEQ ID NO: 17804 - DNA, 433 bp, synthetic construct
  source 1..433: mol_type = other DNA
ttctactagtgagataccacgcttgtggaccttatgctcacacagccatcctctagtaagtttgtgagacgtctggtgacgtgtgggaacttattggaaacaacattttgctgcaaagcatcctattgccagcggaacaacacctggtaacaggtgcctctggggccaaaagccaaggtctaacaaaccctttaggattggttctaaacctgagatgttgtggaagatacttagtacctgccgatctggtagtagtgcaaacactagttgtaaggcccacgaaggatgcccagaaggtacccataggtaacaagtgacactatggatctgatctggggccaggtacttctatcttagtgacctggttaaaaagcgtctagtgggccaaacccgggggggatccccggtttccttttacttcatcaatgctaca

SEQ ID NO: 17805 - DNA, 432 bp, synthetic construct
  source 1..432: mol_type = other DNA
ctctattagtgagataccacgcttgtggaacttatgctcacacagccatcctctagtaagtttgtgagatgtctaatgacgtgtgggaacttattggaagcaacaatttgccgtacggcatcctattgccagcggatccacacctggtaacaggtgcccctggggccaaaagccaaggtttaacagaccctttaggattggtcaaaacctgaattgttgtggaagatactcagtacctgctgatttggtagtaatgcaaacactagttgtagggcccacgaaggatgcccggaaggtacccgtaggtaacaagtgacactatggatctgatctggggccaactacttctatcatggtgagttggttaaaaaacgtctagtgggccaaacccaggggggatccctggtttccttttatttcactatagccaat

SEQ ID NO: 17806 - DNA, 414 bp, synthetic construct; identical to SEQ ID NO: 451
  source 1..414: mol_type = other DNA

SEQ ID NO: 17807 - DNA, 307 bp, synthetic construct
  source 1..307: mol_type = other DNA
tttaaacacagaaatttggttacttggttatgaattcattggacaaaccctcttgaaagacctgctctggcgcgagctaaagcgcaattgtcaccgggtattgcaccaatggtggcgacagggtacagaagagcaagtactcctgactgggtaatgggactgcattgcatatccctaggcacttatcgagatttctctggggcccaccagcgtggagttcctgtatgggaatgcaggactggacttgtgctgcctgacagggtcgcggctggccgtctgtactttgtatagtcagttgatactcacc

SEQ ID NO: 17808 - DNA, 433 bp, synthetic construct
  source 1..433: mol_type = other DNA
ttctactagtgagataccacgcttgtggaccttatgctcacacagccatcctctagtaagtttgtgagacgtctggtgacgtgtgggaacttattggaaacaacattttgctgcaaagcatcctattgccagcggaacaacacctggtaacaggtgcctctggggccaaaagccaaggtctaacaaaccctttaggattggttctaaacctgagatgttgtggaagatacttagtacctgccgatctggtagtagtgcaaacactagttgtaaggcccacgaaggatgcccagaaggtacccataggtaacaagtgacactatggatctgatctggggccaggtacctctatcttggtgacctggttaaaaagcgtctagtgggccaaacccgggggggatccccggtttccttttattttatcaatgctaca

SEQ ID NO: 17809 - DNA, 432 bp, synthetic construct
  source 1..432: mol_type = other DNA
ccctaatagtgagataccacgcttgtggaccttatgctcacacagccatcctctagtaagtttgtaagacgtctgatgacgtgtgggaacttgttggagataacattttgctgcaaagcatcccattgccagcggatccacatctggtaacagatgcctctggggccaaaagccaaggtttaacagaccctttgggattggttcaaacctgaattgttatggaagacatttagtacctgctgatttggtagtagtgcaaacactagttgtaaggcccacgaaggatgcccagaaggtacccgtaggtaacaagtgacactatggatctgatctggggccaactacctctatctaggtgagttggttaaaaaacgtctagtgggccaaacccaggggggatccctggtttccttttttatttgaataatcact

SEQ ID NO: 17810 - DNA, 465 bp, synthetic construct
  source 1..465: mol_type = other DNA
gacctgaggaatttccatgtggctttgccaggagttgtagcgatgctgtgtgtgtgtgcggatttcccctcatggcaacatgagcctcacaggccaaaagccctgtccgaaaggacccacacagtggagcaaccccagctccctcctacaaagctttgtgagaatgaactcaagtttattctactttattctctatttacatcaggccccaaagatgtcctgaaggtaccttgtgtatctgggcacgagcaccatcagctacccggacttgctcctcggtgcagacacatgtggtgatccagcccctctgcttcggcagaggggctttcgctcgctcagcacgagatctgatcaggagcccctcccagtgtgctttacacctggcgaggggttaaaaattgcccaaggcctggcaaaacaacctaggggactaggttttccttttattaataatgttttgtcatt

SEQ ID NO: 17811 - DNA, 433 bp, synthetic construct
  source 1..433: mol_type = other DNA
ctctaatagtgagataccatgcttgtggaccttatgctcacacagccatcctctagtaagtttgtgagacgtctggtgacgtgtgggaacttattggaaacaacaccttgctgtaaagcatcctattgccagcggaacaacacctggtaacaggtgcctctggggccaaaagccaaggtttaacagaccctttaggattggttttgaacctgagatgttgcggaagatatttagtacctgccgatctggtagtaatgcaaacactagttgtaaggcccacgaaggatgcccagaaggtacccataggtaacaagtgacactatggatctgatctggggctaggtacctctatcttggtgacctggttaaaaaacatctagtgggccaagcccgggggggatccccggtttccttttactttatcaatgccacc

SEQ ID NO: 17812 - DNA, 433 bp, synthetic construct
  source 1..433: mol_type = other DNA
ccctaatagtgagataccacgcttgtggaccttatgctcacacagccatcctctagtaagtttgtaagacgtctgatgacgtgtgggaacttgttggagataacattttgctgcaaagcatcccattgccagcggatccacatctggtaacagatgcctctggggccaaaagccaaggtttaacagaccctttgggattggttcaaacctgaattgttatggaagacatttagtacctgctgatttggtagtagtgcaaacactagttgtaaggcccacgaaggatgcccagaaggtacccgtaggtaacaagtgacactatggatctgatctggggccaactacttctatctaggtgagttggttaaaaaacgtctagtgggccaaacccaggggggatccctggtttcttttttttatttgaataatcact

SEQ ID NO: 17813 - DNA, 431 bp, synthetic construct
  source 1..431: mol_type = other DNA
ctctatcagtgagataccacgcttgtggatcttatgctcacacagccatcctctagtaagtttgtgagacgtctggtgacgtgtgggaacttattggaaacaacgttttgctgcaaagcatcctattgccagcggaataacacctggtaacaggtgcctctggggccaaaagccaaggtttagcaaaccctttaggattggtttaacctgaagcgttgtggaagatatttagtacctgccaatctggtagtagtgcaaacactagttgtaaggcccacgaaggatgcccagaaggtacccgtaggtaacaagcgacactatggatctgatctggggccaggtacttctatcttggtgacctggttaaaaaacgtctagtgggccaaacccgggggggatccccggtttccttttattatatcaatgccact

SEQ ID NO: 17814 - DNA, 431 bp, synthetic construct
  source 1..431: mol_type = other DNA
ccctaatagtgagataccacgcttgtggaccttatgctcacacagccatcctctagtaagtttgtaagacatctgatgatgtgtgggaacttgttggagataacattttgctgcaaagcatcccattgccagcggatccacatctggtaacagatgcctctggggccaaaagccaaggtttaacagaccctttgggattggttcaaacctgaattgttatggaagacatttagtacctgctgatttggtagtagtgcaaacactagttgtaaggcccacaaaggatgcccagaaggtacccgtaggtaacaagtgacactatggatctgatctggggccaactacctctatctaggtgagttggttaaaaaacgtctagtgggccaaacccaggggggatccctggtttcctttttatttgaataaccact

SEQ ID NO: 17815 - DNA, 433 bp, synthetic construct
  source 1..433: mol_type = other DNA
ttctactagtgagataccacgcttgtggaccttatgctcacacagccatcctctagtaagtttgtgagacgtctggtgacgtgtgggaacttattggaaacaacattttgctgcaaagcatcctattgccagcggaacaacacctggtaacaggtgcctctggggccaaaagccaaggtctaacaaaccctttaggattggttctaaacctgagatgttgtggaagatacttagtacctgccgatctggtagtagtgcaaacactagttgtaaggcccacgaaggatgcccagaaggtacccataggtaacaagtgacactatggatctgatctggggacagatacctctatcttggtgacctgtttaaaaagcgtctagtgggccaaacccgggggggatccccggtttccttttattttatcaatgccact

SEQ ID NO: 17816 - DNA, 420 bp, synthetic construct
  source 1..420: mol_type = other DNA
gataccacgcttgtggaccttatgctcacacagccatcctctagtaagtttgtaagacatctgatgatgtgtgggaacttgttggagataacattttgctgcaaagcatcccattgccagcggatccacatctggtaacagatgcctctggggccaaaagccaaggtttaacagactctttgggattggttcaaacctgaattgttatggaagacatttagtacctgctgatttggtagtagtgcaaacactagttgtaaggcccacgaaggatgcccagaaggtacccgtaggtaacaagtgacactatggatctgatctggggccaactacctctatctaggtgagttggttaaaaaacgtctagtgggccaaacccaggggggatccctggtttccttttttatttgaataaccact

SEQ ID NO: 17817 - DNA, 271 bp, synthetic construct
  source 1..271: mol_type = other DNA
gatttatggatttccttttgaagacctgccctggcgcgggctagagcgcaaatgtcaccaggtattgcaccaatggtggcgacagggtacagaagagcaagtactcctgactgggcaatgggactgcattgcatatccctaggcatctattgagatttctctggagcccaccagcatggagttcctgtatgggaatgcaggactggacttgtgctgcctgacagggtcgcggctggccgtctgtactttgtatagtcagttgaaactcatt

SEQ ID NO: 17818 - DNA, 261 bp, synthetic construct
  source 1..261: mol_type = other DNA
ccaaggtttaacagaccctttaggattggtttaaaacctgaaatgttgtggaagatacttagtacctactgatctggtagtagtgcagacactagttgtaaggcccacgaaggatgcccagaaggtacccgtaggtaacaagtgacactatggatctgatctggggccaggtgcctctatcttggtgacctggttaaaaaacgtctagtgggccaaacccgggggggatccccggtttccttttattttaccaatgccaat

SEQ ID NO: 17819 - DNA, 260 bp, synthetic construct
  source 1..260: mol_type = other DNA
ccaaggtttaacagaccctttaggattggtattaacctgaagtgttatggaaaatatttagtacctgctgatttggtagtaatgcaaactctagttgtaaggcccacgaaggatgcccagaaggtacccgtaggtaacaagagacactatggatctgatttggggccaactacctctattaaggtgagttggttaaaaaacgtctagtgggccaagcccaggggggatccctggtttccttttattttactacattcaac

SEQ ID NO: 17820 - DNA, 261 bp, synthetic construct
  source 1..261: mol_type = other DNA
ccaaggtttaacagaccctttaggattggtttaaaacctgaaatgttgtggaaaatacttagtacctaccgatctggtagtagtgcagacactagttgtaaggcccacgaaggatgcccagaaggtacccgtaggtaacaagtgacactatggatctgatctggggccaggtgcctctatcttggtgacctggttaaaaaacgtctagtgggccaaacccgggggggatccccggtttccttttattttaccaatgccact

SEQ ID NO: 17821 - DNA, 404 bp, synthetic construct; identical to SEQ ID NO: 440
  source 1..404: mol_type = other DNA

SEQ ID NO: 17822 - DNA, 425 bp, synthetic construct
  source 1..425: mol_type = other DNA
agtgagataccacgcttgtggaccttatgctcacacagccatcctctagtaagtttgtaagacatctgatgacgtgtgggaacttgttggagataacattttgctgcaaagcatcccattgccagcggatccacatctggtaacagatgcctctggggccaaaagccaaggtttaacagaccctttgggattggttcaaacctgaattgttatggaagacatttagtacctgctgatttggtagtagtgcaaacactagttgtaaggcccacgaaggatgcccagaaggtacccgtaggtaacaagtgacactatggatctgatctggggccaactacctctatctaggtgagttggttaaaaaacgtctagtgggccaaacccaggggggatccctggtttccctttttatttgaataatcact

SEQ ID NO: 17823 - DNA, 251 bp, synthetic construct
  source 1..251: mol_type = other DNA
aagacctgccctggcgcgggctagagcgcaattgtcaccaggtatcgcaccaacggtggcgacagggtacagaagagcaagtactcctgactgggcaatgggactgcattgcatatccctaggcatctattgagatttctctggagcccaccagcatggagttcctgtatgggaatgcaggactggacttgtgctgcctgacagggtcgcggctggccgtctgtactttgtatagtcagttgaaactcatt

SEQ ID NO: 17824 - DNA, 261 bp, synthetic construct
  source 1..261: mol_type = other DNA
ccaaggtttaacagaccctttaggattggtttaaaacctgaaatgttgtggaagatatttagtacctaccgatctggtagtagtgcagacactagttgtaaggcccacgaaggatgcccagaaggtacccgtaggtaacaagtgacactatggatctgatctggggccaggtgcctctatcttggtgacctggttaaaaagcgtctagtgggccaaacccgggggggatccccggtttccttttattttaccaatgccaat

SEQ ID NO: 17825 - DNA, 261 bp, synthetic construct
  source 1..261: mol_type = other DNA
ccaaggtttaacagaccctttaggattggtttaaaacctgaaatgttgtggaaggtatttagtacctaccgatctggtagtagtgcaaacactagttgtaaggcccacgaaggatgcccagaaggtacccgtaggtaacaagcgacactatggatctgatctggggccaggtacctctatcttggtgacctggttaaaaaacgtctagtgggccaaacccgggggggatccccggtttccttttattttaccaatgtcact

SEQ ID NO: 17826 - DNA, 260 bp, synthetic construct
  source 1..260: mol_type = other DNA
ccaaggtttgacagaccctttaggattggttcacacctgaattgttatggaagttactcagtacctaccgatttggtagttaggcaaacactagttgtaaggcccacgaaggatgcccagaaggtacccgtaggtaacaagtgacactatggatctgatctggggtcaactacctctatcatggtgagttgattaaaaaacgtctagtgggccaaacccaggggggatccctggtttccttttattttatcacaacaact

SEQ ID NO: 17827 - DNA, 399 bp, synthetic construct; identical to SEQ ID NO: 435
  source 1..399: mol_type = other DNA

SEQ ID NO: 17828 - DNA, 378 bp, synthetic construct; identical to SEQ ID NO: 381
  source 1..378: mol_type = other DNA

SEQ ID NO: 17829 - DNA, 403 bp, synthetic construct; identical to SEQ ID NO: 439
  source 1..403: mol_type = other DNA

SEQ ID NO: 17830 - DNA, 373 bp, synthetic construct
  source 1..373: mol_type = other DNA
tttgtgagacgtctggtgacgtgtgggaacttattggaaacaacattttgctgcaaagcatcctattgccagcggaacaacacctggtaacaggtgcctctggggccaaaagccaaggtctaacaaaccctttaggattggttctaaacctgagatgttgtggaagatacttagtacctgccgatctggtagtagtgcaaacactagttgtaaggcccacgaaggatgcccagaaggtacccacaggtaacaagtgacactatggatctgatctggggccaggtacctctatcttggtgacctggttaaaaagcgtctagtgggccaaacccgggggggatccccggtttccttttattttatcaatgctaca

SEQ ID NO: 17831 - DNA, 373 bp, synthetic construct
  source 1..373: mol_type = other DNA
tttgtgagacgtctggtgacgtgtgggaacttattggaaacaacattttgctgcaaagcatcctattgccagcggaacaacacctggtaacaggtgcctctggggccaaaagccaaggtctaacaaaccctttaggattggttctaaacctgagatgttgtggaagatacttagtacctgccgatctggtagtagtgcaaacactagttgtaaggcccacgaaggatgcccagaaggtacccataggtaacaagtgacactatggatctgatctggggtcaggtacctctatcttggtgacctggttaaaaagcgtctagtgggccaaacccgggggggatccccggtttccttttattttatcaatgctaca

SEQ ID NO: 17832 - DNA, 372 bp, synthetic construct
  source 1..372: mol_type = other DNA
tttgtgagatgtctaatgacgtgtgggaacttattggaagcaacaatttgccgtacggcatcctattgccagcggatccacacctggtaacaggtgcccctggggccaaaagccaaggtttaacagaccctttaggattggttaaaacctgaattgttgtggaagatactcagtacctgctgatttggtagtaatgcaaacactagttgtaaggcccacgaaggatgcccagaaggtacccataggtaacaagtgacactatggatctgatctggggccaactacttctatcatggtgagttggttaaaaaacgtctagtgggccaaacccaggggggatccctggtttccttttatttcactatagtcaat

SEQ ID NO: 17833 - DNA, 373 bp, synthetic construct
  source 1..373: mol_type = other DNA
tttgtaagacgtctggtgacgtgtgggaacttattggaagcaacattttgctgcaaagcatcctactgccagcggaacaacacctggtaacaggtgcctctggggccaaaagccaaggtttaacaaaccctttaggattggtattaacctgaagtgttgtggaaaatatttagtacctgctgatttggtagtaatgcaaacactagttgtaaggcccacgaaggatgcccagaaggtacccgtaggtaacaagagacactatggatctgatttggggccaactacctctattaaggtgagttggttaaaaaacgtctagtgggccaaacccaggggggatccctggtttcctttttattttactacattcaat

SEQ ID NO: 17834 - DNA, 372 bp, synthetic construct
  source 1..372: mol_type = other DNA
tttgtgagatgtctaatgacgtgtgggaacttattggaagcaacaatttgccgtacggcatcctattgccagcggatccacacctggtaacaggtgcccctggggccaaaagccaaggtttaacagaccctttaggattggttaaaacctgaattgttgtggaagatactcagtacctgctgatttggtagtaatgcaaacactagttgtaaggcccacgaaggatgcccagaaggtacccgtaggtaacaagtgacactatggatctgatctggggccaactacttctattatggtgagttggttaaaaaacgtctagtgggccaaacccaggggggatccctggtttccttttatttcactatagccaat

SEQ ID NO: 17835 - DNA, 372 bp, synthetic construct
  source 1..372: mol_type = other DNA
tttgtgagatgtctaatgacgtgtgggaacttattggaagcaacaatttgccgtacggcatcctattgccagcggatccacacctggtaacaggtgcccctggggccaaaagccaaggtttaacagaccctttaggattggttaaaacctgaattgttgtggaagatactcagtacctgctgatttggtagtaatgcaaacactagttgtaaggcccacgaaggatgcccagaaggtacccgtaggtaacaagtgacactatggatctgatctggggtcaactacttctatcatggtgagttggttaaaaaacgtctagtgggccaaacccaggggggatccctggtttccttttatttcactatagtcaat

SEQ ID NO: 17836 - DNA, 373 bp, synthetic construct; identical to SEQ ID NO: 3
  source 1..373: mol_type = other DNA

SEQ ID NO: 17837 - DNA, 371 bp, synthetic construct
  source 1..371: mol_type = other DNA
tttgtaagacgtctgatgacgtgtgggaacttgttggagataacattttgctgcaaagcatcccattgccagcggatccacatctggtaacagatgcctctggggccaaaagccaaggtttaacagaccctttgggattggttcaaacctgaattgttatggaagacatttagtacctgctgatttggtagtagtgcaaacactagttgtaaggcccacgaaggatgcccagaaggtacccgtaggtaacaagtgacactatggatctgatctggggccaactacttctatctaggtgagttggttaaaaaacgtctagtgggccaaacccaggggggatccctggtttcttttttatttgaataatcact

SEQ ID NO: 17838 - DNA, 373 bp, synthetic construct
  source 1..373: mol_type = other DNA
tttgtgaggcgtctggtgacgtgtgggaacttattggaaacaacgttttgctgcaaagcatcctactgccagcggaaaaacacctggtaacaggtgcctctggggccaaaagccaaggtttaacagaccctttaggattggttctaaacctgagatgttgtggaagatatttagtacctgctaatctggtagttatgcaaacactagttgtaaggcccacgaaggatgcccagaaggtacctgtaggtaacaagtgacactatggatctgatttggggccaggtacctctatcttggtgacctggttaaaaaacgtctagtgggccaaacccgggggggatccccggtttcctcttatcctattaatgccact

SEQ ID NO: 17839 - DNA, 373 bp, synthetic construct
  source 1..373: mol_type = other DNA
tttgcgagacgtctggtgacgtgtgggaacttattggaaacaacattttgctgtaaagcatcctattgccagcggaacaacacctggtaacaggtgcctctggggccaaaagccaaggtttaacaaaccctttaggattggttctaaacctgagatgttgtggaagatacttagtacctactgatctggtagtagtgcaaacactagttgtaaggcccacgaaggatgcccagaaggtacccataggtaacaagtgacactatggatctgatctggggccaggtacctctatcttggtgacctggttaaaaaacgtctagtgggccaaacccgggggggatccccggtttccttttattttatcaataccact

SEQ ID NO: 17840 - DNA, 373 bp, synthetic construct
  source 1..373: mol_type = other DNA
tttgtgagacgtctagtgacgtgtgggaacttattggaaacaacattttgctgtaaagcatcctattgccagcggagtaacacctggtaacaggtgcccctggggccaaaagccaaggtttaacaaaccctttaggattggttctaaacctgagatgttgtggaagatacttagtacctaccgatctggtagtagtgcaaacactagttgtaaggcccacgaaggatgcccagaaggtacccgtaggtaacaagagacactatggatctgatctggggccaggcacctctatttcggtggcctggttaaaaaacgtctagtgggccaaacccgggggggatccccggtttcctttaattttatcaatgccact

SEQ ID NO: 17841 - DNA, 373 bp, synthetic construct
  source 1..373: mol_type = other DNA
tttgtgagacgtctagtgacgcgtgggaacttattggaaacaacattttgctgtaaagcatcctattgccagcggagtaacacctggtaacaggtgcccctggggccaaaagccaaggtttaacaaaccctttaggattggttctaaacctgagatgttgtggaagatacttagtacctaccgatctggtagtagtgcaaacactagttgtaaggcccacgaaggatgcccagaaggtacccgtaggtaacaagtgacactatggatctgatctggggccaggcacctctatcttggtggcctggttaaaaaacgtctagtgggccaaacccgggggggatccctggtttcctttaattttatcaatgccact

SEQ ID NO: 17842 - DNA, 373 bp, synthetic construct
  source 1..373: mol_type = other DNA
tttgtgagacgtctagtgacgtgtgggaacttattggaaacaacattttgctgtaaagcatcctattgccagcggagtaacacctggtaacaggtgcccctggggccaaaagccaaggtttaacaaaccctttaggattggttctaaacctgagatgttgtggaagatacttagtacctaccgatctggtagtagtgcaaacactagttgtaaggcccacgaaggatgcccaaaaggtacccgtaggtaacaagtgacactatggatctgatttggggccaggtacctctatcttggtgacctggttaaaaaacgtctagtgggccaaacccgggggggatccccggtttcctttaatttcatcaatgccatt

SEQ ID NO: 17843 - DNA, 319 bp, synthetic construct; identical to SEQ ID NO: 304
  source 1..319: mol_type = other DNA

SEQ ID NO: 17844 - DNA, 372 bp, synthetic construct
  source 1..372: mol_type = other DNA
tttgtgagacgtctggtgacgtgtgggaacttattggaaacaacatcttgctgtaaagcatcctattgccagcggaataacacctggtaacaggtgcctctggggccaaaagccaaggtttgacagaccctctaggattggttcaaaacctgagatgttgtggaaaatactcagtacctactgatctggtagtagtgcagacactagttgtaaggcccacgaaggatgcccagaaggtacccgtaggtaacaagtgacactatggatctgatctggggccaggtacctctatctaggtgacctggttaaaaaacgtctagtgggccaaacccgggggggaccccggtttccttttactttatcaatgccatt

SEQ ID NO: 17845 - DNA, 371 bp, synthetic construct
  source 1..371: mol_type = other DNA
tttgtaagacatctgatgatgtgtgggaacttgttggagataacattttgctgcaaagcatcccattgccagcggatccacatctggtaacagatgcctctggggccaaaagccaaggtttaacagaccctttgggattggttcaaacctgaattgttatggaagacatttagtacctgctgatttggtagtaatgcaaacactagttgtaaggcccacgaaggatgcccagaaggtacccgtaggtaacaagtgacactatggatctgatctggggccaactacctctatctaggtgagttggttaaaaaacgtctagtgggccaaacccaggggggatccctggtttcctttttatttgaataaccact

SEQ ID NO: 17846 - DNA, 373 bp, synthetic construct
  source 1..373: mol_type = other DNA
tttgtaagacgtctgatgacgtgtgggaacttgttggagataacattttgctgcaaagcatcccattgccagcggatccacatctggtaacagatgcctctggggccaaaagccaaggtttaacagaccctttgggattggttcaaacctgaattgttatggaagacatttagtacctgctgatttggtagtagtgcaaacactagttgtaaggcccacgaaggatgcccagaaggtacccgtaggtaacaagtgacactatggatctgatctggggccaactacttctatctaggtgagttggttaaaaaacgtctagtgggccaaacccaggggggatccctggtttcttttttttatttgaataatcact

SEQ ID NO: 17847 - DNA, 375 bp, synthetic construct
  source 1..375: mol_type = other DNA
tttgtaagacgtctgatgacgtgtgggaacttgttggagataacattttgctgcaaagcatcccattgccagcggatccacatctggtaacagatgcctctggggccaaaagccaaggtttaacagaccctttgggattggttcaaacctgaattgttatggaagacatttagtacctgctgatttggtagtagtgcaaacactagttgtaaggcccacgaaggatgcccagaaggtacccgtaggtaacaagtgacactatggatctgatctggggccaactacctctatctaggtgagttggttaaaaaacgtctagtgggccaaacccaggggggatccctggtttcctttttttttatttgaataatcact

SEQ ID NO: 17848 - DNA, 371 bp, synthetic construct
  source 1..371: mol_type = other DNA
tttgtaagacgtctgatgacgtgtgggaacttgttggaaataacagtttgctgcaaggcatcccactgccagcgggttcacatctggtaacagatgcctctggggccaaaagccaaggtttaatagaccctttgggattggttcaaacctgaactgttatggaagacatttagtacctgctgatttggtagtaatgcaaacactagttgtaaggcccacgaaggatgcccagaaggtacccgtaggtaacaagtgacactatggatctgatctggggccggctacctctatctaggtgagttggttaaaaaacgtctagtgggccaaacccaggggggatccctggtttctttttaatttgagtagtcact

SEQ ID NO: 17849 - DNA, 372 bp, synthetic construct
  source 1..372: mol_type = other DNA
tttgtaagacgtctgatgacgtgtgggaacttgttggagataacattttgctgcaaagcatcccattgccagcggatccacatctggtaacagatgcctctggggccaaaagccaaggtttaacagaccctttgggattggttcaaacctgaattgttatggaagacatttagtacctgctgatttggtagtagtgcaaacactagttgtaaggcccacgaaggatgcccagaaggtacccgtaggtaacaagtgacactatggatctgatctggggccaactacctctatctaggtgagttggttaaaaaacgtctagtgggccaaacccaggggggatccctggtttccttttttatttgaataatcact

SEQ ID NO: 17850 - DNA, 373 bp, synthetic construct
  source 1..373: mol_type = other DNA
tttgtaagacgtctgatgacgtgtgggaacttgttggaaataacagtttgctgcaaagcatcccactgccagtggaatcacatctggtaacagatgcctctggggccaaaagccaaggtttaacagaccctttgggattggttcaaacctgaactgttatggaaaacacttagtacctgctgatttggtagtaatgcaaacactagttgtaaggcccacgaaggatgcccagaaggtacccgtaggtaacaagtgacactatggatctgatctggggccagctacctctatctaggtgagttggttaaaaaacgtctagtgggccaaacccaggggggatccctggtttcctttttaaatttgagtaatcact

SEQ ID NO: 17851 - DNA, 392 bp, synthetic construct; identical to SEQ ID NO: 428
  source 1..392: mol_type = other DNA

SEQ ID NO: 17852 - DNA, 371 bp, synthetic construct
  source 1..371: mol_type = other DNA
tttgtaagacgtttgatgacgtgtgggaacttgttggagataacattttgctgcaaagcatcccattgccagcggatccacatctggtaacagatgcctctggggccaaaagccaaggtttaacagaccctttgggattggttcaaacctgaattgttatggaagacatttagtacctgctgatttgatagtagtgcaaacactagttgtaaggcccacgaaggatgcccagaaggtacccgtaggtaacaagtgacactacggatctgatctggggccaactacctctatctaggtgagttggttaaaaaacgtctagtgggccaaacccaggggggatccctggtttcctttttatttgaataatcact

SEQ ID NO: 17853 - DNA, 370 bp, synthetic construct
  source 1..370: mol_type = other DNA
tttgtaagacatctgatgatgtgtgggaacttgttggagataacattttgctgcaaagcatcccattgccagcggatccacatctggtaacagatgcctctggggccaaaagccaaggtttaacagaccctttgggattggttcaaacctgaattgttatggaagacatttagtacctgctaatttggtagtagtgcaaacactagttgtaaggcccacgaaggatgcccagaaggtacccgtaggtaacaagtgacactatggatctgatctggggccaactacctctatctaggtgagttggttaaaaaacgtctagtgggccaaacccaggggggatccctggtttccttttatttgaataaccact

SEQ ID NO: 17854 - DNA, 370 bp, synthetic construct
  source 1..370: mol_type = other DNA
tttgtaagacgtctgatgacgtgtgggaacttgttggagataacattttgctgcaaagcatcccattgctagcggatctacatctggtaacagatgcctctggggccaaaagccaaggtttaacagaccctttgggattggttcaaacctgaattgttattgaagacatttagtacctgctgatttggtagtagtgcaaacactagttgtaaggcccacgaaggatgcccagaaggtacccgtaggtaacaagtgacactatggatctgatctggggccaactacttctatctaagtgagttggttaaaaaacgtctagtgggccaaacccaggggggatccctggtttctttttatttgaataatcact

SEQ ID NO: 17855 - DNA, 456 bp, synthetic construct
  source 1..456: mol_type = other DNA
gggtggcagatggcgtgccataattctattagtgagataccacgcttgtggaccttatgctcacacagccatcctctagtaagtttgtgagacgtctggtgacgtgtgggaacttattggaaacaatatcttgctgtaaagcattcaactgccagcggaacaacacctggtaacaggtgcctctggggccaaaagccaaggtttaacagacccttttggattggttctaaacctgagatgttgtggaagatacttagtacctactgatctggtagtagtgcaaacactagttgtaaggcccacgaaggatgcccagaaggtacccgtaggtaacaagtgacactatggatctgatctggggctaggtgcctctatcttggtgacctggttaaaaaacgtctagtgggccaaacccaggggggatccctggtttccctttattttatcgatgccact

SEQ ID NO: 17856 - DNA, 406 bp, synthetic construct
  source 1..406: mol_type = other DNA
agatatcgctcgagctagaactacaatgctggtcgctgaacccgcaccacaccttgtggaactttgcggggaaagtggctagtgggctgtagaagtgactctgaccacacgccccatgagcgtgggaaaccacaaatcggtgtagcgacgacaacaggccttgggacaccctctccagtgatggaaacccaaggggccaaaagccacgccttgtgccctgttgttcacaaccccagtgcgatttgtgttagtacctactcgtgggaactgtgtttggacagctgaacacagccctagtgggagactaaggatgcccaggaggtacccggaggtaacaagtgacactctggatctgacctggggagagggggcctgctgtacaggcgcccctctttaaaaaacttct

SEQ ID NO: 17857 - DNA, 335 bp, synthetic construct
  source 1..335: mol_type = other DNA
acaacattttgctgcaaagcatcctactgccagcggaataacacctggtaacaggtgcccctggggccaaaagccaaggtttaacagaccctttaggattggttttaaaaacctgaaatgttgtggaaaatacttagtacctactgatctggtagtaatgcaaacactagttgtagggcccacgaaggatgcccagaaggtacccgtaggtaacaagtgacactatggatctgatctggggccaagtacctctatcttggtgacttggttaaaaaacgtctagtgggccaaacccgggggggaccccggtttccttttattttaccaatgtcact

SEQ ID NO: 17858 - DNA, 320 bp, synthetic construct
  source 1..320: mol_type = other DNA
caaagcatcctactgccagcggaaaaacacctggtaacaggtgcctctggggccaaaagccaaggtttaacagaccctttaggattggttctaaacctgagatgttgtggaagatattcagtacctgctgatctggtagttatgcaaacactagttgtaaggcccacgaaggatgcccagaaggtacctgtaggtaacaagtgacactatggatctgatttggggccagatacctctatcctggtgatctggttaaaaaacgtctagtgggccaaacccgggggggatccccggtttcctcttatcttattaatgccact

SEQ ID NO: 17859 - DNA, 509 bp, synthetic construct; identical to SEQ ID NO: 15
  source 1..509: mol_type = other DNA

SEQ ID NO: 17860 - DNA, 302 bp, synthetic construct
  source 1..302: mol_type = other DNA
cagcggatccacatctggtaacagatgcctctggggccaaaagccaaggtttaacagaccctttgggattggttcaaacctgaattgttatggaagacatttagtacctgctgatttggtagtagtgcaaacactagttgtaaggcccacgaaggatgcccagaaggtacccgtaggtaacaagtgacactatggatctgatctggggccaactacttctatctaggtgagttggttaaaaaacgtctagtgggccaaacccaggggggatccctggtttcctttttatttgaataatcact

SEQ ID NO: 17861 - DNA, 433 bp, synthetic construct; identical to SEQ ID NO: 479
  source 1..433: mol_type = other DNA

SEQ ID NO: 17862 - DNA, 267 bp, synthetic construct
  source 1..267: mol_type = other DNA
aatccatgcatataatcaaagaattcttctaatctagcagctttttccctagcagtggggggaggaggagactggaaaacaacgggttctataagagagacatcagagaaaaaatcggatgtatcggggtcagtcttcttccattcttcaaaagtactctgaattatccatgcaaattttgctgcacgtgcacgtccacgtacagtatcaacaacatccatcttccaagctccccatattaataccttagaaaagggagatcaaatc

SEQ ID NO: 17863 - DNA, 456 bp, synthetic construct
  source 1..456: mol_type = other DNA
ctcgtttctcccttactcactcattcacgcacaaaaagtgtgttgtaactacaagatttagccctcgcacgggatgtgcgataaccgcaagattgactcaagcgcggaaagcgctgtaaccatatgctgttagtccctttatggctgcgagatggctatccacctcggatcactgaactggagctcgaccctccttagtaagggaaccgagaggccttcttgcaacaagctccgacacagagtccacgtgattgctaccaccatgagtacatggttctcccctctcgacccaggacttctttttgaatatccacggctcgatccagagggtggggcatgatccccctagcatagcgagctacagcgggaactgtagctaggccttagcgtgccttggatactgcctgatagggcgacggcctagtcgtgtcggttctataggtagcacatacaaat

SEQ ID NO: 17864 - DNA, 377 bp, synthetic construct
  source 1..377: mol_type = other DNA
taagtttgtgagacgtctggtgacgtgtgggaacttgttggaaacagtattttgctgcaaagcatcctattgccagcggaacaacacctggtaacaggtgcccctggggccaaaagccaaggtttaacagaccctttaggattggttttaaacctgaaatattgtggaagatacttagtacctactaatctggtagtagtgcaaacactagttgtaaggcccacgaaggatgcccagaaggtacccgtaggtaacaagtgacactatggatctgatctggggccaggtacctctatcttggtgacctggttaaaaaacgtctagtgggccaaacccgggggggatcctcggtttccttttattttgtcaataccatt

SEQ ID NO: 17865 - DNA, 575 bp, synthetic construct; identical to SEQ ID NO: 625
  source 1..575: mol_type = other DNA

SEQ ID NO: 17866 - DNA, 387 bp, synthetic construct
  source 1..387: mol_type = other DNA
ccatcctctagtaagtttgtaagacgtctgatgacgtgtgggaagttattggaagtaacaatttgccgtaaggcatcctagagccagtggattaacacctggtaacaggtgcccctggggccaaaagccaaggtttaacagaccctttaggattggttcaaacctgggttgttatggaagatatttagtacctgctgatttggtagtaatacaaacactagttgtaaggcccacgaaggatgcccagaaggtacccgtaggtaacaagtgacactatggatctgatttggggttgactacctctgtcctggtgagtcaattaaaaaacgtctagtgggccaaacccaggggggatccctggtttccttttattttattacaaccatt

SEQ ID NO: 17867 - DNA, 315 bp, synthetic construct; identical to SEQ ID NO: 300
  source 1..315: mol_type = other DNA

SEQ ID NO: 17868 - DNA, 506 bp, synthetic construct; identical to SEQ ID NO: 531
  source 1..506: mol_type = other DNA

SEQ ID NO: 17869 - DNA, 509 bp, synthetic construct; identical to SEQ ID NO: 533
  source 1..509: mol_type = other DNA

SEQ ID NO: 17870 - DNA, 281 bp, synthetic construct
  source 1..281: mol_type = other DNA
tatataagatcctttccgccgatatagacctcgacagtctagtgtaggaggattggtgatattaatttgccccagaagagtgaccgtgacacatagaaaccatgagtacatgtgtatccgtggaggatcgcccgggactggattccatatcccattgccatcccaacaaacggagggtatacccactatgtgcgcgtttgcagtgggagtctgcaaatttagtcatactgcctgatagggtgtgggcctgcactctggggtattcaggctgttcatataat

SEQ ID NO: 17871 - DNA, 387 bp, synthetic construct; identical to SEQ ID NO: 418
  source 1..387: mol_type = other DNA

SEQ ID NO: 17872 - DNA, 627 bp, synthetic construct; identical to SEQ ID NO: 750
  source 1..627: mol_type = other DNA

SEQ ID NO: 17873 - DNA, 576 bp, synthetic construct
  source 1..576: mol_type = other DNA
gcaggttcagggttcttaaatctgtttctctataagaacactcatttttcacgctctctgtcttctttcttccagggctctccccttgccctaggctctggccgttgcgcccggcggggtcaactccatgattagcatggagctgtaggagtctaaattggggacacagatgtttggaacgtcaccttgcagtgttaacttggctttcatgaatctctttgatcttccataaggggtaggctacgggtgaaacctcttaggctaatacttctatgaagagatgctttggatagggtaacagcggcggatattggtgagttgttaagacaaaaaccattcaacgccggaggactgactctcatccagtggatgcattgagtggattgactgtcagggctgtctctaggcttaattccagacctctctgtgcttagggcaaacatcatttggccttaaatgggattctgtgagaggggatccctccattgacagctggactgttctttggggccttatgtggtgtttgcctctgaggtactcaggggcatttaggtttttcctcattcttaaataata

SEQ ID NO: 17874 - DNA, 372 bp, synthetic construct; identical to SEQ ID NO: 356
  source 1..372: mol_type = other DNA

SEQ ID NO: 17875 - DNA, 466 bp, synthetic construct; identical to SEQ ID NO: 502
  source 1..466: mol_type = other DNA

SEQ ID NO: 17876 - DNA, 362 bp, synthetic construct
  source 1..362: mol_type = other DNA
ttggatcataggctagctcatttggtatgactattggatacaccttgaacggcagtagcgtggcgagctatggaaaaatcgcaattgtcgatagccatgttagtgacgcgcttcggcgtgctcctttggtgattcggcgactggttacaggagagtaggcagtgagctatgggcaaacctctacagtattacttagagggaatgtgcaattgagacttgacgagcgtctcttcgagatgtggcgcatgctcttggcattaccatagtgagcttccaggttgggaaacctggactgggcctatactacctgatagggtcgcggctggccgcctgtaactagtatagtcagttgaaaccccccc

SEQ ID NO: 17877 - DNA, 540 bp, synthetic construct
  source 1..540: mol_type = other DNA
cttggacagattgcctccacgacctttgtggatctcaaggtgatcaagtcactggtgaatagagcgaaggttgaggagacctgaggaatttccatgtggctttgccaggagttgtagcgatgctgtgtgtgtgtgcggatttcctctcatggcaacatgagcctcacaggccaaaagccctgtccgaaaggacccacacagtggagcaaccccagctccctcctgcaaagttttgtgtgaatgaactcacgtttattcttctttattctctatttacatcaggccccaaagatgtcctgaaggtaccttgtgtatctgggcacgagcaccatcgactacccggacttgcgcttcggtgcagatgcatgtggtgacccagcccctctgtttcggcagaggggcttttgctcgctcagcacgagatctgatcaggagcccctcccagtgtgctttacgcctggcgagaggttaaaaattgcccaaggcctggcaaaataacctaggggactaggttttcctttattaacaatgtttgtcatt

SEQ ID NO: 17878 - DNA, 519 bp, synthetic construct; identical to SEQ ID NO: 17
  source 1..519: mol_type = other DNA

SEQ ID NO: 17879 - DNA, 1000 bp, synthetic construct; identical to SEQ ID NO: 1482
  source 1..1000: mol_type = other DNA

SEQ ID NO: 17880 - DNA, 306 bp, synthetic construct; identical to SEQ ID NO: 1339
  source 1..306: mol_type = other DNA

SEQ ID NO: 17881 - DNA, 441 bp, synthetic construct
  source 1..441: mol_type = other DNA
ctcatttcccccctccacccttaaggtggttgtatccccataccttaccctcccctccaaacaggatggacaaatggacttggacttgcggcaaggacatatggtatgatcattggatacaccttgaatggcagtagcgtggcgagctatggaaaaatcgcaattgtcgatagccatgttagtgacgcgcttcggcgtgctcctttggtgattcggcgactggttacaggagagtaggcagtgagctatgggcaaacctctgcagtattactcagagggaatgtgcaattgaggcttgacgagcgtctcgtagagatgtggcgcatgctcttggcattaccatagtgagcttccaggttgggaaacctggactgggcctatactacctgatagggtcgcggctggccgcctgtaactagtatagtcagttgaaaccccccc

SEQ ID NO: 17882 - DNA, 712 bp, synthetic construct
  source 1..712: mol_type = other DNA
ttccggagtccctcttggaagtccatggtgaggggacttgatacctcaccgccgtttgcctaggctataggctaaattttccctttcccttttccctttcctattccctttgttttgcttgtaaatattaattcctgcaggttcagggttcttaaatctgtttctctataagaacactcatttttcacgctttctgtcttctttcttccagggctctccccttgccctaggctctggccgttgcgcccggcggggtcaactccatgattagcatggagctgtaggagtctaaattggggacacagatgtttggaacgtcaccttgcagtgttaacttggctttcatgaatctctttgatcttccacaaggggtaggctacgggtgaaacctcttaggctaatacttctatgaagagatgccttggatagggtaacagcggcggatattggtgagttgttaagacaaaaaccattcaacgccggaggactgactctcatccagtggatgcattgagtggattgactgtcagggctgtctttaggcttaattccagacctctctgtgcttagggcaaacatcatttggccttaaatgggattctgtgagaggggatccctccattgacagctggactgttctttggggccttatgtggtgtttgcctctgaggtactcaggggcatttaggtttttcctcattcttaaataata

SEQ ID NO: 17883 - DNA, 405 bp, synthetic construct; identical to SEQ ID NO: 441
  source 1..405: mol_type = other DNA

SEQ ID NO: 17884 - DNA, 1000 bp, synthetic construct; identical to SEQ ID NO: 145
  source 1..1000: mol_type = other DNA

SEQ ID NO: 17885 - DNA, 899 bp, synthetic construct; identical to SEQ ID NO: 1291
  source 1..899: mol_type = other DNA

SEQ ID NO: 17886 - DNA, 338 bp, synthetic construct; identical to SEQ ID NO: 323
  source 1..338: mol_type = other DNA

SEQ ID NO: 17887 - DNA, 386 bp, synthetic construct; identical to SEQ ID NO: 412
  source 1..386: mol_type = other DNA

SEQ ID NO: 17888 - DNA, 331 bp, synthetic construct
  source 1..331: mol_type = other DNA
tttttggatacacttaaatggcagtagcgtggcgagctatggaaaaatcgcaattgtcgatagccatgttagtgacgcgcttcggcgtgctcctttggtgattcggcgactggttacaggagagtaggcagtgagctatgggcaaacccctgcagtgttactcagggggaatgtgcaattgagacttgacgagcgtctctcagagacgtggcgcatgctcttggcattaccatagtgagcttccaggttgggaaacctggactgggcctacactacctgatagggtcgcggctggccgcctgtaactagtatagtcagttgaaaccccccc

SEQ ID NO: 17889 - DNA, 286 bp, synthetic construct
  source 1..286: mol_type = other DNA
acttggttatgaattcattggattaacccctctgaaagacctgctctggcgcgagctaaagcgcaattgtcaccaggtattgcaccaatggtggcgacagggtacagaagagcaagtactcctgactgggtaatgggactgcattgcatatccctaggcacctattgagatttctctggggcccaccagcgtggagttcctgtatgggaatgcaggactggacttgtgctgcctgacagggtcgcggctggccgtctgtactttgtatagtcagttgaaactcacc

SEQ ID NO: 17890 - DNA, 329 bp, synthetic construct
  source 1..329: mol_type = other DNA
ggtcttcggacttttgttgtgtttaaacacagaaatttggttggtctggctatgaatccaatggattaaccctcctgaaagacctgctctggcgcgagctaaagcgcaattgtcaccaggtattgcaccaatggtggcgacagggtacagaagagcaagtactcctgactgggcaatgggactgcattgcatatccctaggcacctattgagatttctctggggcccaccagcgtggagttcctgtatgggaatgcaggactggacttgtgctgcctgacagggtcgcggctggccgtctgtactttgtatagtcagttgaaactcacc

SEQ ID NO: 17891 - DNA, 317 bp, synthetic construct
  source 1..317: mol_type = other DNA
ttctgttgtgtttaaacacagaaatcttgttacttggttatgaattcattggattaacccctctgaaagacctgctctggcgcgagctaaagcgcaattgtcaccaggtattgcaccaatggtggcgacagggtacagaagagcaagtactcctgactgggtaatgggactgcattgcatatccctaggcacctattgagatttctctggggcccaccagcgtggagttcctgtatgggaatgcaggactggacttgtgctgcctgacagggtcgcggctggccgtctgtactttgtatagtcagttgaaactcacc

SEQ ID NO: 17892 - DNA, 325 bp, synthetic construct
  source 1..325: mol_type = other DNA
ctttggtctcttgttgtgtttaaacacagaaatcttgttatctggttatgaattcactggatcaacccctttgaaagacttgctctggcgcgagctaaagcgcaattgtcaccgggtattgcaccaatggtggcgacagggtacagaagagcaagtactcctgactgggcaatgggactgcgttgcatatccctaggcacctattgagatttctctggggcccaccagcgtggagttcctgtatgggaatgcaggactggacttgtgctgcctgacagggtcgcggctggccgtctgtactttgtatagtcagttgaaactcacc

SEQ ID NO: 17893 - DNA, 357 bp, synthetic construct
  source 1..357: mol_type = other DNA
tagttttggattatcttgtgcccaacactagacttcggtctcttgttgtgtttaaacacagaaatcttgctatttggttatgaattcattggaacaatccctctgaaagacttgctctggcgcgagctaaagcgcaattgtcaccgggtattgcaccaatggtggcgacagggtacagaagagcaagtactcctgactgggcaatgggactgcattgcatatccctaggcacctattgagatttctctggggcccaccagcgtggagttcctgtatgggaatgcaggactggacttgtgctacctgacagggtcgcggctggccgtctgtactttgtatagtcagttgaaattcacc

SEQ ID NO: 17894 - DNA, 419 bp, synthetic construct; identical to SEQ ID NO: 458
  source 1..419: mol_type = other DNA

SEQ ID NO: 17895 - DNA, 333 bp, synthetic construct
  source 1..333: mol_type = other DNA
acactagaccttggtcttttgttgtgtttaaacacagaaatcttgttacttggttatgaattcattggattaacccctctgaaagacctgctctggcgcgagctaaagcgcaattgtcaccaggtattgcaccaatggtggcgacagggtacagaagagcaagtactcctgactgggtaatgggactgcattgcatatccctaggcacctattgagatttctctggggcccaccagcgtggagttcctgtatgggaatgcaggactggacttgtgctgcctgacagggtcgcggctggccgtctgtactttgtatagtcagttgaaactcacc

SEQ ID NO: 17896 - DNA, 409 bp, synthetic construct
  source 1..409: mol_type = other DNA
gttgtatcccctaccccatcctcccctccaaacaggacggacaatcggacctgacatctggcgagaagaattggaatggtatttggacacacttgaatggcagtagcgtggcgagctatggaaaaatcgcaattgtcgatagccatgttagtgacgcgcttcggcgtgctcctttggtgattcggcgactggttacaggagagtagacagtgagctatgggcaaacccctacagtgttacttagggggaatgtgcaattgagacttgacgagcgtctcgtagagatgtggcgcatgctcttggcattaccatagtgagcttccaggttgggaaacctggactgggtctatactacctgatagggtcgcggctggccgcctgtaactagtatagtcagttgaaacccccc

SEQ ID NO: 17897 - DNA, 343 bp, synthetic construct; identical to SEQ ID NO: 327
  source 1..343: mol_type = other DNA

SEQ ID NO: 17898 - DNA, 333 bp, synthetic construct
  source 1..333: mol_type = other DNA
acactagacctcggtctcttgttgtgtttaaacacagaaatcttgccacttggttacgacttcatgggaacaatcctcctgaaagacctgctctggcgcgagcaaaagcgcaattgtcaccaggtattgcaccaatggtggcgacagggtacagaagagcaagtactcctgactgggcaatgggactgcgttgcatatccctaggcacctattgagatttctctggggcccaccagcgtggagttcctgtatgggaatgcaggactggacttgtgctgcctgacagggtcgcggctggccgtctgtactttgtatagtcagttgaaattcact

SEQ ID NO: 17899 - DNA, 286 bp, synthetic construct
  source 1..286: mol_type = other DNA
gctcggttatgaattcaatggatcaatcctcttgaaagacctgctctggcgcgagcaaaagcgcaattgtcaccaggtattgcaccaatggtggcgacagggtacagaagagcaagtactcctgactgggcaatgggactgcgttgcatatccctaggcacctatcgagatttctctggggcccaccagcgtggagttcctgtatgggaatgcaggactggacttgtgctgcctgacagggtcgcggctggccgtctgtactttgtatagtcagttgaaatttacc

SEQ ID NO: 17900 - DNA, 330 bp, synthetic construct
  source 1..330: mol_type = other DNA
ttagtccccggacttctgttgtgtttaaacacagaaatttggttgtctggctatgaattcattggaacaacccctttgaaagacctgctctggcgcgagctaaagcgcaattgtcaccgggtattgcaccaatggtggcgacagggtacagaagagcaagtactcctgactgggtaatgggactgcattgcatatccctaggcacctattgagatttctctggggcccaccagcgtggagttcctgtatgggaatgcaggactggacttgtgctgcctgacagggtcgcggctggccgtctgtactttgtatagtcagttgaaactcacc

SEQ ID NO: 17901 - DNA, 343 bp, synthetic construct; identical to SEQ ID NO: 328
  source 1..343: mol_type = other DNA

SEQ ID NO: 17902 - DNA, 333 bp, synthetic construct
  source 1..333: mol_type = other DNA
acactagaccttggtcttttgttgtgtttaaacacagaaatcttgttacttggttatgaattcattggattaacccctctgaaagacctgctctggcgcgagctaaagcgcaattgtcaccaggtattgcaccaatggtggcgacagggtacagaagagcaagtactcctgactgggtaatgggactgcattgcatatccctaggcacctattgagatttctctggggcccaccagcgtggagttcctgtatgggaatgcaggactggacttgtgctgcctgacagggtcgcggctggccgtctgtactttgtatagtcagttgaaattcact

SEQ ID NO: 17903 - DNA, 335 bp, synthetic construct
  source 1..335: mol_type = other DNA
aacactagaccttggtcttttgttgtgtttaaacacagaaatttgattatctgactatgaattcaatggattaaccctttttgaaagacctgctctggcgcgagctaaagcgcaattgtcaccaggtattgcaccaatggtggcgacagggtacagaagagcaagtactcctgactgggcaatgggactgcattgcatatccctaggcacctattgagatttctctggggcccaccagcgtggagttcctgtatgggaatgcaggactggacttgtgctgcctgacagggtcgcggctggccgtctgtactttgtatagtcagttgaaactcacc

SEQ ID NO: 17904 - DNA, 315 bp, synthetic construct
  source 1..315: mol_type = other DNA
ctgttgtgtttaaacacagaaatcttgttacttggttatgaattcattggattaacccctctgaaagacctgctctggcgcgagctaaagcgcaattgtcaccaggtattgcaccaatggtggcgacagggtacagaagagcaagtactcctgactgggtaatgggactgcattgcatatccctaggcacctattgagatttctctggggcccaccagcgtggagttcctgtatgggaatgcaggactggacttgtgctgcctgacagggtcgcggctggccgtctgtactttgtatagtcagttgaaactcacc

SEQ ID NO: 17905 - DNA, 332 bp, synthetic construct
  source 1..332: mol_type = other DNA
tgctggtcttcggacttttgttgtgtttaaacacagaaattttgtcgctcgattatgaattcactggatcaatccctctgaaagacctgctctggcgcgagctaaagcgcaattgtcaccaggtattgcaccaatggtggcgacagggtacagaagagcaagtactcctgactgggcaatgggactgcattgcacatccctaggcacctatcgagatttctctggggcccaccagcatggagttcctgtatgggaatgcaggactggacttgtgctgcctgacagggtcgcggctggccgtctgtactttgtatagtcagttgaaactcacc

SEQ ID NO: 17906 - DNA, 529 bp, synthetic construct; identical to SEQ ID NO: 558
  source 1..529: mol_type = other DNA

SEQ ID NO: 17907 - DNA, 387 bp, synthetic construct; identical to SEQ ID NO: 419
  source 1..387: mol_type = other DNA

SEQ ID NO: 17908 - DNA, 333 bp, synthetic construct
  source 1..333: mol_type = other DNA
acattagtccttggactcctgttgtgtttaaacacagaaatttgactgcttggttatgaattcattggataaaccctcttgaaagacctgctctggcgcgagctaaagcgcaattgtcaccaggtattgcaccaatggtggcgacagggtacagaagagcaagtactcctgactgggtaatgggactgcattgcatatccctaggcacctattgagatttctctggggcccaccagcgtggagttcctgtatgggaatgcaggactggacttgtgctgcctgacagggccgcggctggccgtctgtactttgtatagtcagttgaaactcact

SEQ ID NO: 17909 - DNA, 324 bp, synthetic construct
  source 1..324: mol_type = other DNA
ctcggacttttgttgtgtttaaacacagaaatttgattgcttggttatgaattcattggatcaaccctcttgaaagacctgctctggcgcgagctaaagcgcaattgtcaccaggtattgcaccaatggtggcgacagagtacagaagagcaagtactcctgactgggcaatgggactgcattgcatatccctaggcacctattgagatttctctggggcccaccagcatggagttcctgtatgggaatgcaggactggacttgtgctgcctgacagggtcgcggctggccgtctgtactttgtatagtcagttgaaacgcacc

SEQ ID NO: 17910 - DNA, 321 bp, synthetic construct
  source 1..321: mol_type = other DNA
ggtctcctgttgtgtttaaacacagaaatcttgttactcggttatgaattcactggatcaatccttctgaaagacctgctctggcgcgagcaaaagcgcaattgtcaccaggtactgcaccaatggtggcgacagggtacagaagagcaagtactcctgactgggcaatgggactgcattgcatatccctaggcacctattgagatttctctggggcccaccagcgtggagttcctgtatgggaatgcaggactggacttgtgctgcctgacagggtcgcggctggccgtctgtactttgtatagtcagttgaaactcacc

SEQ ID NO: 17911 - DNA, 317 bp, synthetic construct
  source 1..317: mol_type = other DNA
ttctgttgtgtttaaacacagaaatctgactacttggttatgaattcattggataaacccttttgaaagacctgctctggcgcgagctaaagcgcaattgtcaccgggtattgcaccaacggtggcgacagggtacagaagagcaagtactcctgactgggcaatgggactgcattgcatatccctaggcacctattgagattcctctggggcccaccagcatggagttcctgtatgggaatgcaggactggacttgtgctgcctgacagggtcgcggctggccgtctgtactttgtatagtcagttgaaatgcacc

SEQ ID NO: 17912 - DNA, 683 bp, synthetic construct
  source 1..683: mol_type = other DNA
tgaggggacttgatacctcaccgccgtttgcctaggctataggctaaattttcccttcccctctcccctttcctatcctctttgtttggtgagtagatattaattcctgcaggttcagggttcttaaatctgtttctctataagaacactcattttcacgctttctgtcttctctattccagggctctccccttgccctaggctctggccgttgcgcccggcggggtcaactccatgattagcatggagctgtaggagtctaaattggggacacagatgtttggaacgtcaccttgcagtgttaacttggctttcatgaatctctttgatcttccacaaggggtaggctacgggtgaaacctcttaggctaatacttctatgaagagatgctttggatagggtaacagcggcggatattggtgagttgttaagacaaaaaccattcaacgccggaggactgactctcatccagtggatgcattgagtggattgactgtcagggctgtctctaggcttaattccagacctctctgtgcttagggcaaacatcatttggtcttaaatgggattctgtgagaggggatccctccattgacagctggactgtcctttggggccttatgtggtgtttgcctctgaggtactcaggggcatttaggtttttcctcattcttaaataata

SEQ ID NO: 17913 - DNA, 682 bp, synthetic construct
  source 1..682: mol_type = other DNA
gaggggacttgatacctcaccgccgtttgcctaggctataggctaaatttccctttccctgtccttcccctatttccctttgttttgtttgtaaatattaattcctgcaggttcagggttcttcaatctgtttctctataagaacactcaattttcacgctttctgtcttctttcttccagggctctccccttgccctaggctctggccgttgcgcccggcggggtcaactccatgattagcatggagctgtaggagtctaaattggggacgcagatgtttgggacgtcgccttgcagtgttaacttggctctcatgaacctctttgatcttccacaaggggtaggctacgggtgaaacctcttaggctaatacttctatgaagagatgccttggatagggtaacagcggcggatattggtgagttgttaagacaaaaaccattcaacgccggaggactggctctcatccagtggatgcattgagtgaattgattgtcagggctgtctctaggtttaatctcagaactctctgtgcttagggcaaacactacttggccttaaatgggatcctgtgagagggggtccctccattaacagctggactgttctttgggcccttatgtggtgtttgcttctgaggtactcaggggcatttaggtttttcctcatttttaaataaca

SEQ ID NO: 17914 - DNA, 285 bp, synthetic construct
  source 1..285: mol_type = other DNA
tttggttatagattcagtggactaacccttttgaaagacctgctctggcgcgagctaaagcgcaattgtcaccgggtattgcaccaatggtggcgacagggtacagaagagcaagtactcctgactgggtaatgggactgcattgcatatccctaggcacctattgagatttctctggggcccaccagcgtggagttcctgtatgggaatgcaggactggacttgtgctgcctgacagggtcgcggctggccgtctgtactttgtatagtcagttgaaattcact

SEQ ID NO: 17915 - DNA, 391 bp, synthetic construct
  source 1..391: mol_type = other DNA
cagccatcctctggtaagtttgtaagacgtctggtgacgtgtgggaacttattggaaacaacattttgctgtaaagcatcctattgccagcggaataacacctggtaacaggtgcctctggggccaaaagccaaggtttaacaaaccctttaggattggttctaaacctgagatgttgcggaagatacttagtacctaccgatctggtagtagtgcaaacactagttgtaaggcccacgaaggatgcccagaaggtacccgtaggtaacaagtgacactatggatctgatctggggccaggtacctctatcttggtgatctggttaaaaaacgtctagtgggccaaacccgggggggatccccggtttccttttattttaccaatgccact

SEQ ID NO: 17916 - DNA, 498 bp, synthetic construct
  source 1..498: mol_type = other DNA
ctctccccttgccctaggctctggccgttgcgcccggcgggtcaactccatgattagcatggagctgtaggagtctaaattggggacgcagatgtgtgggacgtcaccttgcagtgtaaacttggctctcatgaacctctttgatcttccacaaggggtaggctacgggtgaaacctcttaggctaatacttctatgaagagatgctttggatagggcaacagcggcggatattggtgagttgttaagacaaaaaccattcaacgccggaggactggctctcatccagtggatgcattgagtggattgattgtcagggctgtctctaggtttaatctcagacctctctgtgcttagggcaaacaccatttggccttaaatgggatcctgtgagagggggtccctccattgacagctggactgttctttggggccttatgtggtgtttgcctctgaggtactcaggggcatttaggtttttcctcattcttaaacaata

SEQ ID NO: 17917 - DNA, 367 bp, synthetic construct; identical to SEQ ID NO: 1
  source 1..367: mol_type = other DNA

SEQ ID NO: 17918 - DNA, 367 bp, synthetic construct
  source 1..367: mol_type = other DNA
tgaggtgtctgatgaggtgtgggaacttattggaagtgattacttgctgcaaagcatcctattgccagcggatcaacacctggtgacaggtgcccctggggccaaaagccaaggtttaacagaccctctaggattggtttaaacctgagtagtcatggaaaatacttagtacctgccaatttggtaacagtgcaaacactagttgtaaggcccacgaaggatgcccagaaggtacccgaaggtaacaagtgacactatggatctgatttggggccatctacttctatcttggtgaggtggttaaaaaacgtctagtgggccaaacccaggggggatccctggtttcctttatcataccactatcatt

SEQ ID NO: 17919 - DNA, 368 bp, synthetic construct; identical to SEQ ID NO: 2
  source 1..368: mol_type = other DNA

SEQ ID NO: 17920 - DNA, 430 bp, synthetic construct
  source 1..430: mol_type = other DNA
cctccacccttaaggtggttgtatccccataccctaccctcccttccacacaggacggataaatggacttggacttatggcaagaacatacggtatgatttttggatacaccttgaatggcagtagcgtggcgagctatggaaaaatcgcaattgtcgatagccatgttagtgacgcgcttcggcgtgctcctttggtgattcggcgactggttacaggagagtaggcagtgagctatgggcaaacctctgcagtattactcagagggaatgtgcaattgagacttgacgagcgtctctttgagatgtggcgcatgctcttggcattaccatagtgagcttccaggttgggaaacctggactgggcctatactacctgatagggtcgcggctggccgcctgtaactagtatagtcagttgaaaccccccc

SEQ ID NO: 17921 - DNA, 369 bp, synthetic construct
  source 1..369: mol_type = other DNA
tgagacgtctggtgacgtgtgggaacttattggaaacaacattttgctgcaaagcatcctactgccagcggaacaacacctggtaacaggtgcctctggggccaaaagccaaggtttaacagaccctttaggattggttctaaacctgaaatgttgtggaaggtacttagtacctaccgatctggtagtagtgcaaacactagttgtaaggcccacgaaggatgcccagaaggtacccgtaggtaacaagtgacactatggatctgatctggggtcaggtacttctatcttggtgacctgattaaaaaacgtctagtgggccaagcccaggggggatccctggtttccttttgttttaccaatgctgct

SEQ ID NO: 17922 - DNA, 370 bp, synthetic construct
  source 1..370: mol_type = other DNA
taagacgtctggtgacgtgtgggaacttattggaaacaacattttgctgtaaagcatcctattgccagcggaacaacacctggtaacaggtgcctctggggccaaaagccaaggtttaacagaccctttaggattggtttgaaaacctggaatgttgtggaagatacttagtacctaccaatctggtagtagtgcaaacactagttgtaaggcccacgaaggatgcccagaaggtacccgaaggtaacaagtgacactatggatctgatctggggccaggtacctctatcttggtgacctggttaaaaaacgtctagtgggccaaacccaggggggatccctggtttccttttgttttattaatgccact

SEQ ID NO: 17923 - DNA, 370 bp, synthetic construct
  source 1..370: mol_type = other DNA
taagacgtctggtgacgtgtgggaacttattggaaacaacattttgctgtaaagcatcctattgccagcggaacaacacctggtaacaggtgcctctggggccaaaagccaaggtttaacagaccctttaggattggtttgaaaacctggaatgttgtggaagatacttagtacctaccaatctggtagtattgcaaacactagttgtaaggcccacgaaggatgcccagaaggtacccgaaggtaacaagtgacactatggatctgatctggggccaggtacctctatcttggtgacctggttaaaaaacgtctagtgggccaaacccaggggggatccctggtttccttttgttttatcaatgccacc

SEQ ID NO: 17924 - DNA, 330 bp, synthetic construct
  source 1..330: mol_type = other DNA
actggatacaccttgaatggcagtagcgtggcgagctatggaaaaatcgcaattgtcgatagccatgttagtgacgcgcttcggcgtgctcctttggtgattcggcgactggttacaggagagtaggcagtgagctatgggcaaacctctacagtattacttagagggaatgtgcaattgagacttgacgagcgtccctccgggatgtggcgcatgctcttggcattaccatagtgagcttctaggttgggaaacctggactgggcctatactacctgatagggtcgcggctggccgcctgtaactagtatagtcagttgaaaccccccc

SEQ ID NO: 17925 - DNA, 520 bp, synthetic construct
  source 1..520: mol_type = other DNA
aaggcaggtgggttcagacgcttaaagtgtgttgtgcatgttcttttctaacctgtgttctacacagggtggcagatggcgtgccataaccctaatagtgagataccacgcttgtggaccttatgctcacacagccatcctctagtaagtttgtaagacgtctgatgacgtgtgggaacttgttggagataacattttgctgcaaagcatcccattgccagcggatccacatctggtaacagatgcctctggggccaaaagccaaggtttaatagaccctttgggattggttcaaacctgaattgttatggaagacatttagtacctgctgatttggtagtagtgcagacactagttgtaaggcccacgaaggatgcccagaaggtacccgtaggtaacaagtgacactatggatctgatctggggccgactacctctatctaggtgagttggttaaaaaacgtctagtgggccaaacccaggggggatccctggtttcccttttatttgaataatcact

SEQ ID NO: 17926 - DNA, 550 bp, synthetic construct; identical to SEQ ID NO: 591
  source 1..550: mol_type = other DNA

SEQ ID NO: 17927 - DNA, 520 bp, synthetic construct
  source 1..520: mol_type = other DNA
aaggcaggtgggttcagacgcttaaagtgtgttgtgcatgttcttttctaacctgtgttctacacagggtggcagatggcgtgccataaccctaatagtgagataccacgcttgtggaccttatgctcacacagccatcctctagtaagtttgtaagacgtctgatgacgtgtgggaacttgttggagataacattttgctgcaaagcatcccattgccagcggatccacatctggtaacagatgcctctggggccaaaagccaaggtttaacagaccctttgggattggttcaaacctgaattgttatggaagacatttagtacctgctgatttggtagtagtgcagacactagttgtaaggcccacgaaggatgcccagaaggtacccgtaggtaacaagtgacactatggatctgatctggggccgactacctctatctaggtgagttggttaaaaaacgtctagtgggccaaacccaggggggatccctggtttcccttttatttgaataatcact

SEQ ID NO: 17928 - DNA, 312 bp, synthetic construct
  source 1..312: mol_type = other DNA
ggcagtagcgtggcgagctatggaaaaatcgcaattgtcgatagccatgttagtgacgcgcttcggcgtgctcctttggtgattcggcgactggttacaggagagtaggcagtgagctatgggcaaacctctgcagtattactcagggggaatgtgcaattgagacttgacgagcgtctctttgagatgtggcgcatgctcttggcattaccatagtgagcttccaggttgggaaacctggactgggcctatactacctgatagggtcgcggctggccgcctgtaactagtatagtcagttgaaaccccccc

SEQ ID NO: 17929 - DNA, 520 bp, synthetic construct; identical to SEQ ID NO: 545
  source 1..520: mol_type = other DNA

SEQ ID NO: 17930 - DNA, 444 bp, synthetic construct
  source 1..444: mol_type = other DNA
acacttgtttcccccctccacccttaaggtggttgtatccccataccttaccctcccttccaaagcggatggacaaatggacttggacttatggcaagaacatatggtatgacttttggatacaccttgaatggcagtagcgtggcgagctatggaaaaatcgcaattgtcgatagccatgttagtgacgcgcttcggcgtgctcctttggtgattcggcgactggttacaggagagtaggcagtgagctatgggcaaacctctgcagtattactcagagggaatgtgcaattgagacttgacgagcgtctcgtagagatgtggcgcatgctcttggcattaccatagtgagcttccaggttgggaaacctggactgggcctatactacctgatagggtcgcggctggccgcctgtaactagtatagtcagttgaaaccccccc

SEQ ID NO: 17931 - DNA, 745 bp, synthetic construct
  source 1..745: mol_type = other DNA
ttaaaacagcctgtgggttgcacccactcacagggcccacgtggcgctagcactctgattctacggaatctttgtgcgcctgttttacaacccccccaatttgcaacttagaagcaatacacaacactgatcaacagcaggcatggcgcaccagccatgtcttgatcaagcacttctgtttccccggactgagtatcaatagactgctcacgcggttgaaggagaaagcgtccgttatccgactaactacttcgagaaacctagtagcaccattgaagctgcggagtgtttcgctcggcacttcccccgtgtagatcaggccgatgagtcactgcaatccccacgggcgaccgtggcagtggctgcgctggcggcctgcctatggggcaacccataggacgctctaatgtggacatggtgcgaagagtctattgagctagttagtagtcctccggcccctgaatgcggctaatcctaactgcggagcacatgccctcaacccagagggtagtgtgtcgtaacgggcaactctgcagcggaaccgactactttgggtgtccgtgtttccttttattcttacattggctgcttatggtgacaatcacagaattgttaccatatagctattggattggccatccggtgtgcaatagagctattatatacctatttgttggctttgtaccactaaccttaaaatctataaccaccctcaactttatattaactctcaatacagtcaaac

SEQ ID NO: 17932 - DNA, 915 bp, synthetic construct; identical to SEQ ID NO: 1296
  source 1..915: mol_type = other DNA

SEQ ID NO: 17933 - DNA, 743 bp, synthetic construct
  source 1..743: mol_type = other DNA
gctcttccgatctgggttgttcccacccacagggcccactgggcgccagcactctgattccacggaatctttgtgcgcctgttttacaacccttcccaatttgtaacgtagaagcaatacacactactgatcaatagtaggcatggcgcgccagtcatgtcatgatcaagcacttctgttcccccggactgagtatcaatagactgctcacgcggttgaaggagaaaacgttcgttacccggctaactacttcgagaaacctagtagcaccatggaagctgcggagtgtttcgctcagcactttccccgtgtagatcaggtcgatgagtcactgcaatccccacgggcgaccgtggcagtggctgcgttggcggcctgcctatggggcaacccataggacgctctaatgtggacatggtgcgaagagtctattgagctagttagtagtcctccggcccctgaatgcggctaatcctaactgcggagcacatgccttcaacccaggaggtggtgtgtcgtaacgggtaactctgcagcggaaccgactactttgggtgtccgtgtttccttttatccttatattggctgcttatggtgacaatcacggaattgttgccatatagctattggattggccatccggtgtctaacagagctattgtatacctatttgttggatttactcccctatcatacaaatctctgaacactttgtgctttatactgaacttaaacacacgaaa

SEQ ID NO: 17934 - DNA, 746 bp, synthetic construct; identical to SEQ ID NO: 1116
  source 1..746: mol_type = other DNA

SEQ ID NO: 17935 - DNA, 742 bp, synthetic construct
  source 1..742: mol_type = other DNA
ttaaaacagcctgtgggttgtacccacccacagggcccactgggcgctagcactctggtgccacggtacctttgtgcgcctgttttatcaccctacccctcatgaaacttagaagcaatacataaccgaccaacagtaggtgtggcgcaccagccgcatcttggtcaagcacttctgtttccccggattgagtatcaataggctgttcacacggctgaaggagaaaacttccgttacccggccaactacttcgagaaacctagtaccactatcgacgttgcaaggcgtttcactcagcacttcccccgtgtagatcaggccgatgagtcaccgcattccccacgggcgaccgtggcggtggctgcgttggcggcctgcctatgggtcagcccataggacgccttaatactgacatggtgcgaagagtctattgagctagttggtagtcctccggcccctgaatgcggctaatcctaactgcggagcacatactcacaagccagtgagcggtgtgtcgtaacgggtaactctgcagcggaaccgactactttgggagtccgtgtttccttttatctttatattggctgcttatggtgacaatcagagaattgttaccatatagctattggattggccatccggtgtctaatagagctattatatatctgtttgttgggttcaccccgttgtcgtataaatccttaaatactttgttctttatcctgaacttaaatacaagaaa

SEQ ID NO: 17936 - DNA, 732 bp, synthetic construct
  source 1..732: mol_type = other DNA
ctgtgggttgtccccactcacagggcccactgggcgccagcactctggtactacggtacctttgtgcgcctgttttatcaccccaccccatctgaaacgtagaagcaatgcacaaccgaccaatagtgggtgtggcgcaccagccacatcttggtcaagcacttctgttcccccgggtttagtatcaataagctgctcacgcggctgaaggagaaaacacccgttatccggccgactacttcgagaaacctagtaccgctatgaacgttgcaaggcgtttcgctcagcacttcccccgtgtagatcaggctgatgagtcaccgcatccctcacgggcgaccgtggcggtggctgcgctggcggcctgcctatgggcttgcccataggacgccttaatactgacatggtgcgaagagtctattgagctagttggtagtcctccggcccctgaatgcggctaatcctaactgcggagcacatactcacaaaccagtgagcggtgtgtcgtaacgggcaactctgcagcggaaccgactactttgggtgtccgtgtttccttttattcttatactggctgcttatggtgacaattaaagaattgttaccatatagctattggattggccatccggtgtctaacagagatatcatatacttgtttgtgggattcacctcgttgtcatacaaatcccttaacactttgtgctttatcttgaatttaaactcaaaaag

SEQ ID NO: 17937 - DNA, 745 bp, synthetic construct
  source 1..745: mol_type = other DNA
gtgctcttccgatctgtgggttgcacccacccacagggcccactgggcgctagcactctggtaccatggtacctttgtgcgcctgttttatcaccctaccccacacgaaacttagaagtaacacgtaaccgaccaatagtaggtgtggcgcaccagccacatcttggtcaagcacttctgtttccccgggttgagtatcaataagctgttcacacggctgaaggagaaaacgcccgttacccggccaactacttcgagaaacctagtaccaccatgaacgttgcaaggcgtttcgctcagcacttcccccgtgtagatcaggccgatgagtcaccgcattccccacgggtgaccgtggcggtggctgcgttggcggcctgcctatgggttagcccataggacgccttaatactgacatggtgcgaagagtctattgagctagttggtagtcctccggcccctgaatgcggataatcctaactgcggagcacatactcacaaaccagtgagctgtgtgtcgtaacgggcaactctgcagcggaaccgactactttgggagaccgtgtttccttttatctttatattggctgcttatggtgacaatcagagaattgttaccatatagctattggattggccatccggtgtctaatagagctattatatacctgtttgttggattcactccgctaacatatagatccctaaatactttgtgctatattttgagcttaaacacacgaag

SEQ ID NO: 17938 - DNA, 740 bp, synthetic construct
  source 1..740: mol_type = other DNA
ctcttccgatctgttgttcccacccacagggcctactgggcgccagcactctgattccacggaatctttgtgcgcctgttttacaaccctccccaatttgtaacgtagaagtgatacacactactgatcaatagtaggcatggcgcgccagtcatgttatgatcaagcacttctgttcccccggactgagtatcaatagactgctcacgcggttgaaggagaaaacgttcgttacccggctaactacttcgagaaacctagtagcaccatggaagctgcagagtgtttcgctcagcacttcccccgtgtagatcaggtcgatgagtcactgcaatccccacgggtgaccgtggcagtggctgcgttggcggcctgcctatggggcaacccataggacgctctaatgtggacatggtgcgaagagtctattgagctagttagtagtcctccggcccctgaatgcggctaatcctaactgcggagcacatgccttcaacccaggaggtggtgtgtcgtaacgggtaactctgcagcggaaccgactactttgggtgtccgtgtttccttttatccttatattggctgcttatggtgacaatcacggaattgttgccatatagctattggattggccatccggtgtctaatagagctattgtatacctatttgttggatttactcccctatcgtataaatctctaaatactttgtgctttatattgagcttaaacacacgaaa

SEQ ID NO: 17939 - DNA, 738 bp, synthetic construct
  source 1..738: mol_type = other DNA
tccctgtgggttgttcccacccacagggcccactgggcgccagcactctgattccacggaatctttgtgtgcctgttttacaacccttccccaatttgtaacgtagaagtaatacacactactgatcaatagcaggcatggcgcgccagtcatgtctcgatcaagcacttctgttcccccggactgagtatcaatagactgctcacgcggttgaaggagaaaacgttcgttacccggctaactacttcgagaaacctagtagcaccatagaagctgcagagtgtttcgctcagcacttcccccgtgtagatcaggctgatgagtcactgcaatccccacgggcgaccgtggcagtggctgcgctggcggcctgcctatggggcaacccataggacgctctaatgtggacatggtgcgaagagtctattgagctagttagtagtcctccggcccctgaatgcggctaatcctaactgcggagcacatgccttcaacccaggaggtggtgtgtcgtaacgggcaactctgcagcggaaccgactactttgggtgtccgtgtttctctttattcctatattggctgcttatggtgacaatcacggaattgttgccatatagctattggattggccatccggtgtctaatagagccattgtgtacctatttgttggatttactccgctatcatataaatctctgaacactttgtgctttatattgaacttaaacacacgaaa

SEQ ID NO: 17940 - DNA, 746 bp, synthetic construct; identical to SEQ ID NO: 1117
  source 1..746: mol_type = other DNA

SEQ ID NO: 17941 - DNA, 735 bp, synthetic construct
  source 1..735: mol_type = other DNA
ctcttcctgttgcacccacccacagggcccactgggcgctagcactctggtaccacggtacccttgtgcgcctgttttatcaccccaccccaacttgaaacttagaagcaatgcacaaccgaccaatagtaggtgtggcgcaccagccgcatctcggtcaagcacttctgtttccccgggttgagtatcaataagctgtccacacggctgaaggagaaaacgcccgttatccggccaactacttcgagaaacctagtaccactatgaacgttgcaaggcgtttcgctcagcacttcccccgtgtagatcaggtcgatgagtcaccgcatcccccacgggcgaccgtggcggtggctgcgttggcggcctgcctatgggttaacccataggacgccttaataccgacatggtgcgaagagtctattgagctagttggtagtcctccggcccctgaatgcggctaatcctaactgcggagcacacactcacaacccagtgagcggtgtgtcgtaacgggcaactctgcagcggaaccgactactttgggtgtccgtgtttccttttactcttatattggctgcttatggtgacaatcatagaattgttaccatatagctattggattggccatccgatttctaacagagctattatttacctgtttgttggattcactccgttgacatacaaatccctaaacactttgtgctttattttgaacttgaacgcacgaaa

SEQ ID NO: 17942 - DNA, 737 bp, synthetic construct
  source 1..737: mol_type = other DNA
cagcctgtgggttgcacccacccacagggcctactgggcgttagcactctggtaccacggtacccttgtgcgcctgttttatcaccctaacccaacttgaaacttagaagcaatacacaatcgaccaatagtaggtgtggcacaccagccgcatcttggtcaagcacttctgtttccccgggttgagtatcaataagctgtccacacggctgaaggagaaaacgcccgttatccggccaactacttcgagaaacttagtaccactatgaacgttgcaaggcgtttcgctcagcacttcccccgtgtagatcaggtcgatgagtcaccgcattccccacgggcgaccgtggcggtggctgcgttggcggcctgcctatgggttaacccataggacgccttaatactgacatggtgtgaagagtctattgagctagttggtagtcctccggcccctgaatgcggctaatcctaactgcggagcacatactcacaacccagtgagcggtgtgtcgtaatgggtaactctgcagcggaaccgactactttgggtgtccgtgtttccttttattcttacattggctgcttatggtgacaatcatagaattgttaccatatagctattggattggccatccgatttctaacagagctatcatctacctgtttgttggatttactccgttgacatacaaatccctaaacactttgtgctttatcttgaacttgaacgcacgaaa

SEQ ID NO: 17943 - DNA, 735 bp, synthetic construct
  source 1..735: mol_type = other DNA
cctgtgggttgttcccacccacagggcccactgggcgccagcactctgattccacggaatctttgtgcgcctgttttatagcccttcccaatttgtaacgtagaagtaacgcacaccactgatcaatagtaggcatggcgcgccagtcatgtcatgatcaagcacttctgttcccccggactgagtatcaatagactgcttacgcggttgaaggagaaaacgttcgttacccgactaactacttcgagaaacctagtagcaccatggaagctgcagagtgtttcgctcagcacttcccccgtgtagatcaggtcgatgagtcactgcaatccccacgggcgaccgtggcagtggctgcgttggcggcctgcctatggggcaacccataggacgctctaatgtggacatggtgcgaagagtctattgagctagttagtagtcctccggcccctgaatgcggctaatcctaactgcggagcacatgccttcaacccaggaggtggtgtgtcgtaacgggtaactctgcagcggaaccgactactttgggtgtccgtgtttccttttatccttatattggctgcttatggtgacaatcacggaattgttgccatatagctattggattggccatccggtgtctaatagagctattgtatacctatttgttggatttactcccctatcatacaaatctctgaacactttgtgctttatactgaacttaaacacacgaaa

SEQ ID NO: 17944 - DNA, 733 bp, synthetic construct
  source 1..733: mol_type = other DNA
cctgtgggttgcacccacccacagggcccactgggcgctagcactctggtgccacggtacctttgtgcgcctgttttattgccctaccccacacgaaacttagaagtaatacataaccgaccaacagtaggtgtggcacaccagccatatcttggtcaagcacttctgtttccccgggttgagtatcaataagctgttcacacggctgaaggagaaaacacccgttatccgaccaactacttcgagaaacctagtaccgccatgaacgttgcaaggtgtttcgctcagcacttcccccgtgtagatcaggccgatgagtcaccgcattccccacgggtgaccgtggcggtggctgcgttggcggcctgcctatgggctagcccataggacgccttaatactgacatggtgcgaagagtctattgagctagttggtagtcctccggcccctgaatgcggctaatcctaactgcggagcacatactcacaaaccagtgagcggtgtgtcgtaacgggtaactctgcagcggaaccgactactttgggtgtccgtgtttccttttatctttatattggctgcttatggtgacaatcagagaattgttgccatatagctattggattggccatccggtgtctaacagagctattatatacctgtttgttggattcactccgttgacctataaatccctaaacaccttgtgttacattttgaatttaaacacacgaag

SEQ ID NO: 17945 - DNA, 731 bp, synthetic construct
  source 1..731: mol_type = other DNA
tgtgggttgtccccactcacagggcccactgggcgtcagcactctggtactgcggtacctttgtgcgcctgttttatcaccccaccccatctgaaacgtagaagcaatgcacaaccgaccaatagtgggtgtggcgcaccagccacatcttggtcaagcactcctgttcccccgggtttagtatcaataagctgctcacgcggctgaaggagaaaacacccgttatccggccgactacttcgagaaacctagtaccgctatgaacgttgcaaggcgtttcgctcagcacttcccccgtgtagatcaggctgatgagtcaccgcatccctcacgggcgaccgtggcggtggctgcgctggcggcctgcctatgggcttgcccataggacgccttaatactgacatggtgcgaagagtctattgagctagttggtagtcctccggcccctgaatgcggctaatcctaactgcggagcacatactcacaaaccagtgagcggtgtgtcgtaacgggcaactctgcagcggaaccgactactttgggtgtccgtgtttccttttattcttatactggctgcttatggtgacaattaaagaattgttaccatatagctattggattggccatccggtgtctaacagagatatcatatacttgtttgttggattcacctcgttgtcatacaaatcccttaacactttgtgctttatcttgaatttaaactcaaaaag

SEQ ID NO: 17946 - DNA, 727 bp, synthetic construct
  source 1..727: mol_type = other DNA
ggttgtacccacccacagggcccactgggcgttagcactctggtaccacggtacctttgtgcgcctgttttatcaccctacccctcatgaaacttagaagtaatacataaccgaccaatagtaggtgtggcgcgccagccgcatcttggtcaagcacttctgtttccccggattgagtatcaataagctgttcacacggctgaaggagaaaacatccgttacccggccaactacttcgagaaacctagtaccactatcaaagttgcaaggcgtttcgctcagcacttcccccgtgtagatcaggccgatgagtcaccgcattccccacgggcgaccgtggcggtggctgcgttggcggcctgcctatgggtcagcccataggacgccttaatactgacatggtgcgaagagtctattgagctagttggtagtcctccggcccctgaatgcggctaatcctaactgcggagcacatactcacaagccagtgagcgatgtgtcgtaacgggtaactctgcagcggaaccgactactttgggagtccgtgtttccttttatctttatattggctgcttatggtgacaatcagagaattgttaccatatagcttttggattggccatccggtgtctaatagagctattatatatctgtttgttgggttcaccccgttgtcgtataaatccttaagcactttgttctttatcctgaacttaaatacaagaaa

SEQ ID NO: 17947 - DNA, 747 bp, synthetic construct
  source 1..747: mol_type = other DNA
gttagtggatgagcaagggttgttcccacccacagggcccactgggcgccagcactctgatttcacggaatctttgtgcgcctgttttacaacccttccccatcttgtaacgtagaagtaacatacactactgatcaatagcaggcatggcgcaccagtcatgtctcgatcaagcacttctgttcccccggactgagtatcaatagactgctcacgcggttgaaggagaaaacgttcgttacccggctaactacttcgagaaacctagtagcaccatagaagctgcagagtgtttcgctcagcacttcccccgtgtagatcaggctgatgagtcactgcaatccccacgggtgaccgtggcagtggctgcgttggcggcctgcctatggggtaacccataggacgctctaatgtggacatggtgcgaagagtctattgagctagttagtagtcctccggcccctgaatgcggctaatcctaactgcggagcacatgccttcaacccagaaggtggtgtgtcgtaatgggcaactctgcagcggaaccgactactttgggtgtccgtgtttctttttattcctatattggctgcttatggtgacaatcacggaattgttgccatatagctattggattggccatccggtgtctaatagagctattgtgtacctatttgttggatttactccgctatcacataaatctctgaacactttgtgctttatattgaacttaaacacccgaaa

SEQ ID NO: 17948 - DNA, 742 bp, synthetic construct
  source 1..742: mol_type = other DNA
gctcttccgatctggttgttcccacccacagggcctactgggcgccagcactctgattccacggaatctttgtgcgcctgttttacaaccctccccaatttgtaacgtagaagcaatacacactactgatcaatagtaggcatggcgcgccagtcatgtcatgatcaagcacttctgttcccccggactgagtatcaatagactgctcacgcggtcgaaggagaaaacgttcgttacccggctaactacttcgagaaacctagtagcaccatggaagctgcggagtgtttcgctcagcacttcccccgtgtagatcaggtcgatgagtcactgcaatccccacgggcgaccgtggcagtggctgcgttggcggcctgcctatggggtaacccataggacgctctaatgtggacatggtgcgaagagtctattgagctagttagtagtcctccggcccctgaatgcggctaatcctaactgcggagcacatgccttcaacccaggaggtggtgtgtcgtaacgggtaactctgcagcggaaccgactactttgggtgtccgtgtttccttttatccttatattggctgcttatggtgacaatcacggaattgttgccatatagctattggattggccatccggtgtctaacagagctattgtatacctatttgttggatttactcccctatcatacaaatctctgaacactttgtgctttatactgaacttaaacacacgaaa

SEQ ID NO: 17949 - DNA, 734 bp, synthetic construct
  source 1..734: mol_type = other DNA
ctgtgggttgttcccacccacagggcccactgggcgccagcactctgattccacggaatctttgtgcgcctgttttacaacccttcccaatctgtaacgtagaagtaatgcacactattgatcaatagtaagcatggcgcaccagtcatgtcatgatcaagcacttctgttcccccggactgagtatcaatagactgctcacgcggttgaaggagaaaacgttcgttacccggctaactacttcgagaaacctagtagcaccatggaaactgcagagtgtttcgctcagcacctcccccgtgtagatcaggtcgatgagtcactgcaatccccacgggcgaccgtggcagtggctgcgttggcggcctgcctatggggtaacccataggacactctaatgtggacatggtgcgaagagtctattgagctagttagtagtcctccggcccctgaatgcggctaatcctaactgcggagcacatgccttcaacccaggaggtggtgtgtcgtaacgggtaactctgcagcggaaccgactactttgggtgtccgtgtttccttttatcattatattggctgcttatggtgacaatcacggaattgttaccatatagctattggattggccatccggtgtctaatagagctattgtgtacctatttgttggattcactcccctatcgtataaatctctgaacactttgtgctttatattgaacttaaacacacgaaa

SEQ ID NO: 17950 - DNA, 742 bp, synthetic construct
  source 1..742: mol_type = other DNA
ttaaaacagcctgtgggttgtacccactcacagggcccactgggcgccagcactctggtactgcggtacctttgtgcgcctgttttatcaccccaccccatctgaaacgtagaagcaatgcacaactgaccaatagtgggtgtggcgcaccagccacatcttggtcaagcacttctgtttccccgggtttagtatcaataagctgctcacgcggctgaaggagaaaacacccgttatccggccaactacttcgagaagcctagtaccgctatgaacgtagcaaggcgtttcgctcagcacttcccccgtgtagatcaggctgatgagtcaccgcatccctcacgggcgaccgtggcggtggctgcgttggcggcctgcctatgggcttgcccataggacgccttaatactgacatggtgcgaagagtctattgagctagttggtagtcctccggcccctgaatgcggctaatcctaactgcggagcacatactcacaaaccagtgagcggtgtgtcgtaacgggtaactctgcagcggaaccgactactttgggtgtccgtgtttccttttattcttatactggctgcttatggtgacaattaaagaattgttaccatatagctattggattggccatccggtgtctaatagaggcattatatacttgttcgttggatttacctcgttgtcatacaaatcccttaacactttgtgctttatcttgagcttgaattcaaaaag

SEQ ID NO: 17951 - DNA, 730 bp, synthetic construct
  source 1..730: mol_type = other DNA
gtgggttgcacccacccacagggcccactgggcgctagcactctggtgccacggcacctttgtgcgcctgttttatcaccctaccccacacgaaacttagaagtaatacacaaccgaccaatagtaggtgtggcgcaccagccacatcttggtcaagcacttctgtttccccgggtttagtatcaataagctgtttacacggctgaaggagaaaacacccgttacccggccaactacttcgagaaacctagtaccgccatggacgttgcaaggtgtttcgctcagcacttcccccgtgtagatcaggctgatgagtcaccgcatcccccacgggtaaccgtggcggtggctgcgttggcggcctgcctatgggttaacccataggacgccttaatactgacatggtgcgaagagtctattgagctagttggtagtcctccggcccctgaatgcggctaatcctaactgcggagcacatactcacaaaccagtgagcggtgtgtcgtaacgggtaactctgcagcggaaccgactactttgggtgtccgtgtttccttttatctttatattggctgcttatggtgacaatcagagaattgttaccatatagctattggattggccatccggtgtctaatagagctattatatatctgtttattggattcactccgttgacctataaatccctaaacaccttgtgctatattttgaatttaaacacacgaaa

SEQ ID NO: 17952 - DNA, 727 bp, synthetic construct
  source 1..727: mol_type = other DNA
ggttgtacccacccacagggcccactgggcgccagcactctggtactgcggtacctttgtgcgcctgttttatcaccccaccccatctgaaacgtagaagcaatgcacaaccgaccaatagtgggtgtggcgcaccagccacatcttggtcaagcacttctgttcccccgggtttagtatcaataagctgctcacgcggctgaaggagaaaacacccgttatccggccgactacttcgagaaacctagtaccgctatgaatgttgcaaggcgtttcgctcagcacttcccccgtgtagatcaggctgatgagtcaccgcattccccacgggcgaccgtggcggtggctgcgctggcggcctgcctatgggcttgcccataggacgccttaatactgacatggtgcgaagagtctattgagctagttggtagtcctccggcccctgaatgcggctaatcctaactgcggagcacatactcacaaaccagtgagcggtgtgtcgtaacgggcaactctgcagcggaaccgactactttgggtgtccgtgtttccttttattcttatactggctgcttatggtgacaatcaaagaattgttaccatatagctattggattggccatccggtgtctaacagagatatcatatacttgtttgttggattcacctcgttgtcatacagatctcttaacactttgtgctttatcttgaatttaaattcaaaaag

SEQ ID NO: 17953 - DNA, 745 bp, synthetic construct
  source 1..745: mol_type = other DNA
ttaaaacagcctgtgggttgcacccacccacagggcccactgggcgctagcactctggtactgaggtacctttgtgcgcctgtttttactccccttcccccgaagtaacttagaagctgtaaatcaacgatcaatagcaggtgtggcacaccagtcataccttgatcaagcacttctgtttccccggactgagtatcaataggctgctcgcgcggctgaaggagaaaacgttcgttacccgaccaactacttcgagaagcttagtaccaccatgaacgaggcagggtgtttcgctcagcacaaccccagtgtagatcaggctgatgagtcactgcaacccccatgggcgaccatggcagtggctgcgttggcggcctgcccatggagaaatccatgggacgctctaattctgacatggtgtgaagagcctattgagctagctggtagtcctccggcccctgaatgcggctaatcctaactgcggagcacatgctcacaaaccagtgggtggtgtgtcgtaacgggcaactctgcagcggaaccgactactttgggtgtccgtgtttccttttattcctatattggctgcttatggtgacaatcaaaaagttgttaccatatagctattggattggccatccggtgtgcaacagggcaattgtttacctatttattggttttgtaccattatcactgaagtctgtgatcactctcaaattcattttgaccctcaacacaatcaaac

SEQ ID NO: 17954 - DNA, 747 bp, synthetic construct
  source 1..747: mol_type = other DNA
ttaaaacagcctgtgggttgcacccactcacaggacccacgtggtgctagcactctggttctacggaacctttgtgcgcctgttttacgccccctccccaatttgtaacttagaagcaatttacaacactgatcaatagcaggcatggcgcgccagctatgtcttgatcaagcacttctgtttccccggaccgagtatcaatagactgttcacacggttgaaggagaaagcgtccgttatccggctaactacttcgagaaacccagtagcgccattgaagctgcagagtgtttcgctccacacttcccccgtgtagatcaggtcgatgagtcactgcaatcctcacgggcgaccgtggcagtggctgcgctggcggcctgcctatggggcgacccataggacgctctaatgtggacatggtgcgaagagtctattgagctagttagtagtcctccggcccctgaatgcggctaatcctaactgcggagcacatgccttcaatccagagggtagtgtgtcgtaatgggcaactctgcagcggaaccgactactttgggtgtccgtgtttccttttattctcacattggctgcttatggtgacaattacagaattgttaccatatagctattggattggccatccggtgtgcaatagagctattatatacctatttgttggctttataccactaaccttaaaatctgcaaccactctcgagtatatattaaccctcaatacaatcaaac

SEQ ID NO: 17955 - DNA, 745 bp, synthetic construct
  source 1..745: mol_type = other DNA
ttaaaacagcctgtgggttgcacccacccacagggcccactgggcgctagcactctggtactgaggtacctttgtgcgcctgtttttactccccttcccccgaagtaacttagaagctgtaaatcaacgatcaatagcaggtgtggcacaccagtcataccttgatcaagcacttctgtttccccggactgagtatcaataggctgctcgcgcggctgaaggagaaaacgttcgttacccgaccaactacttcgagaagcttagtaccaccatgaacgaggcagggtgtttcgctcagcacaaccccagtgtagatcaggctgatgagtcactgcaacccccatgggcgaccatggcagtggctgcgttggcggcctgcccatggagaaatccatgggacgctctaattctgacatggtgtgaagagcctattgagctagctggtagtcctccggcccctgaatgcggctaatcctaactgcggagcacatgctcacaaaccagtgggtggtgtgtcgtaacgggcaactctgcagcggaaccgactactttgggtgtccgtgtttccttttattcctatattggctgcttatggtgacaatcaaagagttgttaccatatagctattggattggccatccggtgtgcaacagggcaattgtttacctatttattggttttgtaccattatcactgaagtctgtgatcactctcaaattcattttgaccctcaacacaatcaaac

SEQ ID NO: 17956 - DNA, 745 bp, synthetic construct
  source 1..745: mol_type = other DNA
ttaaaacagcctgtgggttgcacccacccacagggcccattgggcgctagcactctggtactgaggtacctttgtgcgcctgtttttactccccttcccccgaagtaacttagaagctgtaaatcaacgatcaatagcaggtgtggcacaccagtcataccttgatcaagcacttctgtttccccggactgagtatcaataggctgctcgcgcggctgaaggagaaaacgttcgttacccgaccaactacttcgagaagcttagtaccaccatgaacgaggcagggtgtttcgctcagcacaaccctagtgtagatcaggctgatgagtcactgcaacccccatgggcgaccatggcagtggctgcgttggcggcctgcccatggagaaatccatgggacgctctaattctgacatggtgtgaagagcctattgagctagctggtagtcctccggcccctgaatgcggctaatcctaactgcggagcacatgctcacgaaccagtgggtggtgtgtcgtaacgggcaactctgcagcggaaccgactactttgggtgtccgtgtttccttttattcttatattggctgcttatggtgacaatcaaagagttgttaccatatagctattggattggccatccggtgtgcaacagggcaattgtttacctatttattggttttgtaccattaccactgaagtctgtgatcactctcaaattcattttgaccctcaacacaatcaaac

SEQ ID NO: 17957 - DNA, 763 bp, synthetic construct
  source 1..763: mol_type = other DNA
tgtacaaaaaagcaggctttaaaacagcctgtgggttgtccccacccatagggcccactgggcgctagcacactgattctgcgggatctttgtgcgcctgttttataacccttcccctaagcagtaacttagaagctttgtacaatcatggccaatagtgggcgtggcgcgccagtcacgtcttggtcaagcacttctgtatccccggactgagtatcaatagactgctcacgcggttgaaggagaaaacgttcgttacccggctaattacttcgagaaacctagtagcaccatgaaagttgcggagtgtttcgctcagcacttcccccgtgtagatcaggtcgatgagtcactgtaaaccccacgggcgaccgtgacagtggctgcgttggcggcctgcccatggggtaacccatgggacgctctaatacagacatggtgcgaagagtctattgagctaattagcagtcctccggcccctgaatgcggctaatcctaactgcggagcgcgcaccctcaacccagggggcggcgtgtcgtaatgggtaactctgcagcggaaccgactactttgggtgtccgtgtttccttttattctttattggctgcttatggtgacaattgaaaagttgttaccatatagctattggattggccatccggtgtctaacagagctattgtttacctattcattggattcgtccctcttaatctcaaggccattcaaactcttgattacatattgctccttaactgtaagaa

SEQ ID NO: 17958 - DNA, 775 bp, synthetic construct; identical to SEQ ID NO: 1236
  source 1..775: mol_type = other DNA

SEQ ID NO: 17959 - DNA, 761 bp, synthetic construct
  source 1..761: mol_type = other DNA
tacaaaaaagcaggctttaaaacagcctgtgggttgtccccacccacagggcccactgggcgctagcacactggttctgcgggacctttgtgcgcctgttttataacccttcccctaagcagtaacttagaagctttgtacaatcatggccaatagtgggcgtggcgcgccagtcacgtcttggtcaagcacttctgtatccccggactgagtatcaatagactgctcacgcggttgaaggagaaaacgttcgttacccggctaactacttcgagaaacctagtagcaccatgaaagttgcggagtgtttcgctcagcacttcccccgtgtagatcaggtcgatgagtcactgtaaaccccacgggcgaccgtgacagtggctgcgttggcggcctgcccatggggtaacccatgggacgctctaatacagacatggtgtgaagagtctattgagctagttagcagtcctccggcccctgaatgcggctaatcctaactgcggagcgcgcaccctcaacccagggggcggcgtgtcgtaatgggtaactctgcagcggaaccgactactttgggtgtccgtgtttccttttattctttattggctgcttatggtgacaattgaaaagttgttaccatatagctattggattggccatccggtgtctaacagagctattgtttacctattcattggattcgtccctcttaatctcaaggccattcaaactcttgattacatattgctccttaactgtaagaa

SEQ ID NO: 17960 - DNA, 762 bp, synthetic construct
  source 1..762: mol_type = other DNA
tacaaaaaagcaggctttaaaacagcctgtgggttgttcccacccacagggcccactgggcgctagcacactgattctgcgggatctttgtgcgcctgttttataacccctccccctaagcagtaacttagaagctccacactatcacgaccaatagcaggcgtggtgcaccagtcacgtcttggtcaagcacttctgtttccccggactgagtatcaatagactgctcacgcggttgaaggagaaaacgttcgttatccggctaactacttcgagaaacctagtagcaccgtgaaagttgcggagtgtttcgctcagcacttcccccgtgtagatcaggtcgatgagtcactgtgaaccccacgggtgaccgtgacagtggctgcgttggcggcctgcccatggggtaacccatgggacgctctaatacagacacggtgtgaagagtctattgagctagttagtagtcctccggcccctgaatgcggctaatcctaactgcggagcgcgtaccctcaatccagggggcagcgcgtcgtaatgggtaactctgcagcggaaccgactactttgggtgtccgtgtttccttttattccttattggctgcttatggtgacaattgaaaagttgttaccatatagctattggattggccatccggtaaccaacagagccattgtttacctgtttgttggatacgtccctctcaatctcaaggccattcaaactcttgattatatactacttctcaactgtgagaa

SEQ ID NO: 17961 - DNA, 698 bp, synthetic construct
  source 1..698: mol_type = other DNA
taaaacagcctgtgggttgcacccactcacagggcccactgggcgccagcactctggtattgcggtacctttgtgcgcctgttttatcaccccaccccatctgaaacgtagaagtaatgcacaaccgaccaatagtgggtgtggcgcaccagccacatcttggtcaagcacttctgttcccccgggtttagtatcaataagctgctcacgcggctgaaggagaaaacacccgttatccggccgactacttcgagaaacctagtaccgctatgaacgttgcaaggcgtttcgctcagcacttcccccgtgtagatcaggctgatgagtcaccgcatccctcacgggcgaccgtggcggtggctgcgctggcggcctgcctatgggcttgcccataggacgccttaatactgacatggtgcgaagagtctattgagctagttggtagtcctccggcccctgaatgcggctaatcctaactgcggagcacatactcacaaaccagtgagcggtgtgtcgtaacgggcaactctgcagcggaaccgactactttgggtgtccgtgtttccttttattcttatactggctgcttatggtgacaattaaagaattgttgccatatagctattggattggccatccggtgtctaacagagatattatatacttgtttgttggattcataacttaaactcaaaaag

SEQ ID NO: 17962 - DNA, 760 bp, synthetic construct
  source 1..760: mol_type = other DNA
tacaaaaaagcaggctttaaaacagcctgtgggttgttcccacccacagggcccactgggcgctagtacactgattctgcgggatctttgtacgcctgttttataaccctcccctaagcagtaacttagaagcttcacgctatcacgaccaatagtaggcgtggtgcaccagtcacgtcttggtcaagcacttctgtttccccggactgagtatcaatagactgcttgcgcggttgaaggagaaaacgttcgttatccggctaactacttcgagaaacctagtagcaccgtgaaagttgcagagtgtttcgctcagcacttcccccgtgtagatcaggtcgatgagtcactgtgaaccccacgggtgaccgtgacagtggctgcgttggcggcctgcccatggggtaacccatgggacgctctaatacagacacggtgtgaagagtctattgagctagttagtagtcctccggcccctgaatgcggctaatcctaactgcggagcgcgtaccctcaatccagggggcagcgcgtcgtaatgggtaactctgcagcggaaccgactactttgggtgtccgtgtttccttttattccttattggctgcttatggtgacaattgaaaagttgttaccatatagctattggattggccatccggtaaccaacagagctattgtttacctgtttattggatacgtccctctcaatttcaaggctattcaaactcttgattatatactacttctcaactgcaagaa

SEQ ID NO: 17963 - DNA, 742 bp, synthetic construct
  source 1..742: mol_type = other DNA
taaaacaagcctgtgggttgcacccactcacagggcctactgggcgcaagcactttggtacctcggtacctttgtgcgcctgttttataccccccccctagtgaaacttagaagcagcaaaccacgatcaatagcaggcataacgctccagttatgtcttgatcaagcacttctgtttccccggactgagtatcaatagactgctcgcgcggttgaaggagaaaacgttcgttatccggctaactacttcggaaaacctagtaacaccatgaaagttgcggagagcttcgttcagcactcccccagtgtagatcaggtcgatgagtcaccgcattccccacgggcgaccgtggcggtggctgcgttggcggcctgcccatggggtaacccatggggcgctctaatacggacatggtgtgaagagtctactgagctagttggtagtcctccggcccctgaatgcggctaatcccaactgcggagcacacgcccacaagccagcgggtagtgtgtcgtaacgggtaactctgcagcggaaccgactactttgggtgtccgtgtttccttttatctttatattggctgcttatggtgacaattaaagaattgttaccatatagctattggattggccatccggtgtgcaacagagcaattatttacctatttattggttttgtaccattaaccttgaattctgtgaccacccttaattatatcttgacccttaacacagctaaac

SEQ ID NO: 17964 - DNA, 742 bp, synthetic construct
  source 1..742: mol_type = other DNA
ttaaaacagcctgtgggttgcacccactcacagggcctactgggcgcaagcactctggtatcttggtacctttgtgcgcctgttttatacccctcccccattgtaacttagaagcagcaaaccacgatcaatagcaggcataacgctccagttatgtctcgatcaagcacttctgtctccccggactgagtatcaatagactgctcgcgcggttgaaggagaaaacgttcgttatccggctagctacttcggaaaacctagtaacaccatgaaagttgcggagagcttcgttcagcactcccccagtgtagatcaggtcgatgagtcaccgcattccccacgggtgaccgtggcggtggctgcgttggcggcctgcccatggggtaacccatggggcgctctaatacagacatggtgtgaagagtctactgagctagttagtagtcctccggcccctgaatgcggctaatcccaactgcggagcacacgcccacaagccagcgggtagtgtgtcgtaacgggtaactctgcagcggaaccgactactttgggtgtccgtgtttccttttatctttatattggctgcttatggtgacaattaaagaattgttaccatatagctattggattggccatccggtgtgcaacagagcaattatttacttgtttattggttttgtgccattaactttgaattctgtgaccacccttaattatattttgacccttaactcagctaaac

SEQ ID NO: 17965 - DNA, 758 bp, synthetic construct
  source 1..758: mol_type = other DNA
aaaaaagcaggctttaaaacagcctgtgggttgtccccacccacagggcccactgggcgctagcacactgattctgcgggatctttgtgcgcctgttttataaccctccccctaagcagtaacttagaagctttgcacaatcacgaccagtagtgggcgtggcgcgccagccacgtcttggtcaagcacttctgtatccccggactgagtatcaatagactgctcacgcggtcgaaggagaaaacgttcgttacccggctaactacttcgagaaacctagtagcaccatgaaagttgcggagtgtttcgctcagcacttcccccgtgtagatcaggccgatgagtcactgtaaaccccacaggcgactgtgacagtggctgcgttggcggcctgcccatggggtaacccatgggacgctctaatacagacatggtgtgaagagtctattgagctagttagtagtcctccggcccctgaatgcggctaatcctaactgcggagcgcgcaccctcaacccagggggcggcgcgtcgtaatgggtaactctgcagcggaaccgactactttgggtgtccgtgtttccttttactccttattggctgcttatggtgacaattgaaaagttgttaccatatagctattggattggccatccggtgtctaacagagctattgtttacctattcattggatacgtccctcttagtctcaaaaccattcaaactcttgactatatattgctccttaactgtgagaa

SEQ ID NO: 17966 - DNA, 747 bp, synthetic construct
  source 1..747: mol_type = other DNA
tttaaaacagcctgtgggttgtacccactcacagggcccactgggcgctagcactctgattccgcggaatctttgtgcgcctgttttataacccctcccccgatttgtaatttagaagtaatgcacatcactgatcaacagcaagcgtggcgcgccagccatgttcagatcaaatacttctgttttcccggactgagtatcaatagactgctcacgcggttgaaggagaaaacgttcgttacccggccaactacttcgagaaacctagtagcaccatcgaaactgcagggtgtttcgctcagcactttccccgtgtagatcaggtcgatgagtcactgcaatccccacgggcgaccgtggcagtggctgcgttggcggcctgcctatgggcttacccataggacgctctaatgtggacatggtgtcaagagtctattgagctagttggtagtcctccggcccctgaatgcggctaatcctaactgtggagcgcataccctcaatccagggggtggtgcgtcgtaacgggcaactccgcagcggaaccgactactttgggtgtccgtgtttccttttattctcatgttggctgcttatggtgacaattgagagattgttgccatatagctattggattggccatccagtgtctaacagagcagttgtatactcgtttgttggattcgtcccactgtcatatacatccattaacaccttatactatattataaaactgaacacaagaaa

SEQ ID NO: 17967 - DNA, 747 bp, synthetic construct
  source 1..747: mol_type = other DNA
tttaaaacagcctgtgggttgtacccactcacagggcccactgggcgctagcactctgattccgcggaatctttgtgcgcctgttttataacccctcccccgatttgtaatttagaagtaatgcacatcactgatcaacagcaagcgtggcgcgccagccatgttcagatcaaatacttctgttttcccggactgagtatcaatagactgctcacgcggttgaaggagaaaacgttcgttacccggccaactacttcgagaaacctagtagcaccatcgaaactgcagggtgtttcgctcagcactttccccgtgtagatcaggtcgatgagtcactgcaatccccacgggcgaccgtggcagtggctgcgttggcggcctgcctatgggcttacccataggacgctctaatgtggacatggtgtcaagagtctattgagctagttggtagtcctccggcccctgaatgcggctaatcctaactgtggagcgcataccctcaatccagggggtggtgcgtcgtaacgggcaactccgcagcggaaccgactactttgggtgtccgtgtttccttttattctcatattggctgcttatggtgacaattgaaagattgttaccatatagctattggattggccatccagtgactaacagagcagttgtatacttatttgttggattcgttccactgtcttatacatccatcaacaccttatactatattataaaattgaacacaagaaa

SEQ ID NO: 17968 - DNA, 747 bp, synthetic construct
  source 1..747: mol_type = other DNA
tttaaaacagcctgtgggttgcacccactcacagggcccaccgggcgctagcactctggttctgtggaacctttgtgcgcctgttttataacccctccctcaattcgtaatttagaagtaatgcacatcattgatcaacagcaagcgtggcgcgccagccatgttcagatcaaatacttctgtttccccggactgagtatcaatagactgctcacgcggttgaaggagaaaacgttcgttacccggctaactacttcgagaaacctagtaacaccatcgaaactacagagtgtttcgctcagcactttccccgtgtagatcaggtcgatgagtcactgcaatccccacgggcgaccgtggcagtggctgcgttggcggcctgcctatgggcttgcccataggacgctctaatgtggacatggtgtgaagagtctattgagctagttagtagtcctccggcccctgaatgcggctaatcctaactgtggagcgcatgccctcaatccagggggtggtgcgtcgtaacgggcaactctgcagcggaaccgactactttgggtgtccgtgtttccttttattcttatattggctgcttatggtgacaattaagagattgttaccatatagctattggattggccatccggtgtctaacagagcaatcgtatacttgtttgttggattcattccgctatcacatacatccgttaacactttatactatattataagattgaatactagaaa

SEQ ID NO: 17969 - DNA, 747 bp, synthetic construct
  source 1..747: mol_type = other DNA
tttaaaacaggctgtgggttgcacccactcacagggcccaccgggcgctagcactctggttctgtggaacctttgtgcgcctgttttataacccctccctcaattcgtaatttagaagtaatgcacatcattgatcaacagcaagcgtggcgcgccagccatgttcagatcaaatacttctgtttccccggactgagtatcaatagactgctcacgcggttgaaggagaaaacgttcgttacccggctaactacttcgagaaacctagtaacaccatcgaaactacagagtgtttcgctcagcactttccccgtgtagatcaggtcgatgagtcactgcaatccccacgggcgaccgtggcagtggctgcgttggcggcctgcctatgggcttgcccataggacgctctaatgtggacatggtgtgaagagtctattgagctagttagtagtcctccggcccctgaatgcggctaatcctaactgtggagcgcatgccctcaatccagggggtggtgcgtcgtaacgggcaactctgcagcggaaccgactactttgggtgtccgtgtttccttttattcttatattggctgcttatggtgacaattaagagattgttaccatatagctattggattggccatccggtgtctaacagagcaatcgtatacttgtttgttggattcattccgctatcacatacatccgttaacactttatactatattataagattgaatactagaaa

SEQ ID NO: 17970 - DNA, 746 bp, synthetic construct; identical to SEQ ID NO: 1118
  source 1..746: mol_type = other DNA

SEQ ID NO: 17971 - DNA, 746 bp, synthetic construct
  source 1..746: mol_type = other DNA
tttaaaacagcctgtgggttgtacccacctacagggcccactgggcgctagcactctgattccacggaatccttgtgcgcctgttttatatcccctccccaagttgtaacttagaagcattgcactacaatgatcagtagcaggcgtggcgctccagccatgtctcgatcaagcacttctgtttccccggaccgagtatcaatagactgctaacgcggttgaaggagaaaacgttcgttatccggctaactacttcgagaaacctagtagcaccatcgaagctgcggggcgtttcgctcagcacttcccccgtgtagatcaggtcgatgagtcactgcaatcctcacgggcgaccgtggcagtggctgcgttggcggcctgcctatggggcaacccataggacgcttcaaagtggacatggtgtgaagagtctattgagctagttagtagtcctccggcccctgaatgcggctaatcctaactgcggagcacataccttcaatccaggaggtagtgtgtcgtaacgggcaactctgcagcggaaccgactactttgggtgtccgtgtttccttttattctcttattggctgcttatggtgacaattgaagaattgttaccatatagctattggattggccatccagtgtctaacagagcaattgtgtacttatttgttggttttgttcctttgtctcacacgtcccttagtactttgtattacattataaaactgaattcggagag

SEQ ID NO: 17972 - DNA, 747 bp, synthetic construct
  source 1..747: mol_type = other DNA
ttaaaacagcctgtgggttgcacccactcacagggcccacgtggcgctagcactctgattccacggaacctttgtgcgcctgttttacgccccctccccaatttgcaacttagaagcaatacacaacactgatcaacagcaggcatggcacaccagctatgtcttgatcaagcacttctgtttccccggaccgagtatcaatagactgttcacgcggttgaaggagaaagcgtccgttatccggctaactacttcgagaaacctagtagcaccattgaagctgcagagtgtttcgctcggcacttcccccgtgtagatcaggtcgatgagtcactgcaatccccacgggcgaccgtggcagtggctgcgctggcggcctgcctatggggcaacccataggacgctctaatgtggacatggtgcgaagagtctattgagctagttagtagtcctccggcccctgaatgcggctaatcctaactgcggagcacatgccttcaatccagagggtggtgtgtcgtaatgggcaactctgcagcggaaccgactactttgggtgtccgtgtttccttttattcttacattggctgcttatggtgacaattgcagaattgttaccatatagctattggattggccatccggtgtgcaatagagctattatatacctatttgttggctttgtaccactaaccttaaaatctataaccaccctcgactttatattaaccctcaatacaatcaaac

SEQ ID NO: 17973 - DNA, 745 bp, synthetic construct
  source 1..745: mol_type = other DNA
ttctcttacagcctgtgggttgcacccacccacagggcccactgggcgctagcactctggtaccacggtacccttgtgcgcctgttttatcaccccaacccaacctgaaacttagaagtaatgcacaatcgaccaatagtaggtgcggcgcaccagccgcatcctggtcaagcacttctgtttccccgggttgagtatcaataagctgtccacacggctgaaagagaaaacacccgttatccggccaactacttcgagaaacctagtaccactatgaacgttgcaaggcgtttcgctcagcacttcccccgtgtagatcaggtcgatgagtcaccgcattccccacgggcgaccgtggcggtggctgcgttggcggcctgcctatggattaacccataggacgccttaatactgacatggtgcgaagagtctattgagctagttggtagtcctccggcccctgaatgcggctaatcctaactgcggagcacatactcacaacccagtgagcggtgtgtcgtaatgggtaactctgcagcggaaccgactactttgggtgtccgtgtttccttttattcttatattggctgcttatggtgacaatcatagaattgttaccatatagctattggattggccatccgatctctaacagagctattatttacctgtttgttggatttactccgttgacatacaaatccctaaacactttgtgctttattttgaacttgaacgcacgaaa

SEQ ID NO: 17974 - DNA, 742 bp, synthetic construct
  source 1..742: mol_type = other DNA
ttaaaacagcctgtgggttgcacccactcacagggcccactgggcgcgagcactctggtgcctcggtacctttgtgcgcctgttttatatcccccccccagtgaaacttagaagcagcaaaccacgatcaatagcaggcataacgctccagttatgtcttgatcaagcacttctgtttccccggaccgagtatcaatagactgctcgcgcggttgaaggagaaagcgttcgttatccggctagctacttcgggaaacctagtaacaccatgaaagttgcggagagcttcgttcagcactcccccagtgtagatcaggtcgatgagtcaccgcattccccacgggcgaccgtggcggtggctgcgttcgcggcctgcccatggggtaacccatggggcgctctaatacggacatggtgtgaagagtctactgagctagttagtagtcctccggcccctgaatgcggctaatcccaactgcggagcacacgcccacaagccagcgggtagtgtgtcgtaacgggcaactctgcagcggaaccgactactttgggtgtccgtgtttccttttatctttatattggctgcttatggtgacaattgaagaattgttaccatatagctattggattggccatccggtgtgcaacagagcaattgtttacctatttattggttttgtaccattaaccttgaagtctgtgaccacccttaattatatcttgacccttaacacagctaaac

SEQ ID NO: 17975 - DNA, 743 bp, synthetic construct
  source 1..743: mol_type = other DNA
ttaaaacagcctgtgggttgcacccactcacagggcccactgggcgcgagcactctggtacctcggtacctttgtgcgcctgttttataaccccctccccaatgaaacttagaagcagtaaaccacgatcaatagcaggcataacgctccagttatgtcttgatcaagcacttctgtttccccggactgagtatcaatagactgctcgcgcggttgaaagagaaaacgttcgttatccggctaactacttcgggaaacctagtaacgccatgaaagttgcggagagcttcgttcagcactcccccagtgtagatcaggtcgatgagtcaccgcattccccacgggcgaccgtggcggtggctgcgttggcggcctgcccatggggtaacccatggggcgctctaatacggacatggtgtgaagagtctactgagctagttagtagtcctccggcccctgaatgcggctaatcccaactgcggagcacacgcccacgagccagcgggtagtgtgtcgtaatgggtaactctgcagcggaaccgactactttgggtgtccgtgtttccttttatcttttcattggctgcttatggtgacaattaaagagttgttaccgtatagctattggattggccatccggtgtgcaacagagcaattgtttacctatttattggttttgtaccattaaccttgagtactgtgaccaccctcaattatattttgacccttaacgcagccaaac

SEQ ID NO: 17976 - DNA, 732 bp, synthetic construct
  source 1..732: mol_type = other DNA
ctgtgggttgtacccactcacagggcctactgggcgccagcactctggtactgtggtacctttgtgcgcctgttttatcaccccaccccatctgaaacgtagaagcaacgcgcaactgaccaatagtgggtgtggcgcaccagccacatcttggtcaagcacttctgtttccccgggtttagtatcaataagctgctcgcgcggctgaaggagaaaacacccgttatccggccaactacttcgagaaacctagtaccgctatgaacgttgcaaggcgtttcgctcagcacttcccccgtgtagatcaggccgatgagtcaccgcatccctcacgggcgaccgtggcggtggctgcgttggcggcctgcctatgggcttgcccataggacgccttaatactgacatggtgcgaagagtctattgagctagttggtagtcctccggcccctgaatgcggctaatcctaactgcggagcacatactcacaaaccagtgagcggtgtgtcgtaacgggcaactctgcagcggaaccgactactttgggtgtccgtgtttccttttactcttatactggctgcttatggtgacaattaaagaattgttaccatatagctattggattggccatccggtgactaacagaggcattatatacttgttcgttggattcacctcgttgtcatacaaatcccttaacactttgtgctttatcttgagtttgaattctaaaag

SEQ ID NO: 17977 - DNA, 748 bp, synthetic construct
  source 1..748: mol_type = other DNA
tttaaaaacaagctgtgggttgtacccactcacagggcccactgggcgctagcactctgattctccggaatctttgtgcgcctgttttataacccctcccccaattcgtaatttagaagtaatgcacaccattgatcaacagcaagcgtggcgcgccagccatgtttagatcaagcacttctgtttccccggactgagtatcaatagactgctcacgcggttgaaggagaaaacgttcgttacccggctaactacttcgagaaacctagtagcaccatcgaaactgcagagtgtttcgctcagcactttccccgtgtagatcaggtcgatgagtcactgcaatccccacgggcgaccgtggcagtggctgcgttggcggcctgcctatgggcttacccataggacgctctaatgtggacatggtgtgaagagtctattgagctagttagtagtcctccggcccctgaatgcggctaatcctaactgcggagcgcataccctcaacccagggggtggtgcgtcgtaacgggcaactctgcagcggaaccgactactttgggtgcccgtgtttccttttattcttatattggctgcttatggtgacaattgagagattgttaccatatagctattggattggccatccagtgtctaacagagcaattgtatacttatttgttggattcgttccactatcatatacatccactaacaccttatactatattataagattgaacacaaggaa

SEQ ID NO: 17978 - DNA, 750 bp, synthetic construct
  source 1..750: mol_type = other DNA
ggctttaaaacagcctgtgggttgttcccacccacagggcccactgggcgctagcacactgattttgcgggatctttgtgcgcctgttttataacccctccccctaagcagtaacttagaagctccacactatcacgaccaatagcaggcgtggtgcaccagtcacgtcttggtcaagcacttctgtttccccggactgagtatcaatagactgctcacgcggttgaaggagaaaacgttcgttatccggctaactacttcgagaaacttagtagcaccgtgaaagttgcggagtgtttcgctcagcacttcccccgtgtagatcaggtcgatgagtcactgtgaaccccacgggtgaccgtgacagtggctgcgttggcggcctgcccatggggtaacccatgggacgctctaatacagacacggtgtgaagagtctattgagctagttagtagtcctccggcccctgaatgcggctaatcctaactgcggagcgcgcaccctcaatccagggggcagcgcgtcgtaatgggtaactctgcagcggaaccgactactttgggtgtccgtgtttccttttattccttattggctgcttatggtgacaattgaaaagttgttaccatatagctattggattggccatccggtaaccaacagagctattgtttacctgtttgttggatacgtccctctcaatctcaaggccattcaaactcttgattatatactacttctcaactgcaagaa

SEQ ID NO: 17979 - DNA, 730 bp, synthetic construct
  source 1..730: mol_type = other DNA
gttgtacccactcacagggcccactgggtgctagcactctgattctgcggaacctttgtgcgcctgttttaaaacccccccctcaattcgtgatttagaagtaatgcacaccattgatcaacagcaagcgtggcgcaccagccatgttcagatcaaacacttctgtttccccgggctgagtatcaatagactgctcgcgcggttgaaggagaaaacgctcgttacccggctaactacttcgagaaacctagtagcaccattgaaactacagagtgtttcgctcagcactttccccgtgtagatcaggtcgatgagtcactgcaatccccacgggcgaccgtggcagtggctgcgttggcggcctgcctatgggcttgcccataggacgctctaaagtggacatggtgtgaagagtctattgagctagttagtagtcctccggcccctgaatgcggctaatcctaactgcggagcgcatgccctcaatccagggggtggtgcgtcgtaacgggcaactctgcagcggaaccgactactttgggtgaccgtgtttccttttattcttatattggctgcttatggtgacaattgagagattgttaccatatagctattggattggccatccagtgtctaacagagcaatcgtatacttatttgttggattcatcccactatcatacatatccattaacaccttatactatattataagattgaacacaagaaa

SEQ ID NO: 17980 - DNA, 744 bp, synthetic construct
  source 1..744: mol_type = other DNA
ttaaaacagcctgtgggttgcacccacccacagggcctactgggcgctagcactctggcactgaggtacctttgtgcgcctgttttgacttcccttccccgaagtaacttagaagctgtaaatcaacgatcaatagtaggtgtgacacaccagtcatatcttgatcaagcacttctgtttccccggactgagtatcaataggctgctcgcgcggctgaaggagaaaacgttcgttacccgaccaactacttcgagaagcttagtaccaccatgaacgaggcagagtgtttcgttcagcacaaccccagtgtagatcaggctgatgagccactgcaacccccatgggcgaccatggcagtggctgcgttggcggcctgcccatggagaaatccatgggacgctctaattctgacatggtgtgaagagcctattgagctagctggtagtcctccggcccctgaatgcggctaatcctaactgcggagcacatgctcacaaaccagtgggtggtgtgtcgtaacgggcaactctgcagcggaaccgactactttgggtgtccgtgtttccttttattcttatattggctgcttatggtgacaatcaaagaattgttaccatatagctattggattggccatccggtgtgcaacagagcaattgtttacctatttattggttttgtaccattatcactgaagtctgtgatcactctcaaattcattttgaccctcaacacaaccaaat

SEQ ID NO: 17981 - DNA, 745 bp, synthetic construct
  source 1..745: mol_type = other DNA
ttaaaacagcctgtgggttgttcccactcacagggcccactgggcgctagcacactgattctgcgggatctttgtgcgcctgttttataacccttcccctaagcagcaacttagaagctttgtacaatcacgaccaatagtgggcgtgacgcgccagtcacgtcttggtcaagcacttctgtatccccggactgagtaccaatagactgctcacgcggttgaaggggaaaacgttcgttacccggctaactacttcgagaaacctagtagtaccatgaaagttgcggagtgtttcgctcagcacttcccccgtgtagatcaggtcgatgagtcactgtaaaccccacgggcgaccgtgacagtggctgcgttggcggcctgcccatggggtaacccatgggacgctctaatacagacatggtgcgaagagtctattgagctagttaacagtcctccggcccctgaatgcggctaatcctaactgcggagcgcgcaccctcaacccagggggcggcgtgtcgtaatgggtaactctgcagcgggaccgactactttgggtgtccgtgtttccttttattctttattggctgcttatggtgacaattgaaaagttgttaccatatagctattggattggccatccggtgtctaacagagctattgtctacctattcattggatacgtccctcttaatctcaaggccattcaaactcttgattatatattgctccttaactgtaggaa

SEQ ID NO: 17982 - DNA, 748 bp, synthetic construct
  source 1..748: mol_type = other DNA
tttaaaacaagcctgtgggttgtacccactcacagggcccactgggcgctagcactctgattccgcggaatctttgtgcgcctgttttataacccctcccccgatttgtaatttagaagtaatgcacaccactgatcaacagcaagcgtggcgcgccagccacgttcagatcaaatacttctgttttcccggactgagtatcaatagactgctcacgcggttgaaggagaaaacgttcgttacccggctaactacttcgagaaacctagtagcaccatcgaaactgcagagtgtttcgctcagcactttccccgtgtagatcaggtcgatgagtcactgcaatccccacgggcgaccgtggcagtggctgcgttggcggcctgcctatgggcttgcccataggacgctctaatgtggacatggtgtgaagagtctattgagctagttggtagtcctccggcccctgaatgcggctaatcctaactgcggagcgcataccctcaatccagggggtggtgcgtcgtaacgggcaactctgcagcggaaccgactactttgggtgtccgtgtttccctttattcttgtattggctgcttatggtgacaattgagagattgttgccatatagctattggattggccatccagtatctaacagagcaattgtatacttgtttgttggattcgttccactgtcatatacatccactaacaccttatactatattataaaattgaacacaagaaa

SEQ ID NO: 17983 - DNA, 748 bp, synthetic construct
  source 1..748: mol_type = other DNA
ttcaaacagcctgtgggttgcacccactcacagggcccacgtggcgctagcactctggttctacggaacctttgtgcgcctgttttacgccccttccccaatttgcaacttagaagcaatacacaacactgatcaacagcgggcatggcgcaccagctatgtcttgatcaagcacttctgtttccccggaccgactatcaatagactgctcacgcggttgaaggagaaagcgtccgttatccggctaactacttcgaaaaacctagtaacaccattgaagctgcagagtgtttcgctcggcacttcccccgtgtagatcaggtcgatgagtcactgcaatccccacgggtgaccgtggcagtggctgcgttggcggcctgcctatggggcaacccataggacgctctaatgcggacatggtgcgaagagtctattgagctagttagtagtcctccggcccctgaatgcggctaatcctaactgcggagcacatgccttcaacccagagggtagtgtgtcgtaatgggcaactctgcagcggaaccgactactttgggtgtccgtgtttccttttattcttatattggctgcttatggtgacaattacagaattgttaccatatagctattggattggccatccggtgtgcaatagagctattatatacctttttttttggctttgtaccactaaccttaaaatctataatcaccctcgactttatattaaccctcaacacagtcaagc

SEQ ID NO: 17984 - DNA, 748 bp, synthetic construct
  source 1..748: mol_type = other DNA
tttaaaaccagcctgtgggttgcacccactcacagggcccactgggcgctagcactctgattctgcggaatctttgtgcgcctgttttataacccctcccccgattcgtaacttagaagtaatacacactattgatcaacagcaagcgtggcgcgccagccatgtttagatcaagcacttctgtttccccggactgagtatcaatagactgctcacgcggttgaaggagaaaacgttcgttacccggctaactacttcgagaaacctagtagcaccatcgaaactgcagagtgtttcgttcagcactttccccgtgtagatcaggtcgatgagtcactgcaacccccacgggcgaccgtggcagtggctgcgttggcggcctgcctatgggcttgcccataggacgctctaatgtggacatggtgtgaagagtctattgagctagttagtagtcctccggcccctgaatgcggctaatcctaactgcggagcgcataccctcaatccagggggtggtgcgtcgtaacgggtaactctgcagcggaaccgactactttgggtgcccgtgtttccttttattcctatattggctgcttatggtgacaattgagagattgttaccatatagctattggattggccatccagtgtctaacagagcaattgtatacttatttgttggattcgttccactatcatatacatccattaataccttacactacattataagattgaactcaaggaa

SEQ ID NO: 17985 - DNA, 747 bp, synthetic construct
  source 1..747: mol_type = other DNA
ttcaaacagcctgtgggttgcacccactcacagggcccacgtggcgctagcactctggttctacggaacctttgtgcgcctgttttacgccccttccccaatttgcaacttagaagcaatacacaacactgatcaacagcaggcatggcgcaccagctatgtcttgatcaagcacttctgtttccccggaccgagtatcaatagactgttcacgcggttgaaggagaaagcgtccgttatccggctaactacttcgagaaacctagtaacaccattgaagctgcagagtgtttcgctcggcacttcccccgtgtagatcaggtcgatgagtcactgcaatccccacgggtgaccgtggcagtggctgcgctggcggcctgcctatggggcaacccataggacgctctaatgcggacatggtgcgaagagtctattgagctagttagtggtcctccggcccctgaatgcggctaatcctaactgcggagcacatgccttcaatccagagggtagtgtgtcgtaatgggcaactctgcagcggaaccgactactttgggtgtccgtgtttccttttattcttatattggctgcttatggtgacaattacagaattgttaccatatagctattggattggccatccggtgtgcaatagagctattatatacctatttgttggctttgtaccactaaccttaaaatctataaccaccctcgactttatattaaccctcaacacagtcaagc

SEQ ID NO: 17986 - DNA, 743 bp, synthetic construct
  source 1..743: mol_type = other DNA
ttaaaacagctgtgggttgcacccacccacagggcccactgggcgctagcactctggtactgaggtacctttgtgcgcctgtttttactccccttccccccgaagtaacttagaagctgtaaatcagatcaatagcaggtgtggcacaccagtcataccttgatcaagcacttctgtttccccggactgagtatcaataggctgctcgcgcggctgaaggagaaaacgttcgttacccgaccaactacttcgagaagcttagtaccaccatgaacgaggcagggtgtttcgctcagcacaaccccagtgtagatcaggctgatgagtcactgcaacccccatgggcgaccatggcagtggctgcgttggcggcctgcccatggagaaatccatgggacgctctaattctgacatggtgtgaagagcctattgagctagctggtagtcctccggcccctgaatgcggctaatcctaactgcggagcacatgctcacaaaccagtgggtggtgtgtcgtaacgggcaactctgcagcggaaccgactactttgggtgtccgtgtttccttttattcctatattggctgcttatggtgacaatcaaaaagttgttaccatatagctattggattggccatccggtgtgcaacagggcaattgtttacctatttattggttttgtaccattatcactgaagtctgtgatcactctcaaattcattttgaccctcaacacaatcaaac

SEQ ID NO: 17987 - DNA, 743 bp, synthetic construct
  source 1..743: mol_type = other DNA
ttaaaacagctgtgggttgcacccacccaccgggccactgggccgctagcactctggtactgaggtacctttgtgcgcctgtttttactccccttccccccgaagtaacttagaagctgtaaatcagatcaatagcaggtgtggcacaccagtcatacctcgatcaagcacttctgtttccccggactgagtatcaataggctgctcgcgcggctgaaggagaaaacgttcgttacccgaccaactacttcgagaagcttagtaccaccatgaacgaggcagggtgtttcgctcagcacaaccccagtgtagatcaggctgatgagtcactgcaacccccatgggcgaccatggcagtggctgcgttggcggcctgcccatggagaaatccatgggacgctctaattctgacatggtgtgaagagcctattgagctagctggtagtcctccggcccctgaatgcggctaatcccaactgcggagcacatgctcacaaaccagtgggtggtgtgtcgtaacgggcaactctgcagcggaaccgactactttgggtgtccgtgtttccttttattcttatattggctgcttatggtgacaatcaaagagttgttaccatatagctattggattggccatccggtgtgcaacagggcaattgtttacctatttattggttttgtaccattatcactgaagtctgtgatcactctcaaattcattttgaccctcaacataatcagac

SEQ ID NO: 17988 - DNA, 745 bp, synthetic construct
  source 1..745: mol_type = other DNA
ttaaaacagcctgtgggttgttcccacccacagggcccactgggcgctagcacactgattctgcgggatctttgtgcgcctgttttataacccctcccctaagcagtaacttagaagcctcacactatcacgaccaatagtaggcgtggcgcaccagtcacgtcttggtcaagcacttctgtttccccggactgagtatcaatagactgctcacgcggttgaaggagaaaacgttcgtcatccggctaactacttcgagaaacctagtaacaccgtgaaagttgccgagtgtttcgctcagcacttcccccgtgtagatcaggtcgatgagtcactgtgaaccccacgggtgaccgtgacagtggctgcgttggcggcctgcccatggggcaacccatgggacgctctaatacagacacggtgtgaagagtctattgagctagttggtagtcctccggcccctgaatgcggctaatcctaactgcggagcgcgtaccctcaatccagggggcagcgcgtcgtaatgggtaactctgcagcggaaccgactactttgggtgtccgtgtttccttttattccttattggctgcttatggtgacaattgaaaagttgttaccatatagctattggattggccatccggtaaccaacagagctattgtttacctgtttattggatacgtccctctcaatctcaaggccattcaaactcttgattatatactacttctcaactgtaagag

SEQ ID NO: 17989 - DNA, 734 bp, synthetic construct
  source 1..734: mol_type = other DNA
cctgtgggttgcacccacccacagggcccactgggcgctagcactctggtaccacggtacccttgtgcgcctgttttatcgccctaccccaacatgaaacttagaagcaatacacaatcgaccaatagtaggtgtggcgcaccagccacatctaggtcaagcacttctgtttccccgggttgagtatcaataagctgtccacacggctgaaggagaaaacgcccgttatccggccaactacttcgagaaacctagtatcactatgaacgttgcaaggcgtttcgctcagcacttcccccgtgtagatcaggtcgatgagtcaccgcattccccacgggcgaccgtggcggtggctgcgttggcggcctgcctatgggttaacccataggacgccttaatactgacatggtgcgaagagtctattgagctagttggtagtcctccggcccctgaatgcggctaatcctaactgcggagcacatactcacaacccagtgagcggtgtgtcgtaacgggcaactctgcagcggaaccgactactttgggtgtccgtgtttccttttattcttatattggctgcttatggtgacaatcatagaattgttaccatatagctattggattggccatccgacttctaacagagctattatttacttgtttgttggattcactccgttgacatataaatccctaaacactttgtgctttattttgaacttgaacgcacgaaa

SEQ ID NO: 17990 - DNA, 747 bp, synthetic construct
  source 1..747: mol_type = other DNA
tttaaaacagcctgtgggttgtacccactcacagggcctactgggcgctagcactctgattctgcggaatctttgtgcgcctgttttataacccctcccccaattcgtaatttagaagtaatgcacaccactgatcaacagcaagcgtggcgcgccagccatgttcagatcaaatacttctgttttcccggactgagtatcaatagactgctcacgcggttgaaggagaaaacgttcgttacccggctaactacttcgagaaacctagtagcaccatcgaaactgcagagtgtttcgttcagcacttcccccgtgtagatcaggtcgatgagtcactgcaatccccacgggcgaccgtggcagtggctgcgttggcggcctgcctatgggcttgcccataggacgctctaatgtggacatggtgcgaagagtctattgagctagttagtagtcctccggcccctgaatgcggctaatcctaactgcggagcgcataccctcaatccagggggtggtgcgtcgtaacgggcaactctgcagcggaaccgactactttgggtgtccgtgtttccttttattcttatattggctgcttatggtgacaattgagggattgttaccatatagctattggattggccatccagtatctaacagagcaattgtatacttatttgttggatttgttccactatcatatacatccactaacaccttatactatattataaaattgaacacaagaaa

SEQ ID NO: 17991 - DNA, 748 bp, synthetic construct
  source 1..748: mol_type = other DNA
tttaaaacagcctgtgggttgcacccactcacagggcccacgtggcgctagcactctggttctacggaacctttgtgcgcctgttttacgccccctccccaacttgcaacttagaagcaacacacaacactgatcaacagcaggcatggcgcaccagctatgtcttgatcaagcacttctgtttccccgggccgagtatcaacagactgttcacacggttgaaggagaaagcgcccgttatccggctaactacttcgagaagcctagtagcaccattgaagctgcagagtgtttcgctcagcactttccccgtgtagatcaggtcgatgagtcactgcaatccccacgggcgaccgtggcagtggctgcgctggcggcctgcctatggggcaacccataggacgctctaatgtggacatggtgcgaagagtctattgagctagttagtagtcctccggcccctgaatgcggctaatcctaactgtggagcacatgccttcaatccagagggtagtgtgtcgtaatgggcaactctgcagcggaaccgactactttgggtgtccgtgtttccttttattcctacattggctgcttatggtgacaattacagaattgttaccatatagctattggattggccatccggtgtgcaatagagctattatatacctgtttgttggctttgtaccactaacctcaaaatctataatcaccctcgattttatattaacccttaatacaatcaaac

SEQ ID NO: 17992 - DNA, 746 bp, synthetic construct
  source 1..746: mol_type = other DNA
ttaaaacagcctgtgggttgttcccacccacagggcccactgggcgctagcacactgattctgcgggatctttgtgcgcctgttttataacccttcccctaagcagcaacttagaagctttgtacaatcacgaccaatagtgggcgtggcgcgccagtcacgtcttggtcaagcacttctgtatccccggactgagtatcaatagactgctcacgcggttgaaggagaaaacgttcgttacccggctaactacttcgagaaacctagtagcaccatgaaagttgcggagtgtttcgctcagcacttcccccgtgtagatcaggtcgatgagtcactgtaaaccccacgggcgaccgtgacagtggctgcgttggcggcctgcccatggggtaacccatgggacgctctaatacagacatggtgcgaagagtctattgagctagttagcagtcctccggcccctgaatgcggctaatcctaactgcggagcgcgcaccctcaacccagggggcggcgtgtcgtaatgggtaactctgcagcggaaccgactactttgggtgtccgtgtttccttttattctttattggctgcttatggtgacaattgaaaagttgttaccatatagctattggattggccatccggtgtctaacagagctattgtttacctatttattggatacgtccctcttaatctcaaagccattcaaactcttgattatatattgctccttaacctgtaggaa

SEQ ID NO: 17993 - DNA, 748 bp, synthetic construct
  source 1..748: mol_type = other DNA
tttcaaacgcctgtgggttgcacccactcacagggcccacgtggcgctagcactttggttttacggaacctttgtgcgcctgtttttacgccccttccccaatttgcaacttagaagcaatgcacaacactgatcaacaggcggcatggcgcaccagctatgtcttgatcaagcacttctgtttccccggaccgactatcaatagactgctcacgcggttgaaggagaaagcgtccgttatccggctaactacttcgaaaaacctagtaacaccattgaagctgcagagtgtttcgctcggcacttcccccgtgtagatcaggtcgatgagtcactgcaatccccacgggtgaccgtggcagtggctgcgttggcggcctgcctatggggcaacccataggacgctctaatgcggacatggtgcgaagagtctattgagctagttagtagtcctccggcccctgaatgcggctaatcctaactgcggagcacatgcctcaacccagagggtagtgtgtcgtaatgggcaactctgcagcggaaccgactactttgggtgtccgtgtttccttttattcttatattggctgcttatggtgacaattacagaattgttaccatatagctattggattggccatccggtgtgcaatagagctattatatacctacttttttggctttgtaccactaaccttaaaatctataatcaccctcgactttatattaaccctcaacacagtcaagc

SEQ ID NO: 17994 - DNA, 748 bp, synthetic construct
  source 1..748: mol_type = other DNA
ttaaaacagcctgtgggttgcacccacccacagggcccactgggcgctagcacactgattctacggaacctttgtgcgcctgttttataaccctttcccctaaaactgtaacttagaagaatattgcactactgatcaatagcaggcatggcacgccagtcatgtatagatcaagcacttctgtctccccggactgagtatcactagactgctagcgcggttgaaggagaaaacgtccgttacccggctaactacttcgagaaacttagtagcaccattgaagctgcggagtgtttcgttcagcactcccccagtgtagatcaggtcgatgagtcactgcactccccacgggcgaccgtggcagtgactgcgttggcggcctgcctatggggcaacccataggacgctctaaagtggacatggtgtgaagagtctattgagctagttagtagtcctccggcccctgaatgcggctaatcccaactgcggagcacatgccctcaatccagagggtggtgtgtcgtaacgggcaactctgcagcggaaccgactactttgggtgtccgtgtttccttttattcttatattggctgcttatggtgacaattgagagattgttaccatatagctattggattggccatccagtgacaaacagagctttgatatacttgtttgtgggttttgttccactcaccagtcgtacagttcatactctaaagtacattctgattctgaacaatagaaa

SEQ ID NO: 17995 - DNA, 747 bp, synthetic construct
  source 1..747: mol_type = other DNA
tttaaaacagcctgtgggttgctcccacccacagggcccactgggcgctagcacactgattttacggaatctttgtgcgcctgttttatatcccctcccccaaacagtaatttagaagtttaatgcatttatggccagtagcgggcatgacgcaccagtcatgtcttggtcaagcacttctgttttcccggactgagtatcaataaactgctcacgcggttgaaggagaaaacgttcgttacccggctaactacttcgagaaacccagtaacaccatgaaagttgcggagtgtttcgctcagcacttcccccgtgtagatcaggtcgatgagtcactgtaaaccccacgggcgaccgtgacagtggctgcgttggcggcctgcccatgggacaacccatgggacgctctaatacagacatggtgtgaagagtctattgagctagttagtagtcctccggcccctgaatgcggctaatcctaactgcggagcacacaccctcaatccagggggcagtgtgtcgtaacgggcaactctgcagcggaaccgactactttgggtgtccgtgtttccttttattcttattgtggctgcttatggtgacaattaaagaattgttaccatatagctattggattggccatccggtgtctaacagagcaattgtgtatttatttgctggatttgttccattatcatacacatcttttaatactttatactttattataaaattgaacacaagaaa

SEQ ID NO: 17996 - DNA, 747 bp, synthetic construct
  source 1..747: mol_type = other DNA
tttaaaacagcctgtgggttgtacccactcacagggcccactgggcgctagcactctgattctgcggaatctttgtgcgcctgttttataacccctcccccaattcgtaatttagaagtaatgcacaccattgatcaacagcaagcgtggcgcgccagccatgtttagatcaagcacttctgttttcccggactgagtatcaatagactgctcacgcggttgaaggagaaaacgttcgttacccggctaactacttcgagaaacctagtagcaccatcgaaactgcagagtgtttcgctcagcactttccccgtgtagatcaggtcgatgagtcactgcaatccccacgggcgaccgtggcagtggctgcgttggcggcctgcctatgggcttacccataggacgctctaatgtggacatggtgtgaagagtctattgagctagttagtagtcctccggcccctgaatgcggctaatcctaactgcggagcgcataccctcaacccagggggcggtgcgtcgtaacgggcaactctgcagcggaaccgactactttgggtgtccgtgtttccttttattcttatattggctgcttatggtgacaattgagagattgttaccatatagctattggattggccatccagtgtctaacagagcaattgtatacttatttgttggattcgttccactatcatatatatccactaacaccttatactatattataggattgaacacaagaaa

SEQ ID NO: 17997 - DNA, 747 bp, synthetic construct
  source 1..747: mol_type = other DNA
ttaaaacagcctgtgggttgtacccagccacagggcccactgggcgctagcacactgattctatggaatctttgtgcgcctgttttataaccccttccccaagactgtaacttagaagaatatcacactaccgatcaatagcaggcatggcgcgccagtcatgtcgagatcaagcacttctgtctccccggattgagtatcaatagactgctagcgcggttgaaggagaaaacgtccgttacccggctaactacttcgagaaacttagtagcaccattgaagctgcggagtgtttcgctcagcactcccccagtgtagatcaggtcgatgagtcactgcactccccacgggcgaccgtggcagtgactgcgttggcggcctgcctatggggcaacccataggacgctctaaagtggaaatggtgtgaagagtctattgagctagttagtagtcctccggcccctgaatgcggctaatcctaactgcggagcacatgccctcaatccagggggtggtgtgtcgtaacgggcaactctgcagcggaaccgactactttgggtgtccgtgtttccttttattcttatattggctgcttatggtgacaattgagagattgttaccatatagctattggattggccatccagtgacaaacagagcttcgatatacttgttcgtgggtttcgttccactcaccagtcgtacagttcatactctaaagtacattctgattctgaacaatagaaa

SEQ ID NO: 17998 - DNA, 747 bp, synthetic construct
  source 1..747: mol_type = other DNA
ttaaaacagcctgtgggttgcacccactcacaggacccacgtggtgctagcactctggttctacggaacccttgtgcgcctgttttacgccccctccccaatttgcaacttagaagcaattcacaacactgatcaatagcaggcatggcgcaccagctatgtcttgatcaagcacttctgtttccccggaccgagtatcaatagactgttcacgcggttgaaggagaaagcgtccgttatccggctaactacttcgagaaacccagtagcgccattgaaactgcagagtgtttcgctccacacttcccccgtgtagatcaggtcgatgagtcactgcaatccccacgggcgaccgtggcagtggctgcgctggcggcctgcctatggggcaacccataggacgctctaatgtggacatggtgcgaagagtctattgagctagttagtagtcctccggcccctgaatgcggctaatcctaactgcggagcacatgccttcaatccagagggtagtgtgtcgtaatgggcaactctgcagcggaaccgactactttgggtgtccgtgtttccttttattctcacattggctgcttatggtgacaattacagaattgttaccatatagctattggattggccatccggtgtgcaatagagctattatatacctatttgttggttttgtaccactaaccttaaaatctgcaaccactctcgactatatattaaccctcaatacaatcaaac

SEQ ID NO: 17999 - DNA, 747 bp, synthetic construct
  source 1..747: mol_type = other DNA
ttaaaacagcctgtgggttgcacccacccacagggcccactgggcgctagcacactgattctacggaatctttgtgcgcctgttttagtacccctcccccaaaacccgtaacttagaagaatagcacgctatcgatcaatagcaggcatggcgcaccagtcatgtttagatcaagcacttctgtctccccggattgagtatcaatagactgctaacgcggttgaaggagaaaacgtccgttacccggctaactacttcgagaaacctagtaacaccattgaaactgcagagcgtttcgctcagcactaccccagtgtagatcaggtcgatgagtcactgcgctccccacgggcgaccgtggcagtggctgcgttggcggcctgcctatggggtgacccataggacgctctaaagtggacatggtgtgaagagtctattgagctagttagtagtcctccggcccctgaatgcggataatcctaactgcggagcgcatgccctcaatccagggggtggtgcgtcgtaacgggcaactctgcagcggaaccgactactttgggtgtccgtgtttcctttattttcatactggctgcttatggtgacaattgaaagattgttaccatatagctattggattggccatccagtgaccaacagagctttgatttacctgtttgcgggttttgttccactcaccaattgtacagttcatactctgaagtacattttaatcctgaataatagaaa

SEQ ID NO: 18000 - DNA, 744 bp, synthetic construct
  source 1..744: mol_type = other DNA
aaacagctctagggttgttcccaccctaggggcccacgtggcggctagcactctggtatcacggtacctttgtgcgcctgttttataccccctcccctatgtaacttagaagctattaaataaagttcaatagaagggggtacaaaccagtgccaccacgaacaaacacttctgtttccccggtgaagctacatagactgttcccacggtcgaaagtagcagatccgttatccgctttggtacttcgagaaacctagtatcatcttggaatcttcgatgcgttgcgctcagcactcaaccccagagtgtagcttaggtcgatgagtctggacgatcctcactggcgacagtggtccaggctgcgttggcggcctacctgtggtgaaagccacaggacgctagttgtgaacaaggtgtgaagagtctattgagctaccaaagagtcctccggcccctgaatgcggctaatcccaaccacggagcaagtgctcacaatccagtgagtggcttgtcgtaacgcgcaagtctgtggcggaaccgactactttgggtgtccgtgtttccttttatttttatcatggctgcttatggtgacaatctaagattgttatcatatagctattggattggccatccggtgaccagtagagacattatatacttatttgttggctttgttaaattagacacaactacacttaaatctcttctcttcatcacacaattgaatattagaaaaagaaa

SEQ ID NO: 18001 - DNA, 745 bp, synthetic construct
  source 1..745: mol_type = other DNA
ttaaaacagcctgtgggttgttcccacccacagggcccactgggcgctagcacactgattctgcgggatctttgtgcgcctgttttataaccccttccctaagcagcaacttagaagcttcacactatcacgaccagtagtgggcgtggcgcgccagtcacgtcttggtcaagcacttctgtttccccggactgagtatcaatagactgctcacgcggttgaaggagaaaacgttcgttatccggctaactacttcgagaaacttagtagcaccgtgaaagttgcggagtgtttcgctcagcacttcccccgtgtagatcaggtcgatgagtcactgtaaaccccacgggcgaccgtgacagtggctgcgttggcggcctgcccatggagtaacccatgggacgctctaatacagacacggtgtgaagagtctattgagctagttagtagtcctccggcccctgaatgcggctaatcctaactgcggagcgcgcaccctcaacccagggggcagcgcgtcgtaatgggtaactctgcagcggaaccgactactttgggtgtccgtgtttccttttactccttattggctgcttatggtgacaattgaaaagttgttaccatatagctattggattggccatccggtgaccaacagggctattgtttacctgtttattggatacgtccctcttattcttgcggccattcaaactcttgattatatattgctccttaactgtaagaa

SEQ ID NO: 18002 - DNA, 747 bp, synthetic construct
  source 1..747: mol_type = other DNA
ttaaaacagcctgtgggttgcacccacccacagggcccactgggcgctagcacactgattctacggaatctttgtgcgcctgttttagtgtccctcccccaaactcgtaacttagaagaatagcaccctatcgatcaatagtaggcatggcgcaccagccatgtctggatcaagcacttctgtctccccggattgagtatcaatagactgctaacgcggttgaaggagaaaacgtccgttatccggctaactacttcgagaaacctagtaacaccattgaaactgcagagcgtttcgctcagcactaccccagtgtagatcaggtcgatgagtcactgcactccccacgggcgaccgtggcagtggctgcgttggcggcctgcctatggggtaacccataggacgctctaaagtggacatggtgcgaagagtctattgagctagttagtagtcctccggcccctgaatgcggataatcctaactgcggagcgcatgccctcaatccagggggtggtgcgtcgtaacgggcaactctgcagcggaaccgactactttgggtgtccgtgtttccttttatttttatactggctgcttatggtgacaattgaaagattgttaccatatagctattggattggccatccagtgaccaacagagctttgatttacctgtttgtgggttttgttccactcaccaattgtacagttcatactttgaagtttattttaatcctgaataatagaaa

SEQ ID NO: 18003 - DNA, 747 bp, synthetic construct
  source 1..747: mol_type = other DNA
ttaaaacagcctgtgggttgtacccactcacagggcccactgggcgccagcacactgattctatggaatctttgtgcgcctgttttataaccccttccccaaaactgcaacttagaagaatagcactctatcgatcaatagcaggcatggcgcgccagtcatgtctaggtcaagcacttctgtctccccggaccgagtatcaatagactgctagcgcggttgaaggagaaaacgtccgttacccggctaactacttcgagaaacttagtagtaccattgaagctgcagagtgtttcgctcagcactcccccagtgtagatcaggtcgatgagtcactgcaatccccacgggcgaccgtggcagtggctgcgttggcggcctgcctatggggcaacccataggacgctctaaagtggacatggtgcgaagggtctattgagctagttagtagtcctccggcccctgaatgcggctaatcctaactgcggagcgcataccctcaatccagggggtggtgtgtcgtaatgggcaactctgcagcggaaccgactactttgggtgtccgtgtttccttttattcttatattggctgcttatggtgacaattgagagattgttaccatatagctattggattggccatccggtgaccaacagagctttgatatacttatttgtaggttttgttccactcacaaatcgtacggtccatactctgaagtacattttgattctgaacaatagaaa

SEQ ID NO: 18004 - DNA, 746 bp, synthetic construct; identical to SEQ ID NO: 1120
  source 1..746: mol_type = other DNA

SEQ ID NO: 18005 - DNA, 746 bp, synthetic construct
  source 1..746: mol_type = other DNA
ttaaaacagcctgtgggttgcacccacccacagggcccactgggcgccagcacactgattctatggaatctttgtgcgcctgttttataaccccttcccaaaactgtaacttagaagaaaagcactttatcgatcaatagcaggcatggtgcaccaatcatgtccagatcaagcacttctgtctccccggatcgagtatcaatagactgctaacgcggttgaaggagaaaacgtccgttacccggctaactacttcgagaaacttagtaacaccattgaagctgcagagtgtttcgctcagcactcccccagtgtagatcaggtcgatgagtcactgcactccccacgggtgaccgtggcagtggctgcgttggcggcctgcctatggggcaacccataggacgctctaaagtggacatggtgcgaagagtctattgagctagttagtagtcctccggcccctgaatgcggctaatcctaactgcggagcgcatgccctcaacccagggggtggtgcgtcgtaacgggcaactctgcagcggaaccgactactttgggtgtccgtgtttccttttattcctatattggctgcttatggtgacaattgagagattgttaccatatagctattggattggccatccagtgactaacagagctttgatatacttgtttgtgggtttcgttccactcaccaatcgcacagttcaaactctaaagtatattttgattctgaacaatagaaa

SEQ ID NO: 18006 - DNA, 731 bp, synthetic construct
  source 1..731: mol_type = other DNA
tggttgttcccacccacagggcccactgggcgccagcactctgattccatggaatctttgtgcgcctgttttacaacccttccccaatttgtaacgtagaagtaatacacactactgatcaatagcaggcatggcgcgccagtcatgtctcgatcaagcacttctgttcccccggactgagtatcaatagactgctcacgcggttgaaggagaaaacgttcgttacccggctaactacttcgagaaacctagtagcaccatagaagctgcagagtgtttcgctcagcacttcccccgtgtagatcaggctgatgagtcactgcaatccccacgggcgaccgtggcagtggctgcgctggcggcctgcctatggggcaacccataggacgctctaatgtggacatggtgcgaagagtctattgagctagttagtagtcctccggcccctgaatgcggctaatcctaactgcggagcacatgccttcaatccaggaggtggtgtgtcgtaacgggcaactctgcagcggaaccgactactttgggtgtccgtgtttctttttattcctatattggctgcttatggtgacaattacggaattgttgccatatagctattggattggccatccggtgtctaatagagctattgtgtacctatttgttggatttactccgctatcatataaatctctgaacactttgtgctttatattgaacttaaacacacgaaa

SEQ ID NO: 18007 - DNA, 745 bp, synthetic construct
  source 1..745: mol_type = other DNA
ttaaaacagcctgtgggttgttcccacccacagggcccactgggcgctagcacactgattctgcgggatctttgtgcgcctgttttataacccttcccctaagcagcaacttagaagctttgtacaatcacgaccaatagtgggcgtggcgcgccagtcacgtcttggtcaagcacttctgtatccccggactgagtatcaatagactgctcacgcggttgaaggagaaaacgttcgttacccggctaactacttcgagaaacctagtagcaccgtgaaagttgcggagtgtttcgctcagcacttcccccgtgtagatcaggtcgatgagtcactgtaaaccccacgggcgaccgtgacagtggctgcgttggcggcctgcccatggggcaacccatgggacgctctaatacagacatggtgcgaagagtctattgagctagttagtagccctccggcccctgaatgcggctaatcctaactgcggagcgcgcaccctcaacccagggggcggcgtgtcgtaatgggtaactctgcagcggaaccgactactttgggtgtccgtgtttccctttattctttattggctgcttatggtgacaattgaaaagttgttaccatatagctattggattggccatccggtgtctaacagagctattgtttacctattcattggatacatccctcttaatctcaaagccattcaaactcttgattatatattgcttctcaactgtaagaa

SEQ ID NO: 18008 - DNA, 746 bp, synthetic construct
  source 1..746: mol_type = other DNA
ttaaaacagcctgtgggttgcacccacccacagggcccactgggcgccagcacactgattctatggaatctttgtgcgcctgttttataaccccttcccaaaactgtaacttagaagaaaagcactttatcgatcaatagcaggcatggtgcaccaatcatgtccagatcaagcacttctgtctccccggatcgagtatcaatagactgctaacgcggttgaaggagaaaacgtccgttacccggctaactacttcgagaaacttagtaacaccattgaagctgcagagtgtttcgctcagcactcccccagtgtagatcaggtcgatgagtcactgcactccccacgggtgaccgtggcagtggctgcgttggcggcctgcttatggggcaacccataggacgctctaaagtggacatggtgcgaagagtctattgagctagttagtagtcctccggcccctgaatgcggctaatcctaactgcggagcgcatgccctcaacccagggggtggtgcgtcgtaacgggcaactctgcagcggaaccgactactttgggtgtccgtgtttccttttattcctatattggctgcttatggtgacaattgagagattgttaccatatagctattggattggccatccagtgaccaacagagctttgatatacttgtttgtgggtttcgttccactcaccaatcgcacagttcaaactctaaagtatattttgattctgaacaatagaaa

SEQ ID NO: 18009 - DNA, 747 bp, synthetic construct
  source 1..747: mol_type = other DNA
ttaaaaccccctctgggttgttcccacccacagggcccactgggcgctagcacactgattctgcgggatctttgtgcgcctgttttataaccctttccctaagcagcaacttagaagctttgtacaatcacgaccaatagtgggcgtgacgcgccagtcacgtcttggtcaagcacttctgtatccccggactgagtaccaatagactgcccacgcggttgaaggggaaaacgttcgttacccggctaactacttcgagaaacctagtagtaccatgaaagttgcggagtgtttcgctcagcacttcccccgtgtagatcaggtcgatgagtcactgtaaaccccacgggcgaccgtgacagtggctgcgttggcggcctgcccatggggtaacccatgggacgctctaatacagacatggtgcgaagagtctattgagctagttagcagtcctccggcccctgaatgcggctaatcctaactgcggagcgcgcaccctcaacccagggggcggcgtgtcgtaatgggtaactctgcagcggaaccgactactttgggtgtccgtgtttccttttttattctttattggctgcttatggtgacaattgaaaagttgttaccatatagctattggattggccatccggtgtctaacagagctattgtttacctatttattggatacgtccctcttaatctcaaggccattcaaactcttgattatatattgctccttaactgtaggaa

SEQ ID NO: 18010 - DNA, 746 bp, synthetic construct
  source 1..746: mol_type = other DNA
ttaaaacagcctgtgggttgtacccacctacagggcccactgggcgccagcacactgattctatggaatctttgtgcgcctgttttataacccttccccaaaactgtaacttagaagaatagcactccatcgatcaatagcaggcatggcgcgccagtcatgtcttgatcaagcacttctgtctccccggatcgagtatcaatagactgctagcgcggttgaaggagaaaacgtccgttacccggctaactacttcgagaaacttagtagcaccattgaagctgcggagtgtttcgctcagcactcccccagtgtagatcaggtcgatgagtcactgcactccccacgggcgaccgtggcagtggctgcgttggcggcctgcctatggggcaacccataggacgctctaaagtggacatggtgcgaagagtctattgagctagttagtagtcctccggcccctgaatgcggctaatcctaactgcggagcacatgcctccaatccagggggtggtgtgtcgtaacgggcaactctgcagcggaaccgactactttgggtgtccgtgtttccttttattcttatattggctgcttatggtgacaattgagagattgttaccatatagctattggattggccacccagtaacgaacagagctctgatatatttgtttgtgggttttgttccactcaccaattgtgcagtccatactctaaagtacattttgattctgaacaatagaaa

SEQ ID NO: 18011 - DNA, 746 bp, synthetic construct
  source 1..746: mol_type = other DNA
ttaaaacagcctgtgggttgtacccacccacagggcccactgggcgccagcacactgattctatggaatctttgtgcgcctgttttataacccttcccccaaactgtaacttagaagaatggcactctatcgatcaatagcaggcatggcgcgccagtcatgtcttgatcaagcacctctgtctccccggatcgagtatcaatagactgctagcgcggttgaaggagaaaacgtccgttacccggctaactacttcgagaaacttagtagcaccattaaagctgcggagtgtttcgctcagcactcccccagtgtagatcaggtcgatgagtcactgcactccccacgggcgaccgtggcagtggctgcgttggcggcctgcctatggggcaacccataggacgctctaaagtggacatggtgcgaagagtctattgagctagttagtagtcctccggcccctgaatgcggctaatcctaactgcggagcacatgccttcaatccagggggtggtgtgtcgtaacgggcaactctgcagcggaaccgactactttgggtgtccgtgtttccttttattcttatattggctgcttatggtgacaattgagagattgttaccatatagctattggattggccatccagtaacgaacagagctctgatatatttgttcgtgggtttcgttccactcaccacttgtgcagtccatactctaaagtacatcttgattctgaacaatagaaa

SEQ ID NO: 18012 - DNA, 745 bp, synthetic construct
  source 1..745: mol_type = other DNA
ttaaaacagcctgtgggttgcacccacccacagggcccactgggcgccagcacactgattctatggaatctttgtgcgcctgttttataaccccttcccaaactgtaacttagaagaatagcactctgtcgatcaatagcaggcatggtgcaccaatcatgcctagatcaagcacttctgtctccccggatcgagtatcaatagactgctagcgcggttgaaggagaaaacgtccgttacccggctaactacttcgagaaacttagtaacaccattgaagctgcagagtgtttcgctcagcactcccccagtgtagatcaggtcgatgagtcactgcactccccacgggcgaccgtggcagtggctgcgttggcggcctgcctatggggcaacccataggacgctctaaagtggacatggtgcgaagagtctattgagctagttagtagtcctccggcccctgaatgcggctaatcctaactgcggagcgcatgccctcaatccagggggtggtgcgtcgtaacgggcaactctgcagcggaaccgactactttgggtgtccgtgtttccttttattcttatattggctgcttatggtgacaactgagagattgttaccatatagctattggattggccatccagtgaccaacagagctttgatatacttgtttgtgggtttcgttccactcaccaatcgtacagtccaaactctaaaatatattttgattctgaacaatagaaa

SEQ ID NO: 18013 - DNA, 770 bp, synthetic construct; identical to SEQ ID NO: 1231
  source 1..770: mol_type = other DNA

SEQ ID NO: 18014 - DNA, 746 bp, synthetic construct
  source 1..746: mol_type = other DNA
ttaaaacagcctgtgggttgcacccactcacaggacccacgcggtgctagcactctggttctacggaacccttgtgcgcctgttttacgccccaccccaacttgtaacttagaagcaattcacaacactgatcaatagtaggcgtggcgcaccagctatgtcttgatcaagcacttctgtttccccggaccgagtatcaatagactgttcacgcggttgaaggagaaagcgtccgttatccggctaactacttcgagaaacccagtaacgccattgaaactgcagagtgtttcgctccacacttcccccgtgtagatcaggtcgatgagtcactgcaatccccacgggcgaccgtggcagtggctgcgctggcggcctgcctatggggcaacccataggacgctctaatgtggacatggtgtgaagagtctattgagctagttagtagtcctccggcccctgaatgcggctaatcctaactgcggagcacatgctctcaatccagagggtagtgtgtcgtaatgggcaactctgcagcggaaccgactactttgggtgtccgtgtttccttttattcttacattggctgcttatggtgacaatcactgaattgttaccatatagctattggactggccatccggtgtgcaacagagctattatatacctatttgttggctttgtaccactaaccttaaaatcaacaaccactctcaactatatattaacccttaatacaatcaaac

SEQ ID NO: 18015 - DNA, 747 bp, synthetic construct; identical to SEQ ID NO: 1144
  source 1..747: mol_type = other DNA

SEQ ID NO: 18016 - DNA, 746 bp, synthetic construct
  source 1..746: mol_type = other DNA
ttaaaacagcctgtgggttgtccccacccacagggcccactgggcgctagcacactgattctgcgggatctttgtgcgcctgttttataacccttccccctaagcagtaacttagaagctttgtacaaccatggccaatagtgggcgtggcgcaccagtcacgtcttggtcaagcatttctgtatccccggactgagtatcaatagactgctcacgtggttgaaggagaaaacgttcgttacccggctaactacttcgagaaacctagtagcaccatgaaagttgcggagtgtttcgctcagcacttcccccgtgtagatcaggtcgatgagtcactgtaaaccccacgggcgaccgtgacagtggctgcgttggcggcctgcccatggggtaacccatgggacgctctaatacggacatggtgcgaagagtctattgagctagttagcagtcctccggcccctgaatgcggctaatcctaactgcggagcgcgcaccctcaacccagggggcagcgtgtcgtaatgggtaactctgcagcggaaccgactactttgggtgtccgtgtttccttttattctttattggctgcttatggtgacaattgaaaagttgttaccatatagctattggattggccatccggcgtctaacagagctattgtttacctattcattggattcgtccctcttaatctcaaggccattcaaactcttgactacatattgctccttaactgtaagaa

SEQ ID NO: 18017 - DNA, 747 bp, synthetic construct
  source 1..747: mol_type = other DNA
ttaaaacagcctgtgggttgcacccactcacaggacccacgtggtgctggcactctggttctacggaacccttgtgcgcctgttttacgtccccaccccaacttgtaacttagaagcaattcacaacactgatcaatagtaggcgtggcgcaccagctatgtcttgatcaagcacttctgtttccccggaccgagtatcaatagactgttcacgcggttgaaggagaaagcgtccgttatccggctaactacttcgagaaacccagtaacgccattgaaactgcagagtgtttcgctccacacttcccccgtgtagatcaggtcgatgagtcactgcaatccccacgggcgaccgtggcagtggctgcgctggcggcctgcctatggggcaacccataggacgctctaatgtggacatggtgtgaagagtctattgagctagttagtagtcctccggcccctgaatgcggctaatcctaactgcggagcacatgccttcaatccagagggtagtgtgtcgtaatgggcaactctgcagcggaaccgactactttgggtgtccgtgtttccttttattcttacattggctgcttatggtgacaatcactgaattgttaccatatagctattggattggccatccggtgtgcaacagagctattatatacctatttgttggctttgtaccactaaccttaaaatcaacaaccactctcaactatatattaacccttaatacaatcaaac

SEQ ID NO: 18018 - DNA, 744 bp, synthetic construct
  source 1..744: mol_type = other DNA
ttaaaacagcctgtgggttgcacccacccacagggcccactgggcgccagcactctggtactgaggtacctttgtgcgcctgtttttacttcccctccccgaagtaacttagaagctgtaaatcaacgatcaatagtaggtgtgacacaccagtcacactttggtcaagcacttctgtttccccggactgagtatcaataggctgctcgcgcggctgaaggagaaaacgttcgttacccgaccaactacttcgagaagcttagtaccaccatgaacgaggcagagtgtttcgttcagcacaaccccagtgtagatcaggctgatgagtcactgcaacccccatgggcgaccatggcagtggctgcgttggcggcctgcccatggagaaatccatgggacgctctaattctgacatggtgcgaagagcctattgagctagttggtagtcctccggcccctgaatgcggctaatcctaactgcggagcacatgctcacaaaccagtgggtggtgtgtcgtaacgggcaactctgcagcggaaccgactactttgggtgtccgtgtttccttttattcttatattggctgcttatggtgacaatcaaagaattgttaccatatagctattggattggccatccagtgtgcaacagagcaattgtttatctattcattggtttcgtacctttatcactgaagtctgtgatcactcttaaattcattttgaccctcaatacaattaaac

SEQ ID NO: 18019 - DNA, 761 bp, synthetic construct
  source 1..761: mol_type = other DNA
tacaaaaaagcaggctttaaaacagcctgtgggttgttcccacccacagggcccactgggcgctagcacactgatcctgcgggatctttgtgcgcctgttttacaacccttcccctaagcagtaacttagaagcttcacactatcatgaccaatagtaggcgtggtgcaccagtcacgtcttggtcaagcacttctgtttccccggactgagtatcaatagactgctcacgcggttgaaggagaaaacgttcgttatccggctaactacttcgagaaacctagtagcatcgtgaaagttgcggagtgtttcgctcagcacttcccccgtgtagatcaggtcgatgagtcactgtgaaccccacgggtgaccgtgacagtggctgcgttggcggcctgcccatggggtaacccatgggacgctctaaaacagacacggtgtgaagagtctattgagctagttagtagtcctccggcccctgaatgcggctaatcctaactgcggagcgcgtaccctcactccagggggcagcgcgtcgtaatgggtaactctgcagcggaaccgactactttgggtgtccgtgtttctttttattctttattggctgcttatggtgacaattgaaaggttgttaccatatagctattggattggccatccggtaaccaacagagctattgtttacctgtttattggatacgtccctctcaatctcaaggccattcaaactcttgattatatattacttctcaactgtaagaa

SEQ ID NO: 18020 - DNA, 724 bp, synthetic construct
  source 1..724: mol_type = other DNA
tgtacccactcacagggcccaccgggcgccagcactctggtactgcggtacctttgtgcgcctgttttatcaccccaccccatctgaaacgtagaagcaatgcacaaccgaccaatagtgggtgtggcgcaccagccacatcttggtcaagcacctctgtttccccgggtttagtatcaataagctgctcacgcggctgaaggagaaaacacccgttacccggccgactacttcaagaaacctagtaccgctatgaacgttgcaaggcgtttcgctcagcacttcccccgtgtagatcaggctgatgagtcaccgcatccctcacgggcgaccgtggcggtggctgcgttggcggcctgcctatgggcttgcccataggacgccttaatactgacatggtgcgaagagtctattgagctagttggtagtcctccggcccctgaatgcggctaatcctaactgcggagcacatactcacaaaccagtgagcggtgtgtcgtaacgggcaactctgcagcggaaccgactactttgggtgtccgtgtttccttttattcttatactggctgcttatggtgacaattaaagaattgttaccatatagctattggattggccatccggtgtctaacagagatattatatacttgtttgttggattcacctcgttgtcatacaaatcccttaacactttgtgctttatcttgagtttgaattcaaaaag

SEQ ID NO: 18021 - DNA, 747 bp, synthetic construct
  source 1..747: mol_type = other DNA
ttaaaacagcctgtgggttgcacccactcacaggacccacgcggtgctagcactctggttctacggaacccttgtgcgcctgttttacgcccccaccccaacttgtaacttagaagcaattcacaacactgatcaatagtaggcgtggcgcaccagctatgtcttgatcaagcacttctgtttccccggaccgagtatcaatagactgttcacgcggttgaaggagaaagcgtccgttatccggctaactacttcgagaaacccagtaacgccattgaaactgcagagtgtttcgctccacacttcccccgtgtagatcaggtcgatgagtcactgcaatccccacgggcgaccgtggcagtggctgcgctggcggcctgcctatggggcaacccataggacgctctaatgtggacatggtgtgaagagtctattgagctagttagtagtcctccggcccctgaatgcggctaatcctaactgcggagcacatgctctcaatccagagggtagtgtgtcgtaatgggcaactctgcagcggaaccgactactttgggtgtccgtgtttccttttattcttacattggctgcttatggtgacaatcactgaattgttaccatatagctattggattggccatccggtgtgcaacagagctattatatacctatttgttggctttgtaccactaaccttaaaatctacaaccactctcaactatatattaacccttaatacaatcaaac

SEQ ID NO: 18022 - DNA, 748 bp, synthetic construct
  source 1..748: mol_type = other DNA
gtgctcttccgatctgtgggttgttcccacccacagggcccactgggcgccagcactctgattccacggaatctttgtgcgcctgttttacaaccctttcccaatctgtaacgtagaagcaatatacactactgatcaatagcaggcatggcgcgccagtcatgtctcgatcaagcacttctgtttccccggactgagtatcaatagactgctcacgcggttgaaggagaaaacgttcgttatccggctaactacttcgagaaacctagtagcaccatagaagctgcagagtgtttcgctcagcacttcccccgtgtagatcaggctgatgagtcactgcaatccccacgggcgaccgtggcagtggctgcgctggcggcctgcctatggggcaacccataggacgctctaatgtggacatggtgcgaagagtctattgagctagttagtagtcctccggcccctgaatgcggctaatcctaactgcggagcacatgccttcaacccaggaggtggtgtgtcgtaacgggcaactctgcagcggaaccgactactttgggtgtccgtgtttctctttattcttatattggctgcttatggtaacaattacggaattgttaccatatagctattggattggccatccggtgtctaatagagctattgtgtacctatttgttggatttactccgctatcatataaatctctgaacactttgtgctttatattgaacttaaacacacgaaa

SEQ ID NO: 18023 - DNA, 724 bp, synthetic construct
  source 1..724: mol_type = other DNA
tgcacccacccacagggcccactgggcgctagcactctggtgtcacggcacctttgtgcgcctgttttatcgccccaccccatacgaaacttagaagtaatacataaccgaccaatagtaggtgtggcgcaccagccacatcttggtcaagcacttctgtttccccgggttgagtatcaataagctgttcacacggctgaaggagaaaatacccgttatccggccaactacttcgagaaacctagtaccgccatgaacgttgcaaggtgtttcgctcagcacttcccccgtgtagatcaggccgatgagtcaccgcattccccacgggtgaccgtggcggtggctgcgttggcggcctgcctatgggttaacccataggacgccttaatactgacatggtgcgaagagtctattgagctagttggtagtcctccggcccctgaatgcggctaatcctaactgcggagcacatactcacaaaccagtgagcggtgtgtcgtaacgggtaactctgcagcggaaccgactactttgggtgtccgtgtttccttttatctttatattggctgcttatggtgacaatcagagaattgttaccatatagctattggattggccatccggtgtctaatagagctattatatacctgtttgttggattcactccgttgacccataaatccctaaacaccttgtgctatattttgaatttaaacacacgaaa

SEQ ID NO: 18024 - DNA, 742 bp, synthetic construct
  source 1..742: mol_type = other DNA
ttaaaacagcctgtgggttgcacccactcacagggcccactgggcgcaagcactctggtacctcggtacctttgtgcgcctgttttataacccccccccagtgaaacttagaagtagcaaaccacgatcaatagcaggcataacgctccagttatgtcttgatcaagcacttctgtttccccggactgagtatcaatagactgctcgcgcggttgaaggagaaaacgttcgttatccggctaactacttcgggaaacctagtagcatcatgaaagttgcggagagcttcgttcagcactcccccagtgtagatcaggtcgatgagtcaccgcgttccccacgggcgaccgtggcggtggctgcgttggcggcctgcccatggggtaacccatggggcgctctaatacggacatggtgcgaagagtctactgagctagttagtagtcctccggcccctgaatgcggctaatcccaactgcggagcacacgcccacaagccagcgggtagtgtgtcgtaacgggcaactctgcagcggaaccgactactttgggtgtccgtgtttctttttatctttatattggctgcttatggtgacaattaaagagttgttaccagatagaaattaccctggccatccggtgtgcaacagagcaattgtttacctatttattggttttgtaccattaaccttgaagtctgtgaccacccttaattatatcttgaccctcaacacagctaaac

SEQ ID NO: 18025 - DNA, 749 bp, synthetic construct; identical to SEQ ID NO: 1191
  source 1..749: mol_type = other DNA

SEQ ID NO: 18026 - DNA, 749 bp, synthetic construct
  source 1..749: mol_type = other DNA
tttaaaacagctctagggttgttcccgccctagaggcccacgtggcggctagcactctggtatcacggtacctttgtgcgcctgttttataccccctccccccatgtaacttagaagctattaaacaaagttcaatagaagggggtacaaaccagtaccaccacgaacaagcacttctgtttccccggtgaagctacatggactgttcccacggttgaaagtggcagatccgttatccgctttggtacttcgagaaacctagtatcatcttggaatcttcgacgcgttgcgctcagcactcaaccccagagtgtagcttaggtcgatgagtctggacgatccccactggcgacagtggtccaggctgcgttggcggcctacctgtggcgaaagccacaggacgctagttgtgaacaaggtgtgaagagtctattgagctaccaaagagtcctccggcccctgaatgcggctaatcccaaccacggagcaagtgctcacaaaccagtgagtggcttgtcgtaacgcgcaagtctgtggcggaaccgactactttgggtgtccgtgtttccttttatttttatcatggctgcttatggtgacaatctaagattgttatcatatagctattggattggccatccggtgactaacagagatatcatatatctatttgttggttttgttaagctagacacaactgcattcaattctcttctcttcatcacacaattgaataatagaaagagaaa

SEQ ID NO: 18027 - DNA, 748 bp, synthetic construct
  source 1..748: mol_type = other DNA
tttaaaacaaagctgtgggttgtacccactcacagggcccactgggcgctagcactctggttctgcggaacctttgtgcgcctgttttataacccctccctcaattcgtaatttagaagtaatacacaccattgatcaacagcaagcgtggcgcgccagccatgtttagatcaagcacttctgttttcccggactgagtatcaatagactgctcacgcggttgaaggagaaaacgttcgttacccggctaactacttcgagaaacctagtagcaccatcgaaactgcagagtgtttcgctcagcactttccccgtgtagatcaggtcgatgagtcactgcaatccccacgggcgaccgtggcagtggctgcgttggcggcctgcctatgggcttacccataggacgctctaatgtggacatggtgtgaagagtctattgagctagttagtagtcctccggcccctgaatgcggctaatcctaactgcggagcgcataccctcaacccagggggtggtgcgtcgtaacgggcaactctgcagcggaaccgactactttgggtgcccgtgtttccttttattcttatattggctgcttatggtgacaattgagagattgttaccatatagctattggattggccatccagtgtctaacagagcaattatatacttgtttgttggattcgttccactatcatatatatccactaacaccttgtactatattataagattgaacacaaggaa

SEQ ID NO: 18028 - DNA, 742 bp, synthetic construct
  source 1..742: mol_type = other DNA
ttaaaacagcctgtgggttgcacccactcacagggcctactgggcgcgagcactctggtacctcggtacctttgtgcgcctgttttacaccccctccccagtgaaacttagaagcaacaaaccacgatcaatagcaggcataacgctccagttatgtcttgatcaagcacttctgtttccccggactgagtatcaatagactgctcgcgcggttgaaggagaaaacgttcgttatccggctagctacttcggaaaacctagtaacaccatgaaagttgcggagagcttcgttcagcactcccccagtgtagatcaggtcgatgagtcaccgcattccccacgggcgaccgtggcggtggctgcgttggcggcctgcccatggggtaacccatggggcgctctaatacggacatggtgcgaagagtctactgagctagttagtagtcctccggcccctgaatgcggctaatcccaactgcggagcacacgcccacaagccagcgggtagtgtgtcgtaacgggtaactctgcagcggaaccgactactttgggtgtccgtgtttccttttatctttatattggctgcttatggtgacaattaaagaattgttaccatatagctattggattggccatccggtgtgcaacagagcaattgtttacttatttattggttttgtaccattaaccttgaagtctgcgaccaccctcaattatatcttaacccttaacacagctaaac

SEQ ID NO: 18029 - DNA, 748 bp, synthetic construct
  source 1..748: mol_type = other DNA
ttaaaacagctctgggggtgttcccaccctagaggcccacgtggcggctagcactctggtatcacggtacctttgtgcgcctgttttatatccctttccccatgcaacttagaagttattaaacaaagttcaatagaagggggtacgaaccagtgccaccacgaacaagcacttctgtttccccggtgaagctgcatagactgtccccacggttgaaagcggcagatccgttatccgctttggtacttcgagaaacccagtaccaccttggaatcttcgatgcgttgcgctcagcactcaaccccagagtgtagcttaggttgatgagtctggacgatcctcactggcgacagtggtccaggctgcgttggcggcctacctgtggtgaaaaccacaggacgctagatgtgaacaaggtgtgaagagtctattgagctaccaaagagtcctccggcccctgaatgcggctaatcctaaccacggagcaagtacccacaaaccagtgggcagcttgtcgtaacgcgcaagtctgtggtggaaccgactactttgggtgtccgtgtttcctttttattttatcatggctgcttatggtgacaatctaagattgttatcatatagctattggattggccatccggtagactaacagagatattatatacctatttgttggttttattagattgaatactatcgcattcaaaactcttctttatatcatacaattgaatagcagaaagagaaa

SEQ ID NO: 18030 - DNA, 747 bp, synthetic construct
  source 1..747: mol_type = other DNA
ttaaaacagctctgggggtgttcccaccctagaggcccacgtggcggctagcactctggtatcacggtacctttgtgcgcctgttttatatccctttccccatgcaacttagaagtttttaaacaaagttcaatagaagggggtacaaaccagtgccaccacgaacaagcacttctgtttccccggtgaagctgcatagactgtccccacggttgaaagcggcagatccgttatccgctttggtacttcgagaaacctagtatcaccttggaatcttcgatgcgttgcgctcagcactcaaccccagagtgtagcttaggttgatgagtctggacgatcctcactggcgacagtggtccaggctgcgttggcggcctacctgtggtgaaaaccacaggacgctagatgtgaacaaggtgtgaagagtctattgagctaccaaagagtcctccggcccctgaatgcggctaatcctaaccacggagcaagtacccacaaaccagtgggcagcttgtcgtaacgcgcaagtctgtggcggaaccgactactttgggtgtccgtgtttcctttttattttatcatggctgcttatggtgacaatctaagattgttatcatatagctattggattggccatccggtgactaacagagatattatatacctatttgttggttttattagattaaatactatcacattcaaaactcttctttatatcatacaattgaacagtagaaagagaaa

SEQ ID NO: 18031 - DNA, 747 bp, synthetic construct
  source 1..747: mol_type = other DNA
ttaaaacagctctggggttgttcccaccctagaggcccacgtggcggctagcactctggtatcacggtacctttgtgcgcctgttttatatccctttccccatgcaacttagaagtttttaaacaaagttcaatagaagggggtacaaaccagtgccaccacgaacaaacacttctgtttccccggtgaagctgcatagactgtccccacggttgaaagcggcagatccgttatccgctttggtacttcgagaaacctagtatcaccttggaatcttcgatgcgttgcgctcagcactcaaccccagagtgtagcttaggttgatgagtctggacgatcctcactggcgacagtggtccaggctgcgttggcggcctacctgtggtgaaaaccacaggacgctagatgtgaacaaggtgtgaagagtctattgagctaccaaagagtcctccggcccctgaatgcggctaatcctaaccacggagcaagtacccacaaaccagtgggcagcttgtcgtaacgcgcaagtctgtggcggaaccgactactttgggtgtccgtgtttcctttttattttatcatggctgcttatggtgacaatctaagattgttatcatatagctattggattggccatccggtgactaacagagatattatatacctatttgttggttttattagattaaatactatcacattcaaaactcttctttatatcatacaattgaacagtagaaagagaaa

SEQ ID NO: 18032 - DNA, 747 bp, synthetic construct
  source 1..747: mol_type = other DNA
ttaaaacagctctggggttgttcccaccctggaggcccacgtggcggctagcactctggtattacggtacctttgtgcgcctgttttatatccctttccccatgcaacttagaagcttttaaacaaagttcaatagaagggggtacaaaccagtgccaccacgaacaagcacttctgtttccccggtgaagctgcatagactgtccccacggttgaaagcggcagatccgttatccgctttggtacttcgagaaacctagtatcaccttggaatcttcgatgcgttgcgctcagcactcaaccccagagtgtagcttaggttgatgagtctggacgatcctcactggcgacagtggtccaggctgcgttggcggcctacctgtggtgaaaaccacaggacgctagatgtgaacaaggtgtgaagagtctattgagctaccaaagagtcctccggcccctgaatgcggctaatcctaaccacggagcaagtacccacaaaccagtgggcagcttgtcgtaacgcgcaagtctgtggcggaaccgactactttgggtgtccgtgtttcctttttattttatcatggctgcttatggtgacaatctaagattgttatcatatagctattggattggccatccggtgactaacagagatattatatacctatttgttggttttattagattgaatactatcacattcaaaacccttctttatatcatacaattgaacagtagaaagggaaa

SEQ ID NO: 18033 - DNA, 742 bp, synthetic construct
  source 1..742: mol_type = other DNA
acagcctgtgggttgcacccacccacaggacccacgtggtgctagcactctggttctacggaacccttgtgcgcctgttttacgccccctccccaattcgcaacttagaagcaattcgcaacaccgatcaatagcaggcatggcgcaccagctatgtcttgatcaagcacttctgtttccccggaccgagtatcaataaactgttcacgcggttgaaggagaaagcgtccgttatccggctaactacttcgagaaacccagtaacgctattgaaactgcagagtgtttcgctccacacttcccccgtgtagatcaggtcgatgagtcactgcaatccccacgggcgaccgtggcagtggctgcgctggcggcctgcctatggggcaacccataggacgctctaatgtggacatggtgtgaagagtctattgagctagttagtagtcctccggcccctgaatgcggctaatcctaactgcggagcacatgccctcaatccagagggtagtgtgtcgtaatgggcaactctgcagcggaaccgactactttgggtgtccgtgtttccttttattctcacattggctgcttatggtgacaatcactgaattgttaccatatagctattggattggccatccggtgtgcaatagagctatcatatacctatttgttggctttgtaccactgaccttaaaatctgtaaccactctcgactatatattgaccctcaatacaatcaaac

SEQ ID NO: 18034 - DNA, 745 bp, synthetic construct
  source 1..745: mol_type = other DNA
ttaaaacagcctgtgggttgttcccactcacagggcccactgggcgctagcacactgattctgcggaatctttgtgcgcctgttttataatccctcccccaagcagcaacttagaagctccatactaccacgtccaatagtaggcgtggcgcaccagtcacgtcttggacaagcacttctgtttccccggactgagtatcaatagactgctcacgcggttgaaggagaaaacgtccgttatccggctaactacttcgagaaacttagtaacaccgtgaaagttgcggagtgtttcgttcagcacttcccccgtgtagatcaggccgatgagtcactgtgaaccccacgggcgaccgtgacagtggctgcgttggcggcctgcccatggggtaacccatgggacgctctaatacagacacggtgcgaagagtctattgagctagttggtagtcctccggcccctgaatgcggctaatcctaactgcggagcgcgcaccctcaatccagggggcagcgcgtcgtaatgggtaactctgcagcggaaccgactactttgggtgtccgtgtttcctgttattccttattggctgcttatggtgacaattgaaaagttgttaccatatagctattggattggccatccggtaaccaacagagctattgtttacctgttcattgggtacgttcctctcaatctcaaggtcattcaaactcttgattatatactacttctcaactgcaagaa

SEQ ID NO: 18035 - DNA, 746 bp, synthetic construct
  source 1..746: mol_type = other DNA
ttaaaacagctgtgggttgcacccactcacaggacccacgtggtgctagcactctggttctacggaacccttgtgcgcctgttttacgccccctccccaatttgtaacttagaagcaatttacaacactgatcaatagcaggcatggcgcgccagctatgtcttgatcaagcacttctgtttccccggaccgagtatcaatagactgttcacacggttgaaggagaaagcgtccgttacccggctaactacttcgagaaacccagtagcgccattgaagctgcagagtgtttcgctccacacttcccccgtgtagatcaggtcgatgagtcactgcaatcctcacgggcgaccgtggcagtggctgcgctggcggcctgcctatggggcgacccataggacgctctaatgtggacatggtgcgaagagtctattgagctagttagtagtcctccggcccctgaatgcggctaatcctaactgcggagcacatgccttcaatccagagggtagtgtgtcgtaatgggcaactctgcagcggaaccgactactttgggtgtccgtgtttccttttattctcacattggctgcttatggtgacaattacagaattgttaccatatagctattggattggccatccggtgtgcaatagagctattatatacctatttgttggctttataccactaaccttaaaatctgtaaccactctcgagtatatattaaccctcaatacaatcaaac

SEQ ID NO: 18036 - DNA, 746 bp, synthetic construct
  source 1..746: mol_type = other DNA
ttaaaacagctgtgggttgcacccactcacaggacccacgtggtgctagcactctggttctacggaacctttgtgcgcctgttttacgccccctccccaatttgcaacttagaagcaatttacaacactgatcaatagcaggcatggcgcaccagctatgtcttgatcaagcacttctgtttccccggaccgagtatcaatagactgttcacacggttgaaggagaaagcgtccgttatccggctaactacttcgagaaatccagtagcgccattgaagctgcagagtgtttcgctccacacttcccccgtgtagatcaggtcgatgagtcactgcaatcctcacgggcgaccgtggcagtggctgcgctggcggcctgcctatggggcaacccataggacgctctaatgtggacatggtgcgaagagtctattgagctagttagtagtcctccggcccctgaatgcggctaatcctaactgcggagcacatgccttcaatccagagggtagtgtgtcgtaatgggcaactctgcagcggaaccgactactttgggtgtccgtgtttccttttattcttacattggctgcttatggtgacaattacagaattgttaccatatagctattggattggccatccggtgtgcaatagagctattatatacctatttgttggctttataccactaaccttaaaatctgcaaccactctcgagtatatattaaccctcaatacaatcaaac

SEQ ID NO: 18037 - DNA, 746 bp, synthetic construct
  source 1..746: mol_type = other DNA
ttaaaacagctgtgggttgcacccactcacaggacccacgtggtgctagcactctggttctacggaacctttgtgcgcctgttttacgccccctccccaatttgtaacttagaagcaatttacaacactgatcaatagcaggcatggcgcaccagctatgtcttgatcaagcacttctgtttccccggaccgagtatcaatagactgttcacacggttgaaggagaaagcgtccgttatccggctaactacttcgagaaacccagtagcgccattgaagctgcagagtgtttcgctccacacttcccccgtgtagatcaggtcgatgagccactgcaatcctcacgggcgaccgtggcagtgactgcgctggcggcctgcctatggggcgacccataggacgctctaatgtggacatggtgcgaagagtctattgagctagttagtagtcctccggcccctgaatgcggctaatcctaactgcggagcacatgccttcaatccagagggtagtgtgtcgtaatgggcaactctgcagcggaaccgactactttgggtgtccgtgtttccttttattctcacactggctgcttatggtgacaattgcagaattgttaccatatagctattggattggccatccggtgtgcaatagagctattatatacctgtttgttggctttataccactagccttaaaatctgtaaccactctcgagtatatattaaccctcaatacaatcaaac

SEQ ID NO: 18038 - DNA, 746 bp, synthetic construct
  source 1..746: mol_type = other DNA
ttaaaacagctgtgggttgcacccactcacaggacccacgtggtgctagcactctggttccacggaacctttgtgcgcctgttttatgccccctccccaatttgtaacttagaagcaatttacaacactgatcaatagcaggcatagcgcaccagctatgtcttgatcaagcacttctgtttccccggaccgagtatcaatagactgttcacacggttaaaggagaaagcgtccgttatccggctaactacttcgagaaacccagtagcaccattgaagctgcagagtgtttcgctccacacttcccccgtgtagatcaggtcgatgagtcactgcaatccccacgggcgaccgtggcagtggctgcgctggcggcctgcctatggggcaacccataggacgctctaatgtggacatggtgcgaagagtctattgagctagttagtagtcctccggcccctgaatgcggctaatcctaactgcggagcacatgccttcaatccagagggtagtgtgtcgtaatgggcaactctgcagcggaaccgactactttgggtgtccgtgtttccttttattctcacattggctgcttatggtgacaattacagaattgttaccatatagctattggattggccatccggtgtgcaatagagctatcatatacctatttgttggctttgtaccactaaccttaaaatccgtaaccactctcgagtatatattaaccctcaatacaatcaaac

SEQ ID NO: 18039 - DNA, 746 bp, synthetic construct
  source 1..746: mol_type = other DNA
ttaaaacagctgtgggttgcacccactcacaggacccacgtggtgctagcactctggttctacggaacctttgtgcgcctgttttacgccccctccccaatttgtaacttagaagcaatttacaacactgatcaatagcaggcatggcgcaccagctatgtcttgatcaagcacttctgtttccccggaccgagtatcaatagactgttcacacggttgaaggagaaagcgtccgttatccggctaactacttcgagaaacccagtagcgccattgaagctgcagagtgtttcgctccacacttcccccgtgtagatcaggtcgatgagtcactgcaatcctcacgggcgaccgtggcagtggctgcgctggcggcctgcctatggggcgacccataggacgctctaatgtggacatggtgcgaagagtctattgagctagttagtagtcctccggcccctgaatgcggctaatcctaactgcggagcacatgccttcaatccagagggtagtgtgtcgtaatgggcaactctgcagcggaaccgactactttgggtgtccgtgtttccttttattctcacattggctgcttatggtgacaattacagaattgttaccatatagctattggattggccatccggtgtgcaatagagctattatatacctatttgttggctttataccactaaccttaaaatctgtaaccactctcgagtatatattaaccctcaatacaatcaaac

SEQ ID NO: 18040 - DNA, 746 bp, synthetic construct
  source 1..746: mol_type = other DNA
ttaaaacagctgtgggttgcacccactcacaggacccacgtggtgctagcactctggttctacggaacctttgtgcgcctgttttacgccccctccccaatttgtaacttagaagcaatttacaacactgatcaatagcaggcatggcgcgccagctatgtcttgatcaagcacttctgtttccccggaccgagtatcaatagactgttcacacggttgaaggagaaagcgtccgttatccggctaactacttcgagaaacccagtagcgccattgaagccgcagagtgtttcgctccacacttcccccgtgtagatcaggtcgatgagtcactgcaatcctcacgggcgaccgtggcagtggctgcgctggcggcctgcctatggggcgacccataggacgctctaatgtggacatggtgcgaagagtccattgagctagttagtagtcctccggcccctgaatgcggctaatcctaactgcggagcacatgccttcaatccagagggtagtgtgtcgtaatgggcaactctgcagcggaaccgactactttgggtgtccgtgtttccttttattctcacattggctgcttatggtgacaattgcagaattgttaccatatagctattggattggccatccggtgtgcaatagagctattatatacctatttgttggctttataccactaatcttaaaatctgtaaccactctcgagtatatattaaccctcaatacgatcaaac

SEQ ID NO: 18041 - DNA, 746 bp, synthetic construct
  source 1..746: mol_type = other DNA
ttaaaacagctgtgggttgcacccactcacaggacccacgtggtgctagcactctggttctacggaacctttgtgcgcctgttttacgccccctccccaatttgtaacttagaagcaatttacaacactgatcaacagcaggcatggcgcaccagctatgtcttgatcaagcacttctgtttccccggaccgagtatcaatagactgttcacacggttgaaggagaaagcgtccgttatccggctaactacttcgagaaacccagtagcgccattgaagctgcagagtgtttcgctccacacttcccccgtgtagatcaggtcgatgagtcactgcaatcctcacgggcgaccgtggcagtggctgcgctggcggcctgcctatggggcgacccataggacgctctaatgtggacatggtgcgaagagtctattgagctagttagtagtcctccggcccctgaatgcggctaatcctaactgcggagcacatgccttcaatccagagggtagtgtgtcgtaatgggcaactctgcagcggaaccgactactttgggtgtccgtgtttccttttattctcacactggctgcttatggtgacaattacagaattgttaccatatagctattggattggccatccggtgtgcaatagagctattatatacctgtttgttggctttataccactaaccttaaaatctgtaaccactctcgagtatatattaaccctcaatacaatcaaac

SEQ ID NO: 18042 - DNA, 744 bp, synthetic construct
  source 1..744: mol_type = other DNA
ttaaaacagctgtgggttgcacccacccacagggcccactgggcgccagcactctggtactaaggtacctttgtgcgcctgtttttacctcccttcccccgaagtaacttagaagctttgaaccaacgatcaacagtaggtgtgacataccagtcatatctcgatcaagcacttctgtttccccggactgagtatcaataggctgctcgcgcggctgaaagagaaaacgttcgttacccggccagctacttcgagaagcttagtaccaccatgaacgaggcagagcgtttcgttcggcacaaccccagtgtagatcaggctgatgagtcactgcaatccccatgggcgaccatggcagtggctgcgctggcggcctgcccatggagaaatccatgggacgctctaattttgacatggtgcgaagagcctattgagctagctggtagtcctccggcccctgaatgcggctaatcctaactgcggagcgcacacccacaaaccagtgggcagtgtgtcgtaacgggcaactctgcagcggaaccgactactttgggtgtccgtgtttccttttattcttatattggctgcttatggtgacaatcgaagagttgttaccatatagctattggattggccatccggtgtgcaacagagcaattgtctacctgtttactggttttgtaccactgacactaaagtctgtgatcacccttaaatttatcttgaccctcaacacagtcaagc

SEQ ID NO: 18043 - DNA, 742 bp, synthetic construct
  source 1..742: mol_type = other DNA
aaacagcctgtgggttgttcccacccacggggcccactgggcgctagcacactgattctgcgggatctttgtgcgcctgttttataacccttcccctaagcagcaacttagaagctttgcacaatcacgaccaatagtgggcgtggcgcgccagtcacgtcttggtcaagcacttctgtatccccggactgagtatcaatagactgctcacgcggttgaaggagaaaacgttcgttacccggctaactacttcgagaaacctagtagcaccatgaaagttgcggagtgtttcgctcagcacttcccccgtgtagatcaggtcgatgagtcactgtaaaccccacgggcgaccgtgacagtggctgcgttggcggcctgcccatggggtaacccatgggacgctctaatacagacatggtgcgaagagtctattgagctagttagtagtcctccggcccctgaatgcggctaatcctaactgcggagcgcgcaccctcaatccagggggcggcgcgtcgtaatgggtaactctgcagcggaaccgactactttgggtgtccgtgtttccttttattctttattggctgcttatggtgacaattgagaagttgttaccatatagctattggattggccatccggtgtctaacagagctattgtctacctatttattggatacgtccctcttaatctcaaggtcattcaaactcttgattatatattgttccttaactgtaagaa

SEQ ID NO: 18044 - DNA, 731 bp, synthetic construct
  source 1..731: mol_type = other DNA
ttcaaacagcctgtgggttgcacccactcacagggcccacgtggcgctagcactctggttctacggaacctttgtgcgcctgttttacgccccttccccaatttgcaacttagaagcaatacacaacactgatcaacaggcggcatggcgcaccagctatgtcttgatcaagcacttctgtttccccggaccgagtatcaatagactgctcacgcggttgaaggagaaagcgtccgttatccggctaactacttcgaaaaacctagtaacaccattgaagctgcagagtgtttcgctcggcacttcccccgtgtagatcaggtcgatgagtcactgcaatccccacgggtgaccgtggcagtggctgcgttggcggcctgcctatggggcaacccataggacgctctaatgcggacatggtgcgaagagtctattgagctagttagtagtcctccggcccctgaatgcggctaatcctaactgcggagcacatgccttcaacccagagggtagtgtgtcgtaatgggcaactctgcagcggaaccgactactttgggtgtccgtgtttccttttattcttatattggctgcttatggtgacaattacagaattgttaccatatagctattggattggccatccggtgtgcaatagagctattatatacctatttttcttttggctttgtatcactaaccttaaaatctataatcaccctcgactttatagc

SEQ ID NO: 18045 - DNA, 744 bp, synthetic construct
  source 1..744: mol_type = other DNA
aaacagcctgtgggttgcacccacccacaggacccacgcggtgctagcactctggttctacgggacctttgtgcgcctgttttacgtcccctccccaatttgtaacttagaagcaatttgcaacactgatcagtagcaggcatagcgcaccagctatgtcttgatcaagcacttctgtttccccggaccgagtatcaatagactgttcacgcggttgaaggagaaagcgtccgttatccggctaactacttcgagaaacccagtagcgccattgaaactgcagagtgtttcgctccacacttcccccgtgtagatcaggtcgatgagtcactgcaatccccacgggcgaccgtggcagtggctgcgctggcggcctgcctatggggcaacccataggacgctctaatgtggacatggtgtgaagagtctattgagctagttagtagtcctccggcccctgaatgcggctaatcctaactgcggagcacatgccttcaatccagagggtagtgtgtcgtaatgggcaactctgcagcggaaccgactactttgggtgtccgtgtttccttttattctcacattggctgcttatggtgacaattacggaattgttaccatatagctattggattggccatccggtgtgcaatagagctattatatacctatttgttggctttgtaccactgaccttaaaatctataaccactctcgagtgtatattaacccttaatacaatcaaac

SEQ ID NO: 18046 - DNA, 738 bp, synthetic construct
  source 1..738: mol_type = other DNA
cctgtgggttgcacccacccacaggacccacgcggtgctagcactctggtcccacgggacctttgtgcgcctgttttacgtcccctccccaattcgtaacttagaagcaatttgcaacactgatcagtagcaggcatggcgcaccagctatgtcttgatcaagcacttctgtttccccggaccgagtatcaatagactgttcacacggttgaaggagaaagcgtccgttatccggctaactacttcgagaaacctagtagcgccattgaaactgcagagtgtttcgctccacacttcccccgtgtagatcaggttgatgagtcactgcaatccccacgggcgaccgtggcagtggctgcgctggcggcctgcctatggggcaacccataggacgctctaatgtggacatggtgcgaagagtctattgagctagttagtagtcctccggcccctgaatgcggctaatcctaactgtggagcacatgccttcaatccagagggtagtgtgtcgtaatgggcaactctgcagcggaaccgactactttgggtgtccgtgtttccttttattcttacattggctgcttatggtgacaattacagaattgttaccatatagctattggattggccatccggtgtgtaatagagctattatatacctatttgttggctttgtaccactgaccttaaaatctgtaaccactctcgagtgtatattaacccttaatacaatcaaac

SEQ ID NO: 18047 - DNA, 742 bp, synthetic construct
  source 1..742: mol_type = other DNA
ttaaaacagctgtgggttgcacccacccacggggcctactgggcgctagcactctggcactaaggtacctttgtgcgcctgtttttacttcctttccccgaagtaacttagaagttgtgtaccaacgatcaatagcaggtgtgacacaccagtcatatcttgatcaagtacttctgtttccccggaccgagtatcaataggctgctcgcgcggctgaaggagaaaacgttcgttacccgaccaactacttcgagaagcttagtaccaccatgaacgaggcagagtgtttcgttcagcacaaccccagtgtagatcaggctgatgagtcactgcaacccccatgggcgaccatggcagtggctgcgttggcggcctgcccatggagaaatccatgggacgctctaattctgacatggtgtgaagagcctattgagctagttggtagtcctccggcccctgaatgcggctaatcctaactgcggagcacatgctcacaaaccagtgggtggtgtgtcgtaatgggcaactctgcagcggaaccgactactttgggtgtccgtgtttccttttattcttatgttggctgcttatggtgacaatcaaagaattgttaccatatagctattggattggccatccggtgtgaacagagcaattgtttacctatttattggtttcgtaccactatcactgaactctgtggtcactctcaaattcattttgaccctcaactcaatcaaac

SEQ ID NO: 18048 - DNA, 742 bp, synthetic construct
  source 1..742: mol_type = other DNA
ttaaaacagctgtgggttgcacccacccacagggcctactgggcgctagcactctggcactgaggtacctttgtgcgcctgttttatttcccttccccgaagtaacttagaagctgtgaactaacgatcaatagtgggtgtgacgcaccagtcacatcttgatcaagcacttctgtttccccggactgagtatcaataggctgctcgcgcggctgaaggagaaaacgttcgttacccgaccaactacttcgagaagcttagtaccaccatgaacgaggcagagtgtttcgttcagcacaaccccagtgtagatcaggctgatgagtcactgcaacccccatgggcgaccatggcagtggctgcgttggcggcctgcccatggaaaaatccatgggacgctctaattctgacatggtgtgaagagcctattgagctagctggtagtcctccggcccctgaatgcggctaatcccaactgtggagcacatgctcacaaaccagtgggtggtgtgtcgtaacgggcaactctgcagcggaaccgactactttgggtgtccgtgtttccttttattcttatgttggctgcttatggtgacaatcaaagaattgttaccatatagctattggattggccatccggtgtgcaacagagcaatcgtctacctatttgttggttttgtaccattatcactgaaggctgtgatcactctcaaattcattttgaccctcaactcaatcaaac

SEQ ID NO: 18049 - DNA, 742 bp, synthetic construct
  source 1..742: mol_type = other DNA
ttaaaacagctgtgggttgcacccacccacagggcctactgggcgctagcactctggcactgaggtacctttgtgcgcctgttttatttcccttccccgaagtaacttagaagctgtgaactaacgatcaatagtgggtgtgacgcaccagtcacatcttgatcaagcacttctgtttccccggactgagtatcaataggctgctcgcgcggctgaaggagaaaacgttcgttacccggccaactacttcgagaagcttagtaccaccatgaacgaggcagagtgtttcgttcagcacaaccccagtgtagatcaggctgatgagtcactgcaacccccatgggcgaccatggcagtggctgcgttggcggcctgcccatggaaaaatccatgggacgctctaattctgacatggtgtgaagagcctattgagctagctggtagtcctccggcccctgaatgcggctaatcccaactgcggagcacatgctcacaaaccagtgggtggtgtgtcgtaacgggtaactctgcagcggaaccgactactttgggtgtccgtgtttccttttattcttatgttggctgcttatggtgacaatcaaagaattgttaccatatagctattggattggccatccggtgtgcaacagagcaatcgtctacctatttgttggttttgtaccattatcactgaaggctgtgatcactctcaaattcattttgaccctcaactcaatcaaac

SEQ ID NO: 18050 - DNA, 742 bp, synthetic construct
  source 1..742: mol_type = other DNA
ttaaaacagctgtgggttgcacccacccacagggcctactgggcgctagcactctggcactgaggtacctttgtgcgcctgttttatttcccttccccgaagtaacttagaagctgtgaactaacgatcaatagtgggtgtgacgcaccagtcacatcttgatcaagcacttctgtttccccggactgagtatcaataggctgctcgcgcggctgaaggagaaaacgttcgttacccgaccaactacttcgagaagcttagtaccaccatgaacgaggcagagtgtttcgttcagcacaaccccagtgtagatcaggctgatgagtcactgcaacccccatgggcgaccatggcagtggctgcgttggcggcctgcccatggaaaaatccatgggacgctctaattctgacatggtgtgaagagcctattgagctagctggtagtcctccggcccctgaatgcggctaatcctaactgcggagcacatgctcacaaaccagtgggtggtgtgtcgtaacgggcaactctgcagcggaaccgactactttgggtgtccgtgtttccttttattcttatgttggctgcttatggtgacaatcaaagaattgttaccatatagctattggattggccatccggtgtgcaacagagcaatcgtctacctatttgttggttttgtaccattatcactgaaggctgtgatcactctcaaattcatcttgaccctcaactcaatcaaac

SEQ ID NO: 18051 - DNA, 742 bp, synthetic construct
  source 1..742: mol_type = other DNA
ttaaaacagctgtgggttgcacccacccacagggcctactgggcgctagcactctggcactgaggtacctttgtgcgcctgttttatttcccttccccgaagtaacttagaagctgtgaactaacgatcaatagtgggtgtgacgcaccagtcacatcttgatcaagcacttctgtttccccggactgagtatcaataggctgctcgcgcggctgaaggagaaaacgttcgttacccggccaactacttcgagaagcttagtaccaccatgaacgaggcagagtgtttcgttcagcacaaccccagtgtagatcaggctgatgagtcactgcaacccccatgggcgaccatggcagtggctgcgttggcggcctgcccatggaaaaatccatgggacgctctaattctgacatggtgtgaagagcctattgagctagctggtagtcctccggcccctgaatgcggctaatcccaactgcggagcacatgctcacaaaccagtgggtggtgtgtcgtaacgggcaactctgcagcggaaccgactactttgggtgtccgtgtttccttttattcttatgttggctgcttatggtgacaatcaaagaattgttaccatatagctattggattggccatccggtgtgcaacagagcaatcgtctacctatttgttggttttgtaccattatcactgaaggctgtgatcactctcaaattcattttgaccctcaactcaatcaaac

SEQ ID NO: 18052 - DNA, 742 bp, synthetic construct
  source 1..742: mol_type = other DNA
ttaaaacagctgtgggttgcacccacccacagggcctactgggcgctagcactctggcactgaggtacctttgtgcgcctgttttatttcccttccccgaagtaacttagaagctgtgaactaacgatcaatagtgggtgtgacgcaccagtcacatcttgatcaagcacttctgtttccccggactgagtatcaataggctgctcgcgcggctgaaggagaaaacgttcgttacccgaccaactacttcgagaagcttagtaccaccatgaacgaggcagagtgtttcgttcagcacaaccccagtgtagatcaggctgatgagtcactgcaacccccatgggcgaccatggcagtggctgcgttggcggcctgcccatggaaaaatccatgggacgctctaattctgacatggtgtgaagagcctattgagctagctggtagtcctccggcccctgaatgcggctaatcccaactgcggagcacatgctcacaaaccagtgggtggtgtgtcgtaacgggcaactctgcagcggaaccgactactttgggtgtccgtgtttccttttattcttatgttggctgcttatggtgacaatcaaagaattgttaccatatagctattggattggccatccggtgtgcaacagagcaatcgtctacctatttgttggttttgtaccattatcactgaaggctgtgatcactctcaaattcattttgaccctcaactcaatcaaac

SEQ ID NO: 18053 - DNA, 742 bp, synthetic construct
  source 1..742: mol_type = other DNA
ttaaaacagctgtgggttgcacccacccacagggcctactgggcgctagcactctggcactgaggtacctttgtgcgcctgttttatttcccttccccgaagtaacttagaagctgtgaactaacggtcaatagtgggtgtgacgcaccagtcacatcttgatcaagcacttctgtttccccggactgagtatcaataggctgctcgcgcggctgaaggagaaaacgttcgttacccgaccaactacttcgagaagcttagtaccaccatgaacgaggcagagtgtttcgttcagcacaaccccagtgtagatcaggctgatgagtcactgcaacccccatgggcgaccatggcagtggctgcgttggcggcctgcccatggaaaaatccatgggacgctctaattctgacatggtgtgaagagcctattgagctagctggtagtcctccggcccctgaatgcggctaatcccaactgcggagcacatgctcacaaaccagtgggtggtgtgtcgtaacgggcaactctgcagcggaaccgactactttgggtgtccgtgtttccttttattcttatgttggctgcttatggtgacaatcaaagaattgttaccatatagctattggattggccatccggtgtgcaacagagcaatcgtctacctatttgttggttttgtaccattatcactgaaggctgtgatcactctcaaattcattttgaccctcaactcaatcaaac

SEQ ID NO: 18054 - DNA, 738 bp, synthetic construct
  source 1..738: mol_type = other DNA
cctgtgggttgcacccactcacaggacccacgcggtgctagcactctggttctacggaacccttgtgcgcctgttttacgtccccaccccaacttgtaacttagaagcaattcacaacactgatcaatagtaggcgtggcgcaccagctatgtcttgatcaagcatttctgtttccccggaccgagtatcaatagactgttcacgcggttgaaggagaaagcgtccgttatccggctaactacttcgagaaacccagtaacgccattgaaactgcagagtgtttcgctccacacttcccccgtgtagatcaggtcgatgagtcactgcaatccccacgggcgaccgtggcagtggctgcgctggcggcctgcctatggggcaacccataggacgctctaatgtggacatggtgtgaagagtctattgagctagttagtagtcctccggcccctgaatgcggctaatcctaactgcggagcacatgctctcaatccagagggtagtgtgtcgtaatgggcaactctgcagcggaaccgactactttgggtgtccgtgtttccttttattcttacactggctgcttatggtgacaatcactgaattgttaccatatagctattggattggccatccggtgtgcaacagagctattatatacctatttgttggctttgtaccactaaccttaaaatctacaaccactctcaactatatattaacccttaatacaatcaaac

SEQ ID NO: 18055 - DNA, 737 bp, synthetic construct
  source 1..737: mol_type = other DNA
ctgtgggttgtacccgcccacaggacccacgtggtgctagcactctggttctacggaacccttgtgcgcctgttttacgccccctccccaatttgcaacttagaagcaattcgcaacaccgatcaatagcaggcatggcgcaccagctatgtcttgatcaagcacttctgtttccccggaccgagtatcaataaactgttcacgcggttgaaggagaaagcgtccgttatccggctaactacttcgagaaacccagtaacaccattgaaactgcagagtgtttcgctccacacttcccccgtgtagatcaggtcgatgagtcactgcaatccccacgggcgaccgtggcagtggctgcgctggcggcctgcctatggggcaacccataggacgctctaatgtggacatggtgtgaagagtctattgagctagttagtagtcctccggcccctgaatgcggctaatcctaactgcggagcacatgccctcaatccagagggtagtgtgtcgtaatgggcaactctgcagcggaaccgactactttgggtgtccgtgtttccttttattctcacattggctgcttatggtgacaatcactgaattgttaccatatagctattggattggccttccggtgtgcaatagagctatcatatacctatttgttggctttgtaccactgaccttaaaatctgtaaccactctcgactatatattgaccctcaatacaatcaaac

SEQ ID NO: 18056 - DNA, 745 bp, synthetic construct
  source 1..745: mol_type = other DNA
ttaaaacagcctgtgggttgcacccacccacagggcctactgggcgctagcactctggcactaaggtacctttgtgcgcctgtttttacttcccttccccaaagtaacttagaagttatgtaccaacgatcaacagcaggtgtgacgcaccagtcatatcttgatcaagcacttctgtttccccggaccgagtatcaataggctgctcgcgcggctgaaggagaaaacgttcgttacccgaccaactacttcgagaagcttagtaccaccatgaacgaggcagagtgtttcgttcagcacaaccccagtgtagatcaggctgatgagtcactgcaacccccatgggcgaccatggcagtggctgcgttggcggcctgcccatgaagaaattcatgggacgctctaattctgacatggtgtgaagagcctattgagctagttggtagtcctccggcccctgaatgcggctaatcctaactgcggagcacatgcccacaaaccagtgggtggtgtgtcgtaacgggcaactctgcagcggaaccgactactttgggtgtccgtgtttcctttttattcttatgttggctgcttatggtgacaatcagagaattgttgccatatagctattggattggccatccggtgtgtaacagagcaattgtttacctatttattggtttcgtaccactatcattaaagtctgtgaccactctcaagttcattttgaccctcaactcaatcaaac

SEQ ID NO: 18057 - DNA, 741 bp, synthetic construct
  source 1..741: mol_type = other DNA
ttaaaacagcttgggttgcacccacccacagggcctactgggcgctagcactctggcactgaggtacctttgtgcgcctgttttatttcccttccccgaagtaacttagaagctgtgaactaacgatcaatagtgggtgtgacgcaccagtcacatcttgatcaagcacttctgtttccccggactgagtatcaataggctgctcgcgcggctgaaggagaaaacgttcgttacccgaccaactacttcgagaagcttagtaccaccatgaacgaggcagagtgtttcgttcagcacaaccccagtgtagatcaggctgatgagtcactgcaacccccatgggcgaccatggcagtggctgcgttggcggcctgcccatggaaaaatccatgggacgctctaattctgacatggtgtgaagagcctattgagctagctggtaatcctccggcccctgaatgcggctaatcccaactgcggagcacatgctcacaaaccagtgggtggtgtgtcgtaacgggcaactctgcagcggaaccgactactttgggtgtccgtgtttccttttattcttatgttggctgcttatggtgacaatcaaagaattgttaccatatagctattggattggccatccggtgtgcaacagagcaatcgtctacctatttgttggttttgtaccattatcactgaaggctgtgatcactctcaaattcattttgaccctcaactcaatcaaac

SEQ ID NO: 18058 - DNA, 747 bp, synthetic construct
  source 1..747: mol_type = other DNA
ttaaaacagcctgtgggttgcacccactcacaggacccacgtggtgctagcactctggttctacggaacccttgtgcgcctgttttacgcccccaccccaacttgtaacttagaagcaattcacaacactgatcaatagtaggcgtggcgcaccagctatgtcttgatcaagcacttctgtttccccggaccgagtatcaatagactgttcacgcggttgaaggagaaagcgtccgttatccggctaactacttcgagaaacccagtaacgccattgaaactgcagagtgtttcgctccacacttcccccgtgtagatcaggtcgatgagtcactgcaatccccacgggcgaccgtggcagtggctgcgctggcggcctgcctatggggcaacccataggacgctctaatgtggacatggtgtgaagagtctattgagctagttagtagtcctccggcccctgaatgcggctaatcctaactgcggagcacatgctctcaatccagagggtagtgtgtcgtaatgggcaactctgcagcggaaccgactactttgggtgtccgtgtttccttttattcttacattggctgcttatggtgacaatcactgaattgttaccatatagctattggattggccatccggtgtgcaacagagctattatatacctatttgttggctttgtaccactaaccttaaaatctacaaccactctcaactatatattaacccttaatacaatcaaac

SEQ ID NO: 18059 - DNA, 739 bp, synthetic construct
  source 1..739: mol_type = other DNA
gcctgtgggttgcacccacccacaggacccacgcggtgctagcactctggttctacgggacctttgtgcgcctgttttacgtcccctccccaatttgtaacttagaagcaatttgcgacactgatcagtagcaggcatagcgcaccagctatgtcttgatcaagcacttctgtttccccggaccgagtatcaatagactgttcacacggttgaaggagaaagcgtccgttatccggctaactacttcgagaaacccagtagcgccattgaaactgcagagtgtttcgctccacacttcccccgtgtagatcaggtcgatgagtcactgcaatccccacgggcgaccgtggcagtggctgcgctggcggcctgcctatggggcaacccataggacgctctaatgtggacatggtgtgaagagtctattgagctagttagtagtcctccggcccctgaatgcggctaatcctaactgcggagcacatgccttcaatccagagggtagtgtgtcgtaatgggcaactctgcagcggaaccgactactttgggtgtccgtgtttccttttattctcacattggctgcttatggtgacaattacggaattgttaccatatagctattggattggccatccggtgtacaatagagctattatatacctatttgttggctttgtaccactgaccttaaaatctatagccactctcgagtgtatattaacccttaatacaatcaaac

SEQ ID NO: 18060 - DNA, 738 bp, synthetic construct
  source 1..738: mol_type = other DNA
cctgtgggttgcacccacccacaggacccacgcggtgctagcactctggttctacgggacctttgtgcgcctgttttatgtcccctccccaatttgtaacttagaagcaatttgcaacactgatcagtagtaggcatagcgcaccagctatgtcttgatcaagcacttctgtttccccggaccgagtatcaatagactgttcacacggttgaaggagaaagcgtccgttatccggctaactacttcgagaaacccagtagcgccattgaaactgcagagtgtttcgctccacacttcccccgtgtagatcaggtcgatgagtcactgcaatccccacgggcgaccgtggcagtggctgcgctggcggcctgcctatggggcaacccataggacgctctaatgtggacatggtgtgaagagtctattgagctagttagtagtcctccggcccctgaatgcggctaatcctaactgcggagcacatgccttcaatccagagggtagtgtgtcgtaatgggcaactctgcagcggaaccgactactttgggtgtccgtgtttccttttattctcacattggctgcttatggtgacaattacggaattgttaccatatagctattggattggccatccggtgtgcaatagagctattatatacctatttgttggctttgtaccactgaccttaaaatctataaccactctcgagtgtatattaacccttaatacaatcaaac

SEQ ID NO: 18061 - DNA, 747 bp, synthetic construct
  source 1..747: mol_type = other DNA
ttaaaacagcctgtgggttgcacccactcacaggacccacgcggtgctagcactctggttctccgggacctttgtgcgcctgttttacgtcccctccccaatttgtaacttagaagcaatttgcaacactgatcagtagcaggcatagcgcaccagctatgtcttgatcaagcacttctgtttccccggaccgagtatcaatagactgttcacacggttgaaggagaaagcgtccgttatccggctaactacttcgagaaacccagtagcgccattgaaactgcagagtgtttcgctccacacttcccccgtgtagatcaggtcgatgagtcactgcaatccccacgggcgaccgtggcagtggctgcgctggcggcctgcctatggggcaacccataggacgctctaatgtggacatggtgtgaagagtctattgagctagttagtagtcctccggcccctgaatgcggctaatcctaactgcggagcacatgccttcaatccagggggtagtgtgtcgtaatgggcaactctgcagcggaaccgactactttgggtgtccgtgtttcctcttattctcacattggctgcttatggtgacaattacggaattgttaccatatagctattggattggccatccggtgtgcaatagagctattatatatctatttgttggctttgtaccactgaccttaaaatctataaccactcttgagtgtatattaacccttaatacaatcaaac

SEQ ID NO: 18062 - DNA, 737 bp, synthetic construct
  source 1..737: mol_type = other DNA
gcctgtgggttgtccccacccacagggcccactgggcgctagcacactgattctgcggaatctttgtgcgcctgttttataatccctcccccaagcagcaacttagaagctccatactaccacgtccaatagtaggcgtggcgcaccagtcacgtcttggacaagcacttctgtttccccggactgagtatcaatagactgctcacgcggttgaaggagaaaacgtccgttatccggctaactacttcgagaaacttagtaacaccgtgaaagttgcggagtgtttcgttcagcacttcccccgtgtagatcaggccgatgagtcactgtgaaccccacgggcgaccgtgacagtggctgcgttggcggcctgcccatggggtaacccatgggacgctctaatacagacacggtgcgaagagtctattgagctagttggtagtcctccggcccctgaatgcggctaatcctaactgcggagcgcgcaccctcaatccagggggcagcgcgtcgtaatgggtaactctgcagcggaaccgactactttgggtgtccgtgtttcctgttattccttattggctgcttatggtgacaattgaaaagttgttaccatatagctattggattggccatccggtaaccaacagagctattgtttacctgttcattgggtacgttcctctcaatctcaaggtcattcaaactcttgattatatactacttctcaactgcaagaa

SEQ ID NO: 18063 - DNA, 741 bp, synthetic construct
  source 1..741: mol_type = other DNA
gtgctcttccgatctgttgtacccacccacagggcccactgggcgctagcactctggtaccacggtacctttgtgcgcctgttttatcacccttcccctcatgaaacttagaagtaatacataaccgaccaatagtaggtgtggcgcgccagccgcatcttggtcaagcacttctgtttccccggattgagtatcaataagctgttcacacggctgaaggagaaaacatccgttacccggccaactacttcgagaaacctagtaccactatcaaagttgcaaggcgtttcgctcagcacttcccccgtgtagatcaggccgatgagtcaccgcattccccacgggcgaccgtggcggtggctgcgttggcggcctgcctatgggtcagcccataggacgccttaatactgacatggtgcgaagagtctattgagctagttggtagtcctccggcccctgaatgcggctaatcctaactgcggagcacatactcacaagccagtgagcggtgtgtcgtaacgggtaactctgcagcggaaccgactactttgggagtccgtgtttccttttatctttatgttggctgcttatggtgacaatcagagaattgttaccatatagctattggattggccatccggtgtctaatagagctattgtatatctgtttgttgggttcaccccgttgtcgtataaatccttaaatactttgttctttatcctgaacttaaatacaagaaa

SEQ ID NO: 18064 - DNA, 744 bp, synthetic construct
  source 1..744: mol_type = other DNA
ttaaaacagcctgtgggttgttcccacccacagggcccactgggcgctagcacactgattctgcgggatctttgtgcgcctgttttataaccctcccctaagcagtaacttagaagcttcacacaatcacgaccaatagtaggcgtggcgcgccagtcacgtcttggtcaagcacttctgttcccccggactgagtatcaatagactgctcacgcggttgaaggagaaaacgttcgttatccggctaactacttcgagaaacctagtagcaccgtgaaagttgcggagcgtttcgctcagcacttcccccgtgtagatcaggtcgatgagtcactgtaaaccccacgggcgaccgtgacagtggctgcgttggcggcctgcccatggggtaacccatgggacgctctaatacagacatggtgtgaagagtctattgagctagttagtagtcctccggcccctgaatgcggctaatcctaactgcggagcacgcaccctcaacccagggggcggcgtgtcgtaatgggtaactctgcagcggaaccgactactttgggtgtccgtgtttccttttattccttactggctgcttatggtgacaattgaaaagttgttaccatatagctattggattggccatccggtgtctaacagagctatagtttacctatttattggatacgtccctcttaatctcaaggccattcaaactcttaattatatattgctccttaactgtaagaa

SEQ ID NO: 18065 - DNA, 737 bp, synthetic construct
  source 1..737: mol_type = other DNA
ctgtgggttgcacccacccacaggacccacgtggtgctagcactctggttctacggaacccttgtgcgcctgttttacgccccctccccaattcgcaacttagaagcaattcgcaacaccgatcaatagcaggcatggcgcaccagctatgtcttgatcaagcacttctgtttccccggaccgagtatcaataaactgttcacgcggttgaaggagaaagcgtccgttatccggctaactacttcgagaaacccagtaacgctattgaaactgcagagtgtttcgctccacacttcccccgtgtagatcaggtcgatgagtcactgcaatccccacgggcgaccgtggcagtggctgcgctggcggcctgcctatggggcaacccataggacgctctaatgtggacatggtgtgaagagtctattgagctagttagtagtcctccggcccctgaatgcggctaatcctaactgcggagcacatgccctcaatccagagggtagtgtgtcgtaatgggcaactctgcagcggaaccgactactttgggtgtccgtgtttccttttattctcacattggctgcttatggtgacaatcactgaattgttaccatatagctattggattggccatccggtgtgcaatagagctatcatatacctatttgttggctttgtaccactgaccttaaaatctgtaaccactctcgactatatattgaccctcaatacaatcaaac

SEQ ID NO: 18066 - DNA, 738 bp, synthetic construct
  source 1..738: mol_type = other DNA
cctgtgggttgcacccacccacaggacccacgcggtgctagcactctggttctacgggacctttgtgcgcctgttttacgtcccctccccaattcgtaacttagaagcaatttgcaacattgatcagtagcaggcatggcgcaccagctatgtcttgatcaagcacttctgtttccccggaccgagtatcaatagactgttcacacggttgaaggagaaagcgtccgttatccggctaactacttcgagaaacccagtagcgccattgaaactgcagagtgtttcgctccgcacttcccccgtgtagatcaggtcgatgagtcactgcaatccccacgggcgaccgtggcagtggctgcgctggcggcctgcctatggggcaacccataggacgctctaatgtggacatggtgcgaagagtctattgagctagttagtagtcctccggcccctgaatgcggctaatcctaactgcggagcacatgccttcaatccagagggtagtgtgtcgtaatgggtaactctgcagcggaaccgactactttgggtgtccgtgtttccttttattcttatattggctgcttatggtgacaattacagaattgttaccatatagctactggattggccatccggtgtgtaatagagctatcatatacctatttgttggctttgtaccactgacattaaaatctgtaaccactctcgagtgtatattaactcttaatacgatcaaac

SEQ ID NO: 18067 - DNA, 734 bp, synthetic construct
  source 1..734: mol_type = other DNA
tgggttgcacccacccacaggacccacgcggtgctagcactctggttctacgggacctttgtgcgcctgttttacgtcccctccccaatttgtaacttagaagcaatttgcaacactgatcagtagcaggcatagcgcaccagctatgtcttgatcaagcacttctgtttccccggaccgagtatcaatagactgttcacacggttgaaggagaaagcgtccgttatccggctaactacttcgagaaacccagtagcgccattgaaactgcagagtgtttcgctccacacttcccccgtgtagatcaggtcgatgagtcactgcaatccccacgggcgaccgtggcagtggctgcgctggcggcctgcctatggggcaacccataggacgctctaatgtggacatggtgtgaagagtctattgagctagttggtagtcctccggcccctgaatgcggctaatcctaactgcggagcacatgccttcaatccagagggtagtgtgtcgtaatgggcaactctgcagcggaaccgactactttgggtgtccgtgtttccttttattctcacattggctgcttatggtgacaattacggaattgttaccatatagctattggattggccatccggtgtgcaatagagctattatatacctatttgttggctttgtaccactgaccttaaaatctacaaccactctcgagtgtatattaacccttaatacaatcaaac

SEQ ID NO: 18068 - DNA, 740 bp, synthetic construct
  source 1..740: mol_type = other DNA
agcctgtgggttgcacccacccacaggacccacgcggtgctagcactctggttctacgggacctttgtgcgcctgttttacgtcccctccccaatttgtaacttagaagcaatttgcaacactgatcagtagcaggcatagcgcaccagctatgtcttgatcaagcacttctgtttccccggaccgagtatcaatagactgttcatacggttgaaggagaaagcgtccgttatccggctaactacttcgagaaacccagtagcgccattgaaactgcagagtgtttcgctccacacttcccccgtgtagatcaggtcgatgagtcactgcaatccccacgggcgaccgtggcagtggctgcgctggcggcctgcctatggggcaacccataggacgctctaatgtggacatggtgtgaagagtctattgagctagttagtagtcctccggcccctgaatgcggctaatcctaactgcggagcacatgccttcaatccagagggtagtgtgtcgtaatgggcaactctgcagcggaaccgactactttgggtgtccgtgtttccttttattctcacattggctgctaatggtgacaattacggaattgttaccatatagctattggattggccatccggtgtgcaatagagctattatatacctatttgttggctttgtaccactgaccttaaaatctataaccactctcgagtgtatattaacccttaatacaatcaaac

SEQ ID NO: 18069 - DNA, 730 bp, synthetic construct
  source 1..730: mol_type = other DNA
gttgtacccactcacagggcccactgggtgctagcactctgattctgcggaacctttgtgcgcctgttttaaaacccccccctcaattcgtgatttagaagtaatgcacaccattgatcaacagcaagcgtggcgcaccagccatgttcagatcaaacacttctgtttccccgggctgagtatcaatagactgctcgcgcggttgaaggagaaaacgctcgttacccggctaactacttcgagaaacctagtagcaccattgaaactacagagtgtttcgctcagcactttccccgtgtagatcgggtcgatgagtcactgcaatccccacgggcgaccgtggcagtggctgcgttggcggcctgcctatgggcttgcccataggacgctctaaagtggacatggtgtgaagagtctattgagctagttagtagtcctccggcccctgaatgcggctaatcctaactgcggagcgcatgccctcaatccagggggtggtgcgtcgtaacgggcaactctgcagcggaaccgactactttgggtgaccgtgtttccttttattcttatattggctgcttatggtgacaattgagagattgttaccatatagctattggattggccatccagtgtctaacagagcaatcgtatacttatttgttggattcatcccactatcatacatatccattaacaccttatactatattataagattgaacacaagaaa

SEQ ID NO: 18070 - DNA, 744 bp, synthetic construct
  source 1..744: mol_type = other DNA
ttaaaacacaccttgggttgttcccacccacagggcccactgggcgctagcacactggttctgcgggacctttgtgcgcctgttttataacccttccctaagcggtaacttagaagctttgtacaatcatggccaatagtgggcgtgacgcgccagtcacgtcttggtcaagcacttctgtatccccggactgagtatcaatagactgctcacgcggttgaaggagaaaacgttcgttacccggctaactacttcgagaaacctagtagcaccatgaaagttgcggagtgtttcgctcagcactttccccgtgtagatcaggtcgatgagtcactgtaaaccccacgggcgaccgtgacagtggctgcgttggcgacctgcccatggggtaacccatgggacgctctaatacagacatggtgcgaagagtctattgagctagttagcagtcctccggcccctgaatgcggctaatcctaactgcggagcgcgcaccctcaacccagggggcggcgcgtcgtaatgggtaactctgcagcggaaccgactactttgggtgtccgtgtttccttttattctttattggctgcttatggtgacaattgaaaggttgttaccatatagctattggattggccatccggtgtctaacagagctattgtttacctattcattggcttcgtccctcttaatctcaaggctattcaaactctcgattacatattgttccttaactgtaagaa

SEQ ID NO: 18071 - DNA, 737 bp, synthetic construct
  source 1..737: mol_type = other DNA
ctgtgggttgcacccacccacaggacccacgcggtgctagcactctggttctacgggacctttgtgcgcctgttttacgtcccctccccaatttgtaacttagaagcaatttgcaacactgatcagtagcaggcatagcgcaccagctatgtcttgatcaagcacttctgtttccccggaccgagtatcaatagactgttcacacggttgaaggagaaagcgtccgttatccggctaactacttcgagaaacccagtagcgccattgaaactgcagagtgtttcgctccacacttcccccgtgtagatcaggtcgatgagtcactgcaatccccacgggcgaccgtggcagtggctgcgctggcggcctgcctatggggcaacccataggacgctctaatgtggacatggtgtgaagagtctattgagctagttagtagtcctccggcccctgaatgcggctaatcctaactgcggagcacatgccttcaatccagagggtagtgtgtcgtaatgggcaactctgcagcggaaccgactactttgggtgtccgtgtttccttttattctcacattggctgcttatggtgacaattacggaattgttaccatatagctattggattggccatccggtgtgcaatagagctattatatacctatttgttggctttgtaccactgaccttaaaatctataaccactctcgagtgtatattaacccttaatacaatcaaac

SEQ ID NO: 18072 - DNA, 737 bp, synthetic construct
  source 1..737: mol_type = other DNA
gcctgtgggttgttcccacccacagggcccactgggcgctagcacactgattctgcgggatctttgtgcgcctgttttataacccttcccctaggcagcaacttagaagctttgcacaatcacgaccaatagtgggcgtggcgcgccagccacgtcttggtcaagcactcctgtatccccggactgagtatcaatagactgctcacgcggttgaaggagaaaacgttcgttacccggctaactacttcgagaaacctagtagcaccatgaaagttgcagagtgtttcgctcagcacttcccccgtgtagatcaggtcgatgagtcactgtaaaccccacgggcgaccgtgacagtgactgcgttggcggcctgcccatggggtaacccatgggacgctctaatacagacatggtgcgaagagtctattgagctagttagcagtcctccggcccctgaatgcggctaatcctaactgcggagcgcgcaccctcaacccagggggcggcgcgtcgtaatgggtaactctgcagcggaaccgactactttgggtgtccgtgtttctttttactctttattggctgcttatggtgacaattgaaaagttgttaccatatagctattggattggccatccggtgtctaacagagctattgtttacctatttattggatacgtccctcttaacctcaaggtcattcaaactcttgattatatattgctccttaactgtaagaa

SEQ ID NO: 18073 - DNA, 733 bp, synthetic construct
  source 1..733: mol_type = other DNA
ctgtgggttgcacccacccacagggcccactgggcgctagcactctggtaccacggtacccttgtgcgcctgttttatcaccccaccccaacttgaaacttagaagcaatgcacaaccgaccaatagtaggtgtggcgcaccagccgcatctcggtcaagcacttctgtttccccgggttgagtatcaataagctgtccacacggctgaaggagaaaacgcccgttatccggccaactacttcgagaaacctagtaccactatgaacgttgcaaggcgtttcgctcagcacttcccccgtgtagatcaggtcgatgagtcaccgcatcccccacgggcgaccgtggcggtggctgcgttggcggcctgcctatgggttaacccataggacgccttaataccgacatggtgcgaagagtctattgagctagttggtagtcctccggcccctgaatgcggctaatcctaactgcggagcacacactcacaacccagtgagcggtgtgtcgtaacgggcaactctgcagcggaaccgactactttgggtgtccgtgtttccttttactcttatattggctgcttatggtgacaatcatagaattgttaccatatagctattggattggccatccgatttctaacagagctattatttacctgtttgttggattcactccgttgacatacaaatccctaaacactttgtgctttattttgaacttgaacgcacgaaa

SEQ ID NO: 18074 - DNA, 742 bp, synthetic construct
  source 1..742: mol_type = other DNA
ttaaaacagcctgtgggttgcacccactcacagggcccactgggcgcaagcactctggtacttcggtacctttgtgcgcctgttttacaacccccccccagtgaaacttagaagcagcaaaccacgatcaatagcaggcataacgctccagttatgtcttgatcaagcacttctgtttccccggaccgagtatcaatagactgctcgcgcggttgaaggagaaaacgttcgtcatccggctaactacttcgggaaacctagtaacaccatgaaagttgcggagagcttcgttcagcactcccccagtgtagatcaggtcgatgagtcaccgcattccccacgggcgaccgtggcggtggctgcgttggcggcctgcccatggggcaacccatggggcgctctaatacggacatggtgcgaagagtctactgagctagttagtagtcctccggcccctgaatgcggctaatcctaactgcggagcacacgcccacaaaccagcgggtagtgtgtcgtaacgggcaactccgcagcggaaccgactactttgggtgtccgtgtttccttttatctctatattggctgcttatggtgacaattaaagagttgttaccatatagctattggattggccatccggtgtgcaacagagcaattgtttacctatttattggttttgtaccattaaccttgaagtctgtgactacccttaattatatcttgaccctcaacacagctaaac

SEQ ID NO: 18075 - DNA, 744 bp, synthetic construct
  source 1..744: mol_type = other DNA
ttaaaacaagctgtgggttgttcccacccacagggcccactgggcgctagcacactggttctgcgggacctttgtgcgcctgttttataacccttccctaagcggtaacttagaagctttgtacaatcatggccaatagtgggcgtgacgcgccagtcacgtcttggtcaagcacttctgtatccccggactgagtatcaatagactgctcacgcggttgaaggagaaaacgttcgttacccggctaactacttcgagaaacctagtagcaccatgaaagttgcggagtgtttcgctcagcactttccccgtgtagatcaggtcgatgagtcactgtaaaccccacgggcgaccgtgacagtggctgcgttggcgacctgcccatggggtaacccatgggacgctctaatacagacatggtgcgaagagtctattgagctagttagcagtcctccggcccctgaatgcggctaatcctaactgcggagcgcgcaccctcaacccagggggcggcgcgtcgtaatgggtaactctgcagcggaaccgactactttgggtgtccgtgtttccttttattctttattggctgcttatggtgacaattgaaaggttgttaccatatagctattggattggccatccggtgtctaacagagctattgtttacctattcattggcttcgtccctcttaatctcaaggctattcaaactctcgattacatattgttccttaactgtaagaa

SEQ ID NO: 18076 - DNA, 736 bp, synthetic construct
  source 1..736: mol_type = other DNA
cctgtgggttgttcccattcacagggcccactgggcgctagcacactgattttgcgggatctttgtgcgcctgttttataacccctcccctaagcagtaacttagaagcttcatactatcacgaccaatagtaggcgtggcgcgccagccacgtcctggtcaagcacttctgtttccccggaccgagtatcaatagactgctcacgcggttgaaggagaaaacgttcgtcatccggctaactacttcgagaaacctagtagcaccgtgaaagttgcggagtgtttcgctcagcacttcccccgtgtagatcaggtcgatgagtcactgtgaaccccacgggcgaccgtgacagtggctgcgttggcggcctgcccatggggtaacccatgggacgctctaatacagacacggtgtgaagagtctattgagctagttagtagtcctccggcccctgaatgcggctaatcctaactgcggagcgcgcaccctcaatccagggggcggcgcgtcgtaatgggtaactctgcagcggaaccgactactttgggtgtccgtgtttccttttattccttattggctgcttatggtgacaattgaaaagttgttaccatatagctattggattggccatccggtaactaacagagctattgtttacctgtttgttggatacgtccctctcaatttcaaggtcattaaaacccttgattatatattacttctcaactgtgagaa

SEQ ID NO: 18077 - DNA, 758 bp, synthetic construct
  source 1..758: mol_type = other DNA
tacacactagactctaaaacagcctgtgggttgttcccacccacagggcccactgggcgccagcactctgattccacggaatctttgtgcgcctgttttacaacccttccccaatttgtaacgtagaagtaacacacactactgatcaatagcaggcatggcgcgccagtcatgtctcgatcaagcacttctgtttccccggactgagtatcaatagactgctcacgcggttgaaggagaaaacgttcgttacccggctaactacttcgagaaacctagtagcgccatggaagctgcagagtgtttcgctcagcacttcccccgtgtagatcaggctgatgagtcactgcaatccccacgggtgaccgtggcagtggctgcgctggcggcctgcctatggggcaacccataggacgctctaatgtggacatggtgcgaagagtctattgagctagttagtagtcctccggcccctgaatgcggctaatcctaactgcggagcacatgccttcaacccaggaggtggtgtgtcgtaacgggcaactctgcagcggaaccgactactttgggtgtccgtgtttctttttattcctatattggctgcttatggtgacaatcacggaattgttgccatatagctattggattggccacccagtgtctaatagagctattgtgtacctatttgttggatttactccgctatcatataaatctctgaacactttgtgctttatattgaatttaaacacacgaaa

SEQ ID NO: 18078 - DNA, 726 bp, synthetic construct
  source 1..726: mol_type = other DNA
gtacccaccctcagggcccactgggcgctagcactctgattctgcggaatccttgtgcgcctgttttataaccctcccccgattcgcaacttagaagcaatgagcctcactgatcaaaagtaggcgtggcgcaccagccacgtcttgatcaagcactcctgtttccccgggctgagtatcaatagactgcttgcgcggttgaaggagaaaacgctcgttatccggctaactacttcgagaaacctagtagcaccattgaaattgcagagtgtttcgctcagcacttcccccgtgtagatcgggtcgatgagtcactgcaatccccacgggcgaccgtggcagtggctgcgttggcggcctgcctatggggcaacccataggacgctctaaaatggacatggtgtgaagagtctattgagctagttagtagtcctccggcccctgaatgcggctaatcctaactgcggagcgcatgcccccaagccagagggtggtgcgtcgtaacgggtaactctgcagcggaaccgactactttgggtgtccgtgtttccttttattcttattatggctgcttatggtgacaattaaagaattgttgccatatagctattggatcggccatccggtgtctaacagagctattgtctatttatttgttggatttgttccattgacatatacatcgcttaatacattatatttcattgtgaggttgaacgcaagaaa

SEQ ID NO: 18079 - DNA, 747 bp, synthetic construct
  source 1..747: mol_type = other DNA
ttaaaacagcctgtgggttgtacccactcacaggacccacgcggtgctagcactctggttccacggaacctttgtgcgcctgttttacgtcccttccccaatttgtaacttagaagcaatttacagcactgatcaatagcaggcatggcacgccagctatgtcttgatcaagcacctctgtttccccggaccgagtatcaatagactgttcacacggtcgaaggagaaagcgttcgctatccggctaactacttcgagaaacccagtagcgccattgaaactgcagagtgtttcgctccacgcttcccccgcgtagatcaggtcgatgagtcactgcaatccccacgggcgaccgtggcagtggctgcgttggcggcctgcctatggggtaacccataggacgctctaatgtggacatggtgcgaagagtctattgagctagttagtagtcctccggcccctgaatgcggctaatcctaactgcggagcacatgccttcaatccagagggtagcgtgtcgtaatgggcaactctgcagcggaaccgactactttgggtgtccgtgtttccttttattctcacattggctgcttatggtgacaattacagaattgttaccatatagctattggattggccatccggtgtgcaataaagctattatatatctatttgttggttttgtaccactaaccttaagatctgtagttactctcgagtatatattgacccttaatacaattaaac

SEQ ID NO: 18080 - DNA, 741 bp, synthetic construct
  source 1..741: mol_type = other DNA
ttaaaacagctgtgggttgcacccactcacagggcccactgggcgcaagcactctggtacctcggtacctttgtgcgcctgttttataacccccccccagtgaaacttagaagcagcaaaccacgatcaatagcaggcataacgctccagttatgtcttgatcaagcacttctgtttccccggactgagtatcaatagactgctcgcgcggttgaaggagaaaacgttcgttatccggctaactacttcgggaaacctagtagcatcatgaaagttgcggagagcttcgttcagcactcccccagtgtagatcaggtcgatgagtcaccgcattccccacgggcgaccgtggcggtggctgcgttggcggcctgcccatggggtaacccatggggcgctctaatacggacatggtgcgaagagtctactgagctagttagtagtcctccggcccctgaatgcggctaatcccaactgcggagcacacgcccacaagccagcgggtagtgtgtcgtaacgggcaactctgcagcggaaccgactactttgggtgtccgtgtttctttttatctttatattggctgcttatggtgacaattaaagagttgttaccatatagctattggattggccatccggtgtgcaacagagcaattgtttacctatttattggttttgtaccattaaccttgaaatctgtgaccacccttgattatatcttgaccctcaacacagctaaac

SEQ ID NO: 18081 - DNA, 741 bp, synthetic construct
  source 1..741: mol_type = other DNA
ttaaaacagctgtgggttgcacccactcacagggcccactgggcgcaagcactctggtacctcggtacctttgtgcgcctgttttataacccccccccagtgaaacttagaagcagcaaaccacgatcaatagcaggcataacgctccagttatgtcttgatcaagcacttctgtttccccggactgagtatcaatagactgctcgcgcggttgaaggagaaaacgttcgttatccggctaactacttcgggaaacctagtagcatcatgaaagttgcggagagcttcgttcagcactcccccagtgtagatcaggtcgatgagtcaccgcattccccacgggcgaccgtggcggtggctgcgttggcggcctgcccatggggtaacccatggggcgctctaatacggacatggtgcgaagagtctactgagctagttagtagtcctccggcccctgaatgcggctaatcccaactgcggagcacacgcccacaagccagcgggtagtgtgtcgtaacgggcaactctgcagcggaaccgactactttgggtgtccgtgtttctttttatctttatattggctgcttatggtgacaattaaagagttgttaccatatagctattggattggccatccggtgtgcaacagagcaattgtttacctatttattggttttgtaccattaaccttgaaatctgtgaccacccttaattatatcttgaccctcaacacagctaaac

SEQ ID NO: 18082 - DNA, 741 bp, synthetic construct
  source 1..741: mol_type = other DNA
ttaaaacagctgtgggttgcacccactcacagggcccactgggcgcaagcactctggtacctcggtacctttgtgcgcctgttttataacccccccccagtgaaacttagaagcagcaaaccacgatcaatagcaggcataacgctccagttatgtcttgatcaagcacttctgtttccccggactgagtatcaatagactgctcgcgcggttgaaggagaaaacgttcgttatccggctaactacttcgggaaacctagtagcatcatgaaagttgcggagcgcttcgttcagcactcccccagtgtagatcaggtcgatgagtcaccgcattccccacgggcgaccgtggcggtggctgcgttggcggcctgcccatggggtaacccatggggcgctctaatacggacatggtgtgaagagtctactgagctagttagtagtcctccggcccctgaatgcggctaatcccaactgcggagcacacgcccacaagccagcgggtagtgtgtcgtaacgggcaactctgcagcggaaccgactactttgggtgtccgtgtttccttttatctttatattggctgcttatggtgacaattgaggagttgttaccatatagctattggattggccatccggtgtgcaacagagcaattgtttacctatttattggttttgtaccattaaccttgaagtctgtgaccacccttaattatatcttgaccctcaacacagctaaac

SEQ ID NO: 18083 - DNA, 741 bp, synthetic construct
  source 1..741: mol_type = other DNA
ttaaaacagctgtgggttgcacccactcacagggcccactgggcgcaagcactctggtacctcggtacctttgtgcgcctgttttataacccccccccagtgaaacttagaagcagcaaaccacgatcaatagcaggcataacgctccagttatgtcttgatcaagcacttctgtttccccggactgagtatcaatagactgctcgcgcggttgaaggagaaaacgttcgttatccggctaactacttcgggaaacctagtagcatcatgaaagttgcggagagcttcgttcagcactcccccagtgtagatcaggtcgatgagtcaccgcattccccacgggcgaccgtggcggtggctgcgttggcggcctgcccatggggtaacccatggggcgctctaatacggacatggtgcgaagagtctactgagctagttagtagtcctccggcccctgaatgcggctaatcccaactgcggagcacacgcccacaagccagcgggtagtgtgtcgtaacgggcaactctgcagcggaaccgactactttgggtgtccgtgtttccttttatctttatattggctgcttatggtgacaattgaagagttgttaccatatagctattggattggccatccggtgtgcaacagagcaattgtttacctatttattggttttgtaccattaaccttgaagtctgtgaccacccttaattatatctcgaccctcaacacagctaaac

SEQ ID NO: 18084 - DNA, 741 bp, synthetic construct
  source 1..741: mol_type = other DNA
ttaaaacagctgtgggttgcacccactcacagggcccactgggcgcaagcactctggtacctcggtacctttgtgcgcctgttttataacccccccccagtgaaacttagaagcagcaaaccacgatcaatagcaggcgtaacgctccagttatgtcttgatcaagcacttctgtttccccggactgagtatcaatagactgctcgcgcggttgaaggagaaaacgttcgttatccggctaactacttcgggaaacctagtagcatcatgaaagttgcggagagcttcgttcagcactcccccagtgtagatcaggtcgatgagtcaccgcattccccacgggcgaccgtggcggtggttgcgttggcggcctgcccatggggtaacccatggggcgctctaatacagacatggtgcgaagagtctactgagctagttagtagtcctccggcccctgaatgcggctaatcccaactgcggagcacacgcccacaagccagcgggtagtgtgtcgtaacgggcaactctgcagcggaaccgactactttgggtgtccgtgtttccttttatctttatattggctgcttatggtgacaattgaagagttgttaccatatagctattggattggccatccggtgtgtaacagagcaattgtttacctatttattggttttgtaccattaaccttgaagtctgtgaccacccttaattatatcttgaccctcaacacagctaaac

SEQ ID NO: 18085 - DNA, 741 bp, synthetic construct
  source 1..741: mol_type = other DNA
ttaaaacagctgtgggttgcacccactcacagggcccactgggcgcaagcactctggtacctcggtacctttgtgcgcctgttttataacccccccccagtgaaacttagaagcagcaaaccacgatcaatagcaggcataacgctccagttatgtcttgatcaagcacttctgtttccccggactgagtatcaatagactgctcgcgcggttgaaggagaaaacgttcgttatccggctaactacttcgggaaacctagtagcatcatgaaagttgcggagagcttcgttcagcactcccccagtgtagatcaggtcgatgagtcaccgcattccccacgggcgaccgtggcggtggctgcgttggcggcctgcccatggggtaacccatggggcgctctaatacggacatggtgtgaagagtctactgagctagttagtagtcctccggcccctgaatgcggctaatcccaactgcggagcacacgcccacaagccagcgggtagtgtgtcgtaacgggcaactctgcagcggaaccgactactttgggtgtccgtgtttccttttatctttatattggctgcttatggtgacaattgaggagttgttaccatatagctattggattggccatccggtgtgcaacagagcaattgtttacctatttattggttttgtaccattaaccttgaagtctgtgaccacccttaattatatcttgaccctcaacacagctaaac

SEQ ID NO: 18086 - DNA, 741 bp, synthetic construct
  source 1..741: mol_type = other DNA
ttaaaacagcctgtgggttgcacccactcacagggcccactgggcgctagcactctggtatcttggtacctttgtgcgcctgttttatacccccccccagtgaaacttagaagcagcaaacctcgatcaatagcaggcataacgctccagttatgtcttgatcaagcacttctgtttccccggactgagtatcaatagactgctcgcgcggttgaaggagaaaacgttcgttatccggctaactacttcggaaaacctagtaacaccatggaagttgcggagagctccgttcagcactcccccagtgtagatcaggtcgatgagtcaccgcattccccacgggcgaccgtggcggtggctgcgttggcggcctgcccatggggtaacccatggggcgctctaatacagacatggtgtgaagagtctactgagctagttagtagtcctccggcccctgaatgcggctaatcccaactgcggagcacacgcccacaagccagcgggtagtgtgtcgtaacgggtaactctgcagcggaaccgactactttgggtgtccgtgtttccttttatctttacattggctgcttatggtgacaattaaagaattgttaccatatagctattggattggccatccggtgtgcaacagagcaattatttacctatttattggttttgtaccatcaactttgaattctgtgaccacccttaattatatcctgacccttaacacagctaaac

SEQ ID NO: 18087 - DNA, 746 bp, synthetic construct
  source 1..746: mol_type = other DNA
ttttaaaaaccagcctgtgggttgcacccactcacagggcctactgggcgcaagcactctggtatctcggtacctttgtgcgcctgttttatacccccccctcagtgaaacttagaagcagcaaaccacgatcaatagcaggcataacgctccagttatgtcttgatcaagcacttctgtttccccggactgagtatcaatagactgctcgcgcggttgaaggagaaaacgttcgttatccggctagctacttcggaaaacctagtaacaccatgaaagttgcggagagcttcgttcagcactcccccagtgtagatcaggtcgatgagtcaccgcattccccacgggcgaccgtggcggtggctgcgttggcggcctgcccatggggtaacccatggggcgctctaatacggacatggtgtgaagagtctactgagctagttagtagtcctccggcccctgaatgcggctaatcctaactgcggagcacacgcccacaaaccagcgggtagtgtgtcgtaacgggtaactctgcagcggaaccgactactttgggtgtccgtgtttccttttatctttatattggctgcttatggtgacaattaaagaattgttaccatatagctattggattggccatccggtgtgcaacagagcaattatttacctatttattggttttgtaccattaaccttgaattctgtgaccacccttaattatatcttgactcttaacgcagctaaac

SEQ ID NO: 18088 - DNA, 746 bp, synthetic construct; identical to SEQ ID NO: 1122
  source 1..746: mol_type = other DNA

SEQ ID NO: 18089 - DNA, 747 bp, synthetic construct
  source 1..747: mol_type = other DNA
ttaaaacagcctgtgggttgtacccactcacaggacccacgcggtgctagcactctggttccacggagcctttgtgcgcctgttttacgtcccctccccaatttgtaacttagaagcaatttacagcactgatcaatagcaggcatggcgcaccagctatgtcttgatcaagcacctctgtttccccggaccgagtatcaatagactgttcacacggtcgaaggagaaagcgttcgttatccggctaactacttcgagaaacccagtagcgccattgaaactgcagagtgtttcgctccacacttcccccgtgtagatcaggtcgatgagtcactgcaatccccacgggcgaccgtggcagtggctgcgttggcggcctgcctatggggtaacccataggacgctctaatgtggacatggtgcgaagagtctattgagctagttagtagtcctccggcccctgaatgcggctaatcctaactgcggagcacatgccttcaatccagagggtagtgtgtcgtaatgggcaactctgcagcggaaccgactactttgggtgtccgtgtttccttttattctcacattggctgcttatggtgacaattacagaattgttaccatatagctattggattggccatccggtgtgcaatagagctattatatacctatttgttggctttgtaccactaaccttaaaatctgtaatcactctcgagtatatattgacccttaatacaattaaac

SEQ ID NO: 18090 - DNA, 733 bp, synthetic construct
  source 1..733: mol_type = other DNA
gggttgcacccacccacaggacccacgcggtgctagcactctggtcccacgggacctttgtgcgcctgttttacgtcccctccccaattcgtaacttagaagcaatttgcaacactgatcagtagcaggcatggcgcaccagctatgtcttgatcaagcacttctgtttccccggaccgagtatcaatagactgttcacacggttgaaggagaaagcgtccgttatccggctaactacttcgagaaacctagtagcgccattgaaactgcagagtgtttcgctccacacttcccccgtgtagatcaggttgatgagtcactgcaatccccacgggcgaccgtggcagtggctgcgctggcggcctgcctatggggcaacccataggacgctctaatgtggacatggtgcgaagagtctattgagctagttagtagtcctccggcccctgaatgcggctaatcctaactgtggagcacatgccttcaatccagagggtagtgtgtcgtaatgggcaactctgcagcggaaccgactactttgggtgtccgtgtttccttttattcttacattggctgcttatggtgacaattacagaattgttaccatatagctattggattggccatccggtgtgtaatagagctattatatacctatttgttggctttgtaccactgaccttaaaatctgtaaccactctcgagtgtatattaacccttaatacaatcaaac

SEQ ID NO: 18091 - DNA, 735 bp, synthetic construct
  source 1..735: mol_type = other DNA
ctgtgggttgttcccacccacagggcccactgggcgccagcactctgattccacggaatctttgtgcgcctgttttacaacccttccccaacttgtaacgtagaagtaatacacactactgatcaatagcaggcatggcgcgccagtcatgtctcgatcaagcacttctgttcccccggactgagtatcaatagactgctcacgcggttgaaggagaaaacgttcgttacccggctaactacttcgagaaacctagtagcaccatagaagctgcagagtgtttcgctcagcacttcccccgtgtagatcaggctgatgagtcactgcaatccccacgggtgaccgtggcagtggctgcgttggcggcctgcctatggggcaacccataggacgctctaatgtggacatggtgcgaagagtctattgagctagttagtagtcctccggcccctgaatgcggctaatcctaactgcggagcacatgccttcaacccagaaggtagtgtgtcgtaacgggcaactctgcagcggaaccgactactttgggtgtccgtgtttctttttattcctatattggctgcttatggtgacaatcacggaattgttgccatatagctattggattggccatccggtgtctaatagagctattgtgtacctatttgttggatttactccgctatcacataaatctctgaacactttgtgctttatattgaacttaaacacccgaaa

SEQ ID NO: 18092 - DNA, 748 bp, synthetic construct
  source 1..748: mol_type = other DNA
ttaaaacagcctgtgggttgcacccactcacagggcccacgtggcgctagcactctggttctacggaacctttgtgcgcctgttttacgccccctccccaatttgcaacttagaagcaatacacaacactgatcaacagcaggcatggcgcaccagctatgtcttgatcaagcacttctgtttccccgggccgagtatcaatagactgttcacacggttgaaggagaaagcgcccgttatccggctaactacttcgagaagcctagtagcaccattgaagctgcagagtgtttcgctcagcacttccccccgtgtagatcaggtcgatgagtcactgcaatccccacgggcgaccgtggcagtggctgcgctggcggcctgcctatggggcaacccataggacgctctaatgtggacatggtgcgaagagtctattgagctagttagtagtcctccggcccctgaatgcggctaatcctaactgtggagcacatgccttcaatccagagggtagtgtgtcgtaatgggcaactctgcagcggaaccgactactttgggtgtccgtgtttccttttattcttacattggctgcttatggtgacaattacagaattgttaccatatagctattggattggccatccggtgtgcaatagagctattatatacctgtttgttggctttgtaccactaaccttaaaatctataatcaccctcgattttatattaacccttaatacaatcaaac

SEQ ID NO: 18093 - DNA, 748 bp, synthetic construct
  source 1..748: mol_type = other DNA
ttaaaacagcctgtgggttgttcccacccacagggcccactgggcgctagcactctgatttcacgaaatctttgtgcgcctgttttatatcccttcccccagtctgaaacatagaagcaatgcgcatcactgatcaatagcaggcgtaacgcgccagttacgtcatgatcaagcacatctgtctccccggaccgagtatcaatagactgcttgcgcggttgaaggagaaacagttcgttacccggctaactacttcgagaagcccagtagcaccatggaagctgtagggtgtttcgctcagcacttcccccgtgtagatcaggtcgatgagtcactgcaacccccacaggcgactgtggcagtggctgcgttggcggcctgcctatggggagacccataggacgctctaatgtggacatggtgtgaagagcctattgagctagttagtagtcctccggcccctgaatgcggctaatcctaactgcggagcacacgccctcaacccagagggtagtgtgtcgtaacgggcaactctgcagcggaaccgactactttgggtgtccgtgtttcttattattcttatattggctgcttatggtgacaattacagaattgttaccatatagctattggattggccatccggtgtgcaatagagctgttatatacctgtttgttggttttgtgccactgactttaaaatctatagttactcttaatttcatattggctctcaacacaattaaac

SEQ ID NO: 18094 - DNA, 748 bp, synthetic construct
  source 1..748: mol_type = other DNA
ttaaaacagcctgtgggttgttcccacccacagggcccactgggcgctagcactctgatttcacgaaatctttgtgcgcctgttttatatcccttcccccagtctgaaacatagaagcaatgcgcatcactgatcaatagcaggcgtaacgcgccagttacgtcatgatcaagcacatctgtctccccggaccgagtatcaatagactgcttgcgcggttgaaggagaaacagttcgttacccggctaactacttcgagaagcccagtagcaccatggaagctgcagggtgtttcgctcagcacttcccccgtgtagatcaggtcgatgagtcactgcaacccccacaggcgactgtggcagtggctgcgttggcggcctgcctatggggagacccataggacgctctaatgtggacatggtgtgaagagcctattgagctagttagtagtcctccggcccctgaatgcggctaatcctaactgcggagcacacgccctcaacccagagggtagtgtgtcgtaacgggcaactctgcagcggaaccgactactttgggtgtccgtgtttcttattattcttatattggcagcttatggtgacaattacagaattgttaccatatagctattggattggccatccggtgtgcaatagagctgttatatacctgtttgttggttttgtgccactaactttaaaatctatagtcactcttaatttcatattggctctcaacacaattaaac

SEQ ID NO: 18095 - DNA, 748 bp, synthetic construct
  source 1..748: mol_type = other DNA
ttaaaacagcctgtgggttgttcccacccacagggcccactgggcgctagcactctgatttcacggaatctttgtgcgcctgttttacatcccttcccctagtctgaaacatagaagcaatgcgcatcactgatcaatagtaggcgtaacgcgccagttacgtcatgatcaagcacatctgtctccccggaccgagtatcaatagactgcttgcgcggttgaaggagaaacagttcgttacccggctaactacttcgagaagcccagtagcaccatggaagctgcagggtgtttcgctcagcacttcccccgtgtagatcaggtcgatgagtcactgcaacccccacaggcgactgtggcagtggctgcgttggcggcctgcctatggggagacccataggacgctctaatgtggacatggtgtgaagagcctattgagctagttagtagtcctccggcccctgaatgcggctaatcctaactgcggagcacacgccctcaacccagagggtagtgtgtcgtaacgggcaactctgcagcggaaccgactactttgggtgtccgtgtttcttattattcttatattggctgcttatggtgacaattacagaattgttaccatatagctattggattggccatccggtgtgcaacagagctgttatatacctgtttgttggttttgtgccactaacttcaaaatctatagttactcttaatttcatattggctctcaacataattaaac

SEQ ID NO: 18096 - DNA, 748 bp, synthetic construct
  source 1..748: mol_type = other DNA
ttaaaacagcctgtgggttgttcccacccacagggcccactgggcgctagcaccctgatttcacggaatctttgtgcgcctgttttatatcccttcccccagtctgaaacatagaagcaatgcgcatcactgatcaatagcaggcgtaacgcgccagttacgtcatgatcaagcacatctgtctccccggaccgagtatcaatagactgcttgcgcggttgaaggagaaagagttcgttacccggctaactacttcgagaagcccagtagcaccatggaagctgcagggtgtttcgctcggcacttcccccgtgtagatcaggtcgatgagtcactgcaacccccacaggcgactgtggcagtggctgcgttggcggcctgcctatggggagacccataggacgctctaatgtgaacatggtgtgaagagcctattgagctagttagtagtcctccggcccctgaatgcggctaatcctaactgcggagcacacgccctcaacccagggggtagtgtgtcgtaacgggcaactctgcagcggaaccgactactttgggtgtccgtgtttcttattattcttatattggctgcttatggtgacaattacagaattgttaccatatagctattggattggccatccggtgtgcaatagagctgttatatacctgtttgttggttttgtgccactaactttaaaatctatagttactcttgatttcatattagctctcaacacaattaaac

SEQ ID NO: 18097 - DNA, 740 bp, synthetic construct
  source 1..740: mol_type = other DNA
ttaaaacagctgtgggttgcacccactcacagggcccactgggcgcaagcactctggtacctcggtacctttgtgcgcctgttttataaccccccccagtgaaacttagaagcagcaaaccacgatcaatagcaggcgtaacgctccagttatgtcttgatcaagcacttctgtttccccggactgagtatcaatagactgctcgcgcggttgaaggagaaaacgttcgttatccggctaactacttcgggaaacctagtagcatcatgaaagttgcggagagcttcgttcagcactcccccagtgtagatcaggtcgatgagtcaccgcattccccacgggcgaccgtggcggtggctgcgttggcggcctgcccatggggtaacccatggggcgctctaatacagacatggtgcgaagagtctactgagctagttagtagtcctccggcccctgaatgcggctaatcccaactgcggagcacacgcccacaagccagcgggtagtgtgtcgtaacgggcaactctgcagcggaaccgactactttgggtgtccgtgtttccttttatctttatattggctgcttatggtgacaattgaagagttgttaccatatagttattggattggccatccggtgtgtaacagagcaattgtttacctatttattggttttgtaccattaaccttgaagtctgtgaccacccttaattatatcttgaccctcaacacagctaaac

SEQ ID NO: 18098 - DNA, 740 bp, synthetic construct
  source 1..740: mol_type = other DNA
ttaaaacagctgtgggttgcacccactcacagggcccactgggcgcaagcactctggtacctcggtacctttgtgcgcctgttttataaccccccccagtgaaacttagaagcagcaaaccacgatcaatagcaggcataacgctccagttatgtcttgatcaagcacttctgttttcccggactgagtatcaatagactgctcgcgcggttgaaggagaaaacgttcgttatccggctaactacttcgggaaacctagtagcatcatgaaagttgcggagagcttcgttcagcactcccccagtgtagatcaggtcgatgagtcaccgcattccccacgggcgaccgtggcggtggctgcgttggcggcctgcctatggggtaacccatggggcgctctaatacggacatggtgcgaagagtctactgagctagttagtagtcctccggcccctgaatgcggctaatcccaactgcggagcacacgcccacaagccagcgggtagtgtgtcgtaacgggcaactctgcagcggaaccgactactttgggtgtccgtgtttccttttatctttatattggctgcttatggtgacaattgaagagttgttaccatatagctattggattggccatccggtgtgcaacagagcaattgtttacctatttattggttttgtaccattaaccttgaagtctgtgaccacccttaattatatcttgaccctcaacacagctaaac

SEQ ID NO: 18099 - DNA, 740 bp, synthetic construct
  source 1..740: mol_type = other DNA
ttaaaacagctgtgggttgcacccactcacagggcccactgggcgcaagcactctggtacctcggtacctttgtgtgcctgttttataaccccccccagtgaaacttagaagcagcaaaccacgatcaatagcaggcataacgctccagttatgtcttgatcaagcacttctgtttccccggactgagtatcaatagactgctcgcgcggttgaaggagaaaacgttcgttatccggctaactacttcgggaaacctagtagcatcatgaaagttgcggagagcttcgttcagcactcccccagtgtagatcaggtcgatgagtcaccgcgttccccacgggcgaccgtggcggtggctgcgttggcggcctgcccatggggtaacccatggggcgctctaatacggacatggtgcgaagagtctactgagctagttagtagtcctccggcccctgaatgcggctaatcccaactgcggagcacacgcccacaagccagcgggtagtgtgtcgtaacgggcaactctgcagcggaaccgactactttgggtgtccgtgtttccttttatctttatattggctgcttatggtgacaattgaagagttgttaccatatagctattggattggccatccggtgtgcaacagagcaattgtttacctatttattggttttgtaccattaaccttgaagtctgtgaccacccttaattatatcttgaccctcaacacagctaaac

SEQ ID NO: 18100 - DNA, 736 bp, synthetic construct
  source 1..736: mol_type = other DNA
tccgatcggttgttcccacccacagggcctactgggcgccagcactctgattccacggaacctttgtgcgcctgttttacaaccctccccaatttgtaacgtagaagtgatacacactactgatcaatagtaggcatggcacgccagtcatgttatgatcaagcacatctgttcccccggactgagtatcaatagactgctcacgcggttgaaggagaaaacgttcgttacccggctaactacttcgagaaacctagtagcaccatggaagctgcggagtgtttcgctcagcacttcccccgtgtagatcaggtcgatgagtcactgcaatccccacgggtgaccgtggcagtggctgcgttggcggcctgcctatggggcaacccataggacgctctaatgtggacatggtgcgaagagtctattgagctagttagtagtcctccggcccctgaatgcggctaatcctaactgcggagcacatgccttcaacccaggaggtggtgtgtcgtaacgggtaactctgcagcggaaccgactactttgggtgtccgtgtttccttttatccttatattggctgcttatggtgacaattacggaattgttgccatatagctattggattggccatccggtgtctaatagagccattgtatacctatttgttggatttactcccctatcgtataaatctctaaacactttgtgcttcatattgaacttaaacacacgaaa

SEQ ID NO: 18101 - DNA, 736 bp, synthetic construct
  source 1..736: mol_type = other DNA
tccgatgggttgttcccacccacagggcctactgggcgccagcactctgattccacggaatctttgtgcgcctgttttacaaccctccccaatttgcaacgtagaagtgatacacactaccgatcaatagtaggcatggcgcgccagtcatgttatgatcaagcacttctgttcccccggactgagtatcaatagactgctcacgcggttgaaggagaaaacgttcgttacccggctaactacttcgagaaacctagtagcaccatggaagctgcggagtgtttcgctcagcacttcccccgtgtagatcaggtcgatgagtcactgcaatccccacgggtgaccgtggcagtggctgcgttggcggcctgcctatggggcaacccataggacgctctaatgtggacatggtgcgaagagtctattgagctagttagtagtcctccggcccctgaatgcggctaatcctaactgcggagcacatgccttcaacccaggaggtggtgtgtcgtaacgggtaactctgcagcggaaccgactactttgggtgtccgtgtttccttttatccttatattggctgcttatggtgacaatcacggagttgttgccatatagctattggattggccatccggtgtctaatagagctattgtatacctatttgttggatttactcccctatcgtatagatccctaaacactttgtgctttatattgaacttaaacacacgaaa

SEQ ID NO: 18102 - DNA, 748 bp, synthetic construct
  source 1..748: mol_type = other DNA
ttaaaacagcctgtgggttgtacccaccctcagggcccactgggcgctagcactctgattctgcggaatctttgtgcgcctgttttataaccctccccccgattcgtaatttagaagcaatgagcctcactgatcaacagtgggcgtggcgcaccagccacgtcttgatcaagcacttctgtttccccgggctgagtatcaatagactgcttgcgcggttgaaggagaaaacgcccgttatccggctaactacttcgagaaacctagtaacgccatcgaaattgcagagtgtttcgctcagcacttcccccgtgtagatcaggtcgatgagtcactgcaatccccacgggcgaccgtggcagtggctgcgttggcggcctgcctatggggcaacccataggacgctctaaaatggacatggtgtgaagagtctattgagctagttagtagtcctccggcccctgaatgcggctaatcctaactgcggagcgcatgcccccaaaccagagggtggtgcgtcgtaatgggtaactctgcagcggaaccgactactttgggtgtccgtgtttcattttactctcttattggctgcttatggtgacaattgaggaattgttaccatatagctattggattggccatccggtgtgcaacagagctattatttatctatttgttggtttcgtaccattaaatttaaaatctgtaaccactctacgctatatactgatcctcaatatagcaaagc

SEQ ID NO: 18103 - DNA, 747 bp, synthetic construct
  source 1..747: mol_type = other DNA
ttaaaacagcctgtgggttgcacccactcacagggcccacgtggcgctagcactctgattctacggaatctttgtgcgcctgttttacaacccctcccaatttgcaacttagaagcaatacacaacactgatcaacagcaggcatggcgcaccagccatgtcttgatcaagcacttctgttttccccggactgagtatcaatagactgctcacgcggttgaaggagaaagcgtccgttatccggctaactacttcgagaaacctagtagcaccattgaagctgcggagtgtttcgctcggcacttcccccgtgtagatcaggtcgatgagtcactgcaatccccacgggcgaccgtggcagtggctgcgctggcggcctgcctatggggcaacccataggacgctctaatgtggacatggtgcgaagagtctattgagctagttagtagtcctccggcccctgaatgcggctaatcctaactgcggagcacatgccctcaacccagagggtagtgtgtcgtaacgggcaactctgcagcggaaccgactactttgggtgtccgtgtttccttttatttttacattggctgcttatggtgacaatcacagaattgttaccatatagctattggattggccatccggtgtgcaatagagctattatatacctatttgttggctttgtaccactaaccttaaaatctataaccaccctcaactttatattaactctcaatacagtcaaac

SEQ ID NO: 18104 - DNA, 747 bp, synthetic construct
  source 1..747: mol_type = other DNA
ttaaaacagcctgtgggttgcacccactcacaggacccacgtggtgctagcactctggttctacggaacctttgtgcgcctgttttacgccccctccccaatttgcaacttagaagcaattcacaacactgatcaatagcaggcatggcgcaccagctatgtcttgatcaagcacttctgtttccccggaccgagtatcaatagactgttcacgcggttgaaggagaaagcgtccgttatccggctaactacttcgagaaacccagtagcgccattgaaactgcagagtgtttcgctccacacttcccccgtgtagatcaggtcgatgagtcactgcaatccccacgggcgaccgtggcagtggctgcgctggcggcctgcctatggggcaacccataggacgctctaatgtggacatggtgcgaagagtctattgagctagttagtagtcctccggcccctgaatgcggctaatcctaactgcggagcacatgccttcaatccagagggtagtgtgtcgtaatgggcaactctgcagcggaaccgactactttgggtgtccgtgtttccttctattctcacattggctgcttatggtgacaattacagaattgttaccatatagctattggattggccatccggtgtgcaatagagctattatatacctatttgttggctttgtaccactaaccttaaaatctgtaaccactctcgactatatattaaccctcaatacaatcaaac

SEQ ID NO: 18105 - DNA, 747 bp, synthetic construct
  source 1..747: mol_type = other DNA
ttaaaacagcctgtgggttgcacccactcacaggacccacgtggtgctagcactctggttctacggaacctttgtgcgcctgttttacgccccctccccaatttgcaacttagaagcaattcacaacactgatcaatagcaggcatggcgcaccagctatgtcttgatcaagcacttctgtttccccggaccgagtatcaatagactgttcacgcggttgaaggagaaagcgtccgttatccggctaactacttcgaaaaacccagtagcgccattgaaactgcagagtgtttcgctccacacttcccccgtgtagatcaggtcgatgagtcactgcaatccccacgggcgaccgtggcagtggctgcgctggcggcctgcctatggggcaacccataggacgctctaatgtggacatggtgcgaagagtctattgagctagttagtagtcctccggcccctgaatgcggctaatcctaactgcggagcacatgccttcaatccagagggtagtgtgtcgtaatgggcaactctgcagcggaaccgactactttgggtgtccgtgtttccttttattctcacattggctgcttatggtgacaattacagaattgttaccatatagctattggattggccatccggtgtgcaatagagctattatatacctatttgttggctttgtaccactaaccttaaaatctgtaaccactctcgactatatattaaccctcaatacaatcaaac

SEQ ID NO: 18106 - DNA, 747 bp, synthetic construct
  source 1..747: mol_type = other DNA
ttaaaacagcctgtgggttgtacccactcacagggcccacgtggtgctagcactctggttctatggaacccttgtgcgcctgttttacgccccctccccaatttgcaacttagaagcaattcacaacactgatcaatagcaggcatggcgtaccagctatgtcttgatcaagcacttctgtttccccggaccgagtatcaatagactgctcacgcggttgaaggagaaagcgtccgttatccggctaactacttcgagaaacccagtagcaccattgaaactgcagagtgtttcgctcggcacttcccccgtgtagatcaggtcgatgagtcactgcaatccccacgggcgaccgtggcagtggctgcgctggcggcctgcctatggggcaacccataggacgcttcaatgtggacatggtgcgaagagtcaattgagctagttagtagtcctccggcccctgaatgcggctaatcctaactgcggagcacatgccttcaatccagagggtagtgtgtcgtaatgggcaactctgcagcggaaccgactactttgggtgtccgtgtttccttttattctcacattggctgcttatggtgacaattacagaattgttaccatatagctattggattggccatccggtgtgcaatagagctattatatacctatttgttggctttgtaccactaaccttaagatctataaccaccctcggctttatattaaccctcaatacaatcaaac

SEQ ID NO: 18107 - DNA, 747 bp, synthetic construct
  source 1..747: mol_type = other DNA
ttaaaacagcctgtgggttgcacccactcacagggcccacgtggcgctagcactctgattctacggaatctttgtgcgcctgttttacaacccccccccaatttgcaacttagaagcaatacacaacactgatcaacagcaggcatggcgcaccagccatgtcttgatcaagcacttctgtttccccggactgagtatcaatagactgctcacgcggttgaaggagaaagcgtccgttatccggctaactacttcgagaaacctagtagcaccattgaagctgcggagtgtttcgctcggcacttcccccgtgtagatcaggccgatgagtcactgcaatccccacgggcgaccgtggcagtggctgcgctggcggcctgcctatggggcaacccataggacgctctaatgtggacatggtgcgaagagtctattgagctagttagtagtcctccggcccctgaatgcggctaatcctaactgcggagcacatgccctcaacccagagggtagtgtgtcgtaacgggcaactctgcagcggaaccgactactttgggtgtccgtgtttccttttattcttacattggctgcttatggtgacaatcacagaattgttaccatatagctattggattggccatccggtgtgcaatagagctattatacacctatttgttggctttgtaccactaaccttaaaatctataaccaccctcaactttatattaactctcaatacagtcaaac

SEQ ID NO: 18108 - DNA, 747 bp, synthetic construct
  source 1..747: mol_type = other DNA
ttaaaacagcctgtgggttgttcccacccacagggcccactgggcgctagcactctgattttacgaaatccttgtgtgcctgttttatatccctgccctaattcgtaacatagaagtaatgcgcaccactgatcaatagcaggcgtaacgcgccagttacgtctcgatcaagcacatctgtctccccggaccgagtatcaatagactgcttacgcggttgaaggagaaagcgttcgttatccggctaactacttcgagaagcccagtagcaccatggaagctgcagggtgtttcgctcagcacttcccccgtgtagatcaggtcgatgagccactgcaacccccacaggtgactgtggcagtggctgcgttggcggcctgcctatggggagacccataggacgctctaatgtggacatggtgcgaagagcctattgagctagttagtagtcctccggcccctgaatgcggctaatcctaactgcggagcacatgccttcaacccagagggtagtgtgtcgtaacgggcaactctgcagcggaaccgactactttgggtgtccgtgtttctttttattctcatattggctgcttatggtgacaattacagaattgttaccatatagctattggattggccatccggtgtgcaatagagctgttatatacctgtttgttggttttgtaccactaactttaaaatctatagctacccttaattttatactgaccctcaacacagttaaac

SEQ ID NO: 18109 - DNA, 747 bp, synthetic construct
  source 1..747: mol_type = other DNA
ttaaaacagcctgtgggttgcacccactcacagggcccacgtggcgctagcactctggttctacggaacctttgtgcgcctgttttacgccccctccccaatttgcaacttagaagcaatacgcaacactgatcaacagcaggcatggcgcaccagctatgtcttgatcaagcacttctgtttccccgggccgactatcaatagactgttcacacggttgaaggagaaagcgcccgttatccggctaactacttcgagaagcctagtagcaccatcgaagctgcagagtgtttcgctcagcacttcccccgtgtagatcaggtcgatgagtcactgcaatccccacgggcgaccgtggcagtggctgcgctggcggcctgcctatggggcaacccataggacgctctaatgtggacatggtgcgaagagtctattgagctagttagtagtcctccggcccctgaatgcggctaatcctaactgtggagcacatgccttcaatccagagggtagtgtgtcgtaatgggcaactctgcagcggaaccgactactttgggtgtccgtgtttccttttattcttacattggctgcttatggtgacaattacagaattgttaccatatagctattggattggccatccggtgtgcaatagagctattatatacctgtttgttggctttgtaccactaaccttaaaatctgtaatcaccctcgattttatattaacccttaatacaatcaaac

SEQ ID NO: 18110 - DNA, 747 bp, synthetic construct
  source 1..747: mol_type = other DNA
ttaaaacagcctgtgggttgcacccactcacaggacccacgtggtgctagcactctggttctacggaacccttgtgcgcctgttttacgccccctccccaatttgcaacttagaagcaattcacaacactgatcaatagcaggcatggcgcaccagccatgtcttgatcaagcacttctgtttccccggaccaagtatcaatagactgttcacgcggttgaaggagaaagcgtccgttatccggctaactacttcgagaaacccagtagcgccattgaaactgcagagtgtttcgctccacacttcccccgtgtagatcaggtcgatgagtcactgcaatccccacgggcgaccgtggcagtggctgcgctggcggcctgcctatggggcaacccataggacgctctaatgtggacatggtgcgaagagtctattgagctagttagtagtcctccggcccctgaatgcggctaatcctaactgcggagcacatgccttcaatccagagggtagtgtgtcgtaatgggcaactctgcagcggaaccgactactttgggtgtccgtgtttccttttattctcacattggctgcttatggtgacaattacagaattgttaccatatagctattggattggccatccggtgtgcaatagagctattatatacctatttgttggctttgtaccactaaccttaaaatctgtaaccactctcgactatatattaacccttaatacaatcaaac

SEQ ID NO: 18111 - DNA, 748 bp, synthetic construct
  source 1..748: mol_type = other DNA
ttaaaacagcctgtgggttgttcccacccacagggcccactgggcgctagcactctgatttcacgaaatctttgtgcgcctgttttatatcccttcccccagtctgaaacatagaagcaatgcgcatcactgatcaatagcaggcgtaacgcgccagttacgtcatgatcaagcacatctgtctccccggaccgagtatcaatagactgcttgcgcggttgaaggagaaacagttcgttacccggctaactacttcgagaagcccagtagcactatggaagctgcagggtgtttcgctcagcacttcccccgtgtagatcaggtcgatgagtcactgcaacccccacaggcgactgtggcagtggctgcgttggcggcctgcctatggggagacccataggacgctctaatgtggacatggtgtgaagagcctattgagctagttagtagtcctccggcccctgaatgcggctaatcctaactgcggagcacacgccctcaacccagagggtagtgtgtcgtaacgggcaactctgcagcggaaccgactactttgggtgtccgtgtttcttattattcttatattggctgcttatggtgacaattacagaattgttaccatatagctattggattggccatccggtgtgtaatagagctgttatatacctgtttgttggttttgtgccactgactttaaaatctatagttactcttaatttcatattggctctcaacacaattaaac

SEQ ID NO: 18112 - DNA, 747 bp, synthetic construct
  source 1..747: mol_type = other DNA
ttaaaacagcctgtgggttgttcccacccacagggcccactgggcgctagcactctgattttacgaaatccttgtgtgcctgttttatatcccttccccaacctgaaacatagaagtaatgcgcaccactgatcaatagcaggcgtaacgcgccagttacgtcacgatcaagcacatctgtctccccggaccgagtatcaatagactgcttacgcggttgaaggagaaagcgttcgttatccggctaactacttcgagaagcccagtagcaccatggaagctgcagggtgtttcgctcagcacttcccccgtgtagatcaggtcgatgagtcactgcaatccccacaggtgactgtggcagtggctgcgttggcggcctgcctatggggagacccataggacgctctaatgtggacatggtgcgaagagcctattgagctagttagtagtcctccggcccctgaatgcggctaatcctaactgcggagcacatgccttcaacccagatggtagtgtgtcgtaacgggtaactctgcagcggaaccgactactttgggtgtccgtgtttctttttattcttatattggctgcttatggtgacaattacagaattgttaccatatagctattggattggccatccggtgtgcaatagagctgttatatacctgtttgttggttttgtaccactgactttaaaatctataaccacccttaattttatattgaccctcaacacagtcaaac

SEQ ID NO: 18113 - DNA, 747 bp, synthetic construct; identical to SEQ ID NO: 1145
  source 1..747: mol_type = other DNA

SEQ ID NO: 18114 - DNA, 747 bp, synthetic construct
  source 1..747: mol_type = other DNA
ttaaaacagcctgtgggttgcacccactcacaggacccacgtggtgctagcactctggttctacggaacctttgtgcgcctgttttacgccccctccccaatttgcaatttagaagcgattcacaacacagatcaatagcaggcatggcgcaccagctatgtctcgatcaagcacttctgtttccccggaccgactatcaatagactgctcacgtggttgaaggagaaaacgtccgttatccggctaactacttcgagaaacctagtagcgccattgaaactgcagagtgtttcgctccacacttcccccgtgtagatcaggtcgatgagtcactgcaatccccacgggcgaccgtggcagtggctgcgctggcggcctgcctatggggcaacccataggacgctctaatgtggacatggtgcgaagagtctattgagctagttagtagtcctccggcccctgaatgcggctaatcctaactgcggagcacatgccttcaacccagagggtagtgtgtcgtaatgggcaactctgcagcggaaccgactactttgggtgtccgtgtttccttttattctcacattggctgcttatggtgacaattacagaattgttaccatatagctattggattggccatccggtgtgcaatagagctattatatacctatttgttggctttgtaccactaactttaaaatctgtaaccactctcgactatatattaaccctcaatacaaataaac

SEQ ID NO: 18115 - DNA, 747 bp, synthetic construct
  source 1..747: mol_type = other DNA
ttaaaacagcctgtgggttgcacccactcacaggacccacgtggtgctagcactctggttctacggaacctttgtgcgcctgttttacgccccctccccaatttgcaatttagaagcgattcacaacacagatcaatagcaggcatggcgcaccagctatgtctcgatcaagcacttctgtttccccggaccgactatcaatagactgctcacgtggttgaaggagaaaacgtccgttatccggctaactacttcgagaaacctagtagcgccattgaaactgcagagtgtttcgctccacacttcccccgtgtagatcaggtcgatgagtcactgcaatccccgcgggcgaccgtggcagtggctgcgctggcggcctgcctatggggcaacccataggacgctctaatgtggacatggtgcgaagagtctattgagctagttagtagtcctccggcccctgaatgcggctaatcctaactgcggagcacatgccttcaacccagagggtagtgtgtcgtaatgggcaactctgcagcggaaccgactactttgggtgtccgtgtttccttttattctcacattggctgcttatggtgataattacagaattgttaccatatagctattggattggccatccggtgtgcaatagagctattatatacctatttgttggctttgtaccactaactttaaaatctgtaaccactctcgactatatattaaccctcaatacaaataaac

SEQ ID NO: 18116 - DNA, 746 bp, synthetic construct
  source 1..746: mol_type = other DNA
ttaaaacagcctgtgggttgttcccacccacagggcccactggggcgctagcacactgattctgcgggatctttgtgcgcctgttttataacccttcccctaagtggcaacttagaagctttgtacaatcatgaccaatagtgggcgtggcgcgccagtcacgtcttggtcaagcacttctgtatccccggactgagtatcaatagactgctcacgcggttgaaggagaaaacgttcgttacccggctaactacttcgagaaacctagtagcaccatgaaagttgcggagtgtttcgctcagcacttcccccgtgtagatcaggtcgatgagtcactgtaaaccccacgggcgaccgtgacagtggctgcgttggcggcctgcccatggggtaacccatgggacgctctaatacagacatggtgcgaagagtctattgagctagttagcagtcctccggcccctgaatgcggctaatcctaactgcggagcgcgcaccctcaacccagggggcggcgtgtcgtaatgggtaactctgcagcggaaccgactactttgggtgtccgtgtttccttttactctttattggctgcttatggtgacaattgaaaagttgttaccatatagctattggattggccatccggtgtctaacagagctattgtttatctatttgttgcatacgtccctcttaatctcaaggtcattcaaactcttgattatatattgctccttaactgtaggaa

SEQ ID NO: 18117 - DNA, 747 bp, synthetic construct
  source 1..747: mol_type = other DNA
ttaaaacagcctgtgggttgcacccactcacaggacccacgtggtgctagcactctggttctacggaacctttgtgcgcctgttttacgccccctccccaatttgtaacttagaagcaatttacaacactgatcaatagcaggcatggcgcaccagctatgtcttgatcaagcacttctgtttccccggaccgagtatcaatagactgttcacacggttgaaggagaaagcgtccgttatccggctaactacttcgagaaacccagtagcgccattgaagctgcagagtgtttcgctccacacttcccccgtgtagatcaggtcgatgagtcactgcaatcctcacgggcgaccgtggcagtggctgcgctggcggcctgcctatggggcgacccataggacgctctaatgtggacatggtgcgaagagtctattgagctagttagtagtcctccggcccctgaatgcggccaatcctaactgcggagcacatgccttcaatccagagggtagtgtgtcgtaatgggcaactctgcagcggaaccgactactttgggtgtccgtgtttccttttattctcacactggctgcttatggtgacaattatagaattgttaccatatagctattggattggccatccggtgtgcaatagagctattatatacctgtttgttggctttataccactaaccttaaaatctgtaaccactctcgagtatatattaaccctcaatacaatcaaac

SEQ ID NO: 18118 - DNA, 747 bp, synthetic construct
  source 1..747: mol_type = other DNA
ttaaaacagcctgtgggttgcacccactcacaggacccacgtggtgctagcactctggttctacggaacccttgtgcgcctgttttacgccccctccccaatttgtaacttagaagcaatttacaacactgatcaatagcaggcatggcgcgccagctatgtcttgatcaagcacttctgtttccccggaccgagtatcaatagactgttcacacggttgaaggagaaagcgtccgttacccggctaactacttcgagaaacccagtagcgccattgaagctgcagagtgtttcgctccacacttcccccgtgtagatcaggtcgatgagtcactgcaatcctcacgggcgaccgtggcagtggctgcgctggcggcctgcctatggggcgacccataggacgctctaatgtggacatggtgcgaagagtctattgagctagttagtagtcctccggcccctgaatgcggctaatcctaactgcggagcacatgccttcaatccagagggtagtgtgtcgtaatgggcaactctgcagcggaaccgactactttgggtgtccgtgtttccttttattctcacattggctgcttatggtgacaattacagaattgttaccatatagctattggattggccatccggtgtgcaatagagctattatatacctatttgttggctttataccactaaccttaaaatctgtaaccactctcgagtatatattaaccctcaatacaatcaaac

SEQ ID NO: 18119 - DNA, 747 bp, synthetic construct
  source 1..747: mol_type = other DNA
ttaaaacagcctgtgggttgcacccactcacaggacccacgtggtgctagcactctggttctacggaacctttgtgcgcctgttttacgccccctccccaatttgtaacttagaagcaatttacaacactgatcaatagcaggcatggcgcaccagctatgtcttgatcaagcacttctgtttccccggaccgagtatcaatagactgttcacacggttgaaggagaaagcgtccgttatccggctaactacttcgagaaacccagtagcgccattgaagctgcagagtgtttcgctccacacttcccccgtgtagatcaggtcgatgagtcactgcaatcctcacgggcgaccgtggcagtggctgcgctggcggcctgcctatggggcgacccataggacgctctaatgtggacatggtgcgaagagtctattgagctagttagtagtcctccggcccctgaatgcggctaatcctaactgcggagcacatgccttcaatccagagggtagtgtgtcgtaatgggcaactctgcagcggaaccgactactttgggtgtccgtgtttccttttattctcacattggctgcttatggtgacaattacagaattgttaccatatagctattggattggccatccggtgtgcaatagagctattatatacctatttgttggctttataccactaactttaaaatctgtaaccactctcgagtatatattaaccctcaatacaatcaaac

SEQ ID NO: 18120 - DNA, 747 bp, synthetic construct
  source 1..747: mol_type = other DNA
ttaaaacagcctgtgggttgcacccactcacaggacccacgtggtgctagcactctggttctacggaacctttgtgcgcctgttttacgccccctccccaattcgtaacttagaagcaatttacaacactgatcaatagcaggcatggcgcaccagctatgtcttgatcaagcacttctgtttccccggaccgagtatcaatagactgttcacacggttgaaggagaaagcgtccgttatccggctaactacttcgagaaacccagtagcgccattgaagctgcagagtgtttcgctccacacttcccccgtgtagatcaggtcgatgagtcactgcaatcctcacgggcgaccgtggcagtggctgcgctggcggcctgcctatggggcgacccgtaggacgctctaatgtggacatggtgcgaagagtctattgagctagttagtagtcctccggcccctgaatgcggctaatcctaactgcggagcacatgccttcaatccagagggtagtgtgtcgtaatgggcaactctgcagcggaaccgactactttgggtgtccgtgtttccttttattctcacactggctgcttatggtgacaattacagaattgttaccatatagctattggattggccatccggtgtgcaatagagctattatatacctgtttgttggctttataccactaaccttaaaatctgtaaccactctcgagtatatattaaccctcaatacaatcaaac

SEQ ID NO: 18121 - DNA, 747 bp, synthetic construct
  source 1..747: mol_type = other DNA
ttaaaacagcctgtgggttgcacccactcacaggacccacgtggtgctagcactctggttctacggaacctttgtgcgcctgttttacgccccctccccaatttgtaacttagaagcaatttacaacactgatcaatagcaggcatggcgcaccagctatgtcttgatcaagcacttctgtttccccggaccgagtatcaatagactgttcacacggttgaaggagaaagcgtccgttatccggctaactacttcgagaaacccagtagcaccattgaagctgcagagtgtttcgctccacacttcccccgtgtagatcaggtcgatgagtcactgcaatcctcacgggcgaccgtggcagtggctgcgctggcggcctgcctatggggcgacccataggacgctctaatgtggacatggtgcgaagagtctattgagctagttagtagtcctccggcccctgaatgcggctaatcctaactgcggagcacatgccttcaatccagagggtagtgtgtcgtaatgggtaactctgcagcggaaccgactactttgggtgtccgtgtttccttttattctcacattggctgcttatggtgacaattacagaattgttaccatatagctattggattggccatccagtgtgcaatagagctattatatacctatttgttggctttataccactaaccttaaaatctgtaaccactctcgagtatatattaaccctcaatacaatcaaac

SEQ ID NO: 18122 - DNA, 747 bp, synthetic construct
  source 1..747: mol_type = other DNA
ttaaaacagcctgtgggttgcacccactcacaggacccacgtggtgctagcactctggttctacggaacctttgtgcgcctgttttacgccccctccccaatttgtaacttagaagcaatttacaacactgatcaatagcaggcatggcgcaccagctatgtcttgatcaagcacttctgtttccccggaccgagtatcaatagactgttcacacggttgaaggagaaagcgtccgttatccggctaactacttcgagaaacccagtagcgccattgaagctgcagagtgtttcgctccacacttcccccgtgtagatcaggtcgatgagtcactgcaatcctcacgggcgaccgtggcagtggctgcgctggcggcctgcctatggggcgacccataggacgctctaatgtggacatggtgcgaagagtctattgagctagttagtagtcctccggcccctgaatgcggctaatcctaactgcggagcacatgccttcaatccagagggtagtgtgtcgtaatgggcaactctgcagcggaaccgactactttgggtgtccgtgtttccttttattctcacactggctgcttatggtgacaattacagaattgttaccatatagctattggattggccatccggtgtgcaatagagctattatatacctgtttgttggctttataccactaaccttaaaatctgtaaccactctcgagtatatattaaccctcaatacaatcaaac

SEQ ID NO: 18123 - DNA, 747 bp, synthetic construct
  source 1..747: mol_type = other DNA
ttaaaacagcctgtgggttgcacccactcacaggacccacgtggtgctagcactctggttctacggaacccttgtgcgcctgttttacgccccctccccaatttgtaacttagaagcaatttacaacactgatcaatagcaggcatggcgcgccagctatgtcttgatcaagcacttctgtttccccggaccaagtatcaatacactgttcacacggttgaaggacaaagcgtccgttatccggctaactacttcgagaaacccagtaacgccattgaagctgcagagtgtttcgctccacacttcccccgtgtagatcaggtcgatgagtcactgcaatcctcacgggcgaccgtggcagtggctgcgctggcggcctgcctatggggcgacccataggacgctctaatgtggacatggtgcgaagagtctattgagctagttagtagtcctccggcccctgaatgcggctaatcctaactgcggagcacatgccttcaatccagagggtagtgtgtcgtaatgggcaactctgcagcgaaaccgactactttgggtgtccgtgtttccttttattctcacattggctgcttatggtgacaattacagaattgttaccatatagctattggattggccatccggtgtgcaatacatctattatatacctatttgttggctttataccactaaccttaaaatctgtaaccactctcgagtatatattaaccctcaatacaatcaaac

SEQ ID NO: 18124 - DNA, 747 bp, synthetic construct
  source 1..747: mol_type = other DNA
ttaaaacagcctgtgggttgcacccactcacaggacccacgtggtgctagcactctggttccacggaacctttgtgcgcctgttttacgccccctccccaatttgtaacttagaagcaatgtacaacactgatcaatagcaggcatggcgcaccagctatgtcttgatcaagcacttctgtttccccggaccgagtatcaatagactgttcacacggttaaaggagaaagcgtccgttatccggctaactacttcgagaaacccagtagcgccattgaagctgcagagtgtttcgctccacacttcccccgtgtagatcaggtcgatgagtcactgcaatccccacgggcgaccgtggcagtggctgcgctggcggcctgcctatggggcaacccataggacgctctaatgtggacatggtgcgaagagtctattgagctagttagtagtcctccggcccctgaatgcggctaatcctaactgcggagcacatgccttcaatccagagggtagtgtgtcgtgatgggcaactctgcagcggaaccgactactttgggtgtccgtgtttccttttattctcacattggctgcttatggtgacaattacagaattgttaccatatagctattggattggccatccggtgtgcaatagagctattatatacctatttgttggctttgtaccactaaccttaaaatccgtaaccactctcgagtatatattaaccctcaatacaatcaaac

SEQ ID NO: 18125 - DNA, 747 bp, synthetic construct
  source 1..747: mol_type = other DNA
ttaaaacagcctgtgggttgcacccactcacaggacccacgtggtgctagcactctggttctacggaacctttgtgcgcctgttttacgccccctccccaatttgtaacttagaagcaatttacaacactgatcaatagcaggcatggcgcaccagctatgtcttgatcaagcacttctgtttccccggaccgagtatcaatagactgttcacacggttgaaggagaaagcgtccgttatccggctagctacttcgagaaacccagtagcgccattgaagctgcagagtgtttcgctccacacttcccccgtgtagatcaggtcgatgagtcactgcaatcctcacgggcgaccgtggcagtggctgcgctggcggcctgcctatggggcgacccataggacgctctaatgtggacatggtgcgaagagtctattgagctagttagtagtcctccggcccctgaatgcggctaatcctaactgcggagcacatgccttcaatccagagggtagtgtgtcgtaatgggcaactctgcagcggaaccgactactttgggtgtccgtgtttccttttattctcacactggctgcttatggtgacaattacagaattgttaccatatagctattggattggccatccggtgtgcaatagagctattatatacctgtttgttggctttataccactaaccttaaaatctgtaaccactctcgagtatatattaaccctcaatacaatcaaac

SEQ ID NO: 18126 - DNA, 747 bp, synthetic construct
  source 1..747: mol_type = other DNA
ttaaaacagcctgtgggttgcacccactcacaggacccacgtggtgctagcactctggttctacggaacccttgtgcgcctgttttacgccccctccccaatttgtaacttagaagcaatttacaacactgatcaatagcaggcatggcgcgccagctatgtcttgatcaagcacttctgtttccccggaccgagtatcaatagactgttcacacggttgaaggagaaagcgtccgttacccggctaactacttcgagaaacctagtagcgccattgaagctgcagagtgtttcgctccacacttcccccgtgtagatcaggtcgatgagtcactgcaatcctcacgggcgaccgtggcagtggctgcgctggcggcctgcctatggggcgacccataggacgctctaatgtggacatggtgcgaaaagtctattgagctagttagtagtcctccggcccctgaatgcggctaatcctaactgcggagcacatgccttcaatccagagggtagtgtgtcgtaatgggcaactctgcagcggaaccgactactttgggtgtccgtgtttccttttattctcacattggctgcttatggtgacaattacagaattgttaccatatagctattggattggccatccggtgtgcaatagagctattatatacctatttgttggctttataccactaaccttaaaatctgtaaccactctcgagtatatattaaccctcaatacaatcaaac

SEQ ID NO: 18127 - DNA, 747 bp, synthetic construct
  source 1..747: mol_type = other DNA
ttaaaacagcctgtgggttgtacccactcacaggacccacgcggtgctagcactctggttccgcggaacctttgtgcgcctgttttacgtcccctccctaatttgtaacttagaagcaatttacagcactgatcaatagcaggcatggcgcaccagctatgtcttgatcaagcacctctgtttccccggaccgagtatcaatagactgttcacacggtcgaaggagaaagcgttcgttatccggctaactacttcgagaaacccagtagcgccattgaaactgcagagtgtttcgctccacacttcccccgtgtagatcaggtcgatgagtcactgcaatccccacgggcgaccgtggcagtggctgcgttggcggcctgcctatggggtaacccataggacgctctaatgtggacatggtgcgaagagtctattgagctagttagtagtcctccggcccctgaatgcggctaatcctaactgcggagcacatgccttcaatccagagggtagtgtgtcgtaatgggcaactctgcagcggaaccgactactttgggtgtccgtgtttccttttattctcacattggctgcttatggtgacaattacagaattgttaccatatagctattggattggccatccggtgtgcaatagagctattatatacctatttgttggctttgtaccactaaccttaaaatctgtaatcactctcgagtatatattgacccttaatacaattaaac

SEQ ID NO: 18128 - DNA, 747 bp, synthetic construct
  source 1..747: mol_type = other DNA
ttaaaacagcctgtgggttgtacccactcacaggacccacgcggtgctagcactctggttccacggaacctttgtgcgcctgttttacgtcccctccccaatttgtaacctagaagcaatttacagcactgatcaatagcaggcatggcgcaccagctatgtcttgatcaagcacctctgtttccccggaccgagtatcaatagactgttcacacggtcgaaggagaaagcgttcgttatccggctaactacttcgagaaacccagtagcgccattgaaactgcagagtgtttcgctccacacttcccccgtgtagatcaggtcgatgagtcactgcaatccccacgggcgaccgtggcagtggctgcgttggcggcctgcctatggggtaacccataggacgctctaatgtggacatggtgcgaagagtctattgagctagttagtaatcctccggcccctgaatgcggctaatcctaactgcggagcacatgccttcaatccagagggtagtgtgtcgtaatgggcaactctgcatcggaaccgactactttgggtgtccgtgtttccttttattctcacattggctgcttatggtgacaattaccgaattgctaccatatagctattggattggccatccggtgtgcaatacagctattatatacctatttgttggctttgtaccactaaccttaaaatctgtgatcactctcgagtatatattgacccttaatacaattaaac

SEQ ID NO: 18129 - DNA, 747 bp, synthetic construct
  source 1..747: mol_type = other DNA
ttaaaacagcctgtgggttgtacccactcacaggacccacgcggtgctagcactctggttccacggaacctttgtgcgcctgttttacgtcccttccccaatttgtaacttagaagcaatttacagcactgatcaatagcaggcatggcacaccagctatgtcttgatcaagtacctctgtttccccggaccgagtatcaatagactgttcacacggtcgaaggagaaagcgttcgttatccggctaactacttcgagaaacccagtagcgccattgaaactgcagagtgtttcgctccacacttcccccgtgtagatcaggtcgatgagtcactgcaatccccacgggcgaccgtggcagtggctgcgttggcggcctgcctatggggtaacccataggacgctctaatgtggacatggtgcgaagagtctattgagctagttagtagtcctccggcccctgaatgcggctaatcctaactgcggagcacatgccttcaatccagagggtagtgtgtcgtaatgggcaactctgcagcggaaccgactactttgggtgtccgtgtttccttttattctcacattggctgcttatggtgacaattacagaattgttaccatatagctattggattggccatccggtgtgcaatagagctattatatacctatttgttggctttgtaccactaaccttaagatctgtaatcactctcgagtatatattgacccttaatacaattaaac

SEQ ID NO: 18130 - DNA, 747 bp, synthetic construct
  source 1..747: mol_type = other DNA
ttaaaacagcctgtgggttgtacccactcacaggacccacgcggtgctagtactctggttccacggaacctttgtgcgcctgttttacgtcccctccccaatttgtaacttagaagcaatttacagcactgatcaatagcaggcatggcgcaccagctatgtcttgatcaagcacctctgtttccccggaccgagtatcaatagactgttcacacggtcgaaggagaaagcgttcgttatccggctaactacttcgagaaacccagtagcgccattgaaactgcagagtgtttcgctccacacttcccccgtgtagatcaggtcgatgagtcactgcaatccccacgggcgaccgtggcagtggctgcgttggcggcctgcctatggggtaacccataggacgctctaatgtggacatggtgcgaagagtctattgagctagttagtagtcctccggcccctgaatgcggctaatcctaactgcggagcacatgccttcaatccagagggtagtgtgtcgtaatgggcaactctgcagcggaaccgactactttgggtgtccgtgtttccttttattctcacattggctgcttatggtgacaattacagaattgttaccatatagctattggattggccacccggtgtgcaatagagctattatatacctatttgttggctttgtaccactaaccttaaaatctgtaatcactctcgagtatatattgacccttaatactattaaac

SEQ ID NO: 18131 - DNA, 747 bp, synthetic construct
  source 1..747: mol_type = other DNA
ttaaaacagcctgtgggttgtacccactcacaggacccacgcggtgctagcactctggttccacggaacctttgtgcgcctgttttacgtcccctccccaatttgtaacttagaagcaattcacagcactgatcaatagcaggcatggcgcaccagctatgtcttgatcaagcacctctgtttccccggaccgagtatcaatagactgttcacacggtcgaaggagaaagcgttcgttatccggctaactacttcgagaaacccagtagcgccattgaaactgcagagtgtttcgctccacacttcccccgtgtagatcaggtcgatgagtcactgcaatccccacgggcgaccgtggcagtggctgcgttggcggcctgcctatggggtaacccataggacgctctaatgtggacatggtgcgaagagtctattgagctagttagtagtcctccggcccctgaatgcggctaatcctaactgcggagcacatgccttcaatccagagggtaatgtgtcgtaatgggcaactctgcagcggaaccgactactttgggtgtccgtgtttccttttattctcacattggctgcttatggtgacaattacagaattgttaccatatagctattggattggccatccggtgtgcaatagagctattatatacctatttgttggctttgtaccactaaccttaaaatctgtaatcactctcgagtatatattgacccttaatacaattaaac

SEQ ID NO: 18132 - DNA, 747 bp, synthetic construct
  source 1..747: mol_type = other DNA
ttaaaacagcctgtgggttgtacccactcacaggacccacgcggtgctagcactctggttccacggaacctttgtgcgcctgttttacgtcccctccccaatttgtaacttagaagcaatttacagcactgatcaatagcaggcatggcgcaccagctatgtcttgatcaagcacctctgtttccccggaccgagtatcaatagactgttcacacggtcgaaggagaaagcgttcgttatccggctaactacttcgagaaacccagtagcgccattgaaactgcagagtgtttcgctccacacttcccccgtgtagatcaggtcgatgagtcactgcaatccccacgggcgaccgtggcagtggctgcgttggcggcctgcctatggggtaacccataggacgctctaatgtggacatggtgcgaagagtctattgagctagttagtagtcctccggcccctgaatgcggctaatcctaactgcggagcacatgccttcaatccagagggtagtgtgtcgtaatgggcaactctgcagcggaaccgactactttgggtgtccgtgtttccttttattctcacattggctgcttatggtgacaattacagaattgttaccatatagctattggattggccacccggtgtgcaatagagctattatatacctatttgttggctttgtaccactaaccttaaaatctgtaatcactctcgagtatatattgacccttaatactattaaac

SEQ ID NO: 18133 - DNA, 747 bp, synthetic construct
  source 1..747: mol_type = other DNA
ttaaaacagcctgtgggttgtacccactcacaggacccacgcggtgctagcactctggttccgcggaacctttgtgcgcctgttttacgtcccctccctaatttgtaacttagaagcaatttacagcactgatcaatagcaggcatggcgcaccagccatgtcttgatcaagcacctctgtttccccggactgagtatcaatagactgttcacacggtcgaaggagaaagcgttcgttatccggctaactacttcgagaaacccagtagcgccattgaaactgcagagtgtttcgctccacacttcccccgtgtagatcaggtcgatgagtcactgcaatccccacgggcgaccgtggcagtggctgcgttggcggcctgcctatggggtaacccataggacgctctaatgtggacatggtgcgaagagtctattgagctagttagtagtcctccggcccctgaatgcggctaatcctaactgcggagcacatgccttcaatccagagggtagtgtgtcgtaatgggcaactctgcagcggaaccgactactttgggtgtccgtgtttccttttattctcacattggctgcttatggtgacaattacagaattgttaccatatagctattggattggccgtccggtgtgcaatagagctattatatacctatttgttggctttgtaccactaaccttaaaatctgtaatcactctcgagtatatattgacccttaatacaattaaac

SEQ ID NO: 18134 - DNA, 747 bp, synthetic construct
  source 1..747: mol_type = other DNA
ttaaaacagcctgtgggttgtacccactcacaggacccacgcggtgctagcactctggttccacggaacctttgtgcgcctgttttacgtcccctccccaatttgtaacttagaagcaatttacagcactgatcaatagcaggcatggcgcaccagctatgtcttgatcaagcatctctgtttccccggaccgagtatcaatagactgttcacacggtcgaaggagaaagcgttcgttatccggctaactacttcgagaaacccagtagcgccattgaaactgcagagtgtttcgctccacacttcccccgtgtagatcaggtcgatgagtcactgcaatccccacgggcgaccgtggcagtggctgcgttggcggcctgcctatggggtaacccataggacgctctaatgtggacatggtgcgaagagtctattgagctagttagtagtcctccggcccctgaatgcggctaatcctaactgcggagcacatgccttcaatccagagggtagtgtgtcgtaatgggcaactctgcagcggaaccgactactttgggtgtccgtgtttccttttattctcacattggctgcttatggtgacaattacagaattgttaccatatagctattggattggccatccggtgtgcactagagctattatatacctatttgttggctttgtaccactaaccttaaaatctgtaatcactctcgagtatatattgacccttaatacaattaaac

SEQ ID NO: 18135 - DNA, 747 bp, synthetic construct
  source 1..747: mol_type = other DNA
ttaaaacagcctgtgggttgcacccacccacaggacccacgcggtgctagcactctggttctacggtacctttgtgcgcctgttttacgtcccctccccgatttgtaacttagaagcaatttgcaacactgatcagtagcaggcatagcgcaccagctatgtcttgatcaagcacttctgtttccccggaccgagtatcaatagactgttcacacggttgaaggagaaagcgtccgttatccggctaactacttcgagaaacccagtagcgccattgaaactgcagagtgtttcgctccacacttcccccgtgtagatcaggtcgatgagtcactgcaatccccacgggcgaccgtggcagtggctgcgctggcggcctgcctatggggcaacccataggacgctctaatgtggacatggtgtgaagagtctattgagctagttagtagtcctccggcccctgaatgcggctaatcctaactgcggagcacatgccttcaatccagagggtagtgtgtcgtaatgggcaactctgcagcggaaccgactactttgggtgtccgtgtttccttttattctcacattggctgcttatggtgacaattacggaattgttaccatatagctattggattggccatccggtgtgcaatagagctattatatacctatttgttggctttgtaccactgaccttaaaatctataaccactctcgagtgtatattaacccttaatacaatcaaac

SEQ ID NO: 18136 - DNA, 747 bp, synthetic construct
  source 1..747: mol_type = other DNA
tttaaaacagcctgtgggttgcacccactcacagggcccactgggcgctagcactccgattctgcggaatctttgtgcgcctgttttataaccctccccccgaaacttgcaacttagaagttatgtacgttactgatcaacagcaggcgtggcacaccagccatgtcttgatcaagcacttctgtaccccggactgagtatcaatagactgctcacgtggtcgaaggagaaaacgttcgttatccggctaactacttcgagaaacctagtagcaccactgaaactgcggagtgtttcgctcagcacttcccccgtgtagatcaggtcgatgagtcactgcttaccccacgggtgaccgtggcagtggctgcgttggcggcctgcctatggggcaacccgtaggacgctctaaagtggacatggtgcgaagagtctattgagctagttagtagtcctccggcccctgaatgcggctaatcctaactgcggagcgcatgccttcaaaccagagggtggtgcgtcgtaacgggtaactctgcagcggaaccgactactttgggtgtccgtgtttctcttattctcataatggctgcttatggtgacaattgaggaattgttaccatatagctattggattggccatccggtgtgcaacagagctattatctacttgtttgttggatacattccattaacacctaaatccttcaatacattgcactatatcttgacactgaacgcaagaaa

SEQ ID NO: 18137 - DNA, 747 bp, synthetic construct
  source 1..747: mol_type = other DNA
tttaaaacagcctgtgggttgtacccacccacagggcccactgggcgctagcactccgattctgcggaatctttgtgcgcctgttttataaccctcccccgaaacttgcaacttagaagttatgtacgttactgatcaacagcaggcgtggcacaccagccatgtcttgatcaagcacttctgtacccccggactgagtatcaatagactgcttacgtggtcgaaggagaaaacgttcgttatccggctaactacttcgagaaacctagtagcaccactgaaactgcggagtgtttcgctcagcacttcccccgtgtagatcaggtcgatgagtcactgcttaccccacgggtgaccgtggcagtggctgcgttggcggcctgcctatggggcaacccataggacgctctaaagtggacatggtgcgaagagtctattgagctagttggtagtcctccggcccctgaatgcggctaatcctaactgcggagcgcatgccctcaagccagagggtggtgcgtcgtaacgggtaactctgcagcggaaccgactactttgggtgtccgtgtttcttttattctcataatggctgcttatggtgacaattgaggaattgttaccatatagctattggattggccatccggtgtgcaacagagctattatctacttgtttgttggatacattccactaacacctaaatcctttaatacactgcactatattctgacgctgaacgcaagaaa

SEQ ID NO: 18138 - DNA, 747 bp, synthetic construct
  source 1..747: mol_type = other DNA
tttaaaacagcctgtgggttgtacccactcacagggcccactgggcgctagcactccgattctgcggaatctttgtgcgcctgttttataaccctcccccgagatctgcaacttagaagttatgtacgttactgatcaacagcaggcgtggcacaccagccatgtcttgatcaagcacttctgtacccccggactgagtatcaatagactgcttgcgtggtcgaaggagaaaacgttcgttatccggccaactacttcgagaaacctagtagcaccactgaaactgcggagtgtttcgctcagcacttcccccgtgtagatcaggtcgatgagtcactgcttaccccacgggtgaccgtggcagtggctgcgttggcggcctgcctatggggcaacccataggacgctctaaagtggacatggtgcgaagagtctattgagctagttggtagtcctccggcccctgaatgcggctaatcctaactgcggagcgcatgccctcaaaccagagggtggtgcgtcgtaacgggtaactctgcagcggaaccgactactttgggtgtccgtgtttcttttattctcataatggctgcttatggtgacaattaaggaattgttaccatatagctattggattggccatccggtgtgcaacagagctattatctacttgtttgttggatacatcccactaacacctaaatcctttaatacactgcactatattctgacgctgaacgcaagaaa

SEQ ID NO: 18139 - DNA, 747 bp, synthetic construct
  source 1..747: mol_type = other DNA
tttaaaacagcctgtgggttgtacccacccacagggcccactgggcgctagcactccgattctgcggaatctttgtgcgcctgttttataaccctcccccgaaacttgcaacttagaagttatgtacgttactgatcaacagcaggcgtggcacaccagccatgtcttgatcaagcacttctgtacccccggactgagtatcaatagactgcttgcgtggtcgaaggagaaaacgttcgttatccggccaactacttcgagaaacctagtagcaccactgaaactgcggagtgtttcgctcagcacttcccccgtgtagatcaggtcgatgagtcactgcttaccccacgggtgaccgtggcagtggctgcgttggcggcctgcctatggggcaacccataggacgctctaaagtggacatggtgcgaagagtctattgagctagttagtagtcctccggcccctgaatgcggctaatcctaactgcggagcgcatgccctcaaaccagagggtggtgcgtcgtaacgggtaactctgcagcggaaccgactactttgggtgtccgtgtttcttttattctcataatggctgcttatggtgacaattaaggaattgttaccatatagctattggattggccatccggtgtgcaacagagctattatctacttgtttgttggatacatcctactaacacctaaatcctttaatacactgcactatattctgacgctgaacgcaagaaa

SEQ ID NO: 18140 - DNA, 747 bp, synthetic construct
  source 1..747: mol_type = other DNA
tttaaaacagcctgtgggttgtacccacccacagggcccactgggcgctagcactccgattctgcggaatctttgtgcgcctgttttataaccctcccccgaaacttgcaacttagaagttatgtacgttactgatcaacagcaggcgtggcacaccagccatgtcttgatcaagcacttctgtacccccggactgagtatcaatagactgctcacgtggtcgaaggagaaaacgttcgttatccggctaactacttcgagaaacttagtagcaccattgaaactgcggagtgtttcgctcagcacttcccccgtgtagatcaggtcgatgagtcactgcttaccccacgggtgaccgtggcagtggctgcgttggcggcctgcctatggggcaacccataggacgctctaaagtggacatggtgcgaagggtctattgagctagttagtagtcctccggcccctgaatgcggctaatcctaactgcagagcgcatgccctcaaaccagagggtggtgcgtcgtaacgggtaactctgcagcggaaccgactactttgggtgtccgtgtttcttttattctcataatggctgcttatggtgacaattgaggaattgttaccatatagctattggattggccatccggtgtgcaacagagctattatctacttgtttgttggatacattccattaacacttaaatccttcaacacattgcactacattctaacgctgaacacaagaag

SEQ ID NO: 18141 - DNA, 747 bp, synthetic construct
  source 1..747: mol_type = other DNA
tttaaaacagcctgtgggttgtacccacccacagggcccactgggcgctagcactccgattctgcggaatctttgtgcgcctgttttataaccctcccccgaaacttgcaacttagaagttatgtacgttactgatcaacagcaggcgtggcacaccagccatgtcttgatcaagcacttctgtacccccggactgagtatcaatagactgctcacgtggtcgaaggagaaaacgttcgttatccggctaactacctcgagaaacctagtagcaccactgaaactgcggagtgtttcgctcagcacttcccccgtgtagatcaggtcgatgagtcactgcttaccccacgggtgaccgtggcagtggctgcgttggcggcctgcctatggggcaacccataggacgctctaaagtggacatggtgcgaagagtctattgagctagttagtagtcctccggcccctgaatgcggctaatcctaactgcggagcgcatgccttcaaaccagagggtggtgcgtcgtaacgggtaactctgcagcggaaccgactactttgggtgtccgtgtttctcttattctcataatggctgcttatggtgacaattgaggaattgttaccatatagctattggattggccatccggtgtgcaacagagctattatttacttgtttgttggatacattccattaacacctaaatccttcaatacattgcactatatcttgacactgaacgcaagaaa

SEQ ID NO: 18142 - DNA, 747 bp, synthetic construct
  source 1..747: mol_type = other DNA
tttaaaacagcctgtgggttgtacccacccacagggcccactgggcgctagcactccgattctgcggaatctttgtgcgcctgttttataaccctcccccgaaacttgcaacttagaagttatgtacgttactgatcaacagcaggcgtggcacaccagccatgtcttgatcaagcacttctgtacccccggactgagtatcaatagactgctcacgtggtcgaaggagaaaacgttcgttatccggctagctacttcgagaaacttagtagcaccactgaaactgcggagtgtttcgctcagcacttcccccgtgtagatcaggtcgatgagtcactgcttaccccacgggtgaccgtggcagtggctgcgttggcggcctgcctatggggcaacccataggacgctctaaagtggacatggtgcgaagagtctattgagctagctagtagtcctccggcccctgaatgcggctaatcctaactgcggagcgcatgccctcaaaccagagggtggtgcgtcgtaacgggtaactctgcagcggaaccgactactttgggtgtccgtgtttcttttattctcataatggctgcttatggtgacaattgaggaattgttaccatatagctattggattggccatccggtgtgcaacagagctattatctacttgtttgttggatacattccattaacacttaaatccttcaatacattgcactacattctaacgctgaacacaagaag

SEQ ID NO: 18143 - DNA, 747 bp, synthetic construct
  source 1..747: mol_type = other DNA
tttaaaacagcctgtgggttgtacccacccacagggcccactgggcgctagcactccgattctgcggaatctttgtgcgcctgttttataaccctccccccgaaactcgcaacttagaagttatgtacgtcactgatcaacagcaggcgtggcacaccagccatgtcttgatcaagcacttctgtaccccggactgagtatcaatagactgctcacgtggtcgaaggagaaaacgttcgttatccggctaactacttcgagaaacctagtagcaccactgaaactgcggagtgtttcgctcagcacttcccccgtgtagatcaggtcgatgagtcactgcttaccccacgggtgaccgtggcagtggctgcgttggcggcctgcctatggggcaacccataggacgctctaaagtggacatggtgcgaagagtctattgagctagttagtagtcctccggcccctgaatgcggctaatcctaactgcggagcgcatgccttcaaaccagagggtggtgcgtcgtaacgggtaactctgcagcggaaccgactactttgggtgtccgtgtttctcttattctcataatggctgcttatggtgacaattgaggaattgttaccatatagctattggattggccatccggtgtgcaacagagctattatctacttgtttgttggatacattccattaacacctaaatccttcaatacattgcactatatcttgacactgaacgcaagaaa

SEQ ID NO: 18144 - DNA, 747 bp, synthetic construct
  source 1..747: mol_type = other DNA
tttaaaacagcctgtgggttgtacccacccacagggcccactgggcgctagcactccgattctgcggaatctttgtgcgcctgttttataaccctcccccgaaacttgcaacttagaagttatgtacgttactgatcaacagcaggcgtggcacaccagccatgtcttgatcaagcacttctgtacccccggactgagtatcaatagactgctcacgtggtcgaaggagaaaacgttcgttacccgactaactacttcgagaaacctagtagcaccaccgaagctgcggagtgtttcgctcagcacttcccccgtgtagatcaggtcgatgagtcactgcttaccccacgggtgaccgtggcagtggctgcgttggcggcctgcctatggggcaacccataggacgctctaaagtggacatggtgcgaagagtctattgagctagttagtagtcctccggcccctgaatgcggctaatcctaactgcggagcgcatgccctcaaaccagggggttgtgcgtcgtaacgggcaactctgcagcggaaccgactactttgggtgtccgtgtttcttttattctcatgatggctgcttatggtgacaattgaggaattgttaccatatagctattggattggccatccggtgtgcaacagagctattatctacctgtttgttggatacattccattaacacttacatccttcaatacattgcactatattctaacgctgaacgtaagaaa

SEQ ID NO: 18145 - DNA, 747 bp, synthetic construct
  source 1..747: mol_type = other DNA
tttaaaacagcctgtgggttgtacccacccacagggcccactgggcgctagcactccgattctgcggaatctttgtgcgcctgttttataaccctcccccgaaacttgcaacttagaagttatgtacgttactgatcaacagcaggcgtggcacaccagccatgtcttggtcaagcacttctgtacccccggactgagtatcaatagactgctcacgcggtcgaaggagaaaacgttcgttatccggctaactacttcgagaaacttagtagcaccactgaaactgcggagtgtttcgctcagcacttcccccgtgtagatcaggtcgatgagtcactgcttaccccacgggtgaccgtggcagtggctgcgttggcggcctgcctatggggcaacccataggacgctctaaagtggacatggtgcgaagagtctattgagctagttagtagtcctccggcccctgaatgcggctaatcctaactgcggagcgcatgccctcaaaccagagggtggtgcgtcgtaacgggtaactctgcagcggaaccgactactttgggtgtccgtgtttcctttattctcataatggctgcttatggtgaccattgaggaattgccaccatatagctattggattggccatccggtgtgcaacagagctatcatctacttgtttgttggatacattccattaacacttaaatccttcaatacattgcactacattctaacgctgaacacaagaag

SEQ ID NO: 18146 - DNA, 747 bp, synthetic construct
  source 1..747: mol_type = other DNA
tttaaaacagcctgtgggttgtacccacccacagggcccactgggcgctagcactccgattctgcggaatctttgtgcgcctgttttataaccctcccccgaaacttgcaacttagaagttatgtacgttactgatcaacagcaggcgtggcacaccagccatgtcttgatcaagcacttctgtacccccggactgagtatcaatagactgctcacgtggtcgaaggagaaaacgttcgttatccggctaactacttcgagaaacctagtagcaccactgaaactgcggagtgtttcgctcagcacttcccccgtgtagatcaggtcgatgagtcactgcttaccccacgggtgaccgtggcagtggctgcgttggcggcctgcctatggggcaacccataggacgctctaaagtggacatggtgcgaagagtctattgagctagttagtagtcctccggcccctgaatgcggctaatcctaactgcggagcgcatgccttcaaaccagagggtggtgcgtcgtaacgggtaactctgcagcggaaccgactactttgggtgtccgtgtttctcttattctcataatggctgcttatggtgacaattgaggaattgttaccatatagctattggattggccatccggtgtgcaacagagctattatttacttgtttgttggatacattccattaacacctaaatccttcaatacattgcactatatcttgacactgaacgcaagaaa

SEQ ID NO: 18147 - DNA, 747 bp, synthetic construct
  source 1..747: mol_type = other DNA
tttaaaacagcctgtgggttgtacccacccacagggcccactgggcgctagcactccgattctgcggaatctttgtgcgcctgttttataaccctcccccgaaacttgcaacttagaagttatgtacgttactgatcaacagcaggcgtggcacaccagccatgtcttgatcaagcacttctgtaaccccggactgagtatcaatagactgctcacgtggtcgaaagagaaaacgttcgttatccggctaactacttcgagaaacctagtagcaccactgaaactgcggagtgtttcgctcagcacttcccccgtgtagatcaggtcgatgagtcactgcttaccccacgggtgaccgtggcagtggctgcgttggcggcctgcctatggggcaacccataggacgctctaaagtggacatggtgtgaagagtctattgagctagttagtagtcctccggcccctgaatgcggctaatcctaactgcggagcgcatgcccccaaaccagagggtggtgcgtcgtaacgggtaactctgcagcggaaccgactactttgggtgtccgtgtttcttttattctcataatggctgcttatggtgacaattgaggaattgttaccatatagctattggattggccatccggtgtgcaacagagctattatctacttgtttgttggatacattccattgacacctaaatccttcaatacattgcactatattctaacgttgaacgcaagaaa

SEQ ID NO: 18148 - DNA, 747 bp, synthetic construct
  source 1..747: mol_type = other DNA
tttaaaacagcctgtgggttgtacccacccacagggcccactgggcgctagcactccgattctgcggaatctttgtgcgcctgttttataaccctcccccgaaacttgcaacttagaagttatgtacgttactgatcaacagcaggcgtggcacaccagccatgtcttgatcaagcacttctgtacccccggactgagtatcaatagactgcttacgtggtcgaaggagaaaacgttcgttatccggctaactacttcgagaaacctagtagcaccactgaaactgcggagtgtttcgctcagcacttcccccgtgtagatcaggtcgatgagtcactgcttaccccacgggtgaccgtggcagtggctgcgttggcggcctgcctatggggcaacccataggacgctctaaagtggacatggtgcgaagagtctattgagctagttggtagtcctccggcccctgaatgcggctaatcctaactgcggagcgcatgccctcaaaccagagggtggtgcgtcgtaacgggtaactctgcagcggaaccgactactttgggtgtccgtgtttcttttattctcataatggctgcttatggtgacaattaaggaattgttaccatatagctattggattggccatccggtgtgcaacagagctattatctacttgtttgttggatacattccactaacacctaaatcctttaatacactgcactatattctgacgctgaacgcaagaaa

SEQ ID NO: 18149 - DNA, 747 bp, synthetic construct
  source 1..747: mol_type = other DNA
tttaaaacagcctgtgggttgtacccacccacagggcccactgggcgctagcactccgattctgcggaatctttgtgcgcctgttttataaccctcccccgaaacttgcaacttagaagttatgtacgttactgatcaacagcaggcgtggcacaccagccatgtcttgatcaagcacttctgtacccccggactgagtatcaatagactgtttacgtggtcgaaggagaaaacgttcgttatccggccaactacttcgagaaacctagtagcaccactgaaactgcggagtgtttcgctcagcacttcccccgtgtagatcaggtcgatgagtcactgcttaccccacgggtgaccgtggcagtggctgcgttggcggcctgcctatggggcaacccataggacgctctaaagtggacatggtgcgaagagtctattgagctagttggtagtcctccggcccctgaatgcggctaatcctaactgcggagcgcatgccctcaaaccagagggtagtgcgtcgtaacgggtaactctgcagcggaaccgactactttgggtgtccgtgtttcttttattctcataatggctgcttatggtgacaattgaggaattgttaccatatagctattggattggccatccggtgtgcaacagagctattatctacttgtttgttggatacattccactaacacctaaatcctttaatacactgcactatattctgacgctgaacgcaagaaa

SEQ ID NO: 18150 - DNA, 747 bp, synthetic construct
  source 1..747: mol_type = other DNA
tttaaaacagcctgtgggttgtacccacccacagggcccactgggcgctagcactccgattctgcggaatctttgtgcgcctgttttataaccctcccccgaaacttgcaacttagaagttatgtacgttactgatcaacagcaggcgtggcacaccagccatgtcttgatcaagcacttctgtaaccccggactgagtatcaatagactgctcacgtggtcgaaggagaaaacgttcgttatccggctaactacttcgagaagcctagtagcaccactgaaactgcggagtgtttcgctcagcacttcccccgtgtagatcaggtcgatgagtcactgcttaccccacgggcgaccgtggcagtggctgcgttggcggcctgcctatggggcaacccataggacgctctaaagtggacatggtgcgaagagtctattgagctagttagtagtcctccggcccctgaatgcggctaatcctaactgcggagcgcatgctctcaaaccagagggtggtgcgtcgtaacgggtaactctgcagcggaaccgactactttgggtgtccgtgtttctcttattttcataatggctgcttatggtgacaattgaggaattgttaccatatagctattggattggccatccggtgtgcaacagagctattatctacttgtttgttggatacattccattaacacctaagtccttcaatacattgcactatattctaacgctgaacacgagaag

SEQ ID NO: 18151 - DNA, 747 bp, synthetic construct
  source 1..747: mol_type = other DNA
ttaaaacagcctgtgggttgcacccactcacaggacccacgcggtgctagcactctggttccacgggacctttgtgcgcctgttttatgtcccctccccaatttgtaacttagaagcaatttgcaacactgatcagtagcaggcatagcgcaccagctatgtcttgatcaagcacttctgtttccccggaccgagtatcaatagactgtacacacggttgaaggagaaagcgttcgttatccggctaactacttcgagaaacccagtagcaccattgaaactacagagtgtttcgctccacacttcccccgtgtagatcaggtcgatgagtcactgcaatccccacgggcgaccgtggcagtggctgcgctggcggcctgcctatggggcaacccataggacgctctaatgtggacatggtgtgaagagtctattgagctagttagtagtcctccggcccctgaatgcggctaatcctaactgcggagcacatgccttcaatccagagggtagtgtgtcgtaatgggcaactctgcagcggaaccgactactttgggtgtccgtgtttccttttactctcacattggctgcttatggtgacaattacagaattgttaccatatagctattggattggccatccggtgcgcaatagagctataatatacctatttgttggctttgtaccactaaccttaaaatctttaaccactctcgagtgtatattaacccttaatacagtcaaac

SEQ ID NO: 18152 - DNA, 749 bp, synthetic construct
  source 1..749: mol_type = other DNA
ttaaaacagcctgtgggttgttcccacccacagggcccactgggcgctagcacactggcttcacggagcctttgtgcgcctgttttacgccccttaccccttaaattggtaacttagaagttttgcatacctgcgaccaacagcgggcatgacgcaccagtcatgtcttggtcaagcacttctgtttccccggactgagtatcaatagactgctcacgcggttgaaggagaaaacgttcgttacccggctggctacttcgagaaacccagtaacaccatgaaagttgcagagtgtttcgctcagcactacccccgtgtagatcaggtcgatgagccactgcgaaccccacgggcgaccgtggtagtggctgcgttggcggcctgcccatggggtgacccatgggacgctctaatacagacatggtgtgaagagtctattgagctggtcagtagtcctccggcccctgaatgcggctaatcctaactgcggagcacatgccctcaatccagggggtggtgtgtcgtaacgggtaactctgcagcggaaccgactactttgggtgtccgtgtttccttttattcttatcatggctgcttatggtgacaattgaaggattgttaccatatagctattggattggccatccggtgtctaacagagctattgtctatctatttgttgggtacgtccttcttgactataaggtccttcagactcttaagtacatcttgtaccttaatcaacagag

SEQ ID NO: 18153 - DNA, 749 bp, synthetic construct
  source 1..749: mol_type = other DNA
ttaaaacagcctgtgggttgttcccacccacagggcccattgggcgctagcacactggctttgcggagcctttgtgcgcctgttttatgccccttaccccttgaattggtaacttagaagttttgcatacctgcgaccaatagcgggcatgacgcaccagtcatgtcttggtcaagcacttctgttcccccggactgagtatcaatagactgctcacgcggtcgaaggagaaaacgttcgttatccggctggctacttcgagaaacccagtaacaccatgaaagttgcagagtgtttcgctcagcactacccccgtgtagatcaggtcgatgagtcactgcgaaccccacgggcgaccgtggcagtggctgcgctggcggcctgcccatggggtaacccatgggacgctctaatacagacatggtgtgaagagtctattgagctagtcagtagtcctccggcccctgaatgcggctaatcctaactgcggagcacatgccctcaatccagggggtggtgtgtcgtaacgggtaactctgcagcggaaccgactactttgggtgtccgtgtttccttttattcttatcatggctgcttatggtgacaattgaaggattgttgccatatagctattggattggccatccggtgtctaacagagctattgtttatctatttgttgggtacgtccttcttgactacaagacccttcagactcttaagtacatcttgtaccttaatcaaaagag

SEQ ID NO: 18154 - DNA, 749 bp, synthetic construct
  source 1..749: mol_type = other DNA
ttaaaacagcctgtgggttgtccccacccacagggcccactgggcgctagcacactggctttacggagcctttgtgcgcctgttttatgccccttcccccttaaattggtaacttagaagttttgcacacctgcgaccaatagcgggcatgacgcgccagtcatgtcttggtcaagcacttctgttcccccggactgagtatcaatagactgctcacgcggtcgaaggagaaaacgttcgtcacccggctggctacttcgagaaacccagtagcatcatgaaagttgcagagtgtttcgctcagcactacccccgtgtagatcaggtcgatgagtcactgcgaaccccacgggtgaccgtggcagtggctgcgttggcggcctgcccatggggtaacccatgggacgctctaatacagacatggtgtgaagagtctattgagctagccagtggtcctccggcccctgaatgcggctaatcctaactgcggagcacatgccctcaatccagggggtggtgtgtcgtaacgggtaactctgcagcggaaccgactactttgggtgtccgtgtttctttttattcttatcatggctgcttatggtgacaattgaaggattgttaccatatagctattggattggccatccggtgtctaacagagctattgtttttctatttgttggatacgtccctcttgattataaggcccttcagactcttaagtatatcttgtgccttaatcaaaagag

SEQ ID NO: 18155 - DNA, 749 bp, synthetic construct
  source 1..749: mol_type = other DNA
ttaaaacagcctgtgggttgtccccacccacagggcccattgggcgctagcacactggctttgcggagcctttgtgcgcctgttttatgccccttaccccttgaattggtaacttagaagttttgcatacctgcgaccaatagcgggcatgacgcaccagtcatgtcttggtcaagcacttctgttcccccggactgagtatcaatagactgctcacgcggtcgaaggagaaaacgttcgttatccggctggctacttcgagaaacccagtaacaccatgaaagttgcagagtgtttcgctcagcactacccccgtgtagatcaggtcgatgagtcactgcgaaccccacgggcgaccgtggcagtggctgcgctggcggcctgcccatggggtaacccatgggacgctctaatacagacatggtgtgaagagtctattgagctagtcagtagtcctccggcccctgaatgcggctaatcctaactgcggagcacatgccctcaatccagggggtggtgtgtcgtaacgggtaactctgcagcggaaccgactactttgggtgtccgtgtttccttttattcttatcatggctgcttatggtgacaattgaaggattgttgccatatagctattggattggccatccggtgtctaacagagctattgtttatctatttgttgggtacgtccttcttgactacaagacccttcagactcttaagtacatcttgtaccttaatcaaaagag

SEQ ID NO: 18156 - DNA, 749 bp, synthetic construct
  source 1..749: mol_type = other DNA
ttaaaacagcctgtgggttgttcccacccacagggcccactgggcgctagcacactggctctacggggcctttgtgcgcctgttttatgcccctttccccctaaattggtaacttagaagttttgcacacctgcgaccaatagcaggcatgacgcgccagtcatgtcttggtcaagcacttctgttcccccggactgagtatcaatagactgctcacgcggtcgaaggagaaaacgttcgtcatccggctggttacttcgagaaacccagtagcatcatgaaagttgcagagtgtttcgctcagcactacccccgtgtagatcaggtcgatgagtcactgcgaaccccacgggtgaccgtggcagtggctgcgttggcggcctgcccatggggtaacccatgggacgctctaatacagacatggtgtgaagagtctattgagctagccagtagtcctccggcccctgaatgcggctaatcctaactgcggagcacataccctcaatccagggggtggtgtgtcgtaacgggtaactctgcagcggaaccgactactttgggtgtccgtgtttctttttattcttattatggctgcttatggtgacaattgaaggattgttaccatatagctgttggattggccatccggtgtctaacagagctattgtttatctatttgttggatacgtccctcttgattacaaggcccttcagactctcaagtgcatcttgtaccttaatcaaaagag

SEQ ID NO: 18157 - DNA, 749 bp, synthetic construct
  source 1..749: mol_type = other DNA
ttaaaacagcctgtgggttgttcccacccacagggcccactgggcgctagcacactggctttacggggcctttgtgcgcctgttttatgccccttcccccctaaattggtaacttagaagtttagcacacctgcgaccaatagcaggcatgacgcgccagtcatgtcttggtcaagcacttctgttcccccggactgagtatcaatagactgctcacgcggtcgaaggagaaaacgttcgtcatccggctggttacttcgagaaacccagtagcatcatgaaagttgcagagtgtttcgctcagcactacccccgtgtagatcaggtcgatgagtcactgcgaaccccacgggtgaccgtggcagtggctgcgttggcggcctgcccatggggtaacccatgggacgctctaatacagacatggtgtgaagagtctattgagctagccagtagtcctccggcccctgaatgcggctaatcctaactgcggagcacataccctcaatccagggggtggtgtgtcgtaacgggtaactctgcagcggaaccgactactttgggtgtccgtgtttctttttattcttattatggctgcttatggtgacaattgaaggattgttaccatatagctgttggattggccatccggtgtctaacagagctattgtttatctatttgttggatacgtccctcttgattacaaggccctacagactctcaagtacatcttgtaccttaatcaaaagag

SEQ ID NO: 18158 - DNA, 749 bp, synthetic construct
  source 1..749: mol_type = other DNA
ttaaaacagcctgtgggttgtccccacccacagggcccactgggcgctagcacactggctttacggagcctttgtgcgcctgttttatgccccttaccccttaaatttgtaacttagaagtcctgcatacctacgaccaatagcgggcatgacgcaccagtcgtgtcttggtcaagcacttctgttcccccggactgagtatcaatagactgctcacgcggtcgaaggagaaaacgttcgttatccggctggctacttcgagaaacccagtaacaccatgaaagttgcagagtgtttcgctcagcactacccccgtgtagatcaggtcgatgagtcactgcgaaccccacgggcgaccgtggcagtggctgcgttggcggcctgcccatggggagacccatgggacgctctaatacagacatggtgtgaagagtctattgagctagtcagtagtcctccggcccctgaatgcggctaatcctaactgcggagcacatgccctcaatccagggggtggtgtgtcgtaacgggtaactctgcagcggaaccgactactttgggtgtccgtgtttctttttattcttatcatggctgcttatggtgacaattaaaggattgttaccatatagctattggattggccatccggtgtctaacagagctattgtttatctatttgttgggtacatccttcttgactataaggcccttcagactcttaagtacatcttgtaccttaatcaaaagag

SEQ ID NO: 18159 - DNA, 747 bp, synthetic construct
  source 1..747: mol_type = other DNA
tttaaaacagcctgtgggttgtacccacccacagggcccactgggcgctagcactctgattctgcggaatctttgtgcgcctgttttataaccctcccccgaaacttgtaacttagaagttatgcacgttactgatcaacagcaggcgtggcacaccagccatgtcttgatcaagcacttctgtacccccggactgagtatcaatagactgctcacgtggtcgaaggagaaaacgttcgttatccggctaactacttcgagaaacctagtagcaccactgaaactgcggagtgtttcgctcagcacttcccccgtgtagatcaggccgatgagtcactgcacaccccacgggtgaccgtggcagtgactgcgttggcggcctgcctatggggcaacccataggacgctctaaagtggacatggtgcgaagagtctattgagctagttagtagtcctccggcccctgaatgcggctaatcctaactgcggagcgcatgccctcaaaccagagggtggtgcgtcgtaacgggaaactctgcagcggaaccgactactttgggtgtccgtgtttcttttattcttataaaggctgcttatggtgacaattgaggaattgttaccatatagctattggattggccatccggtgtgcaacagagctattatctacttgtttgttggatacactccattaacacctaaatccttcaacacattgcactacattctaacgttgaacacaagaaa

SEQ ID NO: 18160 - DNA, 747 bp, synthetic construct
  source 1..747: mol_type = other DNA
tttaaaacagcctgtgggttgtacccacccacagggcccactgggcgctagcactccgattctgcggaatctttgtgcgcctgttttataaccctcccccgaaacttgcaatttagaagttatgtacattactggtcaacagcaggcgtggcacaccagccatgtcttgatcaagcacttctgtacccccggactgagtatcaatagactgctcacgtggtcgaaggagaaaacgttcgttatccggctaactacttcgagaaacttagtaacaccactgaaactgcggagtgtttcgctcagcacttcccccgtgtagatcaggtcgatgagtcactgcttaccccacgggtgaccgtggcagtggctgcgttggcggcctgcctatggggcaacccataggacgctctaaagtggacatggtgcgaagagtctattgagctagttagtagtcctccggcccctgaatgcggctaatcctaactgcggagcgcatgccctcaaaccagagggtggtgcgtcgtaacgggtaactctgcagcggaaccgactactttgggtgtccgtgtttcttttattctcataatggctgcttatggtgacaattgaggaattgttaccatatagctattggattggccatccggtgtgcaacagagctattatctacttgtttgttggatacattccattaacacttaaatcctttaatacattgcactacattctaacgctgaacacaagaag

SEQ ID NO: 18161 - DNA, 747 bp, synthetic construct
  source 1..747: mol_type = other DNA
ttaaaacagcctgtgggttgttcccactcacagggcccactgggcgctagcacactgattctgcgggatctttgtgcgcctgttttataaccctttccctaagcagcaatttaaaagctttgtacaaacacgaccaatagtgggcgtgacgcgccagtcacgtcttggtcaagcacttctgtatccccggactgagtaccaatagactgctcacgcggttgaaggggaaaacgttcgttacccggctaactacttcgagaaacctagtagtaccatgaaagttgcggagtgtttcgctcagcacttcccccgtgtagatcaggtcgatgagtcactgtaaaccccacgggcgaccgtgacagtggctgcgttggcggcctgcccatggggtaacccatgggacgctctaatacagacatggtgcgaagagtctattgagctagttagcagtcctccggcccctgaatgcggctaatcctaactgcggagcgcgcaccctcaacccagggggcggcgtgtcgtaatgggtaactctgcagcggaaccgactactttgggtgtccgtgtttccttttttattctttattggctgcttatggtgacaattgaaaagttgttaccatatagctattggattggccatccggtgtctaacagagctattgtttacctatttattggattcgtccctcttaatctcaaggccattcaaactcttgattatatattgctccttaactgtaggaa

SEQ ID NO: 18162 - DNA, 747 bp, synthetic construct
  source 1..747: mol_type = other DNA
ttaaaacagcctgtgggttgttcccacccacagggcccactgggcgctagcacactgattctgcgggatctttgtgcgcctgttttataaccctttccctaagcagcaacttagaagctttgtacaatcacgaccaatagtgggcgtgacgcgccagtcacgtcttggtcaagcacttctgtatccccggactgagtaccaatagactgctcacgcggttgaaggggaaaacgttcgttacccggctaactacttcgagaaacctagtagtaccatgaaagttgcggagtgtttcgctcagcacttcccccgtgtagatcaggtcgatgagtcactgtaaaccccacgggcgaccgtgacagtggctgcgttggcggcctgcccatggggtaacccatgggacgctctaatacagacatggtgcgaagagtctattgagctagttagcagtcctccggcccctgaatgcggctaatcctaactgcggagcgcgcaccctcaacccagggggcggcgtgtcgtaatgggtaactctgcagcggaaccgactactttgggtgtccgtgtttccttttttattctttattggctgcttatggtgacaattgaaaagttgttaccatatagctattggattggccatccggtgtctaacagagctattgtttacctatttattggattcgtccctcttaatctcaaggccattcaaactcttgattatatattgctccttaactgtaggaa

SEQ ID NO: 18163 - DNA, 742 bp, synthetic construct
  source 1..742: mol_type = other DNA
ttaaaacagcctgtgggttgcacccacccacagggcccactgggcgcgagcactctggtacctcggtacctttgtgcgcctgttttataccccctccccaatgaaacttagaagcagtaaaccacgatcaatagcaggcataacgctccagttatgtcttgatcaagcacttctgtttccccggactgagtatcaatagactgctcgcgcggttgaaggagaaaacgttcgttatccggctaactacttcgggaaacctagtaacgccatgaaagttgcggagagcttcgttcagcactcccccagtgtagatcaggtcgatgagtcaccgcattccccacgggcgaccgtggcggtggctgcgttggcggcctgcccatggggtaacccatggggcgctctaatacggacatggtgtgaagagtctactgagctagttagtagtcctccggcccctgaatgcggctaatcctaactgcggagcacacgcccacgagccagcgggtagtgtgtcgtaatgggtaactctgcagcggaaccgactactttgggtgtccgtgtttccttttatcttttcattggctgcttatggtgacaattaaagaattgttaccatatagctattggattggccatccggtgtgcaacagagcaattgtttacctatttattggttttgtaccattaaccttgagtactgtgaccaccctcaattatattttgacccttaacgcagccaaac

SEQ ID NO: 18164 - DNA, 749 bp, synthetic construct
  source 1..749: mol_type = other DNA
tgtgctcttccgatctgtgggttgttcccacccacagggcccactgggcgccagcactctgattccacggaatctttgtgcgcctgttttacaacccttccccaacttgtaacgtagaagtaatacacactactgatcaatagcaggcatggcgcgccagtcatgtctcgatcaagcacttctgttcccccggactgagtatcaatagactgctcacgcggttgaaggagaaaacgttcgttacccggctaactacttcgagaaacctagtagcaccatagaagctgcagagtgtttcgctcagcacttcccccgtgtagatcaggctgatgagtcactgcaatccccacgggcgaccgtggcagtggctgcgttggcggcctgcctatggggcaacccataggacgctctaatgtggacatggtgcgaagagtctattgagctagttagtagtcctccggcccctgaatgcggctaatcctaactgcggagcacatgccttcaacccagaaggtggtgtgtcgtaacgggcaactctgcagcggaaccgactactttgggtgtccgtgtttctttttattcctatattggctgcttatggtgacaatcacggaattgttgccatatagctattggattggccatccggtgtctaatagagctattgtgtacctatttgtcggatttactccgttatcacataaatctctgaacactttgtgctttatattgaacttaaacacacgaaa

SEQ ID NO: 18165 - DNA, 744 bp, synthetic construct
  source 1..744: mol_type = other DNA
cagtgggccctgtgggtgggtacaacccacagggcccactgggcgctagcactctgattccacggaatctttgtgcgcctgttttatatcccctccccaagttgtaacttagaagtattacactacaatgatcagtagcaggcgtggcgcaccagccatgtctcgatcaagcacttctgtttccccggaccgagtatcaatagactgctaacgcggttgaaggagaaaacgttcgttatccggctaactacttcgagaaacctagtagcgccatcgaagctgcggggcgtttcgctcagcacttcccccgtgtagatcaggtcgatgagtcactgcaatcctcacgggcgaccgtggcagtggctgcgttggcggcctgcctatggggcaacccataggacgcttcaaagtggacatggtgtgaagagtctattgagctagttagtagtcctccggcccctgaatgcggctaatcctaactgcggagcacataccttcaatccagaaggtagtgtgtcgtaacgggcaactctgcagcggaaccgactactttgggtgtccgtgtttccttttattctcttattggctgcttatggtgacaattgaagaattgttgccatatagctattggattggccatccagtgtctaacagagcaattgtgtacttatttgttggttttgtccctttgtcttacacgtctcttagcactttgtattacattataaagttgaactcggagag

SEQ ID NO: 18166 - DNA, 746 bp, synthetic construct
  source 1..746: mol_type = other DNA
tttaaaacagcctgtgggttgtacccacccacagggcccactgggcgccagcactctgattctacggaatctttgtgcgcctgttttacaacccccccgaaatttgcaacttagaagttatgcacattactgatcaatagcaggcgtgacacgccagtcatgtcttgatcaagcacttctgtatccccggactgagtatcaatagactgctcacgtggtcgaaggagaaaacgttcgttatccggctaactacttcgagaaacctagtagcaccagtgaaactgcggagtgtttcgctcagcacttcccccgtgtagatcaggtcgatgagtcactgcttaccccacgggtgaccgtggcagtggctgcgttggcggcctgcctatggggcaacccataggacgctctaaagtggacatggtgtgaagagtctattgagctagttagtagtcctccggcccctgaatgcggctaatcctaactgcggagcgcatgccttcaagccagagggtggtgcgtcgtaacgggcaactctgcagcggaaccgactactttgggtgtccgtgtttctttttattctcataatggctgcttatggtgacaattaaagaattgttaccatatagctattggattggccatccggtgtgcaacagagctattgtctacttatttgttggatacattccattaacacttaaatcccttaacacattgcaatacattctaacactgaacgcaagaaa

SEQ ID NO: 18167 - DNA, 747 bp, synthetic construct
  source 1..747: mol_type = other DNA
ttaaaacagcctgtgggttgtacccacccacagggcccactgggcgctagcactctgattctgcggaacctttgtgcgcctgttttataacccttccccgatttgtaacttagaagctatgaacttcaccgatcaatagtaggcgtggcgcaccagctacgtcttgatcaagcacttctgtttccccgggctgagtatcaatagactgcttgcgtggtcgaaggagaaaacgctcgttacccgactaactacttcgagaaacccagtaacaccaccgaaaccgcggagtgtttcgctcagcacttcccccgtgtagatcaggtcgatgagtcactgcaatccccacgggcgaccgtggcagtggctgcgttggcggcctgcctatggggcaacccataggacgctctaaggtggacatggtgtgaagagtctattgagctagttagtagtcctccggcccctgaatgcggctaatcctaactgcggagcgcatgcccccaaaccagagggtggtgcgtcgtaatgggcaactctgcagcggaaccgactactttgggtgtccgtgtttccttttattctcttaatggctgcttatggtgacaattaaggaattgttaccatatagctattggattggccatccggtgtgtagtagagctattatttatttatttgttggttttgtaccattgaattcaagatctgtaaccactctacactatatactgatcctcaatacggctaagc

SEQ ID NO: 18168 - DNA, 747 bp, synthetic construct
  source 1..747: mol_type = other DNA
ttaaaacagcctgtgggttgcacccactcacaggacccacgtggtgctagcactctggttctacggaacctttgtgcgcctgttttacgccccctccccaatttgcaacttagaagcaattcacaacactgatcaatagcaggcatggcgcaccagctatgtcttgatcaagcacttctgtttccccggaccgagtatcaatagactgttcacgcggttgaaggagaaagcgtccgttatccggctaactacttcgagaaacccagtagcgccattgaaactgcagagtgtttcgctccacacttcccccgtgtagatcaggtcgatgagtcactgcaatccccacgggcgaccgtggcagtggctgcgctggcggcctgcctatggggcaacccataggacgctctaatgtggacatggtgcgaagagtctattgagctagttagtagtcctccggcccctgaatgcggctaatcctaactgcggagcacatgccttcaatccagagggtagtgtgtcgtaatgggcaactctgcagcggaaccgactactttgggtgtccgtgtttccttttattctcacattggctgcttatggtgacaattacagaattgttaccatatagctattggattggccatccggtgtgcaatagagctattatatacctatttgttggctttgtaccactaaccttaaaatctgtaaccactctcgactatatattaaccctcaatacaatcaaac

SEQ ID NO: 18169 - DNA, 747 bp, synthetic construct
  source 1..747: mol_type = other DNA
ttaaaacagcctgtgggttgcacccactcacaggacccacgtggtgctagcactctggttctacggaacctttgtgcgcctgttttacgccccctccccaatttgcaacttagaagcaattcacaacactgatcaatagcaggcatggcgcaccagctatgtcttgatcaagcacttctgtttccccggaccgagtatcaatagactgttcacgcggttgaaggagaaagcgtccgttatccggctaactacttcgagaaacccagtagcgccattgaaactgcagagtgtttcgctccacacttcccccgtgtagatcaggtcgatgagtcactgcaatccccacgggcgaccgtggcagtggctgcgctggcggcctgcctatggggcaacccataggacgctctaatgtggacatggtgcgaagagtctattgagctagttagtagtcctccggcccctgaatgcggctaatcctaactgcggagcacatgccttcaacccagagggtagtgtgtcgtaatgggcaactctgcagcggaaccgactactttgggtgtccgtgtttccttttattctcacattggctgcttatggtgacaattacagaattgttaccatatagctattggattggccatccggtgtgcaatagagctattatatacctatttgttggctttgtaccactaaccttaaaatctgtaaccactctcgactatatattaaccctcaatacaatcaaac

SEQ ID NO: 18170 - DNA, 747 bp, synthetic construct
  source 1..747: mol_type = other DNA
ttaaaacagcctgtgggttgcacccactcacaggacccacgtggtgctagcactctggttttacggaacctttgtgcgcctgttttacgccccctccccaatttgtaacatagaagcaattcacaacactgatcaatagcaggcatggcgcaccagctatgtcttgatcaagcacttctgtttccccggaccgagtatcaatagactgttcacgcggttgaaggagaaagcgtccgttatccggctaactacttcgagaaacccagtagcgccattgaaactgcagagtgtttcgctccacacttcccccgtgtagatcaggtcgatgagccactgcaaccctcacgggcgaccgtggcagtggctgcgctggcggcctgcctatggggcaacccataggacgctctaatgtggacatggtgcgaagagtctattgagctagttagtaatcctccggcccctgaatgcggctaatcctaactgcggagcacatgccttcaatccagagggtagtgtgtcgtaatgggcaactctgcagcggaaccgactactttgggtgtccgtgtttccttttattctcacattggctgcttatggtgacaattacagaattgttaccatatagctattggattggccatccggtgtgcaatagagctattgtatacctatttgttggctttgtaccactaaccttaaaatctgtaatcactctcgactatatattaaccctcaatacaatcaaac

SEQ ID NO: 18171 - DNA, 747 bp, synthetic construct
  source 1..747: mol_type = other DNA
ttaaaacagcctgtgggttgcacccactcacaggacccacgtggtgctagcactctggttctacggaacctttgtgcgcctgttttacgccccctccccaatttgtaatttagaagcgattcacaacacagatcaatagcaggcatggcgcaccagctatgtctcgatcaagcacttctgtttccccggaccgagtatcaatagactgctcacgtggttgaaggagaaaacgtccgttatccggctaactacttcgagaaacctagtagcgccattgaaactgcagagtgtttcgctccacacttcccccgtgtagatcaggtcgatgagtcactgcaatccccacgggcgaccgtggcagtggctgcgctggcggcctgcctatggggcaacccataggacgctctaatgtggacatggtgcgaagagtctattgagctagttagtagtcctccggcccctgaatgcggctaatcctaactgcggagcacatgccttcaacccagagggtagtgtgtcgtaatgggcaactctgcagcggaaccgactactttgggtgtccgtgtttccttttattctcacattggctgcttatggtgacaattacagaattgttaccatatagctattggattggccatccggtgtgcaatagagctattatatacctatttgttggctttgtaccactaaccttaaaatctgtaaccactctcgactatatattaaccctcaatacaaataaac

SEQ ID NO: 18172 - DNA, 747 bp, synthetic construct
  source 1..747: mol_type = other DNA
ttaaaacagcctgtgggttgcacccactcacagggcccacgtggtgctagcactctggttctacggaacctttgtgcgcctgttttacgccccctccccaatttgcaatttagaagcgattcacaacacagatcaatagcaggcatggcgcaccagctatgtctcgatcaagcacttctgtttccccggaccgagtatcaatagactgctcacgtggttgaaggagaaaacgtccgttatccggctaactacttcgagaaacctagtagcgccattgaaactgcagagtgtttcgctccacacttcccccgtgtagatcaggtcgatgagtcactgcaatccccacgggcgaccgtggcagtggctgcgctggcggcctgcctatggggcaacccataggacgctctaatgtggacatggtgcgaagagtctattgagctagttagtagtcctccggcccctgaatgcggctaatcctaactgcggagcacatgccttcaacccagagggtagtgtgtcgtaatgggcaactctgcagcggaaccgactactttgggtgtccgtgtttccttttattctcacattggctgcttatggtgacaattacagaattgttaccgtatagctattggattggccatccggtgtgcaatagagctattatatacctatttgttggctttgtaccactaaccttaaaatctgtaaccactctcgactatatattaaccctcaatacaaataaac

SEQ ID NO: 18173 - DNA, 747 bp, synthetic construct
  source 1..747: mol_type = other DNA
ttaaaacagctctggggttgcacccacccacaggacccacgcggtgctagcactctggttccacgggacctttgtgcgcctgttttatgtcccctccccaattcgtaacctagaagcaatttgcaacactgatcaatagcaggcatggcgcaccagctatgtcttgatcaagcacttctgtttccccggaccgagtatcaatagactgttcacacggttgaaggagaaagcgtccgttatccggctaactacttcgagaaacccagtagcgccattgaaactgcagagtgtttcgctccacacttcccccgtgtagatcaggtcgatgagtcactgcgacccccacgggcgaccgtggcagtggctgcgctggcggcctgcctatggggcaacccataggacgctctaatgtggacatggtgtgaagagtctattgagctagttagtagtcctccggcccctgaatgcggctaatcccaactgcggagcacatgccttcgatccagagggtagtgtgtcgtaatgggcaactctgcagcggaaccgactactttgggtgtccgtgtttccttttattcttacattggctgcttatggtgacaatcacagaattgttaccatatagctattggattggccatccggtgtgtaatagagctattatatatctatttgttggctttgtaccactgactttaaaatctgtaactactcttgagtgtatattaacccttaatacaatcaaac

SEQ ID NO: 18174 - DNA, 747 bp, synthetic construct
  source 1..747: mol_type = other DNA
ttaaaacagctctggggttgcacccacccacaggacccacgcggtgctagcactctggttccacgggacctttgtgcgcctgttttatgtcccctccccaattcgtaacctagaagcaatttgcaacactgatcaatagcaggcatggcgcaccagctatgtcttgatcaagcacttctgtttccccggaccgagtatcaatagactgttcacacggttgaaggagaaagcgtccgttatccggctaactacttcgagaaacccagtagcgccattgaaactgcagagtgtttcgctccacacttcccccgtgtagatcaggtcgatgagtcactgcgacccccacgggcgaccgtggcagtggctgcgctggcggcctgcctatggggcaacccataggacgctctaatgtggacatggtgtgaagagtctattgagctagttagtagtcctccggcccctgaatgcggctaatcccaactgcggagcacatgccttcgatccagagggtagtgtgtcgtaatgggcaactctgcagcggaaccgactactttgggtgtccgtgtttccttttattcttacattggctgcttatggtgacaatcacagaattgttaccatatagctattggattggccatccggtgtgtaatagagctattatatatctatttgttggcttcgtaccactgactttaaaatctgtaactactctcgagtgtatattaacccttaatacaatcaaac

SEQ ID NO: 18175 - DNA, 747 bp, synthetic construct
  source 1..747: mol_type = other DNA
ttaaaacagctctggggttgcacccacccacaggacccacgcggtgctagcactctggttccacgggacctttgtgcgcctgttttatgtcccctccccaattcgtaacctagaagcaatttgcaacactgatcaatagcaggcatggcgcaccagctatgtcttgatcaagcacttctgtttccccggactgagtatcaatagactgttcacacggttgaaggagaaagcgtccgttatccggctaactacttcgagaaacccagtagcgccattgaaactgcagagtgtttcgctccacacttcccccgtgtagatcaggtcgatgagtcactgcgacccccacgggcgaccgtggcagtggctgcgctggcggcctgcctatggggcaacccataggacgctctaatgtggacatggtgtgaagagtctattgagctagttagtagtcctccggcccctgaatgcggctaatcccaactgcggagcacatgccttcgatccagagggtagtgtgtcgtaatgggcaactctgcagcggaaccgactactttgggtgtccgtgtttccttttattcttacattggctgcttatggtgacaatcacagaattgttaccatatagctattggattggccatccggtgtgtaacagagctattatatatctatttgttggctttgtaccactgactttaaaatctgtgactactcttgagtgtatattaacccttaatacaatcaaac

SEQ ID NO: 18176 - DNA, 746 bp, synthetic construct
  source 1..746: mol_type = other DNA
ttaaaacagctgtgggttgtacccactcacagggcccacgtggcgctagcactctggttctgcggaacctttgtgcgcctgttttacgcccgccccccaatttgcaacttagaagcaatacacaacactgatcaacagcaggcatggcgcaccagctatgtcttgatcaagcacttctgtttccccgggccgagtatcaatagactgttcacgcggttgaaggagaaagcgcccgttatccggctaactacttcgagaaacctagtagcaccattgaagctgcagagtgtttcgctcggcacttcccccgtgtagatcaggtcgatgagtcactgcaatccccacgggcgaccgtggcagtggctgcgctggcggcctgcctatggggcaacccataggacgctctaatgtggacatggtgcgaagagtctattgagctagttagtagtcctccggcccctgaatgcggctaatcctaactgtggagcacatgccttcaatccagagggtagtgtgtcgtaatgggcaactctgcagcggaaccgactactttgggtgtccgtgtttccttttatctttacattggctgcttatggtgacgattatagaattgttaccatatagctattggattggccatccggtgtgcaatagagctattatatacctgtttgttggctttgtaccactaaccttaaaatctataaccaccctcgattttatattaaccctcaatacaatcaaac

SEQ ID NO: 18177 - DNA, 746 bp, synthetic construct
  source 1..746: mol_type = other DNA
ttaaaacagctgtgggttgtacccactcacagggcccacgtggcgctagcactctggttctgcggaacctttgtgcgcctgttttacgcccgccccccaatttgcaacttagaagcaatacacaacactgatcaacagcaggcatggcgcaccagctatgtcttgatcaagcacttctgtttccccgggccgagtatcaatagactgttcacgcggttgaaggagaaagcgcccgttatccggctaactacttcgagaaacctagtagcaccattgaagctgcagagtgtttcgctcggcacttcccccgtgtagatcaggtcgatgagtcactgcaatccccacgggcgaccgtggcagtggctgcgctggcggcctgcctatggggcaacccataggacgctctaatgtggacatggtgcgaagagtctattgagctagttagtagtcctccggcccctgaatgcggctaatcctaactgtggagcacatgccttcaatccagagggtagtgtgtcgtaatgggcaactctgcagcggaaccgactactttgggtgtccgtgtttccttttatctttacattggctgcttatggtgacgattatagaattgttaccatatagctattggattggccatccggtgtgcaatagagctattatatacctgtttgctggctttgtaccactaaccttaaaatctataaccaccctcgattttatattaaccctcaatacaaccaaac

SEQ ID NO: 18178 - DNA, 746 bp, synthetic construct
  source 1..746: mol_type = other DNA
ttaaaacagcctgtgggttgcacccactcacagggcccacgtggcgctagcactctggttctgcggaacctttgtgcgcctgttttacgcccccccccaatttgcaacttagaagcaatacacaacactgatcaatagcaggcatggcgcaccagctatgtcttgatcaagcacttctgtttccccgggccgagtatcaatagactgttcacgcggttgaaggagaaagcgcccgttatccggctaactacttcgagaaacctagtagcaccattgaagctgcagagtgtttcgctcggcacttcccccgtgtagatcaggtcgatgagtcactgcaatccccacgggcgaccgtggcagtggctgcgctggcggcctgcctatggggcaacccataggacgctctaatgtggacatggtgcgaagagtctattgagctagttagtagtcctccggcccctgaatgcggctaatcctaactgtggagcacatgccttcaatccagagggtagtgtgtcgtaatgggcaactctgcagcggaaccgactactttgggtgtccgtgtttccttttatctttacattgactgcttatggtgacaattatagaattgttaccatatagctattggattggtcatccggtgtgcaatagagctattatatacctgtttgttggctttgtaccactaaccttaaaatctataaccaccctcgattttatattaaccctcaatacaatcaaac

SEQ ID NO: 18179 - DNA, 746 bp, synthetic construct
  source 1..746: mol_type = other DNA
ttaaaacagcctgtgggttgcacccactcacagggcccacgtggcgctagcactctggttctacggaacctttgtgcgcctgttttacgcccccccccaatttgcaacttagaagcaatatacaacactgatcaacagcaggcatggcgcaccagctatgtcttgatcaagcacttctgtttccccgggccgagtatcaatagactgttcacgcggttgaaggagaaagcgcccgtcatccggctaactacttcgagaaacctagtagcaccattgaagctgcagagtgtttcgctcggcacttcccccgtgtagatcaggtcgatgagtcactgcaatccccacgggcgaccgtggcagtggctgcgctggcggcctgcctatggggcaacccataggacgctctaatgcggacatggtgcgaagagtctattgagctagttagtagtcctccggcccctgaatgcggctaatcctaactgtggagcacatgccttcaatccagagggtagtgtgtcgtaatgggcaactctgcagcggaaccgactactttgggtgtccgtgtttccttttatccttacattggctgcttatggtgacaattacagaattgttaccatatagctattggattggccatccggtgtgcaatagagctattatatacctgtttgttggctttgtaccattaaccttaaaatctataaccaccctcgatttcatattaacccttaatacaatcaaac

SEQ ID NO: 18180 - DNA, 746 bp, synthetic construct
  source 1..746: mol_type = other DNA
ttaaaacagcctgtgggttgcacccactcacagggcccacgtggcgctagcactctgattctacggaatctttgtgcgcctgttttacaaccccccccaatttgcaacttagaagcaatacacaacactgatcaacagcaggcatggcgcaccagccatgtcttgatcaagcacttctgtttccccggactgagtatcaatagactgctcacgcggttgaaggagaaagcgtccgttatccggctaactacttcgagaaacctagtagcaccattgaagctgcggagtgtttcgctcggcacttcccccgtgtagatcaggccgatgagtcactgcaatccccacgggcgaccgtggcagtggctgcgctggcggcctgcctatggggcaacccataggacgctctaatgtggacatggtgcgaagagtctattgagctagttagtagtcctccggcccctgaatgcggctaatcctaactgcggagcacatgccctcaacccagagggtagtgtgtcgtaacgggcaactctgcagcggaaccgactactttgggtgtccgtgtttccttttattcttacattggctgcttatggtgacaatcacagaattgttaccatatagctattggattggccatccggtgtgcaatagagctattatatacctatttgttggctttgtaccactaaccttaaaatctataaccaccctcaactttatattaactctcaatacagtcaaac

SEQ ID NO: 18181 - DNA, 746 bp, synthetic construct
  source 1..746: mol_type = other DNA
ttaaaacagcctgtgggttgcacccactcacagggcccacgtggcgctagcactctgattctacggaatctttgtgcgcctgttttacaaccccccccaatttgcaacttagaagcaatacacaacactgatcaacagcaggcatggcgcaccagccatgtcttgatcaagcacttctgtttccccggactgagtatcaatagactgctcacgcggttgaaggagaaagcgtccgttatccggctaactacttcgagaaacctagtagcaccattgaagctgcggagtgtttcgctcggcacttcccccgtgtagatcaggtcgatgagtcactgcaatccccacgggcgaccgtggcagtggctgcgctggcggcctgcctatggggcaacccataggacgctccaatgtggacatggtgcgaagagtctattgagctagttagtagtcctccggcccctgaatgcggctaatcctaactgcggagcacatgccctcaacccagagggtagtgtgtcgtaacgggcaactctgcagcggaaccgactactttgggtgtccgtgtttccttttattcttacactggctgcttatggtgacaaccacagaattgttaccatatagctattggattggccatccggtgtgcaatagagctattatatacctatttgttggctttgtaccactaaccttaaaatctataaccaccctcaactttatattaactctcaatacagtcaaac

SEQ ID NO: 18182 - DNA, 746 bp, synthetic construct
  source 1..746: mol_type = other DNA
taaaacagccggggggtggcacccactcacagggcccacgtggcgctagcactctgattctacggaatctttgtgcgcctgttttacaacccccccccaatttgcaacttagaagcaatacacaacactgatcaacagcaggcatggcgcaccagccatgtcttgatcaagcacttctgtttccccggactgagtatcaatagactgctcacgcggttgaaggagaaagcgtccgttatccggctaactacttcgagaaacctagtagcaccattgaagctgcggagtgtttcgctcggcacttcccccgtgtagatcaggccgatgagtcactgcaatccccacgggcgaccgtggcagtggctgcgctggcggcctgcctatggggcaacccataggacgctctaatgtggacatggtgcgaagagtctattgagctagttagtagtcctccggcccctgaatgcggctaatcctaactgcggagcacatgccctcaaccaagagggtagtgtgtcgtaacgggcaactctgcagcggaaccgactactttgggtgtccgtgtttccttttattcttacattggctgcttatggtgacaatcacagaattgttaccatatagctattggattggccatccggtgtgcaatagagctattatacacctatttggtggctttgtaccactaaccttaaaatctataaccaccctcaactttatattaactctcaatacagtcaaac

SEQ ID NO: 18183 - DNA, 746 bp, synthetic construct
  source 1..746: mol_type = other DNA
taaaacagctggggggtggtacccactcacagggcccacgtggcgctagcactctggttctacggaacctttgtgcgcctgttttacgccccttccccaatttgcaacttagaagcaatacacaacactgatcaacagcaggcatggcgcaccagctatgtcttgatcaagcacttctgtttccccggaccgagtatcaatagactgttcacgcggttgaaggagaaagcgtccgttatccggctaactacttcgagaaacctagtaacaccattgaagctgcagagtgtttcgctcggcacttcccccgtgtagatcaggtcgatgagtcactgcaatccccacgggtgaccgtggcagtggctgcgctggcggcctgcctatggggcaacccataggacgctctaatgcggacatggtgcgaagagtctattgagctagttagtggtcctccggcccctgaatgcggctaatcctaactgcggagcacatgccttcaatccagagggtagtgtgtcgtaatgggcaactctgcagcggaaccgactactttgggtgtccgtgtttccttttattcttatattggctgcttatggtgacaattacagaattgttaccatatagctattggattggccatccggtgtgcaatagagctattatatacctatttggtggctttgtaccactaaccttaaaatctataaccaccctcgactttatattaaccctcaacacagtcaagc

SEQ ID NO: 18184 - DNA, 747 bp, synthetic construct
  source 1..747: mol_type = other DNA
ttaaaacagcctgtgggttgcacccactcacaggacccacgtggtgctagcactctggttccacggaacctttgtgcgcctgttttacgccccctccccaatttgtaacttagaagcaatgtacaacactgatcaatagcaggcatggcgcaccagctatgtcttgatcaagcacttctgtttccccggaccgagtatcaatagactgttcacacggttaaaggagaaagcgtccgttatccggctaactacttcgagaaacccagtagcgccattgaagctgcagagtgtttcgctccacacttcccccgtgtagatcaggtcgatgagtcactgcaatccccacgggcgaccgtggcaatggctgcgctggcggcctgcctatggggcaacccataggacgctctaatgtggacatggtgcgaagagtctattgagctagttagtagtcctccggcccctgaatgcggctaatcctaactgcggagcacatgccttcaatccagagggtagtgtgtcgtaatgggcaactctgcagcggaaccgactactttgggtgtccgtgtttccttttattctcacattggctgcttatggtgacaattacagaattgttaccatatagctattggattggccatccggtgtgcaatagagctattatatacctatttgttggctttgtaccactaaccttaaaatccgtaaccactctcgagtatatattaaccctcaatacaatcaaac

SEQ ID NO: 18185 - DNA, 745 bp, synthetic construct
  source 1..745: mol_type = other DNA
ttaaaacagcctgtgggttgttcccacccacagggcccactgggcgctagcacactgattctacgggacctttgtgcgcctgttttataaccccttccctaagcagcaacttagaagttttgtacaatcacgaccagtagtaggcgtggcgcgccagtcacgtcttggtcaagcacttctgtatccccggactgagtatcaatagactgctcacgcggttgaaggagaaaacgttcgttacccggctaactacttcgagaaacccagtagcaccgtgaaagttgcggagtgtttcgctcagcacttcccccgtgtagatcaggtcgatgagtcactgtaaaccccacgggcaaccgtgacagtggctgcgttggcggcctgcccatggggtaacccatgggacgctctaatacagacacggtgtgaagagtctattgagctagttagtagtcctccggcccctgaatgcggctaatcctaactgcggagcgcgcaccctcaatccagggggcggcgtgtcgtaatgggtaactctgcagcggaaccgactactttgggtgtccgtgtttccttttattccttattggctgcttatggtgacaattgaaaagttgttaccatatagctattggattggccatccggtgtctaatagagctattgtttacctatttattggatacgtccctcttaatctcaaagccattcaaactcttgattatatattgctccttaactgtaagaa

SEQ ID NO: 18186 - DNA, 745 bp, synthetic construct
  source 1..745: mol_type = other DNA
ttaaaacagcctgtgggttgttcccacccacagggcccactgggcgctagcacactgattctgcgggatctttgtgcgcctgttttataacccttcccccaagcagcaacttagaagctttgtacaatcacgaccaatagtgggcgtgacgcgccagtcacgtcttggtcaagcacttctgtatccccggactgagtaccaatagactgctcacgcggttgaaagggaaaacgttcgttacccggctaactacttcgagaaacctagtagcaccatgaaagttgcggagtgtttcgctcagcacttcccccgtgtagatcaggtcgatgagtcactgtaaaccccacgggcgaccgtgacagtggctgcgttggcggcctgcccatggggtaacccatgggacgctctaatacagacatggtgcgaagagtctattgagctagttagcagtcctccggcccctgaatgcggctaatcctaactgcggagcgcgcaccctcaatccagggggcggcgtgtcgtaatgggtaactctgcagcggaaccgactactttgggtgtccgtgtttctttttattctttattggctgcttatggtgacaattgaaaagttgttgccatatagctattggattggccatccggtgtctaacagagccattgtttacctatttattggatacgtccctcttcatctcaaggccattcaaactcttgattatatactgctccttaactgtaggaa

SEQ ID NO: 18187 - DNA, 745 bp, synthetic construct
  source 1..745: mol_type = other DNA
ttaaaacagcctgtgggttgttcccacccacagggcccactgggcgctagcacactgattctgcgggatctttgtgcgcctgttttataacccttcccctaagcagcaacttagaagctttgtacaatcacgaccaatagtgggcgtgacgcgccagtcacgtcttggtcaagcacttctgtatccccggactgagtaccaatagactgctcacgcggttgaaggggaaaacgttcgttacccggctaactacttcgagaaacctagtagtaccatgaaagttgcggagtgtttcgctcagcacttcccccgtgtagatcaggtcgatgagccactgtaaaccccacgggcgaccgtgacagtggctgcgttggcggcctgcccgtggggtaacccatgggacgctctagtacagacatggtgcgaagagtctattgagctagttagcagtcctccggcccctgaatgcggctaatcctaactgcggagcgcgcaccctcaacccagggggcggcgtgtcgtaatgggtaactctgcagcggaaccgactactttgggtgtccgtgtttccttttattctttattggctgcttatggtgacaattgaaaagttgttaccatatagctattggattggccatccggtgtctaacagagctattgtatacctatttgttggatacgtccctcttaatctcaaggccattcaaactcttgattatatattgctccttaactgtaggaa

SEQ ID NO: 18188 - DNA, 746 bp, synthetic construct
  source 1..746: mol_type = other DNA
ttaaaacagcctgtgggttgttcccacccacagggcccactgggcgctagcacactgattctgcgggatctttgtgcgcctgttttataaccccttcccctaagcagtaacttagaagctccacactatcacgaccaatagcaggcgtggtgcaccaatcacgtctcggtcaagcacttctgtttccccggactgagtatcaatagactgctcacgcggtcgaaagagaaaacgttcgttatccggctaactacttcgagaaacctagtagcaccgtgaaagttgcggagtgtttcgctcagcacttcccccgtgtagatcaggtcgatgagtcactgtgaaccccacgggtgaccgtgacagtggctgcgttggcggcctgcccatggggtaacccatgggacgctctaatacagacacggtgtgaagagtctattgagctagttagtagtcctccggcccctgaatgcggctaatcctaactgcggagcgcgtaccctcaatccagggggcagcgcgtcgtaatgggtaactctgcagcggaaccgactactttgggtgtccgtgtttccttttattccttattggctgcttatggtgacaattgaaaagttgttaccatatagctattggattggccatccggtaactgacagagctattgtttacctgtttgttggatacgtccctctcaatctcaaggccattcaaactcttgattatatactacttctcaactgcaagaa

SEQ ID NO: 18189 - DNA, 746 bp, synthetic construct
  source 1..746: mol_type = other DNA
ttaaaacagcctgtgggttgttcccacccacagggcccactgggcgctagcacactgattctgcgggatctttgtgcgcctgttttataaccctcccccctaagcagtaacttagaagctttgcacaatcacgaccagtagtgggcgtggcgcgccagccacgtctcggtcaagcacttctgtatccccggactgagtatcaatagactgctcacgcggtcgaaggagaaaacgtccgttacccggctaactacttcgagaaacttagtagcaccatgaaagttgcggagtgtttcgctcagcacttcccccgtgtagatcaggtcgatgagtcactgtaaaccccacgggcgaccgtgacagtggctgcgttggcggcctgcccatggggtaacccatgggacgctccaatacagacatggtgtgaagagtctattgagctagttagtagtcctccggcccctgaatgcggctaatcctaactgcggagcgcgcatcctcaacccagggggcggcgtgtcgtaatgggtaactctgcagcggaaccgactactttgggtgtccgtgtttccttttactccttattggctgcttatggtgacaattgaaaagttgttaccatatagctattggattggccatccggtgtctaacagagctattgtttacctattcattggatacgtccctcttagtctcaaagccattcaaactcttgactatatattgctccttaactgtaagaa

SEQ ID NO: 18190 - DNA, 745 bp, synthetic construct
  source 1..745: mol_type = other DNA
ttaaaacagcctgtgggttgttcccacctacagggcccactgggcgctagcacactgattctgcgggatctttgtgcgcctgttttataaccccttccctaagcagcaacttagaagcttcacactatcacgaccagtagtgggcgtggcgcgccagtcacgtcttggtcaagcacttctgtttccccggactgagtatcaatagactgctcacgcggttgaaggagaaaacgttcgttatccggctaactacttcgagaaacctagtagcaccgtgaaagttgcggagtgtttcgctcagcacttcccccgtgtagatcaggtcgatgagtcactgtaaaccccacgggcgaccgtgacagtggctgcgttggcggcctgcccatggggtaacccatgggacgctctaatacagacacggtgtgaagagtctattgagctagttagtagtcctccggcccctgaatgcggctaatcctaactgcggagcgcgcaccctcaacccagggggcagcgcgtcgtaatgggtaactctgcagcggaaccgactactttgggtgtccgtgtttccttttatcccttattggctgcttatggtgacaattgaaaagttgttaccatatagctattggattggccatccggtgaccaacagagctattgtttacctgtttattggatacgtccctcttaatctcaaggccattcaaactcttgattatatattactccttaactgtaagaa

SEQ ID NO: 18191 - DNA, 745 bp, synthetic construct
  source 1..745: mol_type = other DNA
ttaaaacagcctgtgggttgttcccacccacagggcccactgggcgctagcacactgattctgcggaatctttgtgcgcctgttttataaccctttccctaagtagcaacttagaagctttgcacaatcacgaccaatagtgggcgtggcgcgccagtcacgtcttggtcaagcacttctgtttccccggaccgagtatcaatagactgctcacgcggttgaaggagaaaacgttcgttacccggctaactacttcgagaaacctagtagcaccgtgaaagttgcggagtgtttcgctcagcacttcccccgtgtagatcaggtcgatgagtcactgtaaaccccacgggcgaccgtgacagtggctgcgttggcggcctgcccatggggtaacccatgggacgctctaatacagacatggtgtgaagagtctattgagctagttagcagtcctccggcccctgaatgcggctaatcctaactgcggagcgcgcaccctcaacccagggggcggcgtgtcgtaatgggtaactctgcagcggaaccgactactttgggtgtccgtgtttccttttattctttattggctgcttatggtgacaattgaaaagttgttaccatatagctattggattggccatccggtgtctaacagagctattgtttacctatttattggatacgtccctcttaatctcaaggccattcaaactcttgattatatattgctcctcaactgtaagaa

SEQ ID NO: 18192 - DNA, 745 bp, synthetic construct
  source 1..745: mol_type = other DNA
ttgaaacagcctgtgggttgttcccacccacagggcccactgggcgctagcacactgattctgcggaatctttgtgcgcctgttttatgacccttcccctaagcagcaacttagaagctttgtacaatcacgaccaatagtgggcgtggcgcgccagccacgtcttggtcaagcacttctgtttccccggactgagtatcaatagactgctcacgcggtcgaaggagaaaacgttcgttacccggctaactacttcgagaaacctagtagcaccatgaaagttgcggagtgtttcgctcagcacttcccccgtgtagatcaggccgatgagtcactgtaaaccccacgggcgaccgtgacagtggctgcgttggcggcctgcccatggggtaacccatgggacgctctaatacagacatggtgtgaagagtctattgagctagttagtagtcctccggcccctgaatgcggctaatcctaactgcggagcgcgcaccctcaacccagggggcggcgtgtcgtaatgggcaactctgcagcggaaccgactactttgggtgtccgtgtttccttttactctttattggctgcttatggtgacaattgaaaagttgttaccatatagctattggattggccatccggtgtctaacagagctattgtttacctattcattggatacgtccctcttagtctcaaagtcattcaaactcttgactatatattgctccttaactgtaagaa

SEQ ID NO: 18193 - DNA, 747 bp, synthetic construct
  source 1..747: mol_type = other DNA
ttaaaacagcctgtgggttgtacccactcacaggacccacgcggtgctagcactctggttccacggaacctttgtgcgcctgttttacgtcccctccccaatttgtaacttagaagcaatttacagcactgatcaatagcaggcatggcgcaccagctatgtcttgatcaagcacctctgtttccccggaccgagtatcaatagactgttcacacggtcgaaggagaaagcgttcgttatccggctaactacttcgagaaacccagtagcgccattgaaactgcagagtgtttcgctccacacttcccccgtgtagatcaggtcgatgagtcactgcaatccccacgggcgaccgtggcagtggctgcgttggcggcctgcctatggggtaacccataggacgctctaatgtggacatggtgcgaagagtctattgagctagttagtagtcctccggcccctgaatgcggctaatcctaactgcggagcacatgccttcaatccagagggtagtgtgtcgtaatgggcaactctgcagcggaaccgactactttgggtgtccgtgtttccttttattctcacattggctgcttatggtgacaattacagaattgttaccatatagctattggattggccatccggtgtgcaatagagctattatatacctatttgttggctttgtaccactaaccttaaaatctgtaatcactctcgagtatatattgacccttaatacaattaaac

SEQ ID NO: 18194 - DNA, 746 bp, synthetic construct
  source 1..746: mol_type = other DNA
ttaaaacagcctgtgggttgtacccactcacagggcccactgggcgctagcactctgattctgcggaatctttgtgcgcctgttttacaccccctcccccaattcgtaatttagaagtaatgcacaccattgatcaacagcaagcgtggcgcgccagccatgtttagatcaagtacttctgttttcccggactgagtatcaatagactgctcacgcggttgaaggagaaaacgttcgttacccggctaactacttcgagaaacctagtagcaccatcgaaactgcagagtgtttcgttcagcacttaccccgtgtagatcaggtcgatgagtcactgcaatccccacgggcgaccgtggcagtggctgcgctggcggcctgcctatgggcttgcccataggacgctctaatgtggacatggtgtgaagagtctattgagctagttagtagtcctccggcccctgaatgcggctaatcctaactgcggagcgcataccctcaatccagggggtggtgcgtcgtaacgggcaactctgcagcggaaccgactactttgggtgtccgtgtttccttttattcttatattggctgcttatggtgacaattgagagattgttaccatatagctattggattggccatccagtgtctaacagagcaattgtatacttatttgttgggttcgttccactatcatatacatccactaacaccttatactatattataagattgaacacaagaaa

SEQ ID NO: 18195 - DNA, 746 bp, synthetic construct
  source 1..746: mol_type = other DNA
ttaaaacagcctgtgggttgtacccactcacagggcccactgggcgctagcactctgattctgcggaatctttgtgcgcctgttttataacccctcccccaattcgtaatttagaagtgatgcacaccattgatcaacagcaagcgtggcgcaccagccatgtttagatcaagtacttctgtttccccggactgagtatcaataaactgctcacgcggttgaaggagaaaacgttcgttacccggctaactacttcgagaaacttagtagcaccatcgaaactgcagagcgtttcgctcagcactttccccgtgtagatcaggtcgatgagtcactgcaatccccacgggcgaccgtggcagtggctgcgttggcggcctgcctatgggcttgcccataggacgctctaatgtggacatggtgtgaagagtctattgagctagttagtagtcctccggcccctgaatgcggctaatcctaactgcggagcgcataccctcaatccagggggtggtgcgtcgtaacgggcaactctgcagcggaaccgactactttgggtgtccgtgtttccttttattcctatattggctgcttatggtgacaattgagagattgttaccatatagctattggattggccatccagtgtctaacagagcaattgtatacttatttgttggattcgttccactatcatatacatccactaacaccttatactatattataagattgaacacaagaaa

SEQ ID NO: 18196 - DNA, 746 bp, synthetic construct
  source 1..746: mol_type = other DNA
tttaaaacagcctgtgggttgtacccacccacagggcccactgggcgctagcactccgattctgcggaatctttgtgcgcctgttttataaccctcccccgaaacttgcaacttagaagttatgtacgttactgatcaacagcaggcgtggcacaccagccatgtcttgatcaagcacttctgtacccccggactgagtatcaatagactgctcacgtggtcgaaggagaaaacgttcgttatccggctaactacttcgagaaacctagtagcaccactgaaactgcggagtgtttcgctcagcacttcccccgtgtagatcaggtcgatgagtcactgcttaccccacgggtgaccgtggcagtggctgcgttggcggcctgcctatggggcaacccataggacgctctaaagtggacatggtgcgaagagtctattgagctagttagtagtcctccggcccctgaatgcggctaatcctaactgcggagcgcatgccttcaaaccagagggtggtgcgtcgtacgggtaactctgcagcggaaccgactactttgggtgtccgtgtttctcttattctcataatggctgcttatggtgacaattgaggaattgttaccatatagctattggattggccatccggtgtgcaacagagctattatttacttgtttgttggatacattccattaacacctaaatccttcaatacattgcactatatcttgacactgaacgcaagaaa

SEQ ID NO: 18197 - DNA, 747 bp, synthetic construct
  source 1..747: mol_type = other DNA
tttaaaacagcctgtgggttgtacccacccacagggcccactgggcgctagcactccgattctgcggaatctttgtgcgcctgttttataaccctcccccgaaacttgcaacttagaagttatgtacgttactgatcaacagcaggcgtggcacaccagccatgtcttgatcaagcacttctgtacccccggactgagtatcaatagactgctcacgtggtcgaaggagaaaacgttcgttatccggctaactactttgagaaacctagtagcaccactgaaactgcggagtgtttcgctcagcacttcccccgtgtagatcaggtcgatgagtcactgcttaccccacgggtgaccgtggcagtggctgcgttggcggcctgcctatggggcaacccataggacgctctaaagtggacatggtgcgaagagtctattgagctagttagtagtcctccggcccctgaatgcggctaatcctaactgcggagcgcatgccttcaaaccagagggtggtgcgtcgtaacgggtaactctgcagcggaaccgactactttgggtgtccgtgtttctcttattctcataatggctgcttatggtgacaattgaggaattgttaccatatagctattggattggccatccggtgtgcaacagagctattatttacttgtttgttggatacattccattaacacctaaatccttcaatacattgcactatatcttgacactgaacgcaagaaa

SEQ ID NO: 18198 - DNA, 747 bp, synthetic construct
  source 1..747: mol_type = other DNA
tttaaaacagcctgtgggttgtacccacccacagggcccactgggcgctagcactccgattctgcggaatctttgtgcgcctgttttataaccctcccccgaaacttgcaacttagaagttatgtacgttactgatcaacagcaggcgtggcacaccagccatgtcttgatcaagcacttctgtacccccggactgagtatcaatagactgctcacgtggtcgaaggagaaaacgttcgttacccgactaactacttcgagaaacctagtagcaccaccgaagctgcggagtgtttcgctcagcacttcccccgtgtagatcaggtcgatgagccactgcttaccccacgggtgaccgtggcagtggctgcgttggcggcctgcctatggggcaacccataggacgctctaaagtggacatggtgcgaagagtctattgagctagttagtagtcctccggcccctgaatgcggctaatcctaactgcggagcgcatgccctcaaaccagggggttgtgcgtcgtaacgggcaactctgcagcggaaccgactactttgggtgtccgtgtttcttttattctcatgatggctgcttatggtgacaattgaggaattgttaccatatagctattggattggccatccggtgtgcagcagagctattatctacctgtttgttggatacattccattaacacttacatccttcaatacactgcactatattctaacgctgaacgcaagaaa

SEQ ID NO: 18199 - DNA, 745 bp, synthetic construct
  source 1..745: mol_type = other DNA
ttaaaacagcctgtgggttgttcccacccacagggcccactgggcgctagcacactgattctgcgggatctttgtgcgcctgttttataacccctcccctaaacagtaacttagaagcttcacactatcacgaccaatagtaggcgtggcgcaccagtcacgtcttggtcaagcacttctgtttccccggactgagtatcaatagactgctcacgcggttgaaggagaaaacgttcgttatccggctaactacttcgagaaacctagtagcactgtgaaagttgcggagtgtttcgctcagcacttcccccgtgtagatcaggtcgatgagtcactgtgaaccccacgggtaaccgtgacagtggctgcgttggcggcctgcccatggggtaacccatgggacgctctaatacagacacggtgtgaagagtctattgagctagttagtagtcctccggcccctgaatgcggctaatcctaactgcggagcgcgtaccctcaatccagggggcagcgcgtcgtaatgggcaactctgcagcggaaccgactactttgggtgtccgtgtttccttttattccttattggctgcttatggtgacaattgaaaagttgttaccatatagctattggattggccatccggtaaccaacagagctattgtttacctgtttattggatacgtccctctcaatctcaaggccattcaaactcttgattatatactacttctcaactgtaagaa

SEQ ID NO: 18200 - DNA, 748 bp, synthetic construct
  source 1..748: mol_type = other DNA
ttaaaacagcctgtgggttgttcccacccacagggcccactgggcgctagcacactggctttacggggcctttgtgcgcctgttttatgccccttccccctaaattggtaacttagaagttttgcacacctacgaccaatagcaggcatgacgcgccagtcatgtcttggtcaagcacttctgttcccccggactgagtatcaatagactgctcacgcggtcgaaggagaaaacgttcgtcatccggctggttacttcgagaaacccagtagcatcatgaaagttgcagagtgtttcgctcagcactacccccgtgtagatcaggtcgatgagtcactgcgaaccccacgggtgaccgtggcagtggctgcgttggcggcctgcccatggggtaacccatgggacgctctaatacagacatggtgtgaagagtctattgagctagccagtagtcctccggcccctgaatgcggctaatcctaactgcggagcacataccctcaatccagggggtggtgtgtcgtaacgggtaactctgcagcggaaccgactactttgggtgtccgtgtttctttttattcttattatggctgcttatggtgacaattgaaggattgttaccatatagctgttggattggccatccggtgtctaacagagctattgtttatctatttgttggatacgtccctcttgattacaaggcccttcagactctcaagtacgtcttgtaccttaatcaaaagag

SEQ ID NO: 18201 - DNA, 748 bp, synthetic construct
  source 1..748: mol_type = other DNA
ttaaaacagcctgtgggttgttcccacccacagggcccactgggcgctagcacactggctttacggggcctttgtgcgcctgttttatgccccttccccctaaattggtaacttagaagttttgcacacctgcgaccaatagcaggcatgacgcgccagtcatgtcttggtcaagcacttctgttcccccggactgagtatcaatagactgctcacgcggtcgaaggagaaaacgttcgtcatccggctggttacttcgagaaacccagtagcatcatgaaagttgcagagtgtttcgctcagcactacccccgtgtagatcaggtcgatgagtcactgcgaaccccacgggtgaccgtggcagtggctgcgttggcggcctgcccatggggtaacccatgggacgctctaatacagacatggtgtgaagagtctattgagctagccagtagtcctccggcccctgaatgcggctaatcctaactgcggagcacataccctcaatccagggggtggtgtgtcgtaacgggtaactctgcagcggaaccgactactttgggtgtccgtgtttctttttattcttattatggctgcttatggtgacaattggaggattgttaccatatagctgttggattggccatccggtgtctaacagagctattgtttatctatttgttggatacgtccttcttgattacaaggcccttcagactctcaagtacatcttgtaccttaatcaaaagag

SEQ ID NO: 18202 - DNA, 747 bp, synthetic construct
  source 1..747: mol_type = other DNA
ttaaaacagcctgtgggttgtacccacccacagggcccactgggcgctagcactccgattctgcggaatccttgtgcgcctgttttataaccctcccccgaaacttgcaacttagaagttatgcacattactgatcaacagcaggcgtggcgcaccagccatgtcttgatcaagcacttctgtatccccggaccgagtatcaatagactgctcacgtggtcgaaggagaaaacgttcgttatccggctaactacttcgagaaacttagtaacaccattgaaactgcggggtgtttcgctcagcacttcccccgtgtagatcaggtcgatgagtcactgcttaccccacgggcgaccgtggcagtggctgcgttggcggcctgcctatggggcaacccataggacgctctaaagtggacatggtgcgaagagtctattgagctagttagtagtcctccggcccctgaatgcggctaatcctaactgcggagcgcatgtcctcaaaccagaggatggtgcgtcgtaacgggcaactctgcagcggaaccgactactttgggtgtccgtgtttctttttattcttataatggctgcttatggtgacaattgaggaattgttaccatatagctattggattggccatccggtgtgcaacagagctattatctacttgtttgttgggtacattccattgacacttaaatccttcaatacattgcactatattctaacactgaacgcaagaaa

SEQ ID NO: 18203 - DNA, 735 bp, synthetic construct
  source 1..735: mol_type = other DNA
ctgtgggttgttcccacccacagggcccactgggcgctagcacactgattttgcggaatctttgtgcgcctgttttataacccctcccctaagtagtaacttagaagcttcacactatcacgaccagtagtaggcgtggcgcaccagctacgtcttggtcaagcacttctgtttccccggactgagtatcaatagactgctcacgcggttgaaggagaaagcgttcgttatccggccaactacttcgagaaacctagtagcaccgtgaaagttgcggagtgtttcgctcagcacttcccccgtgtagatcaggtcgatgagtcactgtgaaccccacgggcgaccgtgacagtggctgcgttggcggcctgcccatggggcaacccatgggacgctctaatacagacacggtgtgaagagtctattgagctagttggtagtcctccggcccctgaatgcggctaatcctaactgcggagcgcgcaccctcaatccagggggcagcgcgtcgtaatgggtaactctgcagcggaaccgactactttgggtgtccgtgtttccttttattctttattggctgcttatggtgacaattgaagagttgttaccatatagctattggattggccatccggtaaccaacagagccattgtttacctgtttattggatacgtctctctcaatctcaagaccattaaaactcttgattatatactacttcttaactgtaagaa

SEQ ID NO: 18204 - DNA, 746 bp, synthetic construct
  source 1..746: mol_type = other DNA
ttaaaacagcctgtgggttgtacccacccacagggcccactgggcgctagcactccgattctgcggaatctttgtgcgcctgttttataaccctcccccgaaacttgcaacttagaagttatgtacgttactgatcaacagcaggcgtggcacaccagccatgtcttgatcaagcacttctgtacccccggactgagtatcaatagactgctcacgtggtcgaaggagaaaacgttcgttatccggctaactacttcgagaaacctagtagcaccactgaaactgcggagtgtttcgctcagcacttcccccgtgtagatcaggtcgatgagtcactgcttaccccacgggtgaccgtggcggtggctgcgttggcggcctgcctatggggcaacccataggacgctctaaggtggacatggtgcgaagagtctatcgagctagttagtagtcctccggcccctgaatgcggctaatcctaactgcggagcgcatgccctcaaaccagagggtggtgcgtcgtaacgggtaactctgcagcggaaccgactactttgggtgtccgtgtttcttttattctcataatggctgcttatggtgacaattgaggaattgttaccatatagctattggattggccatccggtgtgcaacagagcaattatctacttgtttgttggatacattccattaacacttaaatccttcaatacattgcactatattctaacgctgaacacaagaaa

SEQ ID NO: 18205 - DNA, 746 bp, synthetic construct
  source 1..746: mol_type = other DNA
ttaaaacagcctgtgggttgtacccacccacagggcccactgggcgctagcactccgattctgcggaatctttgtgcgcctgttttataaccctcccccgaaacttgcaacttagaagttatgtacgttactgatcaacagcaagcgtggcacaccagccatgtcctgatcaagcacttctgtaaccccggactgagtatcaatagactgctcacgtggtcgaaagagaaaacgttcgttatccggctaactacttcgagaaacctagtagcaccactgaaactgcggagtgtttcgctcagcacttcccccgtgtagatcaggtcgatgagtcactgcttaccccacgggtgaccgtggcagtggctgcgttggcggcctgcctatggggcaacccataggacgctctaaagtggacatggtgtgaagagtctattgagctagttagtagtcctccggcccctgaatgcggctaatcctaactgcggagcgcatgcccccaaaccagagggtggtgcgtcgtaacgggtaactctgcagcggaaccgactactttgggtgtccgtgtttcttttattctcataatggctgcttatggtgacaattgaggaattgttaccgtatagctattggattggccatccggtgtgcaacagagctattatctacttgtttgttggatacattccattgacacctaaatccttcaatacattgcactatattctaacgttgaacgcaagaaa

SEQ ID NO: 18206 - DNA, 746 bp, synthetic construct
  source 1..746: mol_type = other DNA
ttaaaacagcctgtgggttgtacccacccacagggcccactgggcgctagcactccgattctgcggaatctttgtgcgcctgttttataaccctcccccgaaacttgcaacttagaagttgtgtacgttactgatcaacagccggcgtggcacaccagccatgtcttgatcaagcacttctgtggccccggactgagtatcaatagactgctcacgtggtcgaaggagaaaacgttcgttatccggctaactacttcgagaaacctagtagcaccactgaaactgcggggtgtttcgctcagcacttcccccgtgtagatcaggtcgatgagtcactgcttaccccacgggtgaccgtggcagtggctgcgttggcggcctgcctatggggcaacccataggacgctctaaagtggacatggtgcgaagagtctattgagctagttagtagtcctccggcccctgaatgcggctaatcctaactgcggagcgcatgccctcaaaccagagggtggtgcgtcgtaacgggtaactctgcagcggaaccgactactttgggtgtccgtgtttcttttattctcataatggctgcttatggtgacaattgaggaattgttaccatatagctattggattggccatccggtgtgcaacagagctattatctacttgtttgttggatacattccattaacgcctaagtcttttaatacattacattacattctaacgctgaacacaagaaa

SEQ ID NO: 18207 - DNA, 746 bp, synthetic construct
  source 1..746: mol_type = other DNA
ttaaaacagcctgtgggttgtacccacccacagggcccactgggcgctagcactccgattctgcggaatctttgtgcgcctgttttataaccctcccccgaaaattacaacttagaagttatgtacattactggtcaacagcaggcgtggcacgccagccatgtcttgatcaagcacttctgtacccccggactgagtatcaatagactgctcacgtggtcgaaggagaaaacgttcgttatccggctaactacttcgagaaacttagtagcaccactgaaactgcggagtgtttcgctcagcacttcccccgtgtagatcaggtcgatgagtcactgcttaccccacgggtgaccgtggcagtggctgcgttggcggcctgcctatggggcaacccataggacgctctaaagtggacatggtgcgaagagtctattgagctagttagtagtcctccggcccctgaatgcggctaatcctaactgcggagcgcatgccctcaaaccagagggtggtgcgtcgtaacgggtaactctgcagcggaaccgactactttgggtgtccgtgtttcttttattctcataatggctgcttatggtgacaattgaggaattgttaccatatagctattggattggccatccggtgtgcaacagagctattatctacttgtttgttggatacattccattaacacttaaatccttcaatacattgcactacattctaacgctgaatacaagaag

SEQ ID NO: 18208 - DNA, 746 bp, synthetic construct
  source 1..746: mol_type = other DNA
ttaaaacagcctgtgggttgttcccacccacagggcccactgggcgctagcacactgattctgcgggatctttgtgcgcctgttttataacccttccccctaagcagcaacttagaagctttgtacaatcacgaccaatagtgggcgtggcgcgccagtcacgttttggtcaagcacttctgtatccccggaccgagtatcaatagactgcttacgcggttgaaggagaaaacgttcgttacccggctaactacttcgagaaacctagtagcaccatgaaagttgcggagtgtttcgctcagcacttcccccgtgtagatcaggtcgatgagtcactgtaaaccccacgggcgaccgtgacagtggctgcgttggcggcctgcccatggggtaacccatgggacgctctaatacagacatggtgcgaagagtctattgagctagttagcagtcctccggcccctgaatgcggctaatcctaactgcggagcacgcaccctcaagccagggggcggcgtgtcgtaatgggtaactctgcagcggaaccgactactttgggtgtccgtgtttccttttattctttattggctgcttatggtgacaattgaaaagttgttaccatatagctattggattggccatccggtgtccaacagagctattgtttacctatttattggatacgtccctcttaatctcaaggccattcaaactcttgattatatactgctccttaactgtaagag

SEQ ID NO: 18209 - DNA, 746 bp, synthetic construct
  source 1..746: mol_type = other DNA
ttgaaacaagctgtgggttgttcccacccacagggcccactgggcgctagcacactgattctgcgggatctttgtgcgcctgttttataacccttcccctaagcagcaacttagaagcttagcacaaccacgaccagtagtgggcgtggcgcgccagccacgtcttggtcaagcacttctgtatccccggactgagtatcaatagactgcttacgcggttgaaggagaaaacgttcgttacccggctaactacttcgagaaacctagtagcaccatgaaagttgcggagtgtttcgctcagcacttcccccgtgtagatcaggtcgatgagtcactgtaaaccccacgggcgaccgtgacagtggctgcgttggcggcctgcccatggggtaacccatgggatgctctaatacagacatggtgtgaagagtctattgagctagttagtagtcctccggcccctgaatgcggctaatcctaactgcggagcgcgcaccctcaacccagggggcggtgcgtcgtaacgggtaactcctgcagcggaaccgactactttgggtgtccgtgtttccttttattccttattggctgcttatggtgacaattgagaagttgttaccatatagctattggattggccatccggtgtctaacagagccattgtttacctatttattggatacgtccctcttaatctcaaagccattcaaactcttgactatatactgcttctcaactgtaagaa

SEQ ID NO: 18210 - DNA, 734 bp, synthetic construct
  source 1..734: mol_type = other DNA
tgtgggttgttcccacccacagggcctactgggcgccagcactctggttccatggaacctttgtgcgcctgttttacaacccttccccaatttgtaacgtagaagtaatacacattactgatcaatagcaggcatggcgcgccagtcatgtctcgatcaagcacttctgttcccccggactgagtatcaatagactgctcacgcggttgaaggagaaaacgttcgttaaccggctaactacttcgagaaacctagtagcaccatagaagctgcagagcgtttcgctcagcactccccccgtgtagatcaggctgatgagtcactgcaacccccacgggcgaccgtagcagtggctgcgctggcggcctgcctatggggcaacccataggacgctctaatgtggacgtggtgcgaagagtctattgagctagttagtagtcctccggcccctgaatgcggctaatcctaactgcggagcacatgccttcaacccaggaggtagtgtgtcgtaatgggcaactccgcagcggaaccgactactttgggtgtccgtgtttccttttattcctatattggctgcttatggtgacaatcacgggattgttgccatatagctattggattggccatccggtgtctaatagagctattgtgtacctatttgttggatttatcccgctatcatataaatctctgaacactttgtgctttatattaaacttaaacacacgaaa

SEQ ID NO: 18211 - DNA, 750 bp, synthetic construct; identical to SEQ ID NO: 1202
  source 1..750: mol_type = other DNA

SEQ ID NO: 18212 - DNA, 746 bp, synthetic construct
  source 1..746: mol_type = other DNA
ttaaaacagcctgtgggttgtacccacccacagggcccactgggcgctagcactccgattctgcggaatctttgtgcgcctgttttataaccctcccccgaaacttgtaacttagaagttatgtacgttactgatcagtagcaggcgtggcacaccagccatgtcttgatcaagcacttctgtaaccccggaccgagtatcaatagactgctcacgtggtcgaaagagaaaacgttcgttatccggctaactacttcgagaaacctagtagcaccactgaaactgcggagtgtttcgctcagcacttcccccgtgtagatcaggtcgatgagtcactgcttacctcacgggcgaccgtggcagtggctgcgttggcggcctgcctatggggcaacccataggacgctctaaagtggacatggtgtgaagagtctattgagctagttagtagtcctccggcccctgaatgcggctaatcctaactgcggagcgcacgcccccaaaccagagggtggtgcgtcgtaacgggtaactctgcagcggaaccgactactttgggtgtccgtgtttcttttattctcataatggctgcttatggtgacaattgaggaattgttaccatatagctattggattggccatccggtgtgcaacagagctattatctacttgtttgttggatacattccattgacacctaaatccttcaatacactgcactatattctaacattgaacgcaagaaa

SEQ ID NO: 18213 - DNA, 746 bp, synthetic construct
  source 1..746: mol_type = other DNA
ttaaaccagcctgtgggttgtacccacccacagggcccactgggcgctagcactccgattctgcggaatctttgtgcgcctgttttataaccctcccccgaaacttgtaacttagaagttatgtacgttactgatcagtagcaggcgtggcacaccagccatgtcttgatcaagcacttctgtaaccccggactgagtatcaatagactgctcacgtggtcgaaagagaaaacgttcgttatccggctaactacttcgagaaacctagtagcaccactgaaactgcagagtgtttcgctcagcacttcccccgtgtagatcaggtcgatgagtcactgcttacctcacgggtgaccgtggcagtggctgcgttggcggcctgcctatggggcaacccataggacgctctaaagtggacatggtgtgaagagtctattgagctagttagtagtcctccggcccctgaatgcggctaatcctaactgcggagcgcacgcccccaaaccagagggtggtgcgtcgtaacgggtaactctgcagcggaaccgactactttgggtgtccgtgtttcttttattctcataatggctgcttatggtgacaattgaggaattgttaccatatagctattggattggccatccggtgtgcagcagagctattatctacttgtttgttggatacattccattgacacctaaatccttcaatacattgcactatattctaacattgaacacaagaaa

SEQ ID NO: 18214 - DNA, 746 bp, synthetic construct
  source 1..746: mol_type = other DNA
ttaaaacagcctgtgggttgtacccacccacagggcccactgggcgctagcactccgattctgcggaatctttgtgcgcctgttttataaccctcccccgaaacttgcaacttagaagttgtgtacgttactgatcaacagcaggcgtggcacaccagccatgtcttgatcaagcacttctgtgtccccggactgagtatcaatagaccgctcacgtggtcgaaggagaaaacgttcgttatccggctaactacttcgagaaacctagtagcaccactgaaactgcggagtgtttcgctcagcacttcccccgtgtagatcaggtcgatgagtcactgcttaccccacgggtgaccgtggcagtggctgcgttggcggcctgcctatggggcaacccataggacgctctaaagtggacatggtgcgaagagtctattgagctagttagtagtcctccggcccctgaatgcggctaatcctaactgcggagcgcatgccctcaaaccagagggtggtgcgtcgtaacgggtaactctgcagcggaaccgactactttgggtgtccgtgtttcttttattctcataatggctgcttatggtgacaattgaggaattgttaccatatagctattggattggccatccggtgtgcaacagagctattatctacttgtttgttggatacattccattaacacctaagtccttcaatacattgcactacattctaacgctgaacacaagaaa

SEQ ID NO: 18215 - DNA, 746 bp, synthetic construct
  source 1..746: mol_type = other DNA
ttaaaacaacctgtgggttgtacccaccccccaggcccactgggcgctagcactccgattctgcggaatctttgtgcgcctgttttataaccctcccccgaaacttgtaacttagaagttatgtacgttactgatcagtagcaggcgtggcacaccagccatgtcttgatcaagcacttctgtaaccccggactgagtatcaatagactgctcacgtggtcgaaagagaaaacgttcgttatccggctaactacttcgagaaacttagtagcaccactgaaactgcggagtgtttcgctcagcacttcccccgtgtagatcaggccgatgagtcactgcttacctcacgggtgaccgtggcagtggctgcgttggcggcctgcctatggggcaacccataggacgctctaaagtggacatggtgtgaagagtctattgagctagttagtagtcctccggcccctgaatgcggctaatcctaactgcggagcgcacgcccccaaaccagagggtggtgcgtcgtaacgggtaactctgcagcggaaccgactaccttgggtgtccgtgtttcttttattctcataatggctgcttatggtgacaattgaggaattgttaccatatagctattggattggccatccggtgtgcaacagagctattatctacttgtttgttggatacattccattgacacctaaatccttcaatacattgcactatattctaacattgaacgcaagaaa

SEQ ID NO: 18216 - DNA, 746 bp, synthetic construct
  source 1..746: mol_type = other DNA
ttaaaacagcctgtgggttgtacccacccacagggcccactgggcgctagcactccgattctgcggaatctttgtgcgcctgttttataaccctcccccgaaacttgtaacttagaagttatgtacgttactgatcagcagcaggcgtggcacaccagccatgtcttgatcaagcacttctgtacccccggactgagtatcaatagactgctcacgtggtcgaaggagaaaacgttcgttatccggctaactacttcgagaaacttagtagccccactgaaactgcggagtgtttcgctcagcacttcccccgtgtagatcaggtcgatgagtcactgcttaccccacgggtgaccgtggcagtggctgcgttggcggcctgcctatggggctacccataggacgctctaaagtggacatggtgcgaagagtctattgagctagttagtagtcctccggcccctgaatgcggctaatcctaactgcggagcgcatgcccccaaaccagagggtggtgcgtcgtaacgggcaactctgcagcggaaccgactactttgggtgtccgtgtttcttttattcttataatggctgcttatggtgacaattgagggattgttaccatatagctattggattggccatccggtgtgcaacagagctattatctacttgtttgttggatacattccattaacacctaaatccctcaacacattgcactatatcctaacgctgaacgcaagaaa

SEQ ID NO: 18217 - DNA, 746 bp, synthetic construct
  source 1..746: mol_type = other DNA
ttaaaacagcctgtgggttgtacccacccacagggcccactgggcgctagcactccgattctgcggaatccttgtgcgcctgttttataacccttccccgaaacttgtaacttagaagttatacacgttactgatcaacagcaggcgtggcacaccagccatgtcttgatcaagcacttctgtaaccccggactgagtatcaatagactgctcacgtggtcgaaagagaaaacgttcgttatccggctaactacttcgagaaacctagtagcaccactgaaactgcggagtgtttcgctcagcacttcccccgtgtagatcaggtcgatgagtcactgcttaccccacgggtgaccgtggcagtggctgcgttggcggcctgcctatggggcaacccataggacgctctaaagtggacatggtgtgaagagtctattgagctagttagtagtcctccggcccctgaatgcggctaatcctaactgcagagcgcatgcccccaaaccagagggtggtgcgtcgtaacgggtaactctgcagcggaaccgactactttgggtgtccgtgtttcttttattctcataatggctgcttatggtgacaattgaggaattgttaccatatagctattggattggccatccggtgtgcaacagagctattatctacttgtttgttggatacattccattgacacccaaatccttcaaaacattgcattatattctaacgttgaacgcaagaaa

SEQ ID NO: 18218 - DNA, 746 bp, synthetic construct
  source 1..746: mol_type = other DNA
ttaaaacagcctgtgggttgtacccacccacagggcccactgggcgctagcactccgattctgcggaatctttgtgcgcctgttttataaccctcccccgaaactcgtaacttagaagttatgtacgttactgatcagtagcaggcgtggcacaccagccatgtcttgatcaagcacttctgtaaccccggactgagtatcaatagactgctcacgtggtcgaaagagaaaacgttcgttatccggctaactacttcgagaaacctagtagcaccactgaaactgcggagtgtttcgctcagcacttcccccgtgtagatcaggtcgatgagtcactgcttaccccacgggtgaccgtggcagtggctgcgttggcggcctgcctatggggcaacccataggacgctctaaagtggacatggtgtgaagagtctattgagctagttagtagtcctccggcccctgaatgcggctaatcctaactgcggagcgcacgcccccaaaccagagggtggtgcgtcgtaacgggtaactctgcagcggaaccgactactttgggtgtccgtgtttcttttattctcataatggctgcttatggtgacaattgaggaattgttaccatatagctattggattggccatccggtgtgcaacagagctattatctacttgtttgttggatacattccattgacacctaaatccttcaatacattgcactatattctaacattgaacgcaagaaa

SEQ ID NO: 18219 - DNA, 746 bp, synthetic construct
  source 1..746: mol_type = other DNA
ttaaaacagcctgtgggttgtacccactcacagggcccactgggcgctagcactccgattctgcggaatctttgtgcgcctgttttatgaccctcccccgaaacttgcaacttagaagttatgtacgttactgatcaacagcaggcgtggcacaccagccatgtcttggtcaagcacttctgtaaccccggaccgagtatcaatagactgctcacgtggtcgaaagagaaaacgttcgttatccggctaactacttcgagaaacctagtagcaccactgaaactgcggagtgtttcgctcagcacttcccccgtgtagatcaggtcgatgagtcactgcttaccccacgggtgaccgtggcagtggctgcgttggcggcctgcctatggggcaacccataggacgctctaaagtggacatggtgtgaagagtctattgagctagttagtagtcctccggcccctgaatgcggctaatcctaactgcggagcgcatgcccccaaaccagggggtggtgcgtcgtaacgggtaactctgcagcggaaccgactactttgggtgtccgtgtttcttttattctcataatggctgcttatggtgacaattgaggaattgttaccatatagctattggattggccatccggtgtgcaacagagctattatctacctgttcgttggatacattccattgacacctaaatccttcaattcattgcactatattctgacgttgaacgcaagaaa

SEQ ID NO: 18220 - DNA, 746 bp, synthetic construct
  source 1..746: mol_type = other DNA
ttaaaacagctctggggttgcacccactcacaggacccacgcggtgccagcactctggttccacgggacctttgtgcgcctgttttatgtcccctccccaatttgtaatttagaagcaatttgcaacactgatcagtagcaggcatagcgcaccagctatgtcttgatcaagcacttctgtttccccggaccgagtatcaatagactgtacacacggttgaaggagaaagcgtccgttatccggctaactacttcgagaaacccagtagcaccattgaaactacagagtgtttcgctccacacttcccccgtgtagatcaggtcgatgagtcactgcaatccccacgggcgaccgtggcagtggctgcgctggcggcctgcctatggggcaacccataggacgctctaatgtggacatggtgcgaagagtctattgagctagttagtagtcctccggcccctgaatgcggctaatcctaactgcggagcacatgccttcaatccagagggtagtgtgtcgtaatgggcaactctgcagcggaaccgactactttgggtgtccgtgtttcctttattctcacattggctgcttatggtgacaattacagaattgttaccatatagctattggattggccatccggtgtgcaatagagctattatatacctgtttgttggctttgtaccactaaccttaaaatctttaaccactctcgagtgtatattaacccttaatacagtcaaac

SEQ ID NO: 18221 - DNA, 745 bp, synthetic construct
  source 1..745: mol_type = other DNA
ttaaaacagcctgtgggttgcacccacccacagggcccattgggcgctagcactctggtactgaggtacctttgtgcgcctgtttttactccccttcccccgaagtaacttagaagctgtaaatcaacgatcaatagcaggtgtggcacaccagtcataccttgatcaagcacttctgtttccccggactgagtatcaataggctgctcgcgcggctgaaggagaaaacgttcgttacccgaccaactacttcgagaagcttagtaccaccatgaacgaggcagggtgtttcgctcagcacaaccctagtgtagatcaggctgatgagtcactgcaacccccatgggcgaccatggcagtggctgcgttggcggcctgcccatggagaaatccatgggacgctctaattctgacatggtgtgaagagcctattgagctagctggtagtcctccggcccctgaatgcggctaatcctaactgcggagcacatgctcacgaaccagtgggtggtgtgtcgtaacgggcaactctgcagcggaaccgactactttgggtgtccgtgtttccttttattcttatattggctgcttatggtgacaatcaaagagttgttaccatatagctattggattggccatccggtgtgcaacagggcaattgtttacctatttattggttttgtaccattatcactgaagtctgtgatcactctcaaattcattttgaccctcaacacaatcaaac

SEQ ID NO: 18222 - DNA, 745 bp, synthetic construct
  source 1..745: mol_type = other DNA
ttaaaacagcctgtgggttgttcccacccacagggcccactgggcgctagcacactgattctgcgggatctttgtgcgcctgttttataaccccttccctaagcagtaacttagaagctttatacactcacgaccaatagtaggcgtggcgcgccagtcacgtcttggtcaagcacttctgttcccccggactgagtaccaatagactgctcacgcggttgaaggggaaaacgttcgttatccggctaactacttcgagaaacctagtagcaccgtgaaagttgcggagtgtttcgctcagcacttcccccgtgtagatcaggtcgatgagtcactgtaaaccccacgggcgaccgtgacagtggctgcgttggcggcctgcccatggggtaacccatgggacgctctaatacagacatggtgtgaagagtctattgagctagttagtagtcctccggcccctgaatgcggctaatcctaactgcggagcacgcaccctcaacccagggggtggcgtgtcgtaatgggtaactctgcagcggaaccgactactttgggtgtccgtgtttccttttattccttactggctgcttatggtgacaattgaaaagttgttaccatatagctattggattggccatccggtgtctaacagagctattgtttacctatttattggatacgtccctcttaatctcaaggccattcaaactcttaattatatattgctccttaactgtaagaa

SEQ ID NO: 18223 - DNA, 745 bp, synthetic construct
  source 1..745: mol_type = other DNA
ttaaaacagcctgtgggttgcacccacccacagggcccactgggcgctagcactctggtactgaggtacctttgtgcgcctgtttttactccccttcccccgaagtaacttagaagctgtaaattaacgatcaatagcaggtgtggcacaccagtcataccttgatcaagcacttctgtttccccggactgagtatcaataggctgctcgcgcggctgaaggagaaaacgttcgttacccgaccaactacttcgagaagcttagtaccaccatgaacgaggcagggtgtttcgctcagcacaaccccagtgtagatcaggctgatgagtcactgcaacccccatgggcgaccatggcagtggctgcgttggcggcctgcccatggagaaatccatgggacgctctaattctgacatggtgtgaagagcctattgagctagctggtagtcctccggcccctgaatgcggctaatcctaactgcggagcacatgctcacaaaccagtgggtggtgtgtcgtaacgggcaactctgcagcggaaccgactactttgggtgtccgtgtttccttttattcctatattggctgcttatggtgacaatcaaagagttgttaccatatagctattggattggccatccggtgtgcaacagggcaattgtttacctatttattggttttgtaccattatcactgaagtctgtgatcactctcaaattcattttggccctcaacacaatcaaac

SEQ ID NO: 18224 - DNA, 745 bp, synthetic construct
  source 1..745: mol_type = other DNA
ttaaaacagcctgtgggttgcacccacccacagggcccattgggcgctagcactctggtactgaggtacctttgtgcgcctgtttttactccccttcccccgaagtaacttagaagctgtaaatcaacgatcaatagcaggtgtggcacaccagtcataccttgatcaagcacttctgtttccccggactgagtatcaataggctgctcgcgcggctgaaggagaaaacgttcgttacccgaccaactacttcgagaagcttagtaccaccatgaacgaggcagggtgtttcgctcagcacaaccccagtgtagatcaggctgatgagtcactgcaacccccatgggcgaccatggcagtggctgcgttggcggcctgcccatggagaaatccatgggacgctctaattctgacatggtgtgaagagcctattgagctagctggtagtcctccggcccctgaatgcggctaatcctaactgcggagcacatgctcacgaaccagtgggtggtgtgtcgtaacgggcaactctgcagcggaaccgactactttgggtgtccgtgtttccttttattcttatattggctgcttatggtgacaatcaaagagttgttaccatatagctattggattggccatccggtgtgcaacagggcaattgtttacctatttattggttttgtaccattatcactgaagtctgtgatcactctcaaattcattttgaccctcaacacaatcaaac

SEQ ID NO: 18225 - DNA, 746 bp, synthetic construct
  source 1..746: mol_type = other DNA
taaaacagctggggggtggtacccactcacagggcccacgtggcgctagcactctggttctacggaacctttgtgcgcctgttttacgccccttccccaatttgcaacttagaagcaatacacaacactgatcaacagcaggcatggcgcaccagctatgtcttgatcaagcacttctgtttccccggaccgagtatcaataaactgttcacgcggttgaaggagaaagcgtccgttatccggctaactacttcgagaaacctagtaacaccattgaagctgcagagtgtttcgctcggcacttcccccgtgtagatcaggtcgatgagtcactgcaatccccacgggtgaccgtggcagtggctgcgctggcggcctgcctatggggcaacccataggacgctctaatgtggacatggtgtgaagagtctattgagctagttagtggtcctccggcccctgaatgcggctaatcctaactgcggagcacatgccttcaatccagagggtagtgtgtcgtaatgggcaactctgcagcggaaccgactactttgggtgtccgtgtttccttttattcttatattggctgcttatggtgacaattacagaattgttaccatatagctattggattggccatccggtgtgcaacagagctattatatacctatttgttggctttgtaccactaaccttaaaatctataaccaccctcgactttatattaaccctcaatacagtcaaac

SEQ ID NO: 18226 - DNA, 745 bp, synthetic construct
  source 1..745: mol_type = other DNA
ttaaaacagcctgtgggttgttcccacccacagggcccactgggcgctagcacactgattctgcgggatctttgtgcgcctgttttataaccccttccctaagcagtaacttagaagctttgcacaatcacgaccagtagtgggcgtggcgcgccagtcacgtcttggtcaagcacttctgtatccccggactgagtatcaatagactgctcacgcggttgaaggagaaaacgttcgttatccggctaactacttcgagaaacctagtagcaccgtgaaagttgcggagtgtttcgctcagcacttcccccgtgtagatcaggtcgatgagtcactgtaaaccccacgggcgaccgtgacagtggctgcgttggcggcctgcccatggggtaacccatgggacgctctaatacagacatggtgtgaagagtctattgagctagttagtagtcctccggcccctgaatgcggctaatcctaactgcggagcacgcaccctcaacccagggggcggcgtgtcgtaatgggtaactctgcagcggaaccgactactttgggtgtccgtgtttccttttattccttattggctgcttatggtgacaattgaaaagttgttaccatatagctattggattggccatccggtgtctaacagagctattgtttacctatttattggatacgtccctcttaatctcaaggtcattcagactcttgattatatattgctccttaactgtaagaa

SEQ ID NO: 18227 - DNA, 745 bp, synthetic construct; identical to SEQ ID NO: 1088
  source 1..745: mol_type = other DNA

SEQ ID NO: 18228 - DNA, 745 bp, synthetic construct
  source 1..745: mol_type = other DNA
ttaaaacagcctgtgggttgttcccacccacagggcccactgggcgctagcacactgattctgcggaatctttgtgcgcctgttttatgacccttttcccaagtagcaacttagaagctctacacaatcacgaccaatagtgggcgtggcgcgccagccacgtcttggccaagcacttctgtatccccggactgagtatcaatagactgctcacgcggttgaaggagaaaacgttcgttatccggctaactacttcgagaaacctagtagcaccatgaaagttgcggagtgtttcgctcagcacttcccccgtgtagatcaggtcgatgagtcactgtaaaccccacgggcgaccgtgacagtggctgcgttggcggcctgcccatggggtaacccatgggacgctctaatacagacatggtgtgaagagtctattgagctagttagtagtcctccggcccctgaatgcggctaatcctaactgcggagcacgcaccctcaacccagggggcggcgtgtcgtaatgggtaactctgcagcggaaccgactactttgggtgtccgtgtttccttttatttcttactggctgcttatggtgacaattgaaaagttgttaccatatagctattggattggccatccggtgtctaacagagctgttgtttacctatttattggatacgtccctcttaatctcaaggccattcaaactcttgattatatattgctccttaactgtaagaa

SEQ ID NO: 18229 - DNA, 745 bp, synthetic construct
  source 1..745: mol_type = other DNA
ttaaaacagcctgtgggttgttcccacccacagggcccactgggcgctagcacactgattctgcgggatctttgtgcgcctgttttataaccctttccctaagcagcaacttagaagctttgtacaatcacgaccagtagtgggcgtggcgcgccagtcacgtcttggtcaagcacttctgtatccccggactgagtatcaatagactgctcacgcggttgaaggagaaaacgttcgttatccggctaactacttcgagaaacctagtagcaccatgaaagttgcggagtgtttcgctcagcacttcccccgtgtagatcaggtcgatgagccactgtaaaccccacgggcgaccgtgacagtggctgcgttggcggcctgcccatggggtaacccatgggacgctctaatacagacatggtgtgaagagtctattgagctagttagtagtcctccggcccctgaatgcggctaatcctaactgcggagcacgcaccctcaacccagggggcggcgtgtcgtaatgggtaactctgcagcggaaccgactactttgggtgtccgtgtttccttttattccttattggctgcttatggtgacaattgaaaagttgttaccatatagctattggattggccatccagtgtctaacagagctattgtttacttatttattggatacgtccctctcaatctcaaggtcattcaaacccttgattatatattgctccttaattgtaagaa

SEQ ID NO: 18230 - DNA, 746 bp, synthetic construct
  source 1..746: mol_type = other DNA
ttgaaacagcctgtgggttgttcccacccacagggcccactgggcgctagcacactgattctgcgggatctttgtgcgcctgttttataacccttccccctaagcagcaacttagaagctttgtacaatcacgaccaatagtgggcgtggcgcgccagtcacgttttggtcaagcacttctgtatccccggaccgagtatcaatagactgctcacgcggttgaaggagaaaacgttcgttacccggctaactacttcgagaaacctagtagcaccatgaaagttgcggagtgtttcgctcagcacttcccccgtgtagatcaggtcgatgagtcactgtaaaccccacgggcgaccgtgacagtggctgcgttggcggcctgcccatggggtaacccatgggacgctctaatacagacatggtgcgaagagtctattgagctagttagcagtcctccggcccctgaatgcggctaatcctaactgcggagcacgcaccctcaagccagggggcggcgtgtcgtaatgggtaactctgcagcggaaccgactactttgggtgtccgtgtttccttttattctttattggctgcttatggtgacaattgaaaagttgttaccatatagctattggattggccatccggtgtccaacagagctattgtttacctatttattggatacgtccctcttaatctcaaggccattcaaactcttgattatatactgctccttaactgtaagag

SEQ ID NO: 18231 - DNA, 744 bp, synthetic construct
  source 1..744: mol_type = other DNA
ttaaaacagcctgtgggttgttcccacccacagggcccactgggcgctagcacactgattctgcgggacctttgtgcgcctgttttataacccttccctaagcagtaacttagaagctttgtacaatcatggccaatagtgggcgtggcgcgccagtcacgtcttggtcaagcacttctgtatccccggactgagtatcaatagactgctcacgcggttgaaggagaaaacgttcgttacccggctaactacttcgagaaacctagtagcaccatgaaagttgcggagtgtttcgctcagcacttcccccgtgtagatcaggtcgatgagtcactgtaaaccccacgggcgaccgtgacagtggctgcgttggcggcctgcccatggggtaacccatgggacgctctaatacggacatggtgcgaagagtctattgagctagttagcagtcctccggcccctggatgcggctaatcctaactgcggagcgcgcaccctcaacccagggggcggcgcgtcgtaatgggtaactctgcagcggaaccgactactttgggtgtccgtgtttccttttattctttattggctgcttatggtgacaattgaaaagttgttaccatatagctattggattagccatccggtgtctaacagagctattgtttacctattcattggattcgtccctcttaatctcaaggccattcaaactctcgattacatattgctccttaactgtaagaa

SEQ ID NO: 18232 - DNA, 745 bp, synthetic construct
  source 1..745: mol_type = other DNA
ttaaaacagcctgtgggttgttcccacccacagggcccactgggcgctagcacactgattctgcggaatctttgtgcgcctgttttatgacccttttcccaagtagcaacttagaagctctacacaatcacgaccaatagtgggcgtggcgcgccagccacgtcttggccaagcacttctgtatccccggactgagtatcaatagactgctcacgcggttgaaggagaaaacgttcgttatccggctaactacttcgaggaacctagtagcaccatgaaagttgcggagtgtttcgctcagcacttcccccgtgtagatcaggtcgatgagtcactgtaaaccccacgggcgaccgtgacagtggctgcgttggcggcctgcccatggggtaacccatgggacgctctaatacagacatggtgtgaagagtctattgagctagttagtagtcctccggcccctgaatgcggctaatcctaactgcggagcacgcaccctcaacccagggggcggcgtgtcgtaatgggtaactctgcagcggaaccgactactttgggtgtccgtgtttccttttatttcttactggctgcttatggtgacaattgaaaagttgttaccatatagctattggattggccatccggtgtctaacagagctgttgtttacctatttattggatacgtccctcttaatctcaaggccattcaaactcttgattatatattgctccttaactgtaagaa

SEQ ID NO: 18233 - DNA, 745 bp, synthetic construct
  source 1..745: mol_type = other DNA
ttgaaacagcctgtgggttgttcccacccacagggcccactgggcgctagcacactgattctgcgggatctttgtgcgcctgttttataacccttcccctaagcagcaacttagaagctttgtacaatcacgaccaatagtgggcgtggcgcgccagtcacgtcttggtcaagcacttctgtatccccggactgagtatcaatagactgctcacgcggttgaaggagaaaacgttcgttacccggctaactacttcgagaaacctagtagcaccatgaaagttgcggagtgtttcgctcagcacttcccccgtgtagatcaggtcgatgagtcactgtaaaccccacgggcgaccgtgacagtggctgcgttggcggcctgcccatggggtaacccatgggacgctctaatacagacatggtgcgaagagtctattgagctagttagcagtcctccggcccctgaatgcggctaatcctaactgcggagcgcgcaccctcaacccagggggcggcgtgtcgtaatgggtaactctgcagcggaaccgactactttgggtgtccgtgtttccttttattctttattggctgcttatggtgacaattgaaaagttgttaccatatagctattggattggccatccggtgtctaacagagctattgtttacctatttattggatacgtccctcttaatctcaaggccattcaaactcttgattatatattgctccttaactgtaggaa

SEQ ID NO: 18234 - DNA, 746 bp, synthetic construct
  source 1..746: mol_type = other DNA
tttaaaacagcctgtgggttgtacccacccacagggcccactgggcgctagcacactggttctgcgggacctttgtgcgcctgttttataacccttcccctaagcagtaacttagaagttttgtacagtcatggccaatagtgggcgtgacgcgccagtcacgtcttggtcaagcacttctgtatccccggactgagtatcaatagactgctcacgcggttgaaggagaaaacgttcgttacccggctaactacttcgagaaacctagtagcaccatgaaagttgcggagtgtttcgctcagcacttcccccgtgtagatcaggtcgatgagtcactgtaaaccccacgggcgaccgtgacagtggctgcgttggcggcctgcccatggggtaacccatgggacgctctaatacagacatggtgcgaagagtctattgagctagttagcagtcctccggcccctgaatgcggctaatcctaactgcggagcgcgcaccttcaacccagggggcggcgcgtcgtaatgggtaactctgcagcggaaccgactactttgggtgtccgtgtttccttttatcctttattggctgcttatggtgacaattgaaaagttgttaccatatagctattggattggccatccggtgtctaacagagctattgtttacctattcattggcttcgtccctctaaatctcaaagccatccaaactctcgattacatattgctcctcaactgtaagaa

SEQ ID NO: 18235 - DNA, 746 bp, synthetic construct
  source 1..746: mol_type = other DNA
ttaaaacagcctgtgggttgttcccacccacagggcccactgggcgctagcacactgattctgcgggatctttgtgcgcctgttttataacccctccccctaagcagtaacttagaagctccacactatcacgaccaatagcaggcgtggtgcaccagtcacgtcttggtcaagcacttctgtttccccggactgagtatcaatagactgctcacgcggttgaaggagaaaacgttcgttatccggctaactacttcgagaaacctagtagcaccgtgaaagttgcggagtgtttcgctcagcacttcccccgtgtagatcaggtcgatgagtcactgtgaaccccacgggtgaccgtgacagtggctgcgttggcggcctgcccatggggcaacccatgggacgctctaatacagacacggtgtgaagagtctattgagctagttagtagtcctccggcccctgaatgcggctaatcctaactgtggagcgcgtaccctcaatccagagggcagcgcgtcgtaacgggtaactctgcagcggaaccgactactttgggtgtccgtgtttccttttattctttattggctgcttatggtgacaattaaagagttgttaccatatagctattggattggccatccggtaaccaacagagctattgtttacttgtttgttggatacgtccctctcaatctcaagaccattcaaactcttgattatatactacttctcaattgtaagaa

SEQ ID NO: 18236 - DNA, 745 bp, synthetic construct
  source 1..745: mol_type = other DNA
ttaaaacagcctgtgggttgttcccactcacagggcccactgggcgctagcacactgattctgcgggatctttgtgcgcctgttttataacccttcccctaagcagcaacttagaagctttgtacaatcacgaccaatagtgggcgtgacgcgccagtcacgtcttggtcaagcacttctgtatccccggactgagtaccaatagactgctcacgcggttgaaggggaaaacgttcgttacccggctaactacttcgagaaacctagtagtaccatgaaagttgcggagtgtttcgctcagcacttcccccgtgtagatcaggtcgatgagtcactgtaaaccccacgggcgaccgtgacagtggctgcgttggcggcctgcccatggggtaacccatgggacgctctaatacagacatggtgcgaagagtctattgagctagttaacagtcctccggcccctgaatgcggctaatcctaactgcggagcgcgcaccctcaacccagggggcggcgcgtcgtaatgggtaactctgcagcggaaccgactactttgggtgtccgtgtttccttttattctttattggctgcttatggtgacaattgaaaagttgttaccatatagctattggattggccatccggtgtctaacagagctattgtttatctattcattggattcgtccctcttaatctcaaggccattcaaactctcgattacatattgctccttaattgtaagaa

SEQ ID NO: 18237 - DNA, 746 bp, synthetic construct
  source 1..746: mol_type = other DNA
ttaaaacagcctgtgggttgttcccacccacagggcccactgggcgctagcacactgattctgcgggatctttgtgcgcctgttttataaccctcccccctaagcagcaacttagaagctttgtacaatcacgaccagtagtgggcgtggcgcgccagtcacgtcttggtcaagcacttctgtatccccggactgagtatcaatagactgcttacgcggtcgaaggagaaaacgttcgttacccggctaactacttcgagaaacctagtagcaccatgaaagttgcggagtgtttcgctcagcacttcccccgtgtagatcaggtcgatgagtcactgtaaaccccacgggcgaccgtgacagtggctgcgttggcggcctgcccatggggtaacccatgggacgctctaatacagacatggtgtgaagagtctattgagctagttagtagtcctccggcccctgaatgcggctaatcctaactgcggagcgcgcaccctcaacccagggggcggcgcgtcgtaatgggtaactctgcagcggaaccgactactttgggtgtccgtgtttccttttattccttattggctgcttatggtgacaattgaaaagttgttaccatatagctactggattggccatccggtgtccaacagagctattgtttacctatttattggatacgtccctcttaatctcaaagccattcaaactcttgactatatattgctcctcaactgtaagaa

SEQ ID NO: 18238 - DNA, 729 bp, synthetic construct
  source 1..729: mol_type = other DNA
tgcacccacccacaggacccacgcggtgctagcactctggttctacgggacctttgtgcgcctgttttatgtcccctccccaatttgtaacttagaagcaatttgcaacactgatcagtagtaggcatagcgcaccagctatgtcttgatcaagcacttctgtttccccggaccgagtatcaataaactgttcacacggttgaaggagaaagcgtccgttatccggctaactacttcgagaaacccagtagcgccattgaaactgcagagtgtttcgctccacacttcccccgtgtagatcaggtcgatgagtcactgcaatccccacgggcgaccgtggcagtggctgcgctggcggcctgcctatggggcaacccataggacgctctaatgtggacatggtgtgaagagtctattgagctagttagtagtcctccggcccctgaatgcggctaatcctaactgcggagcacatgccttcaatccagagggtagtgtgtcgtaatgggcaactctgcagcggaaccgactactttgggtgtccgtgtttccttttattctcacattggctgcttatggtgacaattacggaattgttaccatatagctattggattggccatccggtgtgcaatagagctattatatacctatttgttggctttgtaccactgaccttaaaatctataaccactctcgagtgtatattaacccttaatacaatcaaac

SEQ ID NO: 18239 - DNA, 746 bp, synthetic construct
  source 1..746: mol_type = other DNA
tttaaaacagcctgtgggttgtacccacccacagggcccaccgggcgctagtacactgattctgcgggatctttgtacgcctgttttacaacccttcccctaagcagtaacttagaagcttcacgctatcacgaccaatagtaggcgtggtgcaccagtcacgtcttggtcaagcacttctgtttccccggactgagtatcaatagactgcttgcgcggttgaaggagaaaacgttcgtcatccggctaactacttcgagaaacctagtagcaccgtgaaagttgcagagtgtttcgctcagcacttcccccgtgtagatcaggtcgatgagtcactgtgaaccccacgggtgaccgtgacagtggctgcgttggcggcctgcccatggggtaacccatgggacgctctaatacagacacggtgtgaagagtctattgagctagttagtagtcctccggcccctgaatgcggctaatcctaactgcggagcgcgtaccctcaatccagggggcagcgcgtcgtaatgggtaactctgcagcggaaccgactactttgggtgtccgtgtttccttttattccttattggctgcttatggtgacaattgaaaagttgttaccatatagctattggattggccatccggtaaccaacagagctattgtttacctgtttattggatacgtccctctcaatcttaaggctattcaaactcttgattatatattacttctcaactgcaagaa

SEQ ID NO: 18240 - DNA, 746 bp, synthetic construct
  source 1..746: mol_type = other DNA
tttaaaacagcctgtgggttgtacccacccacagggcccactgggcgctagcacactggttccgcgggacctttgtgcgcctgttttataacccttcccctaagcagtaacttagaagctttgtacaatcatggccaatagtgggcgtggcgcgccagtcacgtcttggtcaagcacttctgtatccccggactgagtatcaatagactgctcacgcggttgaaggagaaaacgttcgttacccggttaactacttcgagaaacctagtagcaccatgaaagttgcggagtgtttcgctcagcacttcccccgtgtagatcaggtcgatgagtcactgtaaaccccacgggcgaccgtgacagtggctgcgttggcggcctgcccatggggtaacccatgggacgctctaatacagacatggtgcgaagagtctattgagctagttagcagtcctccggcccctgaatgcggctaatcctaactgcggagcgcgcaccctcaacccagggggcggcgcgtcgtaatgggtaactctgcagcggaaccgactactttgggtgtccgtgtttccttttattctttattggctgcttatggtgacaattgaaaagttgttaccatatagctattggattggccatccggtgtctaacagagctattgtttacctattcattggcttcgtccctcttaatctcaaagccattcaaactctcgattgcatattgctcctcaactgtaagaa

SEQ ID NO: 18241 - DNA, 746 bp, synthetic construct
  source 1..746: mol_type = other DNA
tttaaaacagcctgtgggttgtacccacccacagggcccactgggcgctagcacactggttctgcgggacctttgtgcgcctgttttataacccttcccttgagcagtaacttagaagctttgtacaatcacggccaatagtgggcgtggcgcgccagtcacgtcttggtcaagcacttctgtatccccggactgagtatcaatagactgctcacgcggttgaaggagaaaacgttcgttacccggctaactacttcgagaaacctagtagcaccatgaaagttgcggagtgtttcgctcagcacttcccccgtgtagatcaggtcgatgagtcactgtgaaccccacgggtgaccgtgacagtggctgcgttggcggcctgcccatggggtaacccatgggacgctctaatacagacatggtgcgaagagtctattgagctagttagtagtcctccggcccctgaatgcggctaatcctaactgcggagcgcgcaccctcaacccagggggcggcgcgtcgtaatgggtaactctgcagcggaaccgactactttgggtgtccgtgtttccttttattctttattggctgcttatggtgacaattgaaaagttgttaccatatagctattggattggccatccggtgtctaatagagctattgtttacctattcattggattcatccctcttaatctcaaggccattcaaactctccattacatattgctccttaattgtgagaa

SEQ ID NO: 18242 - DNA, 746 bp, synthetic construct
  source 1..746: mol_type = other DNA
tttaaaacagcctgtgggttgtacccacccacagggcccactgggcgctagcacactggttctgcgggacccttgtgcgcctgttttataaccctttccctaagcagtaacttagaagctttgcacaatcatggccaatagtgggcgtggcgcgccagtcacgtcttggtcaagcacttctgtatccccggactgagtatcaatagactgctcacgcggttgaaggagaaaacgttcgttacccggctaactacttcgagaaacctagtagtaccatgaaagttgcggagtgtttcgctcagcacttcccccgtgtagatcaggtcgatgagtcactgtaaaccccacgggcgaccgtgacagtggctgcgttggcggcctgcccatggggtaacccatgggacgctctaatacagacatggtgcgaagagtctattgagctagttagcagtcctccggcccctgaatgcggctaatcctaactgcggagcgcgcaccctcaacccagggggcggcgcgtcgtaatgggtaactctgcagcggaaccgactactttgggtgtccgtgtttccttttattctttattggctgcttatggtgacaattgaaaagttgttaccatatagctattggattggccatccggtgtctaacagagctattgcttatctattcattggattcgtccctcccaatctcaaggccattcaaactctcgattacatattgctccttaactgtaagaa

SEQ ID NO: 18243 - DNA, 745 bp, synthetic construct
  source 1..745: mol_type = other DNA
ttaaaacagcctgtgggttgtccccacccacagggcccactgggcgctagcacactggttctgcgggacctttgtgcgcctgttttataacccttcccctaagcagtaacttagaagctttgtacaatcatggccaatagagggcgtggcgcgccagtcacgtcttggtcaagcacttctgtatccccggactgagtaccaatagactgctcacgcggttgaaggggaaaacgttcgttacccggctaactacttcaagaaacctagtagcaccatgaaagttgcggagtgtttcgctcagcacttcccccgtgtagatcaggtcgatgagtcactgtaaaccccacgggcgaccgtgacagtggctgcgttggcggcctgcccatggggtagcccatgggacgctctaatacagacatggtgcgaagagtctattgagctagttagcagtcctccggcccctgaatgcggctaatcctaactgtggagcgcgcaccctcaacccagggggcggcgcgtcgtaatgggtaactccgcagcggaaccgactactttgggtgtccgtgtttccttttattctttattggctgcttatggtgacaattgaaaagttgttaccatatagctattggattggccatccggtgtttaacagagctattgtttatctgttcattggattcgtccctcttaatctcaaggccattcaaaatctcgattacatattgctccttaactgtaagaa

SEQ ID NO: 18244 - DNA, 745 bp, synthetic construct
  source 1..745: mol_type = other DNA
ttaaaacagcctgtgggttgttcccactcacagggcccactgggcgctagcacactgattctgcgggatctttgtgcgcctgttttataaccctttccctaagcagcaacttagaagctttgtacaatcacgaccaatagtgggcgtgacgcgccagtcacgtcttggtcaagcacttctgtatccccggactgagtaccaatagactgctcacgcggttgaaggggaaaacgttcgttacccggctaactacttcgagaaacctagtagtaccatgaaagttgcggagtgtttcgctcagcacttcccccgtgtagatcaggtcgatgagtcactgtaaaccccacgggcgaccgtgacagtggctgcgttggcggcctgcccatggggtaacccatgggacgctctaatacagacatggtgcgaagagtctattgagctagttagcagtcctccggcccctgaatgcggctaatcctaactgcggagcgcgcaccctcaacccagggggcggcgtgtcgtaatgggtaactctgcagcggaaccgactactttgggtgtccgtgtttccttttattctttattggctgcttatggtgacaattgagaagttgttaccatatagctattggattggccatccggtgtctaacagagctattgtttacctatttattggatacgtccctcttaatctcaaggtcattcaaactcttgattatatattgctccttaactgtagaaa

SEQ ID NO: 18245 - DNA, 745 bp, synthetic construct; identical to SEQ ID NO: 1089
  source 1..745: mol_type = other DNA

SEQ ID NO: 18246 - DNA, 745 bp, synthetic construct
  source 1..745: mol_type = other DNA
ttaaaacagcctgtgggttgttcccacccacagggcccactgggcgctagcacactgattctgcgggatctttgtgcgcctgttttataacccctcccctaagcagcaacttagaagcttcacactatcatgaccaatagtaggcgtggcgcaccagtcacgtcttggtcaagcacttctgtttccccggactgagtatcaatagactgctcacgcggttgaaggagaaaacgttcgttatccggctaactacttcgagaaacctagtaacaccgtgaaagttgcggagtgtttcgctcagcacttcccccgtgtagatcaggtcgatgagtcactgtgaaccccacgggtgaccgtgacagtggctgcgttggcggcctgcccatggggtaacccatgggacgctctaatacagacacggtgtgaagagtctattgagctagttagtagtcctccggcccctgaatgcggctaatcctaactgcggagcgcgtaccctcagtccagggggcagcgcgtcgtaatgggtaactctgcagcggaaccgactactttgggtgtccgtgtttccttttattccttattggctgcttatggtgacaattgaaaagttgttaccatatagctattggattggccatccgacaaccaacagagctattgtttacttgtttattggatacgtccctctcaatctcaaggccattcaaactcttgattatatactacttctcaactggaagaa

SEQ ID NO: 18247 - DNA, 745 bp, synthetic construct
  source 1..745: mol_type = other DNA
ttaaaacagcctgtgggttgttcccacccacagggcccactgggcgctagcacactgattctgcgggatctttgtgcgcctgttttataacccctcccctaagcagtaacttaaaagctttacactatcacgaccaatagtaggcgtgacgcaccagtcacgtcttggtcaagcacttctgtttccccggactgagtatcaatagactgctcacgcggttgaaggagaaaacgttcgttatccggctaactacttcgagaaacctagtagcaccgtgaaagttgcggagtgtttcgctcagcacttcccccgtgtagatcaggtcgatgagtcactgtgaaccccacgggtgaccgtgacagtggctgcggtggcggcctgcccatggggtaacccatgggacgctctaatacagacacggtgtgaagagtctattgagctagttggtagtcctccggcccctgaatgcggctaatcctaactgcggagcgcgcaccctcaatccagggggcagcgcgtcgtaatgggtaactctgcagcggaaccgactactttgggtgtccgtgtttccttttattccttattggctgcttatggtgacaattgaaaagttgttaccatatagctattggattggccatccgataaccaacagagctattgtttacctgtttgttggatacgtccccctcaatctcaaggccattcaaactcttaattatatactacttctcaactgtaggaa

SEQ ID NO: 18248 - DNA, 745 bp, synthetic construct
  source 1..745: mol_type = other DNA
ttaaaacagcctgtgggttgttcccacccacagggcccactgggcgctagcacactgattctgcgggatctttgtgcgcctgttttataacccctcccctaaacagtaacttagaagcttcacactatcacgaccaatagtaggcgtgacgcaccagtcacgtcttggtcaagcacttctgtttccccggactgagtatcaatagactgctcacgcggttgaaggagaaaacgttcgttatccggctaactacttcgagaaacctagtagcaccgtgaaagttgcggagtgtttcgctcagcacttcccccgtgtagatcaggtcgatgagtcactgtgaaccccacgggtgaccgtgacagtggctgcggtggcggcctgcccatggggtaacccatgggacgctctaatacagacacggtgtgaagagtctattgagctagttggtagtcctccggcccctgaatgcggctaatcctaactgcggagcgcgcaccctcaatccagggggcagcgcgtcgtaatgggtaactctgcagcggaaccgactactttgggtgtccgtgtttccttttattccttattggctgcttatggtgacaattgaaaagttgttaccatatagctattggattggccatccgataaccaacagagctattgtttacctgtttgttggatacgtccccctcaatctcaaggccattcaaactcttaattatatactacttctcaactgtaggaa

SEQ ID NO: 18249 - DNA, 745 bp, synthetic construct
  source 1..745: mol_type = other DNA
ttaaaacagcctgtgggttgttcccacccacagggcccactgggcgctagcacactgattctgcgggatctttgtgcgcctgttttataacccttcccctaagcagcaacttaaaagctttgtacaatcacgaccaacagtgggcgtgacgcgccagtcacgtcttggtcaagcacttctgtatccccggactgagtaccaatagactgctcacgcggttgaaggggaaaacgttcgttacccggttaactacttcaagaaacctagtagcaccatgaaagttgcggagtgtttcgttcagcactccccccgtgtagatcaggtcgatgagccactgtaaaccccacgggcgaccgtgacagtggctgcgttggcggcctgcccatggggtaacccatgggacgctctaatacagacatggtgcgaagagtctattgagctagttagcagtcctccggcccctgaatgcggctaatcctaactgcggagcgcgcaccttcaacccagggggcggcgtgtcgtaatgggtaactctgcagcggaaccgactactttgggtgtccgtgtttccttttattctttactggctgcttatggtgacaattgaaaagttgttaccatatagctattggattggccatccggtgtctaacagagctattgtttacctatttgttggatacgtccctcttaatctcaaggccattcaaactcttgattatatactgctccttaactgtaggaa

SEQ ID NO: 18250 - DNA, 745 bp, synthetic construct
  source 1..745: mol_type = other DNA
ttaaaacagcctgtgggttgttcccacccacagggcccattgggcgctagcacactgattttgcggaatctttgtgcgcctgttttataacccttcccccaagcagcaacttagaagtattgcacaatcgcgaccagtagtgggcgtgacgcgccagtcacgtcttggtcaagcacttctgtatccccggactgagtatcaatagactgcccacgcggttgaaggagaaaacgttcgttatccggctaactacttcgggaagcctagtagcaccttgaaagttgcggagtgtttcgctcagtacttcccccgtgtagatcaggccgatgagccactgtaaaccccacgggcgaccgtgacagtggctgcgctggcggcctgcccatgggggaacccatgggacgctctaatactgacatggtgtgaagagtctactgagctagttagtagtcctccggcccctgaatgcggctaatcctaactgcggagcacacaccctcaacccagggggcagtgtgtcgtaatgggtaactctgcagcggaaccgactactttgggtgaccgtgtttccttttattccttattggctgcttatggtgacaattgaaaagttgttgccatatagctattggattggccatccggtatctaatagagctattgtttacttatttattggatacgtccctcttaatttcgaggctatccaaactcttgattatatattgctccttaattataagaa

SEQ ID NO: 18251 - DNA, 745 bp, synthetic construct
  source 1..745: mol_type = other DNA
ttaaaacagcctgtgggttgttcccacccacagggcctattgggcgctagcacactggttttgcggaatctttgtgcgcctgttttataacccttcccccaagcagcaacttagaagtattgcacaatcgcggccagtagtgggcgtgacgcgccagtcacgtcttggtcaagcacttctgtatccccggactgagtatcaatagactgctcacgcggttgaaggagaaaacgttcgttatccggctaactacttcgggaaacctagtagcaccttgaaagttgcagagtgtttcgctcagcacttcccccgtgtagatcaggccgatgagccactgtaaaccccacgggcgaccgtgacagtggctgcgctggcggcctgcccatgggggaacccatgggacgctctaatacagacatggtgtgaagagtctactgagctagttagtagtcctccggcccctgaatgcggctaatcctaactgcggagcacacaccctcaacccagggggcagtgtgtcgtaatgggtaactctgcagcggaaccgactactttgggtgaccgtgtttccttttattccttattggctgcttatggtgacaattgaaaagttgttaccatatagctattggattggccatccggtatctaacagagctattgtttacttatttattggatacgtccctcttaatttcaaggctattcaaactcttgattatatattgctccttaattataagaa

SEQ ID NO: 18252 - DNA, 745 bp, synthetic construct
  source 1..745: mol_type = other DNA
ttaaaacagcctgtgggttgttcccacccacagggcccattgggcgctagcacactgattttgcggaatctttgtgcgcctgttttatagcccttcccccaagcagcaacttagaagtattgcacaatcgcggccagtagcgggcgtgacgcgccagtcacgtcttggtcaagcacttctgtatccccggactgagtatcaatagactgctcacgcggttgaaggagaaaacgttcgttatccggctaactacttcgggaaacctagtagcaccttgaaagttgcagagtgtttcgctcagcactcccctcgtgtagatcaggccgatgagccactgtaaaccccacgggcgaccgtgacagtggctgcgctggcggcctgcccatggggaaacccatgggacgctctaatactgacatggtgtgaagagtctactgagctagttagtagtcctccggcccctgaatgcggctaatcctaactgcggagcacacaccctcaacccagggggcagtgtgtcgtaatgggtaactctgcagcggaaccgactactttgggtgaccgtgtttccttttattccttattggctgcttatggtgacaattgaaaagttgttaccatatagctattggattggccatccggtgtctaacagagctattgtttacttatttattggatacgttccccttaatttcaaggctatccaaactcttgattatatattgctccttaattataagaa

SEQ ID NO: 18253 - DNA, 745 bp, synthetic construct
  source 1..745: mol_type = other DNA
ttaaaacagcctgtgggttgttcccacccacagggcccattgggcgctagcacactgattttgcggaatctttgtgcgcctgttttataacccttcccccaagcagcaacttagaagcattgcacaatcgcggccagtagcgggcgtgacgcgccagtcacgtcttggtcaagcacttctgtatccccggactgagtatcaatagactgctcacgcggttgaaggagaaaacgttcgttacccggctaactacttcgggaaacctagtagcaccttgaaagttgcagagtgtttcgctcagcacttcccccgtgtagatcaggccgatgagccactgtaaaccccacgggcgaccgtgacagtggctgcgctggcggcctgcccatggggaaacccatgggacgctctaatactgacatggtgtgaagagtctactgagctagttagtagtcctccggcccctgaatgcggctaatcctaactgcggagcacacaccctcaacccagggggcagtgtgtcgtaatgggtaactctgcagcggaaccgactactttgggtgaccgtgtttccttttattccttattggctgcttatggtgacaattgaaaagttgttaccatatagctattggattggccatccggtgtctaacagagctattgtttacttatttattgggtacgttccccttaatttcaaggctatccaaactcttgattatatattgctccttaattataagaa

SEQ ID NO: 18254 - DNA, 745 bp, synthetic construct
  source 1..745: mol_type = other DNA
ttaaaacagcctgtgggttgttcccacccacagggcccattgggcgttagcacactgattttgcggaatctttgtgcgcctgttttataacccttcccccaagcagcaacttagaagtattgcacaatcgcggccagtagcgggcgtgacgcgccagtcacgtcttggtcaagcacttctgtatccccggactgagtatcaatagactgctcacgcggttgaaggagaaaacgttcgttacccggctaactacttcgggaaacctagtagcaccttgaaagttgcagagtgtttcgctcagcacttcccccgtgtagatcaggccgatgagccactgtaaaccccacgggcgaccgtgacagtggctgcgctggcggcctgcccatgggggaacccatgggacgctctaatacagacatggtgtgaagagtctactgagctagttagtagtcctccggcccctgaatgcggctaatcctaactgcggagcacacaccctcaacccagggggcagtgtgtcgtaatgggtaactctgcagcggaaccgactactttgggtgaccgtgtttccttttattccttattggctgtttatggtgacaattgaaaagttgttaccatatagctattggattggccatccggtatctaacagagctattgtttacttatttgttggatacgtccctcttaatttcaaggctatccaaactcttgattatatattgctccttaattataagaa

SEQ ID NO: 18255 - DNA, 745 bp, synthetic construct; identical to SEQ ID NO: 1090
  source 1..745: mol_type = other DNA

SEQ ID NO: 18256 - DNA, 746 bp, synthetic construct
  source 1..746: mol_type = other DNA
tttaaaacagcctgtgggttgtacccacccacagggcccactgggcgctagcacactggttctgcgggacctttgtgcgcctgttttatagcccttcccctaagcagtaacttagaagctttgtacaattatggccaatagtgggcgtggcgcgccagtcacgtcttggtcaagcacttctgtttccccggactgagtatcaatagactgctcacgcggttgaaggagaaaacgttcgtcacccggctaactacttcgagaaacctagtagcatcatgaaagttgcggagtgtttcgctcagcacttcccccgtgtagatcaggtcgatgagtcactgtaaaccccacgggcgaccgtgacagtggctgcgttggcggcctgcccatggggtaacccatgggacgctctaatacagacatggtgcgaagagtctattgagctagttagcagtcctccggcccctgaatgcggctaatcctaactgcggagcgcgcaccttcaacccagggggcggcgcgtcgtaatgggtaactctgcagcggaaccgactactttgggtgtccgtgtttccttttattctctattggctgcttatggtgacaattgaaaagttgttaccatatagctattggattggccatccggtgtctaacagagctattgtttacctattcattggctttgtccctcttaatctcaaggtcatccaaactctcgattacatattgctcctcaactgtaagaa

SEQ ID NO: 18257 - DNA, 746 bp, synthetic construct
  source 1..746: mol_type = other DNA
tttaaaacagcctgtgggttgtacccacccacagggcccactgggcgctagcacactggttccgcgggacctttgtgcgcctgttttataacccttcccctaagctgtaacttagaagctttgtacaatcatggccaatagtgggcgtggcgcgccagtcacgtcttggtcaagcacttctgtatccccggactgagtatcaatagactgctcacgcggttgaaggagaaaacgttcgtcacccggctaactacttcgagaaacctagtagcatcatgaaggttgcggagtgtttcgctcagcacttcccccgtgtagatcaggtcgatgagtcactgtaaaccccacgggcgaccgtgacagtggctgcgttggcggcctgcccatggggtaacccatgggacgctctaatacagacatggtgcgaagagtctattgagctagttagcagtcctccggcccctgaatgcggctaatcctaactgcggagcgcgcaccttcaatccagggggcggcgcgtcgtaatgggtaactctgcagcggaaccgactactttgggtgtccgtgtttccttttattctctattggctgcttatggtgacaattgaaaagttgttaccatatagctattggattggccatccggtgtctaacagagctattgtttacttattcattggctttgtccctcttaatctcaaggtcatccaaactctcgattacatattgctcctcaactgtaagaa

SEQ ID NO: 18258 - DNA, 734 bp, synthetic construct
  source 1..734: mol_type = other DNA
gcctgtgggttgcacccacccacagggcccactgggcgccagcactctggtactgcggtacctttgtgcgcctgttttatcaccccaccccatccggaacgtagaagcaatgcacaactgaccaatagtgggtgtggcgcaccagccacatcttggtcgagcactcctgtttccccgggtttagtatcaataagctgctcacgcggctgaaggagaaaacacccgttatccggccaactacttcgagaaacctagtaccgctatgaacgttgcaaggcgtttcgctcagcacttcccccgtgtagatcaggccgatgagtcaccgcattcctcacgggcgaccgtggcggtggctgcgttggcggcctgcctatgggcttgcccataggacgccttaatactgacatggtgcgaagagtctattgagctagttggtagtcctccggcccctgaatgcggctaatcctaactgcggagcacatactcacaaaccagtgagcggtgtgtcgtaacgggcaactctgcagcggaaccgactactttgggtgtccgtgtttccttttattcttatactggctgcttatggtgacaattaaagaattgttaccatatagctattggattggccatccggtgtctaacagagctattatatacttgtttgttggattcatctcgttatcacacaaatccctcaacactttgtgctttatcttgaatttgaactcaaaaag

SEQ ID NO: 18259 - DNA, 744 bp, synthetic construct
  source 1..744: mol_type = other DNA
ttaaaacagcctgtgggttgtacccacccacagggcccaccgggcgccagcactctggtactgaggtacctttgtgcgcctgtttttactccccttccccgaagtaacttagaagctgtgaatcaacgatcaacagtaggtgtgacacaccagtcacatctcgatcaagcacttctgtttccccggactgagtatcaataggctgcttgcgcggctgaaggagaaaacgttcgttacccggccaactacttcgagaagcttagtaccaccatgaacgatgcagagtgtttcgttcagcacaaccccagtgtagatcaggctgatgagtcactgcaatccccatgggcgaccatggcagtggctgcgttggcggcctgcccatggagaaatccatgggacgctctaattctgacatggtgcgaagagcctattgagctagctggtaatcctccggcccctgaatgcggctaatcccaactgcggagcacacgctcacaagccagtgggtagtgtgtcgtaacgggcaactctgcagcggaaccgactactttgggtgtccgtgtttccttttattcttatactggctgcttatggtgacaatcaaagaattgttaccatatagctattggattggccatccggtgtgcaacagagcaattgtttatctatttgttggttttgtaccattgacactgaagtctgtgattacccttaactttattttgactctcaacacaattaaac

SEQ ID NO: 18260 - DNA, 744 bp, synthetic construct
  source 1..744: mol_type = other DNA
ttaaaacagcctgtgggttgtgcccacccacagggcccaccgggcgccagcactctggtactgaggtacctttgtgcgcctgtttttacttcccttccccgaagtaacttagaagctgtgaatcaacgatcaacagtaggtgtgacacaccagtcacatctcgatcaagcacttctgtttccccggactgagtatcaataggctgcttgcgcggctgaaggagaaaacgttcgttacccggccaactacttcgagaagcttagtaccaccatgaacgatgcagagtgtttcgttcagcacaaccccagtgtagatcaggctgatgagtcactgcaatccccatgggcgaccatggcagtggctgcgttggcggcctgcccatggagaaatccatgggacgctctaattctgacatggtgcgaagagcctattgagctagctggtaatcctccggcccctgaatgcggctaatcccaactgcggagcacacgctcacaagccagtgggtagtgtgtcgtaacgggcaactctgcagcggaaccgactactttgggtgtccgtgtttccttttattcttatactggctgcttatggtgacaatcaaagaattgttaccatatagctattggattggccatccggtgtgcaacagagcaattgtttatctatttgttggttttgtaccattgacactgaagtctgtgattacccttaactttattttgactctcaacacaattaaac

SEQ ID NO: 18261 - DNA, 744 bp, synthetic construct
  source 1..744: mol_type = other DNA
ttaaaacagcctgtgggttgcacccacccacagggcctactgggcgctagcactctggcactgaggtacctttgtgcgcctgtttttacttcccttccccgaagtaacttagaagctgtaaaccaacgatcaatagcaggtgtgacacaccagtcatatcttgatcaagcacttctgtttccccggactgagtatcaataggctgctcgcgcggctgaaggagaaaacgttcgttacccgaccaactacttcgagaagcttagtaccaccatgaacgaggcagagtgtttcgctcagcacaaccccagtgtagatcaggctgatgagccactgcaacccccatgggcgaccatggcagtggctgcgttggcggcctgcccatggagaaatccatgggacgctctaatcctgacatggtgtgaagagcctattgagctagctggtagtcctccggcccctgaatgcggctaatcctaactgcggagcacatgctcacaaaccagtgggtggtgtgtcgtaacgggcaactctgcagcggaaccgactactttgggtgtccgtgtttccttttattcttatattggctgcttatggtgacaatcaaagaattgttaccatatagctattggattggccatccggtgtgcaacagagcaattgtttacctatttattggttttgtaccactatcactgaagtctgtgatcactctcgaattcattttgaccctcaatacaatcaaac

SEQ ID NO: 18262 - DNA, 744 bp, synthetic construct
  source 1..744: mol_type = other DNA
ttaaaacagcctgtgggttgtacccacccacagggcccactgggcgtcagcactctggtactgaggtacctttgtgcgcctgttttacttcccttccccaaaagtaacttagaagctttgaaccaacgatcaacagtaagtgtgacaaaccagtcacatctcgatcaagcacttctgtttccccggactgagtatcaataggctgcttacgcggctgaaagagaaaacgttcgttacccggccaactacttcgagaagcttagtaccaccatgaacgaggcagagcgtttcgctcggcactaccccagtgtagatcaggctgatgagtcactgcaatccccatgggcgaccatggcggtggctgcgctggcggcctgcccatggagagatccatgggacgctctaattttgacatggtgcgaagagcctattgagctagttggtagtcctccggcccctgaatgcggctaatcctaactgcggagcgcacacccacataccagtgggcagtgtgtcgtaacgggcaactctgcagcggaaccgactactttgggtgtccgtgtttccttttattcttatgttggctgcttatggtgacaatcgaagagttgttaccatatagctattggattggccatccggtgtgcaacagagcaattgtctaccagtttattggttttgtaccactgacattaaagtctgtaattacccttaattttgtcttgacccttaacacagtcaagc

SEQ ID NO: 18263 - DNA, 744 bp, synthetic construct
  source 1..744: mol_type = other DNA
ttaaaacagcctgtgggttgcacccactcacagggcccactgggcgtcagcactctggtactgaggtacctttgtgcgcctgttttacctccctttccccgaagtaacttagaagctttgaaccaacgatcaacagtaggtgtggcataccagtcacatcccgatcaagcacttctgtttccccggactgagtatcaataggctgctcgcgcggctgaaggagaaaacgttcgttacccggccaactacttcgagaagcttagtaccaccatgaatgaggcagagcgtttcgctcggcactaccccagtgtagatcaggctgatgagtcactgcaatccccatgggcgaccatggcagtgactgcgctggcggcctgcccatggagaaatccatgggacgctctaattttgacatggtgcgaagagcctattgagctagttggtagtcctccggcccctgaatgcggctaatcctaactgcggagcacacacccacaaaccagtgggcagtgtgtcgtaacgggcaactctgcagcggaaccgactactttgggtgtccgtgtttccttttattcttatgctggctgcttatggtgacaatcgaagagttgttaccatatagctattggattggccatccggtgtgcaacagagcaattgtctacctgtttgttggttttgtaccactgacattaaagtctgtaatcactctcaattttatcttgaccctcaacacagtcaagc

SEQ ID NO: 18264 - DNA, 744 bp, synthetic construct
  source 1..744: mol_type = other DNA
ttaaaacagcctgtgggttgtacccacccacagggcccactgggcgtcagcactctggtactgaggtacctttgtgcgcctgttttacttcccttccccaaaagtaacttagaagctttgaaccagcgatcaacagtaggtgtgacataccagtcacatctcgatcaagcacttctgtttccccggactgagtatcaataggctgcttacgcggctgaaagagaaaacgttcgttacccggccaactacttcgagaagcttagtaccaccatgaacgaggcagagcgtttcgctcggcactaccccagtgtagatcaggctgatgagtcactgcaatccccatgggcgaccatggcagtggctgcgctggcggcctgcccatggagagatccatgggacgctctaattttgacatggtgcgaagagcctattgagctagttggcagtcctccggcccctgaatgcggctaatcctaactgcggagcgcacacccacataccagtgggcagtgtgtcgtaacgggcaactctgcagcggaaccgactactttgggtgtccgtgtttccttttattctcatgttggctgcttatggtgacaatcgaagagttgttaccatatagctattggattggccatccggtgtgcaacagagcaattgtctaccagtttattggttttgtaccactgacattaaagtctgtaattacccttaattttatcttgacccttaacacagtcaagc

SEQ ID NO: 18265 - DNA, 745 bp, synthetic construct
  source 1..745: mol_type = other DNA
ttgaaacagcctgtgggttgttcccacccacagggcccactgggcgctagcacactgattctgcgggatctttgtgcgcctgttttataacccctcccctaagcagtaacttagaagcttcacactatcacgaccaatagtaggcgtggcgcaccagtcacgtcttggtcaagcacttctgtctccccggactgagtatcaatagactgctcacgcggttgaaggagaaaacgttcgttatccggctaactacttcgagaaacctagtagcaccgtgaaagttgcggagtgtttcgctcaacacttcccccgtgtagatcaggtcgatgagtcactgtgaaccccacgggtgaccgtgacagtggctgcgttggcggcctgcccatggggtaacccatgggacgctctaatacagacacggtgtgaagagtctattgagctagttagtagtcctccggcccctgaatgcggctaatcctaactgtggagcgcgcaccctcaatccagggggcagcgcgtcgtaatgggtaactctgcagcggaaccgactactttgggtgtccgtgtttccttttattccttattggctgcttatggtgacaattgaaaagttgttaccatatagctactggattggccatccggtgaccaacagagctattgtttacttgtttattggatacgtccctctcaatctcaaagccattcaaactcttgattacatattacttctcaactgtaagaa

SEQ ID NO: 18266 - DNA, 745 bp, synthetic construct
  source 1..745: mol_type = other DNA
ttgaaacagcctgtgggttgttcccacccacagggcccactgggcgctagcacactgattctgcgggatctttgtgcgcctgttttataaccctccccctaagcagcaacttagaagctttgtacaatcacgaccaatagtgggcgtggcgcgccagtcacgtcttggtcaagcacttctgtatccccggactgagtatcaatagactgctcacgcggttgaaggagaaaacgttcgttacccggctaactacttcgagaaacctagtagcaccatgaaagttgcggagtgtttcgctcagcacttcccccgtgtagatcaggtcgatgagtcactgtaaaccccacgggcgaccgtgacagtggctgcgttggcggcctgcccatggggtaacccatgggacgctctaatacagacatggtgcgaagagtctattgagctagttagcagtcctccggcccctgaatgcggctaatcctaactgcggagcgcgcaccctcaacccagggggcggcgtgtcgtaatgggtaactctgcagcggaaccgactactttgggtgtccgtgtttccttttattccttattggctgcttatggtgacaattgaaaagttgttaccatatagctattggattggccatccggtgtctaacagagctattgtttacctatttattggatacgtcccccttaacctcaaggccattcaaactcctgattatatattgctccttaactgtaagaa

SEQ ID NO: 18267 - DNA, 744 bp, synthetic construct
  source 1..744: mol_type = other DNA
ttaaaacagcctgtgggttgcacccacccatagggcccactgggcgctagcactctggcactgaggtacctttgtgcgcctgtttttatttcccttccccgaagtaacttagaagctgtaaatcaacgatcaatagtaggtgtgacacaccagtcataccttgatcaagcacttctgtttccccggactgagtatcaataggctgctcgcgcggctgaaggagaaaccgttcgttacccgaccaactacttcgagaagcttagtaccaccatgaacgaggcagagtgtttcgttcagcacaaccccagtgtagatcaggctgatgagtcactgcaacccccatgggcgaccatggcagtggctgcgttggcggcctgcccatggagaaatccatgggacgctctaattctgacatggtgtgaagagcctattgagctagttggtagtcctccggcccctgaatgcggctaatcctaactgcggagcacatgctcacaaaccagtgggtggtgtgtcgtaacgggcaactctgcagcggaaccgactactttgggtgtccgtgtttccttttattcttatattggctgcttatggtgacaatcaaagaattgttaccatatagctattggatcggccatccggtgtgcaacagagcaattgtttacctatttattggctttgtaccattatcactgaagtccgtgatcactctcaaattcattttgactctcaacacaatcaaac

SEQ ID NO: 18268 - DNA, 744 bp, synthetic construct
  source 1..744: mol_type = other DNA
ttaaaacagcctgtgggttgtacccacccacagggcccactgggcgtcagcactctggtactgaggtacctttgtgcgcctgttttacttcccttccccaaaagtaacttagaagctttgaaccaacgatcaacagtaagtgtgacataccagtcacatctcgatcaagcacttctgtttccccggactgagtatcaataggctgcttacgcggctgaaagagaaaacgttcgttacccggccaactacttcgagaagcttagtaccaccatgaacgaggcagagcgtttcgctcggcactaccccagtgtagatcaggctgatgagtcactgcaatccccatgggcgaccatggcagtggctgcgctggcggcctgcccatggagagatccatgggacgctctaattttgacatggtgcgaagagcctattgagctagctggtagtcctccggcccctgaatgcggctaatcctaactgcggagcgcacacccacataccagtgggcagtgtgtcgtaacgggcaactctgcagcggaaccgactactttgggtgtccgtgtttccttttattcttatgttggctgcttatggtgacaatcgaagagttgttaccatatagctattggattggccatccggtgtgcaacagagcaattgtctaccagtttattggttttgcaccactgacattaaagtctgtaattacccttaattttatcttgacccttaacacagtcaagc

SEQ ID NO: 18269 - DNA, 745 bp, synthetic construct
  source 1..745: mol_type = other DNA
ttgaaacagcctgtgggttgttcccacccacagggcccactgggcgctagcacactgattctgcgggatctttgtgcgcctgttttataacccctcccctaagcagtaacttagaagcttcacactatcacgaccaacagtgggcgtggcgcaccagtcacgtcttggtcaagcacttctgtttccccggactgagtatcaatagactgctcacgcggttgaaggagaaaacgttcgttatccggctaactacttcgagaaacctattagcaccgtgaaagttgcggagagtttcgctcagcacttcccccgtgtagatcaggtcgatgagtcactgtgaaccccacgggtgaccgtgacagtggctgcgttggcggcctgcccatggggtaacccatgggacgctctaatacagacacggtgtgaagagtctattgagctagttagtagtcctccggcccctgaatgcggctaatcctaactgcggagcgcgtaccctcaatccagggggcagcgcgtcgtaatgggtaactctgcagcggaaccgactactttgggtgtccgtgtttccttttattccttattggctgcttatggtgacaattgaaaagttgttaccatatagctattggattggccatccggtaaccaacagagctattgtttacctgtttattggatacgtccccctcaatctcaaggccattcaaactcttgattacatattacttctcaactgtaagaa

SEQ ID NO: 18270 - DNA, 744 bp, synthetic construct
  source 1..744: mol_type = other DNA
ttaaaacagcctgtgggttgtacccacccacagggcctactgggcgctagcactctggcactgaggtacctttgtgcgcctgttttgacttcccttccccgaagtaacttagaagctgtaaatcaacgatcaatagtaggtgtgacacaccagtcatatcttgatcaagcacttctgtttccccggactgagtatcaataggctgctcgcgcggctgaaggagaaaacgttcgttacccgaccaactacttcgagaagcttagtaccaccatgaacgaggcagagtgtttcgttcagcacaaccccagtgtagatcaggctgatgagccactgcaacccccatgggcgaccatggcagtggctgcgttggcggcctgcccatggagaaatccatgggacgctctaattctgacatggtgtgaagagcctattgagctagctggtagtcctccggcccctgaatgcggctaatcctaactgcggagcacatgctcacaaaccagtgggtggtgtgtcgtaacgggcaactctgcagcggaaccgactactttgggtgtccgtgtttccttttattcttatattggctgcttatggtgacaatcaaagaattgttaccatatagctattggattggccatccggtgtgcaacagagcaattgtttacccatttattggttttgtaccattatcactgaagtctgtgatcactctcaaattcattttgaccctcaacacaaccaaat

SEQ ID NO: 18271 - DNA, 745 bp, synthetic construct
  source 1..745: mol_type = other DNA
ttaaaacagcctgtgggttgttcccatccacagggcccactgggcgctagcacactgattctgcgggatctttgtgcgcctgttttataacccttcccctaagcaacaacttagaagctttgtacaatcacgaccaatagtgggcgtgacgcgccagtcacgtcttggtcaagcacttctgtatccccggactgagtaccaataggctgctcacgcggttgaaggggaaaacgttcgttacccggctaactacttcgagaaacctagtagcaccatgaaagttgcggagtgtttcgctcagcacttcccccgtgtagatcaggtcgatgagtcactgtaaaccccacgggcgaccgtgacagtggctgcgttggcggcctgcccatggggtaacccatgggacgctctaatacagacatggtgcgaagagtctattgagctagtcagtagtcctccggcccctgaatgcggctaatcctaactgcagagcgcgcaccctcaatccagggggcggcgtgtcgtaatgggtaactctgcagcggaaccgactactttgggtgtccgtgtttccttttattctttattggctgcttatggtgacaattgagaagttgttaccatatagctattggattggccatccggtgtctaacagagctattgtttacctatttattgggtacgtccctcttaatctcaaggccattcaaactcttgattacatattgctccttaactgtaggaa

SEQ ID NO: 18272 - DNA, 745 bp, synthetic construct
  source 1..745: mol_type = other DNA
ttgaaacagcctgtgggttgttcccacccacagggcccactgggcgctagcacactgattctgcgggatctttgtgcgcctgttttataacccctcccctaagcagtaacttagaagcttcacactattacgaccaatagtaggcgtggcgcaccagtcacgtcttggtcaagcacttctgtttccccggactgagtatcaatagactgctcacgcggtcgaaggagaaaacgttcgttatccggctaactacttcgagaaacctagtagcaccgtgaaagttgcggagtgtttcgctcagcacttcccccgtgtagatcaggtcgatgagtcactgtgaaccccacgggtgaccgtgacagtggctgcgttggcggcctgcccatggggtaacccatgggacgctctaatacagacacggtgtgaagagtctattgagctagttagtagtcctccggcccctgaatgcggctaatcttaactgcggagcgcgtaccctcaatccagggggcagcgcgtcgtaatgggtaactctgcagcggaaccgactactttgggtgtccgtgtttccttttattccttattggctgcttatggtgacaattgaaaagttgttaccatatagctattggattggccatccggtaaccaacagagctattgtttacctgtttattggatacgtccctctcaatctcaaggccattcaaactcttgattatatactacttctcaactgtaagaa

SEQ ID NO: 18273 - DNA, 745 bp, synthetic construct
  source 1..745: mol_type = other DNA
ttaaaacagcctgtgggttgttcccacccacagggcccactgggcgctagcacaccgattctgcgggatctttgtgcgcctgttttataacccctcccctaagcagcaacttagaagctttgcacaatcacgaccagtagtgggcgtggcgcaccagccacgtcttggtcaagcacttctgtatccccggactgagtaccaatagactgctcacgcggttgaaggagaaaatgttcgttacccggctaactacttcgagaaacctagtaacaccatgaaagttgcggagtgtttcgctcagcacttcccccgtgtagatcaggtcgatgagtcactgtaaaccccacgggcgaccgtgacagtggctgcgttggcggcctgcccatggggtaacccatgggacgctctaatacagacatggtgtgaagagtctattgagctagttagtagtcctccggcccctgaatgcggctaatcctaactgcggagcgcgcaccctcaacccagggggcagcgcgtcgtaatgggtaactctgcagcggaaccgactactttgggtgtccgtgtttccttttattccttattggctgcttatggtgacaattgaaaagttgttaccatatagctattggattggccatccggtgtctaatagagccattgtttacctgtttattggatacgttcctcttaatctcaaagccattcaaactcttgactatatactgctccttaactgtaagaa

SEQ ID NO: 18274 - DNA, 745 bp, synthetic construct
  source 1..745: mol_type = other DNA
ttaaaacagcctgtgggttgttcccacccacagggcccactgggcgctagcacactgattctacgggatccttgtgcgcctgttttataatccttcccccaagtagcaacttagaagctttgtacaatcacgaccagtagtgggcgtggcgcgccagtcacgtcttggtcaagcacttctgtatccccggactgagtatcaatagactgctcacgcggttgaaggagaaaacgttcgttacccggctaactacttcgagaaacccagtagcaccgtgaaagttgcggagtgtttcgctcagcacttcccccgtgtagatcaggtcgatgagtcactgtaaaccccacgggcgaccgtgacagtggctgcgttggcggcctgcccatggggtaacccatgggacgctctaatacagacacggtgtgaagagtctattgagctagttagtagtcctccggcccctgaatgcggctaatcctaactgcggagcgcgcaccctcaacccagggggcggcgtgtcgtaatgggtaactctgcagcggaaccgactactttgggtgtccgtgtttccttttattccttattggctgcttatggtgacaattgaaaagttgttaccatatagctattggattggccatccggtgtctaatagagctattgtttacttatttattggatacgtccctcttaatctcaaagtcattcaaactcttgattatatattgctccttaactgtaagaa

SEQ ID NO: 18275 - DNA, 744 bp, synthetic construct
  source 1..744: mol_type = other DNA
ttaaaacagcctgtgggttgcacccacccacagggcccactgggcgctagcactctggcactaaggtacctttgtgcgcctgtttttacttcccttccccaaagtaacttagaagttgtgcaccagcgatcaatagcaggtgtgacacaccagtcatatcttgatcaagtacttctgtttccccggaccgagtatcaataggctgctcgcgcggctgaaggagaaaacgttcgttacccgaccaactacttcgagaagcttagtaccaccatgaacgaggcagagtgtttcgttcagcacaaccccagtgtagatcaggctgatgagtcactgcaacccccatgggcgaccatggcagtggctgcgttggcggcctgcccatggagaaatccatgggacgctctaattctgacatggtgtgaagagcctattgagctagctggtagtcctccggcccctgaatgcggctaatcctaactgcggagcacatgctcacaaaccagtgggtggtgtgtcgtaatgggcaactctgcagcggaaccgactactttgggtgtccgtgtttccttttactcttatgttggctgcttatggtgacaatcaaagaattgttaccatatagctattggattggccatccggtgtgtaacagagcaattgtttacctatttattggttttgtaccactatcactgaagtctgtgaccactctcaaattcattttgaccctcaactcaatcaaac

SEQ ID NO: 18276 - DNA, 744 bp, synthetic construct
  source 1..744: mol_type = other DNA
ttaaaacagcctgtgggttgtacccacccacagggcccactgggcgtcagcactccggtactgaggtacctttgtgcgcctgttttacttcccttccccaaaagtaacttagaagctttgaaccagcgatcaacagtaggtgtgacataccagtcacatctcgatcaagcacttctgtttccccggactgagtatcaataggctgcttacgcggctgaaagagaaaacgttcgttacccggccaactacttcgagaagcttagtaccaccatgaacgaggcagagcgtttcgctcggcactaccccagtgtagatcaggctgatgagtcactgcaatccccatgggcgaccatggcagtggctgcgctggcggcctgcccatggagagatccatgggacgctctaattttgacatggtgcgaagagcctattgagctagttggtagtcctccggcccctgaatgcggctaatcctaactgcggagcgcacacccacataccagtgggcagtgtgtcgtaacgggcaactctgcagcggaaccgactactttgggtgtccgtgtttccttttattctcatgttggctgcttatggtgacaatcgaagagttgttaccatatagctattggattggccatccggtgtgcaacagagcaattgtctaccagtttattggttttgtaccactgacattaaagtctgtaattacccttaatattatcttgacccttaacacagtcaagc

SEQ ID NO: 18277 - DNA, 745 bp, synthetic construct
  source 1..745: mol_type = other DNA
ttaaaacagcctgtgggttgttcccactcacagggcccactgggcgctagcacactgattctgcgggatctttgtgcgcctgttttataacccttcccctaagcagcaacttagaagctttgtacaatcacgaccaatagtgggcgtgacgcgccagtcacgtcttggtcaagcacttctgtatccccggactgagtatcaatagactgctcacgcggttgaaggagaaaacgttcgttacccggctaactacttcgagaaacctagtagcaccatgaaagttgcggagtgtttcgctcagcacttcccccgtgtagatcaggccgatgagtcactgtaaaccccacgggcgaccgtgacagtggctgcgttggcggcctgcccatggggtaacccatgggacgctctaatacagacatggtgcgaagagtctattgagctagttagcagtcctccggcccctgaatgcggctaatcctaactgcggagcgcgcaccctcaacccagggggcggcgcgtcgtaatgggtaactctgcagcggaaccgactactttgggtgtccgtgtttccttttattctttattggctgcttatggtgacaattgaaaagttgttaccatatagctattggattggccacccggtgtctaacagagctattgtttatctattcattggattcgtccctcttaatctcaaggccattcaaactctcgattacatattgctccttaattgtaagaa

SEQ ID NO: 18278 - DNA, 745 bp, synthetic construct
  source 1..745: mol_type = other DNA
ttaaaacagcctgtgggttgttcccacccacagggcccactgggcgctagcacactgattctgcgggatctttgtgcgcctgttttataacccttcccctaagcagcaacttagaagctttgtacaatcacgaccaatagtgggcgtggcgcgccagtcacgtcttggtcaagcacttctgtatccccggactgagtatcaatagactgctcacgcggttgaaggagaaaacgttcgttacccggctaactacttcgagaaacctagtagcaccatgaaagttgcggagtgtttcgctcagcacttcccccgtgtagatcaggccgatgagtcactgtaaaccccacgggcgaccgtgacagtggctgcgttggcggcctgcccatggggtaacccatgggacgctctaatacagacatggtgcgaagagtctattgagctagttagcagtcctccggcccctgaatgcggctaatcctaactgcggagcgcgcaccctcaacccagggggcggcgcgtcgtaatgggtaactctgcagcggaaccgactactttgggtgtccgtgtttccttttattctttattggctgcttatggtgacaattgaaaagttgttaccatatagctattggattggccatccggtgtctaacagagctattgtttatctattcattggattcgtccctcttaatcttaaggccattcaaactctcgattacatattgctccttaattgtaagaa

SEQ ID NO: 18279 - DNA, 745 bp, synthetic construct
  source 1..745: mol_type = other DNA
ttaaaacagcctgtgggttgttcccactcacagggcccactgggcgctagcacactgattctgcgggatctttgtgcgcctgttttataacccttcccctaagcagcaacttagaagctttgtacaatcacgaccaatagtgggcgtgacgcgccagtcacgtcttggtcaaggccttctgtatccccggactgagtatcaatagactgctcacgcggttgaaggagaaaacgttcgttacccggctaactacttcgagaaacctagtagcaccatgaaagttgcggagtgtttcgctcagcacttcccccgtgtagatcaggccgatgagtcactgtaaaccccacgggcgaccgtgacagtggctgcgttggcggcctgcccatggggtaacccatgggacgctttaatacagacatggtgcgaagagtctattgagctagttagcagtcctccggcccctgaatgcggctaatcctaactgcggagcgcgcaccctcaacccagggggcggcgcgtcgtaatgggtaactctgcagcggaaccgactactttgggtgtccgtgtttccttttattctttattggctgcttatggtgacaattgaaaagttgttaccatatagctattggattggccatccggtgtctaacagagctattgtttatctattcattggattcgtccctcttaatctcaagaccattcaaactctcgattacatattgctccttaattgtaagaa

SEQ ID NO: 18280 - DNA, 746 bp, synthetic construct
  source 1..746: mol_type = other DNA
ttaaaacagcctgtgggttgttcccacccacagggcctactgggcgctagcacactgatcctgcgggatctttgtgcgcctgttttataaccccttccctaagtagcaacttagaagcttcgcactatcacgaccgatagtgggcgtggcgcaccagtcacgtcttggtcaagcactcctgtttccccggactgagtatcaatagactgctcacgcggttgaaggagaaaacgttcgttatccggctaactacttcgagaaacctagtagcaccgtgaaagttgcggagtgtttcgctcagcacttcccccgtgtagatcaggtcgatgagtcactgtaaaccccacgggcgaccgtgacagtggctgcgctggcggcctgcccatggggtaacccatgggacgctctaatacagacacggtgtgaagagtctattgagctagttagtagtcctccggcccctgaatgcggctaatcttaactgcggagcgcgtaccctcaacccagggggcggcgcgtcgtaatgggtaactctgcagcggaaccgactactttgggtgtccgtgtttccttttattcctatactggctgcttatggtgacaattgaaaagttgttaccatatagctattggattggccatccggtgaccaacagagctatcatttatctgttcgttggatacgttcctcttgacctcaaggctattcaaactcttgattatatattacttcttaaccataagaa

SEQ ID NO: 18281 - DNA, 746 bp, synthetic construct
  source 1..746: mol_type = other DNA
ttaaaacagcctgtgggttgttcccacccacagggcccattgggcgctagcacactgactttgcggagtctttgtgcgcctgttttataacccttcccccaagtagcaacttagaagtattgcacaaccgcggccagtagtgggtgtgacgcgccagtcacatcttggtcaagcacttctgtatccccggactgagtatcaatagactgctcgcgcggttgaaggagaaaacgttcgttatccggctaactacttcgggaaacctagtagcaccttggaagttgcagagtgtttcgctcagcactttccccgtgtagatcaggtcgatgagccactgtaaaccccacgggcgaccgtgacagtggctgcgttggcggcctgcccatggggtaacccatgggacgctctaatacagacatggtgtgaagagtctactgagctagttagtagtcctccggcccctgaatgcggctaatcctaactgcggagcacacaccctcaatccagggggcggtgtgtcgtaatgggtaactctgcagcggaaccgactactttgggtgtccgtgtttccttttattcctatactggctgcttatggtgacaattgaaaagttgttaccatatagctattggattggccatccggtgtctaacagagctattgtctacttgtttattggatacgtccctcttaatctcaaggtcattcgaactcttgattatatattgctccttaattataggaa

SEQ ID NO: 18282 - DNA, 744 bp, synthetic construct
  source 1..744: mol_type = other DNA
ttaaaacagcctgtgggttgtacccacccacaggggctactgggcgctagcactctggtactaaggtacctttgtgcgcctgtttttatttcccttccccaaagtaacttagaagttgtgcaccaacgatcaatagcaggtatggcacaccagtcatatcttgatcaagtacttctgtttccccggaccgagtatcaataggctgctcgcgcggctgaaggagaaaacgttcgttacccggccaactacttcgagaagcctagtaccaccatgaacgaggcagagtgtttcgctcagcacaaccccagtgtagatcaggctgatgagtcactgcaacccccatgggtgaccatggcagtggctgcgttggcggcctgcccatggagaaatccatgggacgctctaattctgacatggtgtgaagagcctattgacctagatggtagtcctccggcccctgaatgcggctaatcctaactgcggagcacatgctcacaaaccagtgggtggtgtgtcgtaatgggcaactctgcagcggaaccgactactttgggtgtccgtgtttccttttattcctatgttggctgcttatggtgacaatcaaagaattgttaccatatagctattggattggccatccagtgtgcaacagagcaattgtctacctatttgttggtttcgtgccactatcactgaaatctgtgaccactctcaaattcattttgaccctcaactcaaccaaac

SEQ ID NO: 18283 - DNA, 746 bp, synthetic construct
  source 1..746: mol_type = other DNA
tttaaaacagcctgtgggttgtacccacccacagggcccactgggcgctagcacactgattctgcgggatctttgtgcgcctgttttataaccctttccctaagcagcaacttagaagctttgtacaatcacgaccaatagtgggcgtgacgcgccagtcacgtcttggtcaagcacttctgtatccccggactgagtaccaatagactgctcacgcggttgaaggggaaaacgttcgttacccggctaactacttcgagaaacctagtagtaccatgaaagttgcggagtgtttcgctcagcacttccctcgtgtagatcaggtcgatgagtcactgtaaaccccacgggcgaccgtgacagtggctgcgttggcggcctgcccatggggtaacccatgggacgctctaatacagacatggtgcaaagagtctattgagctagttagcagtcctccggcccctgaatgcggctaatcctaactgcggagcgcgcaccctcaacccagggggcggcgtgtcgtaatgggtaactctgcagcggaaccgactactttgggtgtccgtgtttccttttattccttattggctgcttatggtgacaattgaaaagttgttaccatatagctattggattggccatccggtgtctaacagagctattgtttacctatttattggatacgtccctcttaatctcaaggttattcaaaccctcaattatatattgctccttaactgtaggaa

SEQ ID NO: 18284 - DNA, 745 bp, synthetic construct
  source 1..745: mol_type = other DNA
ttaaaacagcctgtgggttgttcccacccacagggcccactgggcgctagcacactgattctgcgggatctttgtgcgcctgttttataaccccgcccgtaagcaggaacttaaaagcttcccactatgacgaccaatagtgggcgtggcgcaccagtcacgtcttggtcaagctcttctgtttccccggactgagtatcaatagactgctcacgcggttgaaggagaaaacgttcgttatccggctaactacttcaagaaacctattagcaccgggaaagttgcggagagtttcgctcaccacttcccccgtgtagatcaggtcgatgagtcactgtaaaccccacgggtgaccgtgacagtggctgcgttggcggcctgcccatggggtaacccatgggacgctctaatacagacacggtgtgaagagtctattgagctagttagtagtcctccggcccctgaatgcggctaatcctaactgcggagcgcgtaccctcaatccagggggcagcgcgtcgtaatgggtaactctgcagcggaaccgactactttgggtgtccgtgtttccttttattccttattggctgcttatggtgacaattgaaaagttgttaccatatagctattggattggccatccggtaaccaacagagctattgtttacctgtttattggatacgtccctctcaatctcaaggccattcaaactcttgattacatattacttctcaactgtaagaa

SEQ ID NO: 18285 - DNA, 744 bp, synthetic construct
  source 1..744: mol_type = other DNA
ttaaaacagcctgtgggttgcacccacccacagggcctactgggcgctagcactctggcactaaggtacctttgtgcgcctgtttttattcccctcccccaaagtaccttagaagttgtgcaccagcgatcaatagcaggtatgacacaccagtcgtatcttgatcaagcacttctgtttccccggaccgagtatcaataggctgctcgcgcggctgaaggagaaaacgttcgttacccgaccaactacttcgagaagcttagtaccaccatgaacgaggcagagtgtttcgttcagcacaaccccagtgtagatcaggctgatgagtcactgcaatccccatgggcgaccatggcagtggctgcgttggcggcctgcccatggagaaatccatgggacgctctaattctgacatggtgtgaagagcctattgagctagctggtagtcctccggcccctgaatgcggctaatcctaactgcggagcacatgctcacaaaccagtgggtggtgtgtcgtaatgggcaactctgcagcggaaccgactactttgggtgtccgtgtttccttttatccttatgttggctgcttatggtgacaatcaaagaattgttaccatatagctattggattggccatccagtgtgcaacagagcaattgtttacctatttgttggtttcgtactgctatcactaaagtctgtgaccactcttaaatttatcttgaccctcaactcaaccaaac

SEQ ID NO: 18286 - DNA, 745 bp, synthetic construct
  source 1..745: mol_type = other DNA
ttgaaacagcctgtgggttgtccccacccacagggcccactgggcgctagcacactggttctgcgggacctttgtgcgcctgttttataacccttcccctaagcagtaacttagaagctttgtacaatcatggccaatagtgggcgtggcgcgccagtcacgtcttggtcaagcacttctgtatccccggactgagtatcaatagactgctcacgcggttgaaggagaaaacgttcgttacccggctaactacttcgagaaacctagtagcaccatgaaagttgcggagtgtttcgctcagcacttcccccgtgtagatcaggtcgatgagtcactgtaaaccccacgggcgaccgtgacagtggctgcgttggcggcctgcccatggggtaacccatgggacgctctaatacagacatggtgcgaagagtctattgagctagttagcagtcctccggcccctgaatgcggctaatcctaactgcggagcgcgcaccctcaacccagggggcggcgtgtcgtaatgggtaactctgcagcggaaccgactactttgggtgtccgggtttccttttattctttattggctgcttatggtgacaattgaaaagttgttaccatatagctattggattggccatccggtgtctaacagagccattgtttacctattcattggattcgtccctcttaatctcaaggccattcaaactcttgattacatattgctccttaactgtaagaa

SEQ ID NO: 18287 - DNA, 740 bp, synthetic construct
  source 1..740: mol_type = other DNA
acagcctgtgggttgttcccacccacagggcccactgggcgccagcactctgattccacggaacctttgtgcgcctgttttataaccctttcccaatttgtaacgtagaagtaatacacactactgatcaatagcaggcatggcgcgccagtcatgtcttgatcaagcacttctgtttccccggactgagtatcaatagactgctcacgcggttgaaggagaaaatgttcgttacccggctaactacttcgagaaacctagtagcaccatagaaactgcagagtgtttcgctcagcacttcccccgtgtagatcaggctgatgagtcactgcaatccccacgggcgaccgtggcagtggctgcgctggcggcctgcctatggggcaacccataggacgctctaatgtggacatggtgcgaagagtctattgagctagttagtagtcctccggcccctgaatgcggctaatcctaactgcggagcacatgccttcaacccaggaggtggtgtgtcgtaacgggcaactctgcagcggaaccgactactttgggtgtccgtgtttctctttattcctatattggctgcttatggtgacaattacggaattgttgccatatagctattggattggccatccggtgtctaatagagctattgtgtacttatttgttggattcaccccactatcatataaatctttgaacactttgtgctttatattgaacttaaacacacgaaa

SEQ ID NO: 18288 - DNA, 744 bp, synthetic construct
  source 1..744: mol_type = other DNA
ttgaaacagcctgtgggttgcacccaccctcagggcccactgggcgccagcactctggtactgaggtacctttgtgcgcctgttttatttcccttcccctaaagtaacttagaagctttgaaccaatgatcagcagtaggtgtgacataccagtcacatctcgatcaagcacttctgtttccccggactgagtatcaataggctgcttacgcggctgaaggagaaaacgttcgttacccggccaactacttcgaaaagcctagtaccaccatgaacgaggcagagcgtttcgctcggcactaccccagtgtagatcaggctgatgagtcactgcaatccccatgggcgaccatggcagtggctgcgctggcggcctgcccatggagaaatccatgggacgctctaattttgacatggtgcgaagagcctattgagctagttggtaatcctccggcccctgaatgcggctaatcctaactgcggagcgcacacccacaaaccagtgggcagtgcgtcgtaacgggcaactctgcagcggaaccgactactttgggtgtccgtgtttccttttatttctatgttggctgcttatggtgacaaacgaagagttgttaccatatagctattggattggccatccggtgtgcaacagagcaattgtctatcagtttgttggttttgtaccactgacattaaagtctgtgatcactcttgaatttgtcttgaccctcaacacagtcaagc

SEQ ID NO: 18289 - DNA, 743 bp, synthetic construct
  source 1..743: mol_type = other DNA
ttaaaacagcctgtgggttgcacccactcacagggcccactgggcgctagtacactggtatctcggtacctttgtacgcctgttttataccccctccctgatttgcaacttagaagcaacgcaaaccagatcaatagtaggtgtgacataccagtcgcatcttgatcaagcacttctgtatccccggaccgagtatcaatagactgtgcacacggttgaaggagaaaacgtccgttacccggctaactacttcgagaaacctagtaacgccattgaagttgcagagtgtttcgctcagcactccccccgtgtagatcaggtcgatgagtcaccgcattccccacgggcgaccgtggcggtggctgcgttggcggcctgcctatggggtaacccataggacgctctaatacggacatggcgtgaagagtctattgagctagttagtagtcctccggcccctgaatgcggttaatcctaactgcggagcacatacccttaatccaaagggcagtgtgtcgtaacgggcaactctgcagcggaaccgactactttgggtgtccgtgtttctttttattcttgtattggctgcttatggtgacaattaaagaattgttaccatatagctattggattggccatccagtgtcaaacagagctattgtatatctctttgttggatttacacctctcactcttgaaacgttacacaccctcaattacattatactgctgaacacgaagcg

SEQ ID NO: 18290 - DNA, 743 bp, synthetic construct
  source 1..743: mol_type = other DNA
ttaaaacagcctgtgggttgcacccactcacagggcccactgggcgctagtacactggtatctcggtacctttgtacgcctgttttataccccctccctgatttgcaacttagaagcaacgcaaaccagatcaatagtaggtgtgacataccagtcgcatcttgatcaagcacttctgtatccccggaccgagtatcaatagactgtgcacacggttgaaggagaaaacgtccgttacccggctaactacttcgagaaacctagtaacgccattgaagttgcagagtgtttcgctcagcactccccccgtgtagatcaggtcgatgagtcaccgcattccccacgggcgaccgtggcggtggctgcgttggcggcctgcctatggggtaacccataggacgctctaatacggacatggcgtgaagagtctattgagctagttagtagtcctccggcccctgaatgcggttaatcctaactgcggagcacacacccttaatccaaagggcagtgtgtcgtaacgggcaactctgcagcggaaccgactactttgggtgtccgtgtttctttttattcttgtattggctgcttatggtgacaattaaagaattgttaccatatagctattggattggccatccagtgtcaaacagagctattgtatatctctttgttggattcacacctctcactcttgaaacgttacacaccctcaattacattatactgctgaacacgaagcg

SEQ ID NO: 18291 - DNA, 743 bp, synthetic construct
  source 1..743: mol_type = other DNA
ttaaaacagcctgtgggttgtacccacccacagggcccactgggcgtcagcactctggtactgaggtacctttgtgcgcctgttttacttcccttccccaaagtaacttagaagctttgaaccaacgatcaacagtgggtgtgacataccagtcacatctcgatcaagcacttctgtttccccggactgagtatcaataggctgcttacgcggctgaaagagaaaacgttcgttacccggccaactacttcgagaagcttagtaccaccatgaacgaggcagagcgtttcgctcggcactaccccagtgtagatcaggctgatgagtcactgcaatccccatgggcgaccatggcagtggctgcgctggcggcctgcccatggagagatccatgggacgctctaattttgacatggtgtgaagagcctattgagctagttggtagtcctccggcccctgaatgcggctaatcctaactgcggagcgcacacccacataccagtgggcagtgtgtcgtaacgggtaactctgcagcggaaccgactactttgggtgtccgtgtttccttttatttttatgttggctgcttatggtgacaatcgaagagttgttaccatatagctattggattggccatccggtgtgcaacagagcaattgtctaccagtttattggttttgtaccactgacattaaagtctataattacccttaattttatcttgacccttaatacagtcaagc

SEQ ID NO: 18292 - DNA, 743 bp, synthetic construct
  source 1..743: mol_type = other DNA
taaaacagccgggggtttttacccacccacagggcccactgggcgctagcactctggcactgaggtacctttgtgcgcctgtttttacttcccttccccgaagtaacttagaagctgtaaatcaacgatcaatagtaggtgtgacacaccagtcgtaccttgatcaagcacttctgtttccccggactgagtatcaataggctgctcgcgcggctgaaggagaaaacgttcgttacccgaccaactacttcgagaagcttagtaccaccatgaatgaggcagagtgtttcgttcagcacaaccccagtgtagatcaggctgatgagtcactgcaacccccatgggcgaccatggcagtggctgcgttggcggcctgcccatggagaaatccatgggacgctctaattctgacatggtgtgaagagcctattgagctagctggtagtcctccggcccctgaatgcggctaatcctaactgcggagcacatgctcacaaaccagtgggtggtgtgtcgtaatgggcaactctgcagcggaaccgactactttgggtgtccgtgtttccttttattcttatattggctgcttatggtgacaatcaaagaattggtaccatatagctattggattggccatccggtgtgcaacagagcaattgtttacctatttattggttttgtaccattatcactgaaggctgtgatcactctcaaattcattttgattctcaacacaatcaagc

SEQ ID NO: 18293 - DNA, 743 bp, synthetic construct
  source 1..743: mol_type = other DNA
taaaacagctgggggtttgtacccacccacagggcccactgggcgctagcactctggcactgaggtacctttgtgcgcctgtttttacttcccttccccgaagtaacttagaagctgtaaatcaacgatcaatagtaggtgtgacacaccagtcataccttgatcaagcacttctgtttccccggactgagtatcaataggctgctcgcgcggctgaaggagaaaacgttcgttacccgaccaactacttcgagaagcttagtaccactatgaatgaggcagagtgtttcgttcagcacaaccccagtgtagatcaggctgatgagtcactgcaacccccatgggcgaccatggcagtggctgcgttggcggcctgcccatggagaaatccatgggacgctctaattctgacatggtgtgaagagcctattgagctagctggtagtcctccggcccctgaatgcggctaatcctaactgcggagcacatgctcacaaaccagtgggtggtgtgtcgtaatgggcaactctgcagcggaaccgactactttgggtgtccgtgtttccttttattcttatattggctgcttatggtgacaatcaaagaattggtaccatatagctattggattggccatccggtgtgcaacagagcaattgtttacctatttattggttttgtaccattatcactgaaggctgtgatcactctcaaattcattttgattctcaacacaatcaagc

SEQ ID NO: 18294 - DNA, 743 bp, synthetic construct
  source 1..743: mol_type = other DNA
ttaaaacagcctgtgggttgcacccactcacagggcccactgggcgctagtacactggtatctcggtacctttgtacgcctgttttataccccctccctgatttgcaacttagaagcaacgcaaaccagatcaatagtaggtgtgacataccagtcgcatcttgatcaagcacttctgtatccccggaccgagtatcaatagactgtgcacacggttgaaggagaaaacgtccgttacccggctaactacttcgagaaacctagtaacgccattgaagttgcagagtgtttcgctcagcactccccccgtgtagatcaggtcgatgagtcaccgcattccccacgggcgaccgtggcggtggctgcgttggcggcctgcctatggggtaacccataggacgctctaatacggacatggcgtgaagagtctattgagctagttagtagtcctccggcccctgaatgcggctaatcctaactgcggagcacatacccttaatcctaagggcagtgtgtcgtaacgggcaactctgcagcggaaccgactactttgggtgtccgtgtttctttttattcttgtattggctgcttatggtgacaattaaagaattgttaccatatagctattggattggccatccagtgtcaaacagagctattgtatatctctttgttggattcacacctctcactcttgaaacgttacacaccctcaattacattatactgctgaacacgaagcg

SEQ ID NO: 18295 - DNA, 743 bp, synthetic construct
  source 1..743: mol_type = other DNA
ttaaaacagcctgtgggttgcacccactcacagggcccactgggcgctagtacactggtatctcggtacccttgtacgcctgttttataccccctccctgatttgcaacttagaagcaacgcaaaccagatcaatagtaggtgtgacataccagtcgcatcttgatcaagcacttctgtatccccggaccgagtatcaatagactgtgcacacggttgaaggagaaaacgtccgttacccggctaactacttcgagaaacctagcaacgccattgaagttgcagagtgtttcgctcagcactccccccgtgtagatcaggtcgatgagtcaccgcattccccacgggcgaccgtggcggtggctgcgttggcggcctgcctatggggtaacccataggacgctctaatacggacatggcgtgaagagtctattgagctagttagtagtcctccggcccctgaatgcggctaatcctaactgcggagcacatacccttaatccaaagggcagtgtgtcgtaacgggcaactctgcagcggaaccgactactttgggtgtccgtgtttctttttattcttgtattggctgcttatggtgacaattaaagaattgttaccatatagctattggattggccatccagtgtcaaacagagctatcgtatatctctttgttggattcacacctctcactcttgaaacgttacacaccctcaattacattatactgctgaacacgaagcg

SEQ ID NO: 18296 - DNA, 744 bp, synthetic construct
  source 1..744: mol_type = other DNA
ttaaaacagcctgtgggttgttcccacccacagggcccactgggcgctagcacactgattccgcggaatctttgtgcgcctgttttataaccctcccccaagcagaaacttagaagttccacactatcacgaccaatagcaggcgtggcgcaccagtcacgtcttggtcaagcacttctgtttccccggactgagtatcaatagactgctcacgcggttgaaggagaaaacgttcgttatccggctaactacttcgagaaacctagtagcaccgtgaaagttgcggagtgtttcgctcagcacttcccccgtgtagatcaggtcgatgagtcactgtgaaccccacgggtgaccgtgacagtggctgcgttggcggcctgcccatggggcaacccatgggacgctctaatacagacacggtgtgaagagtctattgagctagttagtagtcctccggcccctgaatgcggctaatcctaactgtggagcgcgtaccctcaatccagagggcagcgcgtcgtaacgggtaactctgcagcggaaccgactactttgggtgtccgtgtttccttttattctttattggctgcttatggtgacaattaaagagttgttaccatatagctattggattggccatccggtaaccaacagagctattgtttacttgtttgttggatacgtccctctcaatctcaagaccattcaaactcttgattatatactacttctcaattgtaagaa

SEQ ID NO: 18297 - DNA, 745 bp, synthetic construct
  source 1..745: mol_type = other DNA
ttaaaacagcctgtgggttgttcccacccacagggcccactgggcgccagcacactgattctgcgggatctttgtgcgcctgttttataacccctcccttaagcagtaacttagaagcttcgcactatcacgaccagtagtaggcgtggcgtaccagtcacgtcttggtcaagcacttctgtttccccggactgagtatcaatagactgctcacgcggttgaaggagaaaacgttcgttatccggctaactacttcgagaaacctagtagcaccgtgaaagttgcggagtgtttcgctcagcacttcccccgtgtagatcaggtcgatgagtcactgtgaaccccacgggcgaccgtgacagtggctgcgttggcggcctgcccatggggtaacccatgggacgctctaatacagacgcggtgtgaagagtctattgagctggttagtagtcctccggcccctgaatgcggctaatcctaactgcggagcgcgcactctcaatccagggggcagcgcgtcgtaatgggtaactctgcagcggaaccgactactttgggtgtccgtgtttccttttattccttattggctgcttatggtgacaattgaaaagttgttaccatatagctattggattggccatccggtaaccaacagagctattgtttacctgtttattggatacgtccctctcaatctcaaggccattcaaactcttaattatatactacttctcaactgtaagaa

SEQ ID NO: 18298 - DNA, 745 bp, synthetic construct
  source 1..745: mol_type = other DNA
ttaaaacagcctgtgggttgttcccacccacagggcccactgggcgctagcacactgattctgcgggatctttgtgcgcctgttttacaacccctcccctaagcagtaacttagaagcctcacactatcacgaccagtagtgggcgtggcacaccagtcacgtcttggtcaagcacttctgtttccccggactgagtatcaatagactgctcacgcggttgaaggagaaagcgttcgttatccggctaactacttcgagaaacttagtagcaccgtgaaagttgcggagagtttcgctcagcacttcccccgtgtagatcaggtcgatgagtcactgtaaaccccacgggcgaccgtgacagtggctgcgttggcggcctgcccatggggtaacccatgggacgctctaatacagacacggtgtgaagagtctattgagctagttagtagtcctccggcccctgaatgcggctaatcctaactgcggagcgcgcaccctcaatccagggggcggcgcgtcgtaatgggtaactctgcagcggaaccgactactttgggtgtccgtgtttccttttgttccttattggctgcttatggtgacaattgaaaagttgttaccatatagctattggattggccatccggtgaccaacagaactattgtttacctgtttattggatacgtccctcttaatctcaaggtcattcaaactcttgattatatattactccttaattgtaagaa

SEQ ID NO: 18299 - DNA, 745 bp, synthetic construct
  source 1..745: mol_type = other DNA
ttaaaacagcctgtgggttgttcccacccacagggcccactgggcgctagcacactgattctgcgggatctttgtgcgcctgttttataacccctcccccaagcagtgacttagaagcctcacactatcacgaccagtagtgggcgtggcacaccagtcacgtcttggtcaagcacttctgtttccccggactgagtatcaatagactgctcacgcggttgaaggagaaaacgttcgttatccggctaactacttcgagaaacttagtagcaccgtgaaagttgcggagagtttcgctcagcacttcccccgtgtagatcaggtcgatgagtcactgtaaaccccacgggcgaccgtgacagtggctgcgttggcggcctgcccatggggtaactcatgggacgctctaatacagacacggtgtgaagagtctattgagctagttagtagtcctccggcccctgaatgcggctaatcttaactgcggagcgcgcaccctcaatccagggggcggcgcgtcgtaatgggtaactctgcagcggaaccgactactttgggtgtccgtgtttccttttgttccttattggctgcttatggtgacaattgaaaagttgttaccatatagctattggattggccatccggtgaccaacagagctattgtttacctgtttattggatacgtccctcttaatctcaaggccattcaaactcttgattatatattactccttaattgtaagaa

SEQ ID NO: 18300 - DNA, 745 bp, synthetic construct
  source 1..745: mol_type = other DNA
ttaaaacagcctgtgggttgttcccacccacagggcccactgggcgctagcacactgattctacgggatctttgtgcgcctgttttataaccctccccctaagcagcaacttagaagctttgtacaatcatgaccagtagtgggcgtggcgcgccagccacgtcttggtcaagcacttctgtgtccccggactgagtatcaatagactgctcacgcggttgaaggagaaaacgttcgttacccggctaactacttcgagaaacctagtagcaccatgaaagttgcggagtgtttcgctcagcacttcccccgtgtagatcaggccgatgagtcactgtaaaccccacgggcgaccgtgacagtggctgcgttggcggcctgcccatggggtaacccatgggacgctctaatacagacatggtgcgaagagtctattgagctagttagtagtcctccggcccctgaatgcggctaatcctaactgcggagcgcgcaccctcaacccagggggcagcgtgtcgtaatgggcaactctgcagcggaaccgactactttgggtgtccgtgtttccttttattccttattggctgcttatggtgacaattgaaaagttgttaccatatagctattggattggccacccggtgtctaacagagctattgtttacttgtttattggatacgtccctcttaattttaaagccattcaaactcttgattatatattgctccttaactgtaagaa

SEQ ID NO: 18301 - DNA, 745 bp, synthetic construct
  source 1..745: mol_type = other DNA
ttaaaacagcctgtgggttgttcccacccacagggcccactgggcgctagcacactgattctgcgggatctttgtgcgcctgttttataacccttcccctaagcagcaacttagaagccttgtacaatcacgaccaatagtgggcgtgacgcgccagtcacgtcttggtcaagcacttctgtatccccggactgagtaccaatagactgctcacgcggttgaaggggaaaacgttcgttacccggctaactacttcgagaaacctagtagtaccatgaaagttgcggagtgtttcgctcagcacttcccccgtgtagatcaggtcgatgagtcactgtaaaccccacgggcgaccgtgacagtggctgcgttggcggcctgcccatggggtaacccatgggacgctctaatacagacatggtgcgaagagtctattgagctagttagcagtcctccggcccctgaatgcggctaatcctaactgcggagcgcgcaccctcaacccagggggcggcgtgtcgtaatgggtaactctgcagcggaaccgactactttgggtgcccgtgtttccttttattctttattggctgcttatggtgacaattgaaaagttgttaccatatagctattggattggccatccggtgtctaacagagctattgtttacctatttattggatacatccctcttaatctcaaggccattcaaactcttgattatatattgctccttaactgtaggaa

SEQ ID NO: 18302 - DNA, 745 bp, synthetic construct
  source 1..745: mol_type = other DNA
ttaaaacagcctgtgggttgttcccacccacagggcccattgggcgctagcacactgattttgcggaatctttgtgcgcctgttttataacccttcccccaagcagcaacctagaagtattgcacaatcgcggccagtagtgggcgtgacgcgccagtcacgtcttggtcaagcacttctgtatccccggactgagtatcaatagactgctcacgcggttgaaggagaaaacgttcgttatccggctaactacttcgggaaacctagtaacaccttgaaagttgcagagtgtttcgctcagcacttcccccgtgtagatcaggtcgatgagccactgtaaaccccacgggcgaccgtgacagtggctgcgctggcggcctgcccatggggaaacccatgggacgctctaatacagacatggtgtgaagagtctactgagctagttagtagtcctccggcccctgaatgcggctaatcctaactgcggagcacacaccctcaacccagggggcagtgtgtcgtaatgggtaactctgcagcggaaccgactactttgggtgaccgtgtttccttttattcctcattggctgcttatggtgacaattgaaaagttgttaccatatagctattggattggccacccggtgtctaacagagctattgtttacctatttattggatacgtccctcttaatttcaaggctatccaaactcttgattatatattgctccttaattataagaa

SEQ ID NO: 18303 - DNA, 744 bp, synthetic construct
  source 1..744: mol_type = other DNA
ttaaaacagcctgtgggttgtccccacccacagggcccactgggcgctagcacactggttctgcgggacctttgtgcgcctgttttgcaacccttccctaagcagtaacttagaagctttgcacaatcatggccaatagtgggcgtggcgcgccagtcacgtcttggtcaagcacttctgtatccccggactgagtatcaatagactgctcacgcggttgaaggagaaaacgttcgttacccggctaactacttcgagaaacctagtagcaccatgaaagttgcggagtgtttcgctcagcacttcccccgtgtagatcaggtcgatgagtcactgtaaaccccacgggcgaccgtgacagtggctgcgttggcggcctgcccatggggtaacccatgggacgctctaatacagacatggtgcgaagagtctattgagctagttagcagtcctccggcccctgaatgcggctaatcctaactgcagagcgcgcaccctcaacccagggggcggcgcgtcgtaatgggcaactctgcagcggaaccgactactttgggtgtccgtgtttccttttattctttattggctgcttatggtgacaattgagaagttgttgccatatagctattggattggccatccggtgtctaacagagctattgtttacctattcattggattcgtccctctcaatctcaaggtcattcaaactctcaattgcatattgctccttaactataagaa

SEQ ID NO: 18304 - DNA, 744 bp, synthetic construct
  source 1..744: mol_type = other DNA
ttaaaacagcctgtgggttgttcccacccacagggcccactgggcgctagcacactgattctgcgggatctttgtgcgcctgttttataaccctcccctaagcagtaacttagaagcttcacactaccacgaccaatagtaggcgtggtgcaccaaccgcgtcttggtcaagcacttctgtttccccggactgagtatcaatagactgctcacgcggttgaaggagaaaacgttcgttatccggctaactacttcgagaaacctagtagcaccgtgaaagttgcagatcgtttcgctcagcacttcccccgtgtagatcaggccgatgagtcactgtgaaccccacgggcgaccgtgacagtggctgcgttggcggcctgcccatggggtaacccatgggacgctctaatacagacacggtgtgaagagtctattgagctagttagtagtcctccggcccctgaatgcggctaatcctaactgcggagcgcgtgccctcaatccagggggtagcgcgtcgtaatgggtaactctgcagcggaaccgactactttgggtgtccgtgtttccttttatcctttattggctgcttatggtgacaattgaaaagttgttaccatatagctattggattggccatccggtaaccaacagagctattgtttacctgtttattggatacgtccctctcaatctcaaggctattcaaacccttgattacatactacttctcaactgtaagaa

SEQ ID NO: 18305 - DNA, 746 bp, synthetic construct
  source 1..746: mol_type = other DNA
tttaaaacagcctgtgggttgtacccactcacagggcccactgggcgccagcactttgattccgcggaatctttgtgtgcctgttttatcacccttcccccaaacttgcaacttagaagcagcactccaccgaccaatagcgggcgtggcgcaccagccatgtctaggtcaagcacttctgtttccccggactgagtatcaataggctgctcacgcggctgaaggagaaaacgttcgtcatccggctaactacttcgagaaacctagtagcaccggtgaagctgcagagtgtttcgctcagcacttcccccgtgtagatcaggtcgatgagtcactgcactccccacgggcgaccgtggcagtggctgcgctggcggcctgcctatgggtcaacccataggacgctctaatgtggacacggtgcgaagagtctattgagctagttagtagtcctccggcccctgaatgcggctaatcccaactgcggagcacatgccctcgaaccagggggtggtgtgtcgtaacgggtaactctgcagcggaaccgactactttgggtgaccgtgtttccttttattcttattatggctgcttatggtgacaattgaagaattgttaccatatagctattggattggccatccggtgtctaacagagctatcatatacctatttgttggattcgttccattgtcatacacatcactcaatacattacattttattgtgagattaaatacaagaaa

SEQ ID NO: 18306 - DNA, 743 bp, synthetic construct
  source 1..743: mol_type = other DNA
ttaaaacagcctgtgggttgcacccacccacagggcctactgggcgctagcactctggtactaaggtacctttgtgcgcctgttttattccccttccctaaagtaacttagaagttgtgtaccaacgatcaatagtaggtatgacacgccagtcatatcttgatcaagcacttctgtttccccggactgagtatcaataggctgctcgcgtggctgaaggagaaaacgttcgttacccggccaactacttcgagaagcttagtaccaccatgaacgatgcagagtgtttcgttcagcacaaccccagtgtagatcaggctgatgagtcactgcaacccccatgggcgaccatggcagtggctgcgttggcggcctgcccatggagaaatccatgggacgctctaattctaacatggtgtgaagagcctattgagctagctggtagtcctccggcccctgaatgcggctaatcctaactgcggagcacatgctcacaaaccagtgggtggtgtgtcgtaatgggcaactctgcagcggaaccgactactttgggtgtccgtgtttccttttattcttatgttggctgcttatggtgacaattatagaattgttaccatatagctattggattggccatccggtgtgcaacagagcaattgtttacctatttgttggtttcgtaccactatcactgaagtctgtgaccactctcaaattcattttgacccttaactcaatcaaac

SEQ ID NO: 18307 - DNA, 743 bp, synthetic construct
  source 1..743: mol_type = other DNA
ttaaaacaggtacgtgcttgcacccacccacagggcctactgggcgctagcactctggtactaaggtacctttgtgcgcctgttttattccccttccccaaagtaacttagaagttgtgtaccaacgatcaatagtaggtatgacacgccagtcatatcttgatcaagcacttctgtttccccggactgagtatcaataggctgctcgcgcggctgaaggagaaaacgttcgttacccggccaactacttcgagaagcttagtaccaccatgaacgatgcagagtgtttcgttcagcacaaccccagtgtagatcaggctgatgagtcactgcaacccccatgggcgaccatggcagtggctgcgttggcggcctgcccatggagaaatccatgggacgctctaattctgacatggtgtgaagagcctattgagctagctggtagtcctccggcccctgaatgcggctaatcctaactgcggagcacatgctcacaaaccagtgggtggtgtgtcgtaatgggcaactctgcagcggaaccgactactttgggtgtccgtgtttccttttattcttatgttggctgcttatggtgacaattaaagaattgttaccatatagttattggattggccatccggtgtgcaacagagcaattgtttacctatttgttggtttcgtaccactatcactgaagtctgtgaccactctcaaattcattttgaccctcaactcaatcaaac

SEQ ID NO: 18308 - DNA, 750 bp, synthetic construct; identical to SEQ ID NO: 1203
  source 1..750: mol_type = other DNA

SEQ ID NO: 18309 - DNA, 745 bp, synthetic construct
  source 1..745: mol_type = other DNA
ttaaaacagcctgtgggttgtacccacccacagggcccaccgggcgctagcactctgattccacggaatctttgtgcgcctgttttataacccccccccacctcgcaacttagaagcaacgcgcatcactgatcaacagcaggcatggcgcgccagccatgtcttgatcaagcacttctgtttccccggactgagtatcaatagactgcctacgcggttgaaggagaaaacgttcgttacccggctaactacttcgagaaacttagtaacaccatcgaagctgcagggtgtttcgctcagcacttcccccgtgtagatcaggccgatgagtcaccgcaatccccacgggcgaccgtggcggtggctgcgttggcggcctgcctatggggcaacccataggacgccctaaagtggacatggtgcgaagagtctattgagctagttagtaatcctccggcccctgaatgcggctaatcctaactgcggagcacataccctcaagccagagggtggtgtgtcgtaacgggtaactctgcagcggaaccgactactttgggtgtccgtgtttccttttattcttactgtggctgcttatggtgacaattcaagagttgttaccatatagctattggattggccatccggtgtctaacagagctattgtgtacttatttgttgggtacgttccattatcttacacatcccttgacacgttacattttattgtgaagctaaatacaagaag

SEQ ID NO: 18310 - DNA, 745 bp, synthetic construct
  source 1..745: mol_type = other DNA
ttaaaacagcctgtgggttgtacccacccacagggcccaccgggcgctagcactctgattccacggaatctttgtgcgcctgttttataacccccccccacctcgcaacttagaagcaacgcgcatcactgatcaacagcaggcatggcgcgccagccatgtcttgatcaagcacttctgtttccccggactgagtatcaatagactgcttacgcggttgaaggagaaaacgttcgttacccggctaactacttcgagaaacttagtaacaccatcgaagctgcagggtgtttcgctcagcacttcccccgtgtagatcaggccgatgagtcaccgcaatccccacgggcgaccgtggcggtggctgcgttggcggcctgcctatggggcaacccataggacgccctaaagtggacatggtgcgaagagtctattgagctagttagtaatcctccggcccctgaatgcggctaatcctaactgcggagcacataccctcaagccagagggtggtgtgtcgtaacgggtaactctgcagcggaaccgactactttgggtgtccgtgtttccttttattcttactgtggctgcttatggtgacaattcaagagttgttaccatatagctattggattggccatccggtgtctaacagagctattgtgtacttatttgttgggtacgttccattatcttacacatcccttgacacattacattttattgtgaagctaaatacaagaag

SEQ ID NO: 18311 - DNA, 744 bp, synthetic construct
  source 1..744: mol_type = other DNA
tttaaaacagcctgtgggttgcacccactcacagggcctactgggcgcaagcactctggtacctcggtacctttgtgcgcctgttttacaccccctcccccagtgaaacttagaagcaacaaaccacgatcaatagcaggcataacgctccagttatgtcttgatcaagcacttctgtttccccggaccgagtatcaatagactgctcacgcggttgaaggagaaaacgttcgttatccggctagctacttcgggaaacctagtaacaccatgaaagttgcggagagcttcgttcagcactcccccagtgtagatcaggtcgatgagtcaccgcattccccacgggcgaccgtggcggtggctgcgttggcggcctgcccatggggtaacccatggggcgctctaatacggacatggtgtgaagagtctactgagctagttagtagtcctccggcccctgaatgcggctaatcccaactgcggagcacacgcccacaagccagcgggtagtgtgtcgtaacgggtaactctgcagcggaaccgactactttgggtgtccgtgtttccttttatctttatattggctgcttatggtgacaattaaagaattgttaccatatagctattggattggccatctggtgtgcaacagagcaattgtttacctatttattggtttcgtaccgttaaccttgaaatctgtgaccacccttaattatatcttgacccttaacgcagctaaac

SEQ ID NO: 18312 - DNA, 742 bp, synthetic construct
  source 1..742: mol_type = other DNA
aaacagcctgtgggttgttcccacccacagggcccactgggcgctagcacactgattctgcgggatctttgtgcgcctgttttataaccccttccctaagcagcaacttagaagcttcacactatcacgaccagtagtgggcgtggcgcaccagtcacgtcttggtcaagcacttctgtttccccggactgagtatcaatagactgctcacgcggttaaaggagaaaacgttcgttatccggctaactacttcgagaaacctagtagcaccgtgaaagttgcggagcgtttcgctcagcacttcccccgtgtagatcaggtcgatgagtcactgtaaaccccacgggcgaccgtgacagtggctgcgttggcggcctgcccatggggcaacccatgggacgctctaatacagacacggtgtgaagagtctattgagctagttagtagtcctccggcccctgaatgcggctaatcctaactgcggagcgcgcaccctcaacccagggggcggcgcgtcgtaatgggtaactctgcagcggaaccgactactttgggtgtccgtgtttccttttattccttattggctgcttatggtgacaattgaaaagttgttaccatatagctattggattggccatccggtgaccaacagagctattgtctacctgtttattggatacgtccctcttaatctcaaggtcattcaaactcttgattatatattactccttaactgtgagaa

SEQ ID NO: 18313 - DNA, 748 bp, synthetic construct
  source 1..748: mol_type = other DNA
ttaaaacagcctgtgggttgtacccacccacagggcccactgggcgctagcacactgatttcacggaatccttgtgcgcctgttttacaccccctccccccaactcagtaacttagaagttgtaaacacacgtggccaacagcgggcgtagcgcaccagctatgtcttggtcaagcacttctgtttccccggacagagtatcaataagctgcttgcgcggctgaaggagaaaatgttcgttacccggtcaactacttcgagaaacctagtagcatcatgaatgttgcgaggcgtttcgctcagcacttcccccgtgtagatcaggtcgatgagtcactgcactccccacgggcgaccgtggcagtggctgcgttggcggcctgcccatggggtgacccatgggacgcttcaatacggacatggtgtgaagagtctattgagctagttgataatcctccggcccctgaatgcggctaatcctaactgcggagcacataccctcaacccagggggcggtgtgtcgtaacgggcaactctgcagcggaaccgactactttgggtgtccgtgtttccttttatacttatactggctgcttatggtgacaattgaagaattgttaccatatagctattggattggccatccggtgactaacagagctattatatatttatttgttggatttgttccattaacatacacatctttcagcactttacacctcattttacaatacaatacaagaaa

SEQ ID NO: 18314 - DNA, 744 bp, synthetic construct
  source 1..744: mol_type = other DNA
ttaaaacagcctgtgggttgttcccacccacagggcctactgggcgctagcacactgatcctgcgggatctttgtgcgcctgttttataacccctccctaagtagcaacttagaagcttcacactatcacgaccgatagtgggcgtggcacaccagtcacgtcttggtcaagcactcctgtttccccggactgagtatcaatagactgctcacgcggttgaaggagaaaacgttcgttatccggctaactacttcgagaaacctagtagcaccgtgaaagttgcggagtgtttcgctcagcacttcccccgtgtagatcaggtcgatgagtcactgtaaaccccacgggcgaccgtgacagtggctgcgctggcggcctgcccatggggtaacccatgggacgctctaatacagacacggtgtgaagagtctattgagctagttagtagtcctccggcccctgaatgcggctaatcctaactgcggagcgcgtaccctcaacccagggggtagcgcgtcgtaatgggtaactctgcagcggaaccgactactttgggtgtccgtgtttccttttattccttactggctgcttatggtgacaattgaaaagttgttaccatatagctattggattggccatccggtgaccaacagagctatcatttacctgtttgttggatacgttcctcttgacctcaaggttattcaaactcttgattatatattactccttaactataagaa

SEQ ID NO: 18315 - DNA, 743 bp, synthetic construct
  source 1..743: mol_type = other DNA
ttaaaacagcctgtgggttgtacccacccacggggcccacagggcgctagcactctggtaccacggtacctttgtgcgcctgttttaccaccccacccctacctgaaacgtagaagcaataaccagccgaccaatagtgggtgtggcacaccagccacatcttggtcaagcacttctgtttccccgggttgagtatcaatatgctgttcacacggctgaaggagaaaacgcccgttacccggccaactacttcgagaagcctagtaccgccatgaacattgcaaggcgtttcgctcagcacttcccccgtgtagatcaggccgatgagtcaccgcattccccacgggcgaccgtggcggcggctgcgttgtcggcctgcctgtgggttgacccacaggacgccttaatatagacatggtgcgaagagcctattgagctggttggtattcctccggcccctgaatgcggctaatcctaactgcggagcacatactcacaagccagtgggtggtgtgtcgtaatgggcaactctgcagcggaaccgactactttgggtgtccgtgtttccttttatccttatactggctgcttatggtgacaatcagagaattgttaccatatagctattggattggccatccggtgtgcaacagagctattgtgtatttatttgttggatttgtcccactatcgtatacatccctcaacactttgtattttattctgaaattaaacgcaagaaa

SEQ ID NO: 18316 - DNA, 736 bp, synthetic construct
  source 1..736: mol_type = other DNA
cctgtgggttgcacccacccacagggcccactgggcgctagcactctggcactaaggtacctttgtgcgcctgttttttacttcccttccccaaagtaacttagaagttatgtaccaatgatcaacagcaggtgtgacacaccagtcatatcttgatcaagcacttctgtttccccggactgagtatcaataggctgctcgcgcggctgaaggagaaaatgttcgttacccgaccaactacttcgagaagcttagtaccaccatgaacgaggcagagtgtttcgctcagcacaaccccagtgtagatcaggctgatgagtcactgcaacccccatgggcgaccatggcagtggctgcgttggcggcctgcccatggagaagtccatgggacgctctaattctgacatggtgtgaagagcctattgagctagctggtagtcctccggcccctgaatgcggctaatcctaactgcggagcacatgcccacaaaccagtgggtggtgtgtcgtaacgggcaactctgcagcggaaccgactactttgggtgtccgtgtttccttttatacttatgttggctgcttatggtgacaatcagagaattgttaccatatagctattggattggccatccggtgtgtaacagagcaattgtttacctattcattggttttgtaccactatcattgaaatctgtgaccactctcgaattcatcttgatcctcaactcaatcaaac

SEQ ID NO: 18317 - DNA, 742 bp, synthetic construct
  source 1..742: mol_type = other DNA
ttaaaacagcctgtgggttgcacccactcacagggcctactgggcgcaagcactctggtaccttggtacctttgtgcgcctgtttttacacccccccccagtgaaacttagaagcagcaaaccacgatcaatagcaggcataacactccagttatgtcttgatcaagcacttctgtttccccggactgagtatcaatagactgctcgcgcggttgaaggagaaaacgttcgttatccggctagctacttcggaaaacctagtaacaccatgaaagttgcggagagcttcgctcagcactcccccagtgtagatcaggtcgatgagtcaccgcattccccacgggcgaccgtggcggtggctgcgttggcggcctgcccatggggtaacccatggggcgctctaatacggacatggtgtgaagagtctactgagctagttagtagtcctccggcccctgaatgcggctaatcccaactgcggagcacacgcccacaagccagcgggtagtgtgtcgtaacgggtaactctgcagcggaaccgactactttgggtgtccgtgtttccttttatctttatattggctgcttatggtgacaattaaagaattgttaccatatagctattggattggccatccggtgtgcaacagagcaattgtttacctatttattggttttgtaccattaaccttgaattctgtgaccacccttaactatatcttgacccttaacgcagctaaac

SEQ ID NO: 18318 - DNA, 743 bp, synthetic construct
  source 1..743: mol_type = other DNA
ttaaaacagcctgtgggttgcacccactcacagggcctactgggcgcaagcactctggtacctcggtacctttgtgcgcctgttttacaccccctcccccagtgaaacttagaagcaacaaaccacgatcaatagcaggcataacgctccagttatgtcttgatcaagcacttctgtttccccggaccgagtatcaatagactgctcacgcggttgaaggagaaaacgttcgttatccggctagctacttcgggaaacctagtaacaccatgaaagttgcggagagcttcgttcagcactcccccagtgtagatcaggtcgatgagtcaccgcattccccacgggcgaccgtggcggtggctgcgttggcggcctgcccatggggtaacccatggggcgctctaatacggacatggtgtgaagagtctactgagctagttagtagtcctccggcccctgaatgcggctaatcccaactgcggagcacacgcccacaagccagcgggtagtgtgtcgtaacgggtaactctgcagcggaaccgactactttgggtgtccgtgtttccttttatctttatattggctgcttatggtgacaattaaagaattgttaccatatagctattggattggccatccggtgtgcaacagagcaattgtttacctatttattggtttcgtaccgttaaccttgaaatctgtgaccacccttaattatatcttgacccttaacacagctaaac

SEQ ID NO: 18319 - DNA, 743 bp, synthetic construct
  source 1..743: mol_type = other DNA
ttaaaacaagcctgtgggttgcacccactcacagggcccactgggcgcaagcactctggtatcttggtacctttgtgcgcctgttttataccccctccccagtgaaacttagaagcagcaaaccacgatcaatagcaggcataacgatccagttatgtcttgatcaagcacttctgtttccccggactgagtatcaatagactgctcgcgcggttgaaggagaaaacgttcgttatccggctagctacttcggaaaacctagtaacaccatgaaagttgcggagagcttcgttcagcacttccccagtgtagatcaggtcgatgagtcaccgcattccccacgggcgaccgtggcggtggctgcgttggcggcctgcccatggggtaacccatggggcgctctaatacagacatggtgtgaagagtctactgagctagttagtagtcctccggcccctgaatgcggctaatcccaactgcggagcacacgcccacaagccagcgggtagtgtgtcgtaacgggtaactctgcagcggaaccgactactttgggtgtccgtgtttccttttatctttacattggctgcttatggtgacaattaaagaattgttaccatatagctattggattggccatccggtgtgcaacagagcaattatttacttatttattggttttgtaccattgactttgaattctgtgaccacccttaattatatcttgacccttaacacagctaaac

SEQ ID NO: 18320 - DNA, 742 bp, synthetic construct
  source 1..742: mol_type = other DNA
ttaaaacagcctgtgggttgtacccactcacagggcccactgggcgcaagcactctggtacctcggtacctttgtgcgcctgttttataccccctccccagtgaaacttagaagcagtaaaccacgatcaatagcaggcataacgctccagttatgtcttgatcaagcacttctgtttccccggactgagtatcaatagactgctcacgcggttgaaggagaaaacgttcgttatccggctaactacttcggaaaacctagtaacaccatgaaagttgcggagagcttcgttcagcacttccccagtgtagatcaggtcgatgagtcaccgcgttccccacgggcgaccgtggcggtggctgcgttggcggcctgcccatggggtaacccatggggcgctctaatacggacatggtgcgaagagtctactgagctagttagtagtcctccggcccctgaatgcggctaatcccaactgcggagcacacgcccacaagccagcgggtagtgtgtcgtaacgggcaactctgcagcggaaccgactactttgggtgtccgtgtttccttttatctttatattggctgcttatggtgacaattaaagagttgttaccatatagctattggattggccatccggtgtgtaacagagcaattgtttacctatttattggttttgtaccattaaccttgaagtctgtgaccactcttaattatatcttgaccctcaacacagcaagac

SEQ ID NO: 18321 - DNA, 742 bp, synthetic construct
  source 1..742: mol_type = other DNA
ttaaaacagcctgtgggttgcacccactcacagggcctactgggcgcaagcactctggtatcttggtacctttgtgcgcctgttttatacccctcccctattgtaacttagaagcagcaaaccacgatcaatagcaggcataacgctccagttatgtctcgatcaagcacttctgtttccccggactgagtatcaatagactgctcgcgcggttgaaggagaaaacgttcgttatccggctagctacttcggaaaacctagtaacaccatgaaagttgcggagagcttcgttcagcactcccccagtgtagatcaggtcgatgagtcaccgcattccccacgggcgaccgtggcggtggctgcgttggcggcctgcccatggggtaacccatggggcgctctaatacagacatggtgtgaagagtctactgagctagttagtagtcctccggcccctgaatgcggctaatcccaactgcggagcacacgcccacaagccagcgggtagtgtgtcgtaacgggtaactctgcagcggaaccgactactttgggtgtccgtgtttccttttatctctacattggctgcttatggtgacaattaaagaattgttaccatatagctattggattggccatccggtgtgcaacagagcaatcatttacctatttattggttttgtaccattaactttgaattctgtgaccacccttaattatattttgacccttaacacagctaaac

SEQ ID NO: 18322 - DNA, 743 bp, synthetic construct
  source 1..743: mol_type = other DNA
ttaaaacagcctgtgggttgcacccactcacagggcctactgggcgcaagcactctggtacctcggtacctttgtgcgcctgttttgcaccccctcccccagtgaaacttagaagcaacaaaccacgatcaatagcaggcataacgctccagttatgtcttgatcaagcacttctgtttccccggaccgagtatcaatagactgctcacgcggttgaaggagaaaacgttcgttatccggctagctacttcgggaaacctagtaacaccatgaaagttgcggagagcttcgttcagcactcccccagtgtagatcaggtcgatgagtcaccgcattccccacgggcgaccgtggcggtggctgcgttggcggcctgcccatggggtaacccatggggcgctctaatacggacatggtgtgaagagtctactgagctagttagtagtcctccggcccctgaatgcggctaatcccaactgcggagcacacgcccacaagccagcgggtagtgtgtcgtaacgggtaactctgcagcggaaccgactactttgggtgtccgtgtttccttttatctttatattggctgcttatggtgacaattaaagaattgttaccatatagctattggattggccatccggtgtgcaacagagcaattgtttacctatttattggtttcgtaccgttaaccttgaaatctgtgaccacccttaattatatcttgacccttaacacagctaaac

SEQ ID NO: 18323 - DNA, 745 bp, synthetic construct
  source 1..745: mol_type = other DNA
ttaaaacagcctgtgggttgttcccacccacagggcccactgggcgctagcacactgattctgcgggatctttgtgcgcctgttttataacccttcccctaagcagcaacttagaagctttgtacaatcacgaccagtagtgggcgtggcgcgccagccacgtcttggtcaagcacttctgtatccccggactgagtatcaatagactgcttacgcggtcgaaggagaaaacgttcgttacccggctaactacttcgagaaacctagtagcaccatgaaagttgcggagtgtttcgctcagcacttcccccgtgtagatcaggtcgatgagccactgtaaaccccacgggtgaccgtgacagtggctgcgttggcggcctgcccatggggtaacccatgggacgctctaatacagacatggtgtgaagagtctattgagctagttagtagtcctccggcccctgaatgcggctaatcctaactgcggagcgcgcaccctcaacccagggggcggcgcgtcgtaatgggtaactctgcagcggaaccgactactttgggtgtccgtgtttccttttactcctcattggctgcttatggtgacaattgaaaagttgttaccatatagctattggattggccatccggtgtctaatagagctattgtttacctatttattggatacgtccctcttaatctcaaagccattcaagctcttgactatatactacttcttaactgtaagaa

SEQ ID NO: 18324 - DNA, 743 bp, synthetic construct
  source 1..743: mol_type = other DNA
ttaaaacagcctgtgggttgcacccactcacagggcctactgggcgcaagcactctggtatcttggtacctttgtgcgcctgttttatacccctccccctattgtaatttagaagcagcaaaccacgatcaatagcaggcataacgctccagttatgtctcgatcaagcacttctgtttccccggactgagtatcaatagactgctcgcgcggttgaaggagaaaacgttcgttatccggctagctacttcggaaaacctagtaacaccatgaaagttgcggagagcttcgttcagcactcccccagtgtagatcaggtcgatgagtcaccgcattccccacgggcgaccgtggcggtggctgcgctggcggcctgcccatggggtaacccatggggcgctctaatacagacatggtgtgaagagtctactgagctagttagtagtcctccggcccctgaatgcggctaatcccaactgcggagcacacgcccacaagccagcgggtagtgtgtcgtaacgggtaactctgcagcggaaccgactactttgggtgtccgtgtttccttttatctttatattggctgcttatggtgacaattaaagaattgttaccatatagctattggattggccatccggtgtgcaacagagcgatcatttacctatttattggttttgtaccattaactttgaattctgtgaccactcttaattacatcttgacccttaacacagctaaac

SEQ ID NO: 18325 - DNA, 742 bp, synthetic construct
  source 1..742: mol_type = other DNA
ttaaaacagcctgtgggttgcacccactcacagggcccactgggcgcaagcactctggtatcttggtacctttgtgcgcctgttttatacccctcccctattgtaatttagaagcggcaaaccacgatcaatagcaggcataacgctccagttatgtctcgatcaagcacttctgtttccccggactgagtatcaatagactgctcgcgcggttgaaggagaaaacgttcgttatccggctagctacttcggaaaacctagtaacaccatgaaagttgcggagagcttcgttcagcactcccccagtgtagatcaggtcgatgagtcaccgcattccccacgggcgaccgtggcggtggctgcgttggcggcctgcccatggggcaacccatggggcgctctaatacagacatggtgtgaagagtctactgagctagttagtagtcctccggcccctgaatgcggctaatcccaactgcggagcacacgcccacaagccagcgggtagtgtgtcgtaacgggtaactctgcagcggaaccgactactttgggtgtccgtgtttccttttatctttatattggctgcttatggtgacaattaaagaattgttaccatatagctattggattggccatccggtgtgtaacagagcaatcatttacctatttattggttttgtaccattaactttgaattctgtgaccacccttaattatatcttgactcttaacacagctaaac

SEQ ID NO: 18326 - DNA, 743 bp, synthetic construct
  source 1..743: mol_type = other DNA
ttaaaacagcctgtgggttgcacccactcacagggcccactgggcgcaagcactctggtacctcggtacctttgtgcgcctgttttataccccccctcccagtgaaacttagaagcagcaaaccacgatcaatagcaggcataacgctccagttatgtcttgatcaagcacttctgtttccccggactgagtatcaatagactgctcgcgcggttgaaggagaaaacgttcgttatccggctagctacttcggaaaacctagtaacaccatgaaagttgcggagagcttcgttcagcactcccccagtgtagatcaggtcgatgagtcaccgcattccccacgggcgaccgtggcggtggctgcgttggcggcctgcccatggggtaacccatggggcgctctaatacggacatggtgtgaagagtctactgagctagttagtagtcctccggcccctgaatgcggctaatcccaactgcggagcacacgcccacaagccagcgggtagtgtgtcgtaacgggtaactctgcagcggaaccgactactttgggtgtccgtgtttccttttatctttatattggctgcttatggtgacaattaaagaattgttaccatatagctattggattggccatccggtgtgcaacagagcaattacttacctatttattggtcttgtaccattaaccttgaattctgtgaccacccttaattatatcctgacccttaacgcaactaaac

SEQ ID NO: 18327 - DNA, 747 bp, synthetic construct
  source 1..747: mol_type = other DNA
tttaaaacagcctgtgggttgtacccacccacagggcccactgggtgctagcactctggtaccacggtacctttgtgcgcctgttttatctccccaaacccccgtaacgctacactagaagatagacaatacgaccgatagccagtggggcaacccagcctcactttggtcaagcacctctgttttcccgggcttagtaccaataggctgctcgcgcggctgaaggggaacgcgctcgttatccggctaactacttcgagaaacctagtaccaccatggaagttgcagagtgtttcgctcagcacaaccccagtgtagatcaggccgatgagtcaccgtgcaccccacgggcgaccgtgacggtggctgcgttggcggcctgcccatggtgtacaccatgggacgctctaatacagacatggtgcgaagagtctattgagctagttagtagtcctccggcccctgaatgcggctaatcctaactgcggagcacgcgctctcaacccagagagtagcgtgtcgtaacgggcaactccgcagcggaaccgactactttgggtgtccgtgtttctctttattcttacatcggctgcttatggtgacaattgagagattgttaccatatagctattggattggccatccggtgtgtaatagagctatcatatattcttttgttggtttcgtgccactagattatattgcaattattactttaaggtacatcttgcttctgaacacagcaaa

SEQ ID NO: 18328 - DNA, 747 bp, synthetic construct
  source 1..747: mol_type = other DNA
tttaaaacagcctgtgggttgtacccacccacagggcccactgggcgctagcactctggtactgcggtacctttgtgcgcctgttttatctccccagacccccgcaacgtcacattagaagatagacaatacgaccaatagtcagtggggcaacccagcctcactttggtcaagtacctctgtttccccgggcttagtaccaataggctgcttgcgcggctgaaggggaacgcgcccgttatccggctaactacttcgagaaacctagtaccaccatggaagttgccgagtgtttcgctcagcacaaccccagtgtagatcaggtcgatgagtcaccgtacaccccacgggcgaccgtgacggtggctgcgttggcggcctgcccatggtgcacaccatgggacgctctaatacagacatggtgcgaagagtctattgagctagttagtagtcctccggcccctgaatgcggctaatcctaactgtggagcatgcgctctcaacccagagagtagcgtgtcgtaacgggcaactctgcagcggaaccgactactttgggtgtccgtgtttctctttattcttacattggctgcttatggtgacaattgagagattgttaccatatagctattggattggccatccggtgtgcaacagagctatcatatattcttttgttggctttgtaccactagattatactgcaattattgctttaaggtacatcttgcttttgaacacagcaaa

SEQ ID NO: 18329 - DNA, 747 bp, synthetic construct
  source 1..747: mol_type = other DNA
tttaaaacagcctgtgggttgtacccacccacagggcccactgggcgctagcactctggcaccacggtacctttgtgcgcctgttttatctccccagacccccgcaacgttacattagaagatagacaatgcgaccaatagccagtggggcaatccagcctcactttggtcaagtacctctgtttccccgggcttagtaccaataggctgcttgcgcggctgaaggggaacgcgcccgttacccggctaactacttcgagaaacctagtaccaccatggaagttgacgagtgtttcgctcaacacaaccccagtgtagatcaggtcgatgagtcaccgtacaccccacgggcgaccgtgacggtggctgcgttggcggcctgcccatggtgcacaccatgggacgctctaatacagacatggtgcgaagagtctattgagctagttagtagtcctccggcccctgaatgcggctaatcctaactgtggagcatgcgctctcaacccagagagtagcgtgtcgtaacgggcaactctgcagcggaaccgactactttgggtgtccgtgtttccttttattcttatattggctgcttatggtgacaattgagagattgttgccatatagctattggattggccatccagtgtgtaatagagctattgtgtattcttttgttggctttgtgccattagattatactgcagttgctactttaagatacatcttgtttctgaacacagcaaa

SEQ ID NO: 18330 - DNA, 741 bp, synthetic construct
  source 1..741: mol_type = other DNA
agcctgtgggttgcacccactcacaggacccacgcggtgctagcactctggttccacgggacctttgtgcgcctgttttatgtcccctcccccaatttgtaacttagaagcaatttgcaacactgatcagtagcaggcatagcgcaccagctatgtcttgatcaagcacttctgtttccccggaccgagtatcaatagactgtttacacggttgaaggagaaagcgtccgttatccggctaactacttcgagaaacccagtagcaccattgaaactacagagtgtttcgctccacacttcccccgtgtagatcaggtcgatgagtcactgcaatccccacgggcgaccgtggcagtggctgcgctggcggcctgcctatggggcaacccataggacgctctaatgtggacatggtgtgaagagtctattgagctagttagtagtcctccggcccctgaatgcggctaatcccaactgcggagcacatgccttcaacccagagggtagtgtgtcgtaatgggcaactctgcagcggaaccgactactttgggtgtccgtgtttccttttattctcacattggctgcttatggtgacaattacagaattgttaccatatagctattggattggccatccggtgtgcaatagagctattatatacctatttgttggctttgtaccactgaccttaaaatctttaaccactcttgagtgtatattaacccttaatacaatcaaac

SEQ ID NO: 18331 - DNA, 743 bp, synthetic construct
  source 1..743: mol_type = other DNA
ttaaaacagcctgtgggttgttcccacccacagggcccactgggcgctagcacactgattctgcgggatctttgtgcgcctgttttataacccttccctaaacagcaacttagaagttttgcacactcacgaccagtagtgggcgtggcgcaccagtcacgtcttggtcaagcacttctgtatccccggactgagtatcaatagactgctcacgcggttgaaggagaaaacgttcgttatccggctaactacttcgagaaacctagtagcaccatgaaagttgcggagtgtttcgctcagcacttcccccgtgtagatcaggtcgatgagtcactgtaaaccccacgggcgaccgtgacagtggctgcgttggcggcctgcccatggggtaacccatgggacgctctaatacagacatggtgtgaagagtctattgagctagttagtagtcctccggcccctgaatgcggctaatcctaactgcggagcacgcaccctcaacccagggggcggcgtgtcgtaatgggtaactctgcagcggaaccgactactttgggtgtccgtgtttctttttattttcattggctgcttatggtgacaattgaaaagttgttaccatatagctattggattggccatccggtatctaacagagctattgtttacctattcattggatacgtccctcttaatctcaaggccattcaaactcttgattatatattgctccttaattgcaagaa

SEQ ID NO: 18332 - DNA, 743 bp, synthetic construct
  source 1..743: mol_type = other DNA
ttaaaacagcctgtgggttgttcccacccacagggcccactgggcgctagcacactgattctgcgggatctttgtgcgcctgttttataacccttccctaaacagcaacttagaagttttgcacactcacgaccagtagtgggcgtggcgcgccagtcacgtcttggtcaagcacttctgtatccccggactgagtatcaatagactgctcacgcggttgaaggagaaaacgttcgttatccggctaactacttcgagaaacctagtagcaccatgaaagttgcggagtgtttcgctcagcacttcccccgtgtagatcaggtcgatgagtcactgtaaaccccacgggcgaccgtgacagtggctgcgttggcggcctgcccatggggtaacccatgggacgctctaatacagacatggtgtgaagagtctattgagctagttagtagtcctccggcccctgaatgcggctaatcctaactgcggagcacgcaccctcaacccagggggcggcgtgtcgtaatgggtaactctgcagcggaaccgactactttgggtgtccgtgtttctttttattttcattggctgcttatggtgacaattgaaaagttgttaccatatagctattggattggccatccggtatctaacagagctattgtttacctattcattggatacgtccctcttaacctcaaggccattcaaactcttgattatatattgctccttaattgcaagaa

SEQ ID NO: 18333 - DNA, 743 bp, synthetic construct
  source 1..743: mol_type = other DNA
ttaaaacagcctgtgggttgcacccactcacagggcctactgggcgcaagcactctggtacctcggtacctttgtgcgcctgttttacaccccctcccccagtgaaacttagaagcaacaaaccacgatcgatagcaggcataacgctccagttatgtcttgatcaagcacttctgtttccccggaccgagtatcaatagactgctcacgcggttgaaggagaaaacgttcgttatccggctagctacttcgggaaacctagtaacaccatgaaagttgcggagagcttcgttcagcactcccccagtgtagatcaggtcgatgagtcaccgcattccccacgggcgaccgtggcggtggctgcgttggcggcctgcccatggggtaacccatggggcgctctaatacggacatggtgtgaagagtctactgagctagttagtagtcctccggcccctgaatgcggctaatcccaactgcggagcacacgcccacaagccagcgggtagtgtgtcgtaacgggtaactctgcagcggaaccgactactttgggtgtccgtgtttccttttatctttatattggctgcttatggtgacaattaaagaattgttaccatatagctattggattggccatccggtgtgcaacagagcaattgtttacctatttattggtttcgtaccgttaaccttgaaatctgtgaccacccttaattatatcttgacccttaacacagctaaac

SEQ ID NO: 18334 - DNA, 743 bp, synthetic construct
  source 1..743: mol_type = other DNA
ttaaaacagcccttgggttgcacccacccacagggcccactgggcgcaagcactctggtactttggtacctttgtgcgcctgttttatacccctcccccaaacgaaatttagaagcagcaaaccacgatcaatagcaggcatagcgctccagttatgtcttgatcaagcacttctgtttccccggactgagtatcaatagactgctcacgcggttgaaggagaaaacgttcgttacccggccaactacttcggaaaacctagtaacaccatgaaagttgcggagagcttcgttcagcactcccccagtgtagatcaggtcgatgagtcaccgcattccccacgggcgaccgtggcggtggctgcgttggcggcctgcccatggggtaacccatggggcgctctaatacggacatggtgtgaagagtctactgagctagttggtagtcctccggcccctgaatgcggctaatcccaactgcagagcacacgcccacaagccagcgggtagtgtgtcgtaatgggtaactctgcagcggaaccgactactttgggtgtccgtgtttccttttatttttatattggctgcttatggtgacaatcagagaattgttgccatatagctattggattggccatccggtgtgcaacagagcaattatttacctattcgttggttttgtgccattaactttgacttctgtaaccacccttaattatatcttgacccttaacacagttaaac

SEQ ID NO: 18335 - DNA, 743 bp, synthetic construct
  source 1..743: mol_type = other DNA
ttaaaacagcctgtgggttgcacccacccacagggcccactgggcgcaagcactctggtactttggtacctttgtgcgcctgttttatacccctcccccaaatgaaatttagaagcagcaaaccacgatcaatagcaggcatagcgctccagttatgtcttgatcaagcacttctgtttccccggactgagtatcaatagactgctcacgcggttgaaggagaaaacgttcgttacccggccaactacttcggaaaacctagtaacaccatgaaagttgcggagagcttcgttcagcactcccccagtgtagatcaggtcgatgagtcaccgcattccccacgggcgaccgtggcggtggctgcgttggcggcctgcccatggggtaacccatggggcgctctaatacggacatggtgtgaagagtctactgagctagttggtagtcctccggcccctgaatgcggctaatcccaactgcagagcacacgcccacaagccagcgggtagtgtgtcgtaatgggtaactctgcagcggaaccgactactttgggtgtccgtgtttccttttatttttatattggctgcttatggtgacaatcagagaattgttgccatatagctattggattggccatccggtgtgcaacagagcaattatttacctattcgttggttttgtgccattaactttgacttctgtaaccacccttaattatatcttgacccttaacacagttaaac

SEQ ID NO: 18336 - DNA, 743 bp, synthetic construct
  source 1..743: mol_type = other DNA
ttaaaacagcctgtgggttgcacccacccacagggcccactgggcgttagcactctggtaccgcggtacccttgtgcgcctgttttatcaccctaccccaacttgaaacttagaagcaatacacaatcgaccaatagcaggtgtggcgcaccagccacatctaggtcaagcacttctgtttccccgggttgagtatcaataagctgtccacacggctgaaggagaaaacgcccgttatccggccaattacttcgagaaacctagtatcactatgaacgttgcgaggcgtttcgctcagcacttcccccgtgtagatcaggtcgatgagtcaccgcattccccacgggcgaccgtggcggtggctgcgttggcggcctgcctatgggttaacccataggacgccttaatactgacatggtgtgaagagtctattgagctagttggtagtcctccggcccctgaatgcggctaatcctaactgcggagcacatgctcacaacccagtgagtggtgtgtcgtaacgggcaactctgcagcggaaccgactactttgggtgtccgtgtttccttttattcttacattggctgcttatggtgacaatcacagaattgttaccatatagctattggattggccatccgacttctaacagagctattatttacctgtttgttggattcactccgttgacatataaatccctaaacactttgtgctttattttgaacttgaacgcacgaaa

SEQ ID NO: 18337 - DNA, 731 bp, synthetic construct
  source 1..731: mol_type = other DNA
gggttgttcccacccacagggcctactgggcgccagcactctgattccacggaatctttgtgcgcctgttttacaaccctttcccaatttgtaacgtagaagtaacacacactactgatcaatagcaggcatggcgcgccagtcatgtctcgatcaagcacttctgttcccccggactgagtatcaatagactgctcacgcggttgaaggagaaaacgttcgttacccggctaactacttcgagaaacctagtagcaccatagaagctgcagagtgtttcgctcagcacttcccccgtgtagatcaggctgatgagtcactgcaatccccacgggcgaccgtggcagtggctgcgctggcggcctgcctatggggcaacccataggacgctctaatgtggacatggtgcgaagagtctattgagctagttagtagtcctccggcccctgaatgcggctaatcctaactgcggagcacatgccttcaacccaggaggtggtgtgtcgtaacgggcaactctgcagcggaaccgactactttgggtgtccgtgtttccttttattcctatattggctgcttatggtgacaatcacggaattgttgccatatagctattggattggccatccggtgtctaatagagctattgtgtacctatttgttggatttactccgctatcatataaatctctgaacactttgtgctttatattaaacttaaacacacgaaa

SEQ ID NO: 18338 - DNA, 743 bp, synthetic construct
  source 1..743: mol_type = other DNA
ttaaaacagcctgtgggttgcacccactcacagggcctactgggcgcaagcactctggtatcttggtacctttgtgcgcctgttttatacctccccccccagtgaaacttagaagcagcgaaccacgatcaatagcaggcataacgctccagttatgtcttgatcaagcacttctgtttccccggactgagtatcaatagactgctcgcgcggttgaaggagaaaacgttcgttatccggctaactacttcggaaaacctagtaacaccatgaaagttgcggagagcttcgttcagcactcccccagtgtagatcaggtcgatgagtcaccgcattccccacgggcgaccgtggcggtggctgcgttggcggcctgcccatggggtaacccatggggcgctctaatacagacatggtgtgaagagtctactgagctagttagtagtcctccggcccctgaatgcggctaatcccaactgcggagcacacgcccacaagccagcgggtagtgtgtcgtaacgggtaactctgcagcggaaccgactactttgggtgtccgtgtttccttttacctttatattggctgcttatggtgacaattaaagaattgttaccatatagctattggattggccatccggtgtgcaacagagcaattatttacctatttattggttttgtaccattaactttgaattctgtgaccacccttaactatattctgacccttaacacagctaaac

SEQ ID NO: 18339 - DNA, 747 bp, synthetic construct
  source 1..747: mol_type = other DNA
tttaaaacagcctgtgggttgtacccacccacagggcccactgggcgctagcacactggtattacggtacccttgtgcgcctgttttatcctccctggcccccgtaataatgtattagaagtcttgcaacgtgaccaatagctagtaaagcaacccagctttacttgggtcaagtacttctgttaccccggacctagtaccaataggctgctcgcgcggctgaaggggaaaacgttcgttatccggctaactacttcgggaaacccagtaccatcatgaatgttgcggagtgtttcgctcagcactaccccagtgtagatcaggccgatgagtcaccgtacaccccacgggcgaccgtgacggtggctgcgttggcggcctgcccatggcacctgccatgggacgctctaatacggacatggtgtgaagagtctactgagctagttagtagtcctccggcccctgaatgcggctaatcctaactgcggagcacgcgcccccgatccagagggtagcgtgtcgtaatgggcaactctgcagcggaaccgactactttgggtgtccgtgtttccttttattcttacactggctgcttatggtgacaattgagagattgttgccatatagctattggattggccatccggtgagcaatagagcgattatctattcttttgttggatttgtgccattagattacactgccatcatcacactgaagtacattttattgttaaacacaacaaa

SEQ ID NO: 18340 - DNA, 743 bp, synthetic construct
  source 1..743: mol_type = other DNA
tttaaaacagcctgtgggttgcacccacccacagggcccactgggcgctagcactctggtactgcggtacctttgtgcgcctgttttatcaccccaccccatctggaacgtagaagcaatgcacaactgaccaatagtgggtgtggcgcaccagccacatcttggtcaagcacttctgtttccccgggtttagtatcaataagctgctcacgcggctgaaggagaaaacacccgttatccggccgactacttcgagaaacctagtaccgctatgaacgttgcaaggcgtttcgttcagcacttcccccgtgtagatcaggccgatgagtcaccgcattcctcacgggcgaccgtggcggtggctgcgttggcggcctgcctatgggcttgcccataggacgccttaatactgacatggtgcgaagagtctattgagctagttggtagtcctccggcccctgaatgcggctaatcctaactgcggagcacatactcacaaaccagtgagcggtgtgtcgtaacgggcaactctgcagcggaaccgactactttgggtgtccgtgtttccttttattcttatactggctgcttatggtgacaattaaagaattgttaccatatagctattggattggccatccggtgtctaacagagctattatatacttgtttgttggattcatctcgttatcacacaaatcccttaacactttgtgttttatcttgaatttgaactcaaaaag

SEQ ID NO: 18341 - DNA, 742 bp, synthetic construct
  source 1..742: mol_type = other DNA
ttaaaacagcctgtgggttgcacccactcacagggcccactgggcgcaagcactctggtacttcggtacctttgtgcgcctgttttataacccccccccagtgaaacttagaagcagcaaaccacgatcaatagcaggcataacgctccagttatgtcttgatcaagcacttctgtttccccggaccgagtatcaatagactgctcgcgcggttgaaggagaaaacgttcgttatccggctaactacttcgggaaacctagtaacaccatgaaagttgcggagagcttcgctcagcacttccccagtgtagatcaggtcgatgagtcaccgcattccccacgggcgaccgtggcggtggctgcgttggcggcctgcccatggggcaacccatggggcgctctaatacggacatggtgcgaagagtctactgagctagttagtagtcctccggcccctgaatgcggctaatcccaactgcggagcacacgcccacaaaccagcgggtagtgtgtcgtaacgggcaactctgcagcggaaccgactactttgggtgtccgtgtttccttttatctttatattggctgcttatggtgacaattgaagagttgttaccatatagctattggattggccatccggtgtgcaacagagcaattgtttacttatttattggttttgtgccattaaccttgaagtctgtgattacccttaattatatcttgaccctcaacacagctaaac

SEQ ID NO: 18342 - DNA, 721 bp, synthetic construct
  source 1..721: mol_type = other DNA
cccactcacagggcctactgggcgcaagcactctggtacctcggtacctttgtgcgcctgttttacaccccctcccccagtgaaacttagaagcaccaaaccacgatcaatagcaggcataacgctccagttatgtcttgatcaagcacttctgtttccccggaccgagtatcaatagactgcttgcgcggttgaaggagaaaacgttcgtcatccggctagctacttcgggaaacctagtaacaccatgaaagttgcggagagcttcgttcagcacttccccagtgtagatcaggtcgatgagtcaccgcattccccacgggcgaccgtggcggtggctgcgttggcggcctgcccatggggtaacccatggggcgctctaatacggacatggtgtgaagagtctactgagctagttagtagtcctccggcccctgaatgcggctaatcccaactgcggagcacacgcccacaagccagcgggtagtgtgtcgtaacgggtaactctgcagcggaaccgactactttgggtgtccgcgtttccttttatctttatattggctgcttatggtgacagttaaagaattgttaccatatagctattggattggccatccggtgtgcaacagagcaattgtctacctatttattggttttgtaccattaaccttgaagtctgtgaccacccttaattatatcttgacccttaacacagctaaac

SEQ ID NO: 18343 - DNA, 742 bp, synthetic construct
  source 1..742: mol_type = other DNA
ttgaaacagcctgtgggttgcacccactcacagggcccactgggcgcaagcactctggtacctcggtacctttgtgcgcctgttttatgtcccccccccagtgcaacttagaagcagcaaaccacgatcaatagcaggcataacgctccagttatgtcttgatcaagcacttctgtttccccggaccgagtatcaatagactgctcgcgcggttgaaggagaaaacgttcgttatccggctagctacttcgggaaacctagtaacaccatgaaggttgcggagagcttcgttcagcactcccccagtgtagatcaggtcgatgagtcaccgcattccccacgggcgaccgtggcggtggctgcgttggcggcctgcccatggggtaacccatggggcgctctaatacggacatggtgcgaagagtctactgagctagttagtagtcctccggcccctgaatgcggctaatcccaactgcggagcacacgcccacaaaccagcgggtagtgtgtcgtaacgggcaactctgcagcggaaccgactactttgggtgtccgtgtttccttttatctttatattggctgcttatggtgacaatcatagaattgttaccatatagctattggattggccatccggtgtgcaacagagcaattgtttacctgtttattggttttgtaccattaaccttgaagtctgtgaccacccttgattatattttgaccctcaacacagctaaac

SEQ ID NO: 18344 - DNA, 742 bp, synthetic construct
  source 1..742: mol_type = other DNA
ttaaaacagcctgtgggttgcacccactcacagggcctactgggcgcaagcactctggtacctcggtacctttgtgcgcctgttttatacccctcccccagtgaaacttagaagcagtaaaccacgatcaatagcaggcataacgctccagttatgtcttgatcaagcacttctgtttccccggactgagtatcaatagactgctcgcgcggttgaaggagaaaacgttcgttatccggctagctacttcggaaaacctagtaacaccatgaaagttgcggagagcttcgttcagcactcccccagtgtagatcaggtcgatgagtcaccgcattccccacgggcgaccgtggcggtggctgcgttggcggcctgcccatggggtgacccatggggcgctctaatacggacatggtgtgaagagtctactgagctagttagtagtcctccggcccctgaatgcggctaatcctaactgcggagcacacgcccacaagccagcgggtagtgtgtcgtaacgggtaactctgcagcggaaccgactactttgggtgtccgtgtttccttttatctttatattggctgcttatggtgacaattaaagaattgttaccatatagctattggattggccatccggtgtgcaacagagcaattatttacctatttattggttttgtaccattaaccttgagttctgtgaccacccttaattatatcttgacccttaacacagctaaac

SEQ ID NO: 18345 - DNA, 742 bp, synthetic construct
  source 1..742: mol_type = other DNA
ttaaaacagcctgtgggttgcacccactcacagggcctactgggcgcaagcactctggtacctcggtacctttgtgcgcctgttttatacccctcccccagtgaaacttagaagcagtaaaccacgatcaatagcaggcataacgctccagttatgtcttgatcaagcacttctgtttccccggactgagtatcaatagactgctcgcgcggttgaaggagaaaacgttcgttatccggctagctacttcggaaaacctagtaacaccatgaaagttgcggagagcttcgttcagcactcccccagtgtagatcaggtcgatgagtcaccgcattccccacgggcgaccgtggcggtggctgcgttggcggcctgcccatggggtgacccatggggcgctctaatacggacatggtgtgaagagtctactgagctagttagtagtcctccggcccctgaatgcggctaatcctaactgcggagcacacgcccacaagccagcgggtagtgtgtcgtaacgggtaactctgcagcggaaccgactactttgggtgtccgtgtttccttttatctttatattggctgcttatggtgacaattaaagaattgttaccatatagctattggattggccgtccggtgtgcaacagagcaattatttacctatttattggttttataccattaaccttgagttctgtgaccacccttaattatatcttgacccttaacacagctaaac

SEQ ID NO: 18346 - DNA, 742 bp, synthetic construct
  source 1..742: mol_type = other DNA
ttaaaacagcctgtgggttgcacccactcacagggcctactgggcgcgagcactctggtacctcggtacctttgtgcgcctgttttacaccccctccccagtgaaacttagaagcaacacaccacgatcaatagcaggcataacgctccagttatgtcttgatcaagcacttctgtttccccggactgagtatcaatagactgctcgcgcggtcgaaggagaaaacgttcgttatccggctagctacttcggaaaacctagtaacaccatgaaagttgcggagagcttcgttcagcactcccccagtgtagatcaggtcgatgagtcaccgcattccccacgggcgaccgtggcggtggctgcgttggcggcctgcccatggggtaacccatggggcgctctaatacggacatggtgtgaagagtctactgagctagttagtagtcctccggcccctgaatgcggctaatcccaactgcggagcacacgcccacaagccagcgggtggtgtgtcgtaacgggtaactctgcagcggaaccgactactttgggtgtccgtgtttccttttatctttatattggctgcttatggtgacaattaaagaattgttaccatatagctattggattggccatccggtgtgcaacagagcaattatttacctatttattggttttgtaccattaaccttgaagtctgtgaccaccctcaattatatcttaacccttaacacagctaaaa

SEQ ID NO: 18347 - DNA, 742 bp, synthetic construct
  source 1..742: mol_type = other DNA
ttaaaacagcctgtgggttgcacccactcacagggcccactgggcgcaagcactctggtacttcggtacctttgtgcgcctgttttacaacccccccccagtgaaacttaaaagcagcaaactacgatcaatagcaggcataacgctccagttatgtcttgatcaagcacttctgtttccccggaccgagtatcaataaactgctcgcgcggttgaaggaaaaaacgttcgttatccggctaactacttcgggaaacctagtaacaccatgaaagttgcggaaagcttcgttcagcactcccccagtgtaaatcaggtcgatgagccaccgcattccccacgggcgaccgtggcggtggctgcgttggcggcctgcccatggggcaacccatggggcgctctaatacggacatggtgcgaaaagtctactgagctagttagtagtcctccggcccctgaatgcggctaatcctaactgcggagcacacgcccacaaaccagcgggtagtgtgtcgtaacgggcaactccgcagcggaaccgactactttgggtgtccgtgtttccttttatctttatattggctgcttatggtgacaattaaagagttgttaccatatagctattggattggccatccggtgtgcaacaaagcaattgtttacctatttattggttttgtgccattaaccttgaagtctgtgactacccttaattatatcttgaccctcaacacagctaaac

SEQ ID NO: 18348 - DNA, 742 bp, synthetic construct
  source 1..742: mol_type = other DNA
ttaaaacagcctgtgggttgcacccactcccagggcatactgggcgcaagcactctggtatctcggtaccgttgtgcgcctgttttacaccccctcaccagtgaaagttagaagcagcaaaccacgatcaatagcaggcataacgctccagttatgtcttgatcaagcacttctgtttccccggactgagtatcaatagactgctcgcgcggttgaaggagaaaacgttcgttatccgactagctacttcggaaaacctagtaacaccatgaaagttgcggagagcttcgttcagcactcccccagtgtagatcaggtcgatgagtcaccgcattccccacgggcgaccgtggcggtggctgcgttggcggcctgcccatggggtaacccatggggcgctctaatacggacatggtgtgaagagtctactgagctagttagtagtcctccggcccctgaatgcggctaatcccaactgcggagcacacgcccacaagccagcgggtagtgtgtcgtaacgggtaactctgcagcggaaccgactactttgggtgtccgtgtttccttttatctttatattggctgcttatggtgacaattaaagaattgttaccatatagctattggattggccatccggtgtgcaacagagcaattgtttacctatttattggttttgtaccattaaccttgaattctgtgaccacccttaattatatcttgacccttaacacagctaaac

SEQ ID NO: 18349 - DNA, 742 bp, synthetic construct
  source 1..742: mol_type = other DNA
ttaaaacagcctgtgggttgcacccactcacagggcccactgggcgcaagcactctggtacctcggtacctttgtgcgcctgttttataacccccccccagtgaaacttagaagcagcaaaccacgatcaatagcaggcataacgctccagttatgtcttgatcaagcacttctgtttccccggactgagtatcaatagactgctcgcgcggttgaaggagaaaacgttcgttatccggctaactacttcgggaaacctagtagcatcatgaaagttgcggagagcttcgttcagcactcccccagtgtagatcaggtcgatgagtcaccgcattccccacgggcgaccgtggcggtggctgcgttggcggcctgcctatggggtaacccatggggcgctctaatacggacatggtgcgaagagtctactgagctagttagtagtcctccggcccctgaatgcggctaatcccaactgcggagcacacgcccacaagccagcgggtagtgtgtcgtaacgggcaactctgcagcggaaccgactactttgggtgtccgtgtttccttttatctttgtattggctgcttatggtgacaattgaagagttgttaccatatagctattggattggccatccggtgtgcaacagagcaattgtttacctatttattggttttgtaccattaaccttgaagtctgtgaccacccttaattatatcttgaccctcaacacagctaaac

SEQ ID NO: 18350 - DNA, 742 bp, synthetic construct
  source 1..742: mol_type = other DNA
taaaaacagcctgtgggttgcacccactcacagggcctactgggcgcaagcactctggtacctcggtacctttgtgcgcctgttttataccccccccctagtgaaacttagaagcagcaaaccacgatcaatagcaggcataacgctccagttatgtcttgatcaagcacttctgtttccccggactgagtatcaatagactgctcgcgcggttgaaggagaaaacgttcgttatccggctaactacttcggaaaacctagtaacaccatgaaagttgcggagagcttcgttcagcactcccccagtgtagatcaggtcgatgagtcaccgcattccccacgggcgaccgtggcggtggctgcgttggcggcctgcccatggggtaacccatggggcgctctaatacggacatggtgtgaagagtctactgagctagttggtagtcctccggcccctgaatgcggctaatcccaactgcggagcacacgcccacaagccagcgggtagtgtgtcgtaacgggtaactctgcagcggaaccgactactttgggtgtccgtgtttccttttatctttatattggctgcttatggtgacaattaaagaattgttaccatatagctattggattggccatccggtgtgcaacagagcaattatttacctatttattggttttgtaccattaaccttgaattctgtgaccacccttaattatatcttgacccttaacacagctaaac

SEQ ID NO: 18351 - DNA, 742 bp, synthetic construct
  source 1..742: mol_type = other DNA
ttaaaacgcctgtgggttgcacccactcacagggcctactgggcgcaagcactctggtacctcggtacctttgtgcgcctgttttgcaccccctcccccagtgaaacttagaagcaacaaaccacgatcaatagcaggcataacgctccagttatgtcttgatcaagcacttctgtttccccggaccgagtatcaatagactgctcacgcggttgaaggagaaaacgttcgttatccggctagctacttcgggaaacctagtaacaccatgaaagttgcggagagcttcgttcagcactcccccagtgtagatcaggtcgatgagtcaccgcattccccacgggcgaccgtggcggtggctgcgttggcggcctgcccatggggtaacccatggggcgctctaatacggacatggtgtgaagagtctactgagctagttagtagtcctccggcccctgaatgcggctaatcccaactgcggagcacacgcccacaagccagcgggtagtgtgtcgtaacgggtaactctgcagcggaaccgactactttgggtgtccgtgtttccttttatctttatattggctgcttatggtgacaattaaagaattgttaccatatagctattggattggccatccggtgtgcaacagagcaattgtttacctatttattggtttcgtaccgttaaccttgaaatctgtgaccacccttaattatatcttgacccttaacacagctaaac

SEQ ID NO: 18352 - DNA, 742 bp, synthetic construct
  source 1..742: mol_type = other DNA
ttaaaacagcctgtgggttgcacccactcacagggcccattgggcgcaagcactctggtatcttggtacctttgtgcgcctgttttatacccctcccctattgtaacttagaagcagtaaaccacgatcaatagcaggcataacgctccagttatgtctcgatcaagcacttctgtttccccggactgagtatcaatagactgctcgcgcggttgaaggagaaaacgttcgttatccggctagctacttcggaaaacctagtaacaccatgaaagttgcggagagcttcgttcagcactcccccagtgtagatcaggtcgatgagtcaccgcattccccacgggcgaccgtggcggtggctgcgttggcggcctgcccatggggtaacccatggggcgctctaatacagacatggtgtgaagagtctactgagctagttagtagtcctccggcccctgaatgcggctaatcccaactgcggagcacacgcccacaagccagcgggtagtgtgtcgtaacgggtaactctgcagcggaaccgactactttgggtgtccgtgtttccttttatttttatattggctgcttatggtgacaattaaagaattgttaccatatagctattggattggccatccggtgtgcaacagagcaatcatttacctatttattggttttgtaccattaactttgaattctgtgaccacccttaattatatcttgacccttaacatagctaaac

SEQ ID NO: 18353 - DNA, 742 bp, synthetic construct
  source 1..742: mol_type = other DNA
ttaaaacagcctgtgggttgcacccactcacagggcccactgggcgcaagcactctggtacctcggtacctttgtgcgcctgttttatacccccctcccaatgaaacttagaagcaacaaaccacgatcaatagcaggcgtaacactccagttatgtctcgatcaagcacttctgtttccccggactgagtatcaatagactgctcacgcggttgaaggagaaaacgttcgttatccggctaactacttcgggaaacccagtaacaccatgaaagttgcggagagcttcgttcagcacttccccagtgtagatcaggtcgatgagtcaccgcattccccacgggcgaccgtggcggtggctgcgttggcggcctgcccatggggtaacccatggggcgctctaatacggacatggtgcgaagagtctactgagctagttagtagtcctccggcccctgaatgcggctaatcctaactgcggagcacacgcccacaagccagcgggtagtgtgtcgtaacgggtaactctgcagcggaaccgactactttgggtgtccgtgtttccttttatctttatattggctgcttatggtgacaattaaagaattgttaccatatagctattggattggccatccggtgtgtaacagagcgattgtttatttattcattggttttgtaccattaaccttgaagtctgtgaccactcttaattatatcttgaccctcaatacagcaaaat

SEQ ID NO: 18354 - DNA, 742 bp, synthetic construct
  source 1..742: mol_type = other DNA
ttaaaacagcctgtgggttgcacccactcacagggcccactgggcgcaagcactctggcacctcggtacctttgtgcgcctgttttacaccccctccccagtgaaacttagaagcagcaaaccacgatcaatagcaggcataacgctccagttatgtcttgatcaagcacttctgtttccccggaccgagtatcaatagactgctcgcgcggttgaaggagaaaacgttcgttatccggctaactacttcgggaaacctagtaacaccatgaaagttgcagagagcttcgttcagcacttccccagtgtagatcaggtcgatgagtcaccgcattccccacgggcgaccgtggcggtggctgcgttggcggcctgcccatggggtaacccatggggcgctctaatacggacatggtgcgaagagtctactgagctagttagtagtcctccggcccctgaatgcggctaatcccaactgcggagcacacgcccacaatccagcgggtagtgtgtcgtaacgggcaactctgcagcggaaccgactactttgggtgtccgtgtttccttttatctttatattggctgcttatggtgacaattaaagagttgttaccatatagctattggattggccatctggtgtgcaacagagcgattgtttacctatttattggttttgtaccattaaccttgaagtctgtgaccactcttaattatatcttgaccctcaacacagttaaac

SEQ ID NO: 18355 - DNA, 742 bp, synthetic construct
  source 1..742: mol_type = other DNA
ttaaaacagcctgtgggttgcacccactcacagggcctactgggcgcaagcactctggtatcttggtacctttgtgcgcctgttttatacccctcccctattgtaacttagaagcagcaaaccacgatcaatagcaggcataacgctccagttatgtctcgatcaagcacttctgtttccccggactgagtatcaatagactgctcgcgcggttgaaggagaaaacgttcgttatccggctagctacttcggaaaacctagtaacaccatgaaagttgcggagagcttcgttcagcactcccccagtgtagatcaggtcgatgagtcaccgcattccccacgggcgaccgtggcggtggctgcgttggcggcctgcccatggggtaacccatggggcgctctaatacagacatggtgtgaagagtctactgagctagttagtagtcctccggcccctgaatgcggctaatcccaactgcggagcacacgcccacaagccagcgggtagtgtgtcgtaacgggcaactctgcagcggaaccgactactttgggtgtccgtgtttccttttatctctatattggctgcttatggtgacaattaaagaattgttaccatatagctattggattggccatccggtgtgcaacagagcaatcatttacctattcattggttttgtaccattaaccttcaattctgtgaccacctttaattatattttgacccttaacacagctaaac

SEQ ID NO: 18356 - DNA, 742 bp, synthetic construct
  source 1..742: mol_type = other DNA
ttaaaacagcctgtgggttgtacccacccacagggcctactgggcgcaagcactctggtacttcggtacctttgtgcgcctgttttataccccctccccagtgaaacttagaagcagcaaaccacgatcaatagcaggcatagcgctccagttatgtcttgatcaagcacttctgtttccccggactgagtatcaatagactgctcgcgcggttgaaggagaaaacgttcgttacccggccaactactttggaaaacctagtaacaccatgaaagttgcggagagcttcgttcagcactcccccagtgtagatcaggtcgatgagtcaccgcattccccacgggcgaccgtggcggtggctgcgttggcggcctgcccatggggtaacccatggggcgctctaatacagacatggtgtgaagagtctactgagctagttggtagtcctccggcccctgaatgcggctaatcccaactgcggagcacgcgcccacaagccagcgggtagtgtgtcgtaatgggtaactctgcagcggaaccgactactttgggtgtccgtgtttccttttatctttatattggctgcttatggtgacaattagagagttgttaccatatagctattggattggccatccggtgtgcaacagagcaattatttacctatttattggttttgtaccattaactttgacttctgtgaccacccttaattatatcttggcccttaacacagctaaac

SEQ ID NO: 18357 - DNA, 746 bp, synthetic construct
  source 1..746: mol_type = other DNA
tttaaaacagcctgtgggttgtacccacccacagggcccactgggcgctagcactctggtactacggtacccttgtgcgcctgttttatcttcccaaaccccgtaacgctacactagaagttagacactgtgaccaatagtcagtggggcaacccagccccacttcggtcaagtacctctgtttccccgggtctagtaccaataggctgcttacgcggctgaaggggagcgcgcccgttatccggctaactacttcgagaaacctagtaccaccatggaagttgcagagtgtttcgctcagcacaaccccagtgtagatcaggtcgatgagtcaccgtacaccccacgggcgaccgtgacggtggctgcgttggcggcctgcccatggtgcacaccatgggacgctctaatacagacatggtgcgaagagtctattgagctagttagtagtcctccggcccctgaatgcggctaatcctaactgcggagcatgtgctctcaacccagagggtagcatgtcgtaacgggcaactctgcagcggaaccgactactttgggtgtccgtgtttccttttattcttatattggctgcttatggtgacaattgaaagattgttaccatatagctattggattggccatccggtgtgcaatagagctattgtatattcttttgttggctttgtgccattagattatacggcaactggtactttaagatacattcagcttttgaacacagcaaa

SEQ ID NO: 18358 - DNA, 741 bp, synthetic construct
  source 1..741: mol_type = other DNA
ttaaaacagcctgtgggttgcacccactcacagggcccactgggcgcaagcactctggtacctcggtacctttgtgcgcctgttttatacccccccccaatgaaacttagaagcagcaaaccacgatcaatagcaggcatgacgctccagttatgtcttgatcaagcacttctgtttccccggactgagcatcaatagactgctcgcgcggttgaaggagaaaacgttcgttatccggctaaccacttcggaaaacctagtagcactatgaaagttgcggagagcttcgttcagcactcccccagtgtagatcaggtcgatgagtcaccgcattccccacgggcgaccgtggcggtggctgcgttggcggcctgcccatggggtaacccatggggcgctctaatacggacatggtgtgaagagtctactgagctggttagtagtcctccggcccctgaatgcggctaatcccaactgtggagcacacgcccacaagccagcgggtagtgtgtcgtaatgggtaactctgcagcggaaccgactactttgggtgtccgtgtttccttttatcctcttattggctgcttatggtgacaattaaagaattgttaccatatagctattggattggccatccggtgtgcaacagagcaatcgtttacctatttattggttttgtaccattaaccttgaattctgtgaccactctcaattatatcttgacccttaacacagccaaac

SEQ ID NO: 18359 - DNA, 742 bp, synthetic construct
  source 1..742: mol_type = other DNA
ttaaaacagcctgtgggttgcacccactcacagggcctactgggcgctagcactctggtaccccggtacctttgtgcgcctgttttataccccccccttagtgaaacttagaagcagtaaaccacgatcaatagcaggcatagcactccagctatgtcttgatcaagcacttctgtttccccggactgagtatcaatagactgctcgcgcggttgaaggagaaaacgttcgttacccggccaactacttcgggaaacctagtagcaccatgaaagttgcggagagcttcgttcagcactcccccagtgtagatcaggtcgatgagtcaccgcattccccacgggcgaccgtggcggtggctgcgttggcggcctgcccatggggtaacccatggggcgctctaatacggacatggtgtgaagagtctactgagctagttggtagtcctccggcccctgaatgcggctaatcccaactgcggagcacacgcccacaagccagcgggtagtgtgtcgtaacgggtaactctgcagcggaaccgactactttgggtgtccgtgtttccttttatctttgtattggctgcttatggtgacaattaaggaattgttaccatatagctattggactggccatccggtgtgcaacagagcaattatttacctatttattggttttgtacccttaaccttgaattctgtgaccacccttaattatatcttgacccttaacacagctaaac

SEQ ID NO: 18360 - DNA, 742 bp, synthetic construct
  source 1..742: mol_type = other DNA
ttaaaacagcctgtgggttgcacccactcacagggcctactgggcgcaagcactctggtatcttggtacctttgtgcgcctgttttatacccctcccctattgtaacttagaagcagcaaaccacgatcaatagcaggcataacaatccagttatgtctcgatcaagcacttctgtttccccggactgagtatcaatagactgctcgcgcggttgaaggagaaaacgttcgttatccggctagctacttcggaaaacctagtaacaccatgaaagttgcggagagcttcgttcagcactcccccagtgtagatcaggtcgatgagtcaccgcactccccacgggcgaccgtggcggtggctgcgttggcggcctgcccatggggtgacccatggggcgctctaatacagacatggtgcgaagagtctactgagctagttagtagtcctccggcccctgaatgcggctaatcccaactgcggagcacacgcccacaaaccagcgggtagtgtgtcgtaacgggcaactctgcagcggaaccgactactttgggtgtccgtgtttccttttatctttatattggctgcttatggtgacaattaaagaattgttaccatatagctattggattggccatccggtgtgtaacagagcgatcatttacctgtttattggttttgtaccattaactttgaattctgtgaccacccttaattacatcttgactcttaacacagctaaac

SEQ ID NO: 18361 - DNA, 742 bp, synthetic construct
  source 1..742: mol_type = other DNA
ttaaaacagcctgtgggttgcacccactcacagggcctactgggcgcgagcactctggtatcttggtacctttgtgcgcctgttttatacccccctcccaacgaaacttagaagcagcaaaccacgatcaatagtaggcataacgctccagttatgtcttgatcaagcacttctgtttccccggactgagtatcaatagactgctcgcgcggttgaaggagaaaacgttcgttatccggctagctacttcggaaaacctagtaacatcatgaaagttgcagagagcttcgttcagcactcccccagtgtagatcaggtcgatgagtcaccgcattccccacgggcgaccgtggcggtggctgcgttggcggcctgcccatggggtaacccatggggcgctctaatacagacatggtgtgaagagtctactgagctagctagtagtcctccggcccctgaatgcggctaatcccaactgcggagcacacgcccacaagccagcgggtagtgtgtcgtaacgggtaactctgcagcggaaccgactactttgggtgtccgtgtttccttttatctttatattggctgcttatggtgacaattaaagaattgttaccatatagctattggattggccatccggtgtgcaacagagcaattatttacctatttattggttttgtaccattgactttgaattctgtgaccacccttaattatattttgacccttaacacagctaaac

SEQ ID NO: 18362 - DNA, 742 bp, synthetic construct
  source 1..742: mol_type = other DNA
ttaaaacagcctgtgggttgcacccactcacagggcccactgggcgcaagcactctggtacttcggtacctttgtgcgcctgttttacaacccccccccagtgaaacttagaagcagcaaaccacgatcaatagcaggcataacgctccagttatgtcttgatcaagcacttctgtttccccggaccgagtatcaatagactgctcgcgcggttgaaggagaaaacgttcgtcatccggctaactacttcgggaaacctagtaacaccatgaaagttgcggagagcttcgttcagcactcccccagtgtagatcaggtcgatgagtcaccgcattccccacgggcgaccgtggcggtggctgcgttggcggcctgcccatggggcaacccatggggcgctctaatacggacatggtgcgaagagtctactgagctagttagtagtcctccggcccctgaatgcggcaaatcctaactgcggagcacacgcccacaaaccagcgggtagtgtgtcgtaacgggcaactctgcagcggaaccgactactttgggtgtccgtgtttccttttatctttatattggctgcttatggtgacaattaaagagttgttaccatatagctattggattggccatccggtgtgcaacagagcaattgtttacctatttattggttttgtgccattaaccttgaagtctgtgattacccttaattatatcttgaccctcaacacagttaaac

SEQ ID NO: 18363 - DNA, 742 bp, synthetic construct
  source 1..742: mol_type = other DNA
ttaaaacagcctgtgggttgcacccactcacagggcccattgggcgcaagcactctggtatcttggtacctttgtgcgcctgttttatacccctcccctattgtaacttagaagcagtaaaccacgatcaatagcaggcataacgctccagttatgtctcgatcaagcacttctgtttccccggactgagtatcaatagactgctcgcgcggttgaaggagaaaacgttcgttatccggctagctacttcggaaaacctagtaacaccatgaaagttgcggagagcttcgttcagcactcccccagtgtagatcaggtcgatgagtcaccgcattccccacgggcgaccgtggcggtggctgcgttggcggcctgcccatggggcaacccatggggcgctctaatacggacatggtgcgaagagtctactgagctagttagtagtcctccggcccctgaatgcggctaatcctaactgcggagcacacgcccacaaaccagcgggtagtgtgtcgtaacgggcaactctgcagcggaaccgactactttgggtgtccgtgtttccttttatctttatattggctgcttatggtgacaattaaagaattgttaccatatagctattggattggccatccggtgtgcaacagagcaattgtttacctatttattggttttgtgccattaaccttgaagtctgtgactacccttaattatatcttgaccctcaacacagctaaat

SEQ ID NO: 18364 - DNA, 734 bp, synthetic construct
  source 1..734: mol_type = other DNA
ctgtgggttgtacccacccacagggcccactgggcgctagcactctggcactaaggtacctttgtgcgcctgtttttacttcccttccccaaagtaacttagaagttgtgtaccaacgatcaacagcaggtgtgacacaccagtcatatcttgatcaagcacttctgtttccccggaccgagtatcaataggctgctcgcgcggctgaaggagaaaacgttcgttacccgaccaactacttcgagaagcttagtaccaccatgaacgaggcagagtgtttcgctcagcacaaccccagtgtagatcaggctgatgagtcactgcaatccccatgggcgaccatggcagtggctgcgttggcggcctgcccatggagaaatccatgggacgctctaattctgacatggtgtgaagagcctattgagctagctggtagtcctccggcccctgaatgcggctaatcctaactgcggagcacatgcccacaaaccagtgggtggtgtgtcgtaacgggcaactctgcagcggaaccgactactttgggtgtccgtgtttccttttatacttatgttggctgcttatggtgacaatcagagaattgttaccatatagctattggattggccacccggtgtgtaacagagcaattgtttacctattcattggttttgtaccactatcattgaagtctgtgaccactctcgaattcaccttgaccctcaactcaatcaaac

SEQ ID NO: 18365 - DNA, 746 bp, synthetic construct
  source 1..746: mol_type = other DNA
ttaaaacagcctgcgggttgcacccactcacagggcccactgggcgccagcactctggtaccacggtacctttgtgcgcctgttttatctccccaagcccccgtaacgctacattagaagatgaacaatgcgaccgacagccagtggggcaacccagccccactatggtcaagcacctctgttttcccgggcttagtaccaataggctgcttgcgcggctgaaggggaacgcgcccgttatccggctaactacttcgagaaacctagtaccaccatggaagttgcagagtgtttcgctcagcacaaccccagtgtagatcaggtcgatgagtcaccgtacaccccacgggcgaccgtgacggtggctgcgttggcggcctgcccatggtgcacaccatgggacgctctaatacagacatggtgcgaagagtctattgagctagttagtagtcctccggcccctgaatgcggctaatcctaactgcggagcatgtgctctcaacccagagagtagcgtgtcgtaacgggcaactctgcagcggaaccgactactttgggtgtccgtgtttccttttattcttatattggctgcttatggtgacaattgagaaattgttaccatatagctattggattggccatccggtgtgtaatagagccattgtatattcttttattggctttgtgccattagattatactgcttttgctactttaaggtacatcttgcttctgaacacagcaaa

SEQ ID NO: 18366 - DNA, 741 bp, synthetic construct
  source 1..741: mol_type = other DNA
ttaaaacagctgtgggttgtacccactcacagggcctactgggcgcgagcactctggtacctcggtacctttgtgcgcctgttttacaccccctccccagtgaaacttagaagcaacaaaccacgatcaatagcaggcataacgctccagttatgtcttgatcaagcacttctgtttccccggactgagtatcaatagactgctcgcgcggttgaaggagaaaacgttcgttatccggctagctacttcggaaaacctagtaacaccatgaaagttgcggagagcttcgttcagcactcccccagtgtagatcaggtcgatgagtcaccgcattccccacgggcgaccgtggcggtggctgcgttggcggcctgcccatggggtaacccatggggcgctctaatacggacatggtgtgaagagtctactgagctagttagtagtcctccggcccctgaatgcggctaatcccaactgcggagcacacgcccacaagccagcgggtagtgtgtcgtaacgggtaactctgcagcggaaccgactactttgggtgtccgtgtttccttttatttttatattggctgcttatggtgacaattaaagaattgttaccatatagctattggattggccatccggtgtgcaacagagcaattgtttacctatttgttggttttgtaccattaaccttgaagtctgtgaccaccctcaattatatcttaacccttaacacagccaaac

SEQ ID NO: 18367 - DNA, 741 bp, synthetic construct
  source 1..741: mol_type = other DNA
ttaaaacagcctgtgggttgcacccactcacagggcccactgggcgcaagcactctggtacctcggtacctttgtgcgcctgttttataaccccccccagtgaaacttagaagcagcaaaccacgatcaatagcaggcataacgctccagttatgtcttgatcaagcacttctgtttccccggactgagtatcaatagactgctcgcgcggttgaaggagaaaacgttcgttatccggctaactacttcgggaaacctagtagcgccatgaaagttgcggagagcttcgttcagcactcccccagtgtagatcaggtcgatgagtcaccgcattccccacgggcgaccgtggcggtggctgcgttggcggcctgcccatggggtaacccatggggcgctctaatacggacatggtgcgaagagtctactgagctagttagtagtcctccggcccctgaatgcggctaatcccaactgcggagcacacgcccacaagccagtgggtagtgtgtcgtaacgggcaactctgcagcggaaccgactactttgggtgcccgtgtttccttttatctttatattggctgcttatggtgacaattaaagagttgttaccatatagctattggattggccatccggtgtgcaacagagcaattgtttacctatttattggttttgtaccattaaccttgaagtctgtgaccacccttaattatatcttgaccctcaacacagttaaac

SEQ ID NO: 18368 - DNA, 741 bp, synthetic construct
  source 1..741: mol_type = other DNA
ttaaaacagcctgtgggttgcacccactcacagggcccactgggcgcaagcactctggtacctcggtacctttgtgcgcctgttttataaccccccccagtgaaacttagaagcagcaaaccacgatcaatagcaggcataacgctccagttatgtcttgatcaagcacttctgtttccccggactgagtatcaatagactgctcgcgcggttgaaggagaaaacgttcgttatccggctaactacttcgggaaacctagtagcatcatgaaagttgcggagagcttcgttcagcactcccccagtgtagatcaggtcgatgagtcaccgcattccccacgggcgaccgtggcggtggctgcgttggcggcctgcccatggggtaacccatggggcgctctaatacggacatggtgcgaagagtctactgagctagttagtagtcctccggcccctgaatgcggctaatcccaactgcggagcacacgcccacaagccagcgggtagtgtgtcgtaacgggcaactctgcagcggaaccgactactttgggtgtccgtgtttctttttatctttatattggctgcttatggtgacaattaaagagttgttaccatatagctattggattggccatccggtgtgcaacagagcaattgtttacctatttattggttttgtaccattaaccttgaaatctgtgaccacccttaattatatcttgaccctcaatacagctaaac

SEQ ID NO: 18369 - DNA, 741 bp, synthetic construct
  source 1..741: mol_type = other DNA
ttaaaacagctgtgggttgcacccactcacagggcctactgggcgcaagcactctggtatctcggtacctttgtgcgcctgttttacaccccctccccagtgaaacttagaagcagcaaaccacgatcaatagcaggcataacgctccagttatgtcttgatcaagcacttctgtttccccggactgagtatcaatagactgctcgcgcggttgaaggagaaaacgttcgttatccgactagctacttcggaaaacctagtaacaccatgaaagttgcggagagcttcgttcagcactcccccagtgtagatcaggtcgatgagtcaccgcattccccacgggcgaccgtggcggtggctgcgttggcggcctgcccatggggtaacccatggggcgctctaatacggacatggtgtgaagagtctactgagctagttagtagtcctccggcccctgaatgcggctaatcccaactgcggagcacacgcccacaagccagcgggtagtgtgtcgtaacgggtaactctgcagcggaaccgactactttgggtgtccgtgtttccttttatctttacattggctgcttatggtgacaattaaagagttgttaccatatagctattggattggccatccggtgtgcaacagagcaattgtttacctatttattggttttgtaccattaaccttgaattctgtgaccacccttaattatatcttgacccttaacacagctaaac

SEQ ID NO: 18370 - DNA, 741 bp, synthetic construct
  source 1..741: mol_type = other DNA
ttaaaacagctgtgggttgtacccactcacagggcccactgggcgcaagcactctggtacctcggtacctttgtgcgcctgttttataacccccccccagtgaaacttagaagcagcaaaccacgatcaatagcaggcataacgctccagttatgtcttgatcaagcacttctgtttccccggactgagtatcaatagactgctcgcgcggttgaaggagaaaacgttcgttatccggctaactacttcgggaaacctagtagcatcatgaaagttgcggagggcttcgttcagcactcccccagtgtagatcaggtcgatgagtcaccgcattccccacgggcgaccgtggcggtggctgcgttggcggcctgcccatggggtaacccatggggcgctctaatacggacatggtgcgaagagtctactgagctagttagtagtcctccggcccctgaatgcggctaatcccaactgcggagcacacgcccacaagccagcgggtagtgtgtcgtaacgggcaactctgcagcggaaccgactactttgggtgtccgtgtttctttttatctttatattggctgcttatggtgacaattaaagagttgttaccatatagctattggattggccatccggtgtgcaacagagcaattgtttacctatttattggttttgtaccattaaccttgaaatctgtgaccacccttaattatatcttgaccctcaacacagctaaac

SEQ ID NO: 18371 - DNA, 741 bp, synthetic construct
  source 1..741: mol_type = other DNA
ttaaaacagcctgtgggttgcacccactcacagggcccactgggcgcaagcactctggtacctcggtacctttgtgcgcctgttttatacccccccccagtgaaacttagaagcagcaaaccacgatcaatagcaggcataacgctccagttatgtcttgatcaagcacttctgtttccccggactgagtatcaatagactgctcgcgcggttgaaggagaaaacgttcgttatccggctaaccacttcggaaaacctagtagcaccatgaaagttgcggagagcttcgttcagcacttccccagtgtagatcaggttgatgagtcaccgcattccccacgggcgaccgtggcggtggctgcgttggcggcctgcccatggggtaacccatggggcgctctaatacggacatggtgcgaagagtctactgagctggttagtagtcctccggcccctgaatgcggctaatcccaactgcggagcacacgcccacaagccagcgggtggtgtgtcgtaacgggcaactctgcagcggaaccgactactttgggtgtccgtgtttccttttatctttatattggctgcttatggtgacaattaaagagttgttaccatatagctattggattggccatccggtgtgcaatagagcaattgtttacctatttattggttttgtaccattaaccttgaagtctgtggccacccttaattatatcttgaccctcaacacagctaaac

SEQ ID NO: 18372 - DNA, 741 bp, synthetic construct
  source 1..741: mol_type = other DNA
ttaaaacagcctgtgggttgcacccactcacagggcctactgggcgcaagcactctggtacctcggtacctttgtgcgcctgttttatacccccccccagtgaaacttagaagcagcaaaccacgatcaatagcaggcataacgctccagttatgtcttgatcaagcacttctgtttccccggactgagtatcaatagactgctcgcgcggttgaaggagaaaacgttcgttatccggctagctacttcggaaaacctagtaacaccatgaaagttgcggagagcttcgttcagcactcccccagtgtagatcaggtcgatgagtcaccgcattccccacgggcgaccgtggcggtggctgcgttggcggcctgcccatggggtaacccatggggcgctctaatacggacatggtgtgaagagtctactgagctagttagtagtcctccggcccctgaatgcggctaatcccaactgcggagcacacgcccacaagccagcgggtagtgtgtcgtaacgggtaactctgcagcggaaccgactactttgggtgtccgtgtttccttttatctttatattggctgcttatggtgacaattaaagaattgttaccatatagctattggattggccatccggtgtgcaacagagcaattatttacctatttattggttttgtaccattaaccttgaattctgtgaccacccttaattatatcttgaccctcaacacagctaaac

SEQ ID NO: 18373 - DNA, 741 bp, synthetic construct
  source 1..741: mol_type = other DNA
ttaaaacagcctgtgggttgcacccactcacagggcccactgggcgcaagcactctggtacctcggtacctttgtgcgcctgttttatacccccccccagtgaaacttagaagcagcaaaccacgatcaatagcaggcataacgctccagttatgtcttgatcaagcacttctgtttccccggaccgagtatcaatagactgctcgcgcggttgaaggagaaaacgttcgttatccggctagctacttcgggaaacctagtaacaccatgaaagttgcggagagcttcgttcagcactcccccagtgtagatcaggtcgatgagtcaccgcattccccacgggcgaccgtggcggtggctgcgttggcggcctgcccatggggtaacccatggggcgctctaatacggacatggtgtgaagagtctactgagctagttagtagtcctccggcccctgaatgcggctaatcccaactgcggagcacacgcccacaagccagcgggtagtgtgtcgtaacgggcaactctgcagcggaaccgactactttgggtgtccgtgtttccttttatctttatattggctgcttatggtgacaattaaagaattgttaccatatagctattggattggccatccggtgtgcaacagagcaattgtttacctatttattggttttgtaccattaaccttgaagactgtgaccacccttaattatatcttgacccttaacacagctaaac

SEQ ID NO: 18374 - DNA, 741 bp, synthetic construct
  source 1..741: mol_type = other DNA
ttaaaacagcctgtgggttgcacccactcacagggcctactgggcgcaagcactctggtatcttggtacctttgtgcgcctgttttatacccccccccagtgaaacttagaagcagcaaaccacgatcaatagcaggcataacgctccagttatgtcttgatcaagcacttctgtttccccggactgagtatcaatagactgctcgcgcggttgaaggagaaaacgttcgttacccggctagctacttcggaaaacttagtaacaccatgaaagttgcggagagcttcgttcagcactcccccggtgtagatcaggtcgatgagtcaccgcattccccacgggcgaccgtggcggtggctgcgttggcggcctgcccatggggtaacccatggggcgctctaatacagacatggtgtgaagagtctactgagctagttagtagtcctccggcccctgaatgcggctaatcccaactgcggagcacacgcccacaagccagcgggtagtgtgtcgtaacgggtaactctgcagcggaaccgactactttgggtgtccgtgtttccttttatctttatattggctgcttatggtgacaattaaagaattgttaccatatagctattggattggccatccggtgtgcaacagagcaattatttacctatttattggttttgtaccattaactttgaattctgtgaccacccttaattatatcttgacccttaacacagctaaac

SEQ ID NO: 18375 - DNA, 742 bp, synthetic construct
  source 1..742: mol_type = other DNA
tttaaaacagcctgtgggttgtccccacccacagggcccactgggcgttagcactctggtattacggtacctttgtgcgcctgttttataacccctccccaactgtaaattagaagcaacacacgtcgatcaatagtaggcgtgacgcaccagtcacgtcttgatcaaggacttctgttgccccggaccgagtatcaatagactgctcacgcggttgaaggagaaaacgttcgttacccgaccaactacttcgaaaaacctagtagcaccatgaaggttgcggagtgtttcgctcggcacttccccagtgtagatcaggtcgatgagtcaccgcattccccacgggcgaccgtggcggtggctgcgctggcggcctgcctatggggtaacccataggacgctctaatacggacatggtgcgaagagtctattgagctagttggtagtcctccggcccctgaatgcggctaatcctaactgcggagcgcgcgcccccattccaggaggtagcgcgtcgtaacgggcaactctgcagcggaaccgactactttgggtgtccgtgtttccttttatctttattctggctgcttatggtgacaattgacagattgttaccatatagctattggattggccatccgatcacaagcagagcgattatctaccaatttattggatttatcccactgcacactcgtgaatataacacattactgctgatactgagtttggacaaagcaaa

SEQ ID NO: 18376 - DNA, 741 bp, synthetic construct
  source 1..741: mol_type = other DNA
ttaaaacagcctgtgggttgcacccactcacagggcctactgggcgcaagcactctggtatcttggtacctttgtgcgcctgttttatacccccccccagtgaaacttagaagcagcaaaccacgatcaatagcaggcataacgctccagttatgtcttgatcaagcacttctgtttccccggactgagtatcaatagactgctcgcgcggttgaaggagaaaacgttcgttatccggctaactacttcggaaaacctagtaacaccatgaaagttgcggagagcttcgttcagcactcccccagtgtagatcaggtcgatgagtcaccgcattccccacgggcgaccgtggcggtggctgcgttggcggcctgcccatggggtaacccatggggcgctctaatacagacatggtgtgaagagtctactgagctagttagtagtcctccggcccctgaatgcggctaatcccaactgcggagcacacgcccacaagccagcgggtagtgtgtcgtaacgggtaactctgcagcggaaccgactactttgggtgtccgtgtttccttttatctttgtattggctgcttatggtgacaattaaagaattgttaccatatagctattggattggccatccggtgtgcaacagagcaattatttacctatttattggttttgtaccattaactttgaattctgtgaccacccttaattatatcttaacccttaacacagctgaac

SEQ ID NO: 18377 - DNA, 741 bp, synthetic construct
  source 1..741: mol_type = other DNA
ttaaaacagcctgtgggttgcacccactcacagggcctactgggcgcaagcactctggtatcttggtacctttgtgcgcctgttttatacccccccccagtgaaacttagaagcagcaaaccacgatcaatagcaggcataacgctccagttatgtcttgatcaagcacttctgtttccccggactgagtatcaatagactgctcacgcggttgaaggagaaaacgttcgttatccggctaactacttcggaaaacctagtaacaccatgaaagttgcggagagcttcgttcagcactcccccagtgtagatcaggtcgatgagtcaccgcattccccacgggcgaccgtggcggtggctgcgttggcggcctgcccatggggtaacccatggggcgctctaatacagacatggtgtgaagagtctactgagctagttagtagtcctccggcccctgaatgcggctaatcccaactgcggagcacacgcccacaagccagcgggtagtgtgtcgtaacgggtaactctgcagcggaaccgactactttgggtgtccgtgtttccttttatctttgtattggctgcttatggtgacaattaaagaattgttaccatatagctattggattggccatccggtgtgcaacagagcaattatctacctatttattggttttgtaccattaactttgaattctgtgaccacccttaattatatcttaacccttaacacagctaaac

SEQ ID NO: 18378 - DNA, 741 bp, synthetic construct
  source 1..741: mol_type = other DNA
ttaaaacagcctgtgggttgcacccactcacagggcccactgggcgcaagcactctggtacctcggtacctttgtgcgcctgttttatacccccccccagtgaaacttagaagcagcaaaccacgatcaatagcaggcataacgctccagttatgtcttgatcaagcacttctgtttccccggactgagtatcaatagactgctcgcgcggttgaaggagaaaacgttcgtcatccggctagctacttcggaaaacctagtaacaccatgaaagttgcggagagcttcgttcagcactcccccagtgtagatcaggtcgatgagtcaccgcattccccacgggcgaccgtggcggtggctgcgttggcggcctgcccatggggtaacccatggggcgctctaatacggacatggtgtgaagagtcaactgagctagttagtagtcctccggcccctgaatgcggctaatcccaactgcggagcacacgcccacaagccagtgggtagtgtgtcgtaacgggtaactctgcagcggaaccgactactttgggtgtccgtgtttccttttatctttatattggctgcttatggtgacaattaaagaattgttaccatatagctattggattggccatccggtgtgcaacagagcaattatttacctatttattggttttgtaccattaaccttgaattctgtgaccacccttaattatatcttgacccttaacacagctaaac

SEQ ID NO: 18379 - DNA, 741 bp, synthetic construct
  source 1..741: mol_type = other DNA
ttaaaacagcctgtgggttgcacccactcacagggcctactgggcgcaagcactctggtatcttggtacctttgtgcgcctgttttatacccccccccagtgaaacttagaagcagcaaaccacgatcaatagcaggcataacgctccagttatgtcttgatcaagcacttctgtttccccggactgagtatcaatagactgctcgcgcggttgaaggagaaaacgttcgttatccggctaactacttcggaaaacctagtaacaccatgaaagttgcggagagcttcgttcagcactcccccagtgtagatcaggtcgatgagtcaccgcattccccacgggcgaccgtggcggtggctgcgttggcggcctgcccatggggtaacccatggggcgctctaatacagacatggtgtgaagagtctactgagctagttagtagtcctccggcccctgaatgcggctaatcccaactgcggagcacacgcccacaagccagcgggtagtgtgtcgtaacgggtaactctgcagcggaaccgactactttgggtgtccgtgtttccttttacctttatattggctgcttatggtgacaattaaagaattgttaccatatagctattggattggccatccggtgtgcaacagagcaattatttacctatttattggttttgtaccattaactttgaattctgtgaccacccttaattatatcctgacccttaacacagctaaac

SEQ ID NO: 18380 - DNA, 741 bp, synthetic construct
  source 1..741: mol_type = other DNA
ttaaaacgcctgtgggttgcacccactcacagggcctactgggcgcaagcactctggtacctcggtacctttgtgcgcctgttttataccccccccctagtgaaacttagaagcagcaaaccacgatcaatagcaggcataacgctccagttatgtcttgatcaagcacttctgtttccccggactgagtatcaatagactgctcgcgcggttgaaggagaaaacgttcgttatccggctaactacttcggaaaacctagtaacaccatgaaagttgcggagagcttcgttcagcactcccccagtgtagatcaggtcgatgagtcaccgcattccccacgggcgaccgtggcggtggctgcgttggcggcctgcccatggggtaacccatggggcgctctaatacggacatggtgtgaagagtctactgagctagttggtagtcctccggcccctgaatgcggctaatcccaactgcggagcacacgcccacaagccagcgggtagtgtgtcgtaacgggtaactctgcagcggaaccgactactttgggtgtccgtgtttccttttatctttatattggctgcttatggtgacaattaaagaattgttaccatatagctattggattggccatccggtgtgcaacagagcaattatttacctatttattggttttgtaccattaaccttgaattctgtgaccacccttaattatatcttgacccttaacacagctaaac

SEQ ID NO: 18381 - DNA, 741 bp, synthetic construct
  source 1..741: mol_type = other DNA
ttaaaacagcctgtgggttgcacccactcacagggcccactgggcgcaagcactctggtacctcggtacctttgtgcgcctgttttacacccccccccagtgaaacttagaagcagcaaaccacgatcaatagcaggcataacgctccagttatgtcttgatcaagcacttctgtctccccggaccgagtatcaatagactgctcacgcggttgaaggagaaaacgttcgttatccggctagctacttcgggaaacctagtaacaccatgaaagttgcggagagcttcgttcagcactcccccagtgtagatcaggtcgatgagtcaccgcattccccacgggcgaccgtggcggtggctgcgttggcggcctgcccatggggtaacccatggggcgctctaatacggacatggtgtgaagagtctactgagctagttagtagtcctccggcccctgaatgcggctaatcctaactgcggagcacacgcccacaagccagcgggtagtgtgtcgtaacgggtaactctgcagcggaaccgactactttgggtgtccgtgtttccttttatctttatattggctgcttatggtgacaattaaagaattgttaccatatagctattggattggccatccggtgtgcaacagagcaattgtttacctatttattggatttgtaccattaaccttgaagtctgtgactacccttaattatatcttgatccttaacacagctaaac

SEQ ID NO: 18382 - DNA, 741 bp, synthetic construct
  source 1..741: mol_type = other DNA
ttaaaacagcctgtgggttgcacccactcacagggcctactgggcgcaagcactctggtatctcggtacctttgtgcgcctgttttatacccccccccagtgaaacttagaagcagcaaactacgatcaatagcaggcataacgctccagttatgtcttgatcaagcacttctgtttccccggactgagtatcaatagactgctcgcgcggttgaaggagaaaacgttcgttatccggctagctacttcggaaaacctagtaacaccatgaaagttgcggagagcttcgttcagcactcccccagtgtagatcaggtcgatgagtcaccgcattccccacgggcgaccgtggcggtggctgcgttggcggcctgcccatggggtaacccatggggcgctctaatacggacatggtgtgaagagtctactgagctagttagtagtcctccggcccctgaatgcggctaatcctaactgcggagcacacgcccacaagccagcgggtagtgtgtcgtaacgggcaactctgcagcggaaccgactactttgggtgtccgtgtttccttttatctttatattggctgcttatggtgacaattaaagaattgttaccatatagctattggattggccatccggtgtgcaacagagcaattgtttacctattcattggttttgtaccattaaccttgaattctgtgaccacccttaattatatcttgacccttaacacagctaaac

SEQ ID NO: 18383 - DNA, 741 bp, synthetic construct
  source 1..741: mol_type = other DNA
ttaaaacagcctgtgggttgcacccactcacagggcctactgggcgcaagcactctggtacctcggtacctttgtgcgcctgttttatacccccccccagtgaaacttagaagcagcaaaccacgatcaatagcaggcatagcgctccagttatgtcttgatcaagcacttctgtttccccggactgagtatcaatagactgctcgcgcggttgaaggagaaaacgttcgttatccggctaactacttcggaaaacctagtaacaccatgaaagttgcggagagcttcgttcagcactcccccagtgtagatcaggtcgatgagtcaccgcattccccacgggcgaccgtggcggtggctgcgttggcggcctgcccatggggtaacccatggggcgctctaatacggacatggtgtgaagagtctactgagctagttggtagtcctccggcccctgaatgcggctaatcccaactgcggagcacacgctcacaagccagcgggtagtgtgtcgtaacgggtaactctgcagcggaaccgactactttgggtgtccgtgtttccttttatctttatattggctgcttatggtgacaattaaagaattgttaccatatagctattggattggccatccggtgtgcaacagagcaattatttacctatttattggttttgtaccattaaccttgaattctgtgaccacccttaattatatcttgacccttaacacagctaaac

SEQ ID NO: 18384 - DNA, 741 bp, synthetic construct
  source 1..741: mol_type = other DNA
ttaaaacagcctgtgggttgcacccactcacagggcctactgggcgcaagcactctggtacttcggtacctttgtgcgcctgttttacacccccccccagtgaaacttagaagcagcaaaccacgatcaatagcaggcatagcgctccagttatgtcttgatcaagcactcctgtttccccggactgagtatcaatagactgctcgcgcggttgaaggagaaaacgttcgttacccggccaactacttcggaaaacctagtaacaccatgaaagttgcggagagtttcgttcagcactcccccagtgtagatcaggtcgatgagtcaccgcattccccacgggcgaccgtggcggtggctgcgttggcggcctgcccatggggtaacccatggggcgctctaatacggacatggtgtgaagagtctactgagctagttggtagtcctccggcccctgaatgcggctaatcccaactgcggagcacacgcccacaagccagcgggtagtgtgtcgtaatgggtaactctgcagcggaaccgactactttgggtgtccgtgtttccttttatctttatattggctgcttatggtgacaattagagaattgttaccatatagctattggattggccatccggtgtgcaacagagcaattatttacctgtttattggttttgtaccattaactttgacttctgtgaccacccttaattatatcttgacccttaatacagctaaac

SEQ ID NO: 18385 - DNA, 741 bp, synthetic construct
  source 1..741: mol_type = other DNA
ttaaaacagcctgtgggttgcacccactcacagggcctactgggcgcaagcactctggtacttcggtacctttgtgcgcctgttttacacccccccccagtgaaacttagaagcagcaaaccacgatcaatagcaggcatagcgctccagttatgtcttgatcaagcactcctgtttccccggactgagtatcaatagactgctcgcgcggttgaaggagaaaacgttcgttacccggccaactacttcggaaaacctagtaacaccatgaaagttgcggagagtttcgttcagcactcccccagtgtagatcaggtcgatgagtcaccgcattccccacgggcgaccgtggcggtggctgcgttggcggcctgcccatggggtaacccatggggcgctctaatacggacatggtgtgaagagtctactgagctagttggtagtcctccggcccctgaatgcggctaatcccaactgcggagcacacgcccacaagccagcgggtagtgtgtcgtaatgggtaactctgcagcggaaccgactactttgggtgtccgtgtttccttttatctttatattggctgcttatggtgacaattagagaattgttaccatatagctattggattggccatccggtgtgcaacagagcaattatttacctatttattggttttgtaccattaaccttgaattctgtgaccacccttaattatatcttgacccttaacacagctaaac

SEQ ID NO: 18386 - DNA, 741 bp, synthetic construct
  source 1..741: mol_type = other DNA
ttaaaacagcctgtgggttgcacccactcacagggcctactgggcgcaagcactctggtatcttggtacctttgtgcgcctgttttatgcccccccccagtgaaacttagaagcagcaaaccacgatcaatagcaggcataacgctccagttatgtcttgatcaagcacttctgtttccccggactgagtatcaatagactgctcacgcggttgaaggagaaaacgttcgttatccggctaactacttcggaaaacctagtaacaccatgaaagttgcggagagcttcgttcagcactcccccagtgtagatcaggtcgatgagtcaccgcattccccacgggcgaccgtggcggtggctgcgttggcggcctgcccatggggtgacccatggggcgctctaatacagacatggtgtgaagagtctactgagctagttagtagtcctccggcccctgaatgcggctaatcccaactgcggagcacacgcccacaagccagcgggtagtgtgtcgtaacgggtaactctgcagcggaaccgactactttgggtgtccgtgtttccttttacctttatattggctgcttatggtgacaattaaagaattgttaccatatagctattggattggccatccagtgtgcaacagagcaattatttacctatttattggttttgtaccattaactttgaattctgtgaccacccttaattatatcctgacccttaacacagctaaat

SEQ ID NO: 18387 - DNA, 741 bp, synthetic construct
  source 1..741: mol_type = other DNA
ttaaaacagcctgtgggttgcacccactcacagggcccactgggcgtaagcactctggtatcttggtacctttgtgcgcctgttttatacccccccctattgtaatttagaagcactaaaccacgatcaatagcaggcataacgctccagttatgtctcgatcaagcacttctgtttccccggactgagtatcaatagactgctcacgcggttgaaggagaaaacgttcgttatccggctagctacttcggaaagcctagtaacaccatgaaagttgcggagagcttcgttcagcactcccccagtgtagatcaggtcgatgagtcaccgcattccccacgggcgaccgtggcggtggctgcgttggcggcctgcccatggggtaacccatggggcgctctaatacagacatggtgtgaagagcctactgagctagttagtagtcctccggcccctgaatgcggctaatcccaactgcggagcacacgcccacaagccagcgggtagtgtgtcgtaacgggtaactctgcagcggaaccgactactttgggtgtccgtgtttccttttatctttatattggctgcttatggtgacaattaaagaattgttaccatatagctattggattggccatccggtgtgcagcagagcaatcatttacctatttgttggttttgtaccattaactttgaattctgtgaccactcttaattatatcttgacccttaacacagccaaac

SEQ ID NO: 18388 - DNA, 741 bp, synthetic construct
  source 1..741: mol_type = other DNA
ttaaaacagcctgtgggttgcacccactcacagggcctactgggcgcaagcactctggtatcttggtacctttgtgcgcctgttttatgcccccccccagtgaaacttagaagcagcaaaccacgatcaatagcaggcataacgctccagttatgtcttgatcaagcacttctgtttccccggactgagtatcaatagactgctcgcgcggttgaaggagaaaacgttcgttatccggctaactacttcggaaaacctagtaacaccatgaaagttgcggagagcttcgttcagcactcccccagtgtagatcaggtcgatgagtcaccgcattccccacgggcgaccgtggcggtggctgcgttggcggcctgcccatggggtaacccatggggcgctctaatacagacatggtgtgaagagtctactgagctagttagtagtcctccggcccctgaatgcggctaatcccaactgcggagcacacgcccacaagccagcgggtagtgtgtcgtaacgggtaactctgcagcggaaccgactactttgggtgtccgtgtttccttttatctttgtattggctgcttatggtgacaattaaagaattgttaccatatagctattggattggccatccggtgtgcaacagagcaattatttacttatttattggttttgtaccattaactttggattctgtgaccacccttaattatatcctgacccttaacacagctaaac

SEQ ID NO: 18389 - DNA, 741 bp, synthetic construct
  source 1..741: mol_type = other DNA
ttaaaacgcctgtgggttgcacccactcacaggggccactgggcgcaagcactctggtacctcggtacctttgtgcgcctgttttataccccctccccagtgaaacttagaagcagcaaaccacgatcaatagcaggcataacgctccagttatgtcttgatcaagcacttctgtttccccggactgagtatcaatagactgctcgcgcggttgaaggagaaaacgttcgttatccggctagctacttcggaaaacctagtaacaccatgaaagttgcggagagcttcgttcagcactcccccagtgtagatcaggtcgatgagtcaccgcattccccacgggcgaccgtggcggtggctgcgttggcggcctgcccatggggtaacccatggggcgctctaatacggacatggtgtgaagagtctactgagctagttagtagtcctccggcccctgaatgcggctaatcccaactgcggagcacacgcccacaagccagcgggtagtgtgtcgtaacgggtaactctgcagcggaaccgactactttgggtgtccgtgtttccttttatctttatattggctgcttatggtgacaattaaagaattgttaccatatagctattgggttggccatccggtgtgcatcagagcaatcatttacctatttattggttttgtaccattaaccttggattctgtgaccacccttaattatatcttgacccttaacgcagttaaac

SEQ ID NO: 18390 - DNA, 740 bp, synthetic construct
  source 1..740: mol_type = other DNA
ttaaaacagctgtgggttgcacccactcacagggcctactgggcgcgagcactctggtacctcggtacctttgtgcgcctgttttacacccccccccagtggaacttagaagcagcaaaccacgatcaatagcaggcataacgctccagttgtgtcttgatcaagcacttctgtttccccggaccgagtatcaatagactgctcgcgcggttgaaggagaaaacgttcgttatccggctagctacttcgggaaacctagtaacaccatgaaagttgcggagagcttcgttcagcactcccccagtgtagatcaggtcgatgagtcaccgcattccccacgggcgaccgtggcggtggctgcgttggcggcctgcccatggggtaacccatggggcgctctgatacggacatggtgtgaagagtctactgagctagttagtagtcctccggcccctgaatgcggctaatcccaactgcggagcacacgcccacaagccagcgggtagtgtgtcgtaacgggtaactctgcagcggaaccgactactttgggtgtccgtgtttccttttatctttatattggctgcttatggtgacaattaaagaattgttaccatatagctattggattggccatccagtgtgtaacagagcaattatttacctatttattggttttgtaccattaaccttgaagtctgtgaccacccttaattatatcttgacccttaacacagctaaac

SEQ ID NO: 18391 - DNA, 740 bp, synthetic construct
  source 1..740: mol_type = other DNA
ttaaaacagctgtgggttgcacccactcacagggcctactgggcgcaagcactctggtatctcggtacctttgtgcgcctgttttatacccccccccagtgaaacttagaagcagcaaaccacgatcaatagcaggcataacgctccagttatgtcttgatcaagcacttctgtttccccggactgagtatcaatagactgctcgcgcggttgaaggagaaaacgttcgttacccgactagctacttcggaaagcctagtaacaccatgaaagttgcggagggcttcgttcagcactcccccagtgtagatcaggtcgatgagtcaccgcattccccacgggcgaccgtggcggtggctgcgttggcggcctgcccatggggtaacccatggggcgctctaatacggacatggtgtgaagagtctactgagctagttagtagtcctccggcccctgaatgcggctaatcccaactgcggagcacacgcccacaagccagcgggtagtgtgtcgtaatgggtaactctgcagcggaaccgactactttgggtgtccgtgtttccttttatctttatattggctgcttatggtgacaattaaagaattgttaccatatagctattggattggccatccggtgtgcaacagagcaattatttacctatccattggttttgtaccattaaccttgaattctgtaaccacccttaattatatctcgacccttaacacagctaaac

SEQ ID NO: 18392 - DNA, 742 bp, synthetic construct
  source 1..742: mol_type = other DNA
tttaaaacagcctgtgggttgtccccacccacagggcccactgggcgttagcactctggtattacggtacctttgtgcgcctgttttataacccctccccaactgtaaattagaagcaacacacgtcgatcaatagtaggcgtgacgcaccagtcacgtcttgatcaagcacttctgtttccccggaccgagtatcaataggctgctcacgcggttgaaggagaaaacgttcgttacccgaccaactacttcgaaaaacctagtagcaccatgaaggttgcggagtgtttcgctcggcacttccccagtgtagatcaggtcgatgagtcaccgcattccccacgggcgaccgtggcggtggctgcgctggcggcctgcctatggggtaacccataggacgctctaatacggacatggtgcgaagagtctattgagctagttggtagtcctccggcccctgaatgcggctaatcctaactgcggagcgcgcgcccccattccaggaggtagcgcgtcgtaacgggcaactctgcagcggaaccgactactttgggtgtccgtgtttccttttatctttattctggctgcttatggtgacaattgacagattgttaccatatagctattggattggccatccggtcacaagcagagcgattatctaccaatttattggatttatcccactgcacactcgtgaatataacacattactgctgatactgagtttggacaaagcaaa

SEQ ID NO: 18393 - DNA, 738 bp, synthetic construct
  source 1..738: mol_type = other DNA
agctgtgggttgttcccacccacagggcccactgggcgctagcacactgattctgcgggatctttgtgcgcctgttttataaccccttccctaagcagcaacttagaagcttcacactatcacgaccagcagtgggcgtgacgcaccagtcacgtcttggtcaagcacttctgtttccccggactgagtatcaatagactgctcatgcggttgaaggagaaaacgttcgttatccggctaactacttcgagaaacctagtagcaccgtgaaagttgcggagtgtttcgctcagcacttcccccgtgtagatcaggtcgatgagtcactgtaaaccccacgggcgaccgtgacagtggctgcgttggcggcctgcccatggggaaacccatgggacgctctaatacagacacggtgtgaagagtctattgagctagttagtagtcctccggcccctgaatgcggctaatcctaactgcggagcgcgtaccctcaacccagagggcggcgcgtcgtaatgggtaactctgcagcggaaccgactactttgggtgtccgtgtttcctttttattccttattggctgcttatggtgacaattgaaaagttgttaccatatagctattggattggccatccagtgaccaacagagctattgtttacctgtttattggatacgtccctcttaatctcaagaccatccaaactcttgattatatattactccttaatcataagaa

SEQ ID NO: 18394 - DNA, 715 bp, synthetic construct
  source 1..715: mol_type = other DNA
ggacagggcccactgggcgctagcactctgattctgcggaatctttgtgcgcctgttttataacctccccaaacttgcaacttagaagttatgtacgttactgatcaacagcaggcgtggcacaccagccatgtcttgatcaagcacttctgtaccccggactgagtatcaatagactgctcacgtggtcgaaggagaaaacgttcgttatccggctaactacttcgagaaacctagtagcaccactgaaactgcggagtgtttcgctcagcacttcccccgtgtagatcaggtcgatgagtcactgcttaccccacgggtgaccgtggcagtggctgcgttggcggcctgcctatggggcaacccataggacgctctaaagtggacatggtgcgaagagtctattgagctagttagtagtcctccggcccctgaatgcggctaatcctaactgcggagcgcatgccttcaaaccagagggtggtgcgtcgtaacgggtaactctgcagcggaaccgactactttgggtgtccgtgtttcttttattctcataatggctgcttatggtgacaattgaggaattgttaccatatagctattggattggccatccggtgtgcaacagagctattatctacttgtttgttgggtacattccattaacacctaaatccttcaatacattgcactatatcttaacactgaacgcaaggaa

SEQ ID NO: 18395 - DNA, 742 bp, synthetic construct
  source 1..742: mol_type = other DNA
tttaaaacagcctgtgggttgcacccactcacagggcccactgggcgcaagcactctggtacctcggtacctttgtgcgcctgttttatacccccccccagtgaaacttaaaagcagcaaaccacgatcaatagcaggcataacgctccagttatgtcttgatcaagcacttctgtttccccggactgagtatcaataaactgctcgcgcggttgaaggaaaaaacgttcgttatccggctaactacttcggaaaacttagtaacaccatgaaagttgcggaaagcttcgttcagcactcccccagtgtaaatcaggtcgatgagtcaccgcattccccacgggcgaccgtggcggtggctgcgttggcggcctgcccatggggtaacccatggggcgctctaatacagacatggtgtgaagagtctactgagctagttagtagtcctccggcccctgaatgcggctaatcccaactgcggagcacacgcccacaagccagcgggtagtgtgtcgtaacgggtaactctgcagcggaaccgactactttgggtgtccgtgtttccttttacctttattttggctgcttatggtgacaattaaagaattgttaccatatagctattggattagccatccggtgtgcaacagagcaattatttacctatttattggttttgtaccattaactttgaattctgtgaccacccttaattatatcctgacccttaacacagctaaac

SEQ ID NO: 18396 - DNA, 729 bp, synthetic construct
  source 1..729: mol_type = other DNA
gttgttcccacccacagggcccactgggcgccagcactctgattccatggaatctttgtgcgcctgttttataacccttccccaatttgcaacttagaagtaatacacactacagatcaatagtaggcatggcgcgccagtcatgtctcgatcaagcacttctgtttccccggactgagtatcaatagactgcccacgcggttgaaggagaaaacgtccgttacccggctaactacttcgagaaacctagtagcaccaaataagctgcagagcgtttcgctcagcacctcccccgtgtagatcaggctgatgagtcactgcaatccccacgggcgaccgtggcagtggctgcgctggcggcctgcctatggggcaacccataggacgctctaatgtggacatggtgcgaagagtctattgagctagttagtagtcctccggcccctgaatgcggctaatcctaactgcggagcacataccttcaatccaggaggtggtgtgtcgtaacgggtaactctgcagcggaaccgactactttgggtgtccgtgtttccttttatccttatattggctgcttatggtgacaatcacggaattgttgccatatagctattggattggccatccggtgtctaatagagctattgtatacctatttgttggatttactccactatcatataaatctctgaacactttgtacttcatattgaacttaaacacacgaaa

SEQ ID NO: 18397 - DNA, 729 bp, synthetic construct
  source 1..729: mol_type = other DNA
gggttgtacccacccacggggcccattgggcgctagcactctggtaccacggtacctttgtgcgcctgttttattaccccacccctacctgaaacgtagaagcaacaattagtcgaccaatagtgggtgtggcacaccagccacatcttggtcaagcacttctgtttccccgggttgagtatcaatatgctgttcacacggctgaaggagaaaacgcccgttacccggccaactacttcgagaagcctagtaccgccatgaacattgcaaggcgtttcactcagcacttcccccgtgtagatcaggccgatgagtcaccgcattccccacgggcgaccgtggcggtggctgcgctggcggcctgcctgtgggttgacccacaggacgccttaatatagacatggtgcgaagagcctattgagctagttggtattcctccggcccctgaatgcggctaatcctaactgtggagcacatactcacaagccagtgggtggtgtgtcgtaatgggcaactctgcagcggaaccgactactttgggtgtccgtgtttccttttattcttatactggctgcttatggtgacaatcagagaattgttaccatatagctattggattggccatccggtgtgcaacagagctattgtgtatttatttgttggatttgtcccactgtcgtatacatccctcaacactttgtattttattttgaaattaaacgcaagaaa

SEQ ID NO: 18398 - DNA, 737 bp, synthetic construct
  source 1..737: mol_type = other DNA
tggggggtggtacccactcacagggcccacgtggcgctagcactctgattctacggaatctttgtgcgcctgttttacaacccacccccaatttgcaacttagaagcaatacacaacactgatcaacagcaggcatggcgcaccagccatgtcttgatcaagcacttctgtttccccggactgagcatcaatagactgctcacgcggttgaagaagaaagcgtccgttatccggctaactacttcgagagacctagtagcaccattcaagctgcggagtgtttcgctcggcacttcccccgtgtagatcaggccgatgagtcactgcaatccccacgggcgaccgtggcagtggctgcgctggcggcctgcctatggggcaacccataggacgctctaatgtggacatggtgcgaagagtctattgagctagttagtagtcctccggcccctgaatgcggctaatcctaactgcggagcacatgccctcaacccagagggtagtgtgtcgtaacgggcaactctgcagcggaaccgactactttgggtgtccgtgtttccttttattcttacattggctgcttatggtgacaatcacagaattgttaccatatagctattggattggccatccggtgtgcgatagagctattatatacctatctgttggctttgtaccactaaccttaaaatctataaccaccctcaactttatattaactctcaatacagtcaaac

SEQ ID NO: 18399 - DNA, 741 bp, synthetic construct
  source 1..741: mol_type = other DNA
ttaaaacagcctgtgggttgcacccacccacagggcctactgggcgcaagcactctggtatcttggtacctttgtgcgcctgttttatacccccccccagtgaaacttagaagcagcaaatcacgatcaatagcaggcataacgctccagttgtgtctcgatcaagcacttctgtttccccggactgagtatcaatagactgctcgcgcggttgaaggagaaaacgttcgttatccggctagctacttcggaaaacctagtaacaccatgaaagttgcggagagcttcgttcagcactcccccagtgtagatcaggtcgatgagtcaccgcattccccacgggcgaccgtggcggtggctgcgttggcggcctgcccatggggtaacccatggggcgctctaatacggacatggtgtgaagagtctactgagctagctagtagtcctccggcccctgaatgcggctaatcccaactgcggagcacacgcccacaagccagcgggtagtgtgtcgtaatgggtaactctgcagcggaaccgactactttgggtgtccgtgtttccttttatctttatattggctgcttatggtgacaattaaagaattgttaccatatagctattggattggccatccggtgtgcaacagagcgattgtctacctatttattggttttgttccattaactttgaattctgtgaccacccttaattatatcttgacccttaacacagccaaac

SEQ ID NO: 18400 - DNA, 744 bp, synthetic construct
  source 1..744: mol_type = other DNA
ttaaaacagcctgtgggttgcacccacccacagggcctactgggtgctagcactctggtactaaggtacctttgtgcgcctgtttttattccccttccccaaagtaacttagaagttgtgtaccaacgatcaatagtaggtgtgacacaccagtcatatcttgatcaagtacttctgtttccccggaccgagtatcaataggctgctcgcgcggctgaaggagaaaacgttcgttacccggccaactacttcgagaagcttagtaccaccatgaacgatgcagggtgtttcgttcagcacaaccccagtgtagatcaggctgatgagtcactgcaacccccatgggcgaccatggcagtggctgcgttggcggcctgcccatggagaaatccatgggacgctctaattctgacatggtgtgaagagcctattgagctagctggtagtcctccggcccctgaatgcggctaatcctaactgcggagcacatgctcacaaaccagtgggtggtgtgtcgtaatgggcaactctgcagcggaaccgactactttgggtgtccgtgtttccttttattcttatgttggctgcttatggtgacaatcaaagaattgttaccatatagctattggattggccatccggtgtgcaacagagcaattgtttacctatttgttggtttcgtaccactatcactgaagtctgtgaccactctcaaattcattttgaccctcaactcaatcaaac

SEQ ID NO: 18401 - DNA, 746 bp, synthetic construct
  source 1..746: mol_type = other DNA
ttaaacaagcctgtgggttgttcccacccacagggcccactgggcgctagcacactgattctgcgggatctttgtgcgcctgttttataaccccttccctaagcagcaacttagaagcttcacactatcacgaccagcagtgggcgtgacgcaccagtcacgtcttggtcaagcacttctgtttccccggactgagtatcaatagactgctcatgcggttgaaggagaaaacgttcgttatccggctaactacttcgagaaacctagtagcaccgtgaaagttgcggagtgtttcgctcagcacttcccccgtgtagatcaggtcgatgagtcactgtaaaccccacgggcgaccgtgacagtggctgcgttggcggcctgcccatggggaaacccatgggacgctctaatacagacacggtgtgaagagtctattgagctagttagtagtcctccggcccctgaatgcggctaatcctaactgcggagcgcgtaccctcaacccagagggcggcgcgtcgtaatgggtaactctgcagcggaaccgactactttgggtgtccgtgtttcctttttattccttattggctgcttatggtgacaattgaaaagttgttaccatatagctattggattggccatccagtgaccaacagagctattgtttacctgtttattggatacgtccctcttaatctcaagaccatccaaactcttgattatatattactccttaatcataagaa

SEQ ID NO: 18402 - DNA, 735 bp, synthetic construct
  source 1..735: mol_type = other DNA
ctgtgggttgttcccacccacagggcccattgggcgctagcacactggttttgcggaatctttgtgcgcctgttttataacccttcccccaagtagcaacttagaagtattgcacaatcacggccagtagtgggcgtggcgcaccagccacgtcttggtcaagcacttctgtatccccggactgagtatcaatagactgctcacgcggttgaaggagaaaacgttcgttacccggctaactacttcggaaaacctagtagcaccttgaaagttgcagagtgtttcgctcagcacttcccccgtgtagatcaggtcgatgagccactgtaaaccccacgggcgaccgtgacagtggctgcgttggcggcctgcccatggggcaacccatgggacgctctaatacagacatggtgtgaagagtctactgagctagttagtagtcctccggcccctgaatgcggctaatcctaactgcggagcacacaccctcaacccagggggcggtgtgtcgtaatgggtaactctgcagcggaaccgactactttgggtgtccgtgtttccttttattccttactggctgcttatggtgacaattgaaaagttgttaccatatagctattggattggccatccggtgtctaacagagccattgtttacttatttattggatacgtccctcttaatcttaaggctattcaaactcttaattatatattgctccttaactataagaa

SEQ ID NO: 18403 - DNA, 742 bp, synthetic construct
  source 1..742: mol_type = other DNA
ttaaaacagcctgtgggttgcacccactcacagggcccactgggcgcaagcactctggtatcttggtacctttgtgcgcctgttttatacccctcccctattgtaatttagaagcagcaaaccacgatcaatagcaggcataacgctccagttatgtcttgatcaagcacttctgtttccccggactgagtatcaatagactgctcgcgcggttgaaggagaaaacgttcgttatccggctagctacttcggaaaacctagtaacaccatgaaagttgcggagagcttcgttcagcactcccccagtgtagatcaggtcgatgagtcaccgcattccccacgggcgaccgtggcggtggctgcgttggcggcctgcccatggggtaacccatggggcgctctaatacagacatggtgtgaagagtctactgagctagttagtagtcctccggcccctgaatgcggctaatcccaactgcggagcacacgcccacaagccagcgggtagtgtgtcgtaacgggtaactctgcagcggaaccgactactttgggtgaccgtgtttccttttatctttatattggctgcttatggtgacaattaaggaattgttaccatatagctattggattggccatccggtgtgcaacagagcaatcatttacctatttattggttttgtaccattaactttgaattctgtgaccacccttaattatattttgacccttaaccaggctaaac

SEQ ID NO: 18404 - DNA, 736 bp, synthetic construct
  source 1..736: mol_type = other DNA
cctgtgggttgttcccacccacagggcccattgggcgctagcacactgattttgcggaatctttgtgcgcctgttttataacccttcccccaagcagtaacttagaagcattgcacaatcgcgaccagtagtgggcgtgacgcgccagtcacgtcttggtcaagcacttctgtatccccggactgagtatcaatagactgctcacgcggttgaaggagaaaacgttcgttatccggctaactacttcgggaaacctagtagcaccttgaaagttgcagagtgtttcgctcagcacttcccccgtgtagatcaggccgatgagccactgtaaaccccacgggcgaccgtgacagtggctgcgttggcggcctgcccatggggaaacccatgggacgctctaatacagacatggtgtgaagagtctactgagctagttagtagtcctccggcccctgaatgcggctaatcctaactgcggatcacacaccctcaacccagggggcagtgtgtcgtaatgggtaactctgcagcggaaccgactactttgggtgaccgtgtttccttttattccttattggctgcttatggtgacaattgaaaagttgttaccatatagctattggattggccatccggtgtctaacagagctattgtttacttatttattggatacgttcctcttaatttcaagactatccaaactcttgattatatattgctccttaatcacaagaa

SEQ ID NO: 18405 - DNA, 728 bp, synthetic construct
  source 1..728: mol_type = other DNA
gttgtccccacccacagggcccactgggcgctagcacactggttctgcgggacctttgtgcgcctgttttataacccttccctaagcagtaacttagaagctttgtacaatcatggccaatagtgggcgtggcgcgccagtcacgtcttggtcaagcacttctgtatccccggactgagtatcaatagactgctcacgtggttgaaggagaaaacgtccgttacccggctaactacttcgagaaacctagtagcaccatgaaagttgcggagtgtttcgttcagcacttcccccgtgtagatcaggtcgatgagtcactgtaaaccccacgggcgaccgtgacagtggctgcgttggcggcctgcccatggggtaacccatgggacgctctaatacagacatggtgcgaagagtctattgagctagttagcagtcctccggcccctgaatgcggctaatcctaactgcggagcgcgcaccctcaacccagggggcggcgcgtcgtaatgggcaactctgcagcggaaccgactactttgggtgtccgtgtttccttttattctttattggctgcttatggtgacaattgaaaagttgttaccatatagctattggattggccatccggtgtctaacagagctattgtttacctattcattggattcgtccctcttaatctcaaggtcattcaaactctcgattgcatattgctccttaactgtaagaa

SEQ ID NO: 18406 - DNA, 745 bp, synthetic construct
  source 1..745: mol_type = other DNA
ttaaaacagcctgtgggttgttcccacccacagggcccactgggcgctagcacactgattctgcgggatctttgtgcgcctgttttataaccccttccctaagcagcaacttagaagcttcacacaatcacgaccagtagcgggcgtggcgcgccagtcacgtcttggtcaagcacttctgttcccccggactgagtatcaatagactgctcacgcggttgaaggagaaaacgttcgttatccggctaactacttcgagaaacctagtagcaccgtgaaagttgcggattgtttcgctcagcacttcccccgtgtagatcaggtcgatgagtcactgtaaaccccacgggcgaccgtgacagtggctgcgttggcggcctgcccatggggtaacccatgggacgctctaatacagacacggtgtgaagagtctattgagctagttagtagtcctccggcccctgaatgcggctaatcccaactgcggagcacgcaccctcaacccagggggcggcgtgtcgtaatgggtaactctgcagcggaaccgactactttgggtgtccgtgtttccttttattccttattggctgcttatggtgacaattgaaaagttgttgccatatagctattggattggccatccggtgaccaacagagccattgtttacctgtttattggatacgtccctcttaatcccaaggccattcaaactcttgattatatattgctccttaactgtaagaa

SEQ ID NO: 18407 - DNA, 745 bp, synthetic construct
  source 1..745: mol_type = other DNA
ttaaaacagcctgtgggttgttcccacccacagggcccactgggcgttagcacactgattctgcgggacctttgtgcgcctgttttataaccccttccctaagcagcaacttagaagcttcacacgatcacgaccaatagtgggcgtggcgcgccagtcacgtcttggtcaagcacttctgttcccccggactgagtatcaatagactgctcacgcggttgaaggagaaaacgttcgttatccggctaactacttcgagaaacctagtagcaccgtgaaagttgcggagtgtttcgctcagcacttcccccgtgtagatcaggtcgatgagtcactgtaaaccccacgggcgaccgtgacagtggctgcgttggcggcctgcccatggggtaacccatgggacgctctaatacagacatggtgtgaagagtctattgagctagttggtagtcctccggcccctgaatgcggctaatcctaactgcggagcacgcaccctcaacccagggggcggcgtgtcgtaatgggtaactctgcagcggaaccgactactttgggtgtccgtgtttccttttattccttattggctgcttatggtgacaattgaaaagttgttaccatatagctattggattggccatccggtgtccaacagagctattgtctacctatttattggatacgtccctcttaatctcaaggccattcaaactcttgattatatattgttccttaactgcaagaa

SEQ ID NO: 18408 - DNA, 735 bp, synthetic construct
  source 1..735: mol_type = other DNA
ctgtgggttgttcccacccacagggcccactgggcgctagcacactgattctgcgggatctttgtgcgcctgttttataaccccttccctaagcagcaacttagaagcttcacactatcacgaccagtagtgggcgtggcgcgccagtcacgtcttggtcaagcacttctgtttccccggactgagtatcaatagactgctcacgcggttgaaggagaaaacgttcgttatccggctaactacttcgagaaacctagtagcaccgtgaaagttgcggagcgtttcgctcagcacttcccccgtgtagatcaggtcgatgagtcactgtaaaccccacgggcgaccgtgacagtggctgcgttggcggcctgcccatggggcaacccatgggacgctctaatacagacacggtgtgaagagtctattgagctagttagtagtcctccggcccctgaatgcggctaatcctaactgcggagcgcgcaccctcaacccagggggcggcgcgtcgtaatgggtaactctgcagcggaaccgactactttgggtgtccgtgtttccttttattccttattggctgcttatggtgacaattgaaaagttgttaccatatagctattggattggccatccggtgaccaacagagctattgtctacctgtttattggatacgtccctcttaatctcaaggtcattcaaactcttgattatatattactccttaattgtgagaa

SEQ ID NO: 18409 - DNA, 746 bp, synthetic construct
  source 1..746: mol_type = other DNA
ttaaaacagcctgtgggttgtacccacccacagggcccactgggcgttagcacactgattctacggaatctttgtgcgcctgttttatatccctcccctaaaatagtaacttagaagttgaacatttacacgaccaatagtgggcgtggcgcaccagccacgtcttggtcaagcactcctgtttccccggactgagtatcaataggctgctcacgtggctgaaggagaaagtgttcgttatccggctaactacttcgggaaacccagtaacaccatgaaagttgcagagtgtttcgctcagcacttcccccgtgtagatcaggctgatgagtcactgcgaaccccacgggcgaccgtggcagtggctgcgttggcggcctgcctatggggtaacccataggacgctctaatacagacatggtgcgaagagtctactgagctagttggtattcctccggcccctgaatgcggctaatcctaactgcggagcacataccctcaatccagagggtggtgtgtcgtaacgggcaactctgcagcggaaccgactactttgggtgtccgtgtttccttttactcttatactggctgcttatggtgacaattgaaaggttgttaccatatagctattggattggccatccggtgactaacagagctttgatttatcaattcattgggtttgtgcccttatcatctacagtttattcaaccttggtgtacttgttatatcttaatagtaagaa

SEQ ID NO: 18410 - DNA, 746 bp, synthetic construct
  source 1..746: mol_type = other DNA
ttaaaacagcctgtgggttgtacccacccacagggcccactgggcgttagcacactgattctacggaatctttgtgcgcctgttttatatccctcccctaaaatagtaacttagaagttgaacatctacacgaccaatagtgggcgtggcgcaccagccacgtcttggtcaagcactcctgtttccccggactgagtatcaataggctgctcacgtggctgaaggagaaagtgttcgttatccggctaactacttcgggaaacccagtaacaccatgaaagttgcagagtgtttcgctcagcacttcccccgtgtagatcaggctgatgagtcactgcgaaccccacgggcgaccgtggcagtggctgcgttggcggcctgcctatggggcaacccataggacgctctaatacagacatggtgcgaagagtctactgagctagttggtattcctccggcccctgaatgcggctaatcctaactgcggagcacatgccctcaatccagagggtggtgtgtcgtaacgggcaactctgcagcggaaccgactactttgggtgtccgtgtttccttttactcttatactggctgcttatggtgacaattgaaaggttgttaccatatagctattggattggccatccggtgactaacagagctttgatttatcaattcattgggtttgtgcccttatcatctacagtttattcaaccttggtgtacttgttatatcttaatagtaagaa

SEQ ID NO: 18411 - DNA, 746 bp, synthetic construct
  source 1..746: mol_type = other DNA
ttaaaacagcctgtgggttgtacccacccacagggcccactgggcgttagcacactgattctacggaacctttgtgcgcctgttttatatccctcccctaaaatagtaacttagaagttgaacatttacacgaccaatagtgggcgtggcgcaccagccacgtcttggtcaagcactcctgtttccccggactgagtatcaataggctgctcacgtggctgaaggagaaagtgttcgttatccggctaactacttcgggaaacccagtaacaccatgaaagttgcagagtgtttcgctcagcacttcccccgtgtagatcaggctgatgagtcactgcgaaccccacgggcgatcgtggcagtggctgcgttggcggcctgcctatggggcaacccataggacgctctaatacagacatggtgcgaagagtctactgagctagttggtattcctccggcccctgaatgcggctaatcctaactgcggagcacatgccctcaatccagagggtggtgtgtcgtaacgggcaactctgcagcggaaccgactactttgggtgtccgtgtttccttttactcttatactggctgcttatggtgacaattgaaaggttgttaccatatagctattggattggccatccggtgactaacagagctttgatttatcaattcattgggtttgtgcccttatcatctacagtttactcaaccttggtgtacttgttatatcttaatagtaagaa

SEQ ID NO: 18412 - DNA, 746 bp, synthetic construct
  source 1..746: mol_type = other DNA
ttaaaacagcctgtgggttgtacccacccacagggcccactgggcgttagcacactgattctacggaacctttgtgcgcctgttttatatccctcccctaaaatagtaacttagaagttgaacatttacacgaccaatagtgggcgtggcgcaccagccacgtcttggtcaagcactcctgtttccccggactgagtatcaataggctgctcacgtggctgaaggagaaagtgttcgttatccggctaactacttcgggaaacccagtaacaccatgaaagttgcagagtgtttcgctcagcacttcccccgtgtagatcaggctgatgagtcactgcgaaccccacgggcgaccgtggcagtggctgcgttggcggcctgcctatggggcaacccataggacgctctaatacagacatggtgcgaagagtctactgagctagttggtattcctccggcccctgaatgcggctaatcctaactgcggagcacatgccctcaatccagagggtggtgtgtcgtaacgggcaactctgcagcggaaccgactactttgggtgtccgtgtttccttttactcttatactggctgcttatggtgacaattgaaaggttgttaccatatagctattggattggccatccggtgactaacagagctttgatttatcaattcattgggtttgtgcccttatcatctacagtttattcaaccttggtgtacttgttatatcttaatagtaagaa

SEQ ID NO: 18413 - DNA, 742 bp, synthetic construct
  source 1..742: mol_type = other DNA
aaacagcctgtgggttgttcccacccacagggcccactgggcgctagcacactgattctgcgggatctttgtgcgcctgttttataaccctccccctaagcagtaacttagaagctttgtacagtcacgactagtagtgggcgtggcgcgccagccacgtcttggtcaagcacttctgtatccccggactgagtatcaatagactgctcacgcggtcgaaggagaaaacgttcgttacccggctaactacttcgagaaacctagtaacaccatgaaagttgcggagtgtttcgctcagcacttcccccgtgtagatcaggtcgatgagtcactgtaaaccccacgggcgaccgtgacagtggctgcgttggcggcctgcccatggggtagcccatgggacgctctaatacggacatggtgtgaagagtctattgagctagttagtagtcctccggcccctgaatgcggctaatcctaactgcggagcgcgcaccctcaacccagggggcggcgcgtcgtaatgggtaactctgcagcggaaccgactactttgggtgtccgtgtttccttttactccttactggctgcttatggtgacaattgaaaagttgttaccatatagctattggattggccatccggtgtctaacagagctattgtttacctatttattggatacgtccctcttaatctcaaagccattcaaactcttgactatatattgctccttaactgtaagaa

SEQ ID NO: 18414 - DNA, 741 bp, synthetic construct
  source 1..741: mol_type = other DNA
aaacagcctgtgggttgctcccacccacagggcccactgggcgctagcacactgattctgcgggatctttgtgcgcctgttttgcaacccttcccctaagcagcaacttagaagctttgtacaatcacgaccaatagtgggcgtggcgcgccagtcacgtcttggtcaagcacttctgtatccccggaccgagtatcaatagactgctcacgcggttgaaggagaaaacgttcgttacccggctaactacttcgagaaacctagtagcaccatgaaagttgcggagtgtttcgctcagcacttccccgtgtagatcaggtcgatgagtcactgtaaaccccacaggcgaccgtgacagtggctgcgttggcggcctgcccatggggtaacccatgggacgctctaatacagacatggtgcgaagagtctattgagctagttagcagtcctccggcccctgaatgcggctaatcctaactgcggagcgcgcaccctcaacccagggggcggcgtgtcgtaatgggtaactctgcagcggaaccgactactttgggtgtccgtgtttccttttattctttattggctgcttatggtgacaattgaaaagttgttaccatatagctattggattggccatccggtgtctaacagaactattgtttacctatttattggatacgtccctcttaatctcaaggccattcaaactcttgactatatattgctcctcaactgtaagaa

SEQ ID NO: 18415 - DNA, 747 bp, synthetic construct
  source 1..747: mol_type = other DNA
ttaaaacagcctgtgggttgttcccacccacagggcccactgggcgctagcacactgattctgcgggatctttgtgcgcctgttttataaccctttccctaagcagcaacttagaagctttgtacaatcacgaccaatagtgggcgtgacgcgccagtcacgtcttggtcaagcacttctgtatccccggactgagtaccaatagactgcccacgcggttgaaggggaaaacgttcgttacccggctaactacttcgagaaacctagtagtaccatgaaagttgcggagtgtttcgctcagcacttccccagtgtagatcaggtcgatgagtcactgtaaaccccacgggcgaccgtgacagtggctgcgttggcggcctgcccatggggtaacccatgggacgctctaatacagacatggtgcgaagagtctattgagctagttagcagtcctccggcccctgaatgcggctaatcctaactgcggagcgcgcaccctcaacccagggggcggcgtgtcgtaatgggtaactctgcagcggaaccgactactttgggtgtccgcgtttccttttttattctttattggctgcttatggtgacaattgaaaagttgttaccatatagctattggattggccatccggtgtctaacagagctattgtttacctatttattgggtacgtccctcttaatctcaaggccattcaaactcttgattatatattgctccttaactgtaggaa

SEQ ID NO: 18416 - DNA, 742 bp, synthetic construct
  source 1..742: mol_type = other DNA
aaacagcctgtgggttgttcccacccacagggcccactgggcgctagcacactgattttgcgggatctttgtgcgcctgttttataaccctcccccttaagcagcaacttagaagctttgtacgaccacgaccagtagtgtgcgtggcgcgccagccacgtcttggtcaagcacttctgtatccccggactgagtatcaatagactgcttacgcggtcgaaggagaaaacgttcgttacccggctaactacttcgagaaacctagtagcaccatgaaagttgcagagtgtttcgctcagcacttccccgtgtagatcaggtcgatgagtcactgtaaaccccacgggcgaccgtgacagtggctgcgttggcggcctgcccatggggtaacccatgggacgctctaatacagacatggtgtgaagagtctattgagctagttagtagtcctccggcccctggatacggctaatcctaactgcggagcgcgcaccctcaacccagggggcggcgcgtcgtaatgggcaactctgcagcggaaccgactactttgggtgtccgtgtttccttttactccttattggctgcttatggtgacaattgaaaagttgttaccatatagctattggattggccatccggtgtctaacagagctattgtttacctgtttattggatacgtctcccttaatcccaaagccattcaaactcttgactatatattgctccttaactgtaagaa

SEQ ID NO: 18417 - DNA, 743 bp, synthetic construct
  source 1..743: mol_type = other DNA
aaacagcctgtgggttgttcccacccacagggcccactgggcgctagcacactgattctgcgggatctttgtgcgcctgttttataacccttcccctaagcagcaacttagaagctttgtacaatcacgaccaacagtgggcgtggcgcgccagtcacgtcttggtcaagcacttctgtatccccggactgagtatcaatagactgctcacgcggttgaaggagaaaacgttcgttacccggctaactacttcgagaaacttagtagcaccatgaaagttgcggagtgtttcgctcagcacttcccccgtgtagatcaggtcgatgagtcactgtaaaccccacgggcgaccgtgacagtggctgcgttggcggcctgcccatggggtaacccatgggacgctctaatacagacatggtgcgaagagtctattgagctagttagcagccctccggcccctgaatgcggctaatcctaactgcggagcgcgcaccctcaacccaggggggcggcgtgtcgtgatgggtaactctgcagcggaaccgactactttgggtgtccgtgtttccttttattctttattggctgcttatggtgacaattgaagagttgttaccatatagctattggattggccatccggtgtctaacagagctattgtttacctatttattggatacgtccctcttaatctcaaggccattcaaactcttgattatatattgctccttaactgtaagaa

SEQ ID NO: 18418 - DNA, 742 bp, synthetic construct
  source 1..742: mol_type = other DNA
aaacagcctgtgggttgttcccacccacagggcccactgggcgctagcacactgattctgcgggatctttgtgcgcctgttttataaccctcccccctaagcagtaacttagaagctttgcacaatcacgaccagtagtgggcgtggcgcgccagccacgtcttggtcaagcacttctgtatccccggactgagtatcaatagactgctcacgcggtcgaaggagaaaacgttcgttacccggctaaccacttcgagaaacctagtagcaccatgaaagttgcggagtgtttcgctcagcacttcccccgtgtagatcaggtcgatgagtcactgtaaaccccacgggcgaccgtgacagtggctgcgttggcggcctgcccatggggtaacccatgggacgctctaatacagacatggtgtgaagagtctattgagctggttagtagtcctccggcccctgaatgcggctaatcctaactgcagagcgcgcaccctcaacccagggggcggcgtgtcgtaacgggtaactctgcagcggaaccgactactttgggtgtccgtgtttccttttactccttattggctgcttatggtgacaattgaaaagttgttaccatatagctattggattggccatccggtgtctaacagagctattgtttactattcattggatacgtccctcttagtctcaaagccattcaaactcttgactatatattgctccttaactgtaagaa

SEQ ID NO: 18419 - DNA, 745 bp, synthetic construct
  source 1..745: mol_type = other DNA
ttaaaacagcctgtgggttgttcccacctacagggcccactgggcgctagcacactgattctgcgagatctttgtgcgcctgttttataacccttcccctaagcagcaacttagaagctttgtacaatcacgaccaatagtgggcgtggcgcgccagtcacgtcttggtcaagcacttctgtatccccggactgagtatcaatagactgctcacgcggttgaaggagaaaacgttcgttacccggctaactacttcgagaaacctagtagcaccatgaaagttgcggagtgtttcgctcagcacttcccccgtgtagatcaggtcgatgagtcactgtgaaccccacgggcgaccgtgacagtggctgcgttggcggcctgcccatggggtaacccatgggacgctctaatacagacatggtgcgaagagtctattgagctagttagcagtcctccggcccctgaatgcggctaatcctaactgcggagcgcgcaccctcaacccagggggcggcgtgtcgtaatgggtaactctgcagcggaaccgactactttgggtgtccgtgtttccttttattctttattagctgcttatggtgacaattgaaaagttgttaccatatagctattggattggccatccggtgtctaacagagctattgtttacctatttattggatacgtccctcttaatctcaaagccattcaaactcttgattatatattgctccttaactgtaggaa

SEQ ID NO: 18420 - DNA, 745 bp, synthetic construct
  source 1..745: mol_type = other DNA
aaacagcctgtgggttgttcccacccacagggcccactgggcgctagcacactgattctgcgggatctttgtgcgcctgttttataaccctccccctaagcagcaacttagaagctttgcacaatcacgaccagtagtgggcgtggcgcgccagccacgtcttggtcaagcacttctgtatccccggactgagtatcaatagactgcttacgcggtcgaaggagaaaacgttcgttacccggctaactacttcgagaaacctagtagcaccatgaaagttgcggagtgtttcgctcagcacttcccccgtgtagatcaggtcgatgagtcactgtaaaccccacgggcgaccgtgacagtggctgcgttggcggcctgcccatggggtaacccatgggacgctctaatacagacatggtgtgaagagtctattgagctagttagtagtcctccggcccctgaatgcggctaatcctaactgcggagcgcgcaccctcaacccagggggcggcgcgtcgtgatgggtaactctgcagcggaaccgactactttgggtgtccgtgtttccttttttccctccttattggctgcttatggtgacaattgaaaagttgttaccatatagctattggattggccatccggtgtctaacagagctattgtttacctattcattggatacgtccctcttaatctcaaagccattcaaactcttgactatatattgctccttaactgtaagaa

SEQ ID NO: 18421 - DNA, 742 bp, synthetic construct
  source 1..742: mol_type = other DNA
aaacagcctgtgggttgttcccacccacagggcccactgggcgctagcgcactgatcctgcgggacctttgtgcgcctgttttataacccttcccctaagcagtaacttagaagctttacactatcatgaccaatagtaggcgtggcgcaccagtcacgtctcggtcaagcacttctgtttccccggactgagtatcaatagactgctcacgcggttgaaggagaaaacgttcgttatccgactaactacttcgagaaacctagtagcatcgtgaaagttgcggagtgtttcgctcagcacttcccccgtgtagatcaggtcgatgagtcactgtaaaccccacgggtgaccgtgacagtggctgcgttggcggcctgcccatgggataacccatgggacgctctaaaacagacacggtgtgaagagtctattgagctagttagtagtcctccggcccctgaatgcggctaatcctaactgcggagcgcgtaccctcactccagggggcagcgcgtcgtaatgggtaactctgcagcggaaccgactactttgggtgtccgtgtttctttttattccttattggctgcttatggcgacaattgaaaggttgttaccatatagctattggattggccatccggtaactaacagagctattgtttacctgtttattggatacgtccctctcaatctcaaggccattcaaactcttgattatatattacttctcaactgtaagaa

SEQ ID NO: 18422 - DNA, 743 bp, synthetic construct
  source 1..743: mol_type = other DNA
aaacagcctgtgggttgttcccacccacagggcccactgggcgctagcacactgattctgcgggatctttgtgcgcctgttttataacccttccccctaagcagcaatttagaagctttgtacaatcacgaccaatagtgggcgtggcgcgccagtcacgttttggtcaagcacttctgtatccccggaccgagtatcaatagactgctcacgcggttgaaggagaaaacgttcgttacccggctaactacttcgagaaacctagtagcaccatgaaagttgcggagtgtttcgctcagcacttcccccgtgtagatcaggtcgatgagtcactgtaaaccccacgggcgaccgtgacagtggctgcgttggcggcctgcccatggggtaacccatgggacgctctaatacagacatggtgcgaagagtctattgagctagttagcagtcctccggcccctgaatgcggctaatcctaactgcggagcacgcaccctcaagccagggggcggcgtgtcgtaatgggtaactctgcagcggaaccgactactttgggtgtccgtgtttccttttattctttattggctgcttatggtgacaattgaaaagttgttaccatatagctattggattggccatccggtgtccaacagagctattgtttacctatttattggatacgtccctcttaatctcaaggccattcaaactcttgattatatactgctccttaactgtaagag

SEQ ID NO: 18423 - DNA, 703 bp, synthetic construct
  source 1..703: mol_type = other DNA
agcactcttattctacggaatatttgtgcgcctgttttatagccctcccccattaagtaacttagaagtgatgtgcagcacagatcaatagcaggcatagcgcaccagctgtgtcttgatcaagcacttctgtttccccggactgagtatcaataaactgctcacgcggttgaaggagaaaacgttcgttacccggctaaccacttcgagaaacttagtaacaccattgaagctgtagagtgtttcgctcagcacttccccagtgtagatcaggctgatgagtcactgcgaccctcacgggcgaccgtggcagtggctgcgctggcggcctgcctatggggcaacccataggacgctctaaagtggacatggtgtgaagagtctattgagctggttagtagtcctccggcccctgaatgcggctaatcctaactgcggagcgcatgccctcaaaccagggggtggtgcgtcgtaacgggtaactctgcagcggaaccgactactttgggtgtccgtgtttccttttattctcacattggctgcttatggtgacaattgaagaattgttaccatatagctattggattggccatccggtgtgtaacagagcgattatcttctcttttattgcctttgtcccattgaccccaactgcgttaaacactctgcaatatatactctatcttaactctaggaagcgaac

SEQ ID NO: 18424 - DNA, 746 bp, synthetic construct; identical to SEQ ID NO: 1128
  source 1..746: mol_type = other DNA

SEQ ID NO: 18425 - DNA, 746 bp, synthetic construct
  source 1..746: mol_type = other DNA
ttaaaacagctctggggttgtacccacccacagggcccactgggcgttagcacactgattctacggaatctttgtgcgcctgttttatatcccttccctaaaatagtaacttagaagttgaacatttacacgaccaatagcgggcgtggcgcaccagccacgtcttggtcaagcactcctgtttccccggactgagtatcaataggctgctcacgtggctgaaggagaaagtgttcgttatccggctaactacttcgggaaacccagtaacaccatgaaggttgcagagtgtttcgctcagcacttcccccgtgtagatcaggctgatgagtcactgcgaaccccacgggcgaccgtggcagtggctgcgttggcggcctgcctatggggcaacccataggacgctctaatacagacatggtgcgaagagtctactgagctagttggtattcctccggcccctgaatgcggctaatcctaactgcggagcacatgccctcaatccagagggtggtgtgtcgtaacgggcaactctgcagcggaaccgactactttgggtgtccgtgtttccttttattcttatactggctgcttatggtgacaattgaaaggttgttaccatatagctattggattggccatccggtgactaacagagctttgatttatcaattcattgggttcgtgcccctatcatctacagtttattcaactttggtgtacttattatatcttaatagtaagaa

SEQ ID NO: 18426 - DNA, 744 bp, synthetic construct
  source 1..744: mol_type = other DNA
ttaaaacagcctgtgggttgtccccacccacagggcccactgggcgctagcacactggttctgcgggacctttgtgcgcctgttttataacccttccctaagcagtaacttagaagctttgcacaattatggccaatagtgggcgtggcgcgccagtcacgtcttggtcaagcacttctgtgtccccggactgagtatcaatagactgctcacgcggttgaaggagaaaacgttcgttacccggctaactacttcgagaaacctagtagcaccatgaaagttgcggagtgtttcgctcagcacttcccccgtgtagatcaggtcgatgagtcactgtaaaccccacgggcgaccgtgacagtggctgcgttggcggcctgcccatggggtaacccatgggacgctctaatacagacatggtgcgaagagtctattgagctagttagcagtcctccggcccctgaatgcggctaatcctaactgcggagcgcgcactctcaacccagggggcggcgcgtcgtaatgggcaactctgcagcggaaccgactactttgggtgtccgtgtttccttttattctttattggctgcttatggtgacaattgagaagttgttgccatatagctattggattggccatccggtgtctaacagagctattgtttacctattcattggattcgtccctctcaatctcaaggtcattcaaactctcaattgcatattgctccttaactataagaa

SEQ ID NO: 18427 - DNA, 746 bp, synthetic construct
  source 1..746: mol_type = other DNA
ttaaaacagcctgtgggttgtacccacccacagggcccactgggcgttagcacactgattctacggaatctttgtgcgcctgttttatatccctcccctaaaatggtaacttagaagttgaacatttacacgaccaatagtgggcgcggcgcaccagccacgtcttggtcaagcactcctgtttccccggactgagtatcaataggctgctcacgtggctgaaggagaaagtgttcgttatccggctaactacttcgggaaacccagtaacaccatgaaagttgcagagtgtttcgctcagcacttcccccgtgtagatcaggctgatgagtcactgcgaaccccacgggcgaccgtggcagtggctgcgttggcggcctgcctatggggcaacccataggacgctctaatacagacatggtgcgaagagtctactgagctagttagtattcctccggcccctgaatgcggctaatcctaactgcggagcacatgccctcaatccagagggtggtgtgtcgtaacgggcaactctgcagcggaaccgactactttgggtgtccgtgtttccttttattcctgtactggctgcttatggtgacaattgaaaggttgttaccatatagctattggattggccatccggtgactaacagagctttggtttatcaattcattgggttcgtacccttatcatctacagtttattcaactttggtttacttgttatatcttaatagcaagaa

SEQ ID NO: 18428 - DNA, 746 bp, synthetic construct
  source 1..746: mol_type = other DNA
ttaaaacagcctgtgggttgtacccacccacagggcccactgggcgctagcacactgattctacggaatctttgtgcgcctgttttatatccctcccctaaaatagtaacttagaagttgaacatttacgcgaccaatagtgggcgtggcgcaccagccacgtcttggtcaagcactcctgtttccccggactgagtatcaataggctgctcacgtggctgaaggagaaagtgttcgttatccggctaactactacgggaaacccagtaacaccatgaaagttgcagagtgtttcgctcagcacttcccccgtgtagatcaggctgatgagtcactgcgaaccccacgggcgaccgtggcagtggctgcgttggcggcctgcctatggggcaacccataggacgctctaatacagacatggtgcgaagagtctactgtgctagttagtattcctccggcccctgaatgcggctaatcctaactgcggagcacatgccctcaatccagagggtggtgtgtcgtaacgggcaactctgcagcggaaccgactactttgggtgtccgtgtttccttttattcctgtactggctgcttatggtgacaattgaaaggttgttaccatatagctattggattggccatccggtgactaacagagctttggtttatcaattcattgggttcgtacccttatcatctacagtttattcaactttggtttacttgttatatcttaatagtaagaa

SEQ ID NO: 18429 - DNA, 746 bp, synthetic construct
  source 1..746: mol_type = other DNA
ttaaaacagcctgtgggttgtacccacccacagggcccactgggcgttagcacactgattctacggaatctttgtgcgcctgttttatatccctcccctaaaatagtaacttagaagttgaacatttacacgaccaatagtgggcgtggcgcaccagccacgtcttggtcaagtactcctgtttccccggactgagtatcaataggctgctcacgtggctgaaggagaaagtgttcgttatccggctaactacttcgggaaacccagtaacaccatgaaagttgcagagtgtttcgctcagcacttcccccgtgtagatcaggctgatgagtcactgcgaaccccacgggcgaccgtggcagtggctgcgttggcggcctgcctatggggtaacccataggacgctctaatacagacatggtgcgaagagtctactgagctagttggtattcctccggcccctgaatgcggctaatcctaactgcggagcacatgccctcaatccagagggtggtgtgtcgtaacgggtaactctgcagcggaaccgactactttgggtgtccgtgtttccttttattcttgtactggctgcttatggtgacaattgaaaggttgttaccatatagctattggattggccatccggtgactaacagagctttgatctatcaattcattgggttcgtgcccttatcatctacagtttattcaactttggtgtacttgttatatcttaatagtaagaa

SEQ ID NO: 18430 - DNA, 746 bp, synthetic construct
  source 1..746: mol_type = other DNA
ttaaaacagcctgtgggttgcacccactcacagggcccactgggcgttagcacactgattctacggaatctttgtgcgcctgttttatatccctcccctaagatagtaacttagaagttgagcatttacacgaccaatagtgggcgtggcgcaccagccacgtcttggtcaagcactcctgtttccccggactgagtatcaataagctgctcacgcggctgaaggagaaagtgttcgttatccggctaactacttcgggaaacccagtaacaccatgaaagttgcagagtgtttcgctcagcacttcccccgtgtagatcaggctgatgagtcactgcgaaccccacgggcgaccgtggcagtggctgcgttggcggcctgcctatggggcaacccataggacgctctaatacagacatggtgcgaagagtctactgagctagttggtattcctccggcccctgaatgcggctaatcctaactgcggagcacatgccctcaatccagagggtggtgtgtcgtaacgggcaactctgcagcggaaccgactactttgggtgtccgtgtttccttttactcttatactggctgcttatggtgacgatcgaaaggttgttgccatatagctattggattggccatccggtgactaacagagctttgatttatcaattcattgggtttgtgcccttatcatctgcagtttattcaactttggtgtacttgttatatcttaatagtaggaa

SEQ ID NO: 18431 - DNA, 737 bp, synthetic construct
  source 1..737: mol_type = other DNA
acagcctgtgggttgtacccactcacagggcccactgggcgccagcactctggtactgcggtacccttgtgcgcctgttttatcaccccaccccatctgaaacgtagaagcaatgcacaactgaccaatagtgggtgtggcgcaccagccacatcttggtcaagcacttctgtttccccgggtttagtatcaataagctgctcacgcggctgaaggagaaaacacccgttatccggccaactacttcgagaaacctagtaccgctatgaacgttgcaaggcgtttcgctcaacacttcccccgtgtagatcaggctgatgagtcaccgcatccctcacgggcgaccgtggcggtggctgcgctggcggcctgcctatgggcttgcccataggacgccttaatactgacatggtgcgaagagtctattgagctagttggtagtcctccggcccctgaatgcggctaatcctaactgcggagcacacactcacaaaccagtgagcggtgtgtcgtaacgggcaactctgcagcggaaccgactactttgggtgtccgtgtttccttttattcttatactggctgcttatggtgacaattaaagaattgttaccatatagctattggattggccatccggtgtctaacagaggcattatatacttgttcgttggattcacctcgttgtcatacaaatcccttaacactttgtgctttatcttgagtttgaattcaaaaag

SEQ ID NO: 18432 - DNA, 729 bp, synthetic construct
  source 1..729: mol_type = other DNA
ggttgtccccacccacagggcccactgggcgctagcacactggttttgcgggacctttgtgcgcctgttttataacccttccctaagcagtaacttagaagctttgtacaatcatggccaatagtgggcgtggcgcgccagtcacgtcttggtcaagcacttctgtatccccggactgagtatcaatagactgctcacgtggttgaaggagaaaacgttcgttacccggctaactacttcgagaaacctagtagcaccatgaaagttgcggagtgtttcgctcagcacttcccccgtgtagatcaggttgatgagtcactgtaaaccccacgggcgaccgtgacagtggctgcgttggcggcctgcccatggggtaacccatgggacgctctaatacagacatggtgcgaagagtctattgagctagttagcagtcctccggcccctgaatgcggctaatcctaactgcggagcgcgcaccctcaacccagggggcggcgcgtcgtaatgggcaactctgcagcggaaccgactactttgggtgtccgtgtttccttttattctttattggctgcttatggtgacaattgaaaagttgttaccatatagctattggattggccatccggtgtctaacagagctattgtttacctattcattggattcgtccctcttaatctcaaggtcattcaaactctcgattgcatattgctccttaactgtaagaa

SEQ ID NO: 18433 - DNA, 735 bp, synthetic construct
  source 1..735: mol_type = other DNA
ctgtgggttgttcccacccacagggcccactgggcgctagcacactgattctgcgggatctttgtgcgcctgttttataaccccttccctaagcagcaacttagaagcttcacactatcacgaccagcagtgggcgtggcgcgccagtcacgtcttggtcaagcacttctgtttccccggactgagtatcaatagactgctcacgcggttgaaggagaaaacgttcgttatccggctaactacttcgagaagcctagtagcaccgtgaaagttgcagagtgtttcgctcagcacttcccccgtgtagatcaggtcgatgagtcactgtaaaccccacgggcgaccgtgacagtggctgcgttggcggcctgcccatggggtaacccatgggacgctctaatacagacacggtgtgaagagtctattgagctagttagtagtcctccggcccctgaatgcggctaatcctaactgcggagcgcgtaccctcaacccagggggcggcgcgtcgtaatgggtaactctgcagcggaaccgactactttgggtgtccgtgtttccttttattccttattggctgcttatggtgacaattgaaaagttgttaccatatagctattggattggccatccggtgaccaacagagctattgtttacctgtttgttggatacgtccctcttaatctcaaggccattcaaactcttgattatatattgctccttaactacaagaa

SEQ ID NO: 18434 - DNA, 747 bp, synthetic construct; identical to SEQ ID NO: 1152
  source 1..747: mol_type = other DNA

SEQ ID NO: 18435 - DNA, 714 bp, synthetic construct
  source 1..714: mol_type = other DNA
acagggcccactgggcgctagcactccgattctgcggaatctttgtgcgcctgttttataacctccccgaatctgtaacttagaagtcatgtacgttactgatcaacagcaggcgtggcacaccagccatgtcttgatcaagcacttctgtacccccggactgagtatcaatagactgcttacgtggtcgaaggagaaaacgttcgttatccggctaactacttcgagaaacctagtagcaccactgaaactgcggagtgtttcgctcagcacttcccccgtgtagatcaggtcgatgagtcactgcttaccccacgggtgaccgtggcagtggctgcgttggcggcctgcctatggggcaacccataggacgctctaaagtggacatggtgcgaagagtctattgagctagttggtagtcctccggcccctgaatgcggctaatcctaactgcggagcgcatgccctcaaaccagagggtggtgcgtcgtaacgggtaactctgcagcggaaccgactactttgggtgtccgtgtttcttttattctcataatggctgcttatggtgacaattgaggaattgttaccatatagctattggattggccatccggtgtgcaacagagctattatctacttgtttgttggatacattccactaacacctaaatcctttaatacactgcactatattctgacgctgaacgcaagaga

SEQ ID NO: 18436 - DNA, 1000 bp, synthetic construct; identical to SEQ ID NO: 1483
  source 1..1000: mol_type = other DNA

SEQ ID NO: 18437 - DNA, 744 bp, synthetic construct
  source 1..744: mol_type = other DNA
ttaaaacagcctgtgggttgttcccacccacagggcccactgggcgctagcacactgattctgcgggatctttgtgcgcctgttttataacccttccctaaacagcaacttagaagttttgcacatccacgaccagtagtaagcgtgacgcgccagtcacgtcttggtcaagcacttctgtatccccggactgagtatcaatagactgctcacgcggttgaaggagaaaacgttcgttatccggctaactacttcgagaaacctagtaacaccgtgaaagttgcggagtgtttcgctcagcacttcccccgtgtagatcaggccgatgagtcactgtaaaccccacgggcgaccgtgacagtggctgcgttggcggcctgcccatggggcaactcatgggacgctctgatacagacatggtgtgaagagtctattgagctagttagtagtcctccggcccctgaatgcggctaatcctaactgcggagcacgcaccctcaacccagggggcggcgtgtcgtaatgggtaactctgcagcggaaccgactactttgggtgtccgtgtttccttttattccttattggctgcttatggtgacaattgaagagttgttgccatatagctattggattggccatccggtatctaatagagctattgtttacctgttcattggatacgtccctcttagtcttaagatcattcaaactcttgattacatattactccttaactataagaa

SEQ ID NO: 18438 - DNA, 741 bp, synthetic construct
  source 1..741: mol_type = other DNA
ttaaaacagcctgtgggttgcacccactcacagggcctactgggcgcaagcactctggtacttcggtacctttgtgcgcctgttttacacccccccccagtgaaacttagaagcagcaaaccacgatcaatagcaggcatagcgctccagttatgtcttgatcaagcactcctgtttccccggactgagtatcaatagactgctcgcgcggttgaaggagaaaacgttcgttacccggccaactacttcggaaaacctagtaacaccatgaaagttgcggagagtttcgttcagcactcccccagtgtagatcaggtcgatgagtcaccgcattccccacgggcgaccgtggcggtggctgcgttggcggcctgcccatggggtaacccatggggcgctctaatacggacatggtgtgaagagtctactgagctagttggtagtcctccggcccctgaatgcggctaatcccaactgcggagcacacgcccacaagccagcgggtagtgtgtcgtaatgggtaactctgcagcggaaccgactactttgggtgtccgtgtttccttttatctttatattggctgcttatggtgacaattagagaattgttaccatatagctattggattggctatccggtgtgcaacagagcaattatttacctgtttattggttttgtaccattaactttgaattctgtgaccacccttaattatatcctgacccttaacacagctaaac

SEQ ID NO: 18439 - DNA, 736 bp, synthetic construct
  source 1..736: mol_type = other DNA
cagcctgtgggttgtacccactcacagggcccactgggcgccagcactctggtactgcggtacctttgtgcgcctgttttatcaccccaccccatttgaaacgtagaagcaatgcacaactgatcaatagcgggtgtggcgcaccagccacatctcgatcaagcacttctgttcccccgggtttagtatcaataagctgctcacgcggctgaaggagaaaacacccgttatccggccgactacttcgagaaacctagtaccgctatgaacgttgcaaggcgtttcgctcagcacttcccccgtgtagatcaggctgatgagtcaccgcttccctcacgggcgaccgtggcggtggctgcgctggcggcctgcctatgggcttgcccataggacgccttaatactgacatggtgcgaagagtctattgagctagttggtagtcctccggcccctgaatgcggctaatcctaactgcggagcacatactcacaaaccagtgagcggtgtgtcgtaacgggcaactctgcagcggaaccgactactttgggtgtccgtgtttccttttattcttatactggctgcttatggtgacaattaaagaattgttaccatatagctattggattggccatccggtgtctaacagagatattatatacttgtttgttggattcacctcgttgtcatacgaatccctcaacactttgtgccttatcttaaatttaaactcaaaaag

SEQ ID NO: 18440 - DNA, 726 bp, synthetic construct
  source 1..726: mol_type = other DNA
tgtccccacccacagggcccactgggcgctagcacactggttctgcgggacctttgtgcgcctgttttataacccttccctaagcagtaacttagaagctttgtacaatcatggccaatagtgggcgcgacgcaccagtcacgtcttggtcaagcacttctgtattcccggactgagtatcaatagactgctcacgcggttgaaggagaaaacgttcgttacccggctaactacttcgagaaacctagtagcaccatgaaagttgcggagtgtttcgctcagcacttcccccgtgtagatcaggtcgatgagtcactgtaaaccccacgggcgaccgtgacagtggctgcgttggcggcctgcccatggggtaacccatgggacgctctaatacagacatggtgcaaagagtctattgagctagttagcagtcctccggcccctgaatgcggctaatcctaactgcggagcgcgcaccctcaacccagggggcggcgcgtcgtaatgggtaactctgcagcggaaccgactactttgggtgtccgtgtttccttttattctttattggctgcttatggtgacaattgaaaagttgttaccatatagctattggattggccatccggtgtctaacagagctattgtttacctattcattggcttcgtccctctcaatctcaaggccattcaaactctcggttacatattgctcctcaattgtaagaa

SEQ ID NO: 18441 - DNA, 726 bp, synthetic construct
  source 1..726: mol_type = other DNA
gttcccacccacagggcccactgggcgctagcacactgattctgcgggatctttgtgcgcctgttttataaccctccccctaagcagcaacttagaagctctgtacaatcacgaccagtagtgggcgtggcgcgccagccatgtcttggtcaagcacttctgtatccccggactgagtatcaatagactgcttacgtggtcgaaggagaaaacgttcgttacccggctaactacttcgagaaacccagtagcactatgaaagttgcggagtgtttcgctcagcacttcccccgtgtagatcaggtcgatgagtcactgtaaaccccacgggcaaccgtgacagtggctgcgttggcggcctgcccatggggtaacccatgggacgctctaatacagacatggtgtgaagagtctattgagctagttagtagtcctccggcccctgaatgcggctaatcctaactgcggagcgcgcaccctcaacccagggggcggcgcgtcgtaatgggtaactctgcagcggaaccgactactttgggtgtccgtgtttccttttattccttattggctgcttatggtgacaattgagaagttgttaccatatagctattggattggccatccggtgtctaacagagccattgtttacctattcattggatacgtccctcttgatctcaaggccattcaaactcttgactatatattgctccttaactgcaagaa

SEQ ID NO: 18442 - DNA, 727 bp, synthetic construct
  source 1..727: mol_type = other DNA
ttgtccccacccacagggcccactgggcgctagcacactggttctgcgggacctttgtgcgcctgttttataacccttccctaagcagtaacttagaagctttgtacaatcatgaccaatagtgggcgtggcgcgccagtcacgtcttggtcaagcacttctgtatccccggactgagtatcaatagactgctcacgtggttgaaggagaaaacgtccgttacccggctaactacttcgagaaacctagtagcaccatgaaagttgcggagtgtttcgttcagcacttcccccgtgtagatcaggtcgatgagtcactgtaaaccccacgggcgaccgtgacagtggctgcgttggcggcctgcccatggggtaacccatgggacgctctaatacagacatggtgcgaagagtctattgagctagttagtggtcctccggcccctgaatgcggctaatcctaactgcggagcgcgcaccctcaacccagggggcggcgcgtcgtaatgggcaactctgcagcggaaccgactactttgggtgtccgtgtttccttttattttttattggctgcttatggtgacaattgaaaagttgttaccatatagctattggattggccatccggtgtctaacagagctattgtttacctattcattggattcgtccctcttaatctcaaggtcattcaaactctcgattgcatattgctccttaactgtaagaa

SEQ ID NO: 18443 - DNA, 748 bp, synthetic construct
  source 1..748: mol_type = other DNA
ttaaaacagcctgtgggttgcacccacccacagggcccactgggcgctagcactctgattctatggaatctttgtgcgcctgttttataaccccctcccccaagtttgtaatttagaagcaaagtaccgtaacgatcaacagcaggcgtggcgtaccagccatgtctcgatcaagcacttctgtttccccggacagagtatcaatagactactcacgtggttgaaggagaaaacgtccgttatccggctaactacttcgagaaacctagtaacaccattgaagctgcagagcgtttcgctcagcacttaccccgtgtagatcaggtcgatgagtcactgcattccccacgggcgaccgtggcagtggctgcgttggcggcctgcctatggggtcacccataggacgctctaatgtggacatggtgcgaagagtctattgagctagttagtagtcctccggcccctgaatgcggctaatcctaactgcggagcgcataccctcaaaccagggggtggtgcgtcgtaacgggtaactctgcagcggaaccgactactttgggtgtccgtgtttccttttattttcttactggctgcttatggtgacaattgaagaattgttgccatatagctattggattggccatccggtgtgtaacagagcaatcatctatttgtttgtcgggtatatcccactaacgctcaactcttttaacacattacagtatatactaatcctgaatacaagaaa

SEQ ID NO: 18444 - DNA, 744 bp, synthetic construct
  source 1..744: mol_type = other DNA
ttaaaacagcctgtgggttggccatccggtgggcccactgggcgttagcacactgattctacggaatctttgtgcgcctgttttatatccctcccctaaaatagtaacttagaagttgaacatttacacgaccaatagtgggcgtggcgcaccagccacgtcttggtcaagcactcctgtttccccggactgagtatcaataggctactcacgtggctgaaggagaaagtgttcgttatccggctaactacttcgggaaacccagtaacaccatgaaagttgcagagtgtttcgctcagcacttcccccgtgtagatcaggctgatgagtcactgcgaacctcacgggcgaccgtggcagtggctgcgttggcggcctgcctatggggcaacccataggacgctctaatacagacatggtgcgaagagtctactgagctagttagtattcctccggcccctgaatgcggctaatcctaactgcggagcacatgccttcaatccagagggtggtgtgtcgtaacgggcaactctgcagcggaaccgactactttgggtgtccgtgtttccttttattcttatactggctgcttatggtgacaattgaaaggttgttaccatatagctattggattggccatccggtgactaacagagctttgatttatcaattcattgggttcgtgcccttatcatctacagtttattcaactttggtgtacttgttatatcttaatagtaggaa

SEQ ID NO: 18445 - DNA, 744 bp, synthetic construct
  source 1..744: mol_type = other DNA
ttaaaacagcctgtgggttggccatccggtgggcccactgggcgttagcacactgattctacggaatctttgtgcgcctgttttatatccctcccctaaaatagtaacttagaagttgaacatttacacgaccaatagtgggcgtggcgcaccagccacgtcttggtcaagcactcctgtttccccggactgagtatcaataggctactcacgtggctgaaggagaaagtgttcgttatccggctaactacttcgggaaacccagtaacaccatgaaagttgcagagtgtttcgctcagcacttcccccgtgtagatcaggctgatgagtcactgcgaaccccacgggcgaccgtggcagtggctgcgttggcggcctgcctatggggcaacccataggacgctctaatacagacatggtgcgaagagtctactgagctagttagtattcctccggcccctgaatgcggctaatcctaactgcggagcacatgccctcaatccagagggtggtgtgtcgtaacgggcaactctgcagcggaaccgactactttgggtgtccgtgtttccttttattcttatactggctgcttatggtgacaattgaaaggttgttaccatatagctattggattggccatccggtgactaatagagccttggtttatcaattcattgggttcgtgcccttatcatctacagtttattcaactttggtgtacttgttatatcttaatagtaagaa

SEQ ID NO: 18446 - DNA, 744 bp, synthetic construct
  source 1..744: mol_type = other DNA
ttaaaacagcctgtgggttggccacccggtgggcccactgggcgttagcacactgattctacggaacctttgtgcgcctgttttatatccctcccctaaaatagtaacttagaagttgaacatttacacgaccaatagtgggcgtggcgcaccagccacgtcttggtcaagcactcctgtttccccggactgagtatcaataggctgctcacgtggctgaaggagaaagtgttcgttatccggctaactacttcgggaaacccagtaacaccatgaaagttgcagagtgtttcgctcagcacttcccccgtgtagatcaggctgatgagtcactgcgaaccccacgggcgaccgtggcagtggctgcgttggcggcctgcctatggggcaacccataggacgctctaatacagacatggtgcgaagagcctactgagctagttggtattcctccggcccctgaatgcggctaatcctaactgcggagcacatgccctcaatccagagggtggtgtgtcgtaacgggcaactctgcagcggaaccgactactttgggtgtccgtgtttccttttattcttatactggctgcttatggtgacaattgaaaggttgttaccatatagctattggattggccatccggtgactaacagagctttgatttatcaattcattgggttcgtgcccctatcacctacagtttattcaactttggtgtacttattatatcttaatagtaagaa

SEQ ID NO: 18447 - DNA, 744 bp, synthetic construct
  source 1..744: mol_type = other DNA
ttaaaacagcctgtgggttggccatccggtgggcccactgggcgttagcacactgattctacggaacctttgtgcgcctgttttatatccctcccctaaaatagtaacttagaagttgaacatttacatgaccaatagtaggcgtggcgcaccagccacgtcttggtcaagcactcctgtttccccggactgagtatcaataggctgctcacgcggctgaaggagaaagtgttcgttatccggctaactacttcgggaaacccagtaacaccatgaaagttgcagagtgtttcgctcagcacttcccccgtgtagatcaggctgatgagtcactgcgaaccccacgagcgatcgtggcagtggctgcgttggcggcctgcctatggggcaacccataggacgctctaatacagacatggtgcgaagagtctactgagctagttggtattcctccggcccctgaatgcggctaatcctaactgcggagcacatgccctcaatccagagggtggtgtgtcgtaacgggcaactctgcagcggaaccgactactttgggtgtccgtgtttccttttattctcatactggctgcttatggtgacaattgaaaggttgttaccatatagctattggattggccatccggtgactaacagagctttgatttatcaattcattgggtttgtgcccttatcacctacagtttattcaactttggtgtacttgttacatcttaatagtaagaa

SEQ ID NO: 18448 - DNA, 744 bp, synthetic construct
  source 1..744: mol_type = other DNA
ttaaaacagcctgtgggttggccatccggtgggcccactgggcgttagcacactgattctacggaatctttgtgcgcctgttttatatccctcccctaaaatagtaacttagaagttgaacatttacacgaccaatagtgggcgtggcgcaccagccacgtcttggtcaagcactcctgtttccccggactgagtatcaataggctgctcacgtggctgaaggagaaagtgttcgttatccggctaactacttcgggaaacccagtaacaccatgaaagttgcagagtgtttcgctcagcacttcccccgtgtagatcaggctgatgagtcactgcgaaccccacgggcgaccgtggcagtggctgcgttggcggcctgcctatggggcaacccataggacgctctaatacagacatggtgcgaagagtctactgagctagttggtattcctccggcccctgaatgcggctaatcctaactgcggagcacatgccctcaatccagagggtggtgtgtcgtaacgggcaactctgcagcggaaccgactactttgggtgtccgtgtttccttttattcttatactggctgcttatggtgacaattgaaaggttgttaccatatagctattggattggccatccggtgactaacagagctttgatttatcaattcattgggttcgtgcccctatcacctacagtttattcaactttggtgtacttattatatcttaatagtaagaa

SEQ ID NO: 18449 - DNA, 738 bp, synthetic construct
  source 1..738: mol_type = other DNA
cctgtgggttgcacccacccacaggacccacgcggtgctagcactctggttctacgggacctttgtgcgcctgttttacgtcccctccccgatttgtaacttagaagcaatttgcaatactgatcagtagcaggcatagcgcaccagctatgtcttgatcaagcacttctgtttccccggaccgagtatcaatagactgttcacacggttgaaggagaaaacgtccgttatccggctaactacttcgagaaacccagtagcgccattgaaactgcagagtgtttcgctccacacttcccccgtgtagatcaggtcgatgagtcactgcaatccccacgggcgaccgtggcagtggctgcgctggcggcctgcctatggggcaacccataggacgctctaatgtggacatggtgtgaagagtctattgagctagttagtagtcctccggcccctgaatgcggctaatcctaactgcggagcacatgccttcaatccagagggtagtgtgtcgtaatgggcaactctgcagcggaaccgactactttgggtgtccgtgtttccttttattctcacattggctgcttatggtgacaattacggaattgttaccatatagctattggattggccatccggtgtgcaatagagctattatatacctatttgttggctttgtaccactgaccttaaaatctataaccactctcgagtgtatattaacccttaatacaatcaagc

SEQ ID NO: 18450 - DNA, 745 bp, synthetic construct
  source 1..745: mol_type = other DNA
ttaaaacagcctgtgggttgttcccacccacagggcccactgggcgctagcacactgattctgcgggatctttgtgcgcctgttttataacccttcccctaaacagcaacttagaagttttgtacaatcacgaccaatagtgggcgtgacgcgccagtcacgtcttggtcaaacacttctgtatccccggactgagtaccaataggctgctcacgcggttgaaggggaaaacgttcgttacccggctaactacttcgagaaacctagtaacaccatgaaagttgcggagtgtttcgctcagcacttcccccgtgtagatcaggtcgatgagtcactgtaaaccccacgggcgaccgtgacagtggctgcgttggcggcctgcccatggggtaacccatgggacgctctaatacagacatggtgcgaagagtctattgagctagttagcagtcctccggcccctgaatgcggctaatcctaactgcggagcgcgcaccctcaatccagggggcggcgtgtcgtaatgggtaactctgcagcggaaccgactactttgggtgtccgtgtttccttttattctttattggctgcttatggtgacaattgaaaagttgttaccatatagctattggattggccatccggtgtctaacagagctattgtttacctatttattggatacgtccctctcaatctcaaggtcattcaaactcttgattatatattgctccttaactgtaggaa

SEQ ID NO: 18451 - DNA, 735 bp, synthetic construct
  source 1..735: mol_type = other DNA
gcctgtgggttgcacccacccacagggcccactgggcgttagcactctggtaccacggtacccttgtgcgcctgttttatcaccctaccccaacttgaaacttagaagcaatacacaatcgaccaatagcaggtgtggcgcaccagccgcatctaggtcaagcacttctgtttccccgggttgagtatcaataagctgtccacacggctgaaggagaaaacgcccgttatccggccaattacttcgagaaacctagtatcactatgaacgttgcaaggcgtttcgctcagcacttcccccgtgtagatcaggtcgatgagtcaccgcattccccacgggcgaccgtggcggtggctgcgttggcggcctgcctatgggttaacccataggacgccttaatactgacatggtgtgaagagtctattgagctaattggtagtcctccggcccctgaatgcggctaatcctaactgcggagcacatgctcacaacccagtgagtggtgtgtcgtaacgggcaactctgcagcggaaccgactactttgggtgtccgtgtttccttttattcttacattggctgcttatggtgacaatcacagaattgttaccatatagctattggattggccatccgacttctaacagagctattatttacctgtttgttggattcactccgttgacatataaatccctaaacactttgtgctttattttgaacttgaacgcacgaaa

SEQ ID NO: 18452 - DNA, 735 bp, synthetic construct
  source 1..735: mol_type = other DNA
agcctgtgggttgcacccacccacagggcccactgggcgccagcactctggtactgcggtacctttgtgcgcctgttttatcaccccaccccatccggaacgtagaagcaatgcacaactgaccaatagtgggtgtggcgcaccagccacatcatggtcaagcactcctgtttccccgggtttagtatcaataagctgctcacgtggctgaaggagaaaacacccgttatccggccaactacttcgagaaacttagtaccgctatgaacgttgcaaggcgtttcgctcagcacttcccccgtgtagatcaggccgatgagtcaccgcattcctcacgggcgaccgtggcggtggctgcgctggcggcctgcctatgggcttgcccataggacgccttaatactgacatggtgcgaagagtctattgagctagttggtagtcctccggcccctgaatgcggctaatcctaactgcggagcacatactcacaaaccagtgagcagtgtgtcgtaacgggcaactctgcagcggaaccgactactttgggtgtccgtgtttccttttattcctacactggctgcttatggtgacaattaaagaattgttaccatatagctattggattggccatccggtgtctaacagagctattatatacttgtttgttggattcatctcgttatcacacaaatcccttaacactttgtgctttatcttgaatttgaactcaaaaag

SEQ ID NO: 18453 - DNA, 734 bp, synthetic construct
  source 1..734: mol_type = other DNA
aagctgtgggttgcacccactcacagggcccactgggcgcaagcactctggtacctcggtacctttgtgcgcctgttttatacccccccccagtgaaacttagaagcagcaaatcacggtcaatagcaggcataacgctccagttatgtcttgatcaagcacttctgtttccccggaccgagtatcaatagactgctcgcgcggttgaaggagaaaacgttcgttatccggctagctacttcgggaaacccagtaacaccatgaaagttgcggagagcttcgttcagcactcccccagtgtagatcaggtcgatgagtcaccgcattccccacgggcgaccgtggcggtggctgcgttggcggcctgcccatggggtaacccatggggcgctctaatacggacatggtgtgaagagtctactgagctagttagtagtcctccggcccctgaatgcggctaatcccaactgcggagcacgcgcccacaaaccagtgggtagtgtgtcgtaacgggcaactctgcagcggaaccgactactttgggtgtccgtgtttccttttatctttatactggctgcttatggtgacaattaaagaattgttaccatatagctattggattggccatccggtgtgcaacagagcaattgtttacctatttattggttttgtaccattaaccttgaagtctgcgaccacccttaactatatcttaaccctcaacacagctaaac

SEQ ID NO: 18454 - DNA, 733 bp, synthetic construct
  source 1..733: mol_type = other DNA
gtgggttgttcccactcacagggcccactgggcgctagcacactgattctgcgggatctttgtgcgcctgttttataaccccttccctaagcagcaacttagaagcttcacactaccacgaccagtagtgggcgtggcgcgccagtcacgtcttggtcaagcacttctgtttccccggactgagtatcaatagactgctcacgcggttgaaggagaaaacgttcgttatccggctaactacttcgagaaacctagtagcaccgtgaaagttgcggagtgtttcgctcagcacttcccccgtgtagatcaggtcgatgagtcactgtaaaccccacgggcgaccgtgacagtggctgcgttggcggcctgcccatggggtaacccatgggacgctctaatacagacacggtgtgaagagtctattgagctagttagtagtcctccggcccctgaatgcggctaatcctaactgcggagcgcgcaccctcaacccagggggcggcgcgtcgtaatgggtaactctgcagcggaaccgactactttgggtgtccgtgtttccttttattccttattggctgcttatggtgacaattgaaaagttgttaccatatagctattggattggccatccggtgaccaacagagctattgtttacctgtttattggatacgtccctcttaatctcaaggccattcaaactcttgattatatattactccttaactgtaagaa

SEQ ID NO: 18455 - DNA, 739 bp, synthetic construct
  source 1..739: mol_type = other DNA
ttaaaacagcctgtgggttgcacccactcacagggcccactgggcgtcagcactctggtacctcggtacctttgtgcgcctgttttatatccccccccattgaaacttagaagcaatgcacctcgatcaatagcgggcgtggcgcaccagccacgtcatgatcaagcacttctgtttccccggaccgagtatcaatagactgctaacgcggttgagggagaaaacgtccgttacccggccaactgcttcgagaaatccagtaacatcatgaaaattgcagagtgtttcgctcagcacttccccagtgtagatcaggtcgatgagtcaccgcgttccccacgggcgaccgtggcggtggctgcgttggcggcctgcctgtggagcaacccacaggacgctctaatatagacatggtgtgaagaatctattgagccagttggtagtcctccggcccctgaatgcggctaatcctaactgcggagcacgtgccctcaatccagtgggtagcgtgtcgtaatgggtaactctgcagcggaaccgactactttgggtgtccgtgtttccatttattcttacattggctgcttatggtgacaattgaaagattgttgccatatagctattggattggccatccggtatcgaatagagcggttatctatcagtttattggatttatcccgttgagtgtgcagcagtatcgcactttgcttttaatagtgagactgaatagtataaa

SEQ ID NO: 18456 - DNA, 739 bp, synthetic construct
  source 1..739: mol_type = other DNA
ttaaaacagcctgtgggttgcacccactcacagggcccactgggcgtcagcactctggtacctcggtacctttgtgcgcctgttttatacccccccccattgaaacttagaagcgatgcacttcgatcaatagcgggcgtggcacaccagccacgtcgtgatcaagcacttctgtttccccggaccgagtatcaatagactgctaacgcggttgagggagaaaacgtccgttacccggccaactgcttcgagaaatccagtaacaccatgaaaattgcagagtgtttcgctcagcacttccccagtgtagatcaggtcgatgagtcaccgcattccccacgggcgaccgtggcggtggctgcgttggcggcctgcctgtggggcaacccacaggacgctctaatatagacatggtgtgaagaatctattgagccagttggtagtcctccggcccctgaatgcggctaatcctaactgcggagcacgtgccctcaatccagtgggtggcgtgtcgtaatgggtaactctgcagcggaaccgactactttgggtgtccgtgtttccatttattcttacattggctgcttatggtgacaattgaaagattgttaccatatagctattggattggccatccggtgtcgaatagagcgattatctatcagtttattggatttatcccgttgaatgtgcagcagtatcgcactttgcttttaatagtgagattgaatagtacaaa

SEQ ID NO: 18457 - DNA, 743 bp, synthetic construct
  source 1..743: mol_type = other DNA
ttaaaacagcctgtgggttgcacccactcacagggcccactgggcgctagcactctgattctacggaatccttgtgcgcctgttttagagccccttcccccaatgtaatttagaagcaaagtactaacgatcaacagcaggcgtggcgcaccagccatgtctcgatcaagcacttctgttcccccggacagagtatcaatagactactcacgtggttgaaggagaaaacgtccgttatccggctaactacttcgagaaacctagtaacaccattgaagctgcagagcgtttcgttcagcacttaccccgtgtagatcaggtcgatgagtcactgcattccccacgggcgaccgtggcagtggctgcgttggcggcctgcctatggggtcacccataggacgctctaatgtggacatggtgcgaagagtctattgagctagttagtagtcctccggcccctgaatgcggctaatcctaactgtggagcgcataccctcaaaccagggggcggtgcgtcgtaacgggcaactctgcagcggaaccgactactttgggtgtccgtgtttccttttattttcttactggctgcttatggtgacaattgaagaattgttgccatatagctattggattggccatccggtgtgtaacagagcaatcatctatttgtttgtcgggtatatcccactaacgctcaactcttttaacacattacaatatatactaatcctgaatacaagaaa

SEQ ID NO: 18458 - DNA, 743 bp, synthetic construct
  source 1..743: mol_type = other DNA
ttaaaacagcctgtgggttgtacccacccacagggcccactgggcgctagcactctgattctacggaatctttgtgcgcctgttttataatcccctcccccaatgtaatttagaagcaaagtactaacgatcaacagcaggcgtggcgcgccagccatgtctcgatcaagcacttctgtttccccggacagagtatcaatagactactcacgtggttgaaggagaaaacgtccgttatccggctaactacttcgagaaacctagtaacaccattgaagctgcagagcgtttcgctcagcacttaccccgtgtagatcaggtcgatgagtcactgcattccccacgggcgaccgtggcagtggctgcgttggcggcctgcctatggggtcacccataggacgctctaatgtggacatggtgcgaagagtctattgagctagttagtagtcctccggcccctgaatgcggctaatcctaactgcggagcgcataccctcaaaccagggggtggtgcgtcgtaacgggcaactctgcagcggaaccgactactttgggtgtccgtgtttccttttattttcttactggctgcttatggtgacaattgaagaattgttgccatatagctattggattggccatccggtgtgtaacagagcaatcatctatttgtttgtcgggtatatcccactaacgctcaactcttttaacacattacagtatatactaatcctgaatacaagaaa

SEQ ID NO: 18459 - DNA, 743 bp, synthetic construct
  source 1..743: mol_type = other DNA
ttaaaacagcctgtgggttgcacccactcacagggcccactgggcgctagcactctgattctacggaatctttgtgcgcctgttttataaccccctcccccaatgtaatttagaagcaatgcaccaatgatcaacagcaggcgtggcgcaccagccatgtctcgatcaagcacttctgtttccccggacagagtatcaatagactgctcgcgtggtcgaaggagaaaacgtccgttacccggctaactacttcgagaaacctagtagcaccaatgaagctgcagagcgtttcgctcagcacttaccccgtgtagatcaggccgatgagtcactgcgttccccacgggcgaccgtggcagtggctgcgttggcggcctgcctatggggtcacccataggacgctctaatgtggacatggtgcgaagagtctattgagctagttagtagtcctccggcccctgaatgcggctaatcctaactgcggagcgcataccctcaaaccagggggtggtgcgtcgtaacgggtaactctgcagcggaaccgactactttgggtgtccgtgtttccttttattctcttaatggctgcttatggtgacaattgaggaattgttaccatatagctattggattggccatccggtgtgtaacagagcaattatctacttgtttgcaggatttaccccattaacgttcaaatctcttaacacactacagtacatactaaccttgaatacaagaaa

SEQ ID NO: 18460 - DNA, 743 bp, synthetic construct
  source 1..743: mol_type = other DNA
ttaaaacagcctgtgggttgtacccacccacagggcccactgggcgctagcactctgattctacggaatctttgtgcgcctgttttacaaccccctccccctatgtaacttagaagcaatgcaccaatgatcaacagcaggcgtggcgcaccagccatgtcttgatcaagcacttctgtttccccggacagagtatcaatagactgctcgcgtggtcgaaggagaaaacgtccgttacccggctaactacttcgagaaacctagtagcaccaatgaagctgcagagcgtttcgctcagcacttaccccgtgtagatcaggccgatgagtcactgcgttccccacgggcgaccgtggcagtggctgcgttggcggcctgcctatggggtcacccataggacgctctaatgtggacatggtgcgaagagtctattgagctagttagtagtcctccggcccctgaatgcggctaatcctaactgcggagcgcataccctcaaaccagggggtggtgcgtcgtaacgggtaactctgcagcggaaccgactactttgggtgtccgtgtttccttttattttcttaatggctgcttatggtgacaattgaggaattgttaccatatagctattggattggccatccggtgtgtaacagagcaattatctacttgtttgtaggatataccccattaacgttcaaatctcttaacacactacagtacatactaactttgaacacaagaaa

SEQ ID NO: 18461 - DNA, 743 bp, synthetic construct
  source 1..743: mol_type = other DNA
ttaaaacagcctgtgggttgtacccacccacagggcccactgggcgctagcactctgattctacggaatctttgtgcgcctgttttataaccccctcccccaatgtaatttagaagcaaagtactaacgatcaacagcaggcgtggcgcaccagccatgtctcgatcaagcacttctgtttccccggacagagtatcaatagactactcacgtggtcgaaggagaaaacgtccgttatccggctaactacttcgagaaacctagtaacgccattgaagctgcagagtgtttcgctcagcacttaccccgtgtagatcaggtcgatgagtcactgcattccccacgggcgaccgtggcagtggctgcgttggcggcctgcctatggggtcacccataggacgctctaatgtggacatggtgcgaagagtctattgagctagttagtggtcctccggcccctgaatgcggctaatcctaactgcggagcgcataccctcaaaccagggggtggtgcgtcgtaacgggcaactctgcagcggaaccgactactttgggtgtccgtgtttccttttattttcttactggctgcttatggtgacaattgaagaattgttgccatatagctattggattggccatccggtgtgtaacagagcaatcatctatttgtttgtcggatacatcccactaacgcttaactcttttaacacattacagtatatactaatcctgaacacaagaaa

SEQ ID NO: 18462 - DNA, 728 bp, synthetic construct
  source 1..728: mol_type = other DNA
gggttgtacccactcacagggcccaccgggcgctagcactctggtactgcggtacctttgtgcgcctgttttatcaccccaccccatctgaaacgtagaagcaatgcacaaccgaccaatagtgggtgtggcgcaccagccacatcttggtcaagcacttctgtttccccgggtttagtatcaataagctgctcacgcggctgagggagaaaacacccgttatccggccgactacttcgagaaacctagtaccgctatgaacgttgcaaggcgtttcgctcagcacttcccccgtgtagatcaggctgatgagtcaccgcatccctcacgggcgaccgtggcggtggctgcgctggcggcctgcctatgggcttgcccataggacgccttaatactgacatggtgcgaagagtctattgagctagttggtagtcctccggcccctgaatgcggctaatcctaactgcggagcacatactcacaaaccagtgagcggtgtgtcgtaacgggcaactctgcagcggaaccgactactttgggtgtccgtgtttccttttattcttatactggctgcttatggtgacaattaaagaattgttaccatatagctattggattggccatccggtgtctaacagagatattatatacttgttcgttggattcacctcgttgtcatacaaatcccttaacactttgtgctttatcttggatttaaactcaaaaag

SEQ ID NO: 18463 - DNA, 739 bp, synthetic construct
  source 1..739: mol_type = other DNA
tttaaacagctctggggttgtacccactcacagggcccactgggcgtcagcactctggtaccccggtacccttgtgcgcctgttttatatccccccccattgaaacttagaagtaatgcacctcgatcaatagcgggcgtggcgcaccagccacgtcatgatcaagcacttctgtttccccggaccgagtatcaatagactgctaacgcggttgagggagaaaacgtccgttatccggccaactgcttcgagaaatccagtaacatcatgaaaattgcagagtgtttcgctcagcacttccccagtgtagatcaggtcgatgagtcaccgcgttccccacgggcgaccgtggcggtggctgcgttggcggcctgcctgtggggcaacccgcaggacgctctaatatggacatggtgtgaagaatctattgagccagttggtagtcctccggcccctgaatgcggctaatcctaactgcggagcacgcgccttcaatccagtgggtagcgtgtcgtaatgggtaactctgcagcggaaccgactactttgggtgtccgtgtttccatttactcttacattggctgcttatggtgacaattgaaagattgttaccatatagctattggattggccatccggtatcgaatagagcaattatctatcagtttattggatttattccgttgagtgtgcagcagtatcgcactttgcttttaatagtgagactgaatagtgcaaa

SEQ ID NO: 18464 - DNA, 739 bp, synthetic construct
  source 1..739: mol_type = other DNA
cttaaacagcctcggggttgtaccaactcacagggcccactgggcgtcagcactctggtaccccggtacccttgtgcgcctgttttatatccctccccattgaaacttagaagtaatgcacctcgatcaatagcgggcgtggcgcaccagccacgtcatgatcaagcacttctgtttccccggaccgagtatcaatagactgctaacgcggttgagggagaaaacgtccgttatccggccaactgcttcgagaaatccagtaacatcatgaaaattgcagagtgtttcgctcagcacttccccagtgtagatcaggtcgatgagtcaccgcgttccccacgggcgaccgtggcggtggctgcgttggcggcctgcctgtggggcaacccgcaggacgctctaatatggacacggtgtgaagaatctattgagccagttggtagtcctccggcccctgaatgcggctaatcctaactgcggagcacgcgccttcaatccagtgggtagcgtgtcgtaatgggcaactctgcagcggaaccgactactttgggtgtccgtgtttccatttactcttacattggctgcttatggtgacaattgaaagattgttaccatatagctattggattggccatccggtatcgaatagagcaattatctatcagtttattggatttattccgttgagtgtgcagcagtatcgcactgtgcttttaatagtgagactgaatagtgcaaa

SEQ ID NO: 18465 - DNA, 739 bp, synthetic construct
  source 1..739: mol_type = other DNA
cttaaacagcctcggggttgtaccaactcacagggcccactgggcgtcagcactctggtaccccggtacccttgtgcgcctgttttatatccctccccattgaaacttagaagtaatgcacctcgatcaatagcgggcgtggcgcaccagccacgtcatgatcaagcacttctgtttccccggaccgagtatcaatagactgctaacgcggttgagggagaaaacgtccgttatccggccaactgcttcgagaaatccagtaacatcatgaaaattgcagagtgtttcgctcagcacttccccagtgtagatcaggtcgatgagtcaccgcgttccccacgggcgaccgtggcggtggctgcgttggcggcctgcctgtggggcaacccgcaggacgctctaatatggacatggtgtgaagaatctattgagccagttggtagtcctccggcccctgaatgcggctaatcctaactgcggagcacgcgccttcaatccagtgggtagcgtgtcgtaatgggcaactctgcagcggaaccgactactttgggtgtccgtgtttccatttactcttacattggctgcttatggtgacaattgaaagattgttaccatatagctattggattggccatccggtatcgaatagagcaattatctatcagtttattggatttattccgttgagtgtgcagcagtatcgcactttgcttttaatagtgagactgaatagtgcaaa

SEQ ID NO: 18466 - DNA, 744 bp, synthetic construct
  source 1..744: mol_type = other DNA
ttaaaacaggctgtgggttgtacccactcacagggcctactgggcgctagcactctggcactaaggtgcctttgtgcgcctgtttttacttcccttccccaaagtaacttagaagttgtgtaccaacgatcaatagcaggtgtgacacaccagtcatatcttgatcaagtacttctgtttccccggaccgagtatcaataggctgctcgcgcggctgaaggagaaaacgttcgttacccgaccaactacttcgagaagcttagtaccaccatgaacgaggcagagtgtttcgttcagcacaaccccggtgtagatcaggctgatgagtcactgcaacccccatgggcgaccatggcagtggctgcgttggcggcctgcccatggagaaatccatgggacgctctaattctgacatggtgtgaagagcctattgagctagctggtagtcctccggcccctgaatgcggctaatcctaactgcggagcacatgctcacaaaccagtgggtggtgtgtcgtaatgggcaactctgcagcggaaccgactactttgggtgtccgtgtttccttttattcttatattggctgcttatggtgacaatcaaagaattgttaccatatagctattggattggccatccggtgtgcaacagagcaattgtttacttatttattggtttcgtaccactatcactgaagtctgtgaccattctcgaattcattttgaccctcaactcaatcaaac

SEQ ID NO: 18467 - DNA, 745 bp, synthetic construct
  source 1..745: mol_type = other DNA
ttaaacaagcctgtgggttgttcccacccacagggcccactgggcgctagcacactgattctgcgggatctttgtgcgcctgttttataaccccttccctaagcagcaacttagaagcttcacactatcacgaccagtagtgggcgtggcgcgccagtcacgtcttggtcaagcatttctgtttccccggactgagtatcaatagactgctcacgcggttgaaggagaaaacgttcgttatccggctaactacttcgagaaacctagtagcaccgtgaaagttgcggagtgtttcgctcagcacttcccccgtgtagatcaggtcgatgagtcactgtaaaccccacgggcgaccgtgacagtggctgcgttggcggcctgcccatggggtaacccatgggacgctctaacacagacacggtgtgaagagtctattgagctagttagtagtcctccggcccctgaatgcggctaatcctaactgcggagcgcgcaccctcaacccagggggcggcgcgtcgtaacgggtaactctgcagcggaaccgactactttgggtgtccgtgtttccttttattccttattggctgcttatggtaacaattgaaaagttgttaccatatagctattggattggccatccggtgaccaacagagctattgtttacctgtttattggatacgtccctcttaatctcaagaccattcaaactcttgagtatatattactccttaactgtaagaa

SEQ ID NO: 18468 - DNA, 743 bp, synthetic construct
  source 1..743: mol_type = other DNA
aaacaagcctgtgggttgttcccacccacagggcccactgggcgttagcacactgattctgcgggatctttgtgcgcctgttttataaccccttccctaagcagtaacttagaagcttcacacaatcacgaccagtagtgggcgtggcgcgccagtcacgtcttggtcaagcacttctgtttccccggactgagtatcaatagactgctcacgcggttgaaggagaaaacgttcgttatccggctaactacttcgagaaacctagtagcaccgtgaaagttgcggagtgtttcgctcagcacttcccccgtgtagatcaggtcgatgagtcactgtaaaccccacgggcgaccgtgacagtggctgcgttggcggcctgcccatggggtaacccatgggacgctctaatacagacatggtgtgaagagtctattgagctagttagtagtcctccggcccctgaatgcggctaatcctaactgcggagcacgcaccctcaacccagggggcggcgtgtcgtaatgggtaactctgcagcggaaccgactactttgggtgtccgtgtttccttttattccttactggctgcttatggtgacaattgaaaagttgttatcatatagctattggattggccatccggtgtccaacagagctattgtttacctatttattggatacgtccctcttaatctcaaggctattcaaactcttgattatatattgctccttaactgtaagaa

SEQ ID NO: 18469 - DNA, 732 bp, synthetic construct
  source 1..732: mol_type = other DNA
ctgtgggttgcacccactcacagggcctactgggcgcaagcactctggtacctcggtacctttgtgcgcctgttttacaccccccccctagtgaaacttagaagcagcaaaccccgatcaatagcaggcatagcgctccagttatgtcttgatcaagcacttctgtttccccggactgagtatcaatagactgctcgcgcggttgaaggagaaaacgttcgttatccggccaactacttcggaaaacctagtaacactatgaaagttgcagagagcttcgttcagcactcccccagtgtagatcaggtcgatgagtcaccgcattccccacgggcgaccgtggcggtggctgcgttggcggcctgcccatggggtaacccatggggcgctctaatacggacatggtgtgaagagtctactgagctagttggtagtcctccggcccctgaatgcggctaatcccaactgcggagcacacgcccacaaaccagcgggtagtgtgtcgtaacgggtaactctgcagcggaaccgactactttgggtgtccgtgtttccttttaactttatattggctgcttatggtgacaattagagaattgttgccatatagctattggatcggccatccggtgtgcaacagagcaattatttacttattcactggttttataccattaactttgaattctgtgaccacccttaattatatcttgacccttaacacggctaaac

SEQ ID NO: 18470 - DNA, 732 bp, synthetic construct
  source 1..732: mol_type = other DNA
tgggttgcacccacccacaggacccacgcggtgctagcactctgattctgcgggatctttgtgcgcctgttttataatccctcccccaagcagtaacttagaagcttcatactaccacgaccaatagtaggcgtggcgcaccagtcacgtctcggtcaagcacttctgtttccccggactgagtatcaatagactgctcacgcggttgaaggagaaagcgttcgttatccggctaactacttcgagaaacttagtagcaccgtgaaagttgcggagcgtttcgctcagcacttcccccgtgtagatcaggtcgatgagtcactgtgaaccccacgggcgaccgtgacagtggctgcgttggcggcctgcccatggggtaacccatgggacgctctaatacagacacggtgtgaagagtctattgagctagttagtagtcctccggcccctgaatgcggctaatcctaactgcggagcgcgcaccctcaatccagtgggcagcgcgtcgtaatgggtaactctgcagcggaaccgactactttgggtgtccgtgtttcctgttattccttattggctgcttatggtgacaattgaaaagttgttaccatatagctattggattggccatccggtgaccaacagagctattgtttatttgtttattgggtacgtccctctcaatctcaaagtcattcaaactcttgattatatactacttctcaattgtaagaa

SEQ ID NO: 18471 - DNA, 691 bp, synthetic construct
  source 1..691: mol_type = other DNA
cactctgattctgcggaatctttgtgcgcctgttttataaccctcccccgacttgcaccttagaagttatgtacgttgatcaacagcaggcgtggcacaccagccatgtcttgatcaagcacttctgtgcccccggactgagtatcaatagactgctcacgtggtcgaaggagaaaacgttcgttatccggctaactacttcgagaaacctagtaacaccactgaaactgcggagtgtttcgctcagcacttcccccgtgtagatcaggtcgatgagtcactgcttaccccacgggtgaccgtggcagtggctgcgttggcggcctgcctatggggcaacccataggacgctctaaagtggacatggtgcgaagagtctattgagctagttagtagtcctccggcccctgaatgcggctaatcctaactgcggagcgcatgcccccaaaccagagggtggtgcgtcgtaacgggtaactctgcagcggaaccgactactttgggtgtccgtgtttcttttattctcataatggctgcttatggtgacaattgaggaattgttaccgtatagctattggattggccatccggtgtgtaacagagctattatctacttgtttgttggatacattccattaacacctaaatccttcaatacattgcattacattctaacgctgaacgcaagaaa

SEQ ID NO: 18472 - DNA, 730 bp, synthetic construct
  source 1..730: mol_type = other DNA
gggttgcacccacccacagggcccactgggcgctagcactctggcactgaggtgcctttgtgcgcctgtttttacttcccttccccgaagtaacttagaagctgtaaatcaacgatcaatagtaggtgtgacgcaccagtcatatcttgatcaagcacttctgtttccccggactgagtatcaataggctgctcgcgcggctgaaggagaaaacgttcgttacccgaccaactacttcgagaagcttagtaccaccatgaacgaagcagagtgtttcgttcagcacaaccccagtgtagatcaggctgatgagccactgcaacccccatgggcgaccatggcagtggctgcgttggcggcctgcccatggagaaatccatgggacgctctaattctgacatggtgtgaagagcctattgagctagctggtagtcctccggcccctgaatgcggctaatcctaactgcggagcacatgctcacaaaccagtgggtggtgtgtcgtaacgggcaactctgcagcagaaccgactactttgggtgtccgtgtttccttttattcttatattggctgcttatggtgacaatcaaagaattgttaccatatagctattggattggccatccggtgtgcaacagagcaattgtttacctatttattggttttgtaccattatcactgaagtctgtgaccactctcaaattcattctgaccctcaacacaatcaaac

SEQ ID NO: 18473 - DNA, 724 bp, synthetic construct
  source 1..724: mol_type = other DNA
tgcacccactcacagggcccactgggcgccagcactctggtactgcggtacctttgtgcgcctgttttatcaccccaccccatccggaacgtagaagcgatgcacaactgaccaatagtgggtgtggcgcaccagtcacatcttggtcaagcacttctgtttccccgggtttagtatcaataagctgctcacgcggctgaaggagaaaacacccgttatccggccgactacttcgagaaacctagtaccgctatgaacgttgcaaggcgtttcgctcagcacttcccccgtgtagatcaggccgatgagtcaccgcactcctcacgggcgaccgtggcggtggctgcgttggcggcctgcctatgggcttgcccataggacgccttaatgctgacatggtgcgaagagtctattgagctagttggtagtcctccggcccctgaatgcggctaatcctaactgcggagcacatactcacaaaccagtgagcggtgtgtcgtaacgggcaactctgcagcggaaccgactactttgggtgtccgtgtttccttttattcttatactggctgcttatggtgacaattaaagaattgttaccatatagctattggattggccatccggtgtctaacagagctattatatacttgtttgttggattcatctcgttatcacacaaatccctcaacactttgtgctttattttgaatttaaactcaaaaag

SEQ ID NO: 18474 - DNA, 719 bp, synthetic construct
  source 1..719: mol_type = other DNA
ccactcacagggcccactgggcgccagcactctggtactgcggtacctttgtgcgcctgttttatcaccccaccccatctgaaacgtagaagcaatgcacaaccgaccaatagtgggtgtggcgcaccagccacatcttggtcaagcacttctgtttccccgggtttagtatcaataagctgctcacgcggctgaaggagaaaacacccgttatccggccgactacttcgagaaacctagtaccgctatgaacgttgcaaggcgtttcgctcagcacttcccccgtgtagatcaggctgatgagtcaccgcatccctcacgggcgaccgtggcggtggctgcgctggcggcctgcctatgggcttgcccataggacgccttaatactgacatggtgcgaagagtctattgagctagttggtagtcctccggcccctgaatgcggctaatcctaactgcggagcacatactcacaaaccagtgagcggtgtgtcgtaacgggcaactctgcagcggaaccgactactttgggtgtccgtgtttccctttattcatatactggctgcttatggtgacaatcaaagaattgttaccatatagctattggattggccatccggtgtctaacagagatattatatacttgttcattggattcacctcgttgtcatacaaatcccttaacactttgtgctttatcttgaatttaaactcaaaaag

SEQ ID NO: 18475 - DNA, 744 bp, synthetic construct
  source 1..744: mol_type = other DNA
ttaaaacaggctgtgggttgtacccactcacagggcctactgggcgctagcactctggcactaaggtacctttgtgcgcctgtttttacttccctttcccaaagaaacttagaagttgtgtaccaatgatcaatagcaggtgtgacgcaccagtcacatcttgatcaagcacttctgtttccccggaccgagtatcaataggctgctcgcgcggctgaaggagaaaacgttcgttacccgaccagctacttcgagaagcttagtaccaccatgaacgaggcagagtgtttcgttcagcacaaccccagtgtagatcaggctgatgagtcactgcaacccccatgggcgaccatggcagtggctgcgttggcggcctgctcatggagaaatccatgagacgctctaattctgacatggtgtgaagagcctattgagctagctggtattcctccggcccctgaatgcggctaatcctaactgcggagcacatgctcacgagccagtgggtggtgtgtcgtaatgggcaactctgcagcggaaccgactactttgggtgtccgtgtttccttttattcttatgttggctgcttatggtgacaatcaaagaattgttaccatatagctattggattggccatccggtgtgcaacagagcaattgtttatctatttattggtttcgtaccactatcactgaagtctgtgaccactctcgaattcattttgaccctcaactcaatcaaac

SEQ ID NO: 18476 - DNA, 744 bp, synthetic construct
  source 1..744: mol_type = other DNA
ttaaaacaggctgtgggttgtacccactcacagggcctactgggcgctagcactctggcactaaggtacctttgtgcgcctgtttttacttccctttcccaaagtaacttagaagttgtgtaccaatgatcaatagcaggtgtgacgcaccagtcacatcttgatcaagcacttctgtttccccggaccgagtatcaataggctgctcgcgcggctgaaggagaaaacgttcgttacccgaccagctacttcgagaagcttagtaccaccatgaacgaggcagagtgtttcgttcagcacaaccccagtgtagatcaggctgatgagtcactgcaacccccatgggcgaccatggcagtggctgcgttggcggcctgcccatggagaaatccatgggacgctctaattctgacatggtgtgaagagcctattgagctagctggtattcctccggcccctgaatgcggctaatcctaactgcggagcacatgctcacgagccagtgggtggtgtgtcgtaatgggcaactctgcagcggaaccgactactttgggtgtccgtgtttccttttattcttatgttggctgcttatggtgacaatcaaagaattgttaccatatagctattggattggccatccggtgtgcaacagagcaattgtttatctatttattggtttcgtaccactatcactgaagtctgtgaccactctcgaattcattttgaccctcaactcaatcaaac

SEQ ID NO: 18477 - DNA, 744 bp, synthetic construct
  source 1..744: mol_type = other DNA
ttaaaacaggctgtgggttgtacccactcacagggcctactgggcgctagcactctggcactaaggtacctttgtgcgcctgtttttacttcccttccccaaagtaacttagaagttgtgcaccagcgatcaatagcaggtgtgacacaccagtcatatcttgatcaagcacttctgtttccccggaccgagtatcaataggccgctcgcgcggctgaaggagaaaacgttcgttacccggccaactacttcgagaagcttagtaccaccatgaacgaggcagagtgtttcgttcagcacaaccccagtgtagatcaggctgatgagccactgcaacccccatgggtgaccatggcagtggctgcgttggcggcctgcccatggagaaatccatgggacgctctaattctgacatggtgtgaagagcctattgagctagctggtatttctccggcccctgaatgcggctaatcctaactgcggagcacatgctcacaaaccagtgggtggtgtgtcgtaatgggcaactctgcagcggaaccgactactttgggtgtccgtgtttccttttattcttatgttggctgcttatggtgacaatcaaagaattgttaccatatagctattggattggccatccggtgtgcaacagagcaattgtttacctatttattggtttcgtaccactatcactgaagtctgtgaccactctcaaattcattttgaccctcaactcaatcaaac

SEQ ID NO: 18478 - DNA, 744 bp, synthetic construct
  source 1..744: mol_type = other DNA
ttaaaacaggctgtgggttgtacccactcacagggcctactgggcgctagcactctggcactaaggtacctttgtgcgcctgtttttacttccctttcccaaagaaacttagaagttgtgtaccaatgatcaatagcaggtgtgacgtacaaataacatcttgatcaagcacttctgtttccccggaccgagtatcaataggctgctcacgcggctgaaggagaaaacgttcgttacccggccaactacttcgagaagcttagtaccaccatgaacgaggcagagtgtttcgttcagcacaaccccagtgtagatcaggctgatgagtcactgcaacccccatgggtgaccatggcagtggctgcgttggcggcctgcccatggagaaatccatgggacgctccaattctgacatggtgtgaagagcctattgagctagctggtatttctccggcccctgaatgcggctaatcctaactgcggagcacatgctcacaaaccagtgggtggtgtgtcgtaatgggcaactctgcagcggaaccgactactttgggtgtccgtgtttccttttattcttatgttggctgcttatggtgacaatcaaagaattgttaccatatagctattggattggccatccggtgtgcaacagagcaattgtttatctatttattggtttcgtaccactatcactgaagtctgtgaccactctcgaattcattttgaccctcaactcaatcaaac

SEQ ID NO: 18479 - DNA, 744 bp, synthetic construct
  source 1..744: mol_type = other DNA
ttaaaacaggctgtgggttgtacccactcacagggcctactgggcgctagcactctggcactaaggtacctttgtgcgcctgtttttacttcccttccccaaagtaacttagaagttgtgcaccagcgatcaatagcaggtgtgacacaccagtcatatcttgatcaagcacttctgtttccccggaccgagtatcaataggctgctcgcgcggctgaaggagaaaacgttcgttacccgaccaactacttcgagaagcttagtaccaccatggacgaggcagagtgtttcgttcagcacaaccccagtgtagatcaggctgatgagccactgcaacccccatgggcgaccatggcagtggctgcgttggcggcctgcccatggagaaatccatgggacgctccaattctgacatggtgtgaagagcctattgagctagctggtattcctccggcccctgaatgcggctaatcctaactgcggagcacatgctcacaaaccagtgggtggtgtgtcgtaatgggcaactctgcagcggaaccgactactttgggtgtccgtgtttccttttattctcatgttggctgcttatggtgacaatcaaagaattgttaccatatagctattggattggccatccggtgtgcaatagagcaattgtttacctatttattggtttcgtaccactatcactgaagtctgtgaccactctcaaattcattttggccctcaattcaatcaaac

SEQ ID NO: 18480 - DNA, 735 bp, synthetic construct
  source 1..735: mol_type = other DNA
gtgggttgcacccactcacaggacccacgtggtgctagcactctggttctacggaacctttgtgcgcctgttttacgccccctccccaatttgtaatttagaagcgattcacaacacagatcaatagcaggcatggcgcaccagctatgtctcgatcaagcacttctgtttccccggaccgagtatcaatagactgctcacgtggttgaaggagaaaacgtccgttatccggctaactacttcgagaaacctagtagcgccattgaaactgcagagtgtttcgctccacacttcccccgtgtagatcaggtcgatgagtcactgcaatccccacgggcgaccgtggcagtggctgcgctggcggcctgcctatggggcaacccataggacgctctaatgtggacatggtgcgaagagtctattgagctagttagtagtcctccggcccctgaatgcggctaatcctaactgcggagcacatgccttcaacccagagggtagtgtgtcgtaatgggcaactctgcagcggaaccgactactttgggtgtccgtgtttccttttattctcacattggctgcttatggtgacaattacagaattgttaccatatagctattggattggccatccggtgtgcaatagagctattatatacctatttgttggctttgtaccactaaccttaaaatctgtaaccactctcgactatatattaaccctcaatacaaataaac

SEQ ID NO: 18481 - DNA, 740 bp, synthetic construct
  source 1..740: mol_type = other DNA
taaaacagcctgtgggttgcacccactcacagggcctactgggcgcaagcactctggtacctcggtacctttgtgcggctgttttatacccccccccagtgaaacttagaagcagtaaaccacgatcaatagcaggcataacgctccagttatgtcttgatcaagcacttctgtttccccggactgagtatcaatagactgctcgcgcggttgaaggagaaaacgttcgttatccggctaactacttcggaaaacctagtaacaccatgaaagttgcggagagcttcgttcagcactcccccagtgtagatcaggtcgatgagtcaccgcgttccccacgggcgaccgtggcggtggctgcgttggcggcctgcccatggggtaacccatggggcgctctaatacggacatggtgtgaagagtctactgagctagttggtagtcctccggcccctgaatgcggctaatcccaactgcggagcacacgcccacaagccagcgggtagtgtgtcgtaacgggtaactctgcagcggaaccgactactttgggtgtccgtgtttccttttatctttatattggctgcttatggtgacaatcaaagaattgttaccatatagctattggattggccatccggtgtgcaacagagcaattatttacctatttattggttttataccactaaccttgaattctgtgactacccttaattatattttgacccttaacacagctaaac

SEQ ID NO: 18482 - DNA, 742 bp, synthetic construct
  source 1..742: mol_type = other DNA
ttaaaacagcctgtgggttgcacccactcacagggcccactgggcgcaagcactctggtacttcggtacctttgtgcgcctgttttataacccccccccagtgaaacttagaagcagcaaaccacgatcaatagcaggcatagcgctccagttatgtcttgatcaagcacttctgtttccccggactgagtatcaatagactgctcgcgcggttgaaggaaaaaacgttcgttatccggccaactacttcggaaaacctagtaacaccatgaaagttgcggaaagcttcgttcagcactcccccagtgtaaatcaggtcgatgagtcaccgcattccccacgggcgaccgtggcggtggctgcgttggcggcctgcccatggggtaacccatggggcgctctaatacggacatggtgtgaagagtctactgagctagttggtagtcctccggcccctgaatgcggctaatcccaactgcggagcacacgcccacaagccagcgggtagtgtgtcgtaacgggtaactctgcagcggaaccgactactttgggtgtccgtgtttccttttatccttatattggctgcttatggtgacaattagagaattgttaccatatagctattggattggccatccggtgtgcaacagagcaattatttacctatttattagttttgtaccattaaccttgaattctgtgaccacccttaattatatcttgacccttaacacagctaaac

SEQ ID NO: 18483 - DNA, 731 bp, synthetic construct
  source 1..731: mol_type = other DNA
tgtgggttgcacccacccacagggcccactgggcgctagcactctggtgccacggtacctttgtgcgcctgttttattaccctaccccatacgaaacttagaagtaatacataaccgaccaatagtaggtgtggcgcaccagccacatcttggtcaagcacttctgtttccccgggtcgagtatcaataagctgttcacgcggctgaaggagaaaacacccgttatccggccaactacttcgagaaacctagtaccgccatgaacgttgcaaggcgtttcgctcagcacttcccccgtgtagatcaggccgatgagtcaccgcattccccacgggtgaccgtggcggtggctgcgttggcggcctgcctatgggttatcccataggacgccttaatactgacatggtgcgaagagtctattgagctagttggtagtcctccggcccctgaatgcggctaatcctaactgcggagcacatactcgcaaaccagtgagtggtgtgtcgtaacgggtaactctgcagcggaaccgactactttgggtgtccgtgtttccttttatctttatattggctgcttatggtgacaatcagtgaattgttaccatatagctattggattggccatccggtgtctaatagagctattatatacctgtttgttggattcattccgttgacctataaatccctaaccatcctgtactacattttgaaattaaacacacgaaa

SEQ ID NO: 18484 - DNA, 747 bp, synthetic construct
  source 1..747: mol_type = other DNA
ttaaaacagcctgtgggttgcacccacccacaggacccacgcggtgctagcactctggttctacgggacctttgtgcgcctgttttatgtcccctccccaattcgtaacttagaagcaatttgcaacactgatcagtagtaggcatagcgcaccagctatgtcttgatcaagcacttctgtttccccggaccgagtatcaatagactgttcacacggttgaaggagaaagcgtccgttatccggctaactacttcgagaaacccagtagcgccattgaaactgcagagtgtttcgctccacactttccccgtgtagatcaggtcgatgagtcactgcaatccccacgggcgaccgtggcagtggctgcgctggcggcctgcctatggggcaacccataggacgctctaatgtggacatggtgtgaagagtctattgagctagttggtaatcctccggcccctgaatgcggctaatcctaactgcggagcacatgccttcaatccagagggtagtgtgtcgtaatgggcaactctgcagcggaaccgactactttgggtgtccgtgtttccttttattctcacattggctgcttatggtgacaattacggaattgttaccatatagctattggattggccatccggtgtgcaatagagctattatatacctatttgttggctttgtaccactgaccttaaaatctataaccactctcgagtatatattaacccttaacacaatcaaac

SEQ ID NO: 18485 - DNA, 747 bp, synthetic construct
  source 1..747: mol_type = other DNA
ttaaaacagcctgtgggttgcacccacccacaggacccacgtggtgctagcactctggttctacgggacctttgtgcgcctgttttatgtcccctccccaatttgtaacttagaagcaatttgcaacactgatcagtagtaggcgtagcgcaccagctatgtcttgatcaagcacttctgtttccccggaccgagtatcaatagactgttcacacggttgaaggagaaagcgtccgttatccggctaactacttcgagaaacccagtagcgccattgaaattgcagagtgtttcgctccacacttcccccgtgtagatcaggtcgatgagtcactgcaatccccacgggcgaccgtggcagtggctgcgctggcggcctgcctatggggtaacccataggacgctctaatgtggacatggtgtgaagagtctattgagctagttagtagtcctccggcccctgaatgcggctaatcctaactgcggagcacatgccttcaatccagagggtagtgtgtcgtaatgggcaactctgcagcggaaccgactactttgggtgtccgtgtttccttttattctcacattggctgcttatggtgacaattacggaattgttaccatatagctattggattggccatccggtgtgcaatagagctattatatacctatttgttggctttgtaccactgaccttaaaatctataaccactctcgagtatatattaacccttaacacaatcaaac

SEQ ID NO: 18486 - DNA, 747 bp, synthetic construct
  source 1..747: mol_type = other DNA
ttaaaacagcctgtgggttgcacccactcacaggacccacgtggtgctagcactctggttctacggaacctttgtgcgcctgttttacgccccctccccaatttgtaacttagaagcaatttacaacactgatcaatagcaggcatggcgcgccagctatgtcttgatcaagcacttctgtttccccggaccgagtatcaatagactgttcacacggttgaaggagaaagcgtccgttatccggctaactacttcgagaaacccagtagcgccactgaagctgcagagtgtttcgctccacacttcccccgtgtagatcaggtcgatgagtcactgcaatcctcacgggcgaccgtggcagtggctgcgctggcggcctgcctatggggcgacccataggacgctctaatgtggacatggtgcgaagagtctattgagctagttagtagtcctccggcccctgaatgcggctaatcctaactgcggagcacatgccttcaatccagagggtagtgtgtcgtaatgggcaactctgcagcggaaccgactactttgggtgtccgtgtttccttttattctcacattggctgcttatggtgacaattacagaattgttaccatatagctattggattggccatccggtgtgcaatagagctattatatacctatttgttggctttataccactaaccttaaagtctgcaaccactctcgagtatatattaaccctcaatacaatcaaac

SEQ ID NO: 18487 - DNA, 747 bp, synthetic construct
  source 1..747: mol_type = other DNA
ttaaaacagcctgtgggttgcacccactcacaggacccacgtggtgctagcactctggttctacggaacctttgtgcgcctgttttacaccccctccccaatttgtaacttagaagcaatttacaacactgatcaatagcaggcatggcgcaccagctatgtcttgatcaagcacttctgtttccccggaccgagtatcaatagactgttcacacggttgaaggagaaagcgtccgttatccggctaactacttcgagaaacccagtagcgccattgaagctgcagagtgtttcgctccacacttcccccgtgtagatcaggtcgatgagtcactgcaatcctcacgggcgaccgtggcagtggctgcgttggcggcctgcctatggggtaacccataggacgctctaatgtggacatggtgcgaagagtctattgagctagttagtagtcctccggcccctgaatgcggctaatcctaactgcggagcacatgccttcaatccagagggtagtgtgtcgtaatgggcaactctgcagcggaaccgactactttgggtgtccgtgtttccttttattcttacattggctgcttatggtgacaattacagaattgttaccatatagctattggattggccatccggtgtgcaatagagctattatatacctatttgttggctttataccactaaccttaaaatctgtgatcactctcgagtatatattaaccctcaatacaatcaaac

SEQ ID NO: 18488 - DNA, 747 bp, synthetic construct
  source 1..747: mol_type = other DNA
ttaaaacagcctgtgggttgcacccactcacaggacccacgtggtgctagcactctggttctacggaacctttgtgcgcctgttttacgccccctccccaatttgtaacttagaagcaatttacaacactgatcaatagcaggcatggcgcgccagctatgtcttgatcaagcacttctgtttccccggaccgagtatcaatagactgttcacacggttgaaggagaaagcgtccgttatccggctaactacttcgagaaacccagtagcgccattgaagctgcagagtgtttcgctccacacttcccccgtgtagatcaggtcgatgagtcactgcaatcctcacgggcgaccgtggcagtggctgcgctggcggcctgcctatggggcgacccataggacgctctaatgtggacatggtgcgaagagtctattgagctagttagtagtcctccggcccctgaatgcggctaatcctaactgcggagcacatgccttcaatccagagggtagtgtgtcgtaatgggcaactctgcagcggaaccgactactttgggtgtccgtgtttccttttattctcacattggctgcttatggtgacaattacagaattgttaccatatagctattggattggccatccggtgtgcaatagagctattatatacctatttgttggctttataccactaaccttaaaatctgtaaccactctcgagtatatattaaccctcaatacaatcaaac

SEQ ID NO: 18489 - DNA, 747 bp, synthetic construct
  source 1..747: mol_type = other DNA
ttaaaacagcctgtgggttgcacccactcacaggacccacgtggtgctagcactctggttctacggaacctttgtgcgcctgttttacgccccctccccaatttgtaacttagaagcaatttacaacactgatcaatagcaggcatggcgcaccagctatgtcttgatcaagcacttctgtttccccggaccgagtatcaatagactgttcacacggttgaaggagaaagcgtccgttatccggctaactacttcgagaaacccagtagcgccattgaagctgcagagtgtttcgctccacacttcccccgtgtagatcaggtcgatgagtcactgcaatcctcacgggcgaccgtggcagtggctgcgctggcggcctgcctatggggcgacccataggacgctctaatgtggacatggtgcgaagagtctattgagctagttagtagtcctccggcccctgaatgcggctaatcctaactgcggagcacatgccttcaatccagagggtagtgtgtcgtaatgggcaactctgcagcggaaccgactactttgggtgtccgtgtttccttttattctcacactggctgcttatggtgacaattacagaattgttaccatatagctattggattggccatccggtgtgtaatagagctattatatacctgtttgttggctttataccactaaccttaaaatctgtaaccactctcgagtatatattaaccctcaatacaattaaac

SEQ ID NO: 18490 - DNA, 747 bp, synthetic construct
  source 1..747: mol_type = other DNA
ttaaaacagcctgtgggttgcacccactcacaggacccacgtggtgctagcactctggttctacggaacctttgtgcgcctgttttacgccccctccccaatttgtaacttagaagcaatttacaacactgatcaatagcaggcatggtgcaccagctatgtcttgatcaagcacttctgtttccccggaccgagtatcaatagactgttcacacggttgaaggagaaagcgtccgttatccggctaactacttcgagaaacccagtagcgccattgaagctgcagagtgtttcgctccacacttcccccgtgtagatcaggtcgatgagtcactgcaatcctcacgggcgaccgtggcagtggctgcgctggcggcctgcctatggggcgacccataggacgctctaatgtggacatggtgcgaagagtctattgagctagttagtagtcctccggcccctgaatgcggctaatcctaactgcggagcacatgccttcaatccagagggtagtgtgtcgtaatgggcaactctgcagcggaaccgactactttgggtgtccgtgtttccttttattctcacactggctgcttatggtgacaattacagaattgttaccatatagctattggattggccatccggtgtgcaatagagctattatatacctgtttgttggctttataccactaaccttaaaatctgtaaccactctcgagtatatattaaccctcaatacaatcaaac

SEQ ID NO: 18491 - DNA, 747 bp, synthetic construct
  source 1..747: mol_type = other DNA
ttaaaacagcctgtgggttgcacccactcacaggacccacgtggtgctagcactctggttctacggaacctttgtgcgcctgttttacgccccctccccaatttgtaacttagaagcaatttacaacactgatcaatagcaggcatggcgcaccagctatgtcttgatcaagcacttctgtttccccggaccgagtatcaatagactgttcacacggttgaaggagaaagcgtccgttatccggctaactacttcgagaaacccagtagcgccattgaagccgcagagtgtttcgctccacacttcccccgtgtagatcaggtcgatgagtcactgcaatcctcacgggcgaccgtggcagtggctgcgctggcggcctgcctatggggcgacccataggacgctctaatgtggacatggtgcgaagagtctattgagctagttagtagtcctccggcccctgaatgcggctaatcctaactgcggagcacatgccttcaatccagagggtagtgtgtcgtaatgggcaactctgcagcggaaccgactactttgggtgtccgtgtttccttttattctcacattggctgcttatggtgacaattacagaattgttaccatatagctattggattggccatccggtgtgcaatagagctattatatacctatttgttggctttataccactaaccttaaaatctgtaaccactctcgagtatatattaaccctcaatacaatcaaac

SEQ ID NO: 18492 - DNA, 747 bp, synthetic construct
  source 1..747: mol_type = other DNA
ttaaaacagcctgtgggttgcacccactcacaggacccacgtggtgctagcactctggttctacggaacctttgtgcgcctgttttacgccccctccccaatttgtaacttagaagcaattcacaacactgatcaatagcaggcatggcgcaccagctatgtcttgatcaagcacttctgtttccccggaccgagtatcaatagactgttcacacggttgaaggagaaagcgtccgttatccggctaactacttcgagaaacccagtagcgccattgaagctgcagagtgtttcgctccacacttcccccgtgtagatcaggtcgatgagtcactgcaatcctcacgggcgaccgtggcagtggctgcgctggcggcctgcctatggggcgacccataggacgctctaatgtggacatggtgcgaagagtctattgagctagttagtagtcctccggcccctgaatgcggctaatcctaactgcggagcacatgccttcaatccagagggtagtgtgtcgtaatgggcaattctgcagcggaaccgactactttgggtgtccgtgtttcctttcattctcacactggctgcttatggtgacaattacagaattgttaccatatagctattggattggccatccggtgtgcaatagagctattatatacctgtttgttggctttataccactaaccttaaaatctgtaaccactctcgagtatatattgaccctcaacacaatcaaac

SEQ ID NO: 18493 - DNA, 747 bp, synthetic construct
  source 1..747: mol_type = other DNA
ttaaaacagcctgtgggttgcacccactcacaggacccacgtggtgctagcactctggttccacggaacctttgtgcgcctgttttatgccccctccccaatttgtaacttagaagcaatttacaacactgatcagtagcaggcatagcgcaccagctatgtcttgatcaagcacttctgtttccccggaccgagtatcaatagactgttcacacggttaaaggagaaagcgtccgttatccggctaactacttcgagaaacccagtagcgccattgaagctgcagagtgtttcgctccacacttcccccgtgtagatcaggtcgatgagtcactgcaatccccacgggcgaccgtggcagtggctgcgctggcggcctgcctatggggcaacccataggacgctctaatgtggacatggtgcgaagagtctattgagctagttagtagtcctccggcccctgaatgcggctaatcctaactgcggagcacatgccttcaatccagagggtagtgtgtcgtaatgggcaactctgcagcggaaccgactactttgggtgtccgtgtttccttttattctcacattggctgcttatggtgacaattacagaattgttaccatatagctattggattggccatccggtgtgcaatagagctatcatatacctatttgttggctttgtaccactaaccttaaaatccgtaaccactctcgagtatatattaaccctcaatacaatcaaac

SEQ ID NO: 18494 - DNA, 747 bp, synthetic construct
  source 1..747: mol_type = other DNA
ttaaaacagcctgtgggttgcacccactcacaggacccacgtggtgctagcactctggttctacggaacctttgtgcgcctgttttacgccccctccccaatttgtaacttagaagcaatttacaacactgatcaatagcaggcatggcgcgccagctatgtcttgatcaagcacttctgtttccccggaccgagtatcaatagactgttcacacggttgaaggagaaagcgtccgttatccggctaactacttcgagaaacccagtagcgccattgaagctgcagagtgtttcgctccacactttccccgtgtagatcaggtcgatgagtcactgcaatcctcacgggcgaccgtggcagtggctgcgctggcggcctgcctatggggcgacccataggacgctctaatgtggacatggtgcgaagagtctattgagctagttagtagtcctccggcccctgaatgcggctaatcctaactgcggagcacatgccttcaatccagagggtagtgtgtcgtaatgggcaactctgcagcggaaccgactactttgggtgtccgtgtttccttttattctcacattggctgcttatggtgacaattacagaattgttaccatatagctattggattggccatccggtgtgcaatagagctattatatacctatttgttggctttataccactaaccttaaagtctacaaccactctcgaatatatattaaccctcaatacaatcaaac

SEQ ID NO: 18495 - DNA, 747 bp, synthetic construct
  source 1..747: mol_type = other DNA
ttaaaacagcctgtgggttgtacccactcacaggacccacgcggtgctagcactctggttccacggaacctttgtgcgcctgttttacgtcccctccccaatttgtaacttagaagcaatttacagcactgatcaatagcaggcatggcgcaccagctatgtcttgatcaagcacctctgtttccccggaccgagtatcaatagactgttcacacggtcgaaggagaaagcgttcgttatccggctaactacttcgagaaacccagtagcgccattgaagctgcagagtgtttcgctccacacttcccccgtgtagatcaggtcgatgagtcactgcaatccccacgggcgaccgtggcagtggctgcgttggcggcctgcctatggggtaacccataggacgctctaatgtggacatggtgcgaagagtctattgagctagttagtagtcctccggcccctgaatgcggctaatcctaactgcggagcacatgccttcaatccagagggtagtgtgtcgtaatgggcaactctgcagcggaaccgactactttgggtgtccgtgtttccttttattctcacattggctgcttatggtgacaattacagaattgttaccatatagctattggattggccatccggtgtgcaatagagctattatatacctatttgttggctttgtaccactaaccttaaaatctgtaatcactctcgagtatatattgacccttaatacaattaaac

SEQ ID NO: 18496 - DNA, 747 bp, synthetic construct
  source 1..747: mol_type = other DNA
ttaaaacagcctgtgggttgtacccactcacaggacccacgcggtgcttgcactctggttccacggaacctttgtgcgcctgttttacgtcccctccccaatttgtaacttagaagcaatttacagcactgatcaatagcaggcatggcgcaccagctatgtcttgatcaagcacctctgtttccccggaccgagtatcaatagactgttcacacggtcgaaggagaaagcgttcgttatccggctaactacttcgagaaacccagtagcgccattgaaactgcagagtgtttcgctccacacttcccccgtgtagatcaggtcgatgagtcactgcaatccccacgggcgaccgtggcagtggctgcgttggcggcctgcctatggggtaacccataggacgctctaatgtggacatggtgcgaagagtctattgagctagttagtagtcctccggcccctgaatgcggctaatcctaactgcggagcacatgccttcaatccagagggtagtgtgtcgtaatgggcaactctgcagcggaaccgactactttgggtgtccgtgtttccttttattctcacattggctgcttatggtgacaattacagaattgttaccatatagctattggattggccacccggtgtgcaatagagctattatatacctatttgttggctttgtaccactaaccttaaagtctgtaatcactctcgagtatatattgacccttaatacgattaaac

SEQ ID NO: 18497 - DNA, 747 bp, synthetic construct
  source 1..747: mol_type = other DNA
ttaaaacagcctgtgggttgtacccactcacaggacccacgcggtgctagcactctggttccacggaacctttgtgcgcctgttttacgtcccctccccaatttgtaacttagaagcaatttacagtactgatcaatagcaggcatggcgcaccagctatgtcttgatcaagcacctctgtttccccggaccgagtatcaatagactgttcacacggtcgaaggagaaagcgttcgttatccggctaactacttcgagaaacccagtagcgccattgaaactgcagagtgtttcgctccacacttcccccgtgtagatcaggtcgatgagtcactgcaatccccacgggcgaccgtggcagtggctgcgttggcggcctgcctatggggtaacccataggacgctctaatgtggacatggtgcgaagagtctattgagctagttagtagtcctccggcccctgaatgcggctaatcctaactgcggagcacatgccttcaatccagagggtagtgtgtcgtaatgggcaactctgcagcggaaccgactactttgggtgtccgtgtttccttttattctcacattggctgcttatggtgacaattacagaattgttaccatatagctattggattggccatccggtgtgcaatagagctattatatacctatttgttggctttgtaccactaaccttaaaatctgtaatcactctcgagtatatattgacccttaatacaattaaac

SEQ ID NO: 18498 - DNA, 747 bp, synthetic construct
  source 1..747: mol_type = other DNA
ttaaaacagcctgtgggttgtacccactcacaggacccacgcggtgctagcactctggttccacggaacctttgtgcgcctgttttacgtcccctccccaatttgtaacttagaagcaatttacagcactgatcaatagcaggcatggcgcaccagctatgtcttgatcaagcacctctgtttccccggaccgagtatcaatagactgttcacacggtcgaaggagaaagcgttcgttatccggctaactacttcgagaaacccagtagcgccattgaaactgcagagtgtttcgctccacacttcccccgtgtagatcaggtcgatgagtcactgcaatccccacgggcgaccgtggcagtggctgcgttggcggcctgcctatggggtaacccataggacgctctaatgtggacatggtgcgaagagtctattgagctagttagtagtcctccggcccctgaatgcggctaatcctaactgcggagcacatgccttcaatccagagggtagtgtgtcgtaatgggcaactctgcagcggaaccgactactttgggtgtccgtgtttccttttattctcacattggctgcttatggtgacaattacagaattgttaccatatagctattggattggccatccggtgtgcaatagagctattatatacctatttgttggctttgtaccactaaccttaaaatctgtaatcaccctcgagtatatattgacccttaatacaattgaac

SEQ ID NO: 18499 - DNA, 747 bp, synthetic construct
  source 1..747: mol_type = other DNA
ttaaaacagcctgtgggttgtacccactcacaggacccacgcggtgctagcactctggttccacggaacctttgtgcgcctgttttacgtcccctccccaatttgtaacttagaagcaattcacagcactgatcaatagcaggcatggcgcaccagctatgtcttgatcaagcacctctgtttccccggaccgagtatcaatagactgttcacacggtcgaaggagaaagcgttcgttatccggctaactacttcgagaaacccagtagcgccattgaaactgcagagtgtttcgctccacacttcccccgtgtagatcaggtcgatgagtcactgcaatccccacgggcgaccgtggcagtggctgcgttggcggcctgcctatggggtaacccataggacgctctaatgtggacatggtgcgaagagtctattgagctagttagtagtcctccggcccctgaatgcggctaatcctaactgcggagcacatgccttcaatccagagggtagtgtgtcgtaatgggcaactctgcagcggaaccgactactttgggtgtccgtgtttccttttattctcacattggctgcttatggtgacaattatagaattgttaccatatagctattggattggccatccggtgtgcaatagagctattatatacctatttgttggctttgtaccactaaccttaaaatctgtaatcactctcgaatatatattgacccttaatacaattaaac

SEQ ID NO: 18500 - DNA, 747 bp, synthetic construct
  source 1..747: mol_type = other DNA
ttaaaacagcctgtgggttgtacccactcacaggacccacgcggtgctagcactctggctccacggaacctttgtgcgcctgttttacgtcccttccccaatttgtaacttagaagcaatttacagcactgatcaatagcaggcatggcgcaccagctatgtcttgatcaagcacctctgtttccccggaccgagtatcaatagactgttcacacggtcgaaggagaaagcgttcgttatccggctaactacttcgagaaacccagtagcgccattgaaactgcagagtgtttcgctccacacttcccccgtgtagatcaggtcgatgagtcactgcaatccccacgggcgaccgtggcagtggctgcgttggcggcctgcctatggggtaacccataggacgctctaatgtggacatggtgcgaagagtctattgagctagttagtagtcctccggcccctgaatgcggctaatcctaactgcggagcacatgccttcaatccagagggtagtgtgtcgtaatgggcaactctgcagcggaaccgactactttgggtgtccgtgtttccttttattctcacattggctgcttatggtgacaattacagaattgttaccatatagctattggattggccatccggtgtgcaatagagctattatatacctatttgttggctttgtaccactaaccttaagatctgtaatcactctcgagtttatattgacccttaatacaattaaac

SEQ ID NO: 18501 - DNA, 747 bp, synthetic construct
  source 1..747: mol_type = other DNA
ttaaaacagcctgtgggttgtacccactcacaggacccacgcggtgctagcactctggttccatggaacctttgtgcgcctgttttacgtcccctccccaatttgtaacttagaagcaatttacagcactgatcaatagcaggcatggcgcaccagctatgtcttgatcaagcacctctgtttccccggaccgagtatcaatagactgttcacacggtcgaaggagaaagcgttcgttatccggctaactacttcgagaaacccagtagcgccattgaaactgcagagtgtttcgctccacacttcccccgtgtagatcaggtcgatgagtcactgcaatccccacgggcgaccgtggcagtggctgcgttggcggcctgcctatggggtaacccataggacgctctaatgtggacatggtgcgaagagtctattgagctagttagtagtcctccggcccctgaatgcggctaatcctaactgcggagcacatgccttcaatccagagggtagtgtgtcgtaatgggcaactctgcagcggaaccgactactttgggtgtccgtgtttccttttattctcacattggctgcttatggtgacaattacagaattgttaccatatagctattggattggccatccggtgtgcaatagagctattatatacctatttgttggctttgtaccactaaccttaaaatctgtaatcactctcgagtatatattgacccttaacgcaattaaac

SEQ ID NO: 18502 - DNA, 747 bp, synthetic construct
  source 1..747: mol_type = other DNA
ttaaaacagcctgtgggttgtacccactcacaggacccacgcggtgctagcactctggttccacggaacctttgtgcgcctgttttacgtcccctccccaatttgtaacttagaagcaatttacagcactgatcaatagcaggcatggcgcaccagctatgtcttgatcgagcacctctgtttccccggaccgagtatcaatagactgttcacacggtcgaaggagaaagcgttcgttatccggctaactacttcgagaaacccagtagcgccattgaaactgcagagtgtttcgctccacacttcccccgtgtagatcaggtcgatgagtcactgcaatccccacgggcgaccgtggcagtggctgcgttggcggcctgcctatggggtaacccataggacgctctaatgtggacatggtgcgaagagtctattgagctagttagtagtcctccggcccctgaatgcggctaatcctaactgcggagcacatgccttcaatccagagggtagtgtgtcgtaatgggcaactctgcagcggaaccgactactttgggtgtccgtgtttccttttattctcacattggctgcttatggtgacaattacagaattgttaccatatagctattggattggccatccggtgtgcaatagagctatcatatacctatttgttggctttgtaccactaaccttaaaatctgtaatcaccctcgagtatatattgacccttaatacaattgaac

SEQ ID NO: 18503 - DNA, 747 bp, synthetic construct
  source 1..747: mol_type = other DNA
ttaaaacagcctgtgggttgtacccactcacaggacccacgcggtgctagcactctggttccacggaacctttgtgcgcctgttttacgtcccctccccaatttgtaacttagaagcaatttacagcactgatcaatagcaggcatggcgcaccagctatgtcttgatcaagcacctctgtttccccggaccgagtatcaatagactgttcacacggtcgaaggagaaagcgttcgttatccggctaactacttcgagaaacccagtagcgccattgaaactgcagagtgtttcgctccacacttcccccgtgtagatcaggtcgatgagtcactgcaatccccacgggcgaccgtggcagtggctgcgttggcggcctgcctatggggtaacccataggacgctctaatgtggacatggtgcgaagagtctattgagctagttagtagtcctccggcccctgaatgcggctaatcctaactgcggagcacatgccttcaatccagagggtagtgtgtcgtaatgggcaactctgcagcggaaccgactactttgggtgtccgtgtttccttttattctcacattggctgcttatggtgacaattacagaattgttaccatatagctattggattggccatccggtgtgcaatagagctattatatacctatttgttggctttgtaccactaaccttaaaacctgtgatcactctcgagtgtatattgacccttaatacaattaaac

SEQ ID NO: 18504 - DNA, 747 bp, synthetic construct
  source 1..747: mol_type = other DNA
ttaaaacagcctgtgggttgtacccactcacaggacccacgcggtgctagcactctggttccacggaacctttgtgcgcctgttttacgtcccctccccaatttgtaacttagaagcaatttacagcactgatcaatagcaggcatggcgcaccagctatgtcttgatcaagcacctctgtttccccggaccgagtatcaatagactgttcacacggtcgaaggagaaagcgttcgttatccggctaactacttcgagaaacccagtagcgccattgaagctgcagagtgtttcgctccacacttcccccgtgtagatcaggtcgatgagtcactgcaatccccacgggcgaccgtggcagtggctgcgttggcggcctgcctatggggtaacccataggacgctctaatgtggacatggtgcgaagagtctattgagctagttagtagtcctccggcccctgaatgcggctaatcctaactgcggagcacatgccttcaatccagagggtagtgtgtcgtaatgggcaactctgcagcggaaccgactactttgggtgtccgtgtttccttttattctcacattggctgcttatggtgacaattacaggattgttaccatatagctattggattggccatccggtgagcaatagagctattatatacctatttgttggctttataccactaaccttaaaatctgtaatcactctcgagtatatattgacccttaatacaattaaac

SEQ ID NO: 18505 - DNA, 743 bp, synthetic construct
  source 1..743: mol_type = other DNA
ttaaaacagcctgtgggttgtacccactcacagggcccactgggcgccagcactctggtaatacgttacctttgtgcgcctgttttacctccccctaccctggaacactttagaagtaaagcatttctggtcaatagaaggtgtggcgaaccagctgcatctcgaccaagcacttctgtttccccggactgagtatcaatagactgctaacgcggtcgaaggagaaaacgttcgttatccggctagctacttcgagaagcttagtaacactatgaaagttgcagagtgtttcactcagcacttcccccgtgtagatcaggtcgatgagtcaccgcggcccccacgggcgaccgtggcggtggctgcgttggcggcctgcctgtggggtaacccacaggacgctctaatacagacatggtgtgaagagcctattgagctagctagtagtcctccggcccctgaatgcggctaatcctaactgcggagcacatgctcgtgagccagcgagtagtgtgtcgtaatgggtaactctgcagcggaaccgactactttgggcgtccgtgtttctttttattcttacattggctgcttatggtgacaattaaagaattggcaccatatagctattggattggccatcctgtgactaacagagctattatatatctctttgttggatttgttcctttgaggctcactacttataacacactttgttttatattgactctcaattcagcaaa

SEQ ID NO: 18506 - DNA, 743 bp, synthetic construct
  source 1..743: mol_type = other DNA
ttaaaacagcctgtgggttgtacccactcacagggcccactgggcgctagcactctggtaatatgttacctttgtgcgcctgttttacctccccctaccctggaacactttagaagtaaagcatttctggtcaatagaaggtgtggcgaaccagctgcatctcgaccaagcacttctgtttccccggactgagtatcaatagactgctaacgcggtcgaaggagaaaacgttcgttatccggctagctacttcgagaagcctagtaacaccatgaaagttgcagagtgtttcactcagcacttcccccgtgtagatcaggtcgatgagtcaccgcgacccccacgggcgaccgtggcggtggctgcgctggcggcctgcctgtggggcaacccataggacgctctaatacagacatggtgtgaagagcctattgagctagctagtagtcctccggcccctgaatgcggctaatcctaactgcggagcacatgctcgtgagccagcgagtagtgtgtcgtaatgggtaactctgcagcggaaccgactactttgggtgtccgtgtttctttttattcctacattggctgcttatggtgacaattaaagaattggcaccatatagctattggattggccatcctgtgactaacagagctattatatatctctttgttggatttgttcctttgaggctcactacttataacacactttgttttatattgactctcaatacagcaaa

SEQ ID NO: 18507 - DNA, 743 bp, synthetic construct
  source 1..743: mol_type = other DNA
ttaaaacagcctgtgggttgtacccactcacagggcccactgggcgccagcactctggtaatacgttacctttgtgcgcctgttttacctccccctaccctggaacactttagaagtaaagcatttctggtcaatagaaggtgtggcgagccagctgcatctcgaccaagcacttctgtttccccggactgagtatcaatagactgctaacgtggtcgaaggagaaaacgttcgttatccggctagctacttcgagaagcctagtaacaccatgaaagttgcagagtgtttcactcagcacttcccccgtgtagatcaggtcgatgagtcaccgcgacccccacgggcgaccgtggcggtggctgcgttggcggcctgcctgtggggcaacccataggacgctctaatacagacatggtgtgaagagcctattgagctagctagtagtcctccggcccctgaatgcggctaatcctaactgcggagcacatgctcgtgagccagcgagtagtgtgtcgtaatgggtaactctgcagcggaaccgactactttgggtgtccgtgtttctttttattcttacaatggctgcttatggtgacaattaaagaattggcaccatatagctattggattggccatcctgtgactaacagagctattatatatctctttgttggattcattcctttgaggctcactacttataacacactttgttttatattgactctcaattcagcaaa

SEQ ID NO: 18508 - DNA, 743 bp, synthetic construct
  source 1..743: mol_type = other DNA
ttaaaacagcctgtgggttgtacccactcacagggcccactgggcgccagcactctggtaatacgttacctttgtgcgcctgttttacctccccctaccctggaacactttagaagtaaagcatatccggtcaatagaaggtgcggcgaaccagctgcatcccgaccaagcacttctgtttccccggactgagtatcaatagactgctaccgcggttgaaggagaaaacgttcgttatccggctagctacttcgagaagcccagtaacaccatgaaagttgcagagtgtttcactcagcacttcccccgtgtagatcaggtcgatgagtcaccgcgacccccacgggcgaccgtggcggtggctgcgttggcggcctgcctgtggggcaacccacaggacgctctaatacagacatggtgtgaagagcctattgagctagctagtagtcctccggcccctgaatgcggctaatcctaactgcggagcacatgttcgtgaaccagcgagtagtgtgtcgtaatgggtaactctgcagcggaaccgactactttgggtgtccgtgtttctttttattcttacattggctgcttatggtgacaattaaggaattggcaccatatagctattggattggccatcctgtgactaacagagctattatatatctctttgttggatttgttcccttgaggctcgctacttataacacactttgttttatattgactctcaattcagcaaa

SEQ ID NO: 18509 - DNA, 743 bp, synthetic construct
  source 1..743: mol_type = other DNA
ttaaaacagcctgtgggttgtacccactcacggggcccactgggcgtcagcactctggtaatacgttacctttgtgcgcctgttttacctccccctaccctggaacactttagaagtaaagcatatccggtcaatagaaggtgtggcgaaccagctgcatctcgaccaagcacttctgtttccccggactgagtatcaatagactgctaccgcggtcgaaggagaaaacgttcgttatccggctagctacttcgagaagcccagtaacaccatgaaagttgcagagtgtttcattcagcacttcccccgtgtagatcaggtcgatgagtcaccgcgacccccacgggtgaccgtggcggtggctgcgttggcggcctgcctgtggggcaacccacaggacgctctaatacagacatggtgtgaagagcctattgagctagctagtagtcctccggcccctgaatgcggctaatcctaactgcggagcacatgctcgtgaaccagcgagtagtgtgtcgtaatgggtaactctgcagcggaaccgactactttgggtgtccgtgtttctttttattctcacattggctgcttatggtgacaattaaagaattggcaccatatagctattggattggccatcccgtgactaacagagctattatatacctctttgttggatttgttcccttgaggctcactacttataacacactttgttttatattgactctcaattcagcaaa

SEQ ID NO: 18510 - DNA, 743 bp, synthetic construct
  source 1..743: mol_type = other DNA
ttaaaacagcctgtgggttgtacccactcacagggcccactgggcgccagcactctggtaatgcgttacctttgtgcgcctgttttacccccccctaccctggaacactttagaagtaaagcatttccggtcaatagaaggtgcggcgaaccagctgcatctcgaccaagcacttctgtttccccggactgagtatcaatagactgctaacgcggtcgaaggagaaaacgttcgttacccggctagctacttcgagaagcctagtaacgccatgaaagttgcagagtgtttcgctcagcacttcccccgtgtagatcaggccgatgagtcaccgcgacccccacgggcgaccgtggcggtggctgcgttggcggcctgcctgtggggcaacccataggacgctctaatacagacatggtgtgaagagcctattgagctagctagtagtcctccggcccctgaatgcggctaatcctaactgcggagcacatgctcgtgagccagcgagtagtgtgtcgtaatgggtaactctgcagcggaaccgactactttgggtgtccgtgtttctttttattctcacattggctgcttatggtgacaattaaagaattgacaccatatagctattggattggccatcctgcgactaacagagctattatatatctttttgttggatttgttcccttgaggcttactacttataacacactttgttttatattgactctcaattcagcaaa

SEQ ID NO: 18511 - DNA, 742 bp, synthetic construct
  source 1..742: mol_type = other DNA
ttaaaacagcctgtgggttgtacccacccacagggcccactgggcgctagcactctggtattacggtacctttgtgcgcctgttttatttcccttccccattgtaactttagaagaaacaaaactggatcaatagcccatcacccaaaccagggtggtgacgatcaagcacttctgtttccccggatctagtatcaatagactgttagcacggttgaaggagaacgattcgttatccggctcactacttcgagaagcctagtaccactatgaaagtgaaatagcgtttcgctcagcacaaccccagtgtagatcaggccgatgagtcactgcattccccacgggcgaccgtggcagtggctgcgttggcggcctgcctgtgggtccccccacaggacgctaattcatggacatggtgcgaagagcctattgagctagtgagtagtcctccggcccctgaatgcggctaatcctaaccacggagcatccgctggcagtccagccagtagggtgtcgtaacgggtaactctgtggcggaaccgactactttgggtgtccgtgtttcctgttttacttactttggctgcttatggtgacaatttacggattgttgccatatagctattggattggccatccggattataaacacacaatactgttattttttcctttttgggatttcttcccttgagttttactaattattttatcttgttaatagttttaaagttgaatacatt

SEQ ID NO: 18512 - DNA, 744 bp, synthetic construct
  source 1..744: mol_type = other DNA
ttaaaacagcctgtgggttgttcccacccacagggcccactgggcgctagcacactgattctgcgggatctttgtgcgcctgttttataacccttccctaagcagcaacttagaagcttcacactatcacgaccagtagcgggcgtggcgcgccagtcacgtctcggtcaagcacttctgtttccccggactgagtatcaatagactgctcacgcggttgaaggagaaaacgttcgttatccggctaactacttcgagaaacctagtagcaccgtgaaagttgcggagtgtttcgctcagcacttcccccgtgtagatcaggtcgatgagtcactgtaaaccccacgggcgaccgtgacagtggctgcgttggcggcctgcctatggggtaacccatgggacgctctaatacagacacggtgtgaagagtccattgagctagttagtagtcctccggcccctgaatgcggctaatcctaactgcggagcgcgcaccctcaacccagggggcggcgcgtcgtaatgggtaactctgcagcggaaccgactactttgggtgtccgtgtttccttttattccttattggctgcttatggtgacaattgaaaagttgttaccatatagctattggattggccatccggtgaccaacagagctattgtttacctgtttattggatacgtccctcttaatctcaaggccattcaaactcttgattatatattactccttaactgtaagaa

SEQ ID NO: 18513 - DNA, 731 bp, synthetic construct
  source 1..731: mol_type = other DNA
tgtgggttgcacccacccacagggcccactgggcgctagcactctggtgtcacggcacctttgtgcgcctgttttatcaccctaccccacacgagacttagaagtagtacacaaccgaccaatagtaggtgtggcgcaccagccacatcttggtcaagcacttctgtttccccgggttgagtatcaataagctgttcacacggctgaaggagaaagcacccgttacccggccaactacttcgagaaacctagtaccgccatggacgttgcaaggtgtttcgctcagcacttcccccgtgtagatcaggccgatgagtcaccgcatcccccacgggtgaccgtggcggtggctgcgttggcggcctgcctatgggttaacccataggacgccttaatactgacatggtgcgaagagtctattgagctagttggtagtcctccggcccctgaatgcggctaatcctaactgcggagcacatactcacaaaccagtgagcggtgtgtcgtaacgggtaactctgcagcggaaccgactactttgggtgtccgtgtttccttttatctttatattggctgcttatggtgacaatcagagaattgttaccatatagctattggattggccatccggtgtctaatagagctattatatacctgtttattggattcactccgttgacctataaatccctaaacaccttgtgctatattttgaatttaaacacacgaaa

SEQ ID NO: 18514 - DNA, 742 bp, synthetic construct
  source 1..742: mol_type = other DNA
ttaaaacagcctgtgggttgtacccactcacagggcctactgggcgctagcactctggtaatacgttacctttgtgcgcctgttttacctccccttaccctggaacactttagaagtaaagcattcctggtcaatagaaggtgtggcgaaccagctgcatcacgaccaagcacttctgtttccccggactgagtatcaatagactgctaacgcggttgaaggagaaaacgttcgttatccggctagctacttcgagaagcctagtaacaccatgaaagttgcagagtgtttcactcagcacttcccccgtgtagatcaggtcgatgagtcaccgcgacccccacgggcgaccgtggcggtggctgcgttggcggcctgcctgtggggtaacccataggacgctctaatacagacatggtgtgaagagcctattgagctagttagtagtcctccggcccctgaatgcggctaatcctaactgcggagcacacgctcgtgagccagcgagtagtgtgtcgtaatgggtaactctgcagcggaaccgactactttgggtgtccgtgtttcttttattcttacattggctgcttatggtgacaatcaaagaattggcaccatatagctattggattggccatcctgtgactaacagagctattatatatctctttgttggatttgttcctttgagactcactacttataacacactttgtttcatattgactctcaactcagcaaa

SEQ ID NO: 18515 - DNA, 742 bp, synthetic construct
  source 1..742: mol_type = other DNA
ttaaaacagcctgtgggttgtacccactcacagggcctactgggcgctagcactctggtaatacgttacctttgtgcgcctgttttacctccccctaccctggaacactttagaagtaaagcattcctggtcaatagaaggtgtggcgaaccagctgcatcacgaccaagtacttctgtttccccggactgagtatcaatagactgctaacgcggttgaaggagaaaacgttcgttatccggctagctacttcgagaagcctagtaacaccatgaaagttgcagagtgtttcactcagcacttcccccgtgtagatcaggtcgatgagtcaccgcgatccccacgggcgaccgtggcggtggctgcgttggcggcctgcctatggggcaacccataggacgctctaatacagacatggtgtgaagagcctattgagctagttagtagtcctccggcccctgaatgcggctaatcctaactgcggagcacacgctcgtgagccagcgagtagtgtgtcgtaatgggtaactctgcagcggaaccgactactttgggtgtccgtgtttcttttattcttacattggctgcttatggtgacaattaaagaattggcaccatatagctattggattggccatcctgtgactaacagagctattatatatctctttgttggatttgttcctttgaggctcactacttataacacactttgtttcatattgactctcaactcagcaaa

SEQ ID NO: 18516 - DNA, 727 bp, synthetic construct
  source 1..727: mol_type = other DNA
cacccactcacagggcccactgggcgctagcactctgattttacgaaatccttgtgcgcctgttttatatcccttccctaattcgaaacgtagaagcaatgcgcaccactgatcaatagtaggcgtaacgcgccagttacgtcatgatcaagcatatctgttcccccggactgagtatcaatagactgcttacgcggttgaaggagaaaacgttcgttatccggctaactacttcgagaagcccagtaacaccatggaagctgcagggtgtttcgctcagcacttcccccgtgtagatcaggtcgatgagccactgcaatccccacaggtgactgtggcagtggctgcgttggcggcctgcctatggggagacccataggacgctctaatgtggacatggtgcgaagagcctattgagctagttagtagtcctccggcccctgaatgcggctaatcctaactgcggagcacatgccttcaacccagagggtagtgtgtcgtaacgggcaactctgcagcggaaccgactactttgggtgtccgtgtttctttttatttttatattggctgcttatggtgacaattacagaattgttaccatatagctattggattggccatccggtgtgtaatagagctgttatatacctatttgttggctttgtaccactaactttaaaatctataactaccctcaactttgtattaactctcaatacagctgatc

SEQ ID NO: 18517 - DNA, 729 bp, synthetic construct
  source 1..729: mol_type = other DNA
gggttgttcccacccacagggcccactgggcgccagcactctgattccacggaatctttgtgcgcctgttttacaaccctccccaatttgtaacgtagaagcaatacacactactgatcaatagtaggcatggcgcgccagtcatgtcatgatcaagcacttctgttccccggactgagtatcaatagactgctcacgcggttgaaggagaaaacgttcgttacccggctaactacttcaagaaacctagtagcaccatggaagctgcggagtgtttcgctcagcacttcccccgtgtagatcaggtcgatgagtcactgcaatccccacgggcgaccgtggcagtggctgcgttggcggcctgcctatggggtaacccataggacgctctaatgtggacatggtgcgaagagtctattgagctagttagtagtcctccggcccctgaatgcggctaatcctaactgcggagcacatgccttcaacccaggaggtggtgtgtcgtaacgggtaactctgcagcggaaccgactactttgggtgtccgtgtttccttttatccttatattggctgcttatggtgacaatcacggaattgttgccatatagctattggattggccatccggtgtctaacagagctattgtatacctatttgttggatttactcccctatcatacaaatctctgaacactttgtgctttatactgaacttaaacacacgaaa

SEQ ID NO: 18518 - DNA, 730 bp, synthetic construct
  source 1..730: mol_type = other DNA
gggttgttcccacccacagggcccactgggcgccagcactctgattccacggaatctttgtgcgcctgttttacaacccttcccaatctgtaacgtagaagtaatgcacactattgatcaatagtaggcatggcgcgccagtcatgtcgtgatcaagcacttctgttcccccggactgagtatcaatagactgctcacgcggttgaaggagaaaacgttcgttacccggctaactacttcgagaaacctagtagcaccatggaagctgcagagtgtttcgctcagcacctcccccgtgtagatcaggtcgatgagtcactgcaatccccacgggcgaccgtggcagtggctgcgttggcggcctgcctatggggtaacccataggacgctctaatgtggacatggtgcgaagagtctattgagctagttagtagtcctccggcccctgaatgcggctaatcctaactgcggagcacatgccttcaacccaggaggtggtgtgtcgtaacgggtaactctgcagcggaaccgactactttgggtgtccgtgtttccttttatccttatactggctgcttatggtgacaatcacggaattgttaccatatagctattggattggccatccggtgtctaatagagctattgtgtacctatttgttggattcactcccctatcgtataaatctctgaacactttgtgttttatattgaacttaaacacacgaaa

SEQ ID NO: 18519 - DNA, 747 bp, synthetic construct
  source 1..747: mol_type = other DNA
ttaaaacagcctgtgggttgtacccactcacaggacccacgcggtgctagcactctggttccacggaacctttgtgcgcctgttttacgtcccctccccaatttgtaacttagaagcaatatacagcactgatcaatagcaggcatggcgcaccagctatgtcttgatcaagcacctctgtttccccggaccgagtatcaatagactgttcacacggtcgaaggagaaagcgttcgttatccggctaactacttcgagaaacccagtagcgccattgaaactgcagagtgtttcgctccacacttcccccgtgtagatcaggtcgatgagtcactgcaatccccacgggcgaccgtggcagtggctgcgttggcggcctgcctatggggtaacccataggacgctctaatgtggacatggtgcgaagagtctattgagctagttagtagtcctccggcccctgaatgcggctaatcctaactgcggagcacatgccttcaatccagagggtagtgtgtcgtaatgggcaactctgcagcggaaccgactactttgggtgtccgtgtttccttttattctcacattggctgcttatggtgacaattacagaattgttaccatatagctattggattggccatccggtgtgcaatagagctattatatacctatttgttggctttgtaccactaaccttaaaatctgtaatcactctcgagtgtatattgacccttaatacaattaaac

SEQ ID NO: 18520 - DNA, 738 bp, synthetic construct
  source 1..738: mol_type = other DNA
agcctgtgggttgttcccacccacagggcccactgggcgctagcacactgattctgcgggatctttgtgcgcctgttttataaccccttccctaagcagcaacttagaagcttcacactatcacgaccagtagtgggcgtggcgcgccagtcacgtcttggtcaagcacttctgtttccccggactgagtatcaatagactgctcacgcggttgaaggagaaaacgttcgttatccggctaactacttcgagaagcctagtagcatcgtgaaagttgcggagtgtttcgctcggcacttcccccgtgtagatcaggtcgatgagtcactgtaaaccccacgggcgaccgtgacagtggctgcgttggcggcctgcccatggggtaacccatgggacgctctaatacagacacggtgtgaagagtctattgagctagttagtagtcctccggcccctgaatgcggctaatcctaactgcggagcgcgcaccctcaacccagggggcggcgcgtcgtaacgggtaactctgcagcggaaccgactactttgggtgtccgtgtttccttttatcccttattggctgcttatggtgacaattgaaaagttgttaccatatagctattggattggccatccggtgaccaacagagctattgtttacctgtttattggatacgtccctcttaatctcaaggccattcaaactcttgattacatattactccttaactgtaagaa

SEQ ID NO: 18521 - DNA, 744 bp, synthetic construct
  source 1..744: mol_type = other DNA
ttaaaacagcctgtgggttgtacccactcacagggcccactgggcgttagcactctggtactaaggtacctttgtgcgcctgttttaactccctttccctgaagtaacttagaagcagtaaactaatgatcaatagtgggcatgacataccagccatgtctcgatcaagcacttctgtttccccggaccgagtatcaataggctgctcgcgcggctgaaagagaaaacgttcgttacccggccagctacttcgagaagcttagtaccatcatgaacgaagcagagcgtttcgctcagcacaatcccagtgtagatcaggctgatgagtcactgcaaaccccatgggcgaccatggcagtggctgcgttggcggcctgcccatggagaaatccatgggacgctctaattctgacatggtgcgaagagcctattgagctagctggtagtcctccggcccctgaatgcggctaatcctaactgcggagcacgcacccacaaaccagtgggcagtgtgtcgtaatgggtaactctgcagcggaaccgactactttgggtgtccgtgtttccttttattcttatattggctgcttatggtgacaatcaaagagttgttaccatatagctattggattggccatccggtgtgcaacagagcaattgtttacctatttattgggtttgtaccactaacgttgaagtctgtgaccacactcaactttatcctgaacctcaatacagtaaaac

SEQ ID NO: 18522 - DNA, 747 bp, synthetic construct
  source 1..747: mol_type = other DNA
ttaaaacagcctgtgggttgtacccactcacaggacccacgcggtgctagcactctggttccacggaacctttgtgcgcctgttttacgtcccctccccaatttgtaacttagaagcaatttacagcactgatcaatagcaggcatggcgcaccagctatgtcttgatcaagcacctctgtttccccggaccgagtatcaatagactgttcacacggtcgaaggagaaagcgttcgttatccggctaactacttcgagaaacccagtagcgccattgaaactgcagagtgtttcgctccacacttcccccgtgtagatcaggtcgatgagtcactgcaatccccacgggcgaccgtggcagtggctgcgttggcggcctgcctatggggtaacccataggacgctctaatgtggacatggtgcgaagagtctattgagctagttagtagtcctccggcccctgaatgcggctaatcctaactgcggagcacatgccttcaatccagagggtagtgtgtcgtaatgggcaactctgcagcggaaccgactactttgggtgtccgtgtttccttttattctcacattggctgcttatggtgacaattacagaattgttaccatatagctattggattggccatccggtgtgcaatagagctattatatacctatttgttggctttgtaccactaaccttaaaatctgtgatcactctcgagtatatattgacccttaatacaattaaac

SEQ ID NO: 18523 - DNA, 727 bp, synthetic construct
  source 1..727: mol_type = other DNA
tgttcccacccacagggcccactgggcgccagcactctgattccatggaatctttgtgcgcctgttttataacccttccccgatttgtaacgtagaagtaatacacactacagatcaatagtaggcatggcgcgccagtcatgtctcgatcaagcacttctgtttccccggactgagtatcaatagactgcccacgcggttgaaggagaaaacgtccgttacccggctaactacttcgagaaacccagtagcaccatataagctgcagagtgtttcgctcagcacttcccccgtgtagatcaggccgatgagtcactgcaacccccacgggcgaccgtggcagtggctgcgctggcggcctgcctatggggcaacccataggacgctctaatgtggacatggtgcgaagagtctattgagctagttagtagtcctccggcccctgaatgcggctaatcctaactgcggagcacatgccttcaatccaggaggtggtgtgtcgtaacgggtaactctgcagcggaaccgactactttgggtgtccgtgtttccttttatccttatattggctgcttatggtgacaatcacggaattgttgccatatagctattggattggccatccggtgtctaatagagctattgtgtacctatttgttggatttactccactgtcatataaatctctgaacactttgtgctttatattgaacttaaacacacgaaa

SEQ ID NO: 18524 - DNA, 728 bp, synthetic construct
  source 1..728: mol_type = other DNA
gttgttcccacccacagggcccactgggcgccagcactctgattccacggaacctttgtgcgcctgttttacaaccctccccaatttgtaacgtagaagtaatacacactactgatcaatagtaggcatggcgcgccagtcatgtcatgatcaagcacttctgttctcccggactgagtatcaatagactgctcacgcggttgaaggagaaaacgttcgttacccggctaactacttcaagaaacctagtagcaccatggaaactgcggagcgtttcgctcagcacttcccccgtgtagatcaggtcgatgagtcactgcaatccccacgggcgaccgtggcagtggctgcgttggcggcctgcctatggggtaacccataggacgctctaatgtggacatggtgcgaagagtctattgagctagttagtagtcctccggcccctgaatgcggctaatcctaactgcggagcacatgccttcaacccaggaggtggtgtgtcgtaacgggtaactctgcagcggaaccgactactttgggtgtccgtgtttccttttatccttatattggctgcttatggtgacaatcacggaattgttgccatatagctattggattggccatccggtgtctaacagagctattgtatacctatttgttggatttactcccctatcatacaaatctctgaacactttgtgctttatattgaacttaaacacacgaaa

SEQ ID NO: 18525 - DNA, 747 bp, synthetic construct
  source 1..747: mol_type = other DNA
ttaaaacagcctgtgggttgtacccactcacaggacccacgcggtgctagcactctggttccacggaacctttgtgcgcctgttttacgtcccctccccaatttgtaacttagaagcaatttacagcactgatcaatagcaggcatggcgcaccagctatgtcttgatcaagcacctctgtttccccggaccgagtatcaatagactgttcacacggtcgaaggagaaagcgttcgttatccggctaactacttcgagaaacccagtagcgccattgaagctgcagagtgtttcgctccacacttcccccgtgtagatcaggtcgatgagtcactgcaatccccacgggcgaccgtggcagtggctgcgttggcggcctgcctatggggtaacccataggacgctctaatgtggacatggtgcgaagagtctattgagctagttagtagtcctccggcccctgaatgcggctaatcctaactgcggagcacatgccttcaatccagagggtagtgtgtcgtaatgggcaactctgcagcggaaccgactactttgggtgtccgtgtttccttttattctcacattggctgcttatggtgacaattacagaattgttaccatatagctattggattggccatccggtgtgcaatagagctattatatacctatttgttggctttataccactaaccttaaaatctgtaatcactctcgagtatatattgacccttaatacaattaaac

SEQ ID NO: 18526 - DNA, 723 bp, synthetic construct
  source 1..723: mol_type = other DNA
ccactcacagggcccactgggcgctagcactctgattctgcggaatctttgtgcgcctgttttacaacccctcccccaatttgtaacttagaagtagtgcacatcaccgatcaacagcaagcgtggcgcgccagccatgtttagatcaagcacttctgtttccccggactgagtatcaatagactgctcacgcggttgaaggagaaaacgttcgttacccgactaactacttcgagaaacctagtagcaccatcgaaactgcagggtgtttcgctcagcacttcccccgtgtagatcaggtcgatgagtcactgcaatccccacgggcgaccgtggcagtggctgcgttggcggcctgcctatgggcttacccataggacgccctaatgtggacatggtgtgaagagtctattgagctagttagtagtcctccggcccctgaatgcggctaatcctaactgcggagcgcataccctcaatccagggggtggtgcgtcgtaatgggcaactctgcagcggaaccgactactttgggtgtccgtgtttccttttattcttacattggctgcttatggtgacaattgagaaattgttaccatatagctattggattggccatccagtgtctaacagagcaattgtatacttatttgttggattcattccactgtcacacacatccattaataccctatactacatcataaaattgaacacaagaaa

SEQ ID NO: 18527 - DNA, 725 bp, synthetic construct
  source 1..725: mol_type = other DNA
ccacccacagggcccactgggcgttagcacactgattctaaggaatctttgtgcgcctgttttatatccctcccctccaaaagtgtaacttagaagtttaatgcactcacgaccaatagcgggcgcgacgcaccagtcacgtcttggtcaagtacttctgtctccccgggccaagtatcaatagactgcttacgcggttgaaggagaaaacgctcgttacccggctaactacttcgagaaacccagtagcaccatggaagttgcagggtgtttcgttcagcacttcccccgtgtagatcaggtcgatgagtcactgcaaaccccacgggcgaccgtggcagtggctgcgttggcggcctgcccatggggtaacccatgggacgctctaatacagacatggtgtgaagagtctattgagctggttagtagtcctccggcccctgaatgcggctaatcctaactgcggagcacacaccctcaacccagggggcggtgtgtcgtaacgggtaactctgcagcggaaccgactactttgggtgtccgtgtttccttttatatttactatggctgcttatggtgacaattgaagaattgttaccatatagctattggattggccatccggtgtctaacagagcaattgtatacttatttgttggatttgtccctctatcacacacacctctcaaaaccttatactatattataaagttgaatacaggaag

SEQ ID NO: 18528 - DNA, 725 bp, synthetic construct
  source 1..725: mol_type = other DNA
caacccacagggcccactgggcgttagcacactgatttcaaggaatctttgtgcgcctgttttatatccctcccccccaaaagtgtaacttagaagtttaatgcactcacgaccaatagtaggcgagacgcaccagtcacgtcttggtcaagtacttctgtctccccgggcccagtatcaatagactgcttacgcggttgaaggagaaaacgctcgttacccgactaactacttcgagaaacccagtagcaccatgaaagttgcagggtgtttcgttcagcacttcccccgtgtagatcaggtcgatgagtcactgcaaaccccacgggcgaccgtggcagtggctgcgttggcggcctgcccatggggtaacccatgggacgctctaatacagacatggtgtgaagagtctattgagctagttagtaatcctccggcccctgaatgcggctaatcctaactgcggagcacacaccctcaacccagggggcggtgtgtcgtaacgggtaactctgcagcggaaccgactactttgggtgtccgtgtttccttttatacttactgtggctgcttatggtgacaattgaagaattgttaccatatagctattggattggccatccggtgtctaatagagcaattgtgtacctatttgttggatttgtccctctgtcatacacacctctcaataccttatactatattataaagttgaatacaggaag

SEQ ID NO: 18529 - DNA, 723 bp, synthetic construct
  source 1..723: mol_type = other DNA
ccactcacagggcccactgggcgctagcactctgattctgcggaatctttgtgcgcctgttttacaacccctcccccaatttgtaacttagaagtagtgcacatcaccgatcaacagcaagcgtggcgcgccagccatgtttagatcaagcacttctgtttccccggactgagtatcaatagactgctcacgcggttgaaggagaaaacgttcgttacccgactgactacttcgagaaacctagtagcaccatcgaaactgcagggtgtttcgctcagcacttcccccgtgtagatcaggtcgatgagtcactgcaatccccacgggcgaccgtggcagtggctgcgttggcggcctgcctatgggcttacccataggacgccctaatgtggacatggtgtgaagagtctattgagctagttagtagtcctccggcccctgaatgcggctaatcttaactgcggagcgcataccctcaatccagggggtggtgcgtcgtaatgggcaactctgcagcggaaccgactactttgggtgtccgtgtttccttttattcttacattggctgcttatggtgacaattgagaaattgttaccatatagctattggattggccatccagtgtctaacagagcaattgtatacttatttgttggattcattccactgtcacacacatccattaataccctacactacatcataaaattgaacacaagaaa

SEQ ID NO: 18530 - DNA, 731 bp, synthetic construct
  source 1..731: mol_type = other DNA
tgtgggttgtacccactcacagggcccactgggcgccagcactctggtactgcggtacctttgtgcgcctgttttatcaccccaccccatttgaaacgtagaagcaatgcacaaccggccaatagtaggtgtggcgcaccagccacatcttggccaagcacttctgtttccccgggtttagtatcaataagctgctcacgcggctgaaggagaaaacacccgttatccggccgactacttcgagaaacctagtaccactatgaacgttgcaaggcgtttcgctcagcacttcccccgtgtagatcaggctgatgagtcaccgcatccctcacgggcgaccgtggcggtggctgcgttggcggcctgcctatgggcttgcccataggacgccttaacactgacatggtgcgaagagtctattgagctagttggtagtcctccggcccctgaatgcggctaatcctaactgcggagcacacactcacaaaccagtgagcggtgtgtcgtaacgggcaactctgcagcggaaccgactactttgggtgtccgtgtttccttttattcttatactggctgcttatggtgacaattaaagaattgttaccatatagctattggattggccatccggtgtctaacagagatattatatacttgtttgttggattcacctcgttatcatacaaatcccttaacactttgtgctttatcttgagtttgaattcaaaaag

SEQ ID NO: 18531 - DNA, 747 bp, synthetic construct
  source 1..747: mol_type = other DNA
ttaaaacagcctgtgggttgtacccactcacaggacccacgcggtgctagcactctggttccacggaacctttgtgcgcctgttttacgtcccctccccaatttgtaacttagaagcaatatacagcactgatcaatagcaggcatggcgcaccagctatgtcttgatcaagcacctctgtttccccggaccgagtatcaatagactgttcacacggtcgaaggagaaagcgttcgttatccggctaactacttcgagaaacccagtagcgccattgaaactgcagagtgtttcgctccacacttcccccgtgtagatcaggtcgatgagtcactgcaatccccacgggcgaccgtggcagtggctgcgttggcggcctgcctatggggtaacccataggacgctctaatgtggacatggtgcgaagagtctattgagctagttagtagtcctccggcccctgaatgcggctaatcctaactgtggagcacatgccttcaatccagagggtagtgtgtcgtaatgggcaactctgcagcggaaccgactactttgggtgtccgtgtttccttttattctcacattggctgcttatggtgacaattacagaattgttaccatatagctattggattggccatccggtgtgcaatagagctattatatacctatttgttggctttgtaccactaaccttaaaatctgtaatcactctcgagtatatattgacccttaatacaattaaac

SEQ ID NO: 18532 - DNA, 734 bp, synthetic construct
  source 1..734: mol_type = other DNA
gcctgtgggttgtacccactcacagggcccactgggcgcaagcactctggtaccctggtacctttgtgcgcctgttttatatcccccccccaatgaaacctagaagcagtaaaccacgatcaatagcaggcataacgctccagttatgtcttgatcaagcacttctgtttccccggactgagtatcaatagactgctcgcgcggttgaaggagaaaacgttcgttatccggctagctacttcggaaaacctagtaacaccatgaaagttgcggagagcttcgttcagcactcccccagtgtagatcaggtcgatgagtcaccgcattccccacgggcgaccgtggcggtggctgcgttggcggcctgcccatggggcaacccatggggcgctctaatacggacatggtgtgaagagtctactgagctagttagtagtcctccggcccctgaatgcggctaatcccaactgcggagcacacgcccacaaaccagcgggtagtgtgtcgtaacgggtaactctgcagcggaaccgactactttgggtgtccgtgtttccttttatctttatattggctgcttatggtgacaattaaagaattgttaccatatagctattggattggccatccggtgtgcaacagagcaattatttaccaatttattggttttgtaccattaaccttgaattctgtgaccacccttaattatatcttgacccttaacgcagctaaac

SEQ ID NO: 18533 - DNA, 734 bp, synthetic construct
  source 1..734: mol_type = other DNA
gcctgtgggttgtacccactcacagggcccactgggcgcaagcactctggtaccctggtacctttgtgcgcctgttttatatcccccccccaatgaaacctagaagcagtaaaccacgatcaatagcaggcataacgctccagttatgtcttgatcaagcacttctgtttccccggactgagtatcaatagactgctcacgcggttgaaggagaaaacgttcgttatccggctagctacttcggaaaacctagtaacaccatgaaagttgcggagagcttcgttcagcactcccccagtgtagatcaggtcgatgagtcaccgcattccccacgggcgaccgtggcggtggctgcgttggcggcctgcccatggggtaacccatggggcgctctaatacggacatggtgtgaagagtctactgagctagttagtagtcctccggcccctgaatgcggctaatcccaactgcggagcacacgcccacaaaccagcgggtagtgtgtcgtaacgggtaactctgcagcggaaccgactactttgggtgtccgtgtttccttttatctttatattggctgcttatggtgacaattaaagaattgttaccatatagctattggattggccatccggtgtgcaacagagcaattatttaccaatttattggttttgtaccattaaccttgaattctgtgaccacccttaattatatcttgacccttaacgcagctaaac

SEQ ID NO: 18534 - DNA, 734 bp, synthetic construct
  source 1..734: mol_type = other DNA
gcctgtgggttgtacccactcacagggcccactgggcgcaagcactctggtaccctggtacctttgtgcgcctgttttatatcccccccccaatgaaacctagaagcagtaaaccacgatcaatagcaggcataacgctccagttatgtcttgatcaagcacttctgtttccccggactgagtatcaatagactgctcgcgcggttgaaggagaaaacgttcgttatccggctagctacttcggaaaacctagtaacaccatgaaagttgcggagagcttcgttcagcactcccccagtgtagatcaggtcgatgagtcaccgcattccccacgggcgaccgtggcggtggctgcgttggcggcctgcccatggggtaacccatggggcgctctaatacggacatggtgtgaagagtctactgagctagttagtagtcctccggcccctgaatgcggctaatcccaactgcggagcacacgcccacaaaccagcgggtagtgtgtcgtaacgggtaactctgcagcggaaccgactactttgggtgtccgtgtttccttttatctttatattggctgcttatggtgacaattaaagaattgttaccatatagctattggattggccatccggtgtgcaacagagcaattatttaccaatttattggttttgtaccattaaccttgaattctgtgaccacccttaattatatcttgacccttaacgcagctaaac

SEQ ID NO: 18535 - DNA, 724 bp, synthetic construct
  source 1..724: mol_type = other DNA
cactcacaggacccacgcggtgctagcactctggttccacgggacctttgtgcgcctgttttatgtcccctcccccaatttgtaacttagaagcaatttgcaacactgatcagtagcaggcatagcgcaccagctatgtcttgatcaagcacttctgtttccccggaccgagtatcaatagactgtttacacggttgaaggagaaagcgtccgttatccggctaactacttcgagaaacccagtagcaccattgaaactacagagtgtttcgctccacacttcccccgtgtagatcaggtcgatgagtcactgcaatccccacgggcgaccgtggcagtggctgcgctggcggcctgcctatggggcaacccataggacgctctaatgtggacatggtgtgaagagtctattgagctagttagtagtcctccggcccctgaatgcggctaatcccaactgcggagcacatgccttcaacccagagggtagtgtgtcgtaatgggcaactctgcagcggaaccgactactttgggtgtccgtgtttccttttattctcacattggctgcttatggtgacaattacagaattgttaccatatagctattggattggccatccggtgtgcaatagagctattatatacctatttgttggctttgtaccactgaccttaaaatctttaaccactcttgagtgtatattaacccttaatacaattaaac

SEQ ID NO: 18536 - DNA, 724 bp, synthetic construct
  source 1..724: mol_type = other DNA
cactcacaggacccacgcggtgctagcactctggtcccacgggacctttgtgcgcctgttttatgtcccctcccccaatttgtaacttagaagcaatttgcaacactgatcagtagcaggcatagcgcaccagctatgtcttgatcaagcacttctgtttccccggaccgagtatcaatagactgttcacgcggttgaaggagaaagcgtccgttatccggctaactacttcgagaaacccagtagcaccattaaaactacagagtgtttcgctccacacttcccccgtgtagatcaggtcgatgagtcactgcaatccccacgggcgaccgtggcagtggctgcgctggcggcctgcctatggggcaacccataggacgctctaatgtggacatggtgtgaagagtctattgagctagttagtagtcctccggcccctgaatgcggctaatcctaactgcggagcacatgccttcaacccagagggtggtgtgtcgtaatgggcaactctgcagcggaaccgactactttgggtgtccgtgtttccttttattctcacattggctgcttatggtgacaattatagaattgttaccatatagctattggattggccatccggtgtgcaatagagctattatatacctatttgttggctttgtaccactgactttaaaatctttaaccactcttgagtgtatattaacccttaatacaatcaaac

SEQ ID NO: 18537 - DNA, 724 bp, synthetic construct
  source 1..724: mol_type = other DNA
gtacccactcacagggcccactgggcgtagcactctggtactgcggtacctttgtgcgcctgttttatccccctcccccaaaagtaacttagaagctttgaactaatgatcaatagtaggtgtggcaggccagccacatctcgatcaagcacttctgtctccccggactgagtatcaataggctgctcacgtggctgaaagagaaaacgttcgttacccggccaactacttcgagaagcttagtaccaccatgaacgaggcagagcgtttcgctcggcactaccccagtgtagatcaggctgatgagtcactgcaatccccatgggcgaccatggcagtggctgcgctggcggcctgcccatggagagatccatgggacgctctaattttgacatggtgcgaagagcctattgagctagttggtagtcctccggcccctgaatgcggctaatcctaactgcggagcacacacccacatgccagtgggcagtgtgtcgtaacgggcaactctgcagcggaaccgactactttgggtgtccgtgtttccttttattcttatgctggctgcttatggtgacaatcgaagagttgttaccatatagctattggattggccatccggtgtgcaacagagcgattgtttatcagtttattggctttgtaccactgacattaaagtctataattacccttaattttatcttgacccttaatacagtcaagc

SEQ ID NO: 18538 - DNA, 735 bp, synthetic construct
  source 1..735: mol_type = other DNA
ctgtgggttgttcccacccacagggcccactgggcgctagcacactgattctgcgggatctttgtgcgcctgttttataaccccttccctaagcagcaacttagaagcttcacactatcacgaccagtagtgggcgtggcgcgccagtcacgtcttggtcaagcacttctgtttccccggactgagtatcaatagactgctcacgcggttgaaggagaaaacgttcgttatccggctaactacttcgagaaacctagtagcaccgtgaaagttgcggagtgtttcgctcagcacttcccccgtgtagatcaggtcgatgagtcactgtaaaccccacgggcgaccgtgacagtggctgcgttggcggcctgcccatggggtaacccatgggacgctctaatacagacacggtgtgaagagtctattgagctagttagtagtcctccggcccctgaatgcggctaatcctaactgcggagcgcgcaccctcaacccagggggcggcgcgtcgtaatgggtaactctgcagcggaaccgactactttgggtgtccgtgtttccttttattccttattggctgcttatggtgacaattgaaaagttgttaccatatagctattggattggccatccggtgaccaacagagctattgtttacctgtttattggatacgtccctcttaatctcaaggccattcaaactcttgattatatattactccttaactgtaagaa

SEQ ID NO: 18539 - DNA, 732 bp, synthetic construct
  source 1..732: mol_type = other DNA
gggttgttcccacccacagggcccactgggcgctagcacactgattctgcgggatctttgtgcgcctgttttataaccctcccccctaagcagcaacttagaagctctgtacaatcacgaccagcagtgggcgtggcgcgccagccatgtcttggtcaagcacttctgtatccccggactgagtatcaatagactgcttacgtggtcgaaggagaaaacgttcgttacccggctaactacttcgagaaacccagtagcactatgaaagttgcggagtgtttcgctcagcacttcccccgtgtagatcaggccgatgagtcactgtaaaccccacgggcgaccgtgacagtggctgcgttggcggcctgcccatggggtaacccatgggacgctctaatacagacatggtgtgaagagtctattgagctagttagtagtcctccggcccctgaatgcggctaatcctaactgcggagcgcgcaccctcaacccagggggcggcgcgtcgtaatgggtaactctgcagcggaaccgactactttgggtgtccgtgtttccttttattccttattggctgcttatggtgacaattgagaagttgttaccatatagctattggattggccatccggtgtctaacagagccattgtttacctattcattggatacgtccctcttgatctcaaggccattcaaacccttgactatatattgctccttaactgcaagaa

SEQ ID NO: 18540 - DNA, 742 bp, synthetic construct
  source 1..742: mol_type = other DNA
ttaaaacagcctgtgggttgcacccactcacagggcccactgggcgcaagcactctggtacctcggtacctttgtgcgcctgttttataacccccccccagtgaaacttagaagcagcaaaccacgatcaatagcaggcataacgctccagttatgtcttgatcaagcacttctgtttccccggactgagtatcaatagactgctcgcgcggttgaaggagaaaacgttcgttatccggctaactacttcgggaaacccagtagcatcatgaaagttgcggagagcttcgttcagcactcccccagtgtagatcaggtcgatgagtcaccgcattccccacgggcgaccgtggcggtggctgcgttggcggcctgcccatggggtaacccatggggcgctctaatacggacatggtgcgaagagtctactgagctagttagtagtcctccggcccctgaatgcggctaatcccaactgcggagcacacgcccacaagccagcgggtagtgtgtcgtaacgggcaactctgcagcggaaccgactactttgggtgtccgtgtttccttttatctttatattggctgcttatggtgacaattgaagagttgttaccatatagctattggattggccatccggtgtgcaacagagcaattgtttacctatttattggttttgtaccattaaccttgaagtctgtgaccacccttagttatatcttgaccctcaacacagctaaac

SEQ ID NO: 18541 - DNA, 747 bp, synthetic construct
  source 1..747: mol_type = other DNA
ttaaaacagcctgtgggttgtacccactcacaggacccacgcggtgttagcactctggttccacggaacctttgtgcgcctgttttacgtcccctccccaatttgtaacttagaagcaatttacagcactgatcaatagcaggcatggcgcaccagctatgtcttgatcaagcacctctgtttccccggaccgagtatcaatagactgttcacacggtcgaaggagaaagcgttcgttatccggctaactacttcgagaaacccagtagcgccattgaaactgcagagtgtttcgctccacacttcccccgtgtagatcaggtcgatgagtcactgcaatccccacgggcgaccgtggcagtggctgcgttggcggcctgcctatggggtaacccataggacgctctaatgtggacatggtgcgaagagtctattgagctagttagtagtcctccggcccctgaatgcggctaatcctaactgcggagcacatgccttcaatccagagggtagtgtgtcgtaatgggcaactctgcagcggaaccgactactttgggtgtccgtgtttccttttattttcacattggctgcttatggtgacaattacagaattgttaccatatagctattggattggccatccggtgtgcaatagagctattatatacctatttgttggctttgtaccactaaccttaaaatctgtaatcactctcgagtatatattgacccttaatacaattaaac

SEQ ID NO: 18542 - DNA, 747 bp, synthetic construct
  source 1..747: mol_type = other DNA
ttaaaacagcctgtgggttgtacccactcacaggacccacgcggtgctagcactctggttccacggaacctttgtgcgcctgttttacgtcccctccccaatttgtaacttagaagcaatttacagcactgatcaatagcaggcatggcgcaccagctatgtcttgatcaagcacctctgtttccccggaccgagtatcaatagactgttcacacggtcgaaggagaaagcgttcgttatccggctaactacttcgaaaaacccagtagcgccattgaagctgcagagtgtttcgctccacacttcccccgtgtagatcaggtcgatgagtcactgcaatccccacgggcgaccgtggcagtggctgcgttggcggcctgcctatggggtaacccataggacgctctaatgtggacatggtgcgaagagtctattgagctagttagtagtcctccggcccctgaatgcggctaatcctaactgcggagcacatgccttcaatccagagggtagtgtgtcgtaatgggcaactctgcagcggaaccgactactttgggtgtccgtgtttccttttattctcacattggctgcttatggtgacaattacagaattgttaccatatagctattggattggccatccggtgtgcaatagagctattatatacctatttgttggctttataccactaaccttaaaatctgtaatcactctcgagtatatattgacccttaatacaattaaac

SEQ ID NO: 18543 - DNA, 726 bp, synthetic construct
  source 1..726: mol_type = other DNA
gcacccacccacagggcccactgggcgccagcactctgattccgcggaatctttgtgtgcctgttttatcacccttcccccaaactcgcaacttagaagcagcacttcactgaccaatagcaggcgtggcgcaccagccatgtctaggtcaagcacttctgtttccccggactgagtatcaataggctgctcacgcggctgaaggagaaaacgttcgtcatccggctaactacttcgagaaacctagtagcaccggtgaagctgcagagtgtttcgctcagcacttcccccgtgtagatcaggtcgatgagtcactgcactccccacgggcgaccgtggcagtggctgcgctggcggcctgcctatgggtcaacccataggacgctctaatgtggacacggtgcgaagagtctattgagctagttagtagtcctccggcccctgaatgcggctaatcctaactgcggagcacatgcccccgaaccagggggtggtgtgtcgtaacgggcaactctgcagcggaaccgactactttgggtgaccgtgtttccttttgttcttattatggctgcttatggtgacaattgaagaattgttaccatatagctattggattggccatccagtgtctaacagagctatcatatacctatttgttggattcgttccattgtcatacacatcactcaatacattacattttattgtgagattaaatacaagaaa

SEQ ID NO: 18544 - DNA, 723 bp, synthetic construct
  source 1..723: mol_type = other DNA
cactcacagggcccacgcggtgctagcactctggttccacgggacctttgtgcgcctgttttatgtcccctccccaatttgtaacttagaagcaatttgcaacactgatcagtagcaggcatagcgcaccagctatgtcttgatcaagcacttctgtttccccggaccgagtatcaatagactgttcacacggttgaaggagaaagcgtccgttatccggctaactacttcgagaaacccagtagcatcattgaaactacagagtgtttcgctccacacttcccccgtgtagatcaggtcgatgagtcactgcaatccccacgggcgaccgtggcagtggctgcgctggcggcctgcctatggggcaacccataggacgctctaatgtggacatggtgtgaagagtctattgagctagttagtagtcctccggcccctgaatgcggctaatcctaactgcggagcacatgccttcaacccagagggtggtgtgtcgtaatgggcaactctgcagcggaaccgactactttgggtgtccgtgtttccttttattctcacattggctgcttatggtgacaatcacagaattgttaccatatagctattggattggccatccggtgtgcaatagagctattatatacctatttgttggctttgtaccactaaccttaaaatctttaaccactcttgagtgtatattaacccttaatacaatcaagc

SEQ ID NO: 18545 - DNA, 723 bp, synthetic construct
  source 1..723: mol_type = other DNA
cactcacaggacccacgcggtgctagcactctggttccacgggacctttgtgcgcctgttttatgtcccctccccaatttgtaacttagaagcaatttgcaacactgatcagtagcaggcatagcgcaccagctatgtctcgatcaagcacttctgtttccccggaccgagtatcaatagactgttcacacggttgaaggagaaagcgtccgttatccggctaactacttcgagaaacccagtagcaccattgaaactacagagtgtttcgctccacacttcccccgtgtagatcaggtcgatgagtcactgcaatccccacgggcgaccgtggcagtggctgcgctggcggcctgcctatggggcaacccataggacgctctaatgtggacatggtgtgaagagtctattgagctagttagtagtcctccggcccctgaatgcggctaatcctaactgcggagcacatgccttcaatccagagggtagtgtgtcgtaatgggcaactctgcagcggaaccgactactttgggtgtccgtgtttccttttattctcacattggctgcttatggtgacaattactgaattgttaccatatagctattggattggccatccggtgtgcaatagagctattatatacctatttgttggttttgtaccactaaccttaaaatctataaccactctcgagtgtatattaacccttaatacaatcaaac

SEQ ID NO: 18546 - DNA, 723 bp, synthetic construct
  source 1..723: mol_type = other DNA
cactcacaggacccacgcggtgctagcactctggttccacgggacctttgtgcgcctgttttatgtcccctccccaatttgtaacttagaagcaatttgcaacactgatcagtagcaggcatagcgcaccagctatgtctcgatcaagcacttctgtttccccggaccgagtatcaatagactgttcacacggttgaaggagaaagcgtccgttatccggctaactacttcgagaaacccagtagcaccattgaaactacagagtgtttcgctccacacttcccccgtgtagatcaggtcgatgagtcactgcaatccccacgggcgaccgtggcagtggctgcgctggcggcctgcctatggggcaacccataggacgctctaatgtggacatggtgtgaagagtctattgagctagttagtagtcctccggcccctgaatgcggctaatcctaactgcggagcacatgccttcaatccagagggcagtgtgtcgtaatgggcaactctgcagcggaaccgactactttgggtgtccgtgtttccttttattctcacatcggctgcttatggtgacaattactgaattgttaccatatagctattggattggccatccggtgtgcaatagagctattatatacctatttgttggttttgtaccactaaccttaaaatctataaccactctcgagtgtatattaacccttaatacaatcaaac

SEQ ID NO: 18547 - DNA, 723 bp, synthetic construct
  source 1..723: mol_type = other DNA
cactcacaggacccacgcggtgctagcactctggttccacgggacctttgtgcgcctgttttatcttccctccccaatttgtaacttagaagcaatttgcaacactgatcagtagcaggcatagcgcaccagctatgtcttgatcaagcacttctgtttccccggaccgagtatcaatagactgttcacatggttgaaggagaaagcgtccgttatccggctaactacttcgagaaacccagtagcaccattgaaactacagagtgtttcgctccacacttcccccgtgtagatcaggtcgatgagtcactgcaatccccacgggcgaccgtggcagtggctgcgctggcggcctgcctatggggcaacccataggacgctttgatgtggacatggtgtgaagagtctattgagctagttagtagtcctccggcccctgaatgcggctaatcctaactgcggagcacatgccttcaacccagagggtagtgtgtcgtaatgggcaactctgcagcggaaccgactactttgggtgtccgtgtttccttttattttcacattggctgcttatggtgacaattacagaattgttaccatatagctattggattggccatccggtgtgcaatagagctattatatacctatttgttggctttgtaccactgaccttaaaatctttaaccactcttgagcgtatattaatccttaatacagtcaaac

SEQ ID NO: 18548 - DNA, 735 bp, synthetic construct
  source 1..735: mol_type = other DNA
ctgtgggttgttcccacccacagggcccattgggcgctagcacactggttttgcggaatctttgtgcgcctgttttataacccttcccctaagcagcaacttagaagtattgcacaatcacggccagtagtgggcgtggcgcgccagccacgtcttggtcaagcacttctgtatccccggactgagtatcaatagactgctcacgcggttgaaggagaaaacgttcgttacccggctaactacttcggaaaacctagtagcaccttgaaagttgcagagtgtttcgctcagcacttcccccgtgtagatcaggtcgatgagccactgtaaaccccacgggcgaccgtgacagtggctgcgttggcggcctgcccatggggtaacccatgggacgctctaatacagacatggtgtgaagagtctactgagctagttagtagtcctccggcccctgaatgcggctaatcctaactgcggagcacacaccctcaacccagggggcggtgtgtcgtaatgggtaactctgcagcggaaccgactactttgggtgtccgtgtttccttttattccttactggctgcttatggtgacaattgaaaagttgttgccatatagctattggattggccatccggtgtctaacagagctattgtttacttatttattggatacgtccctcttaatcttaaggctactcaaactcttaattatatattgctccttaactataagaa

SEQ ID NO: 18549 - DNA, 735 bp, synthetic construct
  source 1..735: mol_type = other DNA
ctgtgggttgttcccacccacagggcccactgggcgccagcacactgattctgcgggatctttgtgcgcctgttttataaccccttccctaagcagcaacttagaagcttcacactatcacgaccagtagtgggcgtggcgcgccagtcacgtcttggtcaagtacttctgtttccccggactgagtatcaatagactgctcacgcggttgaaggagaaaacgttcgttacccggctaactacttcgagaaacctagtagcaccgtgaaagttgcggagtgtttcgctcagcacttcccccgtgtagatcaggtcgatgagtcactgtaaaccccacgggcgaccgtgacagtggctgcgttggcggcctgcccatgggttaacccatgggacgctctaatacagacacggtgtgaagagtctattgagctagttagtagtcctccggcccctgaatgcggctaatcctaactgcggagcgcgcaccctcaacccagggggcagcgtgtcgtaatgggcaactctgcagcggaaccgactactttgggtgtccgtgtttccttttattccttattggctgcttatggtgacaattgaaaagttgttaccatatagctattggattggccatccggtgactaacagagctattatttacctgtttattggatacatccctctcactctcaaggccattcaaactcttgattatatattactccttaactgtaagaa

SEQ ID NO: 18550 - DNA, 735 bp, synthetic construct
  source 1..735: mol_type = other DNA
ctgtgggttgttcccactcacagggcccattgggcgctagcacactggttttgcggaatctttgtgcgcctgttttataacccttcccctaagcagcaacttagaagtattgcacaatcacggccagtagtgggcgtggcgcgccagccacgtcttggtcaagcacttctgtatccccggactaagtatcaatagactgctcacgcggttgaaggagaaaacgttcgttacccggctaactacttcggaaaacctagtagcaccttgaaagttgcagagtgtttcgctcagcacttcccccgtgtagatcaggtcgatgagccactgtaaaccccacgggcgaccgtgacagtggctgcgttggcggcctgcccatggggtaacccatgggacgctctaatacagacatggtgtgaagagtctactgagctagttagtagtcctccggcccctgaatgcggctaatcctaactgcggagcacacaccctcaacccagggggcggtgtgtcgtaatgggtaactctgcagcggaaccgactactttgggtgtccgtgtttccttttattccttactggctgcttatggtgacaattgaaaagttgttaccatatagctattggattggccatccggtgtctaacagagctattgtttacttatttattggatacgtccctcttaatcttaaggctattcaaactcttaattatatattgctccttaactataagaa

SEQ ID NO: 18551 - DNA, 730 bp, synthetic construct
  source 1..730: mol_type = other DNA
gtgggttgcacccacccacagggcccactgggcgccagcactctggtactgcggtacctttgtgcgcctgttttattaccccaccccacccggaacgtagaagcaatacacaactgaccaatagtgggtgtggcgcaccagccacatcatggtcaagcactcctgtttccccgggtttagtatcaataagctgctcacgcggctgaaggagaaaacacccgttacccggccaactacttcgagaaacttagtaccgctatgaacgttgcaaggcgtttcgctcagcacttcccccgtgtagatcaggccgatgagtcaccgcattcctcacgggcgaccgtggcggtggctgcgctggcggcctgcctatgggcttgcccataggacgccttaatgctgacatggtgcgaagagtctattgagctagttggtagtcctccggcccctgaatgcggctaatcctaactgcggagcacatactcacaaaccagtgagcagtgtgtcgtaacgggcaactctgcagcggaaccgactactttgggtgtccgtgtttccttttattcctatactggctgcttatggtgacaattaaagaattgttaccatatagctattggattggccatccggtgtctaacagagctattatatacttgtttgttggattcatctcgttatcacacaaatccctcaacactttgtgctttatcttgaatttgaactcaaaaag

SEQ ID NO: 18552 - DNA, 742 bp, synthetic construct
  source 1..742: mol_type = other DNA
ttaaaacagcctgtgggttgcacccactcacagggcccactgggcgcaagcactctggtacctcggtacctttgtgcgcctgttttataacccccccccagtgaaacttagaagcagcaaaccacgatcaatagcaggcataacgctccagttatgtcttgatcaagcacttctgtttccccggactgagtatcaatagactgctcgcgcggttgaaggagaaaacgttcgttatccggctaactacttcgggaaacctagtagcatcatgaaagttgcggagagcttcgttcagcactcccccagtgtagatcaggtcgatgagtcaccgcattccccacgggcgaccgtggcggtggctgcgttggcggcctgcccatggggtaacccatggggcgctctaatacggacatggtgcgaagagtctactgagctagttagtagtcctccggcccctgaatgcggctaatcccaactgcggagcacacgcccacaagccagcgggtagtgtgtcgtaacgggcaactctgcagcggaaccgactactttgggtgtccgtgtttctttttatctttatattggctgcttatggtgacaattaaagagttgttaccatatagctattggattggccatccggtgtgcaacagagcaattgtttacctatttattggttttgtaccattaaccttgaaatctgtgaccacccttaattatatcttgaccctcaacacagctaaac

SEQ ID NO: 18553 - DNA, 742 bp, synthetic construct
  source 1..742: mol_type = other DNA
ttaaaacagcctgtgggttgcacccactcacagggcccactgggcgcaagcactctggtacctcggtacctttgtgcgcctgttttataaccccccctcagtgaaacttagaagcagcaaaccacgatcaatagcaggcataacgctccagttatgtcttgatcaagcacttctgtttccccggactgagtatcaatagactgctcgcgcggttgaaggagaaaacgttcgttatccggctaactacttcgggaaacccagtagcatcatgaaagttgcggagagcttcgttcagcactcccccagtgtagatcaggtcgatgagtcaccgcattccccacgggcgaccgtggcggtggctgcgttggcggcctgcccatggggtaacccatggggcgctctaatacggacatggtgcgaagagtctactgagctagttagtagtcctccggcccctgaatgcggctaatcccaactgcggagcacacgcccacaagccagcgggtagtgtgtcgtaacgggcaactctgcagcggaaccgactactttgggtgtccgtgtttccttttatctttatattggctgcttatggtgacaattgaagagttgttaccatatagctattggattggccatccggtgtgcaacagagcaattgtttacctatttattggttttgtaccattaaccttgaagtctgtgaccacccttagttatatcttgaccctcaacacagctaaac

SEQ ID NO: 18554 - DNA, 742 bp, synthetic construct
  source 1..742: mol_type = other DNA
ttaaaacagcctgtgggttgcacccactcacagggcccactgggcgcaagcactctggtacctcggtacctttgtgcgcctgttttataaccctcccccagtgaaacttagaagcagcaaaccacgatcaatagcaggcataacgctccagttatgtcttgatcaagcacttctgtttccccggactgagtatcaatagactgctcgcgcggttgaaggagaaaacgttcgttatccggctaactacttcgggaaacctagtagcatcatgaaagttgcggagagcttcgttcagcactcccccagtgtagatcaggtcgatgagtcaccgcattccccacgggcgactgtggcggtggctgcgttggcggcctgcccatggggtaacccatggggcgctctaatacggacatggtgcgaagagtctactgagctagttagtagtcctccggcccctgaatgcggctaatcccaactgcggagcacacgcccacaagccagcgggtagtgtgtcgtaacgggcaactctgcagcggaaccgactactttgggtgtccgtgtttccttttatctttatattggctgcttatggtgacaattgaagagttgttaccatatagctattggattggccatccggtgtgcaacagagcaattgtttacctatttattggtttcgtaccattaaccttgaagtctgtgaccacccttaattatatcttgaccctcaacacagctaaac

SEQ ID NO: 18555 - DNA, 742 bp, synthetic construct
  source 1..742: mol_type = other DNA
ttaaaacagcctgtgggttgcacccactcacagggcccactgggcgtaagcactctggtacctcggtacctttgtgcgcctgttttataacccccccccagtgaaacttagaagcagcaaaccacgatcaatagcaggcataacgctccagttatgtcttgatcaagcacttctgtttccccggactgagtatcaatagactgctcgcgcggttgaaggagaaaacgttcgttatccggctaactacttcgggaaacctagtagcatcatgaaagttgcggagagcttcgttcagcactcccccagtgtagatcaggtcgatgagccaccgcattccccacgggcgactgtggcggtggctgcgttggcggcctgcccatggggtaacccatggggcgctctaatacggacatggtgcgaagagtctactgagctagttagtagtcctccggcccctgaatgcggctaatcccaactgcggagcacacgcccacaagccagcgggtagtgtgtcgtaacgggcaactctgcagcggaaccgactactttgggtgtccgtgtttccttttatctttatattggctgcttatggtgacaattgaagagttgttaccatatagctattggattggccatccggtgtgcaacagagcaattgtctacctatttattggttttgtaccattaaccttgaagtctgtgaccacccttaattatatcttgaccctcaacacagctaaac

SEQ ID NO: 18556 - DNA, 742 bp, synthetic construct
  source 1..742: mol_type = other DNA
ttaaaacagcctgtgggttgcacccactcacagggcccactgggcgcaagcactctggtacctcggtacctttgtgcgcctgttttataacccccccccagtgaaacttagaagcagcaaaccacgatcaatagcaggcgtaacgctccagttatgtcttgatcaagcacttctgtttccccggactgagtatcaatagactgctcgcgcggttgaaggagaaaacgttcgttatccggctaactacttcgggaaacctagtagcatcatgaaagttgcggagagcttcgttcagcactcccccagtgtagatcaggtcgatgagtcaccgcattccccacgggcgaccgtggcggtggctgcgttggcggcctgcccatggggtaacccatggggcgctctaatacagacatggtgcgaagagtctactgagctagttagtagtcctccggcccctgaatgcggctaatcccaactgcggagcacacgcccacaagccagcgggtagtgtgtcgtaacgggcaactctgcagcggaaccgactactttgggtgtccgtgtttccttttatctttatattggctgcttatggtgacaattgaagagttgttaccatatagctattggattggccatccggtgtgtaacagagcaattgtttacctatttattggttttgtaccattaaccttgaagtctgtgaccacccttaattatatcttgaccctcaacacagctaaac

SEQ ID NO: 18557 - DNA, 724 bp, synthetic construct
  source 1..724: mol_type = other DNA
cactcacaggacccacgcggtgctagcactctggttccacgggacctttgtgcgcctgttttatgtcccctcccccaatttgtaacttagaagcaatttgcaacactgatcagtagcaggcatagcgcaccagctatgtcttgatcaagcacttctgtttccccggaccgagtatcaatagactgttcacacggttgaaggagaaagcgtccgttatccggctaactacttcgagaaacccagtagcaccattgaaactacagagtgtttcgctccacacttcccccgtgtagatcaggtcgatgagtcactgcaatccccacgggcgaccgtggcagtggctgcgctggcggcctgcctatggggcaacccataggacgctctaatgtggacatggtgtgaagagtctattgagctagttagtagtcctccggcccctgaatgcggctaatcccaactgcggagcacatgccttcaacccagagggtagtgtgtcgtaatgggcaactctgcagcggaaccgactactttgggtgtccgtgtttccttttattctcacattggctgcttatggtgacaattacagaattgttaccatatagctattggattggccatccggtgtgcaatagagctattatatacctatttgttggctttgtaccactgaccttaaaatctttaaccactcttgagtgtatattaacccttaatacaatcaaac

SEQ ID NO: 18558 - DNA, 734 bp, synthetic construct
  source 1..734: mol_type = other DNA
tgtgggttgttcccacccacagggcccactgggcgttagcacactgattctgcgggatctttgtgcgcctgttttataaccccttccctaagcagtaacttagaagcttcacacaatcacgaccagtagtgggcgtggcgcgccagtcacgtcttggtcaagcacttctgtttccccggactgagtatcaatagactgctcacgcggttgaaggagaaaacgttcgttatccggctaactacttcgagaaacctagtagcaccgtgaaagttgcggagtgtttcgctcagcacttcccccgtgtagatcaggtcgatgagtcactgtaaaccccacgggcgaccgtgacagtggctgcgttggcggcctgcccatggggtaacccatgggacgctctaatacagacatggtgtgaagagtctattgagctagttagtagtcctccggcccctgaatgcggctaatcctaactgcggagcacgcaccctcaacccagggggcggcgtgtcgtaatgggtaactctgcagcggaaccgactactttgggtgtccgtgtttccttttattccttattggctgcttatggtgacaattgaaaagttgttaccatatagctattggattggccatccggtgtccaacagagctattgtttacctatttattggatacgtccctcttaatctcaaggctattcaaactcttgattatatattgctccttaactgtaagaa

SEQ ID NO: 18559 - DNA, 741 bp, synthetic construct
  source 1..741: mol_type = other DNA
ttaaaacagcctgtgggttgcacccactcacagggcccactgggcgcaagcactctggtacctcggtacctttgtgcgcctgttttataaccccccccagtgaaacttagaagcagcaaaccacgatcaatagcaggcataacactccagttatgtcttgatcaagcacttctgtttccccggactgagtatcaatagactgctcgcgcggttgaaggagaaaacgttcgttatccggctaactacttcgggaaacctagtagcatcatgaaagttgcggagagcttcgttcagcactcccccggtgtagatcaggtcgatgagtcaccgcattccccacgggcgaccgtggcggtggctgcgttggcggcctgcccatggggtaacccatggggcgctctaatacggacatggtgcgaagagtctactgagctagttagtagtcctccggcccctgaatgcggctaatcccaactgcggagcacacgcccacaagccagcgggtagtgtgtcgtaacgggcaactctgcagcggaaccgactactttgggtgtccgtgtttccttttatctttatattggctgcttatggtgacaattgaagagttgttaccatatagctattggattggccatccggtgtgcaacagagcaattgtttacctatttattggttttgtaccattaaccttgaagtctgtgaccacccttaattatatcttgaccctcaacacagctaaac

SEQ ID NO: 18560 - DNA, 741 bp, synthetic construct
  source 1..741: mol_type = other DNA
ttaaaacagcctgtgggttgcacccactcacagggcccactgggcgcaagcactctggtacctcggtacctttgtgcgcctgttttataaccccccccagtgaaacttagaagcagcaaaccacgatcaatagcaggcgtaacgctccagttatgtcttgatcaagcacttctgtttccccggactgagtatcaatagactgctcgcgcggttgaaggagaaaacgttcgttatccggctaactacttcgggaaacctagtagcatcatgaaagttgcggagagcttcgttcagcactcccccagtgtagatcaggtcgatgagtcaccgcattccccacgggcgaccgtggcggtggctgcgttggcggcctgcccatggggtaacccatggggcgctctaatacagacatggtgcgaagagtctactgagctagttagtagtcctccggcccctgaatgcggctaatcccaactgcggagcacacgcccacaagccagcgggtagtgtgtcgtaacgggcaactctgcagcggaaccgactactttgggtgtccgtgtttccttttatctttatattggctgcttatggtgacaattgaagagttgttaccatatagctattggattggccatccggtgtgtaacagagcaattgtttacctatttattggttttgtaccattaaccttgaagtctgtgaccacccttaattatatcttgaccctcaacacagctaaac

SEQ ID NO: 18561 - DNA, 723 bp, synthetic construct
  source 1..723: mol_type = other DNA
cactcacaggacccacgcggtgctagcactctggttccacgggacctttgtgcgcctgttttatgccccctccccaatttgtaacttagaagcaatttgcaacactgatcagtagcaggcatagcgcaccagctatgtcttgatcaagcacttctgtttccccggaccgagtatcaatagactgttcacacggttgaaggagaaagcgtccgttatccggctaactacttcgagaaacccagtagcaccattgaaactacagagtgtttcgctccacacttcccccgtgtagatcaggtcgatgagtcactgcaatccccacgggcgaccgtggcagtggctgcgctggcggcctgcctatggggcaacccataggacgctttgatgtggacatggtgtgaagagtctattgagctagttagtagtcctccggcccctgaatgcggctaatcctaactgcggagcacatgccttcaacccagagggtagtgtgtcgtaatgggcaactctgcagcggaaccgactactttgggtgtccgtgtttccttttattctcacattggctgcttatggtgacaattacagaattgttaccatatagctattggactggccatccggtgtgcaatagagctattatatacctatttgttggctttgtaccactgaccttaaaatctttaaccactcttgagtgtatattaacccttaatacaatcaaac

SEQ ID NO: 18562 - DNA, 723 bp, synthetic construct
  source 1..723: mol_type = other DNA
cactcacaggacccacgcggtgctagcactctggttccacgggacctttgtgcgcctgttttatgtcccctccccaatttgtaacttagaagcaatttgcaacactgatcagtagcaggcatagcgcaccagctatgtcttgatcaagcacttctgtttccccggaccgagtatcaatagactgttcacatggttgaaggagaaagcgtccgttatccggctaactacttcgagaaacccagtagcaccattgaaactacagagtgtttcgctccacacttcccccgtgtagatcaggtcgatgagtcactgcaatccccacgggcgaccgtggcagtggctgcgctggcggcctgcctatggggcaacccataggacgctttgatgtggacatggtgtgaagagtctattgagctagttagtagtcctccggcccctgaatgcggctaatcctaactgcggagcacatgccttcaacccagagggtagtgtgtcgtaatgggcaactctgcagcggaaccgactactttgggtgtccgtgtttccttttattttcacattggctgcttatggtgacaattacagaattgttaccatatagctattggattggccatccggtgtgcaatagagctattatatacctatttgttggctttgtaccactgaccttgaaatctttaaccactcttgagtgtatattaatccttaatacaatcaaac

SEQ ID NO: 18563 - DNA, 723 bp, synthetic construct
  source 1..723: mol_type = other DNA
cactcacagggcccacgcggtgctagcactctggttctacggaacctttgtgcgcctgttttgcgtcccctccccaatttgtaacctagaagcaatttacaacactgatcaatagcaggcatggcgcaccagctatgtcttgatcaagcacctctgtttccccggaccgagtatcaatagactgttcacacggtcgaaggagaaagcgttcgttatccggctaactacttcgagaaacccagtagcgccattgaaactgcagagtgtttcgctccacacttcccccgtgtagatcaggtcgatgagtcactgcaatccccacgggcgaccgtggcagtggctgcgttggcggcctgcctatggggtaacccataggacgctctaatgtggacatggtgcgaagagtctattgagctagttagtagtcctccggcccctgaatgcggctaatcctaactgcggagcacatgccttcaatccagagggtagtgtgtcgtaatgggcaactctgcagcggaaccgactactttgggtgtccgtgtttccatttattctcacattggctgcttatggtgacaattatagaattgttaccatatagctattggattggccatccggtgtgcaatagagctattatatacctatttgttggctttgtaccactaacctcaaaatctgtgatcactctcaagtatatattgacccttaatacaattaagc

SEQ ID NO: 18564 - DNA, 723 bp, synthetic construct
  source 1..723: mol_type = other DNA
cactcacaggacccacgcggtgctagcactctggttccacgggacctttgtgcgcctgttttatgtcccttccccaatttgtaacttagaagcaatttacaacactgatcagtagcaggcatagcgcaccagctatgtcttgatcaagcacttctgtttccccggaccgagtatcaatagactgttcacacggttgaaggagaaagcgtccgttatccggctaactacttcgagaaacccagtagcaccattgaaactacagagtgtttcgctccacacttcccccgtgtagatcaggtcgatgagtcactgcaacccccacgggcgaccgtggcagtggctgcgctggcggcctgcctatggggcaacccataggacgctctaatgtggacatggtgtgaagagtctattgagctagttagtagtcctccggcccctgaatgcggctaatcctaactgcggagcacatgccttcaatccagagggtagtgtgtcgtaatgggcaactctgcagcggaaccgactactttgggtgtccgtgtttccttttattcttacattggctgcttatggtgacaattacagaattgttaccatatagctattggattggccatccggtgtgcaatagagctattatatacctatttgttggctttgtaccactgaacttaaaatctttaaccactcttgagtgtatattaacccttaatacaatcaaac

SEQ ID NO: 18565 - DNA, 737 bp, synthetic construct
  source 1..737: mol_type = other DNA
ccgatctgttgtacccacccacagggcccactgggcgctagcactccgattctgcggaatctttgtgcgcctgttttatgaccctcccccgaaacttgtaacttagaagctatgtacattaccgatcaacagcaggcgtggcgcaccagccatgtcttgatcaagtacttctgtacccccggactgagtatcaatagactgctcacgcggttgaaggagaaaacgttcgttacccggctaactacttcgagaaacctagtaacaccattgaaactgcggagtgtttcgctcagcatttcccccatgtagatcaggtcgatgagtcactgcttaccccacgggcgaccgtggcagtggctgcgttggcggcctgcctatggggcaacccataggacgctctaaagtggacatggtgcgaagagtctattgagctagttagtagtcctccggcccctgaatgcggctaatcctaactgcggagcgcatgtcctcaaaccagagggtggtgcgtcgtaatgggtaactctgcagcggaaccgactactttgggtgtccgtgtttcttttattcttataatggctgcttatggtgacaatcgaggaattgttaccatatagctattggattggccatccggtgtgcaacagagctattatctacttgtttgtcggatacattcccttaacacctaaatccttcaacacattgcactatattctaacattgaacgcgagaaa

SEQ ID NO: 18566 - DNA, 738 bp, synthetic construct
  source 1..738: mol_type = other DNA
ctgtgggttgcacccactcacaggacccacgcggtgctagcactctggttccacgggacctttgtgcgcctgttttatgtcccctcccccaatttgtaacttagaagcaatttgcaacactgatcagtagcaggcatagcgcaccagctatgtcttgatcaagcacttctgtttccccggaccgagtatcaatagactgttcacacggttgaaggagaaagcgtccgttatccggctaactacttcgagaaacccagtagcaccattgaaactacagagtgtttcgctccacacttcccccgtgtagatcaggtcgatgagtcactgcaatccccacgggcgaccgtggcagtggctgcgctggcggcctgcctatggggcaacccataggacgctctaatgtggacatggtgtgaagagtctattgagctagttagtagtcctccggcccctgaatgcggctaatcccaactgcggagcacatgccttcaacccagagggtagtgtgtcgtaatgggcaactctgcagcggaaccgactactttgggtgtccgtgtttccttttattctcacattggctgcttatggtgacaattacagaattgttaccatatagctattggattggccatccggtgtgcaatagagctattatatacctatttgttggctttgtaccactgaccttaaaatctttaaccactcttgagtgtatattaacccttaatacaatcaaac

SEQ ID NO: 18567 - DNA, 720 bp, synthetic construct
  source 1..720: mol_type = other DNA
acccacagggcctactgggcgctagcactctggtactaaggtacctttgtgcgcctgtttttattccctccccctaaagtaacctagaagttgtgcaccaacgatcaatagtaggtgtgacacaccagtcatatctcgatcaagtacttctgttttccccggaccgagtatcaataggctgctcgcgcggctgaaggagaaaacgttcgttacccggccaactacttcgagaagcttagtaccaccatgaacgatgcagagtgtttcgttcagcacaaccccagtgtagatcaggctgatgagtcactgcaacccccatgggcgaccatggcagtggctgcgttggcggcctgcccatggagaaatccatgggacgctctaattctgacatggtgtgaagagcctattgagctagctggtagtcctccggcccctgaatgcggctaatcctaactgcggagcacatgctcacaaaccagtgggtggtgtgtcgtaatgggcaactctgcagcggaaccgactactttgggtgtccgtgtttccttttattcttatgttggctgcttatggtgacaatcaaagaattgttaccatatagctattggattggccatccggtgtgcaacagagcaattgtgtacctatttgttggttttgtaccattatcactgaagtctgtaaccactctcaaatttattttgaccctcaactcaatcaaac

SEQ ID NO: 18568 - DNA, 721 bp, synthetic construct
  source 1..721: mol_type = other DNA
ccacccgcagggcccactgggcgctagcacactgattctacggaaactttgtgcgcctgttttatatccctccccaaacgagtaacttagaagtttaacatattcatgaccaatagcaggcgtgacacaccagtcacgtcttggtcaagtacttctgtctccccggactgagtatcaataagctgctcacgcggctgaaagagaaaacgttcgttacccggctaactacttcgagaaacctagtaacaccatgaacgttgcagagtgtttcgctcagcacttcccccgtgtagatcaggtcgatgagtcactgcaaaccccacgggtaaccgtggcagtggctgcgttggcggcctgcccatggggtaacccatgggacgctctaatacagacatggtgcgaagagtctattgagctagttagtagtcctccggcccctgaatgcggctaatcctaactgcggagcacacaccttcaatccagggggcagtgtgtcgtaacgggtaactccgcagcggaaccgactactttgggtgtccgtgtttccttttatcttattatggctgcttatggtgacaattgaggaattgttaccatatagctattggattggccatccggtgtctaacagagcaattgtatacctatttgttggacttgtccctctgtcacacacatctctcaataccttatactacattataaagttaaatataaggag

SEQ ID NO: 18569 - DNA, 721 bp, synthetic construct
  source 1..721: mol_type = other DNA
ccacccacagggcccactgggcgctagcacactgattctacggaaactttgtgcgcctgttttatatccctccccaaacgagtaacttagaagtttaacatattcatgaccaatagcaggcgtgacacaccagtcacgtcttggtcaagtacttctgtctccccggactgagtatcaataagctgctcacgcggctgaaagagaaaacgttcgttacccggctaactacttcgagaaacctagtaacaccatgaacgttgcagagtgtttcgatcagcacttcccccgtgtagatcaggtcgatgagtcactgcaaaccccacgggtaaccgtggcagtggctgcgttggcggcctgcccatggggtaacccatgggacgctctaatacagacatggtgcgaagagtctattgagctagttagtagtcctccggcccctgaatgcggctaatcctaactgcggagcacacaccttcaatccagggggcagtgtgtcgtaacgggcaactccgcagcggaaccgactactttgggtgtccgtgtttccttttatcttattatggctgcttatggtgacaattgaggaattgttaccatatagctattggattggccatccggtgtctaacagagcaattgtatacctatttgttggatttgtccctctgtcacacacatctctcaataccttatactacattataaagttaaatataaggag

SEQ ID NO: 18570 - DNA, 721 bp, synthetic construct
  source 1..721: mol_type = other DNA
ccactcacagggcccactgggcgctagcacactgattctacggaagctttgtgcgcctgttttatatccctccccaaacgagtaacttagaagtttaacacattcatgaccaatagcaggcgtgacacaccagtcacgtcttggtcaagtacttctgtctccccggactgagtatcaataagctgcttacgcggctgaaagagaaaacgttcgttacccggctaactacttcgagaaacctagtaacaccatgaacgttgcagagtgtttcgctcagcacttcccccgtgtagatcaggtcgatgagtcactgcaaaccccacgggtaaccgtggcagtggctgcgttggcggcctgcccatggggtaacccatgggacgctctaatacagacatggtgcgaagagtctattgagctagttagtagtcctccggcccctgaatgcggctaatcctaactgcggagcacacaccttcaatccagggggcagtgtgtcgtaacgggcaactccgcagcggaaccgactactttgggtgtccgtgtttctttttatcttattatggctgcttatggtgacaattgaggaattgttaccatatagctattggattggccatccggtgtctaacagagcaattgtatacctatttgttggatttgtccctctgtcacacatatctctcaataccttatactacattataaagttaaatataagaag

SEQ ID NO: 18571 - DNA, 747 bp, synthetic construct
  source 1..747: mol_type = other DNA
ttaaaacagcctgtgggttgtacccactcacaggacccacgcggtgctagcactctggttccacggaacccttgtgcgcctgttttacgtcccctccccaatttgtaacttagaagcaatttacagtactgatcaatagcaggcatggcgcaccagctatgtcttgatcaagcacctctgtttccccggaccgagtatcaatagactgttcacacggtcgaaggagaaagcgttcgttatccggctaactacttcgagaaacccagtagcgccagtgaaactgcagagtgtttcgctccacacttcccccgtgtagatcaggtcgatgagtcactgcaatccccacgggcgaccgtggcagtggctgcgttggcggcctgcctatggggtaacccataggacgctctaatgtggacatggtgcgaagagtctattgagctagttagtagtcctccggcccctgaatgcggctaatcctaactgcggagcacatgccttcaatccagagggtagtgtgtcgtaatgggcaactctgcagcggaaccgactactttgggtgtccgtgtttccttttattctcacattggctgcttatggtgacaattacagaattgttaccatatagctattggattggccatccggtgtgcaatagagctattatatacctatttgttggctttgtaccactaaccttaaaatctgtaatcactctcgagtatatattgacccttaatacaattaaac

SEQ ID NO: 18572 - DNA, 747 bp, synthetic construct
  source 1..747: mol_type = other DNA
ttaaaacagcctgtgggttgtacccactcacaggacccacgcggtgctagcactctggttccacggaacctttgtgcgcctgttttacgtcccttccccaatttgtaacttagaagcaatttacagcactgatcaatagcaggcatggcacaccagctatgtcttgatcaagcacctctgtttccccggaccgagtatcaatagactgttcacacggtcgaaggagaaagcgttcgttatccggctaactacttcgagaaacccagtagcgccactgaaactgcagagtgtttcgctccacacttcccccgtgtagatcaggtcgatgagtcactgcaatccccacgggcgaccgtggcagtggctgcgttggcggcctgcctatggggtaacccataggacgctctaatgtggacatggtgcgaagagtctattgagctagttagtagtcctccggcccctgaatgcggctaatcctaactgcggagcacatgccttcaatccagagggtagtgtgtcgtaatgggcaactctgcagcggaaccgactactttgggtgtccgtgtttccttttattctcacattggctgcttatggtgacaattacagaattgttaccatatagctattggattggccatccggtgtgcaatagagctattatatatctatttgttggctttgtaccactaaccttaagatctgtaatcactctcgagtatatattgacccttaatacaattaaac

SEQ ID NO: 18573 - DNA, 724 bp, synthetic construct
  source 1..724: mol_type = other DNA
cactcacaggacccacgcggtgctagcactctggttccacgggacctttgtgcgcctgttttatgtcccctcccccaatttgtaacttagaagcaatttgcaacactgatcagtagcaggcatagcgcaccagctatgtcttgatcaagcacttctgtttccccggaccgagtatcaatagactgttcacacggttgaaggagaaagcgtccgttatccggctaactacttcgagaaacccagtagcaccattgaaactacagagtgtttcgctccacacttcccccgtgtagatcaggtcgatgagtcactgcaatccccacgggcgaccgtggcagtggctgcgctggcggcctgcctatggggcaacccataggacgctctaatgtggacatggtgtgaagagtctattgagctagttagtagtcctccggcccctgaatgcggctaatcccaactgcggagcacatgccttcaacccagagggtagtgtgtcgtaacgggcaactctgcagcggaaccgactactttgggtgtccgtgtttccttttatcctcacattggctgcttatggtgacaattacagaattgttaccatatagctattggattggccatccggtgtgcaatagagctattatatacctatttgttggctttgtaccactgaccttaaaatctttaaccactcttgagtgtatattaacccttaatacaatcaaac

SEQ ID NO: 18574 - DNA, 736 bp, synthetic construct
  source 1..736: mol_type = other DNA
ctgtgggttgtacccacccacagggcccactgggcgctagcactccgattctgcggaatctttgtgcgcctgttttatgaccctcccccgaaacttgtaacttagaagttatgtacatcaccgatcaatagcaggcgtggcgcaccagccatgtcttgatcaagcacttctgtacccccggactgagtatcaatagactgctcacgcggttgaaggagaaaatgttcgttacccggctaactacttcgagaaacctagtaacaccattgaaactgcggagtgtttcgctcagcattccccccatgtagatcaggtcgatgagtcactgcttaccccacgggcgaccgtggcagtggctgcgttggcggcctgcctatggggcaacccataggacgctctaaagtggacatggtgcgaagagtctattgagctagttagtagtcctccggcccctgaatgcggctaatcctaactgcggagcgcatgtcctcaaaccagagggtggtgcgtcgtaatgggtaactctgcagcggaaccgactactttgggtgtccgtgtttcttttgttcttaaaatggctgcttatggtgacaatcgaggaattgttaccatatagctattggattggccatccggtgtgcaacagagctattatctacttgtttgtcggatacatccccttaacacctaaatcctttaatacattgcattatattttaacattgaacgcgagaaa

SEQ ID NO: 18575 - DNA, 728 bp, synthetic construct
  source 1..728: mol_type = other DNA
gggttgcacccacccacagggcccactgggcgctagcactctggtaccacggtacctttgtgcgcctgttttatcaccccaccccatttgaaactcagaagcaacgcacaaccgaccaatagcgggtgtggcacaccagctgcatcttggtcaagcacttctgtttccccgggttgagtatcagtaagctgttcacacggctgaaggagaaagtacccgttacccggccaactacttcgagaaacctagtaccaccatgaacgttgcaaggcgtttcgctcagcacttcccccgtgtagatcaggctgatgagtcaccgcattccccacgggcgaccgtggcggtggctgcgctggcggcctgcctatgggttagcccataggacgccttaatactgacatggtgcgaagagtctattgagctagttggtagtcctccggcccctgaatgcggctaatcctaactgcggagcacatactcacaaaccagtgagcagtgtgtcgtaatgggtaactctgcagcggaaccgactactttgggtgtccgtgtttccttttattcttatattggctgcttatggtgacaatcagagaattgttgccatatagctattggattggccatccggtgtctaatagagctattatatacttgtttgttggatttattccgttgtcatataaatctctaaacactttgtgctttatcttgaacttgaacacacgaaa

SEQ ID NO: 18576 - DNA, 725 bp, synthetic construct
  source 1..725: mol_type = other DNA
cactcacaggacccacgcggtgctagcactctggttccacgggacctttgtgcgcctgttttatgtcccctcccccaatttgtaacttagaagcaatttgcaacactgatcagtagcaggcatagcgcaccagctatgtcttgatcaagcacttctgtttccccggaccgagtatcaatagactgtttacacggttgaaggagaaagcgtccgttatccggctaactacttcgagaaacccagtagcaccattgaaactacagagtgtttcgctccacacttcccccgtgtagatcaggtcgatgagtcactgcaatccccacgggcgaccgtggcagtggctgcgctggcggcctgcctatggggcaacccataggacgctctaatgtggacatggtgtgaagagtctattgagctagttagtagtcctccggcccctgaatgcggctaatcccaactgcggagcacatgccttcaacccagagggtagtgtgtcgtaatgggcaactctgcagcggaaccgactactttgggtgtccgtgtttcctttttattctcacattggctgcttatggtgacaattacagaattgttaccatatagctattggattggccatccggtgtgcaatagagctattatatacctatttgttggctttgtaccactgaccttaaaatctttaaccactcttgagtgtatattaacccttaatacaattaaac

SEQ ID NO: 18577 - DNA, 723 bp, synthetic construct
  source 1..723: mol_type = other DNA
cactcacaggacccacgcggtgctagcactctggttccacgggacctttgtgcgcctgttttatgtccccacccccgatttgtaacttagaagcaatttgcaacactgatcagtagcaggcatagcgcaccagctatgtcttgatcaagcacttctgtttccccggaccgagtatcaatagactgttcacacggttgaaggagaaagcgtccgttatccggctaactacttcgagaagcccagtagcaccattgaaactacagagtgtttcgctccacacttccccgtgtagatcaggtcgatgagtcactgcaatccccacgggcgaccgtggcagtggctgcgctggcggcctgcctatggggcaacccataggacgctctaatgtggacatggtgtgaagagtctattgagctagttagtagtcctccggcccctgaatgcggctaatcctaactgcggagcacatgccttcaacccagagggtagtgtgtcgtaatgggcaactctgcagcggaaccgactactttgggtgtccgtgtttccttttattctcacattggctgcttatggtgacaattacagaattgttaccatatagctattggattggccatccggtgtgcaatagagctattatatacctatttgttggctttgtaccactgaccttaaaatctttaaccactcttgagtgtatattaacccttaatacaatcaaac

SEQ ID NO: 18578 - DNA, 728 bp, synthetic construct
  source 1..728: mol_type = other DNA
gggttgcacccactcacagggcccactgggcgccagcactctggtactgcggtacctttgtgcgcctgttttatcaccccaccccatctgaaacgtagaagcgatgcacaaccgaccaatagtgggtgtggcgcaccagccacatcttggtcaagcacttctgttcccccgggtttagtatcaataagctgctcacgcggctgaaggagaaaacacccgttatccggccaactacttcgagaaacctagtaccgctatgaacgttgcaaggcgtttcgctcagcacttcccccgtgtagatcaggctgatgagtcaccgcttccctcacgggcgaccgtggcggtggctgcgctggcagcctgcctatgggcttgcccataggacgccttaatactgacatggtgcgaagagtctattgagctagttggtagtcctccggcccctgaatgcggctaatcctaactgcggagcacatactcacaaaccagtgagcggtgtgtcgtaacgggcaactctgcagcggaaccgactactttgggtgtccgtgtttccttttattcttatattggctgcttatggtgacaattgaagaattgttaccatatagctattggattggccatccggtgtctaacagagatattatatacttgtttgttggattcacctcgttgtcatacaaatcccttaacactttgtgctttatcttaaatttgaactcaaaaag

SEQ ID NO: 18579 - DNA, 725 bp, synthetic construct
  source 1..725: mol_type = other DNA
cactcacaggacccacgcggtgctagcactctggttccacgggacctttgtgcgcctgttttatgtcccctccccccaatttgtaacttagaagcaatttgcaacactgatcagtagcaggcatagcgcaccagctatgtcttgatcaagcacctctgtttccccggaccgagtatcaatagactgtttgcacggttgaaggagaaagcgtccgttatccggctaactacttcgagaaacccagtagcaccattgaaactacagagtgtttcgctccacacttcccccgtgtagatcaggtcgatgagtcactgcaatccccacgggcgaccgtggcagtggctgcgctggcggcctgcctatggggcaacccataggacgctctaatgtggacatggtgtgaagagtctattgagctagttagtagtcctccggcccctgaatgcggctaatcccaactgcggagcacatgccttcaacccagagggtagtgtgtcgtaatgggcaactctgcagcggaaccgactactttgggtgtccgtgtttccttttattctcacattggctgcttatggtgacaattacagaattgttaccatatagctattggattggccatccggtgtgcaatagagctattatatacctatttgttggctttgtaccactgaccttaaaatctttaaccactcttgagtgtatattaacccttaatacaatcaaac

SEQ ID NO: 18580 - DNA, 724 bp, synthetic construct
  source 1..724: mol_type = other DNA
cactcacaggacccacgcggtgctagcactctggttccacgggacctttgtgcgcctgttttatgtcccttccccaatttgtaacttagaagcaatttgcaacactgatcagtagcaggcatagcgcaccagctatgtcttgatcaagcacttctgtttccccggaccgagtatcaatagactgtacacacggttgaaggagaaagcgtccgttatccggctaactacttcgagaagcccagtagcaccattgaaactacagagtgtttcgctccacacttccccccgtgtagatcaggtcgatgagtcactgcaatccccacgggcgaccgtggcagtggctgcgctggcggcctgcctatggggcaacccataggacgctctaatgtggacatggtgtgaagagtctattgagctagttagtagtcctccggcccctgaatgcggctaatcctaactgcggagcacatgccttcaatccagagggtagtgtgtcgtaatgggcaactctgcagcggaaccgactactttgggtgtccgtgtttccttttattctcacattggctgcttatggtgacaattacagaattgttaccatatagctattggattggccatccggtgtgcaatagagctattatatacctatttgttggctttgtaccactaaccttaaaatctttaaccactctcgagtgtatattaacccttaatacaatcaaac

SEQ ID NO: 18581 - DNA, 724 bp, synthetic construct
  source 1..724: mol_type = other DNA
cactcacaggacccacgcggtgctagcactctggttccacgggacctttgtgcgcctgttttatgtcccctcccccaatttgtaacttagaagcaatttgcaacactgatcagtagcaggcatagcgcaccagctatgtcttgatcaagcacttctgtttccccggaccgagtatcaatagactgttcacacggttgaaggagaaagcgtccgttatccggctaactacttcgagaaacccagtagcaccattgaaactacagagtgtttcgctccacacttcccccgtgtagatcaggtcgatgagtcactgcaatccccacgggcgaccgtggcagtggctgcgctggcggcctgcctatggggcaacccataggacgctctaatgtggacatggtgtgaagagtctattgagctagttagtagtcctccggcccctgaatgcggctaatcccaactgcggagcacatgccttcaacccagagggtagtgtgtcgtaatgggcaactctgcagcggaaccgactactttgggtgtccgtgtttccttttattttcacattggctgcttatggtgacaattacagaattgttaccatatagctattggattggccatccggtgtgcaatagagctattatatacctatttgttggctttgtaccactgaccttaaaatctttaaccactcttgagtgtatattaacccttaatacaatcaaac

SEQ ID NO: 18582 - DNA, 724 bp, synthetic construct
  source 1..724: mol_type = other DNA
cactcacaggacccacgcggtgctagcactctggttccacgggacctttgtgcgcctgttttatgtccccacccccaatttgtaacttagaagcaatttgcaacactgatcagtagcaggcatagcgcaccagctatgtcttgatcaagcacttctgtttccccggaccgagtatcaatagactgttcacacggttgaaggagaaagcgtccgttatccggctaactacttcgagaagcccagtagcaccattgaaactacagagtgtttcgctccacacttcccccgtgtagatcaggtcgatgagtcactgcaatccccacgggcgaccgtggcagtggctgcgctggcggcctgcctatggggcaacccataggacgctctaatgtggacatggtgtgaagagtctattgagctagttagtagtcctccggcccctgaatgcggctaatcctaactgcggagcacatgccttcaacccagagggtagtgtgtcgtaatgggcaactctgcagcggaaccgactactttgggtgtccgtgtttccttttattctcacattggctgcttatggtgacaattacagaattgttaccatatagctattggattggccatccggtgtgcaatagagctattatatacctatttgttggctttgtaccactaaccttaaaatctttaaccactcttgagtgtatattaacccttaatacaatcaaac

SEQ ID NO: 18583 - DNA, 723 bp, synthetic construct
  source 1..723: mol_type = other DNA
cactcacaggacccacgcggtgctagcactctggttccacgggacctttgtgcgcctgttttatgtcccctccccaatttgtaacttagaagcaatttgcaacactgatcagtagcaggcatagcgcaccagctatgtcttgatcaagcacttctgtttccccggaccgagtatcaatagactgttcacacggttgaaggagaaagcgtccgttatccggctaactacttcgagaaacccagtagcaccattgaaactacagagtgtttcgctccacacttcccccgtgtagatcaggtcgatgagtcactgcaatccccacgggcgaccgtggcagtggctgcgctggcggcctgcctatggggcaacccataggacgctctaatgtggacatggtgtgaagagtctattgagctagttagtagtcctccggcccctgaatgcggctaatcctaactgcggagcacatgccttcaatccagagggtagtgtgtcgtaatgggcaactctgcagcggaaccgactactttgggtgtccgtgtttccttttattctcacattggctgcttatggtgacaattaaagaattgttaccatatagctattggattggccatccggtgtgcaatagagctatcatatatttatttgttggttttgtaccactgaccttaaaatctataaccactctcgagtgtatattaacccttaatacaatcaaac

SEQ ID NO: 18584 - DNA, 723 bp, synthetic construct
  source 1..723: mol_type = other DNA
cactcacaggacccacgcggtgctagcactctggttccacgggacctttgtgcgcctgttttatgtcccctccccaatttgtaacttagaagcaatttgcaacactggtcagtagcaggcatagcgcaccagctatgtcttgatcaagcacttctgtttccccggaccgagtatcaatagactgtacacacggttgaaggagaaagcgtccgttatccggctaactacttcgagaaacccagtagcaccattgaaactacagagtgtttcgctccacacttcccccgtgtagatcaggtcgatgagtcactgcaatccccacgggcgaccgtggcagtggctgcgctggcggcctgcctatggggcaacccataggacgctctgatgtggacatggtgtgaagagtctattgagctagttagtagtcctccggcccctgaatgcggctaatcctaactgcggagcacatgccttcaatccagagggtagtgtgtcgtaatgggcaactctgcagcggaaccgactactttgggtgtccgtgtttccttttattctcacattggctgcttatggtgacaattacagaattgttaccatatagctattggattggccatccggtgtgcaatagagctattatatacctatttgttggctttgtaccactaaccttaaaatctttaaccactctcgagtgtatattaacccttaatacaatcaaac

SEQ ID NO: 18585 - DNA, 724 bp, synthetic construct
  source 1..724: mol_type = other DNA
cactcacaggacccacgcggtgctagcactctggttccacgggacctttgtgcgcctgttttatgtcccctccccagtttgtaacttagaagcaatttgcaacaccgatcagtagcaggcatagcacaccagctatgtcttgatcaagcacttctgtttccccggaccgagtatcaatagactgttcacacggttgaaggagaaagcgtccgttacccggctaactacttcgagaaacccagtaacaccattgaaattgcagagtgtttcgctccacactttcccccgtgtagatcaggtcgatgagtcactgcaatccccacgggcgaccgtggcagtggctgcgctggcggcctgcctatggggcaacccataggacgctctaatgtggacatggtgtgaagagtctattgagctagttagtagtcctccggcccctgaatgcggctaatcctaactgcggagcacatgccttcaacccagagggtagtgtgtcgtaatgggcaactctgcaacggaaccgactactttgggtgtccgtgtttccttttattcttacattggctgcttatggtgacaattacagaattgttaccatatagctattggattggccatccggtgtgcaatagagctattatatacctatttgttggctttgtaccattgaccttaaaatctttaaccactcttgagtgtatattaacccttaatacaatcaaac

SEQ ID NO: 18586 - DNA, 724 bp, synthetic construct
  source 1..724: mol_type = other DNA
cactcacaggacccacgcggtgctagcactctggttccacgggacctttgtgcgcctgttttatgtcccctcccccaatttgtaacttagaagcaatttgcaacactgatcagtagcaggcatagcgcaccagctatgtcttgatcaagcacttctgtttccccggaccgagtatcaatagactgtttacacggttgaaggagaaagcgtccgttacccggctaactacttcgagaaacccagtagcaccattgaaactacagagtgtttcgctccacacttcccccgtgtagatcaggtcgatgagtcactgcaatccccacgggcgaccgtggcagtggctgcgctggcggcctgcctatggggcaacccataggacgctctaatgtggacatggtgtgaagagtctattgagctagttagtagtcctccggcccctgaatgcggctaatcccaactgcggagcacatgccttcaacccagagggtagtgtgtcgtaatgggcaactctgcagcggaaccgactactttgggtgtccgtgtttccttttattctcacattggctgcttatggtgacaattacagaattgttaccatatagctattggattggccatccggtgtgcaatagagctattatatacctatttgttggctttgtaccactgaccttaaaatctttaaccactcttgagtgtatattaacccttaatacaattaaac

SEQ ID NO: 18587 - DNA, 724 bp, synthetic construct
  source 1..724: mol_type = other DNA
cactcacaggacccacgcggtgctagcactctggttccacgggacctttgtgcgcctgttttatgtcccctcccccaatttgtaacttagaagcaatttgcaacactgatcagtagcaggcatagcgcaccagctatgtcttgatcaagcacttctgtctccccggaccgagtatcaatagactgtttacacggttgaaggagaaagcgtccgttatccggctaactacttcgagaaacccagtagcaccattgaaactacagagtgtttcgctccacacttcccccgtgtagatcaggtcgatgagtcactgcaatccccacgggcgaccgtggcagtggctgcgctggcggcctgcctatggggcaacccataggacgctctaatgtggacatggtgtgaagagtctattgagctagttagtagtcctccggcccctgaatgcggctaatcccaactgcggagcacatgccttcaacccagagggtagtgtgtcgtaatgggcaactctgcagcggaaccgactactttgggtgtccgtgtttccttttattctcacattggctgcttatggtgacaattacagaattgttaccatatagctattggattggccatccggtgtgcaatagagctattatatacctatttgttggctttgtaccactgaccttaaaatctttaaccactcttgagtgtatattaacccttaatacaattaaac

SEQ ID NO: 18588 - DNA, 724 bp, synthetic construct
  source 1..724: mol_type = other DNA
cactcacaggacccacgcggtgctagcactctggttccacgggacctttgtgcgcctgttttatgtcccctcccccaatttgtaacttagaagcaatttgcaacactgatcagtagcaggcatagcgcaccagctatgtcttgatcaagcacttctgtttccccggaccgagtatcaatagactgtttacacggttgaaggagaaagcgtccgttatccggctaactacttcgagaaacccagtagcaccattgaaactacagagtgtttcgctccacacttcccccgtgtagatcaggtcgatgagtcactgcaatccccacgggcgaccgtggcagtggctgcgttggcggcctgcctatggggcaacccataggacgctctaatgtggacatggtgtgaagagtctattgagctagttagtagtcctccggcccctgaatgcggctaatcccaactgcggagcacatgccttcaacccagagggtagtgtgtcgtaatgggcaactctgcagcggaaccgactactttgggtgtccgtgtttccttttattctcacattggctgcttatggtgacaattacagaattgttaccatatagctattggattggccatccggtgtgcaatagagctattatatacctatttgttggctttgtaccactgaccttaaaatctttaaccactcttgagtgtatattaacccttaatacaattaaac

SEQ ID NO: 18589 - DNA, 724 bp, synthetic construct
  source 1..724: mol_type = other DNA
cactcacaggacccacgcggtgctagcactctggttccacgggacctttgtgcgcctgttttatgtcccctcccccaatttgtaacttagaagcaatttgcaacactgatcagtagcaggcatagcgcaccagctatgtcttgatcaagcacttctgtttccccggaccgagtatcaatagactgtttacacggttgaaggagaaagcgtccgttatccggctaactacttcgagaaacccagtagcaccattgaaactacagagtgtttcgctccacacttcccccgtgtagatcaggtcgatgagtcactgcaatccccacgggcgaccgtggcagtggctgcgttggcggcctgcctatggggcaacccataggacgctctaatgtggacatggtgtgaagagtctattgagctagttagtagtcctccggcccctgaatgcggctaatcccaactgcggagcacatgccttcaacccagagggtagtgtgtcgtaatgggcaactctgcagcggaaccgactactttgggtgtccgtgtttccttttattctcacattggctgcttatggtgacaattatagaattgttaccatatagctattggattggccatccggtgtgcaatagagctattatatacctatttgttggctttgtaccactgaccttaaaatctttaaccactcttgagtgtatattaacccttaatacaattaaac

SEQ ID NO: 18590 - DNA, 724 bp, synthetic construct
  source 1..724: mol_type = other DNA
cactcacaggacccacgcggtgctagcactctggttccacgggacctttgtgcgcctgttttatgtcccctcccccaatttgtaacttagaagcaatttgcaacactgatcagtagcaggcatagcgcaccagctatgtcttgatcaagcacttctgtttccccggaccgagtatcaatagactgtttacacggttgaaggagaaagcgtccgttatccggctaactacttcgagaaacccagtagcaccattgaaactacagagtgtttcgctccacacttcccccgtgtagatcaggtcgatgagtcactgcaatccccacgggcgaccgtggcagtggctgcgctggcggcctgcctatggggcaacccataggacgctctaatgtggacatggtgtgaagagtctattgagctagttagtagtcctccggcccctgaatgcggctaatcccaactgcggagcacatgccttcaacccagagggtagtgtgtcgtaatgggcaactctgcagcggaaccgactactttgggtgtccgtgtttccttttattctcacattggctgcttatggtgacaattacagaattgttaccatatagctattggattggccatccggtgtgcaatagagctattatatacctatttgttggctttgtaccactgaccttaaaatctttaaccactcttgagtgtatattaacccttaatacaatcaaac

SEQ ID NO: 18591 - DNA, 724 bp, synthetic construct
  source 1..724: mol_type = other DNA
cactcacaggacccacgcggtgctagcactctggttccacggaacctttgtgcgcctgttttatgtcccctcccccaatttgtaacttagaagcaatttgcaacactgatcagtagcaggcatagcgcaccagctatgtcttgatcaagcacttctgtttccccggaccgagtatcaatagactgtttacacggttgaaggagaaagcgtccgttatccggctaactacttcgagaaacccagtagcaccattgaaactacagagtgtttcgctccacacttcccccgtgtagatcaggtcgatgagtcactgcaatccccacgggcgaccgtggcagtggctgcgctggcggcctgcctatggggcaacccataggacgctctaatgtggacatggtgtgaagagtctattgagctagttagtagtcctccggcccctgaatgcggctaatcccaactgcggagcacatgccttcaacccagagggtagtgtgtcgtaatgggcaactctgcagcggaaccgactactttgggtgtccgtgtttccttttattctcacattggctgcttatggtgacaattacagaattgttaccatatagctattggattggccatccggtgtgcaatagagctattatatacctatttgttggctttgtaccactgaccttaaaatctttaaccactcttgagtgtatattaacccttaatacaatcaaac

SEQ ID NO: 18592 - DNA, 724 bp, synthetic construct
  source 1..724: mol_type = other DNA
cactcacaggacccacgcggtgctagcactctggttccacgggacctttgtgcgcctgttttatgtcccctcccccaatttgtaacttagaagcaatttgcaacactgatcagtagcaggcatagcgcaccagctatgtcttgatcaagcacttctgtttccccggaccgagtatcaatagactgtttgcacggttgaaggagaaagcgtccgttatccggctaactacttcgagaaacccagtagcaccattgaaactacagagtgtttcgctccgcacttcccccgtgtagatcaggtcgatgagtcactgcaatccccacgggcgaccgtggcagtggctgcgctggcggcctgcctatggggcaacccataggacgctctaatgtggacatggtgtgaagagtctattgagctagttagtagtcctccggcccctgaatgcggctaatcccaactgcggagcacatgccttcaacccagagggtagtgtgtcgtaatgggcaactctgcagcggaaccgactactttgggtgtccgtgtttccttttattctcacattggctgcttatggtgacaattacagaattgttaccatatagctattggattggccatccggtgtgcaatagagctattatatacctatttgttggctttgtaccactgaccttaaaatctttaaccactcttgagtgtatattaacccttaatacaatcaaac

SEQ ID NO: 18593 - DNA, 724 bp, synthetic construct
  source 1..724: mol_type = other DNA
cactcacaggacccacgcggtgctagcactctggttccacgggacctttgtgcgcctgttttatgtcccctcccccaatttgtaacttagaagcaatttgcaacactgatcagtagcaggcatagcgcaccagctatgtcttgatcaagcacttctgtttccccggaccgagtatcaatagactgttcacacggttgaaggagaaagcgtccgttatccggctaactacttcgagaaacccagtagcaccattgaaactacagagtgtttcgctccacacttcccccgtgtagatcaggtcgatgagtcactgcaatccccacgggcgaccgtggcagtggctgcgctggcggcctgcctatggggcaacccataggacgctctaatgtggacatggtgtgaagagtctattgagctagttagtagtcctccggcccctgaatgcggctaatcccaactgcggagcacatgccttcaacccagagggtagtgtgtcgtaatgggcaactctgcagcggaaccgactactttgggtgtccgtgtttccttttattctcacattggctgcttatggtgacaattacagaattgttaccatatagctattggattggccatccggtgtgcaatagagctattatatacctatttgttggctttgtaccactgaccttgaaatctttaaccactcttgagtgcatattaacccttaatacaatcaaac

SEQ ID NO: 18594 - DNA, 724 bp, synthetic construct
  source 1..724: mol_type = other DNA
cactcacaggacccacgcggtgctagcactctggttccacgggacctttgtgcgcctgttttatgtcccctcccccaatttgtaactcagaagcaatttgcaacactgatcagtagcaggcatagcgcaccagctatgtcttgatcaagcacttctgtttccccggaccgagtatcaatagactgttcacacggttgaaggagaaagcgtccgttatccggctaactacttcgagaaacccagtagcaccattgaaactacagagtgtttcgctccacacttcccccgtgtagatcaggtcgatgagtcactgcaatccccacgggcgaccgtggcagtggctgcgctggcggcctgcctatggggcaacccataggacgctctaatgtggacatggtgtgaagagtctattgagctagttagtagtcctccggcccctgaatgcggctaatcccaactgcggagcacatgccttcaacccagagggtagtgtgtcgtaatgggcaactctgcagcggaaccgactactttgggtgtccgtgtttccttttattctcacattggctgcttatggtgacaattacagaattgttaccatatagctattggattggccatccggtgtgcaatagagctattatatacctatttgttggctttgtaccactgaccttaaaatctttaaccactcttgagtgtatattaacccttaatacaatcaaac

SEQ ID NO: 18595 - DNA, 724 bp, synthetic construct
  source 1..724: mol_type = other DNA
cactcacaggacccacgcggtgctagcactctggttccacgggacctttgtgcgcctgttttatgtcccctcccccaatttgtaacttagaagcaatttgcaacactgatcagtagcaggcatagcgcaccagctatgtcttgatcaagcacttctgtttccccggaccgagtatcaatagactgttcacacggttgaaggagaaagcgtccgttatccggctaactacttcgagaaacccagtagcaccattgaaactacagagtgtttcgctccacacttcccccgtgtagatcaggtcgatgagtcactgcaatccccacgggcgaccgtggcagtggctgcgctggcggcctgcctatggggcaacccataggacgctctaatgtggacatggtgtgaagagtctattgagctagttagtagtcctccggcccctgaatgcggctaatcccaactgcggagcacatgccttcaacccagagggtagtgtgtcgtaatgggcaactctgcagcggaaccgactactttgggtgtccgtgtttccttttatcctcacattggctgcttatggtgacaattacagaattgttaccatatagctattggattggccatccggtgtgcaatagagctattatatacctatttgttggctttgtaccactgaccttaaaatctttaaccactcttgagtgtatattaacccttaatacaatcaaac

SEQ ID NO: 18596 - DNA, 724 bp, synthetic construct
  source 1..724: mol_type = other DNA
cactcacaggacccacgcggtgctagcactctggttccacgggacctttgtgcgcctgttttatgtcccctcccccaatttgtaacttagaagcaatttgcaacactgatcagtagcaggcatagcgcaccagctatgtcttgatcaagcacttctgtttccccggaccgagtatcaatagactgttcacacggttgaaggagaaagcgtccgttatccggctaactacttcgagaaacccagtagcaccattgaaactacagagtgtttcgctccacacttcccccgtgtagatcaggtcgatgagtcactgcaatccccacgggcgaccgtggcagtggctgcgctggcggcctgcctatggggcaacccataggacgctctaatgtggacatggtgtgaagagtctattgagctagttagtagtcctccggcccctgaatgcggctaatcccaactgcggagcacatgccttcaacccagagggtagtgtgtcgtaatgggcaactctgcggcggaaccgactactttgggtgtccgtgtttccttttattctcacattggctgcttatggtgacaattacagaattgttaccatatagctattggattggccatccggtgtgcaatagagctattatatacctatttgttggctttgtaccgctgaccttaaaatctttaaccactcttgagtgtgtattaacccttaatacaatcaaac

SEQ ID NO: 18597 - DNA, 724 bp, synthetic construct
  source 1..724: mol_type = other DNA
cactcacaggacccacgcggtgctagcactctggttccacgggacctttgtgcgcctgttttatgtcccctcccctaatttgtaacttagaagcaatttgcaacactgatcagtagcaggcatagcgcaccagctatgtcttgatcaagcacttctgtttccccggaccgagtatcaatagactgttcacacggttgaaggagaaagcgtccgttatccggctaactacttcgagaaacccagtagcaccattgaaactacagagtgtttcgctccacacttcccccgtgtagatcaggtcgatgagtcactgcaatccccacgggcgaccgtggcagtggctgcgctggcggcctgcctatggggcaacccataggacgctctaatgtggacatggtgtgaagagtctattgagctagttagtagtcctccggcccctgaatgcggctaatcccaactgcggagcacatgccttcaacccagagggtagtgtgtcgtaatgggcaactctgcagcggaaccgactactttgggtgtccgtgtttccttttattctcacattggctgcttatggtgacaattacagaattgttaccatatagctattggattggccatccggtgtgcaatagagctattatatacctatttgttggctttgtaccactgaccgtaaaatctttaaccactcttgagtgtatattaacccttaatacaatcaaac

SEQ ID NO: 18598 - DNA, 724 bp, synthetic construct
  source 1..724: mol_type = other DNA
cactcacaggacccacgcggtgctagcactctggttccacgggacctttgtgcgcctgttttatgtcccctcccctaatttgtaacttagaagcaatttgcaacactgatcggtagcaggcatagcgcaccagctatgtcttgatcaagcacttctgtttccccggaccgagtatcaatagactgttcacacggttgaaggagaaagcgtccgttacccggctaactacttcgagaaacccagtagcaccattgaaactacagagtgtttcgctccacacttcccccgtgtagatcaggtcgatgagtcactgcaatccccacgggcgaccgtggcagtggctgcgctggcggcctgcctatggggcaacccataggacgctctaatgtggacatggtgtgaagagtctattgagctagttagtagtcctccggcccctgaatgcggctaatcctaactgcggagcacatgccttcaacccagagggtggtgtgtcgtaatgggcaactctgcagcggaaccgactactttgggtgtccgtgtttccttttattctcacattggctgcttatggtgacaattacagaattgttaccatatagctattggattggccatccggtgtgcaatagagctattatatacctatttgttggctttgtaccactgactttaaaatctttaaccactcttgagtgtatattaacccttaatacaatcaaac

SEQ ID NO: 18599 - DNA, 724 bp, synthetic construct
  source 1..724: mol_type = other DNA
cactcacaggacccacgcggtgctagcactctggttccacgggacctttgtgcgcctgttttatgtcccctcccccaatttgtaacttagaagcaatttgcaacactgatcagtagcaggcatagcgcaccagctatgtcttgatcaagcacttctgtttccccggaccgagtatcaatagactgttcacgcggttgaaggagaaagcgtccgttatccggctaactacttcgagaaacccagtagcaccattgaaactacagagtgtttcgctccacacttcccccgtgtagatcaggtcgatgagtcactgcaatccccacgggcgaccgtggcagtggctgcgctggcggcctgcctatggggcaacccataggacgctctaatgtggacatggtgtgaagagtctattgagctagttagtagtcctccggcccctgaatgcggctaatcctaactgcggagcacatgccttcaacccagagggtggtgtgtcgtaatgggcaactctgcagcggaaccgactactttgggtgtccgtgtttccttttattctcacattggctgcttatggtgacaattacagaattgttaccatatagctattggattggccatccggtgtgcaatagagctattatatacctatttgttggctttgtaccactgactttaaaatctttaaccactcttgagtgtatattaacccttaatacaatcaaac

SEQ ID NO: 18600 - DNA, 723 bp, synthetic construct
  source 1..723: mol_type = other DNA
cactcacaggacccacgcggtgctagcactctggttccacgggacctttgtgcgcctgttttatgtcccctccccaatttgtaacttagaagcaatttgcaacactgatcagtagcaggcatagcgcaccagctatgtcttgatcaagcacttctgtttccccggaccgagtatcaatagactgttcacacggttgaaggagaaagcgtccgttatccggctaactacttcgagaaacccagtagcaccattgaaactacagagtgtttcgctccacacttcccccgtgtagatcaggtcgatgagtcactgcaatccccacgggcgaccgtggcagtggctgcgctggcggcctgcctatggggcaacccataggacgctctaatgtggacatggtgtgaagagtctattgagctagttagtagtcctccggcccctgaatgcggctaatcctaactgcggagcacatgccttcaacccagagggtagtgtgtcgtaatgggcaactctgcagcggaaccgactactttgggtgtccgtgtttccttttattctcacattggctgcttatggtgacaattacagaattgttaccatatagctattggattggccatccggtgtgcaatagagctattatatacctatttgttggctttgtaccactgaccttaaaatctttaaccactcttgagtgtatattaacccttaatacaatcaaac

SEQ ID NO: 18601 - DNA, 723 bp, synthetic construct
  source 1..723: mol_type = other DNA
cactcacaggacccacgcggtgccagcactctggttccacgggacctttgtgcgcctgttttatgtcccctccccaatttgtaatttagaagcaatttgcaacactgatcagtagcaggcatagcgcaccagctatgtcttgatcaagcacttctgtttccccggaccgagtatcaatagactgtacacacggttgaaggagaaagcgtccgttatccggctaactacttcgagaaacccagtagcaccattgaaactacagagtgtttcgctccacacttcccccgtgtagatcaggtcgatgagtcactgcaatccccacgggcgaccgtggcagtggctgcgctggcggcctgcctatggggcaacccataggacgctctaatgtggacatggtgtgaagagtctattgagctagttagtagtcctccggcccctgaatgcggctaatcctaactgcggagcacatgccttcaatccagagggtagtgtgtcgtaatgggcaactctgcagcggaaccgactactttgggtgtccgtgtttccttttattctcacattggctgcttatggtgacaattacagaattgttaccatatagctattggattggccatccggtgtgcaatagagctattatatacctatttgttggctttgtaccactaaccttaaaatctttaaccactctcgagtgtatattaacccttaatacagtcaaac

SEQ ID NO: 18602 - DNA, 723 bp, synthetic construct
  source 1..723: mol_type = other DNA
cactcacaggacccacgcggtgctagcactctggttccacgggacctttgtgcgcctgttttatgtcccctccccaatttgtaacttagaagcaatttgcaacactgatcagtagcaggcatagcgcaccagctatgtcttgatcaagcacttctgtttccccggaccgagtatcaatagactgtacacacggttgaaggagaaagcgtccgttatccggctaactacttcgagaaacccagtaccaccattgaaattacagagcgtttcgctccacacttcccccgtgtagatcaggtcgatgagtcactgcaatccccacgggcgaccgtggcagtggctgcgctggcggcctgcctatggggcaacccataggacgctctaatgtggacatggtgcgaagagtctattgagctagttagtagtcctccggcccctgaatgcggctaatcccaactgcggagcacatgccttcaatccagagggtagtgtgtcgtaatgggcaactctgcagcggaaccgactactttgggtgtccgtgtttccttttattctcatattggctgcttatggtgacaattacagaattgttaccatatagctattggattggccatccggtgtgcaatagagctattatatacctatttgttggctttgtaccactgaccataaaatctttaaccactctcgagtgcatattaacccttaatacaatcaaac

SEQ ID NO: 18603 - DNA, 723 bp, synthetic construct
  source 1..723: mol_type = other DNA
cactcacaggacccacgcggtgctagcactctggttccacgggacctttgtgcgcctgttttatgtcccctccccaatttgtaacttagaagcaatttgcaacactgatcagtagtaggcatagcgcaccagctatgtcttgatcaagcacttctgtttccccggaccgagtatcaatagactgttcacacggttgaaggagaaagcgtccgttacccggctaactacttcgagaaacccagtaacaccattgaaactacagagtgtttcgctccacacttcccccgtgtagatcaggtcgatgagtcactgcaatccccacgggcgaccgtggcagtggctgcgctggcggcctgcctatggggcaacccataggacgctttgatgtggacatggtgtgaagagtctattgagctagttagtagtcctccggcccctgaatgcggctaatcctaactgcggagcacatgccctcaacccagagggtagtgtgtcgtaatgggcaactctgcagcggaaccgactactttgggtgtccgtgtttccttttattctcacattggctgcttatggtgacaattacagaattgttaccatatagctattggattggccatccggtgtgcaatagagctattatatacctatttgttggctttgtaccactgaccttaaaatctttaaccaatcttgagtgtatattaacccttaacacaatcaaac

SEQ ID NO: 18604 - DNA, 723 bp, synthetic construct
  source 1..723: mol_type = other DNA
cactcacaggacccacgcggtgctagcactctggttccacgggacctttgtgcgcctgttttatcttccctccccaatttgtaacttagaagcaatttgcaacactgatcagtagcaggcatagcgcaccagctatgtcttgatcaagcacttctgtttccccggaccgagtatcaatagactgttcacatggttgaaggagaaagcgtccgttatccggctaactacttcgagaaacccagtagcaccattgaaactacagagtgtttcgctccacacttcccccgtgtagatcaggtcgatgagtcactgcaatccccacgggcgaccgtggcagtggctgcgctggcggcctgcctatggggcaacccataggacgctttgatgtggacatggtgtgaagagtctattgagctagttagtagtcctccggcccctgaatgcggctaatcctaactgcggagcacatgccttcaacccagagggtagtgtgtcgtaatgggcaactctgcagcggaaccgactactttgggtgtccgtgtttccttttattttcacattggctgcttatggtgacaattacagaattgttaccatatagctattggattggccatccggtgtgcaatagagctattatatacctatttgttggctttgcaccactgaccttaaaatctttgaccactcttgagcgtatattaatccttaatacagtcaaac

SEQ ID NO: 18605 - DNA, 716 bp, synthetic construct
  source 1..716: mol_type = other DNA
atgttctgctcatggcgctagcacactggttctgcgggacctttgtgcgcctgttttataacccttcccttaagcagtaacttagaagctttgtacaatcatggccaatagtgggcgtggcgcgccagtcacgtcttggtcaagcacttctgtatccccggactgagtatcaatagactgctcacgcggttgaaggagaaaacgttcgttacccggctaactacttcgagaaacctagtagcaccatgaaagttgcggagtgtttcgctcagcacttcccccgtgtagatcaggtcgatgagtcactgtaaaccccacgggcgaccgtgacagtggctgcgttggcggcctgcccatggggtaacccatgggacgctctaatacggacatggtgcgaagagtctattgagctagttagcagtcctccggcccctgaatgcggctaatcctaactgcggagcgcgcaccttcaatccagggggcggcgcgtcgtaatgggtaactctgcagcggaaccgactactttgggtgtccgtgtttccttttattctttattggctgcttatggtgacaattgaaaagttgttaccatatagctattggattggccatccggtgtctaacagagctattgtttacctattcattggcttcgtcccttttaatctcaaggccatccaagctctcgattacatattgctcctcaactgtaggaa

SEQ ID NO: 18606 - DNA, 724 bp, synthetic construct
  source 1..724: mol_type = other DNA
cactcacaggacccacgcggtgctagcactctggttccacgggacctttgtgcgcctgttttatgtcccctcccccaatttgtaacttagaagcaatttgcaacactgatcaatagcaggcatagcgcaccagctatgtcttgatcaagcacttctgtttccccggaccgagtatcaatagactgtttacacggttgaaggagaaagcgtccgttatccggctaactacttcgagaaacccagtagcaccattgaaactacagagtgtttcgctccacacttcccccgtgtagatcaggtcgatgagtcactgcaatccccacgggcgaccgtggcagtggctgcgctggcggcctgcctatggggcaacccataggacgctctgatgtggacatggtgtgaagagtctattgagctagttagtagtcctccggcccctgaatgcggctaatcccaactgcggagcacatgccttcaacccagagggtagtgtgtcgtaatgggcaactctgcagcggaaccgactactttgggtgtccgtgtttccttttattctcacattggctgcttatggtgacaattacagaattgttaccatatagctattggattggccatccggtgtgcaatagagctattatatacctatttgttggctttgtaccactgaccttaaaatctttaaccactcttgagtgtatattaacccttaatacaattaaac

SEQ ID NO: 18607 - DNA, 724 bp, synthetic construct
  source 1..724: mol_type = other DNA
cactcacaggacccacgcggtgctagcactctggttccacgggacctttgtgcgcctgttttatgtcccctcccccaatttgtaacttagaagcaatttgcaacactgatcagtagcaggcatagcgcaccagctatgtcttgatcaagcacttctgtttccccggaccgagtatcaatagactgtttacacggttgaaggagaaagcgtccgttatccggctaactacttcgagaaacccagtagcaccattgaaactacagagtgtttcgctccacacttcccccgtgtagatcaggtcgatgagtcactgcaatccccacgggcgaccgtggcagtggctgcgctggcggcctgcctatggggcaacccataggacgctctaatgtggacatggtgtgaagagtctattgagctagttagtagtcctccggcccctgaatgcggctaatcccaactgcggagcacatgccttcaacccagagggtagtgtgtcgtaatgggcaactctgcagcggaaccgactactttgggtgtccgtgtttccttttattctcacattggctgcttatggtgacaattacagaattgttaccatatagctattggattggccatctggtgtgcaatagagctattatatacctatttgttggctttgtaccactgaccttaaaatctttaaccactcttgagtgtatattaacccttaatacaattaaac

SEQ ID NO: 18608 - DNA, 724 bp, synthetic construct
  source 1..724: mol_type = other DNA
cactcacaggacccacgcggtgctagcactctggttccacgggacctttgtgcgcctgttttatgtcccctcccccaatttgtaacttagaagcaatttgcaacactgatcagtagcaggcatagcgcaccagctatgtcttgatcaagcacttctgtttccccggaccgagtatcaatagactgtttacacggttgaaggagaaagcgtccgttatccggctaactacttcgagaaacccagtagcaccattgaaactacagagtgtttcgctccacacttcccccgtgtagatcaggtcgatgagtcactgcaatccccacgggcgaccgtggcagtggctgcgctggcggcctgcctatggggcaacccataggacgctctaatgtggacatggtgtgaagagtctattgagctagttagtagtcctccggcccctgaatgcggctaatcccaactgcggagcacatgccttcaacccagagggtagtgtgtcgtaatgggcaactctgcagcggaaccgactactttgggtgtccgtgtttccttttattctcacattggctgcttatggtgacaattacagaattgttaccatatagctattggattggccatccagtgtgcaatagagctattatatacctatttgttggctttgtaccactgaccttaaaatctttaaccactcttgagtgtatattaacccttaatacaattaaac

SEQ ID NO: 18609 - DNA, 723 bp, synthetic construct
  source 1..723: mol_type = other DNA
cactcacaggacccacgcggtgctagcactctggttccacgggacctttgtgcgcctgttttatgtcccctccccaatttgtaacttagaagcaatttgcaacactgatcagtagcaggcatagcgcaccagctatgtcttgatcaagcacttctgtttccccggaccgagtatcaatagactgttcacacggttgaaggagaaagcgtccgttatccggctaactacttcgagaaacccagtagcaccattgaaactacagagtgtttcgctccacacttcccccgtgtagatcaggtcgatgagtcactgcaatccccacgggcgaccgtggcagtggctgcgctggcggcctgcctatggggcaacccataggacgctctaatgtggacatggtgtgaagagtctattgagctagttagtagtcctccggcccctgaatgcggctaatcctaactgcggagcacatgccttcaacccagagggtagtgtgtcgtaatgggcaactctgcagcggaaccgactactttgggtgtccgtgtttccttttattctcgcattggctgcttatggtgacaattacagaattgttaccatatagctattggattggccatccggtgtgcaatagagctattatatacctatttgttggctttgtaccactgaccttaaaatctttaaccactcttgagtgtatattaacccttaatacaatcaaac

SEQ ID NO: 18610 - DNA, 723 bp, synthetic construct
  source 1..723: mol_type = other DNA
cactcacaggacccacgcggtgctagcactctggttccacgggacctttgtgcgcctgttttatgttccctccccaatttgtaacttagaagcaatttgcaacactgatcagtagcaggcatagcgcaccagctatgtcttgatcaagcacttctgtttccccggaccgagtatcaatagactgttcacacggttgaaggagaaagcgtccgttatccggctaactacttcgagaaacccagtagcaccattgaaactacagagtgtttcgctccacacttcccccgtgtagatcaggtcgatgagtcactgcaatccccacgggcgaccgtggcagtggctgcgctggcggcctgcctatggggcaacccataggacgctctaatgtggacatggtgtgaagagtctattgagctagttagtagtcctccggcccctgaatgcggctaatcctaactgcggagcacatgccttcaacccagagggtagtgtgtcgtaatgggcaactctgcagcggaaccgactactttgggtgtccgtgtttccttttattctcacattggctgcttatggtgacaatcacagaattgttaccatatagctattggattggccatccggtgtgcaacagagctattatacacctgtttgttggctttgtaccactaaccttaaaatctttagccactcttgagtgtatattaacccttaatacaatcaagc

SEQ ID NO: 18611 - DNA, 723 bp, synthetic construct
  source 1..723: mol_type = other DNA
cactcacaggacccacgcggtgctagcactctggttccacgggacctttgtgcgcctgttttatgtcccctccccaatttgtaacttagaagcaatttgcaacactgatcagtagcaggcatagcgcaccagctatgtcttgatcaagcacttctgtttccccggaccgagtatcaatagactgttcacacggttgaaggagaaagcgtccgttatccggctaactacttcgagaaacccagtagcaccattgaaactacagagtgtttcgctccacacttcccccgtgtagatcaggtcgatgagtcactgcaatccccacgggcgaccgtggcagtgactgcgctggcggcctgcctatggggcaacccataggacgctctaatgtggacatggtgtgaagagtctattgagctagttagtagtcctccggcccctgaatgcggctaatcctaactgcggagcacatgccttcaacccagagggtagtgtgtcgtaatgggcaactctgcagcggaaccgactactttgggtgtccgtgtttccttttattctcacattggctgcttatggtgacaatcacagaattgttaccatatagctattggattggccatccggtgtgcaacagagctattatatacctgtttgttggctttgtaccactaaccttaaaatctttaaccactcttgagtgtatattaacccttaatacaatcaagc

SEQ ID NO: 18612 - DNA, 723 bp, synthetic construct
  source 1..723: mol_type = other DNA
cactcacaggacccacgcggtgctagcactctggttccacggaacctttgtgcgcctgttttatgtcccctccccaatttgtaacttagaagcaatttgcaacactgatcagtagcaggcatagcgcaccagctatgtcttgatcaagcacttctgtttccccggaccgagtatcaatagactgttcacacggttgaaggagaaagcgtccgttatccggctaactacttcgagaaacccagtagcaccattgaaactacagagtgtttcgctccacacttcccccgtgtagatcaggtcgatgagtcactgcgatccccacgggcgaccgtggcagtggctgcgctggcggcctgcctatggggcaacccataggacgctctaatgtggacatggtgtgaagagtctattgagctagttagtagtcctccggcccctgaatgcggctaatcctaactgcggagcacatgccttcaacccagagggtagtgtgtcgtaatgggcaactctgcagcggaaccgactactttgggtgtccgtgtttccttttattctcacattggctgcttatggtgacaattacagaattgttaccatatagctattggattggccatccggtgtgcaatagagctattatatacctatttgttggctttgtaccactgaccttaaaatctttaaccactcttgagtgtatattaacccttaatacaatcaaac

SEQ ID NO: 18613 - DNA, 723 bp, synthetic construct
  source 1..723: mol_type = other DNA
cactcacaggacccacgcggtgctagcactctggtttcacgggacctttgtgcgcctgttttatgtcccctccccaatttgtaacttagaagcaatttgcaacactgatcagtagcaggcatagcgcaccagctatgtcttgatcaagcacttctgtttccccggaccgagtatcaatagactgttcacgcggttgaaggagaaagcgtccgttatccggctaactacttcgagaaacccagtagcaccattgaaactacagagtgtttcgctccacacttcccccgtgtagatcaggtcgatgagtcactgcaatccccacgggcgaccgtggcagtggctgcgctggcggcctgcctatggggcaacccataggacgctctaatgtggacatggtgtgaagagtctattgagctagttagtagtcctccggcccctgaatgcggctaatcctaactgcggagcacatgccttcaacccagagggtggtgtgtcgtaatgggcaactctgcagcggaaccgactactttgggtgtccgtgtttccttttattctcacattggctgcttatggtgacaattacagaattgttaccatatagctattggattggccatccggtgtgcaatagagctattatatacctatttgttggctttgtaccactgactttaaaatctttaaccactcttgagtgtatattaacccttaatacaatcaaac

SEQ ID NO: 18614 - DNA, 723 bp, synthetic construct
  source 1..723: mol_type = other DNA
cactcacaggacccacgcggtgccagcactctggttccacgggacctttgtgcgcctgttttatgtcccctccccaatttgtaacttagaagcaatttgcaacactgatcagtagcaggcatagcgcaccagctatgtcttgatcaagcacttctgtttccccggaccgagtatcaatagactgttcacacggttgaaggagaaagcgtccgttatccggctaactacttcgagaaacccagtagcaccattgaaactacagagtgtttcgctccacacttcccccgtgtagatcaggtcgatgagtcactgcaatccccacgggcgaccgtggcagtggctgcgctggcggcctgcctatggggtaacccataggacgctctaatgtggacatggtgtgaagagtctattgagctagttagtagtcctccggcccctgaatgcggctaatcctaactgcggagcacatgccttcaacccagagggtagtgtgtcgtaatgggcaactctgcagcggaaccgactactttgggtgtccgtgtttccttttattctcacattggctgcttatggtgacaattacagaattgttaccatatagctattggattggccatccggtgtgcaatagagctattatatacctatttgttggctttgtaccactgaccttaaaatctttaaccactcttgagtgtatattaacccttaatacaatcaaac

SEQ ID NO: 18615 - DNA, 723 bp, synthetic construct
  source 1..723: mol_type = other DNA
cactcacaggacccacgcggtgctagcactctggttccacgggacctttgtgcgcctgttttatatcccctccccaatttgtaacttagaagcaatttgcaacaccgatcagtagcaggcatagcgcaccagctatgtcttgatcaagcacttctgtttccccggaccgagtatcaatagactgttcacacggttgaaggagaaagcgtccgttatccggctaactacttcgagaaacccagtagcaccattgaaactacagagtgtttcgctccacacttcccccgtgtagatcaggtcgatgagtcactgcaatccccacgggcgaccgtggcagtggctgcgctggcggcctgcctatggggcaacccataggacgctctaatgtggacatggtgtgaagagtctattgagctagttagtagtcctccggcccctgaatgcggctaatcctaactgcggagcacatgccttcaacccagagggtagtgtgtcgtaatgggcaactctgcagcggaaccgactactttgggtgtccgtgtttccttttattctcacattggctgcttatggtgacaattacagaattgttaccatatagctattgggttggccatccggtgtgcaatagagctattatatacctatttgttggctttgtgccactgaccttaaaatctttaaccactcttgagtgtatattaacccttaatacaatcaaac

SEQ ID NO: 18616 - DNA, 723 bp, synthetic construct
  source 1..723: mol_type = other DNA
cactcacaggacccacgcggtgctagcactctggttccacgggacctttgtgcgcctgttttatatcccctccccaatttgtaacttagaagcaatttgcaacaccgatcagtagcaggcatagcgcaccagctatgtcttgatcaagcacttctgtttccccggaccgagtatcaatagactgttcacacggttgaaggagaaagcgtccgttatccggctaactacttcgagaaacccagtagcaccattgaaactacagagtgtttcgctccacacttcccccgtgtagatcaggtcgatgagtcactgcaatccccacgggcgaccgtggcagtggctgcgctggcggcctgcctatggggcaacccataggacgctctaatgtggacatggtgtgaagagtctattgagctagttagtagtcctccggcccctgaatgcggctaatcctaactgcggagcacatgccttcaacccagagggtagtgtgtcgtaatgggcaactctgcagcggaaccgactactttgggtgtccgtgtttccttttattctcacattggctgcttatggtgacaattacagaattgttaccatatagctattgggttggccatccggtgtgcaatagagctattatatacctatttgttggctttgtgccactgaccttaaaatctttaaccactcttgagtgtatattaacccttaatataatcaaac

SEQ ID NO: 18617 - DNA, 723 bp, synthetic construct
  source 1..723: mol_type = other DNA
cactcacaggacccacgcggtgctagcactctggttccacgggacctttgtgcgcctgttttatatcccttccccaatttgtaacttagaagcaatttgcaacaccgatcagtagcaggcatagcgcgccagctatgtcttgatcaagcacttctgtttccccggaccgagtatcaatagactgttcacacggttgaaggagaaagcgtccgttatccggctaactactttgagaaacccagtagcaccattgaaactacagagtgtttcgctccacacttcccccgtgtagatcaggtcgatgagtcactgcaatccccacgggcgaccgtggcagtggctgcgctggcggcctgcctatggggcaacccataggacgctctaatgtggacatggtgtgaagagtctattgagctagttagtagtcctccggcccctgaatgcggctaatcctaactgcggagcacatgccttcaacccagagggtagtgtgtcgtaatgggcaactctgcagcggaaccgactactttgggtgtccgtgtttccttttattctcacattggctgcttatggtgacaattacagaattgttaccatatagctattgggttggccatccggtgtgcaatagagctattatatacctatttgttggctttgtaccactgaccttaaaatctttaaccactcttgagtgtatattaacccttaatacaatcaaac

SEQ ID NO: 18618 - DNA, 723 bp, synthetic construct
  source 1..723: mol_type = other DNA
cactcacaggacccacgcggtgctagcactctggttccacgggacctttgtgcgcctgttttatgttccctccccagtttgtaacttagaagcaatttgcaacaccgatcagtagcaggcatagcacaccagctatgtcttgatcaagcacttctgtttccccggaccgagtatcaatagactgttcacacggttgaaggagaaagcgtccgttacccggctaactacttcgagaaacccagtaacaccattgaaattgcagagtgtttcgctccacactttccccgtgtagatcaggtcgatgagtcactgcaatcctcacgggcgaccgtggcagtggctgcgctggcggcctgcctatggggcaacccataggacgctctaatgtggacatggtgtgaagagtctattgagctagttagtagtcctccggcccctgaatgcggctaatcctaactgcggagcacatgccttcaacccagagggtagtgtgtcgtaatgggcaactctgcagcggaaccgactactttgggtgtccgtgtttccttttattcttacattggctgcttatggtgacaattacagaattgttaccatatagctattggattggccatccggtgtgcaatagagctattatatacctatttgctggctttgtaccattgaccttaaaatctttaaccactcttgagtgtgtattaacccttaatacaatcaaac

SEQ ID NO: 18619 - DNA, 723 bp, synthetic construct
  source 1..723: mol_type = other DNA
cactcacaggacccacgcggtgctagcactctggttccacgggacctttgtgcgcctgttttatgtcccttccccaatttgtaacttagaagcaatttacaacactgatcagtagcaggcatagcgcaccagctatgtcttgatcaagcacttctgtttccccggaccgagtatcaatagactgttcacacggttgaaggagaaagcgtccgttatccggctaactacttcgagaaacccagtagcaccattgaaactacagagtgtttcgctccacacttcccccgtgtagatcaggtcgatgagtcactgcaatccccacgggcgaccgtggcagtggctgcgctggcggcctgcctatggggcaacccataggacgctctaatgtggacatggtgtgaagagtctattgagctagttagtagtcctccggcccctgaatgcggctaatcctaactgcggagcacatgccttcaacccagagggtagtgtgtcgtaatgggcaactctgcagcggaaccgactactttgggtgtccgtgtttccttttattctcacattggctgcttatggtgacaattacagaattgttaccatatagctattggattggccatccggtgtgcaatagagctattatatacccatttgttggctttgtaccactgaccttaaaatctttaaccactctcgagtgtatattaacccttaatacaatcaaac

SEQ ID NO: 18620 - DNA, 723 bp, synthetic construct
  source 1..723: mol_type = other DNA
cactcacaggacccacgcggtgttagcactctggttccacgggacctttgtgcgcctgttttatgtcccctccccaatttgcaacttagaagcaatttgcaacactgatcagtagcaggcatagcgcaccagctatgtcttgatcaagcacttctgtttccccggaccgagtatcaataaactgtccacacggttgaaggagaaagcgtccgttatccggctaactacttcgagaaacccagtagcaccattgaaactgcagagtgtttcgctccacacttcccccgtgtagatcaggtcgatgagtcactgcaatccccacgggcgaccgtggcagtggctgcgctggcggcctgcctatggggcaacccataggacgctctaatgtggacatggtgtgaagagtctattgagctagttagtagtcctccggcccctgaatgcggctaatcctaactgcggagcacatgccttcaatccagagggtagtgtgtcgtaatgggcaactctgcagcggaaccgactactttgggtgtccgtgtttccttttattctcacattggctgcttatggtgacaattactgaattgttaccatatagctattggattggccatccggtgtgcaatagagctattatatacctatttgttggctttgtaccactgaccttagaatctataaccactctcgagtgtatattaaccctcaatacaatcaagc

SEQ ID NO: 18621 - DNA, 723 bp, synthetic construct
  source 1..723: mol_type = other DNA
cactcacaggacccacgcggtgttagcactctggttccacgggacctttgtgcgcctgttttatgtcccctccccaatttgcaacttagaagcaatttgcaacactgatcagtagcaggcatagcgcaccagctatgtcttgatcaagcacttctgtttccccggaccgagtatcaatagactgttcacacggttgaaggagaaagcgtccgttatccggctaactacttcgagaaacccagtagcaccattgaaactgcagagtgtttcgctccacacttcccccgtgtagatcaggtcgatgagtcactgcaatccccacgggcgaccgtggcagtggctgcgctggcggcctgcctatggggcaacccataggacgctctaatgtggacatggtgtgaagagtctattgagctagttagtagtcctccggcccctgaatgcggctaatcctaactgcggagcacatgccttcaatccagagggtagtgtgtcgtaatgggcaactctgcagcggaaccgactactttgggtgtccgtgtttccttttattctcacattggctgcttatggtgacaattactgaattgttaccatatagctactggattggccatccggtgtgcaatagagctattatatacctatttgttggctttgtaccactgaccttaaaatctataaccactctcgagtgtatattaaccctcaatacaatcaaac

SEQ ID NO: 18622 - DNA, 723 bp, synthetic construct
  source 1..723: mol_type = other DNA
cactcacaggacccacgcggtgctagcactctggttccacgggacctttgtgcgcctgttttatgtcccctccccaatctgtaacttagaagcaatttgcaacactgatcagtagcaggcatagcgcaccagctatgtctcgatcaagcacttctgtttccccggaccgagtatcaatagactgttcacacggttgaaggagaaagcgtccgttatccggctaactacttcgagaaacccagtagcaccattgaaactatagagtgtttcgctccacacttcccccgtgtagatcaggtcgatgagtcactgcaatccccacgggcgaccgtggcagtggctgcgctggcggcctgcctatggggcaacccataggacgctctaatgtggacatggtgtgaagagtctattgagctagttagtagtcctccggcccctgaatgcggctaatcctaactgcggagcacatgccttcaatccagagggtagtgtgtcgtaatgggcaactctgcagcggaaccgactactttgggtgtccgtgtttccttttattctcacattggctgcttatggtgacaattactgaattgttaccatatagctattggattggccatccggtgtgcaatagagctattatatacctatttgttggttttgtaccactaaccttaaaatctataaccactctcgagtgtatattaacccttaatacaatcaaac

SEQ ID NO: 18623 - DNA, 723 bp, synthetic construct
  source 1..723: mol_type = other DNA
cactcacaggacccacgcggtgctagcactctggttccacgggacctttgtgcgcctgttttatgtcccctccccaatctgtaacttagaagcaatttgcaacactgatcagtagcaggcatagcgcaccagctatgtctcgatcaagcacttctgtttccccggaccgagtatcaatagactgtttacacggttgaaggagaaagcgtccgttatccggctaactacttcgagaaacccagtagcaccattgaaactatagagtgtttcgctccacacttcccccgtgtagatcaggtcgatgagtcactgcaatccccacgggcgaccgtggcagtggctgcgctggcggcctgcctatggggcaacccataggacgctctaatgtggacatggtgtgaagagtctattgagctagttagtagtcctccggcccctgaatgcggctaatcctaactgcggagcacatgccttcaatccagagggtagtgtgtcgtaatgggcaactctgcagcggaaccgactactttgggtgtccgtgtttccttttattctcacattggctgcttatggtgacaattactgaattgttaccatatagctattggattggccatccggtgtgcaatagagctattatatacttatttgttggttttgtaccactaaccttaaaatctataaccactctcgagtgtatattaacccttaatacaatcaaac

SEQ ID NO: 18624 - DNA, 723 bp, synthetic construct
  source 1..723: mol_type = other DNA
cactcacaggacccacgcggtgctagcactctggttccacgggacctttgtgcgcctgttttatgtcccctccccaatctgtaacttagaagcaatttgcaacactgatcagtagcaggcatagcgcaccagctatgtctcgatcaagcacttctgtttccccggaccgagtatcaatagactgttcgcacggttgaaggagaaagcgtccgttatccggctaactacttcgagaaacccagtagcaccattgaaactatagagtgtttcgctccacacttcccccgtgtagatcaggtcgatgagtcactgcaatccccacgggcgaccgtggcagtggctgcgctggcggcctgcctatggggcaacccataggacgctctaatgtggacatggtgtgaagagtctattgagctagttagtagtcctccggcccctgaatgcggctaatcctaactgcggagcacatgccttcaatccagagggtagtgtgtcgtaatgggcaactctgcagcggaaccgactactttgggtgtccgtgtttctttttattctcacattggctgcttatggtgacaattactgaattgttaccatatagctattggattggccatccggtgtgcaatagagctattatatacctatttgttggttttgtaccactaaccttaaaatctataaccactctcgagtgtatattaacccttaatacaatcaaac

SEQ ID NO: 18625 - DNA, 723 bp, synthetic construct
  source 1..723: mol_type = other DNA
cactcacaggacccacgcggtgctagcactctggttccacgggacctttgtgcgcctgttttatgtcccctccccaatctgtaacttagaagcaatttgcaacactgatcagtagcaggcatagcgcaccagctatgtctcgatcaagcacttctgtttccccggaccgagtatcaatagactgttcacacggttgaaggagaaagcgtccgttatccggctaactacttcgagaaacccagtagcaccattgaaactatagagtgtttcgctccacacttcccccgtgtagatcaggtcgatgagtcactgcaatccccacgggcgaccgtggcagtggctgcgctggcggcctgcctatggggcaacccataggacgctttaatgtggacatggtgtgaagagtctattgagctagttagtagtcctccggcccctgaatgcggctaatcctaactgcggagcacatgccttcaatccagagggtagtgtgtcgtaatgggcaactctgcagcggaaccgactactttgggtgtccgtgtttccttttattctcacattggctgcttatggtgacaattactgaattgttaccatatagctattggattggccatccggtgtgcaatagagctattatatacctatttgttggttttgtaccactaaccttaaaatctataaccactctcgagtgtatattaacccttaatacaatcaaac

SEQ ID NO: 18626 - DNA, 723 bp, synthetic construct
  source 1..723: mol_type = other DNA
cactcacaggacccacgcggtgctagcactctggttccacgggacctttgtgcgcctgttttatgtcccctccccaatctgtaacttagaagcaatttgcaacactgatcagcagcaggcatagcgcaccagctatgtctcgatcaagcacttctgtttccccggaccgagtatcaatagactgttcacacggttgaaggagaaagcgtccgttatccgactaactacttcgagaaacccagtagcaccattgaaactatagagtgtttcgctccacacttcccccgtgtagatcaggtcgatgagtcactgcaatccccacgggcgaccgtggcagtggctgcgctggcggcctgcctatggggcaacccataggacgctctaatgtggacatggtgtgaagagtctattgagctagttagtagtcctccggcccctgaatgcggctaatcctaactgtggagcacatgccttcaatccagagggtagtgtgtcgtaatgggcaactctgcagcggaaccgactactttgggtgtccgtgtttccttttgttctcacattggctgcttatggtgacaattactgaattgttaccatatagctattggattggccatccggtgtgcaatagagctattatatacctatttgttggttttgtaccactaaccttaaaaactataaccactctcgagtgtatattaacccttaatacaatcaaac

SEQ ID NO: 18627 - DNA, 723 bp, synthetic construct
  source 1..723: mol_type = other DNA
cactcacaggacccacgcggtgctagcactctggtttcacgggacctttgtgcgcctgttttatgtcccctccccaatctgtaacttagaagcaatttgcaacactgatcagtagcaggcatagcgcaccagctatgtctcgatcaagcacttctgtttccccggaccgagtatcaatagactgttcacacggttgaaggagaaagcgtccgttatccggctaactacttcgagaaacccagtagcaccattgaaactatagagtgtttcgctccacacttcccccgtgtagatcaggtcgatgagtcactgcaatccccacgggcgaccgtggcagtggctgcgctggcggcctgcctatggggcaacccataggacgctctaatgtggacatggtgtgaagagtctattgagctagttagtagtcctccggcccctgaatgcggctaatcctaactgcggagcacatgccttcaatccagagggtagtgtgtcgtaatgggcaactctgcagcggaaccgactactttgggtgtccgtgtttccttttattctcacattggctgcttatggtgacaattactgaattgttaccatatagctattggattggccatccggtgtgcaatagagctattatatacctatttgttggttttgtaccactaaccttaaaatctataaccactctcgagtgtatattaacccttaatacaatcaaac

SEQ ID NO: 18628 - DNA, 723 bp, synthetic construct
  source 1..723: mol_type = other DNA
cactcacaggacccacgcggtgctagcactctggtttcacgggacctttgtgcgcctgttttatgtcccctccccaatctgtaacttagaagcaatttgcaacactgatcagtagcaggcatagcgcaccagctatgtctcgatcaagcacttctgtttccccggaccgagtatcaatagactgttcacacggttgaaggagaaagcgtccgttatccggctaactacttcgagaaacccagtagcaccattgaaactatagagtgtttcgctccacacttcccccgtgtagatcaggtcgatgagtcactgcaatccccacgggcgaccgtggcagtggctgcgctggcggcctgcctatggggcaacccataggacgctctaatgtggacatggtgtgaagagtctattgagctagttagtagtcctccggcccctgaatgcggctaatcctaactgcggagcacatgccttcaatccagaaggtagtgtgtcgtaatgggcaactctgcagcggaaccgactactttgggtgtccgtgtttccttttattctcacattggctgcttatggtgacaattactgaattgttaccatatagctattggattggccatccggtgtgcaatagagctattatatacctatttgttggttttgtaccactaaccttaaaatctataaccactctcgagtgtatattaactcttaatacaatcaaac

SEQ ID NO: 18629 - DNA, 723 bp, synthetic construct
  source 1..723: mol_type = other DNA
cactcacaggacccacgcggtgctagcactctggttccacgggacctttgtgcgcctgttttatgtcccctccccaatttgtaacttagaagcaatttgcaacactgatcagtagcaggcatagcgcaccagctatgtcttgatcaagcacttctgtttccccggaccgagtatcaatagactgttctcacggttgaaggagaaagcgtccgttatccggctaactacttcgagaaacccagtaacaccattgaaactacagagtgtttcgctccacacttcccccgtgtagatcaggtcgatgagtcactgcaatccccacgggcgaccgtggcagtggctgcgctggcggcctgcctatggggcaacccataggacgctctaatgtggacatggtgtgaagagtctattgagctagttagtagtcctccggcccctgaatgcggctaatcctaactgcggagcacatgccttcaatccagagggtagtgtgtcgtaatgggcaactctgcagcggaaccgactactttgggtgtccgtgtttccttttattctcacattggctgcttatggtgacaattactgaattgttaccatatagctattggattggccatccggtgtgcaatagagctattatatacctatttgttggttttgtaccactaaccgtaaaatctataaccaccctcgagtgtatattaacccttaatacaatcaaac

SEQ ID NO: 18630 - DNA, 723 bp, synthetic construct
  source 1..723: mol_type = other DNA
cactcacaggacccacgcggtgttagcactctggttccacgggacctttgtgcgcctgttttatgccccctccccaaattgtgacttagaagtaacttgcaacactggtcagtagcaggcatagcgcaccagctatgtcttgatcaagcacttctgtttccccggaccgagtatcaatagactgttcacacggttgaaggagaaagcgtccgttatccggctaactacttcgagaaacccagtagcaccattgaaactacagagtgtttcgctccacacttcccccgtgtagatcaggtcgatgagtcactgcaatccccacgggcgaccgtggcagtggctgcgctggcggcctgcctatggggcaacccataggacgctctaatgtggacatggtgtgaagagtctattgagctagttagtaatcctccggcccctgaatgcggctaatcctaactgcggagcacatgccttcaatccagagggtagtgtgtcgtaatgggcaactctgcagcggaaccgactactttgggtgtccgtgtttccttttattctcacattggctgcttatggtgacaattactgaattgttaccatatagctattggattggccatccggtgtgcaatagagctattatatacctatttgttggctttgtaccactgactttaaagtctataaccactctcgattatatattaacccttaatacaatcaaac

SEQ ID NO: 18631 - DNA, 723 bp, synthetic construct
  source 1..723: mol_type = other DNA
cactcacaggacccacgcggtgctagcactctggttccacgggacctttgtgcgcctgttttatgtcccctccccaatttgtaacttagaagcaatttgcaacactgatcagtagcaggcatagcgcaccagctatgtcttgatcaagcacttctgtttccccggaccgagtatcaatagactgtacacacggttgaaggagaaagcgtccgttatccggctaactacttcgagaaacccagtagcaccattgaaactacagagtgtttcgctccacacttcccccgtgtagatcaggtcgatgagtcactgcaatccccacgggcgaccgtggcagtggctgcgctggcggcctgcctatggggcaacccataggacgctctaatgtggacatggtgtgaagagtctattgagctagttagtagtcctccggcccctgaatgcggctaatcctaactgcggagcacatgccttcaatccagagggtagtgtgtcgtaatgggcaactctgcagcggaaccgactactttgggtgtccgtgtttccttttattctcacattggctgcttatggtgacaattacagaattgttaccatatagctattggattggccatccggtgtgcaatagagctattatatacctatttgttggctttgtaccactgaccttaaaatctttaaccactctcgtgtgtatattaacccttaatacaatcaaac

SEQ ID NO: 18632 - DNA, 723 bp, synthetic construct
  source 1..723: mol_type = other DNA
cactcacaggacccacgcggtgctagcactctggttccacgggacctttgtgcgcctgttttatgtcccctccccaatttgtaacttagaagcaatttgcaacactgatcagtagcaggcatagcgcaccagctatgtcttgatcaagcacttctgtttccccggaccgagtatcaatagactgtacacacggttgaaggagaaagcgtccgttatccggctaactacttcgagaaacccagtagcaccattgaaactacagagtgtttcgctccacacttcccccgtgtagatcaggtcgatgagtcactgcaatccccacgggcgaccgtggcagtggctgcgctggcggcctgcctatggggcaacccataggacgctctaatgtggacatggtgtgaagagtctattgagctagttagtagtcctccggcccctgaatgcggctaatcctaactgcggagcacatgccttcaatccagagggtagtgtgtcgtaatgggcaactctgcagcggaaccgactactttgggtgtccgtgtttccttttattctcacattggctgcttatggtgacaattacagaattgttaccatatagctattggattggccatccggtgtgcaatagagctattatatacctatttgttggctttgtgccattgaccttaaaatctttaaccactctcgagtgtatattaacccttaatacaatcaaac

SEQ ID NO: 18633 - DNA, 723 bp, synthetic construct
  source 1..723: mol_type = other DNA
cactcacaggacccacgcggtgctagcactctggttccacgggacctttgtgcgcctgttttatgtcccctccccaatttgtaacttagaagcaatttgcaacactgatcagtagcaggcatagcgcaccagctatgtcttgatcaagcacttctgtttccccggaccgagtatcaatagactgtacacacggttgaaggagaaagcgtccgttatccggctaactacttcgagaaacccagtagcaccattgaaactacagagtgtttcgctccacacttcccccgtgtagatcaggtcgatgagtcactgcaatccccacgggcgaccgtggcagtggctgcgctggcggcctgcctatggggcaacccataggacgctctaatgtggacatggtgtgaagagtctattgagctagttagtagtcctccggcccctgaatgcggctaatcctaactgcggagcacatgccttcaatccagagggtagtgtgtcgtaatgggcaactctgcagcggaaccgactactttgggtgtccgtgtttccttttattctcacattggctgcttatggtgacaattacagaattgttaccatatagctattggattggccatccggtgtgcaatagagctattatatacctatttgttggctttgtgccattgaccttaaaatctttaaccactctcgagtatatattaacccttaatacaatcaaac

SEQ ID NO: 18634 - DNA, 723 bp, synthetic construct
  source 1..723: mol_type = other DNA
cactcacaggacccacgcggtgctagcactctggttccacgggacctttgtgcgcctgttttatgtcccctccccaatttgtaacttagaagcaatttgcaacactgatcagtagcaggcatagcgcaccagctatgtctcgatcaagcacttctgtttccccggaccgagtatcaatagactgtacacacggttgaaggagaaagcgtccgttacccggctaactacttcgagaaacccagtagcaccattgaaactacagagtgtttcgctccacacttcccccgtgtagatcaggtcgatgagtcactgcaatccccacgggcgaccgtggcagtggctgcgctggcggcctgcctatggggcaacccataggacgctctaatgtggacatggtgtgaagagtctattgagctagttagtagtcctccggcccctgaatgcggctaatcctaactgcggagcacatgccttcaatccagagggtagtgtgtcgtaatgggcaactctgcagcggaaccgactactttgggtgtccgtgtttccttttattctcacattggctgcttatggtgacaattacagaattgttaccatatagctattggattggccatccggtgtgcaatagagctattatatacctatttgttggctttgtgccactgaccttaaaatctttaaccactctcgagtgtatattaacccttaacacaatcaaac

SEQ ID NO: 18635 - DNA, 723 bp, synthetic construct
  source 1..723: mol_type = other DNA
cactcacaggacccacgcggtgctagcactctggttccacgggacctttgtgtgcctgttttatgtcccctccccaatttgtaacttagaagcaatttgcaacactgatcagtagcaggcatagcgcaccagctatgtcttgatcaagcacttctgtttccccggaccgagtatcaatagactgtacacacggttgaaggagaaagcgtccgttatccggctaactacttcgagaaacccagtagcaccattgaaactacagagtgtttcgctccacacttcccccgtgtagatcaggtcgatgagtcactgtaatccccacgggcgaccgtggcagtggctgcgctggcggcctgcctatggggcaacccataggacgctctaatgtggacatggtgtgaagagtctattgagctagttagtagtcctccggcccctgaatgcggctaatcctaactgcggagcacatgccttcaatccagagggtagtgtgtcgtaacgggcaactctgcagcggaaccgactactttgggtgtccgtgtttccttttattctcacattggctgcttatggtgacaattacagaattgttaccatatagctattggattggccatccggtgtgcaatagagctattatatacctatttgttggctttgtgccactgaccttaaaatctttaaccactctcgagtgtatattaacccttaatacaatcaaac

SEQ ID NO: 18636 - DNA, 723 bp, synthetic construct
  source 1..723: mol_type = other DNA
cactcacaggacccacgcggtgccagcactctggttccacgggacctttgtgcgcctgttttatgtcccctccccaatttgtaatttagaagcaatttgcaacactgatcagtagcaggcatagcgcaccagctatgtcttgatcaagcacttctgtttccccggaccgagtatcaatagactgtacacacggttgaaggagaaagcgtccgttatccggctaactacttcgagaaacccagtagcaccattgaaactacagagtgtttcgctccacacttcccccgtgtagatcaggtcgatgagtcactgcaatccccacgggcgaccgtggcagtggctgcgctggcggcctgcctatggggcaacccataggacgctctaatgtggacatggtgtgaagagtctattgagctagttagtagtcctccggcccctgaatgcggctaatcctaactgcggagcacatgccttcaatccagagggtagtgtgtcgtaatgggcaactctgcagcggaaccgactactttgggtgtccgtgtttccttttattctcacattggctgcttatggtgacaattacagaattgttaccatatagctattggattggccatccggtgtgcaatagagctgttatatacctatttgttggctttgtaccactaaccttaaaatctttaaccactctcgagtgtatattaacccttaatacagtcaaac

SEQ ID NO: 18637 - DNA, 723 bp, synthetic construct
  source 1..723: mol_type = other DNA
cactcacaggacccacgcggtgccagcactctggttccacgggacctttgtgcgcctgttttatgtcccctccccaatttgtaatttagaagcaatttgcaacactgatcagtagcaggcatagcgcaccagctatgtcttgatcaagcacttctgtttccccggaccgagtatcaatagactgtacacacggttgaaggagaaagcgtccgttatccggctaactacttcgagaaacccagtagcaccattgaaactacagagtgtttcgctccacacttcccccgtgtagatcaggtcgatgagtcactgcaatccccacgggcgaccgtggcagtggctgcgctggcggcctgcctatggggcaacccataggacgctctaatgtggacatggtgtgaagagtctattgagctagttagtagtcctccggcccctgaatgcggctaatcctaactgcggagcacatgccttcaatccagagggtagtgtgtcgtaatgggcaactctgcagcggaaccgactactttgggtgtccgtgtttccttttattctcacattggctgcttatggtgacaattacagaattgttaccatatagctattggattggccatccggtgtgcaatagagctattatatacctatttgttggctttgtaccactaacctcaaaatctttaaccactctcgagtgtatattaacccttaatacagtcaaac

SEQ ID NO: 18638 - DNA, 723 bp, synthetic construct
  source 1..723: mol_type = other DNA
cactcacaggacccacgcggtgccagcactctggttccacgggacctttgtgcgcctgttttatgtcccctccccaatttgtaatttagaagcaatttgcaacactgatcagtagcaggcatagcgcaccagctatgtcttgatcaagcacttctgtttccccggaccgagtatcaatagactgtacacacggttgaaggagaaagcgtccgttatccggctaactacttcgagaaacccagtagcaccattgaaactacagagtgtttcgctccacacttcccccgtgtagatcaggtcgatgagtcactgcaatccccacgggcgaccgtggcagtggctgcgctggcggcctgcctatggggcaacccataggacgctctaatgtggacatggtgtgaagagtctattgagctagttagtagtcctccggcccctgaatgcggctaatcctaactgcggagcacatgccttcaatccagagggtagtgtgtcgtaatgggcaactctgcagcggaaccgactactttgggtgtccgtgtttccttttattctcacattggctgcttatggtgacaattacagaattgttaccatatagctattggattggccatccggtgtgcaatagagctattatatacctatttgttggctttgtaccactaacctcagaatctttaaccactctcgagtgtatattaacccttaatacagtcaaac

SEQ ID NO: 18639 - DNA, 723 bp, synthetic construct
  source 1..723: mol_type = other DNA
cactcacaggacccacgcggtgctagcactctggttccacgggacctttgtgcgcctgttttatgtcccctccccaatttgtaacttagaagcaatttgcaacactgatcagtagcaggcatagcgcaccagctatgtcttgatcaagcacttctgtttccccggaccgagtatcaatagactgtacacacggttgaaggagaaagcgtccgttatccggctaactacttcgagaaacccagtaccaccattgaaactacagagcgtttcgctccacacttcccccgtgtagatcaggtcgatgagtcactgcaatccccacgggcgaccgtggcagtggctgcgttggcggcctgcctatggggcaacccataggacgctctaatgtggacatggtgcgaagagtctattgagctagttagtagtcctccggcccctgaatgcggctaatcccaactgcggagcacatgccttcaatccagagggtagtgtgtcgtaatgggcaactctgcagcggaaccgactactttgggtgtccgtgtttccttttattctcatattggctgcttatggtgacaattacagaattgttaccatatagctattggattggccatccggtgtgcaatagagctattatatacctatttgttggctttgtaccactgaccataaaatctttaaccactctcgagtgcatattaacccttaatacaatcaaac

SEQ ID NO: 18640 - DNA, 723 bp, synthetic construct
  source 1..723: mol_type = other DNA
cactcacaggacccacgcggtgctagcactctggttccacgggacctttgtgcgcctgttttatgtcccctccccaatttgtaacttagaagcaatttgcaacactgatcagtagcaggcatagcgcaccagctatgtcttgatcaagcacttctgtttccccggaccgagtatcaatagactgtacacacggttgaaggagaaagcgtccgttatccggctaactacttcgagaaacccagtaccaccattgaaactacagagcgtttcgctccacacttcccccgtgtagatcaggtcgatgagtcactgcaatccccacgggcgaccgtggcagtggctgcgctggcggcctgcctatggggcaacccataggacgctctaatgtggacatggtgcgaagagtctattgagctagttagtagtcctccggcccctgaatgcggctaatcctaactgcggagcacatgccttcaatccagagggtagtgtgtcgtaatgggcaactctgcagcggaaccgactactttgggtgtccgtgtttccttttattctcatattggctgcttatggtgacaattacagaattgttaccatatagctattggattggccatccggtgtgcaatagagctattatatacctatttgttggctttgtaccactgaccataaaatcttcaaccactctcgagtgcatattaacccttaatacaatcaaac

SEQ ID NO: 18641 - DNA, 723 bp, synthetic construct
  source 1..723: mol_type = other DNA
cactcacaggacccacgcggtgctagcactctggttccacgggacctttgtgcgcctgttttatgtcccctccccaatttgtaacttagaagcaatttgcaacactgatcagtagcaggcatagcgcaccagctatgtcttgatcaagcacttctgtttccccggaccgagtatcaatagactgtacacacggttgaaggagaaagcgtccgttatccggctaactacttcgagaaacccagtagcaccattgaaactgcagagtgtttcgctccacacttcccccgtgtagatcaggtcgatgagtcactgcaatccccacgggcgaccgtggcagtggctgcgctggcggcctgcctatggggcaacccataggacgctctaatgtggacatggtgtgaagagtctattgagctagttagtagtcctccggcccctgaatgcggctaatcctaactgcggagcacatgccttcaatccagagggtagtgtgtcgtaatgggcaactctgcagcggaaccgactactttgggtgtccgtgtttccttttattctcacattggctgcttatggtgacaattacagaattgttaccatatagctattggattggccatccggtgtgcaatagagctattatatacctatttgttggctttgtaccactaaccttaaaatctttaaccactctcgagtgtatattaacccttaatacaatcaaac

SEQ ID NO: 18642 - DNA, 723 bp, synthetic construct
  source 1..723: mol_type = other DNA
cactcacaggacccacgcggtgctagcactctggttccacgggacctttgtgcgcctgttttatgtcccctccccaatttgtaacttagaagcaatttgcaacactgatcagtagcaggcatagcgcaccagctatgtcttgatcaagcatttctgtttccccggaccgagtatcaatagactgtacacacggttgaaggagaaagcgtccgttatccggctaactacttcgagaaacccagtagcaccattgaaactgcagagtgtttcgctccacacttcccccgtgtagatcaggtcgatgagtcactgcaatccccacgggcgaccgtggcagtggctgcgctggcggcctgcctatggggcaacccataggacgctctaatgtggacatggtgtgaagagtctattgagctagttagtagtcctccggcccctgaatgcggctaatcctaactgcggagcacatgccttcaatccagagggtggtgtgtcgtaatgggcaactctgcagcggaaccgactactttgggtgtccgtgtttccttttattctcacattggctgcttatggtgacaattacagaattgttaccatatagctattggattggccatccggtgtgcaatagagctattatatacctatttgttggctttgtaccactaaccttaaaatctttaaccactctcgagtgtatattaacccttaatacaatcaaac

SEQ ID NO: 18643 - DNA, 723 bp, synthetic construct
  source 1..723: mol_type = other DNA
cactcacaggacccacgcggtgctagcactctggttccacgggacctttgtgcgcctgttttatgtcccctccccaatttgtaacttagaagcaatttgcaacactgatcagtagcaggcatagcgcaccagctatgtcttgatcaagcacttctgtttccccggaccgagtatcaatagactgttcacatggttgaaggagaaagcgtccgttatccggctaactacttcgagaaacccagtagcaccattgaaactacagagtgtttcgctccacacttcccccgtgtagatcaggtcgatgagtcactgcaatccccacgggcgaccgtggcagtggctgcgctggcggcctgcctatggggcaacccataggacgctttgatgtggacatggtgtgaagagtctattgagctagttagtagtcctccggcccctgaatgcggctaatcctaactgcggagcacatgccttcaacccagagggtagtgtgtcgtaatgggcaactctgcagcggaaccgactactttgggtgtccgtgtttccttttattctcacattggctgcttatggtgacaattacagaattgttaccatatagctattggattggccatccggtgtgcaatagagctattatatacctatttgttggctttgtaccactgaccttaaaatctttaaccactcttgagtgtatattaacccttaacacaatcaaac

SEQ ID NO: 18644 - DNA, 723 bp, synthetic construct
  source 1..723: mol_type = other DNA
cacccacaggacccacgcggtgctagcactctggttccacgggacctttgtgcgcctgttttatgtcccctccccaatttgtaacttagaagtaatatgcaacactgatcagtagcaggcatagcgcaccagctatgtcttgatcaagcacttctgtttccccggaccgagtatcaatagactgttcacatggttgaaggagaaagcgtccgttatccggctaactactccgagaaacccagtagcaccatcgaaactacagagtgtttcgctccacacttcccccgtgtagatcaggtcgatgagtcactgcaatccccacgggcgaccgtggcagtggctgcgctggcggcctgcctatggggcaacccataggacgctctgatgtggacatggtgtgaagagtctattgggctagttagtagtcctccggcccctgaatgcggctaatcctaactgcggagcacatgccttcaatccagagggtggtgtgtcgtaatgggcaactctgcagcggaaccgactactttgggtgtccgtgtttccttttattcttacattggctgcttatggtgacaattacagaattgttaccatatagctattggattggccatccggtgtgcaatagagctattatatacctatttgttggctttgtaccactaaccttaaaatctttaaccactcttgagtgtatattaacccttaatacaatcaaac

SEQ ID NO: 18645 - DNA, 723 bp, synthetic construct
  source 1..723: mol_type = other DNA
cactcacagggcccacgcggtgctagcactctggttctacggaacctttgtgcgcctgttttgcgtcccctccccaatttgtaacctagaagcaatttacaacactgatcaatagcaggcatggcgcaccagctatgtcttgatcaagcacctctgtttccccggaccgagtatcaatagactgttcacacggtcgaaggagaaagcgttcgttatccggctaactacttcgagaaacccagtagcgccattgaaactgcagagtgtttcgctccacacttcccccgtgtagatcaggtcgatgagtcactgcaatccccacgggcgaccgtggcagtggctgcgttggcggcctgcctatggggtaacccataggacgctctaatgtggacatggtgcgaagagtctattgagctagttagtagtcctccggcccctgaatgcggctaatcctaactgcggagcacatgccttcaatccagagggtagtgtgtcgtaatgggcaactctgcagcggaaccgactactttgggtgtccgtgtttccatttattctcacattggctgcttatggtgacaattatagaattgttaccatatagctattggattggccatccggtgtgcaatagagctattatatacctatttgttggctttgtaccactaacctcaaaatctgtaatcactctcaagtatatattgacccttaatacaattaagc

SEQ ID NO: 18646 - DNA, 723 bp, synthetic construct
  source 1..723: mol_type = other DNA
cactcacagggcccacgcggtgctagcactctggttctacggaacctttgtgcgcctgttttgcgtcccctccccaatttgtaacctagaagcaatttacaacactgatcaatagcaggcatggcgcaccagctatgtcttgatcaagcacctctgtttccccggaccgagtatcaatagactgttcacacggtcgaaggagaaagcgttcgttatccggctaactacttcgagaaacccagtagcgccattgaaactgcagagtgtttcgctccacacttcccccgtgtagatcaggtcgatgagtcactgcaatccccacgggcgaccgtggcagtggctgcgttggcggcctgcctatggggtaacccataggacgctctaatgtggacatggtgcgaagagtctattgagctagttagtagtcctccggcccctgaatgcggctaatcctaactgcggagcacatgccttcaatccagagggtagtgtgtcgtaatgggcaactctgcagcggaaccgactactttgggtgtccgtgtttccatttattctcacattggctgcttatggtgacaattatagaattgttaccatatagctattggattggccatccggtgtgcaatagagctattatatacctatttgttggctttgtaccactaacctcaaaatctataatcactctcaagtatatattgacccttaatacaattaagc

SEQ ID NO: 18647 - DNA, 723 bp, synthetic construct
  source 1..723: mol_type = other DNA
cactcacagggcccacgcggtgctagcactctggttctacggaacctttgtgcgcctgttttgcgtcccctccccaatttgtaacctagaagcaatttacaacgctgatcaatagcaggcatggcgcaccagctatgtcttgatcaagcacctctgtttccccggaccgagtatcaatagactgttcacacggtcgaaggagaaagcgttcgttatccggctaactacttcgagaaacccagtagcgccattgaaactgcagagtgtttcgctccacacttcccccgtgtagatcaggtcgatgagtcactgcaatccccacgggcgaccgtggcagtggctgcgttggcggcctgcctatggggtaacccataggacgctctaatgtggacatggtgcgaagagtctattgagctagttagtagtcctccggcccctgaatgcggctaatcctaactgcggagcacatgccttcaatccagagggtagtgtgtcgtaatgggcaactctgcagcggaaccgactactttgggtgtccgtgtttccatttattctcacattggctgcttatggtgacaattatagaattgttaccatatagctattggattggccatccggtgtgcaatagagctattatatacctatttgttggctttgtaccactaacctcaaaatctgtaatcactctcaagtatatattgacccttaatacaattaagc

SEQ ID NO: 18648 - DNA, 723 bp, synthetic construct
  source 1..723: mol_type = other DNA
cactcacagggcccacgcggtgctagcactctggttctacggaacctttgtgcgcctgttttgcgtcccctccccaatttgtaacctagaagcaatttacaacactgatcaatagcaggcatggcgcaccagctatgtcttgatcaagcacctctgtttccccggaccgagtatcaatagactgttcacacggtcgaaggagaaagcgttcgttatccggctaactacttcgagaaacccagtagcgccattgaaactgcagagtgtttcgctccacacttcccccgtgtagatcaggtcgatgagtcactgcaatccccacgggcgaccgtggcagtggctgcgttggcggcctgcctatggggtaacccataggacgctctaatgtggacatggtgcgaagagtctattgagctagttagtagtcctccggcccctgaatgcggctaatcctaactgcggagcacatgccttcaatccagagggtagtgtgtcgtaatgggcaactctgcagcggaaccgactactttgggtgtccgtgtttccatttattctcacattggctgcttatggtgacaattacagaattgttaccatatagctattggattggccatccggtgtgcaatagagctattatatacctatttgttggctttgtaccactaacctcaaaatctgtaatcactctcaagtatatattgacccttaatacaattaagc

SEQ ID NO: 18649 - DNA, 723 bp, synthetic construct
  source 1..723: mol_type = other DNA
cactcacagggcccacgcggtgctagcactctggttctacggaacctttgtgcgcctgttttacgccccctccccaatttgtaacttagaagcaatttacaacactgatcaatagcaggcatggcgcaccagctatgtcttgatcaagcacctctgtttccccggaccgagtatcaatagactgttcacacggtcgaaggagaaagcgttcgttatccggctaactacttcgagaaacccagtagcgccattgaaactgcagagtgtttcgctccacacttcccccgtgtagatcaggtcgatgagtcactgcaatccccacgggcgaccgtggcagtggctgcgttggcggcctgcctatggggtaacccataggacgctctaatgtggacatggtgcgaagagtctattgagctagttagtagtcctccggcccctgaatgcggctaatcctaactgcggagcacatgccttcaatccagagggtagtgtgtcgtaatgggcaactctgcagcggaaccgactactttgggtgtccgtgtttctttttattctcacattggctgcttatggtgacaattacagaattgttaccatatagctattggattggccatccggtgtgcaatagagctattatatacctatttgttggctttgtaccactaaccttaaaatctgtaatcactctccagtatatattgacccttaatacaattaaac

SEQ ID NO: 18650 - DNA, 732 bp, synthetic construct
  source 1..732: mol_type = other DNA
ggttgcacccactcacaggacccacgcggtgctagcactctggttccacgggacctttgtgcgcctgttttatgtcccctccccaatttgtaacttagaagcaatttgcaacactgatcagtagcaggcataacgcaccagttatgtcttgatcaagcacttctgtttccccggactgagtatcaatagactgttcacacggttgaaggagaaagcgtccgttatccggctaactacttcgagaaacccagtagcaccattgaaactacagagtgtttcgctccacacttcccccgtgtagatcaggtcgatgagtcactgcaatccccacgggcgaccgtggcagtggctgcgctggcggcctgcctatggggcaacccataggacgctctaatgtggacatggtgtgaagagtctattgagctagttagtagtcctccggcccctgaatgcggctaatcctaactgcggagcacatgccttcaatccagagggtagtgtgtcgtaatgggcaactctgcggcggaaccgactactttgggtgtccgtgtttccttttattctcatattggctgcttatggtgacaattacagaattgttaccatatagctattggattggccatccggtgtgcaatagagctattatatacctatttgttggttttgtaccactgaccttaaaatctttaaccactcttgagtgtatattaacccttaatacaatcaaac

SEQ ID NO: 18651 - DNA, 732 bp, synthetic construct
  source 1..732: mol_type = other DNA
ggttgcacccactcacaggacccacgcggtgttagcactctggttccacgggacctttgtgcgcctgttttatgtcccctccccaatttgtaacttagaagtaatttgcaacactggtcagtagcaggcatagcgcaccagctatgtcttgatcaagcacttctgtttccccggaccgagtatcaatagactgttcacacggttgaaggagaaagcgtccgttatccggctaactacttcgagaaacccagtagcaccattgaaactacagagtgtttcgctccacacttcccccgtgtagatcaggtcgatgagtcactgcaatccccacgggcgaccgtggcagtggctgcgctggcggcctgcctatggggcaacccataggacgctctgatgtggacatggtgtgaagagtctattgagctagttagtagtcctccggcccctgaatgcggctaatcctaactgcggagcacatgccttcaatccagagggtagtgtgtcgtaatgggcaactctgcagcggaaccgactactttgggtgtccgtgtttccttttattctcacattggctgcttatggtgacaattactgaattgttaccatatagctattggattggccatccggtgtgcaatagagctattatatacctatttgttgggtttgtaccactgaccttaaaatctataaccactctcgattgtatattaacccttaatacaatcaaac

SEQ ID NO: 18652 - DNA, 730 bp, synthetic construct
  source 1..730: mol_type = other DNA
gttgtacccacccacagggcccactgggcgctagcactctggtactacggtacctttgtgtgcctgttttatctccccagacccccgtaacgctacattagaagatagacaatacgaccaatagtcagtggggcaatccagcttcactttggtcaagcacctctgtttccccgggcttagtaccaataggctgcttgcgcggctgaaggggaacgcgcccgttatccggctaactacttcgagaaacctagtaccaccatggaagttgccgagtgtttcgctcagcacaaccccagtgtagatcaggtcgatgagccaccgtacaccccacgggcgaccgtgacggtggctgcgttggcggcctgcccatggtgcacaccatgggacgctctaatacagacatggtgcgaagagtctattgagctagttagtagtcctccggcccctgaatgcggctaatcctaactgcggagcatgcgctctcaacccagagagtagcgtgtcgtaacgggcaactctgcagcggaaccgactactttgggtgtccgtgtttccttttattcttatattggctgcttatggtgacaattgagagattgttaccatatagctattggattggccatccggtgtgtaatagagctattgtatattcttttgttggctttgtgccattagattatactgcaattgctactttaaggtacatcttgctcctcaacacagcaaa

SEQ ID NO: 18653 - DNA, 737 bp, synthetic construct
  source 1..737: mol_type = other DNA
ccacccacagggcccactgggcgctgcccactgggcgctagcactccgattctgcggaatctttgtgcgcctgttttataaccctcccccgaaacttgcaacttagaagttatgtacgttactgatcaacagcaggcgtggcataccagccatgtcttgatcaagcacttctgtaaccccggactgagtatcaatagactgctcacgtggtcgaaagagaaaacgttcgttatccggctaactacttcgagaaacctagtagcaccactgaaactgcggagtgtttcgctcagcacttcccccgtgtagatcaggtcgatgagtcactgcttaccccacgggtgaccgtggcagtggctgcgttggcggcctgcctatggggcaacccataggacgctctaaagtggacatggtgtgaagagtctattgagctagttagtagtcctccggcccctgaatgcggctaatcctaactgcggagcgcatgcccccaaaccagagggtggtgcgtcgtaacgggtaactctgcagcggaaccgactactttgggtgtccgtgtttcttttattctcataatggctgcttatggtgacaattgaagaattgttaccatatagctattggattggccatccggtgtgcaacagagctattatctacttgtttgttggatacattccattgacacctaaatccttcaatacattgcactatattctaacgctgaacgcaagaaa

SEQ ID NO: 18654 - DNA, 747 bp, synthetic construct
  source 1..747: mol_type = other DNA
ttaaaacagcctgtgggttgtacccactcacaggacccacgcggtgctagcactctggttccacggaacctttgtgcgcctgttttacgtcccttccccaatttgtaacttagaagcaatttacagcactgatcaatagcaggcatggcacaccagctatgtcttgatcaagcacctctgtttccccggaccgagtatcaatagactgttcacacggtcgaaggagaaagcgttcgttatccggctaactacttcgagaaacccagtagcgccactgaaactgcagagtgtttcgttccacacttcccccgtgtagatcaggtcgatgagtcactgcaatccccacgggcgaccgtggcagtggctgcgttggcggcctgcctatggggtaacccataggacgctctaatgtggacatggtgcgaagagtctattgagctagttagtagtcctccggcccctgaatgcggctaatcctaactgcggagcacatgccttcaatccagagggtagtgtgtcgtaatgggcaactctgcagcggaaccgactactttgggtgtccgtgtttccttttattctcacattggctgcttatggtgacaatttcagaattattaccatatagctattggattggccatccggtgtgcaatagagctattatatatctatttgttggctttgtaccactaaccttaagatctgtaatcactctcgagtatatattgacccttaatacaattaaac

SEQ ID NO: 18655 - DNA, 723 bp, synthetic construct
  source 1..723: mol_type = other DNA
cactcacaggacccacgcggtgctagcactctggttccacgggacctttgtgcgcctgttttatgtcccttccccaatttgtaacttagaagcaattcgcaacactgatcagtagcaggcatagcgcaccagctatgtcttgatcaagcacttctgtttccccggaccgagtatcaatagactgttcacacggttgaaggagaaagcgtccgttatccggctaactacttcgagaaacccagtagcaccattgaaactacagagtgtttcgctccacacttcccccgtgtagatcaggtcgatgagtcactgcaatccccacgggcgaccgtggcagtggctgcgctggcggcctgcctatggggcaacccataggacgctctaatgtggacatggtgtgaagagtctattgagctagttagtagtcctccggcccctgaatgcggctaatcctaactgcggagcacatgccttcaacccagagggtagtgtgtcgtaatgggcaactctgcagcggaaccgactactttgggtgaccgtgtttccttttattctcacattggctgcttatggtgacaattacagaattgttaccatatagctattggattggccatccggtgtgcaatagagctattatatacctatttgttggctttgtaccactgaccttaaaatctttgaccactcttgagtgtatattaacccttaatacaattaaac

SEQ ID NO: 18656 - DNA, 723 bp, synthetic construct
  source 1..723: mol_type = other DNA
cactcacaggacccacgcggtgctagcactctggttccacgggacctttgtgcgcctgttttatgtcccctccccaatctgtaacttagaagcaatttgcaacactgatcagtagcaggcatagcgcaccagctatgtctcgatcaagcacttctgtttccccggaccgagtatcaatagactgttcgcacggttgaaggagaaagcgtccgttatccggctaactacttcgagaaacccagtagcaccattgaaactatagagtgtttcgctccacacttcccccgtgtagatcaggtcgatgagtcactgcaatccccacgggcgaccgtggcagtggctgcgctggcggcctgcctatggggcaacccataggacgctctaatgtggacatggtgtgaagagtctattgagctagttagtagtcctccggcccctgaatgcggctaatcctaactgcggagcacatgccttcaatccagagggtagtgtgtcgtaatgggcaactctgcagcggaaccgactactttgggtgtccgtgtttccttttattctcacattggctgcttatggtgacaattactgaattgttaccatatagctattggattggccatccggtgtgcaatagagctattatatacctatttgttggttttgtaccactaaccttaaaatctataaccactctcgagtgtatattaacccttaatacaatcaaac

SEQ ID NO: 18657 - DNA, 723 bp, synthetic construct
  source 1..723: mol_type = other DNA
cactcacaggacccacgcggtgttagcactctggttccacgggacctttgtgcgcctgttttatgtcccctccccaatttgtaacttagaagcaatttgcaacactgatcagtagcaggcatagcgcaccagctatgtcttgatcaagcacttctgtttccccggaccgagtatcaatagactgtacacacggttgaaggagaaagcgtccgttatccggctaactacttcgagaaacccagtagcaccattgaaactacagagtgtttcgctccacacttcccccgtgtagatcaggtcgatgagtcactgcaatccccacgggcgaccgtggcagtggctgcgctggcggcctgcctatggggcaacccataggacgctctaatgtggacatggtgtgaagagtctattgagctagttagtagtcctccggcccctgaatgcggctaatcctaactgcggagcacatgccttcaatccagagggtagtgtgtcgtaatgggcaactctgcagcggaaccgactactttgggtgtccgtgtttccttttattctcacattggctgcttatggtgacaattacagaattgttaccatatagctattggattggccatccggtgtgcaatagagctattatatacctatttgttggctttgtaccactgaccttaaaatctttaaccactctcgagtgtatattaaccctcaatacaatcaaac

SEQ ID NO: 18658 - DNA, 723 bp, synthetic construct
  source 1..723: mol_type = other DNA
cactcacaggacccacgcggtgctagcactctggttccacgggacctttgtgcgcctgttttatgtcccctccccaatttgtaacttagaagcaatttgcaacactgatcagtagcaggcatagcgcaccagctatgtcttgatcaagcacttctgtttccccggaccgagtatcaatagactgtacacacggttgaaggagaaagcgtccgttatccggctaactacttcgagaaacccagtagcaccattgaaactacagagtgtttcgctccacacttcccccgtgtagatcaggtcgatgagtcactgcaatccccacgggcgaccgtggcagtggctgcgctggcggcctgcctatggggcaacccataggacgctctaatgtggacatggtgtgaagagtctattgagctagttagtagtcctccggcccctgaatgcggctaatcctaactgcggagcacatgccttcaatccagagggtagtgtgtcgtaatgggcaactctgcagcggaaccgactactttgggtgtccgtgtttccttttattctcacattggctgcttatggtgacaattacagaattgttaccatatagctattggattggccatccggtgtgcaatagagctattatatacctatttgttggctttgtgccactgaccttaaaatctttaaccactctcgagtgtatattaacccttaatacaatcaaac

SEQ ID NO: 18659 - DNA, 723 bp, synthetic construct
  source 1..723: mol_type = other DNA
cactcacaggacccacgcggtgctagcactctggttccacgggacctttgtgcgcctgttttatgtcccctccccaatttgtaacttagaagcaatttgcaacactgatcagtagcaggcatagcgcaccagctatgtcttgatcaagcacttctgtttccccggaccgagtatcaatagactgtacacacggttgaaggagaaagcgtccgttatccggctaactacttcgagaaacccagtaccaccattgaaactacagagcgtttcgctccacacttcccccgtgtagatcaggtcgatgagtcactgcaatccccacgggcgaccgtggcagtggctgcgctggcggcctgcctatggggcaacccataggacgctctaatgtggacatggtgcgaagagtctattgagctagttagtagtcctccggcccctgaatgcggctaatcccaactgcggagcacatgccttcaatccagagggtagtgtgtcgtaatgggcaactctgcagcggaaccgactactttgggtgtccgtgtttccttttattctcatattggctgcttatggtgacaattacagaattgttaccatatagctattggattggccatccggtgtgcaatagagctattatatacctatttgttggctttgtaccactgaccataaaatctttaaccactctcgagtgcatattaacccttaatacaatcaaac

SEQ ID NO: 18660 - DNA, 723 bp, synthetic construct
  source 1..723: mol_type = other DNA
cacccacaggacccacgcggtgctagcactctggttccaagggacctttgtgcgcctgttttatgtcccctccccaatttgtaacttagaagcaatttgcaacagtgatcagtagcaggcatagcgcaccagctatgtcttgatcaagcacttctgtttccccggaccgagtatcaatagactgttcacatggttgaaggagaaagcgtccgttatccggctaactacttcgagaaacccagtagcaccattgaaactacagagtgtttcgctccacacttcccccgtgtagatcaggtcgatgagtcactgcaatccccacgggcgaccgtggcagtggctgcactggcggcctgcctatggggcaacccataggacgctttgaagtggacatggtgcgaagagtctattgagctagttagtagtcctccggcccctgaatgcggctaatcctaactgcggagcacatgccttcaacccagagggtagtgtgtcgtaatgggcaactctgcagcggaaccgactactttgggtgtccgtgtttccttttattctcacattggctgcttatggtgacaattacagaattgttaccatatagctattggattggccatccggtgtgcaatagagctattatatacctatttgttggctttgtaccactgaccttaaaatctttaaccactcttgagtgtatattaacccttaatacaatcaaac

SEQ ID NO: 18661 - DNA, 723 bp, synthetic construct
  source 1..723: mol_type = other DNA
cactcacaggacccacgcggtgctagcactctggttccacgggacctttgtgcgcctgttttatgtcccctccccaatttgtaacttagaagcaatttgcaacactgatcagtagcaggcatagcacaccagctatgtcttgatcaagcacttctgtttccccggaccgagtatcaatagactgttcacatggttgaaggagaaagcgtccgttatccggctaactacttcgagaaacccagtagcaccattgaaactacagagtgtttcgctccacacttcccccgtgtagatcaggtcgatgagtcactgcaatccccacgggcgaccgtggcagtggctgcgctggcggcctgcctatggggtaacccataggacgctttgatgtggacatggtgtgaagagtctattgagctagttagtagtcctccggcccctgaatgcggctaatcctaactgcggagcacatgccttcaacccagagggtagtgtgtcgtaatgggcaactctgcagcggaaccgactactttgggtgtccgtgtttccttttattttcacattggctgcttatggtgacaattacagaattgttaccatatagctattggattggccatccggtgtgcaatagagctattatatacctatttgttggctttgtaccactgaccttaaaatctttaaccactcttgagtatatattaatccttaatacaatcaaac

SEQ ID NO: 18662 - DNA, 701 bp, synthetic construct
  source 1..701: mol_type = other DNA
ctagcactctggttctacgggacctttgtgcgcctgttttacgtcccctccccaatttgtaacttagaagcaatttgcaacactgatcagtagcaggcatagcgcaccagctatgtcttgatcaagcacttctgtttccccggaccgagtatcaatagactgttcacacggttgaaggagaaagcgtccgttatccggctaactacttcgagaaacccagtagcgccattgaaactgcagagtgtttcgctccacacttccctcgtgtagatcaggtcgatgagtcactgcaatccccacgggcgaccgtggcagtggctgcgctggcggcctgcctatggggcaacccataggacgctctaatgtggacatggtgtgaagagtctattgagctagttagtagtcctccggcccctgaatgcggctaatcctaactgcggagcacatgccttcaatccagagggtagtgtgtcgtaatgggcaactctgcagcggaaccgactactttgggtgtccgtgtttccttttattctcacattggctgcttatggtgacaattacggaattgttaccatatagctattggattggccatccggtgtgcaatagagctattatatacctatttgttggctttgtaccactgaccttaaaatctataaccactctcgagtgtatattaactctcaatacaatcaaac

SEQ ID NO: 18663 - DNA, 692 bp, synthetic construct
  source 1..692: mol_type = other DNA
cactgattctacggaaactttgtgcgcctgttttatatccctccccaaacgagtaacttagaagtttaacatattcatgaccaatagcaggcgtgacacaccagtcacgtcttggtcaagtacttctgtctccccggactgagtatcaataagctgctcacgcggctgaaagagaaaacgttcgttacccggctaactacttcgagaaacctagtaacaccatggacgttgcagagtgtttcgctcagcacttcccccgtgtagatcaggtcgatgagtcactgcaaaccccacgggtgaccgtggcagtggctgcgttggcggcctgcccatggggtaacccatgggacgctctaatacagacatggtgcgaagagtctattgagctagttagtagtcctccggcccctgaatgcggctaatcctaactgcggagcacacaccttcaatccagggggcagtgtgtcgtaacgggcaactccgcagcggaaccgactactttgggtgtccgtgtttccttttatcttattatggctgcttatggtgacaattgaggaattgttaccatatagctattggattggccatccggtgtctaacagagcaattgtattcctatttgttggatttgtccctctgtcacacacatctttcaataccttatactacattataaagttaaatataagaag

SEQ ID NO: 18664 - DNA, 731 bp, synthetic construct
  source 1..731: mol_type = other DNA
gtgggttgcacccacccacagggcccactgggcgctagcactctggtaccacggtacccttgtgcgcctgttttatcaccccaacccaacctgaaacttagaagcaatgcacaatcgaccaatagtaggtgcggcgcaccagccgcatcctggtcaagcactcctgtttccccgggttgagtatcaataagctgtccacacggctgaaagagaaaacacccgttatccggccaactacttcgagaaacctagtaccactatgaacgttgcaaggcgtttcgctcagcacttcccccgtgtagatcaggtcgatgagtcaccgcattccccacgggcgaccgtggcggtggctgcgttggcggcctgcctatgggttaacccataggacgccttaatactgacatggtgcgaagagtctattgagctagttggtagtcctccggcccctgaatgcggctaatcctaactgcggagcacatactcacaacccagtgagcggtgtgtcgtaatgggtaactctgcagcggaaccgactactttgggtgtccgtgtttccttttattcttatactggctgcttatggtgacaatcatagaattgttaccatatagctattggattggccatccgatctctaacagagctattatttacctgtttgttggatttactccgttgacatacaaatccctaaacactttgtgctttattttgaacttgaacgcacgaaa

SEQ ID NO: 18665 - DNA, 723 bp, synthetic construct
  source 1..723: mol_type = other DNA
cactcacaggacccacgcggtgctagcactctggttccacgggacctttgtgcgcctgttttatgtcccctccccaatttgtaacttagaagcaatttgcaacactgatcagtagcaggcatagcgcaccagctatgtcttgatcaagcacttctgtttccccggaccgagtatcaatagactgttcacacggttgaaggagaaagcgtccgttatccggctaactacttcgaaaaacccagtagcaccattgaaactacagagtgtttcgctccacacttcccccgtgtagatcaggtcgatgagtcactgcaatccccacgggcgaccgtggcagtggctgcgctggcggcctgcctatggggcaacccataggacgctttgatgtggacatggtgtgaagagtctattgagctagttagtagtcctccggcccctgaatgcggccaatcctaactgcggagcacatgccttcaacccagagggtagtgtgtcgtaatgggcaactctgcagcggaaccgactactttgggtgtccgtgtttccttttattctcacattggctgcttatggtgacaattacagaattgttaccatatagctattggattggccatccggtgtgcaatagagctattatatacctatttgttggctttgtaccactgaccttaaaatctttaaccactcttgagtgtatattaacccttaacacaatcaaac

SEQ ID NO: 18666 - DNA, 745 bp, synthetic construct
  source 1..745: mol_type = other DNA
ttaaaacagcctgtgggttgttcccacccacagggcccactgggcgctagcacactgattctgcgggatctttgtgcgcctgttttataacccctcccctaagcagtaacttagaagcttcacactatcacgaccaacagtgggcgtggcgcaccagtcacgtcttggtcaagcacttctgtttccccggactgagtatcaatagactgctcacgcggttgaaggagaaaacgttcgttatccggctaactacttcgagaaacctattagcaccgtgaaagttgcggagagtttcgctcagcacttcccccgtgtagatcaggtcgatgagtcactgtgaaccccacgggtgaccgtgacagtggctgcgttggcggcctgcccatggggtaacccatgggacgctctaatacagacacggtgtgaagagtctattgagctagttagtagtcctccggcccctgaatgcggctaatcctaactgcggagcgcgtaccctcaatccagggggcagcgcgtcgtaatgggtaactctgcagcggaaccgactactttgggtgtccgtgtttccttttattccttattggctgcttatggtgacaattgaaaagttgttaccatatagctattggattggccatccggtaaccaacagagctattgcttacctgtttattggatacgtccccctcaatcccaaggccattcaaactcttgattacatattacttctcaactgtaagaa

SEQ ID NO: 18667 - DNA, 747 bp, synthetic construct
  source 1..747: mol_type = other DNA
ttaaaacagcctgtgggttgtacccactcacaggacccacgcggtgctagcactctggttccatggaacctttgtgcgcctgttttacgtcccctccccaatttgtaacttagaagcaatttacagcactgatcaatagcaggcatggcgcaccagctatgtcttgatcaagcacctctgtttccccggaccgagtatcaatagactgttcacacggtcgaaggagaaagcgttcgttatccggctaactacttcgagaaacccagtagcgccattgaaactgcagagtgtttcgctccacacttcccccgtgtagatcaggtcgatgagtcactgcaatccccacgggcgaccgtggcagtggctgcgttggcggcctgcctatggggtaacccataggacgctctaatgtggacatggtgcgaagagtctattgagctagttagtagtcctccggcccctgaatgcggctaatcctaactgcggagcacatgccttcaatccagagggtagtgtgtcgtaatgggcaactctgcagcggaaccgactactttgggtgtccgtgtttccttttattctcacattggctgcttatggtgacaattacagaattgttaccatatagctattggattggccatccggtgtgcaatagagctattatatacctatttgttggctttgtaccactaaccttaaaatctgtaatcactctcgagtatatattgacccttaacacaattaaac

SEQ ID NO: 18668 - DNA, 733 bp, synthetic construct
  source 1..733: mol_type = other DNA
ggttgcacccactcacaggacccacgcggtgctagcactctggttccacgggacctttgtgcgcctgttttatgtcccctccccaatttgtaacttagaagcaatttgcaacactgatcagtagcaggcatagcgcaccagctatgtcttgatcaagcacttctgtttccccggaccgagtatcaatagactgttcacatggttgaaggagaaagcgtccgttatccggctaactacttcgagaaacccagtagcaccattgaaactacagagtgtttcgctccacacttccccccgtgtagatcaggtcgatgagtcactgcaatccccacgggcgaccgtggcagtggctgcgctggcggcctgcctatggggcaacccataggacgctttgatgtggacatggtgtgaagagtctattgagctagttagtagtcctccggcccctgaatgcggctaatcctaactgcggagcacatgccttcaacccagagggtagtgtgtcgtaatgggcaactctgcagcggaaccgactactttgggtgtccgtgtttccttttattctcacattggctgcttatggtgacaattacagaattgttaccatatagctattggattggccatccggtgtgcaatagagctattatatacctatttgttggctttgtaccactgaccttaaaatctttaaccactcttgagtgtatattaacccttaacacaatcaaac

SEQ ID NO: 18669 - DNA, 729 bp, synthetic construct
  source 1..729: mol_type = other DNA
tgcacccactcacaggacccacgcggtgctagcactctggttccacgggacctttgtgcgcctgttttatgccccctccccaatttgtaacttagaagcaatttgcaacactgatcagtagcaggcatagcgcaccagctatgtcttgatcaagcacttctgtttccccggaccgagtatcaatagactgttcacacggttgaaggagaaagcgtccgttatccggctaactacttcgagaaacccagtagcaccattgaaactacagagtgtttcgctccacacttcccccgtgtagatcaggtcgatgagtcactgcaatccccacgggcgaccgtggcagtggctgcgctggcggcctgcctatggggcaacccataggacgctttgatgtggacatggtgtgaagagtctattgagctagttagtagtcctccggcccctgaatgcggctaatcctaactgcggagcacatgccttcaacccagagggtagtgtgtcgtaatgggcaactctgcagcggaaccgactactttgggtgtccgtgtttccttttattctcacattggctgcttatggtgacaattacagaattgttaccatatagctattggattggccatccggtgtgcaatagagctattatatacctatttgttggctttgtaccactgaccttaaaatctttaaccactcttgagtgtatattaacccttaatacaatcaaac

SEQ ID NO: 18670 - DNA, 736 bp, synthetic construct
  source 1..736: mol_type = other DNA
tgtgggttgcacccactcacaggacccacgcggtgctagcactctggttccacgggacctttgtgcgcctgttttatgtcccctccccaatttgtaacttagaagcaatttgcaacactgatcagtagcaggcatagcgcaccagctatgtcttgatcaagcacttctgtttccccggaccgagtatcaatagactgttcacgcggttgaaggagaaagcgtccgttatccggctaactacttcgagaaacccagtagcaccattgaaactacagagtgtttcgctccacacttcccccgtgtagatcaggtcgatgagtcactgcaatccccacgggcgaccgtggcagtggctgcgctggcggcctgcctatggggcaacccataggacgctctaatgtggacatggtgtgaagagtctattgagctagttagtagtcctccggcccctgaatgcggctaatcctaactgcggagcacatgccttcaacccagagggtggtgtgtcgtaatgggcaactctgcagcggaaccgactactttgggtgtccgtgtttccttttattcttacattggctgcttatggtgacaattacagaattgttaccatatagctattggattggccatccggtgtgcaatagagctattatatacctatttgttggctttgtaccactgaccttaaaatctttaaccactcttgagtgtatattaacccttaatacaatcaaac

SEQ ID NO: 18671 - DNA, 742 bp, synthetic construct
  source 1..742: mol_type = other DNA
ttaaaacagcctgtgggttgcacccactcacagggcctactgggcgcaagcactctggtatcttggtacctttgtgcgcctgttttatacccctccccttttgtaacttagaagcagcaaaccacgatcaatagcaggcataacgttccagttatgtctcgatcaagcacttctgtttccccggactgagtatcaatagactgctcgcgcggttgaaggagaaaacgttcgttatccggctagctacttcggaaaacctagtaacaccatgaaagttgcggagagcttcgttcagcactcccccagtgtagatcaggtcgatgagtcaccgcattccccacgggcgaccgtggcggtggctgcgttggcggcctgcccatggggtaacccatggggcgctctaatacggacatggtgtgaagagtctactgagctagttagtagtcctccggcccctgaatgcggctaatcctaactgcggagcacacgcccacaagccagcgggtagtgtgtcgtaacgggtaactctgcagcggaaccgactactttgggtgtccgtgtttccttttatctttatattggctgcttatggtgacaatcaaagaattgttaccatatagctattggattggccatccggtgtgcaacagagcaatcatttacctatttattggttttgtaccattaactttgaattctgtgaccactctaaattatatcttgaccctcaacacagttaaac

SEQ ID NO: 18672 - DNA, 747 bp, synthetic construct
  source 1..747: mol_type = other DNA
ttaaaacagcctgtgggttgtacccactcacaggacccacgcggtgctagcactctggttccacggaacctttgtgcgcctgttttacgtcccctccccaatttgtaacttagaagcaatttacagcactgatcaatagcaggcatggcgcaccagctatgtcttgatcaagcacctctgtttccccggaccgagtatcaatagactgttcacacggtcgaaggagaaagcgttcgttatccggctaactacttcgagaaacccagtagcgccattgaaactgcagagtgtttcgctccacacttcccccgtgtagatcaggtcgatgagtcactgcaatccccacgggcgaccgtggcagtggctgcgttggcggcctgcctatggggtaacccataggacgctctaatgtggacatggtgcgaagagtctattgagctagttagtagtcctccggcccctgaatgcggctaatcctaactgcggagcacatgccttcaatccagagggtagtgtgtcgtaatgggcaactctgcagcggaaccgactactttgggtgtccgtgtttccttttattttcacattggctgcttatggtgacaattacagaattgttaccatatagctattggattggccatccggtgtgcaatagagctattatatacctatttgttggctttgtaccactaaccttaaaatctgtaatcactctcgagtatatattgacccttaatacaattaaac

SEQ ID NO: 18673 - DNA, 731 bp, synthetic construct
  source 1..731: mol_type = other DNA
gttgcacccactcacagggcccacgcggtgctagcactctggttctacggaacctttgtgcgcctgttttgcgtcccctccccaatttgtaacctagaagcaatttacaacactgatcaatagcaggcatggcgcaccagctatgtcttgatcaagcacctctgtttccccggaccgagtatcaatagactgttcacacggtcgaaggagaaagcgttcgttatccggctaactacttcgagaaacccagtagcgccattgaaactgcagagtgtttcgctccacacttcccccgtgtagatcaggtcgatgagtcactgcaatccccacgggcgaccgtggcagtggctgcgttggcggcctgcctatggggtaacccataggacgctctaatgtggacatggtgcgaagagtctattgagctagttagtagtcctccggcccctgaatgcggctaatcctaactgcggagcacatgccttcaatccagagggtagtgtgtcgtaatgggcaactctgcagcggaaccgactactttgggtgtccgtgtttccatttattctcacattggctgcttatggtgacaattatagaattgttaccatatagctattggattggccatccggtgtgcaatagagctattatatacctatttgttggctttgtaccactaacctcaaaatctgtaatcactctcaagtatatattgacccttaatacaattaagc

SEQ ID NO: 18674 - DNA, 728 bp, synthetic construct
  source 1..728: mol_type = other DNA
gcacccactcacaggacccacgcggtgttagcactctggttccacgggacctttgtgcgcctgttttatatcccctccccaatttgtaacttagaagtaatttgcaacactggtcagtagcaggcatagcgcaccagctatgtcttgatcaagcacttctgtttccccggaccgagtatcaatagactgttcacacggttgaaggagaaagcgtccgttatccggctaactacttcgagaaacccagtagcaccattgaaactacagagtgtttcgctccacacttcccccgtgtagatcaggtcgatgagtcactgcaatccccacgggcgaccgtggcagtggctgcgctggcggcctgcctatggggcaacccataggacgctctaatgtggacatggtgtgaagagtctattgagctagttagtagtcctccggcccctgaatgcggctaatcctaactgcggagcacatgccttcaatccagagggtagtgtgtcgtaatgggcaactctgcagcggaaccgactactttgggtgtccgtgtttccttttattctcacattggctgcttatggtgacaattactgaattgttaccatatagctattggattggccatccggtgtgcaatagagctattatatacctatttgttggctttgtaccactgaccttaaaatctataaccactctcgattgtatattaacccttaatacaatcaaac

SEQ ID NO: 18675 - DNA, 728 bp, synthetic construct
  source 1..728: mol_type = other DNA
gcacccactcacaggacccacgcggtgctagcactctggttccacgggacctttgtgcgcctgttttatgtcccctccccaatttgtaacttagaagcaatttgcaacactgatcagtagcaggcatagcgcaccagctatgtcttgatcaagcacttctgtttccccggaccgagtatcaatagactgttcacatggttgaaggagaaagcgtccgttatccggctaactacttcgagaaacccagtagcaccattgaaactacagagtgtttcgctccacacttcccccgtgtagatcaggtcgatgagtcactgcaatccccacgggcgaccgtggcagtggctgcgctggcggcctgcctatggggcaacccataggacgctttgatgtggacatggtgtgaagagtctattgagctagttagtagtcctccggcccctgaatgcggctaatcctaactgcggagcacatgccttcaacccagagggtagtgtgtcgtaatgggcaactctgcagcggaaccgactactttgggtgtccgtgtttccttttattctcacattggctgcttatggtgacaattacagaattgttaccatatagctattggattggccatccggtgtgcaatagagctattatatacctatttgttggctttgtaccactgaccttaaaatctttaaccactcttgagtgtatattaacccttaacacaatcaaac

SEQ ID NO: 18676 - DNA, 708 bp, synthetic construct
  source 1..708: mol_type = other DNA
cactgggcgctagcacactgattctgcgggatctttgtgcgcctgttttataatccctcccccaagcagtaacttagaagcttcatactaccacgaccaatagtaggcgtggcgcaccagtcacgtctcggtcaagcacttctgtttccccggactgagtatcaatagactgctcacgcggttgaaggagaaagcgttcgttatccggctaactacttcgagaaacttagtagcaccgtgaaagttgcggagcgtttcgctcagcacttcccccgtgtagatcaggtcgatgagtcactgtgaaccccacgggcgaccgtgacagtggctgcgttggcggcctgcccatggggtaacccatgggacgctctaatacagacacggtgtgaagagtctattgagctagttagtagtcctccggcccctgaatgcggctaatcctaactgcggagcgcgcaccctcaatccagtgggcagcgcgtcgtaatgggtaactctgcagcggaaccgactactttgggtgtccgtgtttcctgttattccttattggctgcttatggtgacaattgaaaagttgttaccatatagctattggattggccatccggtgaccaacagagctattgtttatttgtttattgggtacgtccctctcaatctcaaagtcattcaaactcttgattatatactactcctcaattgtaagaa

SEQ ID NO: 18677 - DNA, 728 bp, synthetic construct
  source 1..728: mol_type = other DNA
gcacccactcacaggacccacgcggtgctagcactctggttccacgggacctttgtgcgcctgttttatatcccctccccaatttgtaacttagaagcaatttgcaacaccgatcagtagcaggcatagcgcaccagctatgtcttgatcaagcacttctgtttccccggaccgagtatcaatagactgttcacacggttgaaggagaaagcgtccgttatccggctaactacttcgagaaacccagtagcaccattgaaactacagagtgtttcgctccacacttcccccgtgtagatcaggtcgatgagtcactgcaatccccacgggcgaccgtggcagtggctgcgctggcggcctgcctatggggcaacccataggacgctctaatgtggacatggtgtgaagagtctattgagctagttagtagtcctccggcccctgaatgcggctaatcctaactgcggagcacatgccttcaacccagagggtagtgtgtcgtaatgggcaactctgcagcggaaccgactactttgggtgtccgtgtttccttttattctcacattggctgcttatggtgacaattacagaattgttaccatatagctattggattggccatccggtgtgcaatagagctattatatacctatttgttggctttgtaccactgaccttaaaatctttaaccactcttgagtgtatattaacccttaatacaatcaaac

SEQ ID NO: 18678 - DNA, 723 bp, synthetic construct
  source 1..723: mol_type = other DNA
cactcacaggacccacgcggtgttagcactctggttccacgggacctttgtgcgcctgttttatgtcccctccccaatttgtaacttagaagtaatttgcaacactggtcagtagcaggcatagcgcaccagctatgtcttgatcaagcacttctgtttccccggaccgagtatcaatagactgttcacacggttgaaggagaaagcgtccgttatccggctaactacttcgagaaacccagtagcaccattgaaactacagagtgtttcgctccacacttcccccgtgtagatcaggtcgatgagtcactgcaatccccacgggcgaccgtggcagtggctgcgctggcggcctgcctatggggcaacccataggacgctctgatgtggacatggtgtgaagagtctattgagctagttagtagtcctccggcccctgaatgcggctaatcctaactgcggagcacatgccttcaatccagagggtagtgtgtcgtaatgggcaactctgcagcggaaccgactactttgggtgtccgtgtttccttttattctcacattggctgcttatggtgacaattactgaattgttaccatatagctattggattggccatccggtgtgcaatagagctattatatacctatttgttgggtttgtaccactgaccttaaaatctataaccactctcgattgtatattaacccttaatacaatcaaac

SEQ ID NO: 18679 - DNA, 723 bp, synthetic construct
  source 1..723: mol_type = other DNA
cactcacaggacccacgcggtgctagcactctggttccacgggacctttgtgcgcctgttttatgtcccctccccaatttgtaacttagaagcaatttgcaacactgatcagtagcaggcataacgcaccagttatgtcttgatcaagcacttctgtttccccggactgagtatcaatagactgttcacacggttgaaggagaaagcgtccgttatccggctaactacttcgagaaacccagtagcaccattgaaactacagagtgtttcgctccacacttcccccgtgtagatcaggtcgatgagtcactgcaatccccacgggcgaccgtggcagtggctgcgctggcggcctgcctatggggcaacccataggacgctctaatgtggacatggtgtgaagagtctattgagctagttagtagtcctccggcccctgaatgcggctaatcctaactgcggagcacatgccttcaatccagagggtagtgtgtcgtaatgggcaactctgcggcggaaccgactactttgggtgtccgtgtttccttttattctcatattggctgcttatggtgacaattacagaattgttaccatatagctattggattggccatccggtgtgcaatagagctattatatacctatttgttggttttgtaccactgaccttaaaatctttaaccactcttgagtgtatattaacccttaatacaatcaaac

SEQ ID NO: 18680 - DNA, 723 bp, synthetic construct
  source 1..723: mol_type = other DNA
cactcacaggacccacgcggtgctagcactctggttccacgggacctttgtgcgcctgttttatgtcccctccccaatttgtaacttagaagcaatttgcaacactgatcagtagcaggcatagcgcaccagctatgtcttgatcaagcacttctgtttccccggaccgagtatcaatagactgttcacacggttgaaggagaaagcgtccgttatccggctaactacttcgagaaacccagtagcgccattgaaactacagagtgtttcgctccacacttcccccgtgtagatcaggtcgatgagtcactgcaatccccacgggcgaccgtggcagtggctgcgctggcggcctgcctatggggcaacccataggacgctctaatgtggacatggtgtgaagagtctattgagctagttagtagtcctccggcccctgaatgcggctaatcctaactgcggagcacatgccttcaacccagagggtagtgtgtcgtaatgggcaactctgcagcggaaccgactactttgggtgtccgtgtttccttttattctcacattggctgcttatggtgacaattacagaattgttaccatatagctattggattggccatccggtgtgcaatagagctattatatacctatttgttggctttgtaccactgaccttaagatctttaaccactcttaagtgtatattaacccttaatacaatcaagc

SEQ ID NO: 18681 - DNA, 723 bp, synthetic construct
  source 1..723: mol_type = other DNA
cactcacaggacccacgcggtgctagcactctggttccacgggacctttgtgcgcctgttttatgccccctccccaatttgtaacttagaagcaatttgcaacactgatcagtagcaggcatagcgcaccagctatgtcttgatcaagcacttctgtttccccggaccgagtatcaatagactgttcacacggttgaaggagaaagcgtccgttatccggctaactacttcgagaaacccagtagcaccattgaaactacagagtgtttcgctccacacttcccccgtgtagatcaggtcgatgagtcactgcaatccccacgggcgaccgtggcagtggctgcgctggcggcctgcctatggggcaacccataggacgctttgatgtggacatggtgtgaagagtctattgagctagttagtagtcctccggcccctgaatgcggctaatcctaactgcggagcacatgccttcaacccagagggtagtgtgtcgtaatgggcaactctgcagcggaaccgactactttgggtgtccgtgtttccttttattctcacattggctgcttatggtgacaattacagaattgttaccatatagctattggattggccatccggtgtgcaatagagctattatatacctatttgttggctttgtaccactgaccttaaaatctttaaccactcttgagtgtatattaacccttaatacaatcaaac

SEQ ID NO: 18682 - DNA, 727 bp, synthetic construct
  source 1..727: mol_type = other DNA
cacccactcacaggacccacgcggtgctagcactctggttccacgggacctttgtgcgcctgttttatgtcccctccccaatttgtaacttagaagcaatttgcaacactgatcagtagcaggcatagcgcaccagctatgtcttgatcaagcacttctgtttccccggaccgagtatcaatagactgttcacacggttgaaggagaaagcgtccgttatccggctaactacttcgagaaacccagtagcaccattgaaactacagagtgtttcgctccacacttcccccgtgtagatcaggtcgatgagtcactgcaatccccacgggcgaccgtggcagtggctgcgctggcggcctgcctatggggcaacccataggacgctctaatgtggacatggtgtgaagagtctattgagctagttagtagtcctccggcccctgaatgcggctaatcctaactgcggagcacatgccttcaatccagagggtagtgtgtcgtaatgggcaactctgcagcggaaccgactactttgggtgtccgtgtttccttttattctcacattggctgcttatggtgacaattactgaattgttaccatatagctattggattggccatccggtgtgcaatagagctattatatacctatttgttggctttgtaccactgaccttaaaatctataaccactctcgagtgtatattaaccctcaatacaatcaaac

SEQ ID NO: 18683 - DNA, 724 bp, synthetic construct
  source 1..724: mol_type = other DNA
ccacccacagggcccactgggcgctagcactctgattctacggaatctttgtgcgcctgttttataaccctcccccccatttcgcaacttagaagcaacgcgcatcactgatcaacagcaggcatggcgctccagccatgtcttgatcaagcactcctgtttccccggactgagtatcaatagactgcttacgcggttgaaggagaaaacgttcgttacccggctaactacttcgagaaacttagtaacaccatcgaagctgcagggtgtttcgctcagcacttcccccgtgtagatcaggccgatgagtcaccgcaatccccacgggcgaccgtggcggtggctgcgttggcggcctgcctatggggcaacccataggacgccctaaagtggacatggtgcgaagagtctattgagctagttagtagtcctccggcccctgaatgcggctaatcctaactgcggagcacataccctcaagccagagggtagtgtgtcgtaacgggtaactctgcagcggaaccgactactttgggtgtccgtgtttccttttattcttactgtggctgcttatggtgacaattcaagaattgttaccatatagctattggattggccatccggtgtctaacagagctattgtgtacttatttgttgggtacgttccattatcttacacatcccttaacacattacattttattgtgaagctaaatacaagaag

SEQ ID NO: 18684 - DNA, 724 bp, synthetic construct
  source 1..724: mol_type = other DNA
ccacccacagggcccactgggcgctagcactctgattccacggaatctttgtgcgcctgttttataaccctcccccccatttcgcaacttagaagcaacgcgcatcactgatcaacagcaggcatggcgctccagccatgtcttgatcaagcactcctgtttccccggactgagtatcaatagactgcttacgcggttgaaggagaaaacgttcgttacccggctaactacttcgagaaacttagtaacaccatcgaagctgcagggtgtttcgctcagcacttcccccgtgtagatcaggccgatgagtcaccgcaatccccacgggcgaccgtggcggtggctgcgttggcggcctgcctatggggcaacccataggacgccctaaagtggacatggtgcgaagagtctattgagctagttagtagtcctccggcccctgaatgcggctaatcctaactgcggagcacataccctcaagccagagggtagtgtgtcgtaacgggtaactctgcagcggaaccgactactttgggtgtccgtgtttccttttattcttactgtggctgcttatggtgacaattcaagaattgttaccatatagctattggattggccatccggtgtctaacagagctattgtgtacttatttgttgggtacgttccattatcttacacatcccttaacacattacattttattgtgaagctaaatacaagaag

SEQ ID NO: 18685 - DNA, 724 bp, synthetic construct
  source 1..724: mol_type = other DNA
ccgcccacagggcccactgggcgctagcactctgattccacggaatctttgtgcgcctgttttataaccctctcccctatttcgcaacttagaagcaacgcgcatcactgatcaacagcaggcatggcgctccagccatgtcttgatcaagcactcctgtttccccggactgagtatcaatagactgcttacgcggttgaaggagaaaacgttcgttacccggctaactacttcgagaaacttagtaacaccatcgaagctgcagggtgtttcgctcagcacttcccccgtgtagatcaggccgatgagtcaccgcaatccccacgggcgaccgtggcggtggctgcgttggcggcctgcctatggggcaacccataggacgccctaaagtggacatggtgcgaagagtctattgagctagttagtagtcctccggcccctgaatgcggctaatcctaactgcggagcacataccctcaagccagagggtagtgtgtcgtaacgggcaactctgcagcggaaccgactactttgggtgtccgtgtttccttttattcttactgtggctgcttatggtgacaattcaagaattgttaccatatagctattggattggccatccggtgtctaacagagctattgtgtacttatttgttgggtacgttccattatcttacacatcccttaacacattacattttattgtgaagctaaatacaagaag

SEQ ID NO: 18686 - DNA, 724 bp, synthetic construct
  source 1..724: mol_type = other DNA
ccacccacagggcccactgggcgctagcactctgattccacggaatctttgtgcgcctgttttataaccctcccccccatttcgcaacttagaagcaacgcgcatcactgatcaacagcaggcatggcgttccagccatgtcttgatcaagcactcctgtttccccggactgagtatcaatagactgcttacgcggttgaaggagaaaacgttcgttacccggctaactacttcgagaaacttagtaacaccatcgaagctgcagggtgtttcgctcagcacttcccccgtgtagatcaggccgatgagtcaccgcaatccccacgggcgaccgtggcggtggctgcgttggcggcctgcctatggggcaacccataggacgccctaaagtggacatggtgcgaagagtctattgagctagttagtagtcctccggcccctgaatgcggctaatcctaactgcggagcacataccctcaagccagagggtagtgtgtcgtaacgggtaactctgcagcggaaccgactactttgggtgtccgtgtttccttttattcttactgtggctgcttatggtgacaattcaagaattgttaccatatagctattggattggccatccggtgtctaacagagctattgtgtacttatttgttgggtacgttccattatcttacacgtcccttaacacattacattttattgtgaagccaaatacaagaag

SEQ ID NO: 18687 - DNA, 724 bp, synthetic construct
  source 1..724: mol_type = other DNA
ccgcccacagggcccactgggcgctagcactctgattccacggaatctttgtgcgcctgttttataaccctctcccctatttcgcaacttagaagcaacgcgcatcactgatcaacagcaggcatggcgctccagccatgtcttgatcaagcactcctgtttccccggaccgagtatcaatagactgcttacgcggttgaaggagaaaacgttcgttacccggctaactacttcgagaaacttagtaacaccatcgaagctgcagggtgtttcgctcagcacttcccccgtgtagatcaggccgatgagtcaccgcaatccccacgggcgaccgtggcggtggctgcgttggcggcctgcctatggggcaacccataggacgccctaaagtggacatggtgcgaagagtctattgagctagttagtagtcctccggcccctgaatgcggctaatcctaactgcggagcacataccctcaagccagagggtagtgtgtcgtaacgggcaactctgcagcggaaccgactactttgggtgtccgtgtttccttttattcttactgtggctgcttatggtgacaattcaagaattgttaccatatagctattggattggccatccggtgtctaacagagctattgtgtacttatttgttgggtacgttccattatcttacacatcccttaacacattacattttattgtgaagctaaatacaagaag

SEQ ID NO: 18688 - DNA, 724 bp, synthetic construct
  source 1..724: mol_type = other DNA
cactcacaggacccacgcggtgctagcactctggttccacgggacctttgtgcgcctgttttatgtccccacccccaatttgtaacttagaagcaatttgcaacactgatcagtagcgggcatagcgcaccagctatgtcttgatcaagcacttctgtttccccggaccgagtatcaatagactgttcacacggttgaaggagaaagcgtccgttatccggctaactacttcgagaaacccagtagcaccattaaaactacagagtgtttcgctccacacttcccccgtgtagatcaggtcgatgagtcactgcaatccccacgggcgaccgtggcagtggctgcgctggcggcctgcctatggggcaacccataggacgctctaatgtggacatggtgtgaagagtctattgagctagttagtagtcctccggcccctgaatgcggctaatcctaactgcggagcacatgccttcaacccagagggtagtgtgtcgtaatgggcaactctgcagcggaaccgactactttgggtgtccgtgtttccttttattctcacattggctgcttatggtgacaattacagaattgttaccatatagctattggattggccatccggtgtgcaatagagctattatatacctatttgttggctttgtaccactgaccttaaaatctttaaccactcttgagtgtatattaacccttaatacaatcaaac

SEQ ID NO: 18689 - DNA, 723 bp, synthetic construct
  source 1..723: mol_type = other DNA
cactcacaggacccacgcggtgccagcactctggttccacgggacctttgtgcgcctgttttatatcccctccccaatttgtaacttagaagcaatttgcaacactgatcagtagcaggcatagcgcaccagctatgtcttgatcaagcacttctgtttccccggaccgagtatcaatagactgttcacacggttgaaggagaaagcgtccgttatccggctaactacttcgagaaacccagtaacaccattgaaactacagagtgtttcgctccacacttcccccgtgtagatcaggtcgatgagtcactgcaatccccacgggcgaccgtggcagtggctgcgctggcggcctgcctatggggtaacccataggacgctctaatgtggacatggtgtgaagagtctattgagctagttagtagtcctccggcccctgaatgcggctaatcctaactgcggagcacatgccttcaacccagagggtagtgtgtcgtaatgggcaactctgcagcggaaccgactactttgggtgtccgtgtttccttttattctcacattggctgcttatggtgacaattacagaattgttaccatatagctattggattggccatccggtgtgcaatagagctattatatacctatttgttggctttgtaccactgaccttaaaatctttaaccactcttgagtgtatattaacccttaatacaatcaaac

SEQ ID NO: 18690 - DNA, 722 bp, synthetic construct
  source 1..722: mol_type = other DNA
ccacctacagggcccactgggcgctagcacactgattctgcgggatctttgtgcgcctgttttataacccttcccctaagcagcaatttagaagctttgtacaatcatggccaatagtgggcgtggcgcgccagtcacgtcttggtcaagcacttctgtatccccggactgagtatcaatagactgctcacgcggttgaaagagaaaacgttcgttacccggctaactacttcgagaaacctagtagcaccatgaaagttgcagagtgtttcgctcagcactttccccgtgtagatcaggtcgatgagtcactgtaaaccccacgggcgaccgtgacagtggctgcgttggcggcctgcccatggggaaacccatgggacgctctaatacagacatggtgcgaagagtctattgagctagttagcagtcctccggcccctgaatgcggctaatcctaactgcggagcgcgcaccctcaacccagggggcggcgcgtcgtaatgggtaactctgcagcggaaccgactactttgggtgtccgtgtttccttttattctttattggctgcttatggtgacaattgaaaagttgttaccatatagctattggattggccatccggtgtctaacagagctattgtttacttatttattggatacgtccctcttaatctcaaggccattcaaactcttgattacatattgctccttaactgtaagaa

SEQ ID NO: 18691 - DNA, 722 bp, synthetic construct
  source 1..722: mol_type = other DNA
ccactcacagggcccactgggcgctagcacactgattctgcgggatctttgtgcgcctgttttataacccctcccctaagcagtaacttagaagcttcacactatcacgaccaatagcaggcgtggcgcaccagtcacgtcttggtcaagcacttctgtttccccggactgagtatcaatagactgctcacgcggttgaaggagaaagcgttcgttatccggctaactacttcgagaaacctagtagcaccgtgaaagttgcggagtgtttcgctcagcacttcccccgtgtagatcaggtcgatgagtcactgtgtaccccacgggtgaccgtgacagtggctgcgttggcggcctgcccatggggtaacccatgggacgctctaatacagacacggtgtgaagagtctattgagctagttagtagtcctccggcccctgaatgcggctaatcctaactgcggagcgcgtaccctcaatccagggggcagcgcgtcgtaatgggtaactctgcagcggaaccgactactttgggtgtccgtgtttccttttattccttattggctgcttatggtgacaattgaaaagttgttaccatatagctattggattggccatccggtgaccaacagagctattgtttacctgtttattggatacgtccctctcaatctcaaggtcattcaaactcttgattatatactacttctcaactgtaagaa

SEQ ID NO: 18692 - DNA, 722 bp, synthetic construct
  source 1..722: mol_type = other DNA
ccgcctacagggcccactgggcgctagcacactgattctgcgggatctttgtgcgcctgttttataacccttcccctaagcagcaacttagaagctttgtacaatcacgaccaatagtgggcgtgacgcgccagtcacgtcttggtcaagcacttctgtatccccggactgagtaccaatagactgctcacgcggttgaaggggaaaacgttcgttacccggctaactacttcgagaaacctagtagtaccatgaaagttgcggagtgtttcgctcagcacttcccccgtgtagatcaggtcgatgagccactgtaaaccccacgggcgaccgtgacagtggctgcgttggcggcctgcccatggggtaacccatgggacgctctaatacagacatggtgcgaagagtctattgagctagttagcagtcctccggcccctgaatgcggctaatcctaactgcggagcgcgcaccctcaacccagggggcggcgtgtcgtaatgggtaactctgcagcggaaccgactactttgggtgtccgtgtttccttttattctttattggctgcttatggtgacaattgaaaagttgttaccatatagctattggattggccatccggtgtctaacagagctattgtttacctatttgttggatacgtccctcttaatctcaaggccattcaaactcttgattatatattgctccttaactgtaggaa

SEQ ID NO: 18693 - DNA, 722 bp, synthetic construct
  source 1..722: mol_type = other DNA
tcacccacggggcccactgggcgctagcacactgattctgcgggatctttgtgcgcctgttttataacccttcccctaagcagcaacttagaagctttgtacaatcatggccaatagtgggcgtggcgcgccagtcacgtcttggtcaagcacttctgtatccccggactgagtatcaatagactgctcacgcggttgaaagagaaaacgttcgttacccggctaactacttcgagaaacctagtagcaccatgaaagttgcggagtgtttcgctcagcactttccccgtgtagatcaggtcgatgagtcactgtaaaccccacgggcgaccgtgacagtggctgcgttggcggcctgcccatggggaaacccatgggacgctctaatacagacatggtgcgaagagtctattgagctagttagcagtcctccggcccctgaatgcggctaatcctaactgcggagcgcgcaccctcaacccagggggcggcgcgtcgtaatgggtaactctgcagcggaaccgactactttgggtgtccgtgtttccttttattctttattggctgcttatggtgacaattgaaaagttgttaccatatagctattggattggccatccggtgtctaacagagctattgtttacttatttattggatacgtccctcttaatctcaaggccattcaaactcttgattacatattgctccttaactgtaagaa

SEQ ID NO: 18694 - DNA, 722 bp, synthetic construct
  source 1..722: mol_type = other DNA
ccacccacggggcccactgggcgctagcacactgattctgcgggatctttgtgcgcctgttttataacccttcccctaagcagcaacttagaagctttgtacaatcatggccaatagtgggcgtggcgcgccagtcacgtcttggtcaagcacttctgtatccccggactgagtatcaatagactgctcacgcggttgaaagagaaaacgttcgttacccggctaactacttcgagaaacctagtagcaccatgaaagttgcggggtgtttcgctcagcactttccccgtgtagatcaggtcgatgagtcactgtaaaccccacgggcgaccgtgacagtggctgcgttggcggcctgcccatggggaaacccatgggacgctctaatacagacatggtgcgaagagtctattgagctagttagtagtcctccggcccctgaatgcggctaatcctaactgcggagcgcgcaccctcaacccagggggcggcgcgtcgtaatgggtaactctgcagcggaaccgactactttgggtgtccgtgtttccttttattctttattggctgcttatggtgacaattgaaaagttgttaccatatagctattggattggccatccggtgtctaacagagctattgtttacttatttattggatacgtccctcttaatctcaaggccattcaaactcttgattacatattgctccttaactgtaagaa

SEQ ID NO: 18695 - DNA, 722 bp, synthetic construct
  source 1..722: mol_type = other DNA
ccatccacagggcccactgggcgctagcacactgattctgcgggatctttgtgcgcctgttttataacccttcccctaagcagcaacttagaagctttgtacaatcatggccaatagtgggcgtggcgcgccagtcacgtcttggtcaagcacttctgtatccccggactgagtatcaatagactgctcacgcggttgaaagagaaaacgttcgttacccggctaactacttcgagaaacctagtagcaccatgaaagttgcggagtgtttcgctcagcactttccccgtgtagatcaggtcgatgagtcactgtaaaccccacgggcgaccgtgacagtggctgcgctggcggcctgcccatggggaaacccatgggacgctctaatacagacatggtgcgaagagtctattgagctagttagcagtcctccggcccctgaatgcggctaatcctaactgcggagcgcgcaccctcaacccagggggcggcgcgtcgtaatgggtaactctgcagcggaaccgactactttgggtgtccgtgtttccttttattctttattggctgcttatggtgacaattgaaaagttgttaccatatagctattggattggccatccggtgtctaacagagctattgtttacttatttattggatacgtccctcttaatctcaaggccattcaaactcttgattacatattgctccttaactgtaagaa

SEQ ID NO: 18696 - DNA, 722 bp, synthetic construct
  source 1..722: mol_type = other DNA
ccacctacagggcccactgggcgctagcacactgattctgcgggatctttgtgcgcctgttttataacccttcccctaagcagcaacttagaagctttgtacaatcatggccaatagtgggcgtggcgcgccagtcacgtcttggtcaagcacttctgtatccccggactgagtatcaatagactgctcacgcggttgaaagagaaaacgttcgttacccggctaactacttcgagaagcctagtagcaccatgaaagttgcggagtgtttcgctcagcactttccccgtgtagatcaggtcgatgagtcactgtaaaccccacgggcgaccgtgacagtggctgcgttggcggcctgcccatggggaaacccatgggacgctctaatacagacatggtgcgaagagtctattgagctagttagcagtcctccggcccctgaatgcggctaatcctaactgcggagcgcgcaccctcaacccagggggcggcgcgtcgtaatgggtaactctgcagcggaaccgactactttgggtgtccgtgtttccttatattctttattggctgcttatggtgacaattgaaaagttgttaccatatagctattggattggccatccggtgtctaacagagctattgtttacttatttattggatacgtccctcttaatctcaaggccattcaaactcttgattacatattgctccttaactgtaagaa

SEQ ID NO: 18697 - DNA, 724 bp, synthetic construct
  source 1..724: mol_type = other DNA
ccactcacaggacccacgcggtgctagcactctggttccgcgggacctttgtgcgcctgttttatgtcccctccccaatttgtaacttagaagcattttgcaacactgatcagtagcaggcatagcgcaccagctatgtcttgatcaagcacttctgtttccccggaccgagtatcaatagactgttcacacggttgaaggagaaagcgtccgttatccggctaactacttcgagaaacccagtagcaccgttgaaactacagagtgtttcgctccacacttcccccgtgtagatcaggtcgatgagtcactgcaatccccacgggcgaccgtggcagtggctgcgctggcggcctgcctatggggcaacccataggacgctctaatgtggacatggtgtgaagagtctattgagctagttagtagtcctccggcccctgaatgcggctaatcctaactgcggagcacatgccttcaatccagagggtagtgtgtcgtaacgggcaactctgcagcggaaccgactactttgggtgtccgtgtttccttttattctcacattggctgcttatggtgacaattacagaattgttaccatatagctattggattggccatccggtgtgcaatagagctatcatatatctatttgttggctttgtaccactgaccttaaaatctataaccactctcgagtgtatattaacccttaatacaatcaaac

SEQ ID NO: 18698 - DNA, 710 bp, synthetic construct
  source 1..710: mol_type = other DNA
caatttccactgggcgctagcactccgattctgtggaatctttgtgcgcctgttttataaccctcccccgacttgcaacttagaagttatgtacgttgatcaacagcaggcgtggcacaccagccatgtcttgatcaagcacttctgtaaccccggactgagtatcaatagactgctcacgtggtcgaaagagaaacgttcgttatccggctaactacttcgagaaacctagtagcaccactgaaactgcggagtgtttcgctcagcacttcccccgtgtagatcaggtcgatgagtcactgcttaccccacgggtgaccgtggcagtggctgcgttggcggcctgcctatggggcaacccataggacgctctaaagtggacatggtgtgaagagtctattgagctagttagtagtcctccggcccctgaatgcggctaatcctaactgcggagcgcatgcccccaaaccagagggtggtgcgtcgtaacgggtaactctgcagcggaaccgactactttgggtgtccgtgtttcctttattctcataatggctgcttatggtgacaattgaggaattgttaccatatagctattggattggccatccggtgtgcaacagagctattatctacttgtttgttggatacattccattgacacctaaatccttcaatacattgcactatattctaacgttgaacgcaagaaa

SEQ ID NO: 18699 - DNA, 724 bp, synthetic construct
  source 1..724: mol_type = other DNA
cactcacaggacccacgcggtgctagcactctggttccacgggacctttgtgcgcctgttttatgtcccctccccaatttgtaacttagaagcaatttgcaacactgatcagtagcaggcatagcgcaccagctatgtcttgatcaagcacttctgtttccccggaccgagtatcaatagactgttcacatggttgaaggagaaagcgtccgttatccggctaactacttcgagaaacccagtagcaccattgaaactacagagtgtttcgctccacacttccccccgtgtagatcaggtcgatgagtcactgcaatccccacgggcgaccgtggcagtggctgcgctggcggcctgcctatggggcaacccataggacgctttgatgtggacatggtgtgaagagtctattgagctagttagtagtcctccggcccctgaatgcggctaatcctaactgcggagcacatgccttcaacccagagggtagtgtgtcgtaatgggcaactctgcagcggaaccgactactttgggtgtccgtgtttccttttattctcacattggctgcttatggtgacaattacagaattgttaccatatagctattggattggccatccggtgtgcaatagagctattatatacctatttgttggctttgtaccactgaccttaaaatctttaaccactcttgagtgtatattaacccttaacacaatcaaac

SEQ ID NO: 18700 - DNA, 727 bp, synthetic construct
  source 1..727: mol_type = other DNA
cacccactcacaggacccacgtggtgctagcactctggttccacgggacctttgtgcgcctgttttatgtcccctccccagtttgtaacttagaagcaatttgcaacactgatcaatagcaggcatagcgcaccagctatgtcttgatcaagcacttctgtttccccggaccgagtatcaatagactgttcacacggttgaaggagaaagcgtccgttatccggctaactacttcgagaaacccagtagcaccattgaaactacagagtgtttcgctccacacttcccccgtgtagatcaggtcgatgagtcactgcaatccccacgggcgaccgtggcagtggctgcgctggcggcctgcctatggggcaacccataggacgctctaatgtggacatggtgtgaagagtctattgagctagttagtagtcctccggcccctgaatgcggctaatcctaactgcggagcacatgccttcaatccagagggtagtgtgtcgtaatgggtaactctgcagcggaaccgactactttgggtgcccgtgtttccttttattctcacattggctgcttatggtgacaattacagaattgttaccatatagctattggattggccatccggtgtgcaatagagctattatatacctatttgttggctttgtaccactgaccttaaaatctttaaccactctcgagtgtatattaacccttaatacaatcaaac

SEQ ID NO: 18701 - DNA, 727 bp, synthetic construct
  source 1..727: mol_type = other DNA
cacccactcacaggacccacgcggtgctagcactctggttccacgggacctttgtgcgcctgttttatgtcccctccccaatttgtaacttagaagcaatttgcaacactgatcagtagcaggcatagcgcaccagctatgtcttgatcaagcacttctgtttccccggaccgagtatcaatagactgttcacacggttgaaggagaaagcgtccgttatccggctaactacttcgagaaacccagtagcaccattgaaactacagagtgtttcgctccacacttcccccgtgtagatcaggtcgatgagtcactgcaatccccacgggcgaccgtggcagtggctgcgctggcggcctgcctatgggacaccccataggacgctctaatgtggacatggtgtgaagagtctattgagctagttagtagtcctccggcccctgaatgcggctaatcctaactgcggagcacatgccttcaatccagagggtagtgtgtcgtaatgggcaactctgcagcggaaccgactactttgggtgtccgtgtttccatttattctcacattggctgcttatggtgacaattacagaattgttaccatatagctattggattggccatccggtgtgcaatagagctattatatacctatttgttggctttgtaccactgaccttaaaatctataaccactctcgagcgtatattaactcttaatacaatcaaac

SEQ ID NO: 18702 - DNA, 727 bp, synthetic construct
  source 1..727: mol_type = other DNA
cacccactcacaggacccacgcggtgctagcactctggttccacgggacctttgtgcgcctgttttatgtcccctccccaatttgtaacttagaagcaatttgcaacactgatcagtagcaggcatagcgcaccagctatgtcttgatcaagcacttctgtttccccggaccgagtatcaatagactgttcacacggttgaaggagaaagcgtccgttatccggctaactacttcgagaaacccagtagcaccattgaaactacagagtgtttcgctccacacttcccccgtgtagatcaggtcgatgagtcactgcaatccccacgggcgaccgtggcagtggctgcgctggcggcctgcctatggggcaacccataggacgctctaatgtggacatggtgtgaagagtctattgagctagttagtagtcctccggcccctgaatgcggctaatcctaactgcggagcacatgccttcaatccagagggtagtgtgtcgtaatgggcaactctgcagcggaaccgactactttgggtgtccgtgtttccttttattctcacattggctgcttatggtgacaattaaagaattgttaccatatagctattggattggccatccggtgtgcaatagagctatcatatatttatttgttggctttgtaccactgaccttaaaatctataaccactctcgagtgtatattaacccttaatacaatcaaac

SEQ ID NO: 18703 - DNA, 727 bp, synthetic construct
  source 1..727: mol_type = other DNA
cacccactcacaggacccacgcggtgctagcactctggttctacggaacctttgtgcgcctgttttacgtcccctccccaatttgtaacctagaagcaatttacaacactgatcaatagcaggcatggcgcaccagctatgtcttgatcaagcacctctgtttccccggaccgagtatcaatagactgttcacacggtcgaaggagaaagcgttcgttatccggctaactacttcgagaaacccagtagcgccattgaaactgcagagtgtttcgctccacacttcccccgtgtagatcaggtcgatgagtcactgcaatccccacgggcgaccgtggcagtggctgcgttggcggcctgcctatggggtaacccataggacgctctaatgtggacatggtgcgaagagtctattgagctagttagtagtcctccggcccctgaatgcggctaatcctaactgcggagcacatgccttcaatccagagggtagtgtgtcgtaatgggcaactctgcagcggaaccgactactttgggtgtccgtgtttccttttattctcacattggctgcttatggtgacaattacagaattgttaccatatagctattggattggccatccggtgtgcaatagagctattatatacctatttgttggctttgtaccactaaccttaaaatctgtaatcactctcaagtatatattgacccttaatacaattaaac

SEQ ID NO: 18704 - DNA, 727 bp, synthetic construct
  source 1..727: mol_type = other DNA
cacccactcacaggacccacgcggtgctagcactctggttccacgggacctttgtgcgcctgttttatgtcccctccccaatttgtaacttagaagcaatttacaacactgatcagtagcaggcatagcgcaccagctatgtcttgatcaagcacttctgtttccccggaccgagtatcaatagactgttcacacggttgaaggagaaagcgtccgttatccggctaactacttcgagaaacccagtagcaccattgaaactacagagtgtttcgctccacacttcccccgtgtagatcaggtcgatgagtcactgcaatccccacgggcgaccgtggcagtggctgcgctggcggcctgcctatggggcaacccataggacgctctaatgtggacatggtgtgaagagtctattgagctagttagtagtcctccggcccctgaatgcggctaatcctaactgcggagcacatgccttcaatccagagggtagtgtgtcgtaatgggcaactctgcagcggaaccgactactttgggtgtccgtgtttccttttattctcacattggctgcttatggtgacaattacagaattgttaccatatagctattggattggccatccggtgtgcaatagagctattatatacctatttgttggctttgtaccactgaccttaaaatctttaaccactcttgagtgtatattaacccttaatacaatcaaac

SEQ ID NO: 18705 - DNA, 727 bp, synthetic construct
  source 1..727: mol_type = other DNA
cacccactcacaggacccacgcggtgctagcactctggttccacgggacctttgtgcgcctgttttatgtcccctccccaatttgtaacttagaagcaatttgcaacactgatcagtagcaggcatagcgcaccagctatgtcttgatcaagcacttctgtttccccggaccgagtatcaatagactgttcacacggttgaaggagaaagcgtccgttatccggctaactacttcgagaaacccagtagcaccattgaaactacagagtgtttcgctccacacttcccccgtgtagatcaggtcgatgagtcactgcaatccccacgggcgaccgtggcagtggctgcgctggcggcctgcctatggggcaacccataggacgctctaatgtggacatggtgtgaagagtctattgagctagttagtagtcctccggcccctgaatgcggctaatcctaactgcggagcacatgccttcaacccagagggtagtgtgtcgtaatgggcaactctgcagcggaaccgactactttgggtgtccgtgtttccttttattctcacattggctgcttatggtgacaattacagaattgttaccatatagctattggattggccatccggtgtgcaatagagctattatatacctatttgttggctttgtaccactgaccttaaaatctttaaccactcttgagtgtatattaacccttaatacaatcaaac

SEQ ID NO: 18706 - DNA, 727 bp, synthetic construct
  source 1..727: mol_type = other DNA
cacccactcacaggacccacgcggtgctagcactctggttccacgggacctttgtgcgcctgttttatgtcccctccccaatttgtaacttagaagcaatttgcaacactgatcagtagcaggcatagcgcaccagctatgtcttgatcaagcacttctgtttccccggaccgagtatcaatagactgttcacacggttgaaggagaaagcgtccgttatccggctaactacttcgagaaacccagtagcaccattgaaactacagagtgtttcgctccacacttcccccgtgtagatcaggtcgatgagtcactgcaatccccacgggcgaccgtggcagtggctgcgctggcggcctgcctatggggcaacccataggacgctttgatgtggacatggtgtgaagagtctattgagctagttagtagtcctccggcccctgaatgcggctaatcctaactgcggagcacatgccttcaacccagagggtagtgtgtcgtaatgggcaactctgcagcggaaccgactactttgggtgtccgtgtttccttttattctcacattggctgcttatggtgacaattacagaattgttaccatatagctattggattggccatccggtgtgcaatagagctattatatacctatttgttggctttgtaccactgaccttaaaatctttaaccactcttgagtgtatattaacccttaatacaattaaac

SEQ ID NO: 18707 - DNA, 727 bp, synthetic construct
  source 1..727: mol_type = other DNA
cacccactcacaggacccacgcggtgctagcactctggttccacgggacccttgtgcgcctgttttatgtcccctccccaatttgtaacttagaagcaatttgcaacactgatcagtagcaggcatagcgcaccagctatgtcttgatcaagcacttctgtttccccggaccgagtatcaatagactgttcacacggttgaaggagaaagcgtccgttatccggctaactacttcgagaaacccagtagcaccattgaaactacagagtgtttcgctccacacttcccccgtgtagatcaggtcgatgagtcactgcaatccccacgggcgaccgtggcagtggctgcgctggcggcctgcctatggggcaacccataggacgctctaatgtggacatggtgtgaagagtctattgagctagttagtagtcctccggcccctgaatgcggctaatcctaactgcggagcacatgccttcaatccagagggtagtgtgtcgtaatgggcaactctgcagcggaaccgactactttgggtgtccgtgtttccttttattctcacattggctgcttatggtgacaattactgaattgttaccatatagctattggattggccatccggtgtgcaatagagctattatatacctatttgttggctttgtaccactaaccttaaaatctataaccactctcgagtgtatattaacccttaatacaatcaaac

SEQ ID NO: 18708 - DNA, 727 bp, synthetic construct
  source 1..727: mol_type = other DNA
cacccactcacaggacccacgcggtgctagcactctggttccacgggacctttgtgcgcctgttttatgtcccctccccaatttgtaacttagaagcaatttacaacactgatcagtagcaggcatagcgcaccagctatgtcttgatcaagcacttctgtttccccggaccgagtatcaatagactgttcacacggttgaaggagaaagcgtccgttatccggctaactacttcgagaaacccagtagcaccattgaaactacagagtgtttcgctccacacttcccccgtgtagatcaggtcgatgagtcactgcaatccccacgggcgaccgtggcagtggctgcgctggcggcctgcctatggggcaacccataggacgctctaatgtggacatggtgtgaagagtctattgagctagttagtagtcctccggcccctgaatgcggctaatcctaactgcggagcacatgccttcaacccagagggtagtgtgtcgtaatgggcaactctgcagcggaaccgactactttgggtgtccgtgtttcctcttattctcacattggctgcttatggtgacaattacagaattgttaccatatagctattggattggccatccggtgtgcaatagagctattatatacctatttgttggctttgtaccactgaccttaaaatctttaaccactcttgagtgtatattaacccttaatacaatcaaac

SEQ ID NO: 18709 - DNA, 727 bp, synthetic construct
  source 1..727: mol_type = other DNA
cacccactcacaggacccacgcggtgctagcactctggttccacgggacctttgtgcgcctgttttatgtcccctccccaatttgtaacttagaagcaatttgcaacactgatcagtagcaggcatagcgcaccagctatgtcttgatcaagcacttctgtttccccggaccgagtatcaatagactgttcacacggttgaaggagaaagcgtccgttatccggctaactacttcgagaaacccagtagcaccattgaaactacagagtgtttcgctccacacttcccccgtgtagatcaggtcgatgagtcactgcaatccccacgggcgaccgtggcagtggctgcgctggcggcctgcctatggggcaacccataggacgctctaatgtggacatggtgtgaagagtctattgagctagttagcagtcctccggcccctgaatgcggctaatcctaactgcggagcacatgccttcaacccagagggtagtgtgtcgtaatgggcaactctgcagcggaaccgactactttgggtgtccgtgtttcttgttattctcacattggctgcttatggtgacaattacagaattgttaccatatagctattggattggccatccggtgtgcaatagagctattatatacctatttgttggctttgtaccactgaccttaaaatctttaaccactcttgagtgtatattaacccttaatacaatcaaac

SEQ ID NO: 18710 - DNA, 727 bp, synthetic construct
  source 1..727: mol_type = other DNA
cacccactcacaggacccacgcggtgctagcactctggttccacgggacctttgtgcgcctgttttatgtcccctccccaatttgtaacttagaagcaatttgcaacactgatcagtagcaggcatagcgcaccagctatgtcttgatcaagcacttctgtttccccggaccgagtatcaatagactgttcacacggttgaaggagaaagcgtccgttatccggctaactacttcgagaaacccagtagcaccattgaaactacagagtgtttcgctccacacttcccccgtgtagatcaggtcgatgagtcactgcaatccccacgggcgaccgtggcagtggctgcgctggcggcctgcctatggggtaacccataggacgctctaatgtggacatggtgtgaagagtctattgagctagttagtagtcctccggcccctgaatgcggctaatcctaactgcggagcacatgccttcaatccagagggtagtgtgtcgtaatgggcaactctgcagcggaaccgactactttgggtgtccgtgtttccttttattctcacattggctgcttatggtgacaattacagaattgttaccatatagctattggattggccatccggtgtgcaatagagctattatatacctatttgttggctttgtaccactgaccttaaaatctataaccactctcgagtgtatattaacccttaatacaatcaaac

SEQ ID NO: 18711 - DNA, 727 bp, synthetic construct
  source 1..727: mol_type = other DNA
cacccactcacaggacccacgcggtgctagcactctggttccacgggacctttgtgcgcctgttttatgtcccctccccaatttgtaacttagaagcaatttgcaacactgatcagtagcaggcatagcgcaccagctatgtcttgatcaagcacttctgtttccccggactgagtatcaatagactgttcacacggttgaaggagaaagcgtccgttatccgactaactacttcgagaaacccagtagcaccattgaaactacagagtgtttcgctccacacttcccccgtgtagatcaggtcgatgagtcactgcaatccccacgggcgaccgtggcagtggctgcgctggcggcctgcctatggggcaacccataggacgctctaatgtggacatggtgtgaagagtctattgagctagttagtagtcctccggcccctgaatgcggctaatcctaactgcggagcacatgccttcaatccagagggtagtgtgtcgtaatgggcaactctgcagcggaaccgactactttgggtgtccgtgtttccttttattctcacattggctgcttatggtgacaattactgaattgttaccatatagctattggattggccatccggtgtgcaatagagctattatatacctatttgttggctttgtaccactgaccttaaaatctataaccactctcgagtgtatattaaccctcaatacaatcaaac

SEQ ID NO: 18712 - DNA, 727 bp, synthetic construct
  source 1..727: mol_type = other DNA
cacccactcacaggacccacgcggtgctagcactctggttccacgggacctttgtgcgcctgttttatgtcccctccccaatttgtaacttagaagcaatttgcaacactgatcagtagcaggcatagcgcaccagctatgtcttgatcaagcacttctgtttccccggaccgagtatcaatagactgttcacacggttgaaggagaaagcgtccgttatccggctaactacttcgagaaacccagtagcaccattgaaactacagagtgtttcgctccacacttcccccgtgtagatcaggtcgatgagtcactgcaatccccacgggcgaccgtggcagtggctgcgctggcggcctgcctatgggacaccccataggacgctctaatgtggacatggtgtgaagagtctattgagctagttagtagtcctccggcccctgaatgcggctaatcctaactgcggagcacatgccttcaatccagagggtagtgtgtcgtaatgggcaactctgcagcggaaccgactactttgggtgtccgtgtttccttttattctcacattggctgcttatggtgacaattacagaattgttaccatatagctattggattggccatccggtgtgcaatagagctattatatacctatttgttggctttgtaccactgaccttaaaatctataaccactctcgagcgtatattaacccttaatacaatcaaac

SEQ ID NO: 18713 - DNA, 727 bp, synthetic construct
  source 1..727: mol_type = other DNA
cacccactcacaggacccacgcggtgctagcactctggttccacgggacctttgtgcgcctgttttatgtcccctccccaatttgtaacttagaagcaatttgcaacactgatcagtagcaggcatagcgcaccagctatgtcttgatcaagcacttctgtttccccggaccgagtatcaatagactgttcacacggttgaaggagaaagcgtccgttatccggctaactacttcgagaaacccagtagcaccattgaaactacagagtgtttcgctccacacttcccccgtgtagatcaggtcgatgagtcactgcaatccccacgggcgaccgtggcagtggctgcgctggcggcctgcctatggggcaacccataggacgctctaatgtggacatggtgtgaagagtctattgagctagttagtagtcctccggcccctgaatgcggctaatcctaactgcggagcacatgccttcaatccagagggtagtgtgtcgtaatgggcaactctgcagcggaaccgactactttgggtgtccgtgtttccttttattctcacattggctgcttatggtgacaattacagaattgttaccatatagctattggattggccatccggtgtgcaatagagctattatatacctatttgttggttttgtgccactgaccttaaaatctataaccactctcgagtgtatattaacccttaatacaatcgaac

SEQ ID NO: 18714 - DNA, 734 bp, synthetic construct
  source 1..734: mol_type = other DNA
aggggttgcacccactcacaggacccacgcggtgctagcactctggttctacggaacccttgtgcgcctgttttacaccccaccccaacttgtaacttagaagcaattcacaacactgatcaatagtaggcgtggcgcaccagctatgtcttgatcaagcacttctgtttccccggaccgagtatcaatagactgttcacgcggttgaaggagaaagcgtccgttatccggctaactacttcgagaaacccagtaacgccattgaaactgcagagtgtttcgctccacacttcccccgtgtagatcaggtcgatgagtcactgcaatccccacgggcgaccgtggcagtggctgcgctggcggcctgcctatggggcaacccataggacgctctaatgtggacatggtgtgaagagtctattgagctagttagtagtcctccggcccctgaatgcggctaatcctaactgcggagcacatgctctcaatccagagggtagtgtgtcgtaatgggcaactctgcagcggaaccgactactttgggtgtccgtgtttccttttattcttacattggctgcttatggtgacaatcactgaattgttaccatatagctattggattggccatccggtgtgcaacagagctattatatacctatttgttggctttgtaccactaaccttaaaatctacaaccactctcaactatatattaacccttaatacaatcaaac

SEQ ID NO: 18715 - DNA, 723 bp, synthetic construct
  source 1..723: mol_type = other DNA
cactcacaggacccacgcggtgctagcactctggttccacgggacctttgtgcgcctgttttatgtcccctccccaatttgtaacttagaagcaatttgcaacactgatcagtagcaggcatagcgcaccagctatgtcttgatcaagcacttctgtttccccggaccgagtatcaatagactgttcacacggttgaaggagaaagcgtccgttatccggctaactacttcgagaaacccagtagcaccattgaaactacagagtgtttcgctccacacttcccccgtgtagatcaggtcgatgagtcactgcaatccccacgggcgaccgtggcagtggctgcgctggcggcctgcctatggggcaacccataggacgctctaatgtggacatggtgtgaagagtctattgagctagttagtagtcctccggcccctgaatgcggctaatcctaactgcggagcacatgccttcaacccagagggtagtgtgtcgtaatgggcaactctgcagcggaaccgactactttgggtgtccgtgtttccttttattctcacattggctgcttatggtgacaatcacagaattgttaccatatagctattggattggccatccggtgtgcaatagagctattatatacctatttgttggctttgtaccactgaccttaaaatctttaaccactcttgagtgtatattaacccttaatacaatcaaac

SEQ ID NO: 18716 - DNA, 723 bp, synthetic construct
  source 1..723: mol_type = other DNA
cactcacaggacccacgcggtgctagcactctggttccacgggacctttgtgcgcctgttttatgtcccctccccaatttgtaacttagaagcaatttgcaacactgatcagtagcaggcatagcgcaccagctatgtcttgatcaagcacttctgtttccccggaccgagtatcaatagactgctcacacggttgaaggagaaagcgtccgttatccggctaactacttcgagaaacccagtagcaccattgaaactacagagtgtttcgctccacacttcccccgtgtagatcaggtcgatgagtcactgcaatccccacgggcgaccgtggcagtggctgcgttggcggcctgcctatggggcaacccataggacgctctaatgtggacatggtgtgaagagtctattgagctagttagtagtcctccggcccctgaatgcggctaatcctaactgcggagcacatgccttcaacccagagggtagtgtgtcgtaatgggcaactctgcagcggaaccgactactttgggtgtccgtgtttccttttattctcacattggctgcttatggtgacaatcacagaattgttaccatatagctattggattggccatccggtgtgcaatagagctattatatacctatttgttggctttgtaccactgaccttaaaatctttaaccactcttgagtgtatattaacccttaatacaatcaaac

SEQ ID NO: 18717 - DNA, 723 bp, synthetic construct
  source 1..723: mol_type = other DNA
cactcacaggacccacgcggtgttagcactctggttccacgggacctttgtgcgcctgttttatatcccctccccaatttgtaacttagaagtaatttgcaacactggtcagtagcaggcatagcgcaccagctatgtcttgatcaagcacttctgtttccccggaccgagtatcaatagactgttcacacggttgaaggagaaagcgtccgttatccggctaactacttcgagaaacccagtagcaccattgaaactacagagtgtttcgctccacacttcccccgtgtagatcaggtcgatgagtcactgcaatccccacgggcgaccgtggcagtggctgcgctggcggcctgcctatggggcaacccataggacgctctaatgtggacatggtgtgaagagtctattgagctagttagtagtcctccggcccctgaatgcggctaatcctaactgcggagcacatgccttcaatccagagggtagtgtgtcgtaatgggcaactctgcagcggaaccgactactttgggtgtccgtgtttccttttattctcacattggctgcttatggtgacaattactgaattgttaccatatagctattggattggccatccggtgtgcaatagagctattatatacctatttgttggctttgtaccactgaccttaaaatctataaccactctcgattgtatattaacccttaatacaatcaaac

SEQ ID NO: 18718 - DNA, 723 bp, synthetic construct
  source 1..723: mol_type = other DNA
cactcacaggacccacgcggtgctagcactctggttccgcgggacctttgtgcgcctgttttatgtcccctccccaatttgtaacttagaagcattttgcaacactgatcagtagcaggcatagcgcaccagctatgtcttgatcaagcacttctgtttccccggaccgagtatcaatagactgttcacacggttgaaggagaaagcgtccgttatccggctaactacttcgagaaacccagtagcaccgttgaaactacagagtgtttcgctccacacttcccccgtgtagatcaggtcgatgagtcactgcaatccccacgggcgaccgtggcagtggctgcgctggcggcctgcctatggggcaacccataggacgctctaatgtggacatggtgtgaagagtctattgagctagttagtagtcctccggcccctgaatgcggctaatcctaactgcggagcacatgccttcaatccagagggtagtgtgtcgtaacgggcaactctgcagcggaaccgactactttgggtgtccgtgtttccttttattctcacattggctgcttatggtgacaattacagaattgttaccatatagctattggattggccatccggtgtgcaatagagctatcatatatctatttgttggctttgtaccactgaccttaaaatctataaccactctcgagtgtatattaacccttaatacaatcaaac

SEQ ID NO: 18719 - DNA, 722 bp, synthetic construct
  source 1..722: mol_type = other DNA
ccatccacagggcccactgggcgctagcacactgattctgcgggatctttgtgcgcctgttttataacccctcccctaagcagtaacttagaagcttcacactatcacgaccaatagcaggcgtggcgcaccagccacgtcttggtcaagcacttctgtttccccggactgagtatcaatagactgctcacgcggttgaaggagaaagcgttcgttatccggctaactacttcgagaaacctagtagcaccgtgaaagttgcggagtgtttcgctcagcacttcccccgtgtagatcaggtcgatgagtcactgtgtaccccacgggtgaccgtgacagtggctgcgttggcggcctgcccatggggtaacccatgggacgctctaatacagacacggtgtgaagagtctattgagctagttagtagccctccggcccctgaatgcggctaatcctaactgcggagcgcgtaccctcaatccagggggcagcgcgtcgtaatgggtaactctgcagcggaaccgactactttgggtgtccgtgtttccttttattccttattggctgcttatggtgacaattgaaaagttgttaccatatagctattggattggccatccggtgaccaacagagctattgtttacctgtttattggatacgtccctctcaatctcaaggtcattcaaactcttgattatatactacttctcaactgtaagaa

SEQ ID NO: 18720 - DNA, 726 bp, synthetic construct
  source 1..726: mol_type = other DNA
acccactcacaggacccacgcggtgctagcactctggttccacggagcctttgtgcgcctgttttacgtcccctccccaatttgtaacttagaagcaatttacagcactgatcaatagcaggcatggcgcaccagctatgtcttgatcaagcacctctgtttccccggaccgagtatcaatagactgttcacacggtcgaaggagaaagcgttcgttatccggctaactacttcgagaaacccagtagcgccattgaaactgctgagtgtttcgctccacacttcccccgtgtagatcaggtcgatgagtcactgcaatccccacgggcgaccgtggcagtggctgcgttggcggcctgcctatggggtaacccataggacgctctaatgtggacatggtgcgaagagtctattgagctagttagtagtcctccggcccctgaatgcggctaatcctaactgcggagcacatgccttcaatccagagggtagtgtgtcgtaatgggcaactctgcagcggaaccgactactttgggtgtccgtgtttccttttattctcacattggctgcttatggtgacaattacagaattgttaccatatagctattggattggccatccggtgtgcaatagagctattatatacctatttgttggctttgtaccactaaccttaaaatctgtaatcactctcgagtatatattgacccttaatacaattaaac

SEQ ID NO: 18721 - DNA, 701 bp, synthetic construct
  source 1..701: mol_type = other DNA
cgttagcacactgattctacggaatctttgtgcgcctgttttataaccccttccccaagcagcaacttagaagcttcgcgccaccacgaccagtagtgggcgtgacacaccagtcacgttttggtcaagcacttctgtttccccggactgagtatcaatagactgctcacgcggttgaaggagaaaacgttcgttatccggccaactacttcgagaaacctagtagcatcgtggaagttgcggagtgtttcgctcagcacttcccccgtgtagatcaggtcgatgagtcactgtaaaccccacgggcgaccgtgacagtggctgcgttggcggcctgcccatggggcaacccatgggacgctctaatacagacacggtgtgaagagtctattgagctagttggtagtcctccggcccctgaatgcggctaatcctaactgcggagcgcgcaccctcaacccagggggcagtgcgtcgtaacgggtaactctgcagcggaaccgactactttgggtgtccgtgtttccttttattctctattggctgcttatggtgacaattgaaaagttgttaccatatagctattggattagccatccggtgaccaacagagctattatttacctgtttgttgggtatatccctctcactctcaaggccattcaaactcttaactatatattactccttaactgtaagag

SEQ ID NO: 18722 - DNA, 723 bp, synthetic construct
  source 1..723: mol_type = other DNA
ccacccacagggcccactgggcgctagcactccgattctgcggaatctttgtgcgcctgttttataaccctcccccgaaacttgcaacttagaagttatgtacgttactgatcaacagcaggcgtggcacaccagccatgtcttgatcaagcacttctgtaaccccggactgagtatcaatagactgctcacgtggtcgaaagagaaaacgttcgttatccggctaactacttcgagaaacctagtagcaccactgaaactgcggagtgtttcgctcagcacttcccccgtgtagatcaggtcgatgagtcactgcttaccccacgggtgaccgtggcagtggctgcgttggcggcctgcctatggggcaacccataggacgctctaaagtggacatggtgtgaagagtctattgagctagttagtagtcctccggcccctgaatgcggctaatcctaactgcggagcgcatgcccccaaaccagagggtggtgcgtcgtaacgggtaactctgcagcggaaccgactactttgggtgtccgtgtttcttttattctcataatggctgcttatggtgacaattgaggaattgttaccatatagctattggattggccatccggtgtgcaacaaagctattatctacttgtttgttggatatattccattgacacctaaatccttcaatacattgcactatattctgacgctgaacgcaagaaa

SEQ ID NO: 18723 - DNA, 723 bp, synthetic construct
  source 1..723: mol_type = other DNA
ccacccacagggcccactgggcgctagcactccgattctgcggaatctttgtgcgcctgttttataaccctcccccgaaacttgcaacttagaagttatgtacgttactgatcaacagcaggcgtggcataccagccatgtcttgatcaagcacttctgtaaccccggactgagtatcaatagactgctcacgtggtcgaaagagaaaacgttcgttatccggctaactacttcgagaaacctagtagcaccactgaaactgcggagtgtttcgctcagcacttcccccgtgtagatcaggtcgatgagtcactgcttaccccacgggtgaccgtggcagtggctgcgttggcggcctgcctatggggcaacccataggacgctctaaagtggacatggtgtgaagagtctattgagctagttagtagtcctccggcccctgaatgcggctaatcctaactgcggagcgcatgcccccaaaccagagggtggtgcgtcgtaacgggtaactctgcagcggaaccgactactttgggtgtccgtgtttcttttattctcataatggctgcttatggtgacaattgaagaattgttaccatatagctattggattggccatccggtgtgcaacagagctattatctacttgtttgttggatacattccattgacacctaaatccttcaatacattgcactatattctaacgctgaacgcaagaaa

SEQ ID NO: 18724 - DNA, 723 bp, synthetic construct
  source 1..723: mol_type = other DNA
ccacccacagggcccactgggcgctagcactccgattctgcggaatctttgtgcgcctgttttataaccctcccccaaaacttgcaacttagaagttatgtacgttactgatcaacagcaggcgtggcacaccagccatgtcttgatcaagcacttctgtaaccccggactgagtatcaatagactgctcacgtggtcgaaagagaaaacgttcgttatccggctaactacttcgagaaacctagtagcaccactgaaactgcggagtgtttcgctcagcacttcccccgtgtagatcaggtcgatgagtcactgcttaccccacgggtgaccgtggcagtggctgcgttggcggcctgcctatggggcaacccataggacgctctaaagtggacatggtgtgaagagtctattgagctagttagtagtcctccggcccctgaatgcggctaatcctaactgcggagcgcatgcccccaaaccagagggtggtgcgtcgtaacgggtaactctgcaatggaaccgactactttgggtgtccgtgtttcttttattctcataatggctgcttatggtgacaattggggaattgttaccatatagctattggattggccatccggtgtgcaacagagctattatctatttgtttgttggatacattccattgacacctaaatctttcaatacattgcactatattctaacgttgaacgcaagaaa

SEQ ID NO: 18725 - DNA, 723 bp, synthetic construct
  source 1..723: mol_type = other DNA
ccacctacagggcccactgggcgctagcactccgattctgcggaatctttgtgcgcctgttttataaccctcccccgaaacttgcaacttagaagttatgtacgttactgatcaacagcaggtgtggcacaccagccatgtcttgatcaagcacttctgtaaccccggactgagtatcaatagactgctcacgtggtcgaaagagaaaacgttcgttatccggctaactacttcgagaaacctagtagcaccactgaaactgcggagtgtttcgctcagcacttcccccgtgtagatcaggtcgatgagtcactgcttaccccacgggtgaccgtggcagtggctgcgttggcggcctgcctatggggcaacccataggacgctctaaagtggacatggtgtgaagagtctattgagctagttagtagtcctccggcccctgaatgcggctaatcctaactgcggagcgcatgcccccaaaccagagggtggtgcgtcgtaacgggtaactctgcagcggaaccgactactttgggtgtccgtgtttcttttattctcataatggctgcttatggtgacaattgaggaattgttaccatatagctattggattggccatccggtgtgcaacagagctattatctacttgtttgttggatatattccattgacacctaaatccttcaatacattgcactatattctgacgctgaacgcaagaaa

SEQ ID NO: 18726 - DNA, 723 bp, synthetic construct
  source 1..723: mol_type = other DNA
ccacccgcagggcccactgggcgctagcactccgattctgcggaatctttgtgcgcctgttttataaccctcccccgaaacttgcaacttagaagttatgtacgttactgatcaacagcaggcgtggcataccagccatgtcttgatcaagcacttctgtaaccccggactgagtatcaatagactgctcacgtggtcgaaagagaaaacgttcgttatccggctaactacttcgagaaacctagtagcaccactgaaactgcggagtgtttcgctcagcacttcccccgtgtagatcaggtcgatgagtcactgcttaccccacgggtgaccgtggcagtggctgcgttggcggcctgcctatggggcaacccataggacgctctaaagtggacatggtgtgaagagtctattgagctagttagtagtcctccggcccctgaatgcggctaatcctaactgcggagcgcatgcccccaaaccagagggtggtgcgtcgtaacgggtaactctgcagcggaaccgactactttgggtgtccgtgtttcttttattctcataatggctgcttatggtgacaattgaagaattgttaccatatagctattggattggccatccggtgtgcaacagagctattatctacttgtttgttggatacattccattgacacctaaatccttcaatacattgcactatattctaacgctgaacgcaagaaa

SEQ ID NO: 18727 - DNA, 723 bp, synthetic construct
  source 1..723: mol_type = other DNA
ccacccacagggcccactgggcgctagcactccgattctgcggaatctttgtgcgcctgttttataaccctcccccgaaacttgcaacttagaagttatgtacgttactgatcaacagcaggcgtggcataccagccatgtcttgatcaagcacttctgtaaccccggactgagtatcaatagactgctcacgtggtcgaaagagaaaacgttcgttatccggctaactacttcgagaaacctagtagcaccactgaaactgcggagtgtttcgctcagcacttcccccgtgtagatcaggtcgatgagtcactgcttaccccacgggtgaccgtggcagtggctgcgttggcggcctgcctatggggcaacccataggacgctctaaagtggacatggtgtgaagagtctattgagctagttagtagtcctccggcccctgaatgcggctaatcctaactgcggagcgcatgcccccaaaccagagggtggtgcgtcgtaacgggtaactctgcagcggaaccgactactttgggtgtccgtgtttcttttactctcataatggctgcttatggtgacaattgaagaattgttaccatatagctattggattggccatccggtgtgcaacagagctattatctacttgtttgttggatacattccattgacacctaaatccttcaatacattgcactatattctaacgctgaacgcaagaaa

SEQ ID NO: 18728 - DNA, 723 bp, synthetic construct
  source 1..723: mol_type = other DNA
ccacccacggggcccactgggcgctagcactccgattctgcggaatctttgtgcgcctgttttataaccctcccccgaaacttgcaacttagaagttatgtacgttactgatcaacagcaggcgtggcataccagccatgtcttgatcaagcacttctgtaaccccggactgagtatcaatagactgctcacgtggtcgaaagagaaaacgttcgttatccggctaactacttcgagaaacctagtagcaccactgaaactgcggagtgtttcgctcagcacttcccccgtgtagatcaggtcgatgagtcactgcttaccccacgggtgaccgtggcagtggctgcgttggcggcctgcctatggggcaacccataggacgctctaaagtggacatggtgtgaagagtctattgagctagttagtagtcctccggcccctgaatgcggctaatcctaactgcggagcgcatgcccccaaaccagagggtggtgcgtcgtaacgggtaactctgcagcggaaccgactactttgggtgtccgtgtttcttttattctcataatggctgcttatggtgacaattgaagaattgttaccatatagctattggattggccatccggtgtgcaacagagctattatctacttgtttgttggatacattccattgacacctaaatccttcaatacattgcactatattctaacgctgaacgcaagaaa

SEQ ID NO: 18729 - DNA, 723 bp, synthetic construct
  source 1..723: mol_type = other DNA
cactcacaggacccacgcggtgctagcactctggttccacgggacctttgtgcgcctgttttatatcccctccccaatttgtaacttagaagcaatttgcaacaccgatcagtagcaggcatagcgcaccagctatgtcttgatcaagcacttctgtttccccggaccgagtatcaatagactgttcacacggttgaaggagaaagcgtccgttatccggctaactacttcgagaaacccagtagcaccattgaaactacagagtgtttcgctccacacttcccccgtgtagatcaggtcgatgagtcactgcaatccccacgggcgaccgtggcagtggctgcgctggcggcctgcctatggggcaacccataggacgctctaatgtggacatggtgtgaagagtctattgagctagttagtagtcctccggcccctgaatgcggctaatcctaactgcggagcacatgccttcaacccagagggtagtgtgtcgtaatgggcaactctgcagcggaaccgactactttgggtgtccgtgtttccttttattctcacattggctgcttatggtgacaattacagaattgttaccatatagctattggattggccatccggtgtgcaatagagctattatatacctatttgttggctttgtaccactgaccttaaaatctttaaccactcttgagtgtatattaacccttaatacaatcaaac

SEQ ID NO: 18730 - DNA, 723 bp, synthetic construct
  source 1..723: mol_type = other DNA
cactcacaggacccacgcggtgctagcactctggttccacgggacctttgtgcgcctgttttatgtcccctccccaatttgtaacttagaagcaatttgcaacactgatcagtagcaggcatagcgcaccagctatgtcttgatcaagcacttctgtttccccggaccgagtatcaatagactgttcacacggttgaaggagaaagcgtccgttatccggctaactacttcgagaaacccagtagcaccattgaaactacagagtgtttcgctccacacttcccccgtgtagatcaggtcgatgagtcactgcaatccccacgggcgaccgtggcagtggctgcgctggcggcctgcctatggggcaacccataggacgctctaatgtggacatggtgtgaagagtctattgagctagttagtagtcctccggcccctgaatgcggctaatcctaactgcggagcacatgccttcaatccagagggtagtgtgtcgtaatgggcaactctgcagcggaaccgactactttgggtgtccgtgtttccttttattctcacattggctgcttatggtgacaattactgaattgttaccatatagctattggattggccatccggtgtgcaatagagctattatatacctatttgttggctttgtaccactgaccttaaaatctataaccactctcgagtgtatattaaccctcaatacaatcaaac

SEQ ID NO: 18731 - DNA, 723 bp, synthetic construct
  source 1..723: mol_type = other DNA
cactcacagggcccacgcggtgctagcactctggttctacggaacctttgtgcgcctgttttgcgtcccctccccaatttgtaacctagaagcaatttacaacactgatcaatagcaggcatggcgcaccagctatgtcttgatcaagcacctctgtttccccggaccgagtatcaatagactgttcacacggtcgaaggagaaagcgttcgttatccggctaactacttcgagaaacccagtagcgccattgaaactgcagagtgtttcgctccacacttcccccgtgtagatcaggtcgatgagtcactgcaatccccacgggcgaccgtggcagtggctgcgttggcggcctgcctatggggtaacccataggacgctctaatgtggacatggtgcgaagagtctattgagctagttagtagtcctccggcccctgaatgcggctaatcctaactgcggagcacatgccttcaatccagagggtagtgtgtcgtaatgggcaactctgcagcggaaccgactactttgggtgtccgtgtttccatttattctcacattggctgcttatggtgacaattatagaattgttaccatatagctattggattggccatccggtgtgcaatagagctattatatacctatttgttggctttgtaccactaacctcataatctgtaatcactctcaagtatatattgacccttaatacaattaagc

SEQ ID NO: 18732 - DNA, 724 bp, synthetic construct
  source 1..724: mol_type = other DNA
tacccactcacagggcccactgggcgttagcactctggtactaaggtacctttgtgcgcctgttttaactcccttcccctaaagtaacttagaagcagtgaactaatgatcaatagtgggcatgacataccagccatgtctcgatcaagcacttctgtttccccggactgagtatcaataggctgctcgcgcggctgaaagagaaaacgttcgttacccggccagctacttcgagaagcttagtaccatcatgaacgaagtagagcgtttcgctcagcacaatcccagtgtagatcaggctgatgagtcactgcaaaccccatgggcgaccatggcagtggctgcgttggcggcctgcccatggagaaatccatgggacgctctagttctgacatggtgcgaagagcctattgagctagctggtagtcctccggcccctgaatgcggctaatcctaactgcggagcacgcacccacaaaccagtgggcagtgtgtcgtaatgggtaactctgcagcggaaccgactactttgggtgtccgtgtttccttttattcttatattggctgcttatggtgacaatcaaagagttgttaccatatagctattggattggccatccggtgtgcaatagggcaattgtttacctatttattgggtttgtaccactaacgttgaagtctgtgatcacacttgactttatcctgaacctcaatacagtaaaac

SEQ ID NO: 18733 - DNA, 724 bp, synthetic construct
  source 1..724: mol_type = other DNA
tacccactcacagggcccactgggcgttagcactctggtactaaggtacctttgtgcgcctgttttaactcccttcccctaaagtaacttagaagcagtaaactaatgatcaatagtgggcatgacacaccagccatgtctcgatcaagcacttctgtttccccggactgagtatcaataggctgctcgcgcggctgaaagagaaaacgttcgttacccggccagctacttcgagaagcttagtaccatcatgaacgaagtagagcgtttcgctcagcacaaccccagtgtagatcaggctgatgagtcactgcaaaccccatgggcgaccatggcagtggctgcgttggcggcctgcccatggagaaatccgtgggacgctctagttctgacatggtgcgaagagcctattgagctagctggtagtcctccggcccctgaatgcggctaatcctaactgcggagcacgcacccacaaaccagtgggcagtgtgtcgtaatgggtaactctgcagcggaaccgactactttgggtgtccgtgtttccttttattcttatattggctgcttatggtgacaatcaaagagttgttaccatatagctattggattggccatccggtgtgcaacagagcaattgtttacctatttattgggtttgtaccactaacgttgaagtctgtgatcacacttgactttatcctgaacctcaatacagtaaaac

SEQ ID NO: 18734 - DNA, 724 bp, synthetic construct
  source 1..724: mol_type = other DNA
tacccactcacagggcccactgggcgttagcactctggtactaaggtacctttgtgcgcctgttttaactcccttcccctaaagtaacttagaagcagtaaactaatgatcaatagtgggcatgacataccagccatgtctcgatcaagcacttctgtttccccggactgagtatcaataggctgctcgcgcggctgaaagagaaaacgttcgttacccggccagctacttcgagaagcttagtaccatcatgaacgaagtagagcgtttcgctcagcacaatcccagtgtagatcaggctgatgagtcactgcaaaccccatgggcgaccatggcagtggctgcgttggcggcctgcccatggagaaatccatgggacgctctagttctgacatggtgcgaagagcctattgagctagctggtagtcctccggcccctgaatgcggctaatcctaactgcggagcacgcacccacaaaccagtgggcagtgtgtcgtaatgggtaactctgcagcggaaccgactactttgggtgtccgtgtttccttttattcttatattggctgcttatggtgacaatcaaagagttgttaccatatagctattggattggccatccggtgtgcaatagagcaattgtttacctatttattgggtttgtaccactaacgttgaagtctgtgatcacacttgactttatcctgaacctcaatacagtaaaac

SEQ ID NO: 18735 - DNA, 724 bp, synthetic construct
  source 1..724: mol_type = other DNA
tacccactcacagggcccactgggcgttagcactctggtactaaggtacctttgtgcgcctgttttaactcccttcccctgaagtaacttagaagcagtaaactaatgatcaatagtgggcatgacataccagccatgtctcgatcaagcacttctgtttccccggactgagtatcaataggctgctcgcgtggctgaaagagaaaacgttcgttacccggccagctacttcgagaagcttagtaccatcatgaacgaagcagagcgtttcgctcagcacaatcccagtgtagatcaggctgatgagtcactgcaaaccccatgggcgaccatggcagtggctgcgttggcggcctgcccatggagaaatccatgggacgctctaattctgacatggtgcgaagagcctattgagctagctggtagtcctccggcccctgaatgcggctaatcctaactgcggagcacgcacccacaaaccagtgggcagtgtgtcgtaatgggtaactctgcagcggaaccgactactttgggtgtccgtgtttccctttattcttatattggctgcttatggtgacaatcaaagagttgttaccatatagctattggattggccatccggtgtgcaacagagcaattgcttacctattcattgggtttgtaccactgacgttgaagtctgtgaccacactcaactttatcctgaacctcaatacagtaaaac

SEQ ID NO: 18736 - DNA, 724 bp, synthetic construct
  source 1..724: mol_type = other DNA
tacccactcacagggcccactgggcgttagcactctggtactaaggtacctttgtgcgcctgttttaactccctccccctgaagtaacttagaagcagtaaactaatgatcaatagtgggcatgacataccagccatgtctcgatcaagcacttctgtttccccggactgagtatcaataggctgctcgcgtggctgaaagagaaaacgtccgttacccggccagctacttcgagaagcttagtaccatcatgaacgaagcagagcgtttcgctcagcacaatcccagtgtagatcaggctgatgagtcactgcaaaccccatgggcgaccatggcagtggctgcgttggcggcctgcccatggagaaatccatgggacgctctaattctgacatggtgcgaagagcctattgagctagctggtagtcctccggcccctgaatgcggctaatcctaactgcggagcacgcacccacaaaccagtgggcagtgtgtcgtaatgggtaactctgcagcggaaccgactactttgggtgtccgtgtttccctttattcttatattggctgcttatggtgacaatcaaagagttgttaccatatagctattggattggccatccggtgtgtaacagagcaattgtttacctattcattgggtttgtaccactgacgttgaagtctgtgaccacactcaactttatcctgaatctcaatacagtaaaac

SEQ ID NO: 18737 - DNA, 724 bp, synthetic construct
  source 1..724: mol_type = other DNA
cactcacaggacccacgcggtgctagcactctggttccacgggacctttgtgcgcctgttttatgtccccacccccaatttgtaacttagaagcaatttgcaacactgatcagtagcaggcatagcgcaccagctatgtcttgatcaagcacttctgtttccccggaccgagtatcaatagactgttcacacggttgaaggagaaagcgtccgttatccggctaactacttcgagaagcccagtagcaccattgaaactacagagtgtttcgctccacacttcccccgtgtagatcaggtcgatgagtcactgcaatccccacgggcgaccgtggcagtggctgcgctggcggcctgcctatggggcaacccataggacgctctaatgtggacatggtgtgaagagtctattgagctagttagtagtcctccggcccctgaatgcggctaatcctaactgcggagcacatgccttcaacccagagggtagtgtgtcgtaatgggcaactctgcagcggaaccgactactttgggtgtccgtgtttccttttattctcacattggctgcttatggtgacaattacagaattgttaccatatagctattggattggccatccggtgtgcaatagagctattatatacctatttgttggctttgtaccactgaccttaaaatctttaaccactcttgagtgtatattaacccttaatacaatcaaac

SEQ ID NO: 18738 - DNA, 699 bp, synthetic construct
  source 1..699: mol_type = other DNA
agctgtaactgattctgcgggatctttgtacgcctgttttataaccccccccctaagcagtaacttagaagccttacactatcacgaccaatagtaggcgtggcgcaccagccgcgtcttggtcaagcacttctgtttccccggactgagtatcaatagactgctcacgcggttgaaggagaaaacgttcgttatccggctaactacttcgagaaacctagtagcaccgtgaaagttgcagagcgtttcgctcagcacttcccccgtgtagatcaggccgatgagtcactgtgaaccccacgggtgaccgtgacagtggctgcgttggcggcctgcccatggggtaacccatgggacgctctaatacagacacggtgtgaagagtctattgagctagttagtagtcctccggcccctgaatgcggctaatcctaactgcggagcgcgcgccctcaatccagggggtagtgcgtcgtaatgggtaactctgcagcggaaccgactactttgggtgtccgtgtttccttttatcctttattggctgcttatggtgacaattgaaaagttgttgccatatagctattggattggccatccggtaaccaacagagctattgtttacctgtttgttggatacgtccctctcaatctcaaggctattcaaacccttgattacacactacttctcaactgtaagaa

SEQ ID NO: 18739 - DNA, 722 bp, synthetic construct
  source 1..722: mol_type = other DNA
ccacccacagggcccactgggcgctagcacactgattttacggaatctttgtgcgcctgttttataacccctcccctaagcagtaacttagaagcttcacattatcacgaccaatagcgggcgtggcgcaccagtcacgtcttggtcaagcactcctgtttccccggactgagtatcaatagactgctcacgcggttgaaggagaaaatgttcgttatccggctaactacttcgagaaacctagtagcaccgtgaaagttgcggagtgtttcgctcagcacttcccccgtgtagatcaggtcgatgagtcactgtgaaccccacgggtgaccgtgacagtggctgcgttggcggcctgcccatggggtaactcatgggacgctctaatacagacacggtgtgaagagtctattgagctagttagtagtcctccggcccctgaatgcggctaatcctaactgcggagcgcgcaccttcaatccaggaggcggcgcgtcgtaatgggtaactctgcagcggaaccgactactttgggtgtccgtgtttccttttattccttattggctgcttatggtgacaattgaaaagttgttaccatatagctattggattggccatccggtaaccaacagagctattgtttacctgttcgttggatacgtccctctcgacttcaaggccattcaaactcttgattatatactacatctcaactgtaagaa

SEQ ID NO: 18740 - DNA, 722 bp, synthetic construct
  source 1..722: mol_type = other DNA
ccacccacagggcccactgggcgctagcacactgattttacggaatctttgtgcgcctgttttataacccctcccctaagcagtaacttagaagcttcacattatcacgaccaatagcgggcgtggcgcaccagtcacgtcttggtcaagcactcctgtttccccggactgagtatcaatagactgctcacgcggttgaaggagaaaatgttcgttatccggctaactacttcgagaaacctagtagcaccgtgaaagttgcggagtgtttcgctcagcacttcccccgtgtagatcaggtcgatgagtcactgtgaaccccacgggtgaccgtgacagtggctgcgttggcggcctgcccatggggtaactcatgggacgctctaatacagacacggtgtgaagagtctattgagctagttagtagtcctccggcccctgaatgcggctaatcctaactgcggagcgcgcaccttcaatccaggaggcggcgcgtcgtaatgggtaactctgcagcggaaccgactactttgggtgtccgtgtttccttttattccttattggctgcttatggtgacaattgtaaagttgttaccatatagctattggattggccatccggtaaccaacagagctattgtttacctgttcgttggatacgtccctctcgacttcaaggccattcaaactcttgattatatactacatctcaactgtaagaa

SEQ ID NO: 18741 - DNA, 746 bp, synthetic construct
  source 1..746: mol_type = other DNA
ttaaaacagcctgtgggttgtacccacccacagggcccactgggcgttagcacactgattctacggaatctttgtgcgcctgttttatatccctcccctaaaatagtaacttagaagttgaacatttacacgaccaatagcaggcgtggcgcaccagccacgtcttggtcaagcactcctatttccccggactgagtatcaataggctgctcacgtggctgaaggagaaagtgttcgttatccggctaactacttcgggaaacctagtaacaccatgaaagttgcagagtgtttcgctcagcacttcccccgtgtagatcaggctgatgagtcactgcgaaccccacgggcgaccgtggcagtggctgcgttggcggcctgcctatggggcaacccataggacgctctaatacagacatggtgcgaagagtctactgagctagttggtattcctccggcccctgaatgcggctaatcctaactgcggagcacatgccctcaatccagagggtggtgtgtcgtaacgggcaactctgcagcggaaccgactactttgggtgtccgtgtttccttttatccttatactggctgcttatggtgacaattgaaaagttgttaccatatagctattggattggccatccggtgactaacagagctttgatttatcaattcattgggttcgtacccctatcatctacagtttattcaactttggtgtacttattatatcttaatagcaagaa

SEQ ID NO: 18742 - DNA, 723 bp, synthetic construct
  source 1..723: mol_type = other DNA
cactcacaggacccacgcggtgctagcactctggttccacgggacctttgtgcgcctgttttatgtcccctccccaatttgtaacttagaagcaatttgcaacactgatcagtagcaggcatagcgcaccagctatgtcttgatcaagcacttctgtttccccggaccgagtatcaatagactgttcacgcggttgaaggagaaagcgtccgttatccggctaactacttcgagaaacccagtagcaccattgaaactacagagtgtttcgctccacacttcccccgtgtagatcaggtcgatgagtcactgcaatccccacgggcgaccgtggcagtggctgcgctggcggcctgcctatggggcaacccataggacgctctaatgtggacatggtgtgaagagtctattgagctagttagtagtcctccggcccctgaatgcggctaatcctaactgcggagcacatgccttcaacccagagggtggtgtgtcgtaatgggcaactctgcagcggaaccgactactttgggtgtccgtgtttccttttattcttacattggctgcttatggtgacaattacagaattgttaccatatagctattggattggccatccggtgtgcaatagagctattatatacctatttgttggctttgtaccactgaccttaaaatctttaaccactcttgagtgtatattaacccttaatacaatcaaac

SEQ ID NO: 18743 - DNA, 697 bp, synthetic construct
  source 1..697: mol_type = other DNA
tcgcagcactctggtacttcggtacctttgtgcgcctgttttatacccccccccagtgaaacttagaagcagcaaaccacgatcaatagtaggcatagcactccagttatgtcttgatcaagcacttctgtttccccggactgagtatcaatagaccgctcgcgcggttgaaggagaaaacgttcgttacccggccaactacttcggaaaacctagtaacaccatgaaagttgcggagagcttcgttcagcactcccccagtgtagatcaggtcgatgagtcaccgcattccccacgggcgaccgtggcggtggctgcgttggcggcctgcccatggggtaacccatggggcgctctaatacggacatggtgtgaagagtctactgagctagttggtagtcctccggcccctgaatgcggctaatcccaactgcggagcacatgcccacaagccagcgggtagtgtgtcgtaatgggtaactctgcagcggaaccgactactttgggtgtccgtgtttccttttatctttatattggctgcttatggtgacaatcagagaattgttaccatatagctattggattggccatccggtgtgcaatagagcaattatttacctatttgttggttttgtaccattaactttggcttctgtgaccacccttaattatatcttgacccttaacacagttaaac

SEQ ID NO: 18744 - DNA, 721 bp, synthetic construct
  source 1..721: mol_type = other DNA
ccacccacagggcccactgggcgctagcacactggttctgcgggacctttgtgcgcctgttttacaacccttccctaatcagtaacttagaagctttgtacaattatggccaatagtaggcgtggcgcgccagtcacgtcttggtcaagcacttctgtatccccggactgagtatcaatagactgctcacgcggttgaaggagaaaacgttcgttacccggctaactacttcgagaaacctagtagtaccatgaaagttgcggagtgtttcgctcagcacttcccccgtgtagatcaggtcgatgagtcactgtaaaccccacgggcgaccgtgacagtggctgcgttggcggcctgcccatggggtaacccatgggacgctctaatacagacatggtgcgaagagtctattgagctagttagcagtcctccggcccctgaatgcggctaatcttaactgcggagcgcgcaccctcaacccagggggcagcgcgtcgtaatgggtaactctgcagcggaaccgactactttgggtgtccgtgtttccttttattctttattggctgcttatggtgacaattgaaaagttgttaccatatagctattggattggccatccggtgtctaacagagctattgtttatctattcattggattcgtccctctcaatctcaaggccattcaaactctcgattacatattgctccttaattgtaagaa

SEQ ID NO: 18745 - DNA, 721 bp, synthetic construct
  source 1..721: mol_type = other DNA
ccacccatagggcccattgggcgctagcacactgatttttcggaatctttgtgcgcctgttttataacccttcccccaagcagcaacttagaagtattgcacaaccgcggccattagcaggcgtgacacgccagtcatgtcttggtcaagcacttctgtatccccggactgagtatcaatagactgctcacgcggttgaaggagaaaacgttcgttatccggctaactacttcgggaagcctagtagcaccttgaaagttgcagagtgtttcgctcagcacttcccccgtgtagatcaggccgatgagccactgtaaaccccacgggcgaccgtgacagtggctgcgctggcggcctgcccatgggaaacccatgggacgctctaatactgacatggtgtgaagagtctactgagctagttagtagtcctccggcccctgaatgcggctaatcctaactgcggagcacacaccctcaacccagggggcagtgtgtcgtaatgggtaactctgcagcggaaccgactactttgggtgaccgtgtttccttttattccttattggctgcttatggtgacaattgaaaagttgttaccatatagctattggattggccatccggtgtctaacagagccattgtttacttatttgttggatacgttcctcttaatttcaaggctattcaaactcttgattatatattgctccttaattataagaa

SEQ ID NO: 18746 - DNA, 720 bp, synthetic construct
  source 1..720: mol_type = other DNA
ccactcgcagggcctactgggcgctagcactctggtactaaggtacctttgtgcgcctgttttatttcccttccccaaagcaacttagaagttgtgtgccaacgatcaatagtaggtatgacacgccagtcatatcttgatcaagcacttctgtttccccggactgagtatcaataggctgctcgcgcggctgaaggagaaaacgttcgttacccggccaactacttcgagaagcttagtaccaccatgaacgatgcagagtgtttcgttcagcacaaccccagtgtagatcaggctgatgagtcactgcaacccccatgggcgaccatggcagtggctgcgttggcggcctgcccatggagaaatccatgggacgctctaattctgacatggtgcgaagagcctattgagctagctggtagtcctccggcccctgaatgcggctaatcccaactgcggagcacatgctcacaaaccagtgggtggtgtgtcgtaatgggcaactctgcagcggaaccgactactttgggtgtccgtgtttccttttattcttatgttggctgcttatggtgacaattaaagaattgttaccatatagctattggattggccatccggtgtgcaacagagcaattgtttacctatttgttggtttcgtaccactatcactgaaatccgtgaccactctcaaatttattttgacccttaattcaatcaaac

SEQ ID NO: 18747 - DNA, 721 bp, synthetic construct
  source 1..721: mol_type = other DNA
ccccagggggccactggggcgctagcactccgattctgcggaatctttgtgcgcctgttttataaccctcccccgaaacttgtaacttagaagttatgtacgttaccgatcagcagcaggcgtggcacaccagccatgtcttgatcaagcacttctgtacccccggactgagtatcaatagactgctcacgtggtcgaaggagaaaacgttcgttatccggctaactacttcgagaagcctagtagcgccactgaaactgcggagtgtttcgctcagcacttcccccgtgtagatcaggtcgatgagtcactgctcaccccacgggcgaccgtggcagtggctgcgttggcggcctgcctatggggcaacccataggacgctctaaagtggacatggtgcgaagagtctattgagctagttagtagtcctccggcccctgaatgcggctaatcctaactgcggagcgcatgcccccaaaccagagggtggtgcgtcgtaacgggtaactctgcagcggaaccgactactttgggtgtccgtgtttcctttattcttataatggctgcttatggtgacaattgaggaattgttaccatatagctattggattggccatccggtgtgcaacagagctattgtctacttgtttgttggatacattccattaacacctaaatccttcaatacattacactatattctaacgctgaacgcaagaaa

SEQ ID NO: 18748 - DNA, 724 bp, synthetic construct
  source 1..724: mol_type = other DNA
cacccactcacagggcccactgggcgcaagcactctggtaccccggtacctttgtgcgcctgttttataccccctccccccaatgaaacttagaagcagcaaaccacgatcaatagtaggcataacgctccagttatgtcttgatcaagcacttctgtttccccggactgagtatcaatagactgctcgcgcggttgaaggagaaaacgttcgttatccggctagctacttcggaaaacctagtaacaccatgaaagttgcggagagcttcgttcagcactcccccagtgtagatcaggtcgatgagtcaccgcattccccacgggcgaccgtggcggtggctgcgttggcggcctgcccatggggtaacccatggggcgctctaatacggacatggtgtgaagagtctactgagctagttagtagtcctccggcccctgaatgcggctaatcctaactgcggagcacacgcccacaagccagcgggtagtgtgtcgtaacgggtaactctgcagcggaaccgactactttgggtgtccgtgtttccttttatctttatattggctgcttatggtgacaattaaagaattgttaccatatagctattggattggccatccggtgtgcaacagagcaattatttaccaatttattggttttgtaccattaaccttgaattctgtgaccacccttaattatatcttgacccttaacgcagctaaac

SEQ ID NO: 18749 - DNA, 724 bp, synthetic construct
  source 1..724: mol_type = other DNA
cacccactcacagggcccactgggcgcaagcactctggtaccccggtacctttgtgcgcctgttttatacccccctcccccaatgaaacttagaagcagcaaaccacgatcaatagtaggcataacgctccagttatgtcttgatcaagcacttctgtttccccggactgagtatcaatagactgctcgcgcggttgaaggagaaaacgttcgttatccggctagctacttcggaaaacctagtaacgccatgaaagttgcggagagcttcgttcagcactcccccagtgtagatcaggtcgatgagtcaccgcattccccacgggcgaccgtggcggtggctgcgttggcggcctgcccatggggtaacccatggggcgctctaatacggacatggtgtgaagagtctactgagctagttagtagtcctccggcccctgaatgcggctaatcccaactgcggagcacacgcccacaagccagcgggtagtgtgtcgtaacgggtaactctgcagcggaaccgactactttgggtgtccgtgtttccttttatctttatattggctgcttatggtgacaattaaagaattgttaccatatagctattggattggccatccggtgtgcaacagagcaattatttaccaatttattggttttgtaccattaaccttgaattctgtgaccacccttaattatatcttgacccttaacgcagctaaac

SEQ ID NO: 18750 - DNA, 726 bp, synthetic construct
  source 1..726: mol_type = other DNA
cacccactcacaggacccacgcggtgctagcactctggttctacggaacccttgtgcgcctgttttacgccccaccccaacttgtaacttagaagcaatttacaacactgatcaatagtaggcgtggcgcaccagctatgtcttgatcaagcacttctgtttccccggaccgagtatcaatagactgttcacgcggttgaaggagaaagcgtccgttatccggctaactacttcgagaaacccagtaacgccattgaaactgcagagtgtttcgctccacacttcccccgtgtagatcaggtcgatgagtcactgcaatccccacgggcgaccgtggcagtggctgcgctggcggcctgcctatggggcaacccataggacgctctaatgtggacatggtgtgaagagtctattgagctagttagtagtcctccggcccctgaatgcggctaatcctaactgcggagcacatgctctcaatccagagggtagtgtgtcgtaatgggcaactctgcagcggaaccgactactttgggtgtccgtgtttccttttattcttacattggctgcttatggtgacaatcactgaattgttaccatatagctattggattggccatccggtgtgcaacagagctattatatacctatttgttggctttgtaccactaaccttaaaatctacaaccactctcaactatatattaacccttaatacaatcaaac

SEQ ID NO: 18751 - DNA, 697 bp, synthetic construct
  source 1..697: mol_type = other DNA
aaaacagcctgtgggttgtacccactcacagggcccactgggcgctagcactctgatactgcggtacctttgtgcgcctgttttaccaccccaccccatctgaaacgtagaagcaatgcacaaccgaccaatagtgggtgtggcgcaccagccacatcttggtcaagcacttctgtttccccgggtttagtatcaataagctgctcacgcggctgaaggagaaaacacccgttatccggccgactacttcgagaaacctagtaccgccatgaacgttgcaaggcgtttcgctcagcacttcccccgtgtagatcaggctgatgagtcaccgcatccccctcgggcgaccgtggcggtggctgcgctggcggcctgcctatgggcttgcccataggacgccttaatactaacatggtgcgaagagtctattgagctagttggtagtcctccggcccctgaatgcggctaatcctaactgcggagcacatactcacaaaccagtgagcggtgtgtcgtaacgggcaactctgcagcggaaccgactactttgggtgtccgtgtttccttttatccttatactggctgcttatggtgacaattaaagaattgttaccatatagctattggattggccatccggtgtctaacagagatattatatacttgtttgttggattcatcccctaaactcaaaaag

SEQ ID NO: 18752 - DNA, 723 bp, synthetic construct
  source 1..723: mol_type = other DNA
cacccactcacagggcccactgggcgcaagcactctggtaccccggtacctttgtgcgcctgttttatacccccctccccaatgaaacttagaagcagcaaaccacgatcaatagtaggcataacgctccagttatgtcttgatcaagcacttctgtttccccggactgagtatcaatagactgctcgcgcggttgaaggagaaaacgttcgttatccgactagctacttcggaaaacctagtaacaccatgaaagttgcggagagcttcgttcagcactcccccagtgtagatcaggtcgatgagtcaccgcattccccacgggcgaccgtggcggtggctgcgttggcggcctgcccatggggtaacccatggggcgctctaatacggacatggtgtgaagagtctactgagctagttagtagtcctccggcccctgaatgcggctaatcctaactgcggagcacacgcccacaagccagcgggtagtgtgtcgtaacgggtaactctgcagcggaaccgactactttgggtgtccgtgtttccctttatctttatattggctgcttatggtgacaattaaagaattgttaccatatagctattggattggccatccggtgtgcaacagagcaattatttaccaatttattggttttgtaccattaaccttgaattctgtgaccacccttaattatatcttgacccttaacgcagctaaac

SEQ ID NO: 18753 - DNA, 723 bp, synthetic construct
  source 1..723: mol_type = other DNA
cacccactcacagggcccactgggcgcaagcactctggtaccccggtacctttgtgcgcctgttttataccccccctcccaatgaaacttagaagcagcaaaccacgatcaatagtaggcataacgctccagttatgtcttgatcaagcacttctgtttccccggactgagtatcaatagactgctcgcgcggttgaaggagaaaacgttcgttatccggctagctacttcggaaaacctagtaacaccatgaaagttgcggagagcttcgttcagcactcccccagtgtagatcaggtcgatgagtcaccgcattccccacgggcgaccgtggcggtggctgcgttggcggcctgcccatggggtaacccatggggcgctctaatacggacatggtgtgaagagtctactgagctagttagtagtcctccggcccctgaatgcggctaatcccaactgcggagcacacgcccacaagccagcgggtagtgtgtcgtaacgggtaactctgcagcggaaccgactactttgggtgtccgtgtttccttttatctttatattggctgcttatggtgacaattaaagaattgttaccatatagctattggattggccatccggtgtgcaacagagcaattatttaccaatttattggttttgtaccattaaccttgaattctgtgaccacccttgattatatcttgacccttaacgcagctaaac

SEQ ID NO: 18754 - DNA, 723 bp, synthetic construct
  source 1..723: mol_type = other DNA
cacccactcacagggcccactgggcgcaagcactctggtaccccggtacctttgtgcgcctgttttatacccccctccccaatgaaacttagaagcagcaaaccacgatcaatagtaggcataacgctccagttatgtcttgatcaagcacttctgtttccccggactgagtatcaatagactgctcgcgcggttgaaggagaaaacgttcgttatccgactagctacttcggaaaacctagtaacaccatgaaagttgcggagagcttcgttcagcactcccccagtgtagatcaggtcgatgagtcaccgcattccccacgggcgaccgtggcggtggctgcgttggcggcctgcccatggggtaacccatggggcgctctaatacggacatggtgtgaagagtctactgagctagttagtagtcctccggcccctgaatgcggctaatcctaactgcggagcacacgcccacaagccagcgggtagtgtgtcgtaacgggtaactctgcagcggaaccgactactttgggtgtccgtgtttccctttatcttcatattggctgcttatggtgacaattaaagaattgttaccatatagctattggattggccatccggtgtgcaacagagcaattatttaccaatttattggttttgtaccattaaccttgaattctgtgaccacccttaattatatcttgacccttaacgcagctaaac

SEQ ID NO: 18755 - DNA, 723 bp, synthetic construct
  source 1..723: mol_type = other DNA
cacccactcacagggcccactgggcgcaagcactctggtaccccggtacctttgtgcgcctgttttatacccccctccccaatgaaacttagaagcagcaaaccacgatcaatagtaggcataacgctccagttatgtcttgatcaagcacttctgtttccccggactgagtatcaatagactgctcgcgcggttgaaggagaaaacgttcgttatccggctagctacttcggaaaacctagtaacaccatgaaagttgcggagagcttcgttcagcactcccccagtgtagatcaggtcgatgagtcaccgcattccccacgggcgaccgtggcggtggctgcgttggcggcctgcccatggggtaacccatggggcgctctaatacggacatggtgtgaagagtctactgagctagttagtagtcctccggcccctgaatgcggctaatcccaactgcggagcacacgcccacaagccagcgggtagtgtgtcgtaacgggtaactctgcagcggaaccgactactttgggtgtccgtgtttccttttatctttatattggctgcttatggtgacaattaaagaattgttaccatatagctattggattggccatccggtgtgcaacagagcaattatttaccaatttattggttttgtaccattaaccttgaattctgtgaccacccttaattatatcttaacccttaacgctgctaaac

SEQ ID NO: 18756 - DNA, 723 bp, synthetic construct
  source 1..723: mol_type = other DNA
cacccactcacagggcccactgggcgcaagcactctggtaccctggtacctttgtgcgcctgttttatacccccctccccaatgaaacttagaagcagcaaaccacgatcaatagtaggcataacgctccagttatgtcttgatcaagcacttctgtttccccggactgagtatcaatagactgctcgcgcggttgaaggagaaaacgttcgttatccggctagctacttcggaaaacctagtaacaccatgaaagttgcggagagcttcgttcagcactcccccagtgtagatcaggtcgatgagtcaccgcattccccacgggcgaccgtggcggtggctgcgttggcggcctgcccatggggtaacccatggggcgctctaatacggacatggtgtgaagagtctactgagctagttagtagtcctccggcccctgaatgcggctaatcccaactgcggagcacacgcccacaagccagcgggtagtgtgtcgtaacgggtaactctgcagcggaaccgactactttgggtgtccgtgtttccttttatctttatattggctgcttatggtgacaattaaagaattgttaccatatagctattggattggccatccggtgtgcaacagagcaattatttaccaatttattggttttgtaccattaaccttgaattctgtgaccacccttaattatatcttgacccttaacgcagctaaac

SEQ ID NO: 18757 - DNA, 719 bp, synthetic construct
  source 1..719: mol_type = other DNA
cccaggggccactggggcgctagcactccgattctgcggaatctttgtgcgcctgttttataaccctcccccgaaacttgtaacttagaagttatgtacgttaccgatcagcagcaggcgtggcacaccagccatgtcttgatcaagcacttctgtacccccggactgagtatcaatagactgctcacgtggtcgaaggagaaaacgttcgttatccggctaactacttcgagaagcctagtagcgccactgaaactgcggagtgtttcgctcagcacttcccccgtgtagatcaggtcgatgagtcactgctcaccccacgggcgaccgtggcagtggctgcgttggcggcctgcctatggggcaacccataggacgctctaaagtggacatggtgcgaagagtctattgagctagttagtagtcctccggcccctgaatgcggctaatcctaactgcggagcgcatgcccccaaaccagagggtggtgcgtcgtaacgggtaactctgcagcggaaccgactactttgggtgtccgtgtttcctttattcttataatggctgcttatggtgacaattgaggaattgttaccatatagctattggattggccatccggtgtgcaacagagctattgtctacttgtttgttggatacattccattaacacctaaatccttcaatacattacactatattctaacgctgaacgcaagaaa

SEQ ID NO: 18758 - DNA, 693 bp, synthetic construct
  source 1..693: mol_type = other DNA
actctggtactgaggtacctttgtgcgcctgttttacttcccttccccagaaataacttagaagctttgaaccaacgatcaacagtgggtgtgacataccagtcgcatctcgatcaagcacttctgtttccccggactgagtatcaataggctgcttacgcggctgaaagagaaaacgttcgttacccggccaactacttcgagaagcttagtaccaccatgaacgaggcagagcgtttcgctcggcactaccccagtgtagatcaggctgatgagtcactgcaatccccatgggcgaccatggcagtggctgcgctggcggcctgcccatggagagatccatgggacgctctaattttgacatggtgcgaagagcctattgagctagttggtagtcctccggcccctgaatgcggctaatcctaactgcggagcgcacacccacataccagtgggcagtgtgtcgtaacgggcaactctgcagcggaaccgactactttgggtgtccgtgtttccttttattcttatattggctgcttatggtgacaaacgaagagttgttaccatatagctattggattggccatccggtgtgcaacagagcaattgtctaccagtttattggttttgtaccactgacattaaagtctgtaattacccttaaattcatcttgacccttaacacagtcaagc

SEQ ID NO: 18759 - DNA, 722 bp, synthetic construct
  source 1..722: mol_type = other DNA
cacccactcacagggcccactgggcgcaagcactctggtaccccggtacctttgtgcgcctgttttatacccctcccccaatgaaacttagaagcagcaaaccacgatcaatagtaggcataacgctccagttatgtcttgatcaagcacttctgtttccccggactgagtatcaatagactgctcgcgcggttgaaggagaaaacgttcgttatccggctagctacttcggaaaacctagtaacaccatgaaagttgcggagagcttcgttcagcactcccccagtgtagatcaggtcgatgagtcaccgcattccccacgggcgaccgtggcggtggctgcgttggcggcctgcccatggggtaacccatggggcgctctaatacggacatggtgtgaagagtctactgagctagttagtagtcctccggcccctgaatgcggctaatcccaactgcggagcacacgcccacaagccagcgggtagtgtgtcgtaacgggtaactctgcagcggaaccgactactttgggtgtccgtgtttccttttatctttatattggctgcttatggtgacaattaaagaattgttaccatatagctattggattggccatccggtgtgcaacagagcaattatttaccaatttattggttttgtaccattaaccttgaattctgtgaccacccttgattatatcttgacccttaacgcagctaaac

SEQ ID NO: 18760 - DNA, 705 bp, synthetic construct
  source 1..705: mol_type = other DNA
ccactgggcgctagcactccgattctgcggaatctttgtgcgcctgttttataaccctcccccaacttgcaacttagaagttatgtacgttgatcaacagcaggcgtggcacaccagccatgtcttgatcaagcacttctgtaaccccggactgagtatcaatagactgctcacgtggtcgaaagagaaaacgttcgttatccggctaactacttcgagaaacctagtagcaccactgaaactgcggagtgtttcgctcagcacttcccccgtgtagaccaggtcgatgagtcactgcttaccccacgggtgaccgtggcagtggctgcgttggcggcctgcctatggggcaacccataggacgctctaaagtggacatggtgtgaagagtctattgagctagttagtagtcctccggcccctgaatgcggctaatcctaactgcggagcgcatgcccccaaaccagagggtggtgcgtcgtaacgggtaactctgcagcggaaccgactactttgggtgtccgtgtttcttttattctcataatggctgcttatggtgacaattgaggaattgttaccatatagctattggattggccatccggtgtgcaacagagctattatctacttgtttgttggatacattccattgacacctaaatccttcaatacattgcactatattctaacgttgaacgcaagaaa

SEQ ID NO: 18761 - DNA, 649 bp, synthetic construct
  source 1..649: mol_type = other DNA
cctcctaagcacacttagaagctttgcacaatcacgaccagtagtgggcgtggcgcaccagccacgtcttggtcaagcacttctgtatccccggactgagtatcaataaactgctcacgcggttgaaggagaaaacgttcgttacccggctaactacttcgagaaacctagtagcaccatgaaagttgcggagtgtttcgctcagcacttcccccgtgtagatcaggtcgatgagtcactgtaaaccccacgggcgaccgtgacagtggctgcgttggcggcctgcccatggggtaacccatgggacgctctaatacagacatggtgtgaagagtctattgagctagttagtagtcctccggcccctgaatgcggctaatcctaactgcggagcgcgtaccctcaacccagggggcggcgcgtcgtaatgggtaactctgcagcggaaccgactactttgggtgtccgtgtttccttttattccttattggctgcttatggtgacaattgaaaagttgttaccatatagctattggattggccatccggtgtctaacagagccattgtttacctgtttattggatacgtccctcttaatttcaaaaccgtccaaactcttgactatatactgctccttaactgtaagaa

SEQ ID NO: 18762 - DNA, 718 bp, synthetic construct
  source 1..718: mol_type = other DNA
ggaggggccactggggcgctagcactccgattctgcggaatctttgtgcgcctgttttataaccctcccccgaaacttgtaacttagaagttatgtacgttaccgatcagcagcaggcgtggcacaccagccatgtcttgatcaagcacttctgtacccccggactgagtatcaatagactgctcacgtggtcgaaggagaaaacgttcgttatccggctaactacttcgagaagcctagtagcgccactgaaactgcggagtgtttcgctcagcacttcccccgtgtagatcaggtcgatgagtcactgctcaccccacgggcgaccgtggcagtggctgcgttggcggcctgcctatggggcaacccataggacgctctaaagtggacatggtgcgaagagtctattgagctagttagtagtcctccggcccctgaatgcggctaatcctaactgcggagcgcatgcccccaaaccagagggtggtgcgtcgtaacgggtaactctgcagcggaaccgactactttgggtgtccgtgtttcctttattcttataatggctgcttatggtgacaattgaggaattgttaccatatagctattggattggccatccggtgtgcaacagagctattgtctacttgtttgttggatacattccattaacacctaaatccttcaatacattacactatattctaacgctgaacgcaagaaa

SEQ ID NO: 18763 - DNA, 730 bp, synthetic construct
  source 1..730: mol_type = other DNA
gttgtacccactcacagggcccactgggcgctagcactctgattctgcggaatctttgtgcgcctgttttataacccctcccccaatttgtaatttagaagtagtgcacatcgccgatcaacagcaagcgtggcgcgccagccatgtttagatcaagcacttctgtttccccggactgagtatcaatagactgctcacgcggttgaaggagaaaacgttcgttacccgactaactacttcgagaagcctagtagcaccattgaaactgcagagtgtttcgctcagcactttccccgtgtagatcaggtcgatgagtcactgcactccccacgggcgaccgtggcagtggctgcgttggcggcctgcctatgggttcacccataggacgctctaatgtggacatggtgtgaagagtctattgagctagttagtagtcctccggcccctgaatgcggctaatcctaactgcggagcgcatgccctcaatccagggggtggtgcgtcgtaacgggcaactctgcagcggaaccgactactttgggtgtccgtgtttccttttattcttacattggctgcttatggtgacaattgagaaattgttaccatatagctattggattggccatccagtgtctaacagagcaattgtatatttatttgttggattcattccattatcatacacatccattaataccttatactacatcataagattgaacacaagaaa

SEQ ID NO: 18764 - DNA, 701 bp, synthetic construct
  source 1..701: mol_type = other DNA
tgggcgcagcactctggtacctcggtacctttgtgcgcctgttttataacccccccccagtgaaacttagaagcagcaaaccacgatcaatagcaggcataacactccagttatgtcttgatcaagcacttctgtttccccggactgagtatcaatagactgctcgcgcggttgaaggagaaaacgttcgttatccggctagctacttcggaaaacctagtaacaccatgaaagttgcggagagcttcgttcagcactcccccagtgtagatcaggtcgatgagtcaccgcattccccacgggcgaccgtggcggtggctgcgttggcggcctgcccatggggtaacccatggggcgctctaatacggacatggtgtgaagagtctactgagctagttagtagtcctccggcccctgaatgcggctaatcccaactgcggagcacacgcccacaagccagcgggtagtgtgtcgtaacgggtaactctgcagcggaaccgactactttgggtgtccgtgtttccttttatctttatattggctgcttatggtgacaattaaagaattgttaccatatagctattggattggccatccggtgtgcaacagagcaattatttacctatttattggttttgtaccattaaccttgaattctgtgaccacccttaattatatcttgacccttaacacagctaaac

SEQ ID NO: 18765 - DNA, 721 bp, synthetic construct
  source 1..721: mol_type = other DNA
cacccacccacagggcccactgggcgcaagcactctggtacctcggtacctttgtgcgcctgttttatacccctccccaatgaaacttagaagcagcaaaccacgatcaatagtaggcataacgctccagttatgtcttgatcaagcacttctgtttccccggactgagtatcaatagactgctcgcgcggttgaaggagaaaacgttcgttatccggctagctacttcggaaaacctagtagcaccatgaaagttgcggagagcttcgttcagcactcccccagtgtagatcaggtcgatgagtcaccgcattccccacgggcgaccgtggcggtggctgcgttggcggcctgcccatggggtaacccatggggcgctctaatacggacatggtgtgaagagtctactgagctagttagtagtcctccggcccctgaatgcggctaatcccaactgcggagcacacgcccacaagccagcgggtagtgtgtcgtaacgggtaactctgcagcggaaccgactactttgggtgtccgtgtttccttttatctttatattggctgcttatggtgacaattaaagaattgttaccatatagctattggattggccatccggtgtgcaacagagcaattatttaccaattcattggttttgtaccattaaccttgaattctgtgaccacccttgattatatcttgacccttaacgcagctaaac

SEQ ID NO: 18766 - DNA, 721 bp, synthetic construct
  source 1..721: mol_type = other DNA
cacccactcacagggcctactgggcgcaagcactctggtatcttggtacccttgtgcgcctgttttatacccctccccagtgaaacttagaagcagcaaaacacgaccaatagcaggcataacgcaccagttatgtcttggtcaagcacttctgtttccccggactgagtatcaatagactgctcgcgcggttgaaggagaaaacgttcgttatccggctagctacttcggaaaacctagtaacaccatgaaagttgcggagagcttcgttcagcactcccccagtgtagatcaggtcgatgagtcaccgcattccccacgggcgaccgtggcggtggctgcgttggcggcctgcccatggggtaacccatggggcgctctaatacggacatggtgtgaagagtctactgagctagttagtagtcctccggcccctgaatgcggctaatcccaactgcggagcacacgcccacaagccagcgggtagtgtgtcgtaacgggtaactctgcagcggaaccgactactttgggagtccgtgtttccttttacctttatattggctgcttatggtgacaattaaagaattgttaccatatagctattggattggccatccggtgtgcaacagagcaattatttacctatttattggttttgtaccattaactttggattctgcaaccacccttaattatatcttgacccttaacacagctaaac

SEQ ID NO: 18767 - DNA, 721 bp, synthetic construct
  source 1..721: mol_type = other DNA
cacccactcacagggcccactgggcgcaagcactctggtaccctggtacctttgtgcgcctgttttatacccccccccaatgaaacttagaagcagcaaaccacgatcaatagtaggcataacgctccagttgtgtcttgatcaagcacttctgtttccccggactgagtatcaatagactgctcgcgcggttgaaggagaaaacgttcgttatccggctagctacttcggaaaacctagtaacaccatgaaagttgcggagagcttcgttcagcactcccccagtgtagatcaggtcgatgagtcaccgcattccccacgggcgaccgtggcggtggctgcgttggcggcctgcccatggggtaacccatggggcgctctaatacggacatggtgtgaagagtctactgagctagttagtagtcctccggcccctgaatgcggctaatcccaactgcggagcacacgcccacaagccagcgggtagtgtgtcgtaatgggcaactctgcagcggaaccgactactttgggtgtccgtgtttccttttatctttatattggctgcttatggtgacaattaaagaattgttaccatatagctattggattggccatccggtgtgcaacagagcaatcatttaccaatttattggttttgtaccattaaccttgaattctgtgaccacccttaattatatcttgacccttaacacagctaaac

SEQ ID NO: 18768 - DNA, 721 bp, synthetic construct
  source 1..721: mol_type = other DNA
cacccactcacagggcccactgggcgcaagcactctggtacctcggtacctttgtgcgcctgttttatacccccccccaatgaaacttagaagcagcaaaccacgatcaatagtaggcataacgctccagttatgtcttgatcaagcacttctgtttccccggactgagtatcaatagactgctcgcgcggttgaaggagaaaacgttcgttatccggctagctacttcggaaaacctagtaacaccatgaaagttgcggagagcttcgttcagcactcccccagtgtagatcaggtcgatgagtcaccgcattccccacgggcgaccgtggcggtggctgcgttggcggcctgcccatggggtaacccatggggcgctctaatacggacatggtgtgaagagtctactgagctagttagtagtcctccggcccctgaatgcggctaatcccaactgcggagcacacgcccacaagccagcgggtagtgtgtcgtaacgggtaactctgcagcggaaccgactactttgggtgtccgtgtttccttttacctttatattggctgcttatggtgacaattaaagaattgttaccatatagctattggattggccatccggtgtgcaacagagcaattatttaccaatttattggttttgtaccattaaccttgaattctgtgaccacccttaattatatcttgacccttaacgcagctaaac

SEQ ID NO: 18769 - DNA, 721 bp, synthetic construct
  source 1..721: mol_type = other DNA
cacccactcacagggcctactgggcgcaagcactctggtatcttggtacctttgtgcgcctgttttatacccctccccagtgaaacttagaagcagcaaaacacgaccaatagcaggcataacgcaccagttatgtcttggtcaagcacttctgtttccccggactgagtatcaatagactgctcgcgcggttgaaggagaaaacgttcgttatccggctagctacttcgggaaacctagtaacaccatgaaagttgcggagagcttcgttcagcactcccccagtgtagatcaggtcgatgagtcaccgcattccccacgggcgaccgtggcggtggctgcgttggcggcctgcccatggggcaacccatggggcgctctaatacggacatggtgtgaagagtctactgagctagttagtagtcctccggcccctgaatgcggctaatcccaactgcggagcacacgcccacaagccagcgggtagtgtgtcgtaacgggtaactctgcagcggaaccgactactttgggagtccgtgtttccttttacctctatattggctgcttatggtgacaattaaagaattgttaccatatagctattggattggccatccggtgtgcaacagagcaattatttacctatttattggttttgtaccattaactttggattctgtaaccacccttaattatatcttgacccttaacacagctaaac

SEQ ID NO: 18770 - DNA, 721 bp, synthetic construct
  source 1..721: mol_type = other DNA
cacccactcacagggcccactgggcgcaagcactctggtaccccggtacctttgtgcgcctgttttgtacccccccccaatgaaacttagaagcagcaaaccacgatcaatagtaggcataacgctccagttatgtcttgatcaagcacttctgtttccccggactgagtatcaatagactgctcgcgcggttgaaggagaaaacgttcgttatccggctagctacttcggaaaacctagtaacaccatgaaagttgcggagagcttcgttcagcactcccccagtgtagatcaggtcgatgagtcaccgcattccccacgggcgaccgtggcggtggctgcgttggcggcctgcccatggggtaacccatggggcgctctaatacggacatggtgtgaagagtctactgagctagttagtagtcctccggcccctgaatgcggctaatcccaactgcggagcacacgcccacaagccagcgggtagtgtgtcgtaacgggtaactctgcagcggaaccgactactttgggtgtccgtgtttccttttacctttatattggctgcttatggtgacaattaaagaattgttaccatatagctattggattggccatccggtgtgcaacagagcaattatttaccaatttattggttttgtaccattaaccttgaattctgtgaccacccttaattatatcttgacccttaacgcagctaaac

SEQ ID NO: 18771 - DNA, 721 bp, synthetic construct
  source 1..721: mol_type = other DNA
cacccactcacagggcctactgggcgcaagcactctggtatcttggtacctttgtgcgcctgttttatacccctccccagtgaaacttagaagcagcaaaacacgaccaatagcaggcataacgcaccagttatgtcttggtcaagtacttctgtttccccggactgagtatcaatagactgctcgcgcggttgaaggagaaaacgttcgttatccggctagctacttcggaaaacctagtaacaccatgaaagttgcggagagcttcgttcagcactcccccagtgtagatcaggtcgatgagtcaccgcattccccacgggcgaccgtggcggtggctgcgttggcggcctgcccatggggtaacccatggggcgctctaatacggacatggtgtgaagagtctactgagctagttagtagtcctccggcccctgaatgcggctaatcccaactgcggagcacacgcccacaagccagcgggtagtgtgtcgtaacgggtaactctgcagcggaaccgactactttgggagtccgtgtttccttttacctttatattggctgcttatggtgacaattaaagaattgttaccatatagctattggattggccatccggtgtgcaacagagcaattatttacctatttattggttttgtaccattaactttggattctgtaaccacccttaattatatcttgacccttaacacagctaaac

SEQ ID NO: 18772 - DNA, 721 bp, synthetic construct
  source 1..721: mol_type = other DNA
cacccactcacagggcccactgggcgcaagcactctggtaccccggtacctttgtgcgcctgttttatacccccccccaatgaaacttagaagcagcaaaccacgatcaatagtaggcataacgctccagttatgtcttgatcaagcacttctgtttccccggactgagtatcaatagactgctcgcgcggttgaaggagaaaacgttcgttatccggctagctacttcggaaaacctagtaacaccatgaaagttgcggagagcttcgttcagcactcccccagtgtagatcaggtcgatgagtcaccgcattccccacgggcgaccgtggcggtggctgcgttggcggcctgcccatggggtaacccgtggggcgctctaatacggacatggtgtgaagagtctactgagctagttagtagtcctccggcccctgaatgcggctaatcccaactgcggagcatacgcccacaagccagcgggtagtgtgtcgtaacgggtaactctgcagcggaaccgactactttgggtgtccgtgtttccttttatctttatattggctgcttatggtgacaattaaagaattgttaccatatagctattggattggccatccggtgtgcaacagagcaattatttaccaatttattggctttgtaccattaaccttgaattctgtgaccacccttaattatatcttgacccttaacgcagctaaac

SEQ ID NO: 18773 - DNA, 721 bp, synthetic construct
  source 1..721: mol_type = other DNA
cacccactcacagggcccactgggcgcaagcactctggtaccccggtacctttgtgcgcctgttttatacccccccccaatgaaacttagaagcagcaaaccacgatcaatagtaggcataacgctccagttatgtcttgatcaagcacttctgtttccccggactgagtatcaatagactgctcgcgcggttgaaggagaaaacgttcgttatccggctagctacttcggaaaacctagtaacaccatgaaagttgcggagagcttcgttcagcactcccccagtgtagatcaggtcgatgagtcaccgcattccccacgggcgaccgtggcggtggctgcgttggcggcctgcccatggggtaacccatggggcgctctaatacggacatggtgtgaagagtctactgagctagttagtagtcctccggcccctgaatgcggctaatcccaactgcggagcacacgcccacaagccagcgggtagtgtgtcgtaatgggcaactctgcagcggaaccgactactttgggtgtccgtgtttccttttatctttatattggctgcttatggtgacaattaaagaattgttaccatatagctattggattggccatccggtgtgcaacagagcaattatttaccaatttattggttttgtaccattaaccttgaattctgtgaccacccttaattatatcttgacccttaacacagctaaac

SEQ ID NO: 18774 - DNA, 721 bp, synthetic construct
  source 1..721: mol_type = other DNA
cacccactcacagggcccactgggcgcaagcactctggtaccccggtacctttgtgcgcctgttttacacccccccccaatgaaacttagaagcagcaaaccacgatcaacagtaggcataacgctccagttatgtcttgatcaagcacttctgtttccccggactgagtatcaatagactgctcgcgcggttgaaggagaaaacgttcgttatccggctagctacttcggaaaacctagtaacaccatgaaagttgcggagagcttcgttcagcactcccccagtgtagatcaggtcgatgagtcaccgcattccccacgggcgaccgtggcggtggctgcgttggcggcctgcccatggggtaacccgtggggcgctctaatacggacatggtgtgaagagtctactgagctagttagtagtcctccggcccctgaatgcggctaatcccaactgcggagcatgcgcccacaagccagtgggtagtgtgtcgtaacgggtaactctgcagcggaaccgactactttgggtgtccgtgtttccttttatctttatattggctgcttatggtgacaattaaagaattgttaccatatagctattggattggccatccggtgtgcaacagagcaattatttaccaatttattggctttgtaccattaaccttgaattctgtgaccacccttaattatatcttgacccttaacgcagctaaac

SEQ ID NO: 18775 - DNA, 721 bp, synthetic construct
  source 1..721: mol_type = other DNA
cacccactcacagggcctactgggcgcaagcactctggcacctcggtacctttgtgcgcctgttttatacccccccccagtgaaacttagaagcagcaaaccacgatcaatagcaggcatagcgctccagttatgtcttgatcaagcacttctgtttccccggactgagtatcaatagactgctcgcgcggttgaaggagaaaacgttcgttatccggccaactacttcggaaaacctagtaacaccatgaaagttgcggagagcttcgttcagcactcccccagtgtagatcaggtcgatgagtcaccgcattccccacgggcgaccgtggcggtggctgcgttggcggcctgcccatggggtaacccatggggcgctctaatacggacatggtgtgaagagtctactgagctagttggtagtcctccggcccctgaatgcggctaatcccaactgcggagcacacgcccacaagccagcgggtagtgtgtcgtaacgggtaactctgcagcggaaccgactactttgggtgtccgtgtttccttttaactttatactggctgcttatggtgacaattgtagaattgttaccatatagctgttggattggccatccggtgtgcaacagagcaattatttacctatttattggttttgtgccattaactttgaattctgtgaccacccttaattatatcttgacccttaacacagctaaat

SEQ ID NO: 18776 - DNA, 721 bp, synthetic construct
  source 1..721: mol_type = other DNA
acccactcacagggcccaccgggcgcaagcactctggtaccccggtacctttgtgcgcctgttttatactccccccctaatgaaacttagaagcagcaaatcacgatcaatagcaggcataacactccagttatgtcttgatcaagcacatctgtttccccggaccgagtatcaatagactgctcgcgcggttgaaggagaaaacgtccgttacccggctaactacttcgggaaacctagtaacaccatggaagttgcggagagcttcgctcagcactcccccagtgtagatcaggccgatgagtcaccgcattccccacgggtgaccgtggcggtggctgcgttggcggcctgcccatggggtaacccatggggcgctctaatacggacatggtgcgaagagtctactgagctagttagtagtcctccggcccctgaatgcggctaatcccaactgcggagcacacgcccacaagccagcgggtagtgtgtcgtaacgggcaactctgcagcggaaccgactactttgggtgtccgtgtttccttttattcttatattggctgcttatggtgacgactaaagagttgttaccatatagctattggattggccatccggtgtgtaacagagcaattgtttacctatttattggttttgtgccactaaccttgaagtctgtgattaccctcaattatatcttgaccctcaatacagctaaac

SEQ ID NO: 18777 - DNA, 705 bp, synthetic construct
  source 1..705: mol_type = other DNA
tactggggcgcaagcactctggcatctcggtacctttgtgcgcctgttttatacccccccccagtgaaacttagaagcagcaaatcacgatcaatagcaggcataacgctccagttatgtctcgatcaagcacttctgtttccccggactgagtatcaatagactgctcgcgcggttgaaggagaaaacgttcgttatccggctagctacttcggaaaacctagtaacaccatgaaagttgcggagagcttcgttcagcactcccccagtgtagatcaggtcgatgagtcaccgcattccccacgggcgaccgtggcggtggctgcgttggcggcctgcccatggggtaacccatggggcgctctaatacggacatggtgtgaagagtctactgagctagttagtagtcctccggcccctgaatgcggctaatcccaactgcggagcacacgcccacaagccagcgggtagtgtgtcgtaacgggtaactctgcagcggaaccgactactttgggtgtccgtgtttccttttatttttatattggctgcttatggtgacaattaaagaattgttaccatatagctattggattggccatccggtgtgcaacagagcaattatttacctatttattggttttgtaccattaaccttgaattctgtgaccacccttaattatatcttgacccttaacacagctaaac

SEQ ID NO: 18778 - DNA, 720 bp, synthetic construct
  source 1..720: mol_type = other DNA
cacccactcacagggcccactgggcgcaagcactctggtaccccggtacctttgtgcgcctgttttataccccccccaatgaaacttagaagcagcaaaccacgatcaatagtaggcataacgctccagttatgtcttgatcaagcacttctgtttccccggactgagtatcaatagactgctcgcgcggttgaaggagaaaacgttcgttatccggctagctacttcgggaaacctagtaacaccatgaaagttgcggagagcttcgttcagcactcccccagtgtagatcaggtcgatgagtcaccgcattccccacgggcgaccgtggcggtggctgcgttggcggcctgcccatggggtaacccatggggcgctctaatacggacatggtgtgaagagtctactgagctagttagtagtcctccggcccctgaatgcggctaatcccaactgcggagcacacgcccacaagccagcgggtagtgtgtcgtaacgggtaactctgcagcggaaccgactactttgggtgtccgtgtttccttttatctttatattggctgcttatggtgacaattaaagaattgttaccatatagctattggattggccatccggtgtgcaacagagcaattatttatcaatttattggttttgtaccattaaccttgaattctgtgaccacccttaattatatcttgacccttaacgcagctaaac

SEQ ID NO: 18779 - DNA, 722 bp, synthetic construct
  source 1..722: mol_type = other DNA
acccacccacagggcctactgggcgctagcactctggcactgaggtacctttgtgcgcctgttttatttcccttccccgaagtaacttagaagctgtgaactaacgatcaatagtgggtgtgacgcaccagtcacatcttgatcaagcacttctgtttccccggactgagtatcaataggctgctcgcgcggctgaaggagaaaacgttcgttacccgaccaactacttcgagaagcttagtaccaccatgaacgaggcagagtgtttcgttcagcacaaccccagtgtagatcaggctgatgagtcactgcaacccccatgggcgaccatggcagtggctgcgttggcggcctgcccatggaaaaatccatgggacgctctaattctgacatggtgtgaagagcctattgagctagctggtagtcctccggcccctgaatgcggctaatcccaactgcggagcacatgctcacaaaccagtgggtggtgtgtcgtaacgggcaactctgcagcggaaccgactactttgggtgtccgtgtttccttttattcttatgttggctgcttatggtgacaatcaaagaattgttaccatatagctattggattggccatccggtgtgcaacagagcaatcgtctacctatttgttggttttgtaccattatcactgaaggctgtgatcactctcaaattcattttgaccctcaactcaatcaaac

SEQ ID NO: 18780 - DNA, 718 bp, synthetic construct
  source 1..718: mol_type = other DNA
cgaggggccactggggcgctagcactccgattctgcggaatctttgtgcgcctgttttataaccctcccccgaaacttgtaacttagaagttatgtacgttaccgatcagcagcaggcgtggcacaccagccatgtcttgatcaagcacttctgtacccccggactgagtatcaatagactgctcacgtggtcgaaggagaaaacgttcgttatccggctaactacttcgagaagcctagtagcgccactgaaactgcggagtgtttcgctcagcacttcccccgtgtagatcaggtcgatgagtcactgctcaccccacgggcgaccgtggcagtggctgcgttggcggcctgcctatggggcaacccataggacgctctaaagtggacatggtgcgaagagtctattgagctagttagtagtcctccggcccctgaatgcggctaatcctaactgcggagcgcatgcccccaaaccagagggtggtgcgtcgtaacgggtaactctgcagcggaaccgactactttgggtgtccgtgtttcctttattcttataatggctgcttatggtgacaattgaggaattgttaccatatagctattggattggccatccggtgtgcaacagagctattatctacttgtttgttggatacattccattaacacctaaatccttcaatacattacactatattctaacgctgaacgcaagaaa

SEQ ID NO: 18781 - DNA, 718 bp, synthetic construct
  source 1..718: mol_type = other DNA
cgcggggccactgaagcgctagcactccgattctgcggaatctttgtgcgcctgttttataaccctcccccgaaacttgtaacttagaagttatgtacgttaccgatcagcagcaggcgtggcacaccagccatgtcttgatcaagcacttctgtacccccggactgagtatcaatagactgctcacgtggtcgaaggagaaaacgttcgttatccggctaactacttcgagaagcctagtagcgccactgaaactgcggagtgtttcgctcagcacttcccccgtgtagatcaggtcgatgagtcactgctcaccccacgggcgaccgtggcagtggctgcgttggcggcctgcctatggggcaacccataggacgctctaaagtggacatggtgcgaagagtctattgagctagttagtagtcctccggcccctgaatgcggctaatcctaactgcggagcgcatgcccccaaaccagagggtggtgcgtcgtaacgggtaactctgcagcggaaccgactactttgggtgtccgtgtttcctttattcttataatggctgcttatggtgacaattgaggaattgttaccatatagctattggattggccatccggtgtgcaacagagctattgtctacttgtttgttggatacattccattaacacctaaatccttcaatacattacactatattctaacgctgaacgcaagaaa

SEQ ID NO: 18782 - DNA, 738 bp, synthetic construct
  source 1..738: mol_type = other DNA
agcctgtgggttgttcccacccacagggcccattgggcgctagcacactggttttgcggaatctttgtgcgcctgttttataacccttcccccaagcagcaacttagaagtattgcacaatcacggccagtagtgggcgtggcgcgccagccacgtcttggtcaagcacttctgtatccccggactgagtatcaatagactgctcacgcggttgaaggagaaaacgttcgttacccggctaactacttcggaaaacctagtagcaccttgaaagttgcagagtgtttcgctcagcacttcccccgtgtagatcaggtcgatgagccactgtaaaccccacgggcgaccgtgacagtggctgcgttggcggcctgcccatggggtaacccatgggacgctctaatacagacatggtgtgaagagtctactgagctagttagtagtcctccggcccctgaatgcggctaatcctaactgcggagcacacaccctcaacccagggggcggtgtgtcgtaatgggtaactctgcagcggaaccgactactttgggtgtccgtgtttccttttatcccttactggctgcttatggtgacaattgaaaagttgttaccatatagctattggattggccatccggtgtctaacagagctattgtttacttatttattggatacgtccctcttaatcttaaggctattcaaactcttaattatatattgctccttaactataagaa

SEQ ID NO: 18783 - DNA, 711 bp, synthetic construct
  source 1..711: mol_type = other DNA
ccacgtggtgctagcactctggttctacggaacccttgtgcgcctgttttacgcccccaccccaatttgcaacttagaagcaattcacaacactgatcaatagtaggcgtggcgcaccagctacgtcttgatcaagcacttctgtttccccggaccgagtatcaatagactgctcacgcggttgaaggagaaagcgtccgttatccggctaactacttcgagaaacccagtaacgccattgaaactgcagagtgtttcgctccacacttcccccgtgtagatcaggtcgatgagtcactgcaatccccacgggcgaccgtggcagtggctgcgctggcggcctgcctatggggcaacccataggacgctctaatgtggacatggtgtgaagagtctattgagctagttagtagtcctccggcccctgaatgcggctaatcctaactgcggagcacatgccctcaatccagagggtagtgtgtcgtaatgggcaactctgcagcggaaccgactactttgggtgtccgtgtttccttttattctcacattggctgcttatggtgacaatcactgaattgttaccatatagctattggattggccgtccggtgtgcaatagagctattatatacctatttgttggctttgtaccactaaccttaaaatctgcaaccactctcaactatatattaacccttaatacaatcaaac

SEQ ID NO: 18784 - DNA, 690 bp, synthetic construct
  source 1..690: mol_type = other DNA
tggttctgcgggacctttgtgcgcctgttttataacccttcccttaaacagtaacttagaagctttgtacaatcatggccaatagtgggcgtggcgcgccagtcacgtcttggtcaagcacttctgtatccccggactgagtatcaatagactgctcacgcggttgaaggagaaaacgttcgttacccggctaactacttcgagaaacctagtagcaccatgaaagttgcggagtgtttcgctcagcacttcccccgtgtagatcaggtcgatgagtcactgtaaaccccacgggcgaccgtgacagtggctgcgttggcggcctgcccatggggtaacccatgggacgctctaatacggacatggtgcgaagagtctattgagctagttagcagtcctccggcccctgaatgcggctaatcctaactgcggagcgcgcaccttcaatccagggggcggcgcgtcgtaatgggtaactctgcagcggaaccgactactttgggtgtccgtgtttccttttattctttattggctgcttatggtgacaattgaaaagttgttaccatatagctattggattggccatccggtgtctgacagagctattgtttacctattcattggcttcgtccctcttaatctcaaggccatccaaactctcgattacatattgctcctcaactgtaagaa

SEQ ID NO: 18785 - DNA, 723 bp, synthetic construct
  source 1..723: mol_type = other DNA
gttgtacccactcacagggcccactgggcgttagcactctggtaccccggtacctttgtgcgcctgttttatatccccccccattgaaacttagaagtaatgcacctcgatcaatagcgggcgtggcgcaccagccacgtcatgatcaagcacttctgtttccccggaccgagtatcaatagactgctaacgcggttgagggagaaaacgtccgttacccggccaactgcttcgagaaatccagtaacatcatgaaagttgcagagtgtttcgctcagcacttccccagtgtagatcaggtcgatgagtcaccgcgttccccacgggcgaccgtggcggtggctgcgttggcggcctgcctgtggggcaacccgcaggacgctctaatatggacatggtgtgaagaatctattgagccagttggtagtcctccggcccctgaatgcggctaatcctaactgcggagcacgcgccttcaatccagtgggtagcgtgtcgtaatgggtaactctgcagcggaaccgactactttgggtgtccgtgtttccatttattcttacattggctgcttatggtgacaattgaaagattgttaccatatagctattggattggccatccggtatcgaatagagcgattatctatcagtttattggatttattccgttgagtgtgcagcagtatcgcactttgcttttaatagtgagactgaatagtgcaaa

SEQ ID NO: 18786 - DNA, 729 bp, synthetic construct
  source 1..729: mol_type = other DNA
ttgtacccacccacagggcccactgggcgctagcactctgattctgcggaatctttgtgcgcctgttttataaccctcccccgaaacttgtaacttagaagttatgtacgttactgatcaacagcaggcgtggcacaccagccatgtcttgatcaagcacttctgtacccccggactgagtatcaatagactgctcacgtggtcgaaggagaaaacgttcgttatccggctaactacttcgagaaacctagtagcaccactgaaactgcggagtgtttcgctcagcacttcccccgtgtagatcaggccgatgagtcactgcgtaccccacgggtgaccgtggcagtggctgcgttggcggcctgcctatggggcaacccataggacgctctaaagtggacatggtgcgaagagtctattgagctagttagtagtcctccggcccctgaatgcggctaatcctaactgcggagcgcatgccctcaaaccagagggtggtgcgtcgtaacgggaaactctgcagcggaaccgactactttgggtgtccgtgtttcttttattctcataatggctgcttatggtgacaattgaggaattgttaccatatagctattggattggccatccggtgtgcaacagagctattatctacttgtttgttggatacattccattaacacctaaatccttcaatacattgcactacattctaacgttgaacacaagaaa

SEQ ID NO: 18787 - DNA, 729 bp, synthetic construct
  source 1..729: mol_type = other DNA
ttgtacccacccacagggcccactgggcgctagcactctgattctgcggaatctttgtgcgcctgttttataaccctcccccgaaacttgtaacttagaagttatgtacgttactgatcaacagcaggcgtggcacaccagccatgtcttgatcaagcacttctgtacccccggactgagtatcaatagactgctcacgtggtcgaaggagaaaacgttcgttatccggctaactacttcgagaaacctagtagcaccactgaaactgcggagtgtttcgctcagcacttcccccgtgtagatcaggccgatgagtcactgcgtaccccacgggtgaccgtggcagtggctgcgttggcggcctgcctatggggcaacccataggacgctctaaagtggacatggtgcgaagagtctattgagctagttagtagtcctccggcccctgaatgcggctaatcctaactgcggagcgcatgccctcaaaccagagggtggtgcgtcgtaacgggaaactctgcagcggaaccgactactttgggtgtccgtgtttcttttattctcataatggctgcttatggtgacaattgaggaattgttaccatatagctattggattggccatccggtgtgcaacagagctattatctacttgtttgttggatacattccattaacacctaaatccttcaatacattgcactacattctaacgctgaacacaagaaa

SEQ ID NO: 18788 - DNA, 729 bp, synthetic construct
  source 1..729: mol_type = other DNA
ttgtacccacccacagggcccactgggcgctagcactctgattctgtggaatctttgtgcgcctgttttataaccctcccccgaaacttgtaacttagaagttatgtacgttactgatcaacagcaggcgtggcacaccagccatgtcttgatcaagcatttctgtacccccggactgagtatcaatagactgctcacgtggtcgaaggagaaaacgttcgttatccggctaactacttcgagaaacctagtagcaccactgaagctgcggagtgtttcgctcagcacttcccccgtgtagatcaggccgatgagtcactgcgtaccccacgggtgaccgtggcagtggctgcgttggcggcctgcctatggggtaacccataggacgctctaaagtggacatggtgcgaagagtctattgagctagttagtagtcctccggcccctgaatgcggctaatcctaactgcggagcgcatgccctcaaaccagagggtggtgcgtcgtaacgggaaactctgcagcggaaccgactactttgggtgtccgtgtttcttttattctcataatggctgcttatggtgacaattgaggaattgttaccatatagctattggattggccatccggtgtgcaacagagctattatctacttgtttgttggatacattccattaacacctaaatccttcaatacattgcactacattctaacgctgaacataagaaa

SEQ ID NO: 18789 - DNA, 729 bp, synthetic construct
  source 1..729: mol_type = other DNA
ttgtacccacccacagggcccactgggcgctagcactccgattctgcggaatctttgtgcgcctgttttataaccctcccccgaaacttgcaacttagaagttgtgtacgttactgatcaacagcaggcgtggcacaccagccatgtcttgatcaagcacttctgtgtccccggactgagtatcaatagactgctcacgtggtcgaaggagaaaacgttcgttatccggctaactacttcgagaaacctagtagcaccactgaaactgcggagtgtttcgctcagcacttcccccgtgtagaccaggtcgatgagtcactgcttaccccacgggtgaccgtggcagtggctgcgttggcggcctgcctatggggcaacccataggacgctctaaagtggacatggtgcgaagagtctattgagctagttagtagtcctccggcccctgaatgcggctaatcctaactgcggagcgcatgccctcaaaccagagggtggtgcgtcgtaacgggtaactctgcagcggaaccgactactttgggtgtccgtgtttcttttattctcataatggctgcttatggtgacaattgaggaattgttaccatatagctattggattggccatccggtgtgcaacagagctattatctacttgtttgttggatacattccattaacacctaagtccttcaatacattgcactacattctaacgctgaacacaagaaa

SEQ ID NO: 18790 - DNA, 729 bp, synthetic construct
  source 1..729: mol_type = other DNA
ttgtacccacccacagggcccactgggcgctagcactccgattctgcggaatctttgtgcgcctgttttataaccctcccccgaaacttgcaacttagaagttatgcacgccactgatcaacagcaggcgtggcacaccagccatgtcttgatcaagcacttctgtacccccggactgagtatcaatagactgctcacgtggtcgaaggagaaaacgttcgttatccggctaactacttcgagaaacctagtagcaccaccgaaactgcggagtgtttcgctcagcacttcccccgtgtagatcaggtcgatgagtcactgcttaccccacgggtgaccgtggcagtggctgcgttggcggcctgcctatggggcaacccataggacgctctaaagtggacatggtgcgaagagtctattgagctagttagtagtcctccggcccctgaatgcggctaatcctaactgcggagcgcatgccctcaaaccagggggtggtgcgtcgtaacgggtaactctgcagcggaaccgactactttgggtgtccgtgtttcttttattctcataatggctgcttatggtgacaattgaggaattgttgccatatagctattggattggccatccggtgtgcaacagagctgttatctacttgtttgttggatacattccattaacactcaaatccttcaatacattgcactatattctaacgctgaacgcaagaaa

SEQ ID NO: 18791 - DNA, 729 bp, synthetic construct
  source 1..729: mol_type = other DNA
ttgtacccatctacagggcccactgggcgctagcactccgattctgcggaatctttgtgcgcctgttttataaccctcccccgaaacttgtaacttagaagttatgaacattactggtcaacagcaggcgtggcacaccagccatgtcttgatcaagcacttctgtacccccggactgagtatcaatagactgctcacgtggtcgaaggagaaaacgttcgttatccggctaactacttcgagaaacctagtagcaccactgaaactgcggagtgtttcgctcagcacttcccccgtgtagatcaggtcgatgagtcactgcttacctcacgggtgaccgtggcagtggctgcgttggcggcctgcctatggggcaacccataggacgctctaaagtggacatggtgcgaagagtctattgagctagttagtagtcctccggcccctgaatgcggctaatcctaactgcggagcgcatgccctcaaaccagagggtggtgcgtcgtaacgggtaactctgcagcggaaccgactactttgggtgtccgtgtttcttttattctcataatggctgcttatggtgacaattgaggaattgttaccatatagctattggattggccatccggtgtgcaacagagctattatctacttgtttgttggatacattccattaacacttaaatccttcaatacattgcactacattctaacgctgaacacaagaag

SEQ ID NO: 18792 - DNA, 721 bp, synthetic construct
  source 1..721: mol_type = other DNA
ccactcacagggcccactgggcgctagcactctggtaatacgttacctttgtgcgcctgttttatctccccctaccctggaacaccttagaagcaaagcatctctgatcaatagaaggtgcagcgaaccagctgcgtctcgatcaagcacttctgtttccccggactgagtatcaatagactgctaacgcggtcgaaggagaaaacgttcgttatccggctagctacttcgagaagcctagtaacaccatgaaagttgcagagtgtttcactcagcacttcccccgtgtagatcaggtcgatgagtcaccgcgatccccacgggcgaccgtggcggtggctgcgttggcggcctgcctatggggcaacccataggacgctctaatacagacatggtgtgaagagcctattgagctagctagtagtcctccggcccctgaatgcggctaatcctaactgcggagcacatgctcgtgaaccagcgagtagtgtgtcgtaatgggcaactctgcagcggaaccgactactttgggtgtccgtgtttctttttattttctctattggctgcttatggtgacaattaaagaattgttaccatatagctattggattggccatccggtgactaatagagctattatatatctctttgttggatttgtccccttgaggctcactgcttataacacactttgttatatattgactctcaactcagcaaa

SEQ ID NO: 18793 - DNA, 721 bp, synthetic construct
  source 1..721: mol_type = other DNA
ccactcacagggcccactgggcgctagcactctggtaatacgttacctttgtgcgcctgttttatctccccctaccctggaacaccttagaagcaaagcatctctggtcaatagaaggtgcagcgaaccagctgcgtctcgatcaagcacttctgtttccccggactgagtatcaatagactgctaacgcggtcgaaggagaaaacgttcgttatccggctagctacttcgagaagcctagtaacaccatgaaagttgcagagtgtttcactcagcacttcccccgtgtagatcaggtcgatgagtcaccgcgatccccacgggcgaccgtggcggtggctgcgttggcggcctgcctatggggcaacccataggacgctctaatacagacatggtgtgaagagcctattgagctagctagtagtcctccggcccctgaatgcggctaatcctaactgcggagcacatgctcgtgaaccagcgagtagtgtgtcgtaatgggcaactctgcagcggaaccgactactttgggtgtccgtgtttctttttattttctctattggctgcttatggtgacaattaaagaattgttaccatatagctattggattggccatccggtgactaatagagctattatatatctctttgttggatttgtccccttgaggctcactgcttataacacactttgttttatattgactctcaactcagcaaa

SEQ ID NO: 18794 - DNA, 729 bp, synthetic construct
  source 1..729: mol_type = other DNA
ttgtacccacccacagggcccactgggcgctagcactccgattctgcggaatctttgtgcgcctgttttaaaaccctcccccgaaacttgcaacttagaagttatgtacgttactgatcaacagcaggcgtggcataccagccatgtcttgatcaagcacttctgtaaccccggaccgagtatcaatagactgctcacgtggtcgaaagagaaaacgttcgttatccggctaactacttcgagaaacctagtagcaccactgaaactgcggagtgtttcgctcagcacttcccccgtgtagatcaggtcgatgagtcactgcttaccccacgggtgaccgtggcagtggctgcgttggcggcctgcctatggggcaacccataggacgctctaaagtggacatggtgtgaagagtctattgagctagttagtagtcctccggcccctgaatgcggctaatcctaactgcggagcgcatgcccccaaaccagagggtggtgcgtcgtaacgggtaactctgcagcggaaccgactactttgggtgtccgtgtttcttttattctcataatggctgcttatggtgacaattgaggaattgttaccatatagctattggattggccatccggtgtgcaacagagctattatctacctgtttgttggatacattccattgacacctaaatccttcaatacattgcactatatcctaacgttgaacgcaagaaa

SEQ ID NO: 18795 - DNA, 736 bp, synthetic construct
  source 1..736: mol_type = other DNA
ctgtgggttgttcccacccacagggcccactgggcgctagcacactgattctacggaaactttgtgcgcctgttttatgtccctccccctaatatgtaacttagaaatttagtacacccatgaccaatagtaggcgtgacgcaccagtcacgtcttggtcaagcacttctgtctccccgggctgagtatcaatagactgcttacgcggttgaaggagaaaacgctcgttacccggctaactacttcgagaaacctagtaacaccatgaaagttgcagggtgtttcgctcagcacttcccccgtgtagatcaggtcgatgagtcactgcaaaccccacgggcgaccgtggcagtggctgcgttggcggcctgcccatggggtaacccatgggacgctctaatactgacatggtgcgaagagtctattgagctagttagtagtcctccggcccctgaatgcggctaatcctaactgcggagcacacaccctcaacccagggggcggtgtgtcgtaacgggcaactctgcagcggaaccgactactttgggtgtccgtgtttccttttatctctattatggctgcttatggtgacaattgaagaattgttaccatatagctattggattggccatccggtgtttaacagagcaattgtatacctatttgttgggtttgtccctttgtcacacacatctctcaataccttatactacattataaagttgaatacaggaac

SEQ ID NO: 18796 - DNA, 736 bp, synthetic construct
  source 1..736: mol_type = other DNA
ctgtgggttgttcccacccacagggcccactgggcgctagcacactgattctacggaaactttgtgcgcctgttttatgtccctccccctaatatgtaacttagaaatttagtacacccatgaccaatagtaggcgtgacgcaccagtcacgtcttggtcaagcacttctgtctccccgggctgagtatcaatagactgcttacgcggttgaaggagaaaacgctcgttacccggctaactacttcgagaaacctagtaacaccatgaaagttgcagggtgtttcgctcagcacttcccccgtgtagatcaggtcgatgagtcactgcaaaccccacgggcgaccgtggcagtggctgcgttggcggcctgcccatggggtaacccatgggacgctctgatactgacatggtgcgaagagtctattgagctagttagtagtcctccggcccctgaatgcggctaatcctaactgcggagcacacaccctcaacccagggggcggtgtgtcgtaacgggcaactctgcagcggaaccgactactttgggtgtccgtgtttccttttatctctattatggctgcttatggtgacaattgaagaattgttaccatatagctattggattggccatccggtgtttaacagagcaattgtatacctatttgttggatttgtccctttgtcacacacatctctcaataccttatactacattataaagttgaatacaggaac

SEQ ID NO: 18797 - DNA, 702 bp, synthetic construct
  source 1..702: mol_type = other DNA
tgggcgcaagcactctggtacctcggtacctttgtgcgcctgttttataacccccccccagtgaaacttagaagcagcaaaccacgatcaatagcaggcataacactccagttatgtcttgatcaagcacttctgtttccccggactgagtatcaatagactgctcgcgcggttgaaggagaaaacgttcgttatccggctagctacttcggaaaacctagtaacaccatgaaagttgcggagagcttcgttcagcactcccccagtgtagatcaggtcgatgagtcaccgcattccccacgggcgaccgtggcggtggctgcgttggtggcctgcccatggggtaacccatggggcgctctaatacggacatggtgtgaagagtctactgagctagttagtagtcctccggcccctgaatgcggctaatcccaactgcggagcacacgcccacaagccagcgggtagtgtgtcgtaacgggtaactctgcagcggaaccgactactttgggtgtccgtgtttccttttatctttatattggctgcttatggtgacaattaaagaattgttaccatatagctattggattggccatccggtgtgcaacagagcaattatttacctatttattggttttgtaccattaaccttgaattctgtgaccacccttaattatatcttgacccttaacacagctaaac

SEQ ID NO: 18798 - DNA, 663 bp, synthetic construct
  source 1..663: mol_type = other DNA
cctgttttatacccccccccaatgaaacttagaagcagtaaaccacgatcaatagtaagcataacgcaccagttatgtcttgatcaagcacttctgttcccccggactgagtatcaatagactgctcgcgcggttgaaggagaaaacgttcgttatccggctaactacttcgggaaacctagtaactccatgaaagttgcggagagcttcgttcagcacttccccagtgtagatcaggtcgatgagtcaccgcatcccccacgggcgaccgtggcggtggctgcgttggcggcctgcccatgggataacccatggggcgctctaatacggacatggtgtgaagagtctactgagctagttagtagtcctccggcccctgaatgcggctaatcccaactgcggagcacacgcccacaagccagcgggtagtgtgtcgtaacgggcaactctgcagcggaaccgactactttgggtgtccgtgtttccttttatctttatgttggctgcttatggtgacaattaaagaattgttaccatatagctattggattggccatccggtgtgcaacagagcaattatttatcaatttattggttttgtgccattaaccctgaattctgtgaccacccttaattatatcttgacccttaacacagctaaac

SEQ ID NO: 18799 - DNA, 721 bp, synthetic construct
  source 1..721: mol_type = other DNA
cacccactcacagggcctactgggcgcaagcactctggtacctcggtacctttgtgcgcctgttttatacccccccccagtgaaacttagaagcagcaaaccacgatcaatagcaggcatagcgctccagttatgtcttgatcaagcacttctgtttccccggactgagtatcaatagactgcttgcgcggttgaaggagaaaacgttcgttatccggccaactacttcggaaaacctagtaacaccatgaaagttgcggagagcttcgttcagcactcccccagtgtagatcaggtcgatgagtcaccgcattccccacgggcgaccgtggcggtggctgcgttggcggcctgcccatggggtaacccatggggcgctctaatacggacatggtgtgaagagtctactgagctagttggtagtcctccggcccctgaatgcggctaatcccaactgcggagcacacgcccacaagccagcgggtagtgtgtcgtaacgggtaactctgcagcggaaccgactactttgggtgtccgtgtttccttttaactttatactggctgcttatggtgacaattagagaattgttaccatatagctattggattggccatccggtgtgcaacagagcaattatttacctatttattggttttgtaccattaactttgaattctgtgaccacccttaattatatcttgacccttaacacagctaaat

SEQ ID NO: 18800 - DNA, 733 bp, synthetic construct
  source 1..733: mol_type = other DNA
tgggttgtacccacccacagggcccactgggcgctagcactctggtaccacggtacctttgtgtgcctgttttatctccccaaacccccgtaacgctatattagaagatagacaatgcgaccaatagtcagtggggcaacccagcctcactttggtcaagcacctctgtttccccgggcttagtaccaataggctgcttgcgcggctgaaggggaacgcgcccgttatccggctaactacttcaagaaacctagtaccaccatggaagttgcagagtgtttcgctcagcacaaccccagtgtagatcaggtcgatgagtcaccgtacaccccacgggcgaccgtgacggtggctgcgttggcggcctgcccatggtgcacaccatgggacgctctaatacagacatggtgcgaagagtctattgagctagttagtagtcctccggcccctgaatgcggctaatcctaactgcggagcacgtgctctcaatccagagagtagcgtgtcgtaacgggcaactctgcagcggaaccgactactttgggtgtccgtgtttccttttattcttatattggctgcttatggtgacaattgagagattgttaccatatagctattggattggccatccggtgtgtaacagagctattatatattcttttattggctttgtgccattagatcatactgcaattgctactttaaggtacatcttgcttctgaacacagcaaa

SEQ ID NO: 18801 - DNA, 680 bp, synthetic construct
  source 1..680: mol_type = other DNA
ggtacctttgtgcgcctgtttttacttcccgcccccaaagtaacttagaagttatgtaccaacgatcaatagcaggtgtgacacaccagtcatatcttgatcaagcacttctgtttccccggaccgagtatcaataggctgctcgcgcggctgaaggagaaaacgttcgttacccggccaactacttcgagaagcttagtaccaccatgaacgaggcagagtgtttcgctcagcacaaccccagtgtagatcaggctgatgagtcactgcaacccccatgggcgaccatggcagtggctgcgttggcggcctgcccatggagaaatccatgggacgctctaattctgacatggtgtgaagagcctattgagctagctggtagtcctccggcccctgaatgcggctaatcctaactgcggagcacatgtccacaaaccagtgggtggtgtgtcgtaacgggcaactctgcagcggaaccgactactttgggtgtccgtgtttccttttatacctatgttggctgcttatggtgacaatcagagaattgttaccatatagctattggattggccatccggtgtgtaacagagcaattgtttacctatttattggttttgtaccactctcattgaagtctgtgaccactctcgaattcatcttgacccttaactcagtcaaac

SEQ ID NO: 18802 - DNA, 725 bp, synthetic construct
  source 1..725: mol_type = other DNA
gtacccactcacagggcccactgggcgttagcactctggtactaaggtacctttgtgcgcctgttttaactcccttcccctgaagtaacttagaagcagtaaactaatgatcaatagtgggcatgacataccagccatgtctcgatcaagcacttctgtttccccggaccgagtatcaataggctgctcgcgcggctgaaagagaaaacgttcgttacccggccagctacttcgagaagcttagtaccatcatgaacgaagcagagcgtttcgctcagcacaatcccagtgtagatcaggctgatgagtcactgcaaaccccatgggcgaccatggcagtggctgcgttggcggcctgcccatggagaaatccatgggacgctctaattctgacatggtgcgaagagcctattgagctagctggtagtcctccggcccctgaatgcggctaatcctaactgcggagcacgcacccacaaaccagtgggcagtgtgtcgtaatgggtaactctgcagcggaaccgactactttgggtgtccgtgtttccttttattcttatattggctgcttatggtgacaatcaaagagttgttaccatatagctattggattggccatccggtgtgcaacagagcaattgtttacctatttattgggtttgtaccactaacgttgaagtctgtgaccacactcaactttatcctgaacctcaatacagtaaaac

SEQ ID NO: 18803 - DNA, 729 bp, synthetic construct
  source 1..729: mol_type = other DNA
ttgtacccacccacagggcccactgggcgctagcactctggtactacggtacctttgtgtgcctgttttatctccccagacccccgtaacgctacattagaagatagacaatacgaccaatagtcagtggggcaatccagcttcactttggtcaagcacctctgtttccccgggcttagtaccaataggctgcttgcgcggctgaaggggaacgcgcccgttatccggctaactacttcgagaaacctagtaccaccatggaagttgccgagtgtttcgctcagcacaaccccagtgtagatcaggtcgatgagccaccgtacaccccacgggcgaccgtgacggtggctgcgttggcggcctgcccatggtgcacaccatgggacgctctaatacagacatggtgcgaagagtctattgagctagttagtagtcctccggcccctgaatgcggctaatcctaactgcggagcatgcgctctcaacccagagagtagcgtgtcgtaacgggcaactctgcagcggaaccgactactttgggtgtccgtgtttccttttattcttatattggctgcttatggtgacaattgagagattgttaccatatagctattggattggccatccggtgtgtaatagagctattgtatattcttttgttggctttgtgccattagattatactgcaattgctactttaaggtacatcttgctcctcaacacagcaaa

SEQ ID NO: 18804 - DNA, 732 bp, synthetic construct
  source 1..732: mol_type = other DNA
gggttgtacccacccacagggcccactgggcgctagcactctggtactacggtacctttgtgtgcctgttttatctccccagacccccgtaacgctacattagaagatagacaatacgaccaatagtcagtggggcaatccagcttcactttggtcaagcacctctgtttccccgggcttagtaccaataggctgcttgcgcggctgaaggggaacgcgcccgttatccggctaactacttcgagaaacctagtaccaccatggaagttgccgagtgtttcgctcagcacaaccccagtgtagatcaggtcgatgagccaccgtacaccccacgggcgaccgtgacggtggctgcgttggcggcctgcccatggtgcacaccatgggacgctctaatacagacatggtgcgaagagtctattgagctagttagtagtcctccggcccctgaatgcggctaatcctaactgcggagcatgcgctctcaacccagagagtagcgtgtcgtaacgggcaactctgcagcggaaccgactactttgggtgtccgtgtttccttttattcttatattggctgcttatggtgacaattgagagattgttaccatatagctattggattggccatccggtgtgtaatagagctattgtatattcttttgttggctttgtgccattagattatactgcaattgctactttaaggtacatcttgctcctcaacacagcaaa

SEQ ID NO: 18805 - DNA, 717 bp, synthetic construct
  source 1..717: mol_type = other DNA
cccacagggcccattgggcgtagcactctggtactgaggtacctttgtgcgcctgttttacctcccttccccaaaagtaacttagaagctttgaactaatgatcaatagtaggtgtggcagaccagtcacatctcgatcaagcacttctgtctccccggactgagtatcaataggctgcttacgtggctgaaagagaaaacgttcgttacccgaccaactacttcgagaagcttagtaccaccatgaacggggcagagcgtttcgctcggcactaccccagtgtagatcaggctgatgagtcactgcaacccccatgggcgaccatggcagtggctgcgctggcggcctgcccatggagagatccatgggacgctctaactttgacatggtgcgaagagcctattgagctagttggtagtcctccggcccctgaatgcggctaatcctaactgcggagcacacacccacatgccagtgggcagtgtgtcgtaacgggcaactctgcagcggaaccgactactttgggtgtccgtgtttccttttattcttatgttggctgcttatggtgacaatcgaagagttgttaccatatagctattggattggccatccggtgtgcaacagagcaattgtctatcagtttattggctttgtaccactgacattaaagtctgtaattacccttaattttatcttgacccttaatacagttaagc

SEQ ID NO: 18806 - DNA, 737 bp, synthetic construct
  source 1..737: mol_type = other DNA
ctgtgggttgttcccactcacaggacccacgcggtgctagcactctggttccacggaacctttgtgcgcctgttttacgtcccctccccaatttgtaacttagaagcaatttacagcactgatcaatagcaggcatggcgcaccagctatgtcttgatcaagcacctctgtttccccggaccgagtatcaatagactgttcacacggtcgaaggagaaagcgttcgttatccggctaactacttcgagaaacccagtagcgccattgaaactgcagagtgtttcgctccacacttcccccgtgtagatcaggtcgatgagtcactgcaatccccacgggcgaccgtggcagtggctgcgttggcggcctgcctatggggtaacccataggacgctctaatgtggacatggtgcgaagagtctattgagctagttagtagtcctccggcccctgaatgcggctaatcctaactgcggagcacatgccttcaatccagagggtagtgtgtcgtaatgggcaactctgcagcggaaccgactactttgggtgtccgtgtttccttttattctcacattggctgcttatggtgacaattacagaattgttaccatatagctattggattggccatccggtgtgcaatagagctattatatacctatttgttggctttgtaccactaaccttaaaatctgtaatcactctcgagtatatattgacccttaatacaattaaac

SEQ ID NO: 18807 - DNA, 647 bp, synthetic construct
  source 1..647: mol_type = other DNA
caattcgtaatttagaagtaatgcacaccattgatcaacagcaagcgtggcgcgccagccatgttcagatcaaatacttctgttttcccggactgagtatcaatagactgctcacgcggttgaaggagaaaacgttcgttatccggctaactacttcgagaaacctagtagcaccatcgaaactacagagtgtttcgctcagcactttccccgtgtagatcaggtcgatgagtcactgcaatccccacgggcgaccgtggcagtggctgcgttggcggcctgcctatgggcttgcccataggacgctctaatgtggacatggtgtgaagagtctattgagctagttagtagtcctccggcccctgaatgcggctaatcctaactgcggagcgcataccctcagtccagggggtggtgcgtcgtaacgggcaactctgcagcggaaccgactactttgggtgtccgtgtttctttttattcttatattggctgcttatggtgacaattgagagattgttaccatatagctattggattggccatccagtgtctaacagagcaattgtatacttatttgttggattcgttccactatcatatacatccactaacaccttatactatattataagattgaacacaagaaa

SEQ ID NO: 18808 - DNA, 650 bp, synthetic construct
  source 1..650: mol_type = other DNA
cccgaaacttgcaacttagaagttatgtacgttactgatcaacagcaggcgtggcacaccagccatgtcttgatcaagcacttctgtaaccccggactgagtatcaatagactgctcacgtggtcgaaagagaaaacgttcgttatccggctaactacttcgagaaacttagtagcaccactgaaactgcggagtgtttcgctcagcacttcccccgtgtagatcaggtcgatgagtcactgcttaccccacgggtgaccgtggcagtggctgcgttggcggcctgcctatggggcaacccataggacgctctaaagtggacatggtgtgaagagtctattgagctagttagtagtcctccggcccctgaatgcggctaatcctaactgtggagcgcatgcccccaaaccagagggtggtgcgtcgtaacgggtaactctgcagcggaaccgactactttgggtgtccgtgtttcttttattctcataatggctgcttatggtgacaattgaggaattgttgccatatagctattggattggccatccggtgtgcaacagagctattatctacttgtttgttggatacattccattgacatctaaatcccttaatacattgcactatattctaacgttgaacgcaagaaa

SEQ ID NO: 18809 - DNA, 683 bp, synthetic construct
  source 1..683: mol_type = other DNA
gaaatccttgtgcgcctgttttatatcccttccccaatccgaaacatagaagtaatgcgcaccactgatcaatagcaggcgtaacgcgccagttacgtcacgatcaagcacatctgtctccccggaccgagtatcaatagactgcttacgcggttgaaggagaaagcgttcgttatccggctaactacttcgagaagcccagtagcaccatggaagctgcggggtgtttcgctcagcacttcccccgtgtagatcaggtcgatgagccactgcaacccccacaggtgactgtggcagtggctgcgttggcggcctgcctatggggagacccataggacgctctaatgtggacatggtgcgaagagcctattgagctagttagtagtcctccggcccctgaatgcggctaatcctaactgcggagcacatgccttcaacccagagggtagtgtgtcgtaacgggcaactctgcagcggaaccgactactttgggtgtccgtgtttctttttattcttatattggctgcttatggtgacaattacagaattgttaccatatagctattggattggccatccggtgtgcaatagagctgttatatacctgtttgttggttttgtaccactaactttaaaatctataactacccttaattttatattgaccctcaacacagttaaac

SEQ ID NO: 18810 - DNA, 710 bp, synthetic construct
  source 1..710: mol_type = other DNA
catttccactgggggctagcactctgattctgcggaacctttgtgcgcctgttttataaccctcccccgacttgcactttagaagttatgtacgttgatcaatagcaagcgtggcacaccagccatgttttgatcaagcacttctgtacccccggactgagtatcaatagactgcttacgtggtcaaaggagaaaacgtccgttatccggctaactacttcgagaaacctagtaacaccactgaaactgcggagtgtttcgctcagcacttcccccgtgtagatcaggtcgatgagtcactgcttaccccacgggtgaccgtggcagtggctgcgttggcggcctgcctatggggcaacccataggacgctctaaagtggacatggtgcgaagagtctattgagctagttagtagtcctccggcccctgaatgcggctaatcctaactgcggagcgcatgcccccaaaccagagggtggtgcgtcgtaacgggtaactctgcagcggaaccgactactttgggtgtccgtgtttcttttattctcataatggctgcttatggtgacaattgaggaattgttaccatatagctattggattggccatccggtgtgcaacagagctattatctacttgtttgttggatacatcccattaacacctaaatcccttaatacattgcactacatcctaacactgaacgcaagaaa

SEQ ID NO: 18811 - DNA, 725 bp, synthetic construct
  source 1..725: mol_type = other DNA
acccacccacagggcccactgggcgctagcactctggtaccacggtacctttgtgtgcctgttttatctccccaaacccccgtaacgctatattagaagatagacaatgcgaccaatagtcagtggggcaacccagcctcactttggtcaagcacctctgtttccccgggcttagtaccaataggctgcttgcgcggctgaaggggaacgcgcccgttatccggctaactacttcaagaaacctagtaccaccatggaagttgcagagtgtttcgctcagcacaaccccagtgtagatcaggtcgatgagtcaccgtacaccccacgggcgaccgtgacggtggctgcgttggcggcctgcccatggtgcacaccatgggacgctctaatacagacatggtgcgaagagtctattgagctagttagtagtcctccggcccctgaatgcggctaatcctaactgcggagcacgtgctctcaatccagagagtagcgtgtcgtaacgggcaactctgcagcggaaccgactactttgggtgtccgtgtttccttttattcttatattggctgcttatggtgacaattgagagattgttaccatatagctattggattggccatccggtgtgtaacagagctattatatattcttttattggctttgtgccattagatcatactgcaattgctactttaaggtacatcttgcttctgaacacagcaaa

SEQ ID NO: 18812 - DNA, 723 bp, synthetic construct
  source 1..723: mol_type = other DNA
gttgtacccactcacagggcccactgggcgtcagcactctggtaccccggtacctttgtgcgcctgttttatatccccccccattgaaacttagaagtaatgcacctcgatcaatagcgggcgtggcgcaccagccacgtcatgatcaagcacttctgtttccccggaccgagtatcaatagactgctaacgcggttgagggagaaaacgtccgttacccggccaactgcttcgagaaatccagtaacatcatgaaaattgcagagtgtttcgctcagcacttccccagtgtagatcaggtcgatgagtcaccgcgttccccacgggcgaccgtggcggtggctgcgttggcggcctgcctgtggggcaacccgcaggacgctctaatatggacatggtgtgaagaatctattgagccagttggtagtcctccggcccctgaatgcggctaatcctaactgcggagcacgcaccttcaatccagtgggtagcgtgtcgtaatgggtaactctgcagcggaaccgactactttgggtgtccgtgtttccatttattcttacattggctgcttatggtgacaattgaaagattgttaccatatagctattggattggccatccggtatcgaatagagcaattatctatcagtttattggatttattccgttgagtgtgcagcagtatcgcactttgcttttaatagtgagactgaatagtgcaaa

SEQ ID NO: 18813 - DNA, 681 bp, synthetic construct
  source 1..681: mol_type = other DNA
aatccttgtgcgcctgttttatatcccctttcccaagttgaaacatagaagtaatgcgcaccattgatcaatagcaggcgtaacgcgccagttacgtctcgatcaagcacatctgtttccccggaccgagtatcaatagactgctcacgcggttgaaggagaaagcgttcgttacccggctaactacttcgagaaacccagtagcaccatggaagctgcagggtgtttcgctcagcacttcccccgtgtagatcaggtcgatgagccactgcaatccccacgggcgaccgtggcagtggctgcgttggcggcctgcctatggggagacccataggacgctctaatgtggacatggtgcgaagagtctattgagctagttagtatcctccggcccctgaatgcggctaatcctaactgcggagcacatgccttcaacccagaaggtggtgtgtcgtaacgggcaactctgcagcggaaccgactactttgggtgtccgtgtttccttttattcttatattggctgcttatggtgacaattacggaattgttaccatatagctattggattggccatccggtgtgtaatagagctattatatatctgtttgttggctttgtgccattaactttaaagtctacaactactcttgattttatattgaccctcaacacagttaaac

SEQ ID NO: 18814 - DNA, 723 bp, synthetic construct
  source 1..723: mol_type = other DNA
cacccactcacagggcccactgggcgcaagcactctggtaccccggtacctttgtgcgcctgttttatacccccccctccaatgaaacttagaagcagcaaaccacgatcaatagtaggcataacgctccagttatgtcttgatcaagcacttctgtttccccggactgagtatcaatagactgctcgcgcggttgaaggagaaaacgttcgttatccggctagctacttcggaaaacctagtaacaccatgaaagttgcggagagcttcgttcagcactcccccagtgtagatcaggtcgatgagtcaccgcgttccccacgggcgaccgtggcggtggctgcgttggcggcctgcccatggggtaacccatggggcgctctaatacggacatggtgtgaagagtctactgagctagttagtagtcctccggcccctgaatgcggctaatcccaactgcggagcacacgctcacaagccagcgggtagtgtgtcgtaacgggcaactctgcagcggaaccgactactttgggtgtccgtgtttccttttatctttatattggctgcttatggtgacaattaaagaattgttaccatatagctattggattggccatccggtgtgcaacagagcaattatttaccaatttattggttttgtaccattaaccttgaattctgtgatcaccctcaattatatcttgacccttaacgcagctaaac

SEQ ID NO: 18815 - DNA, 677 bp, synthetic construct
  source 1..677: mol_type = other DNA
ctttgtgcgcctgttttatgaccctccccccgaaacttgtaacttagaagttatgtacattaccgatcaatagcaggcgtggcgcaccagccatgtcttgatcaagtacttctgtacccccggactgagtatcaatagactgctcacgcggttgaaggagaaaacgttcgttacccggctaactacttcgagaaacctagtaacaccattgaaactgcggagtgtttcgctcagcattccccccatgtagatcaggtcgatgagtcactgcttaccccacgggcgaccgtggcagtggctgcgttggcggcctgcctatggggcaacccataggacgctctaaagtggacatggtgcgaagagtctattgagctagttagtagtcctccggcccctgaatgcggctaatcctaactgcggagcgcatgtcctcaaaccagagggtggtgcgtcgtaatgggtaactctgcagcgaaccgactactttgggtgtccgtgtttcttttgttcttataatggctgcttatggtgacaatcgaggaattgttaccatatagctattggattggccatccggtgtgcaacagagctattatctacttgtttgtcggatacatccccttaacacctaaatccctcaacacattgcattatattttaacattgaacgcgagaaa

SEQ ID NO: 18816 - DNA, 726 bp, synthetic construct
  source 1..726: mol_type = other DNA
accgagcagtaggagggcccactgggcgttagcactctggtaccaaggtacctttgtgcgcctgttttaactcccttcccctgaagtaacttagaagcagtaaactaatgatcaatagtgggcatgacataccagccatgtctcgatcaagcacttctgttaccccggactgagtatcaataggctgctcgcgcggctgaaagagaaaacgttcgttacccggccagctacttcgagaagcttagtaccatcatgaacgaagcagagcgtttcgctcagcacaatcccagtgtagatcaggctgatgagtcactgcaaaccccatgggcgaccatggcagtgactgcgttggcggcctgcccatggagaaatccatgggacgctctaattctgacatggtgcgaagagcctattgagctagctggtagtcctccggcccctgaatgcggctaatcctaactgcggagcacgcacccacaaaccagtgggcagtgtgtcgtaatgggtaactctgcagcggaaccgactactttgggtgtccgtgtttccgtttattcatatattggctgcttatggtgacaatcaaagagttgttaccatatagctattggattggccatccggtgtgcaacagagcaattatttacctatttattgggtttgtaccactaacgttgaagtctgtgaccacacttaactttatcctgaacctcaatacagtaaaac

SEQ ID NO: 18817 - DNA, 656 bp, synthetic construct
  source 1..656: mol_type = other DNA
ttcccttccccagaaataacttagaagctttgagccaacgatcaacagtgggtgcgacataccagtcgcatctccatcaagcacttctgtttccccggactgagtatcaatacgctgcttacgcggctgaaggagaaaacgttcgttacccggccaactacttcgagaagcttagtaccatcatgaacgaggcagagcgtttcgctcggcactaccccagtgtagatcaggctgatgagtcactgcaatccccatgggcgaccatggcagtggctgcgctggcggcctgcccatggagagatccatgggacgctctaattttgacatggtgcgaagagcctattgagctagttggtagtcctccggcccctgaatgcggctaatcctaactgcggagcgcacacccacataccagtgggcagtgcgtcgtaacgggcaactctgcagcggaaccgactactttgggtgtccgtgtttccttttattcttatattggctgcttatggtgacaatcggagaattgttaccatatagctattggattggccatccggtgtgcaatagagcaattgtctaccagtttattggttttgtgccactgacgttaaagtctgtaattacccttaatttcatcttgacccttaacacagtcaagc

SEQ ID NO: 18818 - DNA, 655 bp, synthetic construct
  source 1..655: mol_type = other DNA
ccaccccaatttgcaacttagaagcgattcacaacactgatcaatagcaggcatggcgcaccagctatgtcttgatcaagcacttctgtttccccggaccgagtatcaatagactgttcacgcggttgaaggagaaagcgtccgttatccggctaactacttcgagaaacccagtaacgccattgaaactgcagagtgtttcgctccacacttcccccgtgtagatcaggtcgatgagtcactgcaatccccacgggcgaccgtggcagtggctgcgctggcggcctgcctatggggcaacccataggacgctctaatgtggacgtggtgtgaagagtctattgagctagttagtagtcctccggcccctgaatgcggctaatcctaactgcggagcacatgccctcaatccagagggtagtgtgtcgtaatgggcaactctgcagcggaaccgactactttgggtgtccgtgtttccttttattctcatattggctgcttatggtgacaatcactgaattgttaccatatagctattggattggccatccggtgtgcaatagagctataatatacctatttgttggctttgtaccactaaccttaaaatctgtaaccactctcaactatatattaacccttaatacaatcaaac

SEQ ID NO: 18819 - DNA, 718 bp, synthetic construct
  source 1..718: mol_type = other DNA
actcacagggcccactgggcgcaagcactctggtaccccggtacctttgtgcgcctgttttatacccccccctccaatgaaacttagaagcaacaaaccacgatcaatagtaggcataacgctccagttatgtcttgatcaagcacttctgtttccccggactgagtatcaatagactgctcgcgcggttgaaggagaaaacgttcgttatccggctagctacttcggaaaacctagtagcaccatgaaagttgcggagagcttcgttcggcactcccccagtgtagatcaggtcgatgagtcaccgcattccccacgggcgaccgtggcggtggctgcgttggcggcctgcccatggggtaacccatggggcgctctaatacggacatggtgtgaagagtctactgagctagttagtagtcctccggcccctgaatgcggctaatcccaactgcggagcacacgcccacaagccagcgggtagtgtgtcgtaacgggtaactctgcagcggaaccgactactttgggtgtccgtgtttccttttatctttatattggctgcttatggtgacaattaaagaattgttaccatatagctattggattggccatccggtgtgcaatagagcaattatttaccaatttattggttttgtaccattaaccttgaattctgtgaccacccttaattatatcttgacccttaacgcagctaaac

SEQ ID NO: 18820 - DNA, 699 bp, synthetic construct
  source 1..699: mol_type = other DNA
agcactctggttctacggaacctttgtgcgcctgttttacgccccctccccaatttgtaacttagaagcaatttacaacactgatcaatagcaggcatggcgcaccagctatgtcttgatcaagcacttctgtttccccggaccgagtatcaatagactgttcacacggttgaaggagaaagcgtccgttatccggctaactacttcgagaaacccagtagcgccattgaagctgcagagtgtttcgctccacacttcccccgtgtagatcaggtcgatgagtcactgcaatcctcacgggcgaccgtggcagtggctgcgctggcggcctgcctatggggcgacccataggacgctctaatgtggacatggtgcgaagagtctattgagctagttagtagtcctccggcccctgaatgcggctaatcctaactgcggagcacatgccttcaatccagagggtagtgtgtcgtaatgggcaactctgcagcggaaccgactactttgggtgtccgtgtttccttttattctcacattggctgcttatggtgacaattacagaattgttaccatatagctattggattggccatccggtgtgcaatagagctattatatacctatttgttggctttataccactaaccttaaaatctgtaaccactctcgagtatatattaaccctcaatacaatcaaac

SEQ ID NO: 18821 - DNA, 722 bp, synthetic construct
  source 1..722: mol_type = other DNA
tgaacccactcacagggcccactgggcgtcagcactctggtaccccggtacctttgtgcgcctgttttatatcccccccccattgaaacttagaagtaatgcacctcgatcaatagcgggcgtggcgcaccagccacgtcatgatcaagcacttctgtttccccggaccgagtatcaatagactgctaacgcggttgagggagaaaacgtccgttacccggccaactgcttcgagaaatccagtaacatcatgaaaattgcagagtgtttcgctcagcacttccccagtgtagatcaggtcgatgagtcaccgcgttccccacgggcgaccgtggcggtggctgcgttggcggcctgcctgcggggcaacctgcaggacgctctaatatggacatggtgtgaagaatctattgagccagttggtagtcctccggcccctgaatgcggctaatcctaactgcggagcacgcgccttcaatccagtgggtagcgtgtcgtaatgggtaactctgcagcggaaccgactactttgggtgtccgtgtttccatttattcttacattggctgcttatggtgacaattgaaagattgttaccatatagctattggattggccatccggtatcgaatagagcaattatctatcagtttattggatttattccgttgagtgtgcagcagtatcgcactttgcttttaatagtgagactgaatagtgcaaa

SEQ ID NO: 18822 - DNA, 701 bp, synthetic construct
  source 1..701: mol_type = other DNA
ggcgctagcactctggcactaaggtacctttgtgcgcctgttttacttcccttccccaaagtaacttagaagttgtgtgccaacgatcaatagcaggtgtgacacaccagtcatatcttgatcaagtacttctgtttccccggaccgagtatcaataggctgctcgcgcggctgaaggagaaaacgttcgttacccgaccagctacttcgagaagcttagtaccaccatgaacgaggcagagtgtttcgttcagcacaaccccagtgtagatcaggctgatgagtcactgcaacccccatgggcgaccatggcagtggctgcgttggcggcctgcccatggagaaatccatgggacgctctaattctgacatggtgagaagagcctattgagctagctggtagtcctccggcccctgaatgcggctaatcctaactgcggagcacatgctcacaaaccagtgggtggtgtgtcgtaatgggcaactctgcagcggaaccgactactttgggtgtccgtgtttccttttattcttatgttggctgcttatggtgacaatcaaggaattgttaccatatagctattggattggccatccggtgtgcaacagagcaattgtttacctatttattggtttcgtaccgctatcactgaagtctgtgaccactctcgaattcattttgaccctcaactcaatcaaac

SEQ ID NO: 18823 - DNA, 705 bp, synthetic construct
  source 1..705: mol_type = other DNA
ctgggcgctagcactctggcactaaggtacctttgtgcgcctgtttttacttcccttccccaaagtaacttagaagttgtgcaccagcgatcaatagcaggtgtgacacaccagtcatatcttgatcaagtacttctgtttccccggaccgagtatcaataggctgctcgcgcggctgaaggagaaaacgttcgttacccgaccaactacttcgagaagcttagtaccaccatgaacgaggcagagtgtttcgttcagcacaaccccagtgtagatcaggctgatgagtcactgcaacccccatgggcgaccatggcagtggctgcgttggcggcctgcccatggagaaatccatgggacgctctaattctgacatggtgtgaagagcctattgagctagctggtagtcctccggcccctgaatgcggctaatcctaactgcggagcacatgctcacaaaccagtgggtggtgtgtcgtaatgggcaactctgcagcggaaccgactactttgggtgtccgtgtttccttttattcttatgttggctgcttatggtgacaatcaaagaattgttaccatatagctattggattggccatccggtgtgcaacagagcaattgtttacctatttattggttttgtaccactatcactgaagtctgtgaccactctcaaattcattttgaccctcaactcaatcaaac

SEQ ID NO: 18824 - DNA, 698 bp, synthetic construct
  source 1..698: mol_type = other DNA
ggctacctctgatttaccaatccttgtgtgcctgttttaatcccttccctaattccaaacatagaagtaatgcgcaccactgatcaatagcaggcgtaacgcaccagttacgtctcgatcaagtacatctgtctccccggaccgagtatcaatagactgctcacgcggttgaaggagaaagcgttcgtcatccggctaactacttcgagaagcccagtaacaccatggaagctgcagggtgtttcgctcagcactccccccgtgtagatcaggtcgatgagccactacaacccccacaggtgactgtggtagtggctgcgttggcggcctgcctatggggagacccataggacgctctaatgtggacatggtgcgaagagcctattgagctagttagtagtcctccggcccctgaatgcggctaatcctaactgcggagcacatgccttcaacccagagggtagtgtgtcgtaacgggcaactctgcagcggaaccgactactttgggtgtccgtgtttctttttattcttatattggctgcttatggtaacaattacagaattgttaccatatagctattggattggccatccggtgtgtaatagagctgttatatacctgtttgttggttttgtaccactaactttaaaatctataactaccctcaattttatattgaccctcaacacagttaaac

SEQ ID NO: 18825 - DNA, 656 bp, synthetic construct
  source 1..656: mol_type = other DNA
acccctcccctaagcagtaacttagaagcttcacactatcacgaccaatagtaggcgtggtgcaccagtcacgtcttggtcaagcacttctgtttccccggactgagtatcaatagactgctcacgcggttgaaggagaaaacgttcgttatccggctaactacttcgagaaacctagtagcaccgtgaaagttgcagagtgtttcgctcagcacttcccccgtgtagatcaggtcgatgagtcactgtgaaccccacgggtgaccgtgacagtggctgcgttggcggcctgcctatggggtaacccatgggacgctctaatacagacacggtgtgaagagtctattgagctagttagtagtcctccggcccctgaatgcggctaatcctaactgcggagcgcgtaccctcaatccagggggcagcgcgtcgtaatgggtaactctgcagcggaaccgactactttgggtgtccgtgtttccttttatcctttattggctgcttatggtgacaattgaaaagttgttaccatatagctattggattggccatccggtaaccaacagagctattgtttacctgtttattggatacgtccctctcaatctcaaggctattcaaactcttgattatatactacttctcaactgtaagaa

SEQ ID NO: 18826 - DNA, 647 bp, synthetic construct
  source 1..647: mol_type = other DNA
caattcgtaatttagaagtaatgcacaccattgatcaacagcaagcgtggcgcgccagccatgttcagatcaagtacttctgttttcccggactgagtatcaatagactgctcacgcggttgagggagaaaacgttcgttacccggctaactacttcgagaaacctagtagcaccatcgaaactgcagagtgtttcgctcagcactttccccgtgtagatcaggtcgatgagtcactgcaatccccacgggcgaccgtggcagtggctgcgttggcggcctgcctatgggctttcccataggacgctctaatgtggacatggtgtgaagagtctattgagctagttagtagtcctccggcccctgaatgcggctaatcctaactgcggagcgcataccctcaatccagggggtggtgcgtcgtaacgggcaactctgcagcggaaccgactactttgggtgtccgtgtttccttttattcttatattggctgcttatggtgacaatagagagattgttaccatatagctattggattggccatccagtgtctaacagagcaattgtatacttatttgttggatttgttccactatcatatacatccactaacaccttacactatattgtaagattgagcacaagaaa

SEQ ID NO: 18827 - DNA, 693 bp, synthetic construct; identical to SEQ ID NO: 829
  source 1..693: mol_type = other DNA

SEQ ID NO: 18828 - DNA, 723 bp, synthetic construct
  source 1..723: mol_type = other DNA
gttgtacccactcacagggcccactgggcgttagcactctggtaccccggtacctttgtgcgcctgttttatatccccccccattgaaacttagaagtaatgcacctcgatcaatagcgggcgtggcgcaccagccacgtcatgatcaagcacttctgtttccccggaccgagtatcaatagactgctaacgcggttgagggagaaaacgtccgttacccggccaactgcttcgagaaatccagtaacatcatgaaaattgcagagtgtttcgctcagcacttccccagtgtagatcaggtcgatgagtcaccgcgttccccacgggcgaccgtggcggtggctgcgttggcggcctgcctgtggggcaacccgcaggacgctctaatatggacatggtgtgaagaatctattgagccagttggtagtcctccggcccctgaatgcggctaatcctaactgcggagcacgcgccttcaatccagtgggtagcgtgtcgtaatgggtaactctgcagcggaaccgactactttgggtgtccgtgtttccatttattcttacattggctgcttatggtgacaattgaaagattgttaccatatagctattggattggccatccggtatcgaatagagcgattatctatcagtttattggatttattccgttgagtgtgcagcagtatcgcactttgcttttaatagtgagactgaatagtgcaaa

SEQ ID NO: 18829 - DNA, 660 bp, synthetic construct
  source 1..660: mol_type = other DNA
cgccccctccccaatttgcaacttagaagcaattcgcaacaccgatcaatagcaggcatggcgcaccagctatgtcttgatcaagcacttctgtttccccggaccgagtatcagtaaactgttcacgcggttgaaggagaaagcgtccgttatccggctaactacttcgagaaacccagtaacgccattgaaactgcagagtgtttcgctccacacttcccccgtgtagatcaggtcgatgagtcactgcaatccccacgggcgaccgtggcagtggctgcgctggcggcctgcctatggggcaacccataggacgctctaatgtggacatggtgtgaagagtctattgagctagttagtagtcctccggcccctgaatgcggctaatcctaactgcggagcacatgccctcaatccagagggtagtgtgtcgtaatgggcaactctgcagcggaaccgactactttgggtgtccgtgtttccttttattctcacattggctgcttatggtgacaatcactgaattgttaccatatagctattggattggccatccggtgtgcaatagagctatcatatacctatttgttggttttgtaccactgaccttaaaatctgtaaccactctcgactatatattgaccctcaatacaatcaaac

SEQ ID NO: 18830 - DNA, 657 bp, synthetic construct
  source 1..657: mol_type = other DNA
cccctccccaatttgtaacttagaagcaatttgcaacactgatcagtagcaggcatagcgcaccagctatgtcttgatcaagcacttctgtttccccggaccgagtatcaatagactgtccacacggttgaaggagaaaacgtccgttatccggctaactacttcgagaaacccagtagcgccattgaaactgcagagcgtttcgctccacacttcccccgtgtagatcaggtcgatgagtcactgcaatccccacgggcgaccgtggcagtggctgcgctggcggcctgcctatggggcaacccataggacgctctaatgtggacatggtgcgaagagtctattgagctagttagtagtcctccggcccctgaatgcggctaatcctaactgcggagcacatgccttcaatccagagggtagtgtgtcgtaatgggcaactctgcagcggaaccgactactttgggtgtccgtgtttccttttattctcacattggctgcttatggtgacaattacggaattgttaccatatagctattggattggccatccggtgtgcaatagagctattatatacctatttgttggctttgtaccactgaccttaaaatctataaccactctcgagtgtatattaacccttaatacaatcaaac

SEQ ID NO: 18831 - DNA, 657 bp, synthetic construct
  source 1..657: mol_type = other DNA
cccttccccaatttgcaacttagacgcaattcacaacaccgatcaatagcaggcatggcgcaccagctatgtcttgatcaagcacttctgtttccccggaccgagtatcaataaactgctcacgcggttgaaggagaaagcgtccgtcacccggctaactacttcgagaaacccagtaacgccattgaaactgcagagtgtttcgctccacactttccccgtgtagatcaggtcgatgagtcactgcaatccccacgggcgaccgtggcagtggctgcgctggcggcctgcctatggggcaacccataggacgctctaatgtggacatggtgtgaagagtctattgagctagttagtagtcctccggcccctgaatgcggctaatcctaactgcggagcacatgccctcaatccagagggtagtgtgtcgtaatgggcaactctgcagcggaaccgactactttgggtgtccgtgtttccttttattcttacattggctgcttatggtgacaatcactgaattgttaccatatagctattggattggccatccggtgtgcaatagagctatcatatacctatttgttggctttgtaccactgaccttaaaatctgtaaccactctcgactacatattaaccctcaatacaatcaaac

SEQ ID NO: 18832 - DNA, 657 bp, synthetic construct
  source 1..657: mol_type = other DNA
cccctccccaatttgcaacttagaagcaattcgcaacaccgatcaatagcaggcatggcgcaccagctatgtcttgatcaagcacttctgtttccccggaccgagtatcagtaaactgttcacgcggttgaaggagaaagcgtccgttatccggctaactacttcgagaaacccagtaacgccattgaaactgcagagtgtttcgctccacacttcccccgtgtagatcaggtcgatgagtcactgcaatccccacgggcgaccgtggcagtggctgcgctggcggcctgcctatggggcaacccataggacgctctaatgtggacatggtgagaagagtctattgagctagttagtagtcctccggcccctgaatgcggctaatcctaactgcggagcacatgccctcaatccagagggtagtgtgtcgtaatgggcaactctgcagcggaaccgactactttgggtgtccgtgtttccttttattctcacattggctgcttatggtgacaatcactgaattgttaccatatagctattggattggccatccggtgtgcaatagagctatcatatacctatttgttggttttgtaccactgaccttaaaatctgtaaccactctcgactatatattgaccctcaatacaatcaaac

SEQ ID NO: 18833 - DNA, 657 bp, synthetic construct
  source 1..657: mol_type = other DNA
cccctccccaatttgcaacttagaagcaattcgcaacaccgatcaatagcaggcatggcgcaccagctatgtcttgatcaagcacttctgtttccccggaccgagtatcagtaaactgttcacgcggttgaaggagaaagcgtccgttatccggctaactacttcgagaaacccagtaacgccattgaaactgcagagtgtttcgctccacacttcccccgtgtagatcaggtcgatgagtcactgcaatccccacgggcgaccgtggcagtggctgcgctggcggcctgcctatggggcaacccataggacgctctaatgtggacatggtgtgaagagtctattgagctagttagtagtcctccggcccctgaatgcggctaatcctaactgcggagcacatgccctcaatccagagggtagtgtgtcgtaatgggcaactctgcagcggaaccgactactttgggtgtccgtgtttccttttattctcacattggctgcttatggtgacaatcactgaattgttaccatatagctattggattggccatccggtgtgcaatagagctatcatatacctatttgttggttttgtaccactgaccttaaaatctgtaaccactctcgactatatattgaccctcaatacaatcaaac

SEQ ID NO: 18834 - DNA, 701 bp, synthetic construct
  source 1..701: mol_type = other DNA
gctagcacactgattctacggaatctttgtgcgcctgttttatatccctcccctaaaatagtaacttagaagttgaacatttacacgaccaatagcgggcgtggcgcaccagcctcgtcttggtcaagtactcctgtttccccggactgagtatcaataggctgctcacgcggctgaaggagaaagtgttcgttatccggctaactacttcgggaaacccagtaacaccatgaaagttgcggagtgtttcgctcagcacttcccccgtgtagatcaggctgatgagtcactgcgaaccccgcgggcgaccgtggcagtggctgcgttggcggcctgcctatggggcaacccataggacgctctaatacagacatggtgcgaagagtctactgagctagttggtattcctccggcccctgaatgcggctaatcctaactgcggagcacatgccctcaatccagagggtggtgtgtcgtaacgggcaactctgcagcggaaccgactactttgggtgtccgtgtttccttttattcttatactggctgcttatggtgacaattgaaaggttgttaccatatagctattggattggccatccggtgactaacagagctttgatttatcaattcattgggttcgtgcccctatcatctacagtttattcaactttggtgtacttattatatcttaatagtaagaa

SEQ ID NO: 18835 - DNA, 704 bp, synthetic construct
  source 1..704: mol_type = other DNA
gtgctagcactctggttccacgggacctttgtgcgcctgttttacgtcccctccccaatctgtaacttagaagcaatttgcaacaccgatcagtagcaggcatggcgcaccagctatgtcttgatcaagcacttctgtttccccggaccgagtatcaatagactgttcacgcggttgaaggagaaagcgtccgttatccggctaactacttcgagaaacccagtagcgccattaaaactgcagagtgtttcgctccacacttcccccgtgtagatcaggtcgatgagtcaccgcaatccccacgggcgaccgtggcggtggctgcgctggcggcctgcctatggggtaacccataggacgctctaatgtggacatggtgcgaagagtctattgagctagttagtagtcctccggcccctgaatgcggctaatcctaactgcggagcacatgccttcaatccagagggtagtgtgtcgtaatgggcaactctgcagcggaaccgactactttgggtgtccgtgtttccttttattcccacattggctgcttatggtgacaattatagaattgttaccatatagctattggattggccatccggtgtgcaatagagctattatatatctatttgttggctttgtaccactgacctcaaaatctgtaaccacccttaagtatatattaaccctcaatacaatcaaac

SEQ ID NO: 18836 - DNA, 691 bp, synthetic construct
  source 1..691: mol_type = other DNA
ctgattttacggaatctttgtgcgcctgttttataacccctcccctaagcagtaacttagaagcttcacattatcacgaccaatagcgggcgtggcgcaccagtcacgtcttggtcaagcactcctgtttccccggactgagtatcaatagactgctcacgcggttgaaggagaaaatgttcgttatccggctaactacttcgagaaacctagtagcaccgtgaaagttgcggagtgtttcgctcagcacttcccccgtgtagatcaggtcgatgagtcactgtgaaccccacgggtgaccgtgacagtggctgcgttggcggcctgcccatggggtaactcatgggacgctctaatacagacacggtgtgaagagtctattgagctagttagtagccctccggcccctgaatgcggctaatcctaactgcggagcgcgcaccttcaatccaggaggcggcgcgtcgtaatgggtaactctgcagcggaaccgactactttgggtgtccgtgtttccttttattccttattggctgcttatggtgacaattgaaaagttgttaccatatagctattggattggccatccggtaaccaacagagctattgtttacctgttcgttggatacgtccctctcgacttcaaggccattcaaactcttgattatatactacatctcaactgtaagaa

SEQ ID NO: 18837 - DNA, 656 bp, synthetic construct
  source 1..656: mol_type = other DNA
ccctccccaatttgtaacttagaagcaattcgcaacaccgatcaatagcaggcatggcgcaccagctatgtcttgatcaagcacttctgtttccccggaccgagtatcagtaaactgttcacgcggttgaaggagaaagcgtccgttatccggctaactacttcgagaaacccagtaacgccattgaaactgcagagtgtttcgctccacacttcccccgtgtagatcaggtcgatgagtcactgcaatccccacgggcgaccgtggcagtggctgcgctggcggcctgcctatggggcaacccataggacgctctaatgtggacatggtgtgaagagtctattgagctagttagtagtcctccggcccctgaatgcggctaatcctaactgcggagcacatgccctcaatccagagggtagtgtgtcgtaatgggcaactctgcagcggaaccgactactttgggtgtccgtgtttccttttattctcacattggctgcttatggtgacaatcactgaattgttaccatatagctattggattggccatccggtgtgcaatagagctatcatatacctatttgttggttttgtaccactgaccttaaaatctgtaaccactctcgactatatattgaccctcaatacaatcaaac

SEQ ID NO: 18838 - DNA, 636 bp, synthetic construct
  source 1..636: mol_type = other DNA
cttagaagcagcaaaccacgatcaatagcaggcataacgctccagttatgtcttgatcaagcacttctgtttccccggaccgagtatcaatagactgctcgcgcggttgaaggagaaaacgttcgttatccggctagctacttcgggaaacctagtaacaccatgaaagttgcggagggcttcgttcagcactcccccagtgtagatcaggccgatgagtcaccgcattccccacgggcgaccgtggcggtggctgcgttggcggcctgcccatggggtaacccatggggcgctctaatacggacatggtgtgaagagtctactgagctagttagtagtcctccggcccctgaatgcggctaatcccaactgcggagcacacgcccacaagccagcgggtagtgtgtcgtaacgggcaactctgcagcggaaccgactactttgggtgtccgtgtttccttttatctttatattggctgcttatggtgacaattaaagaattgttaccatatagctattggattggccatccggtgtgtaacagagcaattgtttacctatttattggttttgtaccattaaccttgaagactgtgaccacccttaattatatcttgaccctcaacacagctaaac

SEQ ID NO: 18839 - DNA, 720 bp, synthetic construct
  source 1..720: mol_type = other DNA
cacccacagggcccactgggcgctagcacactggttctgcgggacttttgtgcgcctgttttataacccttccctaagcagtaacttagaagctttgtacaatcatggccaatagtgggcgcgacgcaccagtcacgtcttggtcaagcacttctgtatccccggactgagtatcaatagactgctcacgcggttgaaggagaaaacgttcgttacccggctaactacttcgagaaacctagtagcaccatgaaagttgcggagtgtttcgctcagcacttcccccgtgtagatcaggtcgatgagtcactgtaaaccccacgggcgaccgtgacagtggctgcgttggcggcctgcccatggggtaacccatgggacgctctaatacagacatggtgcaaagagtctattgagctagttagcagtcctccggcccctgaatgcggctaatcctaactgcggagcgcgcaccctcaacccagggggcggcgcgtcgtaatgggtaactctgcagcggaaccgactactttgggtgtccgtgtttccttttattctttattggctgcttatggtgacaattgaaaagttgttaccatatagctattggattggccatccggtgtctaacagagctattgtttacctattcattggcttcgtccctctcaatctcaaggccattcaaactctcagttacatattgctcctcaattgtaagaa

SEQ ID NO: 18840 - DNA, 682 bp, synthetic construct
  source 1..682: mol_type = other DNA
gaatctttgtgcgcctgttttacaccccctccccaattcgcaacttagaagcaatatacaacactgatcaacagcgggcgtggcgcaccagccatgtcttgatcaagcacttctgtttccccggactgagtatcgatagactgctcacgcggttgaaggagaaagcgtccgttatccggctaactacttcgagaaacctagtagcaccattgaagctgcagagtgtttcgctcggcacttcccccgtgtagatcaggtcgatgagtcactgcaatccccacgggcgaccgtggcagtggctgcgctggcggcctgcctatggggtaacccataggacgctctaatgtggacatggtgcgaagagtctattgagctagttagtagtcctccggcccctgaatgcggctaatcctaactgcggagcacatgccttcaacccagagggtagtgtgtcgtaatgggcaactctgcagcggaaccgactactttgggtgtccgtgtttctttttattctcatattggctgcttatggtgacaattacagaattgttaccatatagctattggattggccatccggtgtgtaatagagctgttatatacctgtttgttggctttgtgccactaactttaaaatctataactaccctcaattttatattaaccctcaatacagttaaac

SEQ ID NO: 18841 - DNA, 691 bp, synthetic construct
  source 1..691: mol_type = other DNA
ctggttctgcggaacctttgtgcgcctgttttataacccttcccttaagcagtaacttagaagctttgtacaatcatggccaacagtgggcgtggcgcgccagtcacgtcttggtcaagcacttctgtatccccggactgagtatcaatagactgctcacgcggttgaaggagaaaacgttcgtcacccggctaattacttcaagaaacctagtagcaccatgaaagttgcggagtgtttcgctcagcacttcccccgtgtagatcaggtcgatgagtcactgtaaaccccacgggcgaccgtgacagtggctgcgttggcggcctgcccatggggtaacccatgggacgctctaatacggacatggtgtgaagagtctattgagctagttagtagtcctccggcccctgaatgcggctaatcctaactgcggagcgcgcaccctcaacccagggggcagcgcgtcgtaatgggtaactctgcagcggaaccgactactttgggtgtccgtgtttccttttactctttattggctgcttatggtgacaattgaaaagttgttaccatatagctattggattggccatccggtgtctaacagagctattgtttacctgttcattggattcgtccctcttaatctcaagaccattcaaactctcgattacatattgctccttaactgtaagaa

SEQ ID NO: 18842 - DNA, 688 bp, synthetic construct
  source 1..688: mol_type = other DNA
ggtactgaggtacctttgtgcgcctgttttacctcccttcccccgaagtaacttagaagctgtgaaccaacgatcaatagtaggtgtgacataccagtcatatctcgatcaagcacttctgtttccccggactgagtatcaataggctgctcgcgcggctgaaagagaaaacgttcgttacccggccaactacttcgagaagcttagtaccaccatgaacgaggcagagcgtttcgctcggcacaatcccagtgtagatcaggctgatgagtcactgcaatccccatgggcgaccatggcagtggctgcgttggcggcctgcccatggagaaatccatgggacgctctaattttgacatggtgcgaagagcctattgagctagttggtagtcctccggcccctgaatgcggctaatcccaactgcggagcacacacccacaagccagtgggcagtgtgtcgtaacgggcaactctgcagcggaaccgactactttgggtgtccgtgtttccttttattcttatgttggctgcttatggtgacaatcaaagagttgttaccatatagctattggattggccgtccggtgtgcaacagagcaattgtttacttatttattggttttgtaccattgacactgaagtctgtagtcacccttaattttatcttgaccctcaatacagttaaac

SEQ ID NO: 18843 - DNA, 678 bp, synthetic construct
  source 1..678: mol_type = other DNA
tacctttgtgcgcctgtttttacttcccttccccaaagtaacttagaagttgcgcaccaacgatcaatagcaggtgtgacacaccagtcatatcttgatcaagtacttctgtttccccggaccgagtatcaataggctgctcgcgcggctgaaggagaaaacgttcgttacccgaccaactacttcgagaagcttagtaccaccatgaacgaggcagagtgtttcgttcagcacaaccccagtgtagatcaggctgatgagtcactgcaacccccatgggcaaccatggcagtggctgcgttggcggcctgcccatggagaaatccatgggacgctctaattctgacatggtgtgaagagcctattgagctagctggtagtcctccggcccctgaatgcggctaatcctaactgcggagcacatgctcacaaaccagtgggtggtgtgtcgtaatgggcaactctgcagcggaaccgactactttgggtgtccgtgtttccttttattcttatgttggctgcttatggtgacaatcaaagaattgttaccatatagctattggattggccatccggtgtgcaacagagcaattgtttacctatttattggtttcgtaccactatcactgaagtctgtgaccactctcaaattcattttgaccctcaactcaatcaaac

SEQ ID NO: 18844 - DNA, 666 bp, synthetic construct
  source 1..666: mol_type = other DNA
ctgttttataacccctcccctaagcagtaacttagaagcttcacactatcacgaccaatagtaggcgtggcgcaccagtcacgtcttggtcaagcacttctgtctccccggactgagtatcaatagactgctcacgcggttgaaggagaaagcgttcgttatccggctaactacttcgagaaacttagtagcaccgtgaaagttgcggagtgtttcgctcagcacttccctcgtgtagatcaggtcgatgagtcactgtgaaccccacgggcgaccgtgacagtggctgcgttggcggcctgcccatggggtaacccatgggacgctctaatacagacacggtgcgaagagtctattgagctagttagtagtcctccggcccctgaatgcggctaatcctaactgcggagcgcgcaccctcaatccagtgggcagcgcgtcgtaatgggtaactctgcagcggaaccgactactttgggtgtccgtgtttccttttattctttattggctgcttatggtgacaattgaaaagttgttaccatatagctattggattggccatccggtgaccaacagagctattgtttatctgttcattgggtacgtccctctcaatctcaaggtcattcaaactcttgattatatactacttctcaattataagaa

SEQ ID NO: 18845 - DNA, 724 bp, synthetic construct
  source 1..724: mol_type = other DNA
tacccactcacagggcccactgggcgttagcactctggcactaaggtacctttgtgcgcctgttttaactcccttcccctgaagtaacttagaagcagtaaactaatgatcaatagtgggcatgacataccagccatgtctcgatcaagcacttctgtttccccggactgagtatcaataggctgctcgcgtggctgaaagagaaaacgttcgtcacccggccagctacttcgagaagcttagtaccatcatgaacgaagcagagcgtttcgctcagcacaatcccagtgtagatcaggctgatgagtcactgcaaaccccatgggcgaccatggcagtggctgcgttggcggcctgcccatggagaaatccatgggacgctctaattctgacatggtgcgaagagcctattgagctagctggtagtcctccggcccctgaatgcggctaatcctaactgcggagcacgcacccacaaaccagtgggcagtgtgtcgtaatgggtaactctgcagcggaaccgactactttgggtgtccgtgtttccttttattcttatattggctgcttatggtgacaatcaaagagttgttaccatatagctattggattggccatccggtgtgcaacagagcaattgtttacctattcattgggtttgtaccactgacgttgaagtctgtgaccacactcaactttatcctgaacctcaatacagtaaaac

SEQ ID NO: 18846 - DNA, 683 bp, synthetic construct
  source 1..683: mol_type = other DNA
ggaatctttgtgcgcctgttttacaccccctccccaattcgcaacttagaagcaatatacaacactgatcaacagcgggcgtggcgcaccagccatgtcttgatcaagcacttctgtttccccggactgagtatcaatagactgctcacgcggttgaaggagaaagcgtccgttatccggctaactacttcgagaaacctagtagcaccattgaagctgcagagtgtttcgctcggcacttcccccgtgtagatcaggtcgatgagtcactgcaatccccacgggcgaccgtggcagtggctgcgctggcggcctgcctatggggtaacccataggacgctctaatgtggacatggtgcgaagagtctattgagctagttagtagtcctccggcccctgaatgcggctaatcctaactgcggagcacatgccttcaacccagagggtagtgtgtcgtaatgggcaactctgcagcggaaccgactactttgggtgtccgtgtttctttttattctcatattggctgcttatggtgacaattacagaattgttaccatatagctattggattggccatccggtgtgtaatagagctgttatatacctgtttgttggctttgtgccactaactttaaaatctataactaccctcaattttatattaaccctcaatacagttaaac

SEQ ID NO: 18847 - DNA, 698 bp, synthetic construct
  source 1..698: mol_type = other DNA
gcgctagcactctggtatcttggtacctttgtgcgcctgttttatacccctccccagtgaaacttagaagcagcaaaacacgaccaatagcaggcataacgcaccagttatgtcttggtcaagcacttctgtttccccggactgagtatcaatagactgctcgcgcggttgaaggagaaaacgttcgttatccggctagctacttcggaaaacctagtaacaccatgaaagttgcggagagcttcgttcagcactcccccagtgtagatcaggtcgatgagtcaccgcattccccacgggcgaccgtggcggtggctgcgttggcggcctgcccatggggtaacccatggggcgctctaatacggacatggtgtgaagagtctactgagctagctagtagtcctccggcccctgaatgcggctaatcccaactgcggagcacacgcccacaagccagcgggtagtgtgtcgtaacgggtaactctgcagcggaaccgactactttgggagtccgtgtttccttttaactttatattggctgcttatggtgacaattaaagaattgttaccatatagctattggattggccatccggtgtgcaacagagcaattatttacctatttattggttttgtaccattaactttggattctgtaaccacccttaattatatcttgacccttaacacagctaaac

SEQ ID NO: 18848 - DNA, 683 bp, synthetic construct
  source 1..683: mol_type = other DNA
aaatccttgtgcgcctggttttatatcccttccccaatccgaaacatagaagtaatgcgcaccactgatcaatagcaggcgtaacgcgccagttacgtcacgatcaagcacatctgtctccccggaccgagtatcaatagactgcttacgcggttgaaggagaaagcgttcgttatccggctaactacttcgagaagcccagtagcaccatggaagctgcagggtgtttcgctcagcacttcccccgtgtagatcaggtcgatgagccactgcaacccccacaggtgactgtggcagtggctgcgttggcggcctgcctatggggagacccataggacgctctaatgtggacatggtgcgaagagcctattgagctagttagtagtcctccggcccctgaatgcggctaatcctaactgcggagcacacgccttcaacccagagggtagtgtgtcgtaacgggcaactctgcagcggaaccgactactttgggtgtccgtgtttctttttatccttatattggctgcttatggtgacaattacagaattgttaccatatagctattggattggccatccggtgtgcaatagagctgttatatacctctttgttggttttgtaccactaactttaaaatctatagctacccttaattttatattgaccctcaacacagtcaaac

SEQ ID NO: 18849 - DNA, 683 bp, synthetic construct
  source 1..683: mol_type = other DNA
tgaggtacctttgtgcgcctgttttacctcccctcccccgaagcaacttagaagctgtgaaccaacgatcaatagtaggtgtgacataccagtcatatctcgatcaagcacttctgtttccccggactgagtatcaataggctgctcgcgcggctgaaagagaaaacgttcgttacccggccaactacttcgagaagcttagtaccaccatgaacgaggcagagcgtttcgctcggcacaaccccagtgtagatcaggctgatgagtcactgcaacccccatgggcgaccatggcagtggctgcgttggcggcctgcccatggagaaatccatgggacgctctaattttgacatggtgcgaagagcctattgagctagttggtagtcctccggcccctgaatgcggctaatcctaactgcggagcacacacccacaaaccagtgggcagtgtgtcgtaacgggcaactctgcagcggaaccgactactttgggtgtccgtgtttccttttattcttatgttggctgcttatggtgacaactaaagagttgttaccatatagctattggattggccacccggtgtgcaacagagcaattgtttacctatttattggttttgtaccgttgacgctgaagtctgtggtcacccttaattttatcttgatcctcaacacggtcaaac

SEQ ID NO: 18850 - DNA, 604 bp, synthetic construct
  source 1..604: mol_type = other DNA
cataacgctccagttatgtcttgatcaagcacttctgtctccccggactgagtatcaatagactgctcgcgcggttgaaggagaaaacgttcgttatccggctagctacttcggaaaacctagtaacaccatgaaagttgcggagagcttcattcagcactcccccagtgtagatcaggtcgatgagtcaccgcattccccacgggcgaccgtggcggtggctgcgttggcggcctgcccatggggtaacccatggggcgctctaatacggacatggtgtgaagagtctactgagctagttagtagtcctccggcccctgaatgcggctaatcccaactgcggagcacacgcccacaagccagcgggtagtgtgtcgtaacgggtaactctgcagcggaaccgactactttgggtgtccgtgtttctttttatctttatattggctgcttatggtgacaattaaagaattgttaccatatagctattggattggccatccggtgtgcaacagagcaattgtttacctatttattggatttgtaccattaaccttgaagtctgtgaccacccttaattatatcttgacccttaacacagctaaac

SEQ ID NO: 18851 - DNA, 681 bp, synthetic construct
  source 1..681: mol_type = other DNA
aatccttgtgtgcctgttttatatccctcccctaattcgaaacatagaagtaatgcgcaccactgatcaatagcaggcgtaacgcgccagttacgtctcgatcaagcacatctgtttccccggaccgagtatcaatagactgctcacgcggttgaaggagaaagtgttcgttatccggctaactacttcgagaagcccagtaacaccatggaagctgcagggtgtttcgctcaacacttcccccgtgtagatcaggtcgatgagtcactgcaatccccacgggtgaccgtggcagtggctgcgttggcggcctgcctatggggagacccataggacgctctaatgtggacatggtgcgaagagtctattgagctagttagtaatcctccggcccctgaatgcggctaatcctaactgcggagcacatgccttcaatccagagggtagtgtgtcgtaacgggcaactctgcagcggaaccgactactttgggtgtccgtgtttctttttattcttatattggctgcttatggtgacaattacagaattgttaccatatagctattggattggccatccggtgtgtaatagagctattatatacctgtttgttggttttgtgccactaactttaaaatctatagttactctcaattttatattgaccctcaacacagctaaac

SEQ ID NO: 18852 - DNA, 692 bp, synthetic construct
  source 1..692: mol_type = other DNA
ctgatttacgaaatccttgtgcgcctgttttatatcccttccctaattcgaaacatagaagtaatgcgcaccactgatcaatagcaggcgtaacgcgccagttacgtctcgatcaagcacatctgtctccccggaccgagtatcaatagactgcttacgcggttgaaggagaaagcgttcgttatccggctaactacttcgagaagcccagtagcaccatggaagctgcagggtgtttcgctcagcacttcccccgtgtagatcaggtcgatgagccactgcaacccccacaggtgactgtggcagtggctgcgttggcggcctgcctatggggagacccataggacgctctaatgtagacatggtgcgaagagcctattgagctagttagtagtcctccggcccctgaatgcggctaatcctaactgcggagcacatgccttcaacccagagggtagtgtgtcgtaacgggcaactctgcagcggaaccgactactttgggtgtccgtgtttctttttattcttatattggctgcttatggtgacaactacagaattgttaccatatagctattggattggccatccggtgtgtaatagagctgttatatacctgtttgttggttttgtaccactaactttaaaatctataactacccttaattttatattgaccctcaacgcagttaaac

SEQ ID NO: 18853 - DNA, 623 bp, synthetic construct
  source 1..623: mol_type = other DNA
aaccacgatcaatagcaggcataacgctccagttatgtcttgatcaagcacttctgtctccccggactgagtatcaatagactgctcgcgcggttgaaggagaaaacgttcgttatccggctagctacttcggaaaacctagtaacaccatgaaagttgcggagagcttcattcagcactcccccagtgtagatcaggtcgatgagtcaccgcattccccacgggcgaccgtggcggtggctgcgttggcggcctgcccatggggtaacccatggggcgctctaatacggacatggtgtgaagagtctactgagctagttagtagtcctccggcccctgaatgcggctaatcccaactgcggagcacacgcccacaagccagcgggtagtgtgtcgtaacgggtaactctgcagcggaaccgactactttgggtgtccgtgtttctttttatctttatattggctgcttatggtgacaattaaagaattgttaccatatagctattggattggccatccggtgtgcaacagagcaattgtttacctatttattggatttgtaccattaaccttgaagtctgtgaccacccttaattatatcttgacccttaacacagctaaac

SEQ ID NO: 18854 - DNA, 720 bp, synthetic construct
  source 1..720: mol_type = other DNA
ccacaggacccacgcggtgctagcactctggttccacgggacctttgtgcgcctgttttacgtcccctccccaatctgtaacttagaagcaatttgcaacaccgatcagtagcaggcatggcgcaccagctatgtcttgatcaagcacttctgtttccccggaccgagtatcaatagactgttcacgcggttgaaggagaaagcgtccgttatccggctaactacttcgagaaacccagtagcaccattaaaactgcagagtgtttcgctccacacttcccccgtgtagatcaggtcgatgagtcaccgcaatccccacgggcgaccgtggcggtggctgcgctggcggcctgcctatggggtaacccataggacgctctaatgtggacatggtgcgaagagtctattgagctagttagtagtcctccggcccctgaatgcggctaatcctaactgcggagcacatgccttcaatccagagggtagtgtgtcgtaatgggcaactctgcagcggaaccgactactttgggtgtccgtgtttccttttattcccacattggctgcttatggtgacaattatagaattgttaccatatagctattggattggccatccggtgtgcaatagagctattatatatctatttgttggctttgtaccactgacctcaaaatctgtaaccacccttaagtatatattaaccctcaatacaatcaaac

SEQ ID NO: 18855 - DNA, 672 bp, synthetic construct
  source 1..672: mol_type = other DNA
gtgcctgttttatatcccttccctaattcgaaacatagaagtaatgcgcaccactgatcaatagcaggcgtaacgcgccagttacgtctcgatcaagcacatctgtttccccggaccgagtatcaatagactgctcacgcggttgaaggagaaagtgttcgttatccggctaactacttcgagaagcccagtagcaccatggaagctgcagggtgtttcgctcaacacttcccccgtgtagatcaggtcgatgagtcactgcaatccccacgggtgaccgtggcagtggctgcgttcgcggcctgcctatggggagacccataggacgctctaatgtggacatggtgcgaagagtctattgagctagttagtaatcctccggcccctgaatgcggctaatcctaactgcggagcacatgccttcaacccagaaggtagtgtgtcgtaacgggcaactctgcagcggaaccgactactttgggtgtccgtgtttctttttattcttatattggctgcttatggtgacaattacagaattgttaccatatagctattggattggccatccggtgtgtaatagagctattatatacctgtttgttggttttgtgccactaactttaaaatctatagttactctcaattttatattgaccctcaacacagctaaac

SEQ ID NO: 18856 - DNA, 650 bp, synthetic construct
  source 1..650: mol_type = other DNA
cccccccaatgaaacttagaagcagcaaaccacgatcaatagtaggcataacgctccagttatgtcttgatcaagcacttctgtttccccggactgagtatcaatagactgctcgcgcggttgaaggagaaaacgttcgttatccggctagctacttcggaaaacctagtaacaccatgaaagttgcggagagcttcgttcagcactcccccagtgtagatcaggtcgatgagtcaccgcattccccacgggcgaccgtggcggtggctgcgttggcggcctgcccatggggtaacccatggggcgctctaatacggacatggtgtgaagagtctactgagctagttagtagtcctccggcccctgaatgcggctaatcccaactgcggagcacacgcccacaagccagcgggtagtgtgtcgtaacgggtaactctgcagcggaaccgactactttgggtgtccgtgtttccttttatctttatattggctgcttatggtgacaattaaagaattgttaccatatagctattggattggccatccggtgtgcaacagagcaattatttaccaatttattggttttgtaccattaaccttgaattctgtgaccacccttaattatatcttgacccttaacgcagctaaac

SEQ ID NO: 18857 - DNA, 650 bp, synthetic construct
  source 1..650: mol_type = other DNA
cccccccaatgaaacttagaagcagcaaaccacgatcaatagtaggcataacgctccagttatgtcttgatcaagcacttctgtttccccggactgagtatcaatagactgctcgcgcggttgaaggagaaaacgttcgttatccggctagctacttcggaaaacctagtaacaccatgaaagttgcggagagcttcgttcagcactcccccagtgtagatcaggttgatgagtcaccgcattccccacgggcgaccgtggcggtggctgcgttggcggcctgcccatggggtaacccatggggcgctctaatacggacatggtgtgaagagtctactgagctagttagtagtcctccggcccctgaatgcggctaatcccaactgcggagcacacgcccacaagccagcgggtagtgtgtcgtaacgggtaactctgcagcggaaccgactactttgggtgtccgtgtttccttttatctttatattggctgcttatggtgacaattaaagaattgttaccatatagctattggattggccatccggtgtgcaacagagcaattatttaccaatttattggttttgtaccattaaccttgaattctgtgaccacccttaattatatcttgacccttaacgcagctaaac

SEQ ID NO: 18858 - DNA, 650 bp, synthetic construct
  source 1..650: mol_type = other DNA
cccccccaatgaaacttagaagcagcaaaccacgatcaatagtaggcataacgctccagttatgtcttgatcaagcacttctgtttccccggactgagtatcaatagactgctcgcgcggttgaaggagaaaacgttcgttatccggctagctacttcggaaaacctagtaacaccatgaaagttgcggagagcttcgttcagcactcccccagtgtagatcaggtcgatgagtcaccgcattccccacgggcgaccgtggcggtggctgcgttggcggcctgcccatggggtaacccatggggcgctctaatacggacatggtgtgaagagtctactgagctagttagtagtcctccggcccctgaatgcggctaatcccaactgcggagcacacgcccacaagccagcgggtagtgtgtcgtaacgggtaactctgcagcggaaccgactactttgggtgtccgtgtttccttttatctttatactggctgcttatggtgacaattaaagaattgttaccatatagctattggattggccatccggtgtgcaacagagcaattatttaccaatttattggttttgtaccattaaccttgaattctgtgaccacccttaattatatcttgacccttaacgcagctaaac

SEQ ID NO: 18859 - DNA, 668 bp, synthetic construct
  source 1..668: mol_type = other DNA
cctgtttttactccccttcccccgaagtaacttagaagctgtaaatcaacgatcaatagcaggtgtggcacaccagtcataccttgatcaagcacttctgtttccccggactgagtatcaataggctgctcgcgcggctgaaggagaaaacgttcgttacccgaccaactacttcgagaagcttagtaccaccatgaacgaggcagagtgtttcgctcagcacaaccccagtgtagatcaggctgatgagtcactgcaacccccatgggcgaccatggcagtggctgcgttggcggcctgcccatggagaaatccatgggacgctctaattctgacatggtgtgaaagagcctattgagctagctggtagtcctccggcccctgaatgcggctaatcctaactgcggagcacatgctcacgaaccagtgggtggtgtgtcgtaacgggcaactctgcagcggaaccgactactttgggtgtccgtgtttccttttattcctatattggctgcttatggtgacaatcaaagagttgttaccatatagctattggattggccatccggtgtgcaacagggcaattgtttacctatttattggttttgtaccattatcactgaagtctgtgatcactctcaaattcattttgaccctcaacacaatcaaac

SEQ ID NO: 18860 - DNA, 684 bp, synthetic construct
  source 1..684: mol_type = other DNA
cgggacctttgtgcgcctgttttatgtcccctccccaatttgtaacttagaagtaatttgcaacactgatcagtagcaggcatagcgcaccagctatgtcttgatcaagcacttctgtttccccggaccgagtatcaatagactgtacacacggttgaaggagaaagcgtccgttacccggctaactacttcgagaaacccagtagcaccattgaaactacagagtgtttcgctccacacttcccccgtgtagatcaggtcgatgagtcactgcaatccccacgggcgaccgtggcagtggctgcgctggcggcctgcctatggggcaacccataggacgctctaatgtggacatggtgtgaagagtctattgagctagttagtagtcctccggcccctgaatgcggctaatcctaactgcggagcacatgccttcaatccagagggtagtgtgtcgtaatgggcaactctgcagcggaaccgactactttgggtgtccgtgtttccttttattctcacattggctgcttatggtgacaattatagaattgttaccatatagctattggattggccatccggtgtgcaatagagctattatatacctatttgttggctttgtaccactaaccttaaaatctttaaccactctcgagtgtatattaacccttaatacaatcaaac

SEQ ID NO: 18861 - DNA, 675 bp, synthetic construct
  source 1..675: mol_type = other DNA
ctttgtgcgcctgtttttacttcccttccccgaagtaacttagaagctgtaaaccaacgatcaatagtaggtgtgacacgccagtcatatcttgatcaagcacttctgtttccccggactgagtatcaataggctgctcgcgcggctgaaggagaaaacgttcgttacccgaccaactacttcgagaagcttagtaccaccatgaacgaggcagagtgtttcgctcagcacaaccccagtgtagatcaggctgatgagccactgcaacccccatgggcgaccatggcagtggctgcgttggcggcctgcccatggagaaatccatgggacgctctaattctgacatggtgtgaagagcctattgagctagctggtagtcctccggcccctgaatgcggctaatcctaactgcggagcacatgctcacaaaccagtgggtggtgtgtcgtaacgggcaactctgcagcggaaccgactactttgggtgtccgtgtttccttttattcttatattggctgcttatggtgacaatcaaagaattgttaccatatagctattggattggccattcggtgtgcaacagagcaattgtttacctatttattggttttgtaccactatcactgaagtctgtgatcaccctcgaattcattttgaccctcaacacaatcagac

SEQ ID NO: 18862 - DNA, 683 bp, synthetic construct
  source 1..683: mol_type = other DNA
taaggtacctttgtgcgcctgtttttacttcccttccccaaagtaacttagaagttgcgcaccaacgatcaatagcaggtgtgacacaccagtcatatcttgatcaagtacttctgtttccccggaccgagtatcaataggctgctcgcgcggctgaaggagaaaacgttcgttacccgaccaactacttcgagaagcttagtaccaccatgaacgaggcagagtgtttcgttcagcacaaccccagtgtagatcaggctgatgagtcactgcaacccccatgggcgaccatggcagtggctgcgttggcggcctgcccatggagaaatccatgggacgctctaattctgacatggtgtgaagagcctattgagctagctggtagtcctccggcccctgaatgcggctaatcctaactgcggagcacatgctcacaagccagtgggtggtgtgtcgtaatgggcaactctgcagcggaaccgactactttgggtgtccgtgtttccttttattcttatgttggctgcttatggtgacaatcaaagaattgttaccatatagctattggattggccatccggtgtgcaacagagcaattgtttacctatttattggtttcgtaccactatcactgaagtctgtgaccactctcaaattcattttgaccctcaactcaatcaaac

SEQ ID NO: 18863 - DNA, 714 bp, synthetic construct
  source 1..714: mol_type = other DNA
gggcccactgggcgctagcactccggtaccacggtacctttgtgcgcctgttttatccccccaaacccccgtaacgctacactagaagatagacaatgcgaccaatagccagtggggcaacccagcctcactctggtcaagcacctctgtttccccgggcttagtaccaataagctgctcgcgcggctgaaggggaacgcgcccgttatccggctaactacttcgagaaacctagtaccaccatggaagttgcagagtgtttcgctcagcacaaccccagtgtagatcaggccgatgagtcaccgtgcaccccacgggcgaccgtgacggtggctgcgctggcggcctgcccatggtgtacaccatgggacgctctaatacagacatggtgcgaagagtctattgagctagttagtagtcctccggcccctgaatgcggctaatcctaactgcggggcacgcgctctcaacccagagagtagcgtgtcgtaacgggcaactctgcagcggaaccgactactttgggtgtccgtgtttccctttatttttacattggctgcttatggtgacaattgagagattgttaccatatagctattggattggccatccggtgtgtaacagagctatcatatattcttttgttggctttgtaccactaaattatactgtaattattactttaaggtacatcttgcttttaaacacagcaaa

SEQ ID NO: 18864 - DNA, 714 bp, synthetic construct
  source 1..714: mol_type = other DNA
gggcccactgggcgctagcactccggtaccacggtacctttgtgcgcctgttttatccccccaaacccccgtaacgctacactagaagatagacaatgcgaccaatagccagtggggcaacccagcctcactctggtcaagcacctctgtttccccgggcttagtaccaataagctgctcgcgcggctgaaggggaacgcgcccgttatccggctaactacttcgagaaacctagtaccaccatggaagttgcagagtgtttcgctcagcacaaccccagtgtagatcaggccgatgagtcaccgtgcaccccacgggcgaccgtgacggtggctgcgctggcggcctgcccatggtgtacaccatgggacgctctaatacagacatggtgcgaagagtctattgagctagttagtagtcctccggcccctgaatgcggctaatcctaactgcggagcacgcgctctcaacccagagagtagcgtgtcgtaacgggcaactctgcagcggaaccgactactttgggtgtccgtgtttccctttatttttacattggctgcttatggtgacaattgagagattgttaccatatagctattggattggccatccggtgtgtaacagagctatcatatattcttttgttggctttgtaccactaaattatactgtaattattactttaaggtacatcttgcttttaaacacagcaaa

SEQ ID NO: 18865 - DNA, 714 bp, synthetic construct
  source 1..714: mol_type = other DNA
gggcccactgggcgctagcactccggtaccacggtacctttgtgcgcctgttttatccccccaaacccccgtaacgctacactagaagatagacaatgcgaccaatagccagtggggcaacccagcctcactctggtcaagcacctctgtttccccgggcttagtaccaataagctgctcgcgcggctgaaggggaacgcgcccgttatccggctaactacttcgagaaacctagtaccaccatggaagttgcagagtgtttcgctcagcacaaccccagtgtagatcaggccgatgagtcaccgtgcaccccacgggcgaccgtgacggtggctgcgctggcggcctgcccatggtgtacaccatgggacgctctaatacagacatggtgcgaagagtctattgagctagttagtagtcctccggcccctgaatgcggctaatcctaactgcggagcacgcgctctcaacccagagagtagcgtgtcgtaacgggcaactctgcagcggaaccgactactttgggtgtccgtgtttccctttatttttacattggctgcttatggtgacaattgagagattgttaccatatagctattggattggccatccggtgtgtaacagagctatcatatattcttttgttggctttgtgccactaaattatactgtaattattactttaaggtacatcttgcttttaaacacagcaaa

SEQ ID NO: 18866 - DNA, 714 bp, synthetic construct
  source 1..714: mol_type = other DNA
gggcccactgggcgctagcactccggtaccacggtacctttgtgcgcctgttttatccccccaaacccccgtaacgctacactagaagatagacaatgcgaccaatagccagtggggcaacccagcctcactctggtcaagcacctctgtttccccgggcttagtaccaataagctgctcgcgcggctgaaggggaacgcgcccgttatccggctaactacttcgagaaacctagtaccaccatggaagttgcagagtgtttcgctcagcacaaccccagtgtagatcaggccgatgagtcaccgtgcaccccacgggcgaccgtgacggtggctgcgctggcggcctgcccatggtgtacaccatgggacgctctaatacagacatggtgcgaagagtctattgagctagttagtagtcctccggcccctgaatgcggctaatcctaactgcggagcacgcgctctcaacccagagagtagcgtgtcgtaacgggcaactctgcagcggaaccgactactttgggtgtccgtgtttccctttatttttacattggctgcttatggtgacaattgagagattgttaccatatagctattggattggccatccggtgtgtaacagagctatcatatattcttttgttggctttgtgccactaaattatactgtgattattactttaaggtacatcttgcttttaaacacagcaaa

SEQ ID NO: 18867 - DNA, 714 bp, synthetic construct
  source 1..714: mol_type = other DNA
gggcccactgggcgctagcactccggtaccacggtacctttgtgcgcctgttttatccccccaaacccccgtaacgctgcactagaagatagacaatgcgaccaatagccagtggggcaacccagcctcactctggtcaagcacctctgtttccccgggcttagtaccaataagctgctcgcgcggctgaaggggaacgcgcccgttatccggctaactacttcgagaaacctagtaccaccatggaagttgcagagtgtttcgctcagcacaaccccagtgtagatcaggccgatgagtcaccgtgcaccccacgggcgaccgtgacggtggctgcgctggcggcctgcccatggtgtacaccatgggacgctctaatacagacatggtgcgaagagtctattgagctagttagtagtcctccggcccctgaatgcggctaatcctaactgcggagcacgcgctctcaacccagagagtagcgtgtcgtaacgggcaactctgcagcggaaccgactactttgggtgtccgtgtttccctttatttttacattggctgcttatggtgacaattgagagattgttaccatatagctattggattggccatccggtgtgtaacagagctatcatatattcttttgttggctttgtaccactaaattatactgtaattattactttaaggtacatcttgcttttaaacacagcaaa

SEQ ID NO: 18868 - DNA, 714 bp, synthetic construct
  source 1..714: mol_type = other DNA
gggcccactgggcgctagcactccggtaccacggtacctttgtgcgcctgttttatccccccaaacccccgtaacgctacactagaagatagacaatgcgaccaatagccagtggggcaacccagcctcactctggtcaagcacctctgtttccccgggcttagtaccaataagctgctcgcgcggctgaaggggaacgcgcccgttatccggctaactacttcgagaaacctagtaccaccatggaagttgcagagtgtttcgctcagcacaaccccagtgtagatcaggccgatgagtcaccgtgcaccccacgggcgaccgtgacggtggctgcgctggcggcctgcccatggtgtacaccatgggacgctctaatacagacatggtgcgaagagtctattgagctagttagtagtcctccggcccctgaatgcggctaatcctaactgcggagcacgcgctctcaacccagagagtagcgtgtcgtaacgggcaactctgcagcggaaccgactactttgggtgtccgtgtttccctttatttttacattggctgcttatggtgacaattgagagattgttaccatatagctattggattggccatccggtgtgtaacagagctatcatatattcttttgttggctttgtaccactaaattacactgtaattattactttaaggtacatcttgcttttaaacacagcaaa

SEQ ID NO: 18869 - DNA, 714 bp, synthetic construct
  source 1..714: mol_type = other DNA
gggcccactgggcgctagcactctggtaccacggtacccttgtgcgcctgttttatccccccaaacccccgtaacgctacactagaagatagacaatgcgaccaatagtcagtggggcaatccagccccactttggtcaagcacctctgtttccccgggcttagtaccaataagctgctcgcgcggctgaaggggaacgcgcccgttatccggctaactacttcgagaaacctagtaccaccatggaagttgcagagtgtttcgctcagcacaaccccagtgtagatcaggccgatgagtcaccgtgcaccccacgggcgaccgtgacggtggctgcgttggcggcctgcccatggtgtacaccatgggacgctctaatacaaacatggtgcgaagagtctattgagctagttagtagtcctccggcccctgaatgcggctaatcctaactgcggagcacgcgctctcaacccagagagtagcgtgtcgtaacgggcaactctgcagcggaaccgactactttgggtgtccgtgtttccttttattctcacattggctgcttatggtgacaattgagagattgttaccatatagctattggattggccatccggtgtgtaacagagctatcatatattcttttgttggctttgtgccactagattatactgcaattgttactttaaggtacatcttgcttttgaacacagcaaa

SEQ ID NO: 18870 - DNA, 714 bp, synthetic construct
  source 1..714: mol_type = other DNA
gggcccactgggcgctagcactccggtaccacggtacctttgtgcgcctgttttatccccccaaacccccgtaacgctacactagaagatagacaatgcgaccaatagccagtggggcaacccagcctcactctggtcaagcacctctgtttccccgggcttagtaccaataagctgctcgcgcggctgaaggggaacgcgcccgttatccggctaactacttcgagaaacctagtaccaccatggaagttgcagagtgtttcgctcagcacaaccccagtgtagatcaggccgatgagtcaccgtgcaccccacgggcgaccgtgacggtggctgcgctggcggcctgcccatggtgtacaccatgggacgctctaatacagacatggtgcgaagagtctattgagctagttagtagtcctccggcccctgaatgcggctaatcctaactgcggagcacgcgctctcaacccagagagtagcgtgtcgtaacgggcaactctgcagcggaaccgactactttgggtgtccgtgtttccctttatttttccattggctgcttatggtgacaattgagagattgttaccatatagctattggattggccatccggtgtgtaacagagctatcatatattcttttgttggctttgtaccactaaattatactgtaattattactttaaggtacatcttgcttttaaacacagcaaa

SEQ ID NO: 18871 - DNA, 714 bp, synthetic construct
  source 1..714: mol_type = other DNA
gggcccactgggcgctagcactccggtaccacggtacctttgtgcgcctgttttatccccccaaacccccgtaacgctacactagaagatagacaatgcgaccaatagccagtggggcaacccagcctcactctggtcaagcacctctgtttccccgggcttagtaccaataagctgctcgcgcggctgaaggggaacgcgcccgttatccggctaactacttcgagaaacctagtaccaccatggaagttgcagagtgtttcgctcagcacaaccccagtgtagatcaggccgatgagtcaccgtgcaccccacgggcgaccgtgacggtggctgcgctggcggcctgcccatggtgtacaccatgggacgctctaatacagacatggtgcgaagagtctattgagctagttagtagtcctccggcccctgaatgcggctaatcctaactgcggagcacgcgctctcaacccagagagtagcgtgtcgtaacgggcaactctgcagcggaaccgactactttgggtgtccgtgtttccctttatttttacattggctgcttatggtgacaattgggagattgttaccatatagctattggattggccatccggtgtgtaacagagctatcatatattcttttgttggctttgtaccactaaattacactgtaattattactttaaggtacatcttgcttttaaacacagcaaa

SEQ ID NO: 18872 - DNA, 714 bp, synthetic construct
  source 1..714: mol_type = other DNA
gggcccactgggcgctagcactccggtaccacggtacctttgtgcgcctgttttatccccccaaacccccgtaacgctacactagaagatagacaatgcgaccaatagccagtggggcaacccagcctcactctggtcaagcacctctgtttccccgggcttagtaccaataagctgctcgcgcggctgaaggggaacgcgcccgttatccggctaactacttcgagaaacctagtaccaccatggaagttgcagagtgtttcgctcagcacaaccccagtgtagatcaggccgatgagtcaccgtgcaccccacgggcgaccgtgacggtggctgcgctggcggcctgcccatggtgtacaccatgggacgctctaatacagacatggtgcgaagagtctattgagctagttagtagtcctccggcccctgaatgcggctaatcctaactgcggagcacgcgctctcaacccagagagtagcgtgtcgtaacgggcaactctgcagcggaaccgactactttgggtgtccgtgtttccctttatttttacattggctgcttatggtgacaattgagagattgttaccatatagctattggattggccatccggtgtgtaacagagctatcatatattcttttgttggctttgtaccactaaattatactgtaattattactttaagatacatcttgcttttaaacacagcaaa

SEQ ID NO: 18873 - DNA, 714 bp, synthetic construct
  source 1..714: mol_type = other DNA
gggcccactgggcgctagcactccggtaccacggtacctttgtgcgcctgttttatccccccaaacccccgtaacgctacactagaagatagacaatgcgaccaatagccagtggggcgacccagcctcactctggtcaagcacctctgtttccccgggcttagtaccaataagctgctcgcgcggctgaaggggaacgcgcccgttatccggctaactacttcgagaaacctagtaccaccatggaagttgcagagtgtttcgctcagcacaaccccagtgtagatcaggccgatgagtcaccgtgcaccccacgggcgaccgtgacggtggctgcgctggcggcctgcccatggtgtacaccatgggacgctctaatacagacatggtgcgaagagtctattgagctagttagtagtcctccggcccctgaatgcggctaatcctaactgcggagcacgcgctctcaacccagagagtagcgtgtcgtaacgggcaactctgcagcggaaccgactactttgggtgtccgtgtttccctttatttttacattggctgcttatggtgacaattgagagattgttaccatatagctattggattggccatccggtgtgtaacagagctatcatatattcttttgttggctttgtaccactaaattatactgtaattattactttaagatacatcttgcttttaaacacagcaaa

SEQ ID NO: 18874 - DNA, 714 bp, synthetic construct
  source 1..714: mol_type = other DNA
gggcccactgggcgctagcactccggtaccacggtacctttgtgcgcctgttttatccccctaaacccccgtaacgctacactagaagatagacaatgcgaccaatagccagtggggcaacccagcctcactctggtcaagcacctctgtttccccgggcttagtaccaataagctgctcgcgcggctgaaggggaacgcgcccgttatccggctaactacttcgagaaacctagtaccaccatggaagttgcagagtgtttcgctcagcacaaccccagtgtagatcaggccgatgagtcaccgtgcaccccacgggcgaccgtgacggtggctgcgctggcggcctgcccatggtgtacaccatgggacgctctaatacagacatggtgcgaagagtctattgagctagttagtagtcctccggcccctgaatgcggctaatcctaactgcggagcacgcgctctcaacccagagagtagcgtgtcgtaacgggcaactctgcagcggaaccgactactttgggtgtccgtgtttccctttatttttacattggctgcttatggtgacaattgagagattgttaccatatagctattggattggccatccggtgtgtaacagagctatcatatattcttttgttggctttgtaccactaaattatactgtaattattactttaaggtacatcttgcttttaaacacagcaaa

SEQ ID NO: 18875 - DNA, 714 bp, synthetic construct
  source 1..714: mol_type = other DNA
gggcccactgggcgctagcactccggtaccacggtacctttgtgcgcctgttttatccccccaaacccccgtaacgctacactagaagatagacaatgcgaccaatagccagtggggcaacccagcctcactctggtcaagcacctctgtttccccgggcttagtaccaataagctgctcgcgcggctgaaggggaacgcgcccgttatccggctaactacttcgagaaacctagtaccaccacggaagttgcagagtgtttcgctcagcacaaccccagtgtagatcaggccgatgagtcaccgtgcaccccacgggcgaccgtgacggtggctgcgctggcggcctgcccatggtgtacaccatgggacgctctaatacagacatggtgcgaagagtctattgagctagttagtagtcctccggcccctgaatgcggctaatcctaactgcggagcacgcgctctcaacccagagagtagcgtgtcgtaacgggcaactctgcagcggaaccgactactttgggtgtccgtgtttccctttatttttacattggctgcttatggtgacaattgagagattgttaccatatagctattggattggccatccggtgtgtaacagagctatcatatattcttttgttggctttgtaccactaaattatactgtaattattactttaaggtacatcttgcttttaaacacagcaaa

SEQ ID NO: 18876 - DNA, 724 bp, synthetic construct
  source 1..724: mol_type = other DNA
cacccactcacagggcccactgggtgcaagcactctggtaccccggtacctttgtgcgcctgttttataccccccctccccaatgaaacttagaagcagcaaaccacgatcaatagtaggcataacgctccagttatgtcttgatcaagcacttctgtttccccggactgagtatcaatagactgctcgcgcggttgaaggagaaaacgttcgttatccggctagctacttcggaaaacctagtaacaccatgaaagttgcggagggcttcgttcagcactcccccagtgtagatcaggtcgatgagtcaccgcattccccacgggcgaccgtggcggtggctgcgttggcggcctgcccatggggtaacccatggggcgctctaatacggacatggtgtgaagagtctactgagctagttagtagtcctccggcccctgaatgcggctaatcccaactgcggagcacacgcccacaagccagcgggtagtgtgtcgtaacgggtaactctgcagcggaaccgactactttgggtgtccgtgtttccttttatctttatattggctgcttatggtgacaattaaagaattgttaccatatagctattggattggccatccggtgtgcaacagagcaattatttaccaatttgttggttttgtaccattaaccttgaattctgtgaccacccttaattatatcttaacccttaacgcagctaaac

SEQ ID NO: 18877 - DNA, 689 bp, synthetic construct
  source 1..689: mol_type = other DNA
ttttacgaaatccttgtgtgcctgttttatatcccttccctaacttgaaacgtagaagcaatgcgcaacactgatcaatagcaggcgtaacgcgccagttacgtcatgatcaagcatatctgttcccccggactgagtatcaatagactgcttacgcggttgaaggagaaaacgttcgttatccggctaactacttcgagaagcccagtaacaccatggaagctgcagggtgtttcgctcagcactttccccgtgtagatcaggtcgatgagccactgcaatcctcacgggtgaccgtggcagtggctgcgttggcggcctgcctatggggagacccataggacgctctaatgtggacatggtgcgaagagcctattgagctagttagtagtcctccggcccctgaatgcggctaatcctaactgcggagcacatgccttcaacccagggggtagtgtgtcgtaatgggcaactctgcagcggaaccgactactttgggtgtccgtgtttctctttattcttatattggctgcttatggtgacaattaaagaattgttaccatatagctattggattggccatccggtgtgtaatagagctgttatatacctgtttgttggctttgtaccactaactttaaaatctataactaccctcaattttatattaaccctcaatacagttaaac

SEQ ID NO: 18878 - DNA, 653 bp, synthetic construct
  source 1..653: mol_type = other DNA
ccctccccccagtgaaacttagaagcagcaaaccacgatcaatagcaggcataacgctccagttatgtcttgatcaagcacttctgtttccccggactgagtatcaatagactgctcgcgcggttgaaggagaaaacgttcgttatccggctagctacttcggaaaacctagtaacaccatgaaagttgcggagagcttcgttcagcactcccccagtgtagatcaggtcgatgagtcaccgcattccccacgggcgaccgtggcggtggctgcgttggcggcctgcccatggggtaacccatggggcgctctaatacagacatggtgtgaagagtctactgagctagttagtagtcctccggcccctgaatgcggctaatcccaactgcggagcacacgcccacaagccagcgggtagtgtgtcgtaacgggtaactctgcagcggaaccgactactttgggtgtccgtgtttccttttatctttatattggctgcttatggtgacaattaaagaattgttaccatatagctattggattggccatccggtgtgcaacagagcaatcatttacctatttattggttttgtaccattaactttgaattctgtgaccacccttaattatatcttgacccttaacacagctaaac

SEQ ID NO: 18879 - DNA, 644 bp, synthetic construct
  source 1..644: mol_type = other DNA
caatgaaacttagaagcagcaaaccacgatcaatagtaggcataacgctccagttgtgtcttgatcaagcacttctgtttccccggactgagtatcaatagactgctcgcgcggttgaaggagaaaacgttcgttatccggctagctacttcggaaaacctagtaacaccatgaaagttgcggagagcttcgttcagcactcccccagtgtagatcaggtcgatgagtcaccgcattccccacgggcgaccgtggcggtggctgcgttggcggcctgcccatggggtaacccatggggcgctctaatacggacatggtgtgaagagtctactgagctagttagtagtcctccggcccctgaatgcggctaatcccaactgcggagcacacgcccacaagccagcgggtagtgtgtcgtaatgggcaactctgcagcggaaccgactactttgggtgtccgtgtttccttttatctttatattggctgcttatggtgacaattaaagaattgttaccatatagctattggattggccatccggtgtgcaacagagcaattatttaccaatttattggttttgtaccattaaccttgaattctgtgaccacccttaattatatcttgacccttaacacagctaaac

SEQ ID NO: 18880 - DNA, 668 bp, synthetic construct
  source 1..668: mol_type = other DNA
ctgttttacgccccctccccaatttgcaacttagaagcaatacacaacactgatcaacagcaggcatggcgcaccagctatgtcttgatcaagcacttctgtttccccgggccgactatcaatagactgttcacacggttgaaggagaaagcgcccgttatccggctaactacttcgagaagcccagtagcaccatcgaggctgcagagtgtttcgctcagcacttcccccgtgtagatcaggtcgatgagtcactgcaatccccacgggcgaccgtggcagtggctgcgctggcggcctgcctatggggcaacccataggacgctctaatgtggacatggtgcgaagagtctattgagctagttagtagtcctccggcccctgaatgcggctaatcctaactgtggagcacatgccttcaatccagagggtagtgtgtcgtaatgggcaactctgcagcggaaccgactactttgggtgtccgtgtttccttttattcttacattggctgcttatggtgacaattacagagttgttaccatatagctattggattggccatccggtgtgcaatagagctattatatacctgtttgttggctttgtaccactaaccttaaaatctgtaatcaccctcgattttatattaacccttaatacaatcaaac

SEQ ID NO: 18881 - DNA, 657 bp, synthetic construct
  source 1..657: mol_type = other DNA
cccctccccaatttgcaacttagaagcaattcgcaacaccgatcaatagcaggcatggcgcaccagctatgtcttgatcaagcacttctgtttccccggaccgagtatcaataaactgttcacgcggttgaaggagaaagcgtccgttatccggctaactacttcgagaaacccagtaacgccattgaaactgcagagtgtttcgctccacacttcccccgtgtagatcaggtcgatgagtcactgcaatccccacgggcgaccgtggcagtggctgcgctggcggcctgcctatggggcaacccataggacgctctaatgtggacatggtgtgaagagtctattgagctagttagtagtcctccggcccctgaatgcggctaatcctaactgcggagcacatgccctcaatccagagggtagtgtgtcgtaatgggcaactctgcagcggaaccgactactttgggtgtccgtgtttccttttattctcacattggctgcttatggtgacaatcactgaattgttaccatatagctattggattggccatccggtgtgcaatagagctatcatatacctatttgttggctttgtaccactgaccttaaaatctgtaaccactctcgactatatattgaccctcaatacaatcaaac

SEQ ID NO: 18882 - DNA, 646 bp, synthetic construct
  source 1..646: mol_type = other DNA
caactcgtaatttagaagtaacgcacaccattgatcaacagtaagcgtggcgcgccagccatgtttagatcaagtacttctgtttcccggactgagtatcaatagactgctcacgcggttgaaggagaaaacgttcgttacccggctaactacttcgagaaacctagtagcaccatcgaaactgcagagtgtttcgttcagcactttccccgtgtagatcaggtcgatgagtcactgcaatccccacgggcgaccgtggcagtggctgcgttggcggcctgcctatgggcttacccataggacgctctaatgtggacatggtgtgaagagtctattgagctagttagtagtcctccggcccctgaatgcggctaatcctaactgcggagcgcataccctcaacccagggggtggtgcgtcgtaacgggcaactctgcagcggaaccgactactttgggtgtccgtgtttccttttattcttatattggctgcttatggtgacaattgagagattgttaccatatagctattggattggccatccagtgtctaatagagcaattgtatacttatttgttggattcgttccactatcatatacatccactaacaccttatactatattataagattgaacacaaggaa

SEQ ID NO: 18883 - DNA, 656 bp, synthetic construct
  source 1..656: mol_type = other DNA
acccctcccctaagcagtaacttagaagcttcatactatcacgaccagtagtaggcgtggcgcaccagccacgtcttggtcaagcacttctgtttccccggactgagtatcaatagactgctcacgcggttgaaggagaaaacgttcgttatccggctaactacttcgagaaacctagtagcatcgtgaaagttgcggggtgtttcgctcagcacttcccccgtgtagatcaggtcgatgagtcactgtgaaccccacgggcgaccgtgacagtggctgcgttggcggcctgcccatggggcaacccatgggacgctctaatacagacacggtgtgaagagtctattgagctagttggtagtcctccggcccctgaatgcggctaatcctaactgcggagcgcgcaccctcaatccagggggcagcgcgtcgtaatgggtaactctgcagcggaaccgactactttgggtgtccgtgtttccttttattctttattggctgcttatggtgacaattgaagagttgttaccatatagctattggattggccatccggtaaccaacagagctattgtttacctgttcattggatacgtccctctcaatctcaaggccattaaaactcttgattatatattacttctcaactataagaa

SEQ ID NO: 18884 - DNA, 619 bp, synthetic construct
  source 1..619: mol_type = other DNA
atcacgaccaatagtaggcgtggcgcgccagccacgtcttggtcaagcacttctgtttccccggaccgagtatcaatagactgctcacgcggttgaaggagaaaacgttcgtcatccggctaactacttcgagaaacctagtagcatcgtgaaagttgcggagtgtttcgttcagcacttcccccgtgtagatcaggtcgatgagtcactgtgaaccccacgggcgaccgtgacagtggctgcgttggcggcctgcccatggggcagcccatgggacgctctaatacagacacggtgtgaagagtctattgagctagttggtagtcctccggcccctgaatgcggctaatcctaactgcggagcgcgcaccctcaatccagggggcagtgcgtcgtaatgggtaactctgcagcggaaccgactactttgggtgtccgtgtttccttttattccttattggctgcttatggtgacaattgaaaagttgttaccatatagctattggattggccatccggtaaccaacagagctattgtttacctgtttgttggatacgtccctctcaatttcaaggtcattaaaactcttgattatatattacttctcaactgtgagaa

SEQ ID NO: 18885 - DNA, 650 bp, synthetic construct
  source 1..650: mol_type = other DNA
ccaatttgcaacttagaagcaattcgcaacaccgatcaatagcaggcatggcgcaccagctatgtcttgatcaagcacttctgtttccccggaccgagtatcaataaactgttcacgcggttgaaggagaaagcgtccgttatccggctaactacttcgagaaacccagtaacgccattgaaactgcagagtgtttcgctccacacttcccccgtgtagatcaggtcgatgagtcactgcaatccccacgggcgaccgtggcagtggctgcgctggcggcctgcctatggggcaacccataggacgctctaatgtggacatggtgtgaagagtctattgagctagttagtagtcctccggcccctgaatgcggctaatcctaactgcggagcacatgccctcaatccagagggtagtgtgtcgtaatgggcaactctgcagcggaaccgactactttgggtgtccgtgtttccttttattctcacattggctgcttatggtgacaatcactgaattgttaccatatagctattggattggccatccggtgtgcaatagagctatcatatacctatttgttggctttgtaccactgaccttaaaatctgtaaccactctcgactatatattgaccctcaatacaatcaaac

SEQ ID NO: 18886 - DNA, 656 bp, synthetic construct
  source 1..656: mol_type = other DNA
ttcccctccccaaaagtaacttagaagctttgaaccaacgatcaacagtaggtgtgacatgccagtcacatctcgatcaagcacttctgtttccccggactgagtatcaataggctgctcacgcggctgaaagagaaaacgttcgttacccggccaactacttcgagaagcttagtaccaccatgaacgaggcagagcgtttcgctcggcactaccccagtgtagatcaggctgatgagtcactgcaatccccatgggcgaccatggcagtggctgcgctggcggcctgcccatggagagatccatgggacgctctaattttgacatggtgcgaagagcctattgagctagttggtagtcctccggcccctgaatgcggctaatcctaactgcggagcgcacacccacataccagtgggcagtgtgtcgtaacgggcaactctgcagcggaaccgactactttgggtgtccgtgtttccttttattctcatgttggctgcttatggtgacaattgaagagttgttaccatatagctattggattggccatccggtgtgcaacagagcaattgtctaccagtttattggttttgtaccactgacattaaagtctgtaattacccttaattttatcttgacccttaacacagtcaagc

SEQ ID NO: 18887 - DNA, 646 bp, synthetic construct
  source 1..646: mol_type = other DNA
tttgtaacttagaagcaatttgcaacactgatcagtagtaggcatggcgcaccagctatgtcttgatcaagcacttctgtttccccggaccgagtatcaacagactgttcacacggttgaaggagaaagcgtccgttatccggctaactacttcgagaaacccagtagcgccattgaaactgcagagtgtttcgctccacacttcccccgtgtagatcaggtcgatgagtcactgcaatccccacgggcgaccgtggcagtggctgcgctggcggcctgcctatggggtaacccataggacgctctaatgtggacatggtgtgaagagtctattgagctagttagtagtcctccggcccctgaatgcggctaatcctaactgcggagcacatgccttcaatccagagggtagtgtgtcgtaatgggcaactctgcagcggaaccgactactttgggtgtccgtgtttccttttatcctcacattggctgcttatggtgacaattgcggaattgttaccatatagctattggattggccatccggtttgcaatagagctattatatacctatttgttggctttgtaccactgaccttaaaatctatatccactctcgagtatatattaacccttaacacaatcaaac

SEQ ID NO: 18888 - DNA, 653 bp, synthetic construct
  source 1..653: mol_type = other DNA
tccccaatttgtaacttagaagcaatttgcaacactgatcagtagtaggcatagcgcaccagctatgtcttgatcaagcacttctgtttccccggaccgagtatcaatagactgttcacacggttgaaggagaaagcgtccgttatccggctaactacttcgagaaacccagtagcgccattgaaactgcagagtgtttcgctccacacttcccccgtgtagatcaggtcgatgagtcactgcaatccccacgggcgaccgtggcagtggctgcgctggcggcctgcctatggggtaacccataggacgctctaatgtggacatggtgtgaagagtctattgagctagttagtagtcctccggcccctgaatgcggctaatcctaactgcggagcacatgccttcaatccagagggtagtgtgtcgtaatgggcaactctgcagcggaaccgactactttgggtgtccgtgtttccttttattctcacattggctgcttatggtgacaattacggaattgttaccatatagctattggattggccatccggtgtgcaatagagctattatatacctatttgttggctttgtaccactgaccttaaaatctataaccactctcgagtatatattaacccttaacacaatcaaac

SEQ ID NO: 18889 - DNA, 672 bp, synthetic construct
  source 1..672: mol_type = other DNA
cgcctgttttataaccctccccccctacttcgcaacttagaagcaacgcgcatcactgatcaacagcaggcatggcgctccagccatgtcttgatcaagcactcctgtttccccggactgagtatcaatagactgcttacgcggttgaaggagaaaacgttcgttacccggctaactacttcgagaaacttagtaacaccatcgaagctgcagggtgtttcgctcagcacttcccccgtgtagatcaggccgatgagtcaccgcaatccccacgggcgaccgtggcggtggctgcgttggcggcctgcctatggggcaacccataggacgccctaaagtggacatggtgcgaagagtctattgagctagttagtagtcctccggcccctgaatgcggctaatcctaactgcggagcacacaccctcaagccagagggtagtgtgtcgtaacgggtaactctgcagcggaaccgactactttgggtgtccgtgtttccttttattcttattgtggctgcttatggtgacaattcaagaattgttaccatatagctattggattggccatccggtgtctaacagagctattgtgtacttatttgttgggtacgttccattatctcacacatcccttaacacattacattttattgtgaagctaaatacaagaag

SEQ ID NO: 18890 - DNA, 657 bp, synthetic construct
  source 1..657: mol_type = other DNA
ctccccttcccccaaagtaacttagaagctgtaaatcaacgatcaatagcaggtgtggcacaccagtcataccttgatcaagcacttctgtttccccggactgagtatcaataggctgctcgcgcggctgaaggagaaaacgttcgttacccgaccaactacttcgagaagcttagtaccaccatgaacgaggcagggtgtttcgctcagcacaaccccagtgtagatcaggctgatgagtcactgcaacccccatgggcgaccatggcagtggctgcgttggcggcctgcccatggagaaatccatgggacgctctaattctgacatggtgtgaagagcctattgagctagctggtagtcctccggcccctgaatgcggctaatcctaactgcggagcacatgctcacaaaccagtgggtggtgtgtcgtaacgggcaactctgcagcggaaccgactactttgggtgtccgtgtttccttttattcctatattggctgcttatggtgacaatcaaagagttgttaccatatagctattggattggccatccggtgtgcaacagggcaattgtttacctatttattggttttgtaccattatcactgaagtctgtgatcactctcaaattcattttgaccctcaacacaatcaaac

SEQ ID NO: 18891 - DNA, 575 bp, synthetic construct
  source 1..575: mol_type = other DNA
agcacttctgttttcccggaccgagtatcaatagactgctaacgcggttgaaggagaaaacgttcgttatccggctaactacttcgagaaacctagtagcaccatcgaagctgcggagtgtttcgctcagcacttcccccgtgtagatcaggtcgatgagtcactgcaatcctcacgggtgaccgtggcagtggctgcgttggcggcctgcctatggggcaacccataggacgcttcaaagtggacatggtgtgaagagtctattgagctagttagtagtcctccggcccctgaatgcggctaatcccaactgcggagcacataccttcaatccagaaggcagtgtgtcgtaacgggcaactctgcagcggaaccgactactttgggtgtccgtgtttccttttattctcttgttggctgcttatggtgacaattgaagaattgttaccatatagctattggattggccatccagtgtctaacagagcaattgtgtacttatttgttggttttgttcctttgtcttacacgtctcttagtaccttgtactacattataaaactgaactcggaaag

SEQ ID NO: 18892 - DNA, 651 bp, synthetic construct
  source 1..651: mol_type = other DNA
ccccccccaatgaaacttagaagcagcaaaccacgatcaatagtaggcatgacgctccagttatgtcttgatcaagcacttctgtttccccggactgagtatcaatagactgctcgcgcggttgaaggagaaaacgttcgttatccggctagctacttcggaaaacctagtaacaccgtgaaagttgcggagagcttcgttcagcactcccccagtgtagatcaggtcgatgagtcaccgcattccccacgggcgaccgtggcggtggctgcgttggcggcctgcccatggggtaacccatggggcgctctaatacggacatggtgtgaagagtctactgagctagttagtagtcctccggcccctgaatgcggctaatcccaactgcggagcacacgcccacaagccagcgggtagtgtgtcgtaacgggtaactctgcagcggaaccgactactttgggtgtccgtgtttccttttatctttatattggctgcttatggtgacaattaaagaattgttaccatatagctattggattggccatccggtgtgcaacagagctattatttaccaatttattggttttgtaccattaaccttgaattctgtgaccacccttaattatatcttgacccttaacgcagctaaac

SEQ ID NO: 18893 - DNA, 664 bp, synthetic construct
  source 1..664: mol_type = other DNA
tgttttataacccctccctaaacggcaatttagaagttctgcacatccacgaccagtagtaagcgtgacgcgccagtcacgtcttggtcaagtacttctgtatccccggactgagtatcaatagactgctcacgcggttgaaggagaaaacgttcgttatccggctaactacttcgagaaacctagtaacaccgtgaaagttgcggagtgtttcgctcagcacttcccccgtgtagatcaggccgatgagtcactgtaaaccccacgggcgaccgtgacagtggctgcgttggcggcctgcccatgaggcaactcatgggacgctctaatacagacatggtgtgaagagtctattgagctagttagtagtcctccggcccctgaatgcggctaatcctaactgcggagcacgcaccctcaacccagggggcggcgtgtcgtaatgggtaactctgcagcggaaccgactactttgggtgtccgtgtttccttttattccttattggctgcttatggtgacaattgaaaagttgttaccatatagctattggattggccatccggtatctaatagagctattgtttacctgttcattggatacgtccctcttagtcctaaggtcattcaaactcttgattacatattactccttaaccacaagaa

SEQ ID NO: 18894 - DNA, 687 bp, synthetic construct
  source 1..687: mol_type = other DNA
gtactgaggtacctttgtgcgcctgttttacttcccttccccagaaataacttagaagctttgaaccaacgatcaacagtgggtgtgacataccagtcgcatctcgatcaagcacttctgtttccccggactgagtatcaataggctgcttacgcggctgaaagagaaaacgttcgttacccggccaactacttcgagaagcttagtaccaccatgaacgaggcagagcgtttcgctcggcactaccccagtgtagatcaggctgatgagtcactgcaatccccatgggcgaccatggcagtggctgcgctggcggcctgcccatggagagatccatgggacgctctaattttgacatggtgcgaagagcctattgagctagttggtagtcctccggcccctgaatgcggctaatcctaactgcggagcgcacacccacataccagtgggcagtgtgtcgtaacgggcaactctgcagcggaaccgactactttgggtgtccgtgtttccttttattcttatattggctgcttatggtgacaaacgaagagttgttaccatatagctattggattggccatccggtgtgcaacagagcaattgtctaccagtttattggttttgtaccactgacattaaagtctgtaattacccttaaattcatcttgacccttaacacagtcaagc

SEQ ID NO: 18895 - DNA, 650 bp, synthetic construct
  source 1..650: mol_type = other DNA
ctcaatttggtaacatagaagttagaaacatatatggccaatagcaggcgtggcgcaccagtcgcgtctcggtcaagcacttctgtttccccggactgagtatcaataagctgctcgcgcggctgaaggagaaaacgttcgttatccggctaactacttcgagaaacctagtagcaccatgaaagttgcggagtgtttcgctcagcacttcccccgtgtagatcaggtcgatgagtcactgcattccccacgggcgaccgtggcagtggctgcgttggcggcctgcctatggggtaacccataggacgctctaatacggacatggtgcgaagagtcaattgagctagttagtagtcctccggcccctgaatgcggctaatcctaactgcggagcacataccctcaatccagggggcggtgtgtcgtaatgggcaactctgcagcggaaccgactactttgggtgtccgtgtttccttttattcttatattggctgcttatggtgacaattgagagattgttaccatatagctattggattggccatccggtgtccaacagagctctggtttacttgttcgttggctttgtacctctgtcacccacagtttattcaactctggtgttcttaatacaccttaacagtaagag

SEQ ID NO: 18896 - DNA, 593 bp, synthetic construct
  source 1..593: mol_type = other DNA
caccagccatgtcttgatcaagtacttctgtacccccggactgagtatcaatagactgctcacgcggttgaaggagaaaacgttcgttacccggctaactacttcgagaaacctagtaacaccattgaaactgcggagtgtttcgctcagcattccccccatgtagatcaggtcgatgagtcactgcttaccccacgggcgaccgtggcagtggctgcgttggcggcctgcctatggggcaacccataggacgctctaaagtggacatggtgcgaagagtctattgagctagttagtagtcctccggcccctgaatgcggctaatcctaactgcggagcgcatgtcctcaaaccagagggtggtgcgtcgtaatgggtaactctgcagcgaaccgactactttgggtgtccgtgtttcttttgttcttataatggctgcttatggtgacaatcgaggaattgttaccatatagctattggattggccatccggtgtgcaacagagctattatctacttgtttgtcggatacatccccttaacacctaaatccctcaacacattgcattatattttaacattgaacgcgagaaa

SEQ ID NO: 18897 - DNA, 594 bp, synthetic construct
  source 1..594: mol_type = other DNA
caccagccatgtcttgatcaagtacttctgtacccccggactgagtatcaatagactgctcacgcggttgaaggagaaaacgttcgttacccggctaactacttcgagaaacctagtaacaccattgaaactgcggagtgtttcgctcagcattccccccatgtagatcaggtcgatgagccactgcttaccccacgggcgaccgtggcagtggctgcgttggcggcctgcctatggggcaacccataggacgctctaaagtggacatggtgcgaagagtctattgagctagttagtagtcctccggcccctgaatgcggctaatcctaactgcggagcgcatgtcctcaaaccagagggtggtgcgtcgtaatgggtaactctgcagcggaaccgactactttgggtgtccgtgtttcttttgttcttataatggctgcttatggtgacaatcgaggaattgttaccatatagctattggattggccatccggtgtgcaacagagctattatctacttgtttgtcggatacatccccttaacacctaaatccttcaacacattgcattatattttaacattgaacgcgagaaa

SEQ ID NO: 18898 - DNA, 617 bp, synthetic construct
  source 1..617: mol_type = other DNA
gatcaatagcaggcatggcgcaccagctatgtcttgatcaagcacttctgtttccccggaccgagtatcaataaactgttcacgcggttgaaggagaaagcgtccgttatccggctaactacttcgagaaacccagtaacgctattgaaactgcagagtgtttcgctccacacttcccccgtgtagatcaggtcgatgagtcactgcaatccccacgggcgaccgtggcagtggctgcgctggcggcctgcctatggggcaacccataggacgctctaatgtggacatggtgtgaagagtctattgagctagttagtagtcctccggcccctgaatgcggctaatcctaactgcggagcacatgccctcaatccagagggtagtgtgtcgtaatgggcaactctgcagcggaaccgactactttgggtgtccgtgtttccttttattctcacattggctgcttatggtgacaatcactgaattgttaccatatagctattggattggccatccggtgtgcaatagagctatcatatacctatttgttggctttgtaccactgaccttaaaatctgtaaccactctcgactatatattgaccctcaatacaatcaaac

SEQ ID NO: 18899 - DNA, 563 bp, synthetic construct
  source 1..563: mol_type = other DNA
ttaccccggattgagtatcaatagactgctagcgcggttgaggagaaacgtccgttacccggctaactacttcgagaaacttagtagcaccattgaagctgcggagtgtttcgctcagcactctcccagtgtagatcaggtcgatgagtcactgcactccccacgggtgaccgtggcagtgactgcgttggcggcctgcctatggggcaacccgtaggacgctctaaagtggacatggtgcgaagagtctattgagctagttagtagtcctccggcccctgaatgcggctaatcctaactgcggagcacatgccctcaatccagggggtggtgtgtcgtaacgggcaactctgcagcggaaccgactactttgggtgtccgtgtttccttttattcttacattggctgcttatggtgacaattgagagattgttaccatatagctattggattggccatccagtgacaaacagagctttgatatacttgttcgtgggtttcgttccactcaccattcgtacagttcatactctaaaatacattttgattctgaataatagaaa

SEQ ID NO: 18900 - DNA, 646 bp, synthetic construct
  source 1..646: mol_type = other DNA
aaactgcaacttagaagaatagcactctatcgatcaatagcaggcatggcacgccagtcatgtctaggtcaagcacttctgtctccccggaccgagtatcaatagactgctaatgcggttgaaggagaaaacgtccgttacccggctaactacttcgagaaacttagtagtaccattgaagctgcagagtgtttcgctcagcactcccccagtgtagatcaggtcgatgagtcactgcaatccccacgggcgaccgtggcagtggctgcgttggcggcctgcctatggggcaacccataggacgctctaaagtggacatggtgcgaagggtctattgagctagttagtagtcctccggcccctgaatgcggctaatcctaactgcggagcgcataccctcaatccagggggtggtgtgtcgtaacgggcaactctgcagcggaaccgactactttgggtgtccgtgtttccttttattcttatattggctgcttatggtgacaattgagaggttgttaccatatagctattggattggccatccggtgaccaacagagctttgatatacttatttgtaggttttgttccactcacaaatcgtacggtctatactctgaagtacattttgattctgaacaatagaaa

SEQ ID NO: 18901 - DNA, 646 bp, synthetic construct
  source 1..646: mol_type = other DNA
aaactgtaacttagaagaatagcactctatcgatcaatagcaggcatggcgcgccagtcatgtctaaatcaagcacttctgtctccccggaccgagtatcaatagactgctagcgcggttgaaggagaaaacgtccgttacccggctaactacttcgagaaacttagtagcaccattgaagctgcagagtgtttcgctcagcactcccccagtgtaaatcaggtcgatgagtcactgcattccccacgggcgaccgtggcagtggctgcgttggcggcctgcctatggggcaacccataggacgctctaaagtggacatggtgcgaagagtctattgagctagttagtagtcctccggcccctgaatgcggctaatcctaactgcggagcgcatgccctcaatccagggggtagtgtgtcgtaacgggcaactctgcagcggaaccgactactttgggtgtccgtgtttccttttattcttatattggctgcttatggtgacaattgagagattgttaccatatagctattggattggccatccggtgaccaacaaagctctgatatacttgtttgtgggtttcgttccactcaccaatcgtacagtccatactctaaagtacattttgattctgaataatagaaa

SEQ ID NO: 18902 - DNA, 633 bp, synthetic construct
  source 1..633: mol_type = other DNA
agaagttatgtacgttactgatcagcagtaggcgtggcacaccagccatgtcttgatcaagcacttctgtaaccccggactgagtatcaatagactgctcacgtggtcgaaagagaaaacgttcgttatccggctaactacttcgagaaacctagtagcaccactgaaactgcggagtgtttcgctcaacacttcccccgtgtagatcaggtcgatgagtcactgcttaccccacgggtgaccgtggcagtggctgcgttggcggcctgcctgtggggcaacccataggacgctctaaagtggacatggtgtgaagagtctattgagctagttagtagtcctccggcccctgaatgcggctaatcctaactgcggagcgcatgcccccaaaccagagggtggtgcgtcgtaacgggtaactctgcagcggaaccgactactttgggtgtccgtgtttcttttattctcataatggctgcttatggtgacaattgaggaattgttaccatatagctattggattggccacccggtgtgtaacagagctattatttacttgtttgttggatacattccattgacacctaaatccttcagtacattgcactatattctaacgttaaacgcaagaaa

SEQ ID NO: 18903 - DNA, 577 bp, synthetic construct
  source 1..577: mol_type = other DNA
caagcacttctgtttccccggactgagtatcaatagactgcttacgcggttgaaggagaaaacgttcgttacccggctaactacttcgagaaacttagtaacaccatcgaagctgcagggtgtttcgctcagcacttcccccgtgtagatcaggccgatgagtcaccgcaatccccacgggcgaccgtggcggtggctgcgttggcggcctgcctatggggcaacccataggacgccctaaagtggacatggtgcgaagagtctattgagctagttagtagtcctccggcccctgaatgcggctaatcctaactgcggagcacataccctcaagccagagggtggtgtgtcgtaacgggtaactctgcagcggaaccgactactttgggtgtccgtgtttccttttattcttactgtggctgcttatggtgacaattcaagaattgttaccatatagctattggattggccatccagtgtctaacagagctattgtgtacttatttgttgggtacgttccattatcttacacatcccttaacacattacattttattgtgaagctaaatacaagaag

SEQ ID NO: 18904 - DNA, 657 bp, synthetic construct
  source 1..657: mol_type = other DNA
cctccccccctatttcgcaacttagaagcaacgcgcatcattgatcaacagcaggcatggcgctccagccatgtcttgatcaagcactcctgtttccccggactgagtatcaatagactgcttacgcggttgaaggagaaaacgttcgttacccggctaactacttcgagaaacttagtaacaccatcgaagctgcagggtgtttcgctcagcacttcccccgtgtagatcaggccgatgagtcaccgcaatccccacgggcgaccgtggcggtggctgcgttggcggcctgcctatggggcaacccataggacgccctaaagtggacatggtgcgaagagtctattgagctagttagtagtcctccggcccctgaatgcggctaatcctaactgcggagcacataccctcaagccagagggtggtgtgtcgtaacgggtaactctgcagcggaaccgactactttgggtgtccgtgtttccttttattcttattgtggctgcttatggtgacaattcaagaattgttaccatatagctattggattggccatccggtgtctaacagagctattgtgtacttatttgttgggtacgttccattatctcacacatcccttaacacattacattttattgtgaagctaaatacaagaag

SEQ ID NO: 18905 - DNA, 614 bp, synthetic construct
  source 1..614: mol_type = other DNA
gatcaacagcaggcgtggcacaccagccatgtcttgatcaagcacttctgtaaccccggactgagtatcaatagactgctcacgtggtcgaaagagaaaacgttcgttatccggctaactacttcgagaaacttagtagcaccactgaaactgcggagtgtttcgctcagcacttcccccgtgtagatcaggtcgatgagtcactgcttaccccacgggtgaccgtggcagtggctgcgttggcggcctgcctatggggcaacccataggacgctctaaagtggacatggtgtgaagagtctattgagctagttagtagtcctccggcccctgaatgcggctaatcctaactgtggagcgcatgcccccaaaccagagggtggtgcgtcgtaacgggtaactctgcagcggaaccgactactttgggtgtccgtgtttcttttattctcataatggctgcttatggtgacaattgaggaattgttgccatatagctattggattggccatccggtgtgcaacagagctattatctacttgtttgttggatacattccattgacatctaaatcccttaatacattgcactatattctaacgttgaacgcaagaaa

SEQ ID NO: 18906 - DNA, 614 bp, synthetic construct
  source 1..614: mol_type = other DNA
gatcaatagcaggcgtggcacaccagccatgtcttgatcaagcacttctgtacccccggactgagtatcaatagactgctcacgtggtcgaaggagaaaacgttcgttatccggctaactacttcgagaaacctagtaacaccactgaaactgcggagtgtttcgctcagcacttcccccgtgtagatcaggtcgatgagccactgcttaccccacgggtgaccgtggcagtggctgcgttggcggcctgcctatggggcaacccataggacgctctaaagtggacatggtgcgaagagtctattgagctagttagtagtcctccggcccctgaatgcggctaatcctaactgcggagcgcatgcccccaaaccagagggtggtgcgtcgtaacgggtaactctgcagcggaaccgactactttgggtgtccgtgtttcttttattctcataatggctgcttatggtgacaattgaggaattgttaccatatagctattggattggccatccggtgtgcaacagagctattatctacttgtttgttggatacattccattaacacccaaatccttcaatacattgcattacattctaacgctgaacgcaagaaa

SEQ ID NO: 18907 - DNA, 614 bp, synthetic construct
  source 1..614: mol_type = other DNA
ggtcaacagcaggcgtggcacaccagccatgtcttgatcaagcacttctgtacccccggactgagtatcaatagactgctcacgtggtcgaaggagaaaacgttcgttatccggctaactacttcgagaaacttagtagcaccattgaaactgtggagtgtttcgctcagcacttcccccgtgtagatcaggtcgatgagtcactgcttaccccacgggtgaccgtggcagtggctgcgttggcggcctgcctatggggcaacccataggacgctctaaagtggacatggtgcgaagagtctattgagctagttagtagtcctccggcccctgaatgcggctaatcctaactgcggagcgcatgctctcataccagagggtggtgcgtcgtaacgggtaactctgcagcggaaccgactactttgggtgtccgtgtttcttttattctcataatggctgcttatggtgacaattgaggaattgttaccatatagctattggattggccatccggtgtgtaacagagctattatctacttgtttgttggatacattccattaacacttaaatccttcaatacattgcactatattctgacgctgaacgcaagaag

SEQ ID NO: 18908 - DNA, 614 bp, synthetic construct
  source 1..614: mol_type = other DNA
gatcagcagcaggcgtggcacaccagccatgtcttgatcaagcacttctgtaaccccggactgagtatcgatagactgctcacgtggtcgaaagagaaaacgttcgttatccggctaactacttcgagaaacctagtagcaccactgaaactgcggagtgtttcgctcagcacttcccccgtgtagatcaggtcgatgagtcactgcttaccccacgggtgaccgtggcagtggctgcgttggcggcctgcctatggggcaacccataggacgctctaaagtggacatggtgtgaagagtctattgagctagttagtagtcctccggcccctgaatgcggctaatcctaactgcggagcgcatgcccccaaaccagagggtggtgcgtcgtaacgggtaactctgcagcggaaccgactactttgggtgtccgtgtttcttttattctcataatggctgcttatggtgacaattgaggaattgttgccatatagctattggattggccatccggtgtgcaacagagctattatctacttgtttgttggatacattccattgacacctaaatccttcaatacactgcactatattctaacgttgaacgcaagaaa

SEQ ID NO: 18909 - DNA, 614 bp, synthetic construct
  source 1..614: mol_type = other DNA
gatcaacagcaggcgtggcacaccagccatgtcttgatcaagcacttctgtaaccccggactgagtatcaatagactgctcacgtggtcgaaagagaaaacgttcgttatccggctaactacttcgagaaacctagtagcaccactgaagctgcggagtgtttcgctcagcacttcccccgtgtagatcaggtcgatgagtcactgcttaccccacgggtgaccgtggcagtggctgcgttggcggcctgcctatggggcaacccataggacgctctaaagtggacatggtgtgaagagtctattgagctagttagtagtcctccggcccctgaatgcggctaatcctaactgcggagcgcatgcccccaaaccagagggtggtgcgtcgtaacgggtaactctgcagcggaaccgactactttgggtgtccgtgtttcttttattctcataatggctgcttatggtgacaattgaggaattgttaccatatagctattggattggccatccggtgtgcaacagagctattatctacttgtttgttggatacattccattgacacctaaatccttcaatacattgtactatattttaacgttgaacgcaagaaa

SEQ ID NO: 18910 - DNA, 613 bp, synthetic construct
  source 1..613: mol_type = other DNA
gatcaacagcaggcgtggcacaccagccatgtcttgatcaagcacttctgtaccccggactgagtatcaatagactgctcacgtggtcgaaggagaaaacgttcgttatccggctaactacttcgagaaacctagtagcaccactgaaactgcggagtgtttcgctcagcacttcccccgtgtagatcaggtcgatgagtcactgcttaccccacgggtgaccgtggcagtggctgcgttggcggcctgcctatggggcaacccataggacgctctaaagtggacatggtgcgaagagtctattgagctagttagtagtcctccggcccctgaatgcggctaatcctaactgcggagcgcatgccttcaaaccagagggtggtgcgtcgtaacgggtaactctgcagcggaaccgactactttgggtgtccgtgtttcttttattctcataatggctgcttatggtgacaattgaggaattgttaccatatagctattggattggccatccggtgtgcaacagagctattatctacttgtttgttgggtacattccattaacacctaaatccttcaatacattgcactatatcttaacactgaacgcaaggaa

SEQ ID NO: 18911 - DNA, 614 bp, synthetic construct
  source 1..614: mol_type = other DNA
gatcaacagcaggcgtggcacaccagccatgtcttgatcaagcacttctgtacccccggactgagtatcaatagactgcttacgtggtcgaaggagaaaacgttcgttatccggctaactacttcgagaaacctagtagcaccactgaaactgcggagtgtttcgctcagcacttcccccgtgtagatcaggtcgatgagtcactgcttaccccacgggtgaccgtggcagtggctgcgttggcggcctgcctatggggcaacccataggacgctctaaagtggacatggtgcgaagagtctattgagctagttggtagtcctccggcccctgaatgcggctaatcctaactgcggagcgcatgccctcaaaccagagggtggtgcgtcgtaacgggtaactctgcagcggaaccgactactttgggtgtccgtgtttcttttattctcataatggctgcttatggtgacaattgaggaattgttaccatatagctattggattggccatccggtgtgcaacagagctattatctacttgtttgttggatacattccactaacacctaaatcctttaatacactgcactatattctgacgctgaacgcaagaga

SEQ ID NO: 18912 - DNA, 614 bp, synthetic construct
  source 1..614: mol_type = other DNA
gatcaacagcaggcgtggcacaccagccatgtcttgatcaagcacttctgtaaccccggaccgagtatcaatagactgctcacgtggtcgaaagagaaaacgttcgttatccggctaactacttcgagaaacctagtagcaccactgaaactgcggagtgtttcgctcagcacttcccccgtgtagatcaggtcgatgagtcactgcttaccccacgggtgaccgtggcagtggctgcgttggcggcctgcctatggggcaacccataggacgctctaaagtggacatggtgtgaagagtctattgagctagttagtagtcctccggcccctgaatgcggctaatcctaactgcggagcgcatgcccccaaaccagagggtggtgcgtcgtaacgggtaactctgcagcggaaccgactactttgggtgtccgtgtttcttttattctcataatggctgcttatggtgacaattgaggaattgttaccatatagctattggattggccatccggtgtgcaacagagctattatctacttgtttgttggatacattccattgacacctaaatccttcaatacattgcactatattctaacgttgaacgcaagaaa

SEQ ID NO: 18913 - DNA, 645 bp, synthetic construct
  source 1..645: mol_type = other DNA
attggtaacttagaagtttagcacacctgcgaccaatagcaggcatgacgcgccagtcatgtcttggtcaagcacttctgttcccccggactgagtatcaatagactgctcacgcggtcgaaggagaaaacgttcgtcatccggctggctacttcaagaaacccagtagcatcatgaaagttgcagagtgtttcgctcagcactacccccgtgtagatcaggtcgatgagtcactgcgaaccccacgggtgaccgtggcagtggctgcgttggcggcctgcccatggggtaacccatgggacgctctaatacagacatggtgtgaagagtctattgagctagccagtagtcctccggcccctgaatgcggctaatcctaactgcggagcacataccctcaatccagggggtggtgtgtcgtaacgggtaactctgcagcggaaccgactactttgggtgtccgtgtttccttttatccttattatggctgcttatggtgacaattgaaggattgttaccatatagctgttggattggccatccggtgtctaacagagctattgtatatctatttgttggatacgtccctcttgattacaaggccctacagactctcaaatacatcttgtaccttaatcaaaagag

SEQ ID NO: 18914 - DNA, 700 bp, synthetic construct
  source 1..700: mol_type = other DNA
gctagcacactgattctgcgggatctttgtgcgcctgttttataaccctccccctaagcagtaacttagaagctttgcacaatcacgaccagtagtgggcgtggcgcgccagccacgtcttggtcaagcacttctgtatccccggactgagtatcaatagactgctcacgcggtcgaaggagaaaacgttcgttacccggctaactacttcgagaaacctagtagcactatgaaagttgcggagtgtttcgctcagcacttcccccgtgtagatcaggtcgatgagtcactgtaaaccccacgggcgaccgtgacagtggctgcgttggcggcctgcccatggggtaacccatgggacgctctaatacagacatggtgtgaagagtctattgagctagttagtagtcctccggcccctgaatgcggctaatcctaactgcggagcgcgcaccctcaacccagggggcggcgcgtcgtaatgggtaactctgcagcggaaccgactactttgggtgtccgtgtttccttttactccttattggctgcttatggtgacaattgaaaagttgttaccatatagctattggattggccatccggtgtccaacagagctattgtttacctattcattggatacgtccctcttagtctcaaagccattcaaactcttgactatatattactccttaactgtaagaa

SEQ ID NO: 18915 - DNA, 716 bp, synthetic construct
  source 1..716: mol_type = other DNA
actcacagggcccactgggcgcaagcactctggtacctcggtacctttgtgcgcctgttttatacccccccccagtgaaacttagaagcagcaaaccacgatcaatagcaggcatagcgctccagttatgtcttgatcaagcacttctgtttccccggactgagtatcaatagactgctcgcgcggttgaaggagaaaacgttcgttatccggccaactacttcggaaaacctagtaacaccatgaaagttgcggagagcttcgttcagcactcccccagtgtagatcaggtcgatgagtcaccgcattccccacgggcgaccgtggcggtggctgcgttggcggcctgcccatggggtaacccatggggcgctctaatacggacatggtgtgaagagtctactgagctagttggtagtcctccggcccctgaatgcggctaatcccaactgcggagcacacgcccacaagccagcgggtagtgtgtcgtaacgggtaactctgcagcggaaccgactactttgggtgtccgtgtttccttttaactttatactggctgcttatggtgacaattagagaattgttaccatatagctattggattggccatccggtgtgcaacagagcaattatttacctatttattggttttgtaccattgactttgaattctgtgaccacccttaattatatcttgacccttaacacagctaaat

SEQ ID NO: 18916 - DNA, 643 bp, synthetic construct
  source 1..643: mol_type = other DNA
gtaacttagaagcaatttgcaacactgatcagtagtaggcatagcgcaccagctatgtcttgatcaagcacttctgtttccccggaccgagtatcaatagactgttcacacggttgaaggagaaagcgtccgttatccggctaactacttcgagaaacccagtagcgccattgaaattgcagagtgtttcgctccacacttcccccgtgtagatcaggtcgatgagtcactgtaatccccacgggcgaccgtggcagtggctgcgctggcggcctgcctatggggcaacccataggacgctctaatgtggacatggtgtgaagagtctattgagctagttagtagtcctccggcccctgaatgcggctaatcctaactgcggagcacatgccttcaatccagagggtagtgtgtcgtaatgggcaactctgcagcggaaccgactactttgggtgtccgtgtttccttttattctcacattggctgcttatggtgacaattacggaattgttaccatatagctattggattggccatccggtgtgcaatagagctattatatacctatttgttggctttgtaccactgaccttaaaatctataaccactctcgagtgtatattaacccttaatacaatcaagc

SEQ ID NO: 18917 - DNA, 573 bp, synthetic construct
  source 1..573: mol_type = other DNA
cttctgtttccccggactgagtatcaatagactgctcgcgcggttgaaggagaaaacgttcgttatccggccaactacttcggaaaacctagtaacactatgaaagttgcagagagcttcgttcagcactcccccagtgtagatcaggtcgatgagtcaccgcattccccacgggcgaccgtggcggtggctgcgttggcggcctgcccatggggtaacccatggggcgctctaatacggacatggtgtgaagagtctactgagctagttggtagtcctccggcccctgaatgcggctaatcccaactgcggagcacacgcccacaaaccagcgggtagtgtgtcgtaacgggtaactctgcagcggaaccgactactttgggtgtccgtgtttccttttaactttatattggctgcttatggtgacaattagagaattgttgccatatagctattggatcggccatccggtgtgcaacagagcaattatttacttattcactggttttgtaccattaactttgaattctgtgaccacccttaattatatcttgacccttaacacggctaaac

SEQ ID NO: 18918 - DNA, 570 bp, synthetic construct
  source 1..570: mol_type = other DNA
cttctgtacccccggactgagtatcaatagactgctcacgcggttgaaggagaaaacgttcgttacccggctaactacttcgagaaacctagtaacaccattgaaactgcggagtgtttcgctcagcattccccccatgtagatcaggtcgatgagtcactgcttaccccacgggcgaccgtggcagtggctgcgttggcggcctgcctatggggcaacccataggacgctctaaagtggacatggtgcgaagagtctattgagctagttagtagtcctccggcccctgaatgcggctaatcctaactgcggagcgcatgtcctcaaaccagagggtggtgcgtcgtaatgggtaactctgcagcggaaccgactactttgggtgtccgtgtttcttttgttcttataatggctgcttatggtgacaatcgaggaattgttaccatatagctattggattggccatccggtgtgcaacagagctattatctacttgtttgtcggatacatccccttaacacctaaatccttcaacacattgcattatattttaacattgaacgcgagaaa

SEQ ID NO: 18919 - DNA, 644 bp, synthetic construct
  source 1..644: mol_type = other DNA
acagtaacatagaagtcagaaacctacacgaccaatagcaggcgtgacgcaccagtcatgtcttggtcaaacacttctgtttccccggactgagtatcaataagctgctcacgcggctgaaggagaaaacgttcgttatccggctaactacttcgagaaacctagtaacaccatgaaagttgcagagtgtttcgctcagcacttccccccgtgtagatcaggtcgatgagtcactgcatcccccacgggcgaccgtggcagtggctgcgttggcggcctgcctatggggcaacccataggacgctctaatacagacatggtgtgaagagtctattgagctagttagtagtcctccggcccctgaatgcggctaatcccaactgcggagcacgcaccctcaatccagggggcggcgtgtcgtaacgggtaactccgcagcggaaccgactactttgggtgtccgtgtttccttttatcacttactggctgcttatggtgacaatcaaagagttgttaccatatagcttttggattggccatccggtgtctaacagagctattgtttacctgtttgttggatacattcctctcaattacaaggttctccaaactctcaactatatattgctccttaattataagaa

SEQ ID NO: 18920 - DNA, 655 bp, synthetic construct
  source 1..655: mol_type = other DNA
cccccctcaatttggtaacatagaagttagaaacatatatggccaatagcaggcgtggcgcaccagtcgcgtctcggtcaagcacttctgtttccccggactgagtatcaataagctgctcgcgcggctgaaggagaaaacgttcgttatccggctaactacttcgagaaacctagtaacaccatgaaagttgcggagtgtttcgctcagcacttcccccgtgtagatcaggtcgatgagtcactgcattccccacgggcgaccgtggcagtggctgcgttggcggcctgcctatggggtaacccataggacgctctaatacggacatggtgcgaagagtcaattgagctagttagtagtcctccggcccctgaatgcggctaatcctaactgcggagcacataccctcaatccagggggcggtgtgtcgtaatgggcaactctgcagcggaaccgactactttgggtgtccgtgtttccttttattcttatattggctgcttatggtgacaattgagagattgttaccatatagctattggattggccatccggtgtccaacagagctctggtttacttgttcgttggctttgtacctctgtcacccacagtttattcaactctagtgttcttaatacaccttaacagtaagag

SEQ ID NO: 18921 - DNA, 731 bp, synthetic construct
  source 1..731: mol_type = other DNA
gatgcggccccatggggtagtgggtttccactggggctagcactccgattctgcggaatctttgtgcgcctgttttacaaccctcccccaatttgcaacttagaagttatgtacgttgatcaatagcaggcgtggcacaccagccatgtcttgatcaagcacttctgtgaccccggactgagtatcaatagactgctcacgtggtcgaaagagaaaacgttcgttatccggctaactacttcgagaaacctagtagcaccactgaagctgcggagtgtttcgctcagcacttcccccgtgtagatcaggtcgatgagtcactgcttaccccacgggtgaccgtggcagtggctgcgttggcggcctgcctatggggcaacccgtaggacgctctaaggtggacatggtgtgaagagtctattgagctagttagtagtcctccggcccctgaatgcggctaatcctaactgcggagcgcatgcccccaaaccagagggtggtgcgtcgtaacgggtaactctgcagcggaaccgactactttgggtgtccgtgtttcttttattctcataatggctgcttatggtgacaattgaggaattgttaccatatagctattggattggccatccggtgtgcaacagagctattatctacttgtttgttggatacattccattgacacctaaatccttcaatacattgcactatattctaacgttgaacgcaagata

SEQ ID NO: 18922 - DNA, 640 bp, synthetic construct
  source 1..640: mol_type = other DNA
gtaacatagaagttagaaacatatatggccaatagcaggcgtggcgcaccagtcgcgtctcggtcaagcacttctgtttccccggactgagtatcaataagctgctcgcgcggctgaaggagaaaacgttcgttatccggctaactacttcgagaaacctagtagcaccatgaaagttgcggagtgtttcgctcagcacttcccccgtgtagatcaggtcgatgagtcactgcattccccacgggcgaccgtggcagtggctgcgttggcggcctgcctatgggtaacccataggacgctctaatacggacatggtgcgaagagtcaattgagctagttagtagtcctccggcccctgaatgcggctaatcctaactgcggagcacataccctcaatccagggggcggtgtgtcgtaatgggcaactctgcagcggaaccgactactttgggtgtccgtgtttccttttatttttatattggctgcttatggtgacaattgagagattgttaccatatagctattggattggccatccggtgtccaacagagctctggtttacttgttcgttggctttgtacctctgtcacccacagtttattcaactctagtgttcttgatacaccttaacagtaagag

SEQ ID NO: 18923 - DNA, 554 bp, synthetic construct
  source 1..554: mol_type = other DNA
agtatcaatagactgctcgtgcgattgaaggagaaaacgttccttatcaggctagatacttcgggaaacctatcagcagcatgaaagatgcggagaggttcgttcagcactcccccagtgtagatcaagtcgatgagtcaccgcattccccacgggcgaccgtggcggtggctgcgttggcggcctgcccatggggtaacccatggggcgctctaatacggacatggtgtgaagagtctactgagctagttagtagtcctccggcccctgaatgcggctaatcccaactgcggagcacatgcccacaagccagcgggtagtgtgtcgtaacgggcaactctgcagcggaaccgactactttgggtgtccgtgtttccttttatctttatattggctgcttatggtgacaattgaagaattgttaccatatagctattggattggccatccggtgtgcaacagagcaattgtttacctatttattggttttgtaccactaaccttgaagactgtgaccaccctcaattatattttgacccttaacacagctaaac

SEQ ID NO: 18924 - DNA, 549 bp, synthetic construct
  source 1..549: mol_type = other DNA
tatcaatagactgctcacgcggttgaaggagaaaacgttcgttacccggctaactacttcgagaaacctagtaacaccattgaaactgcggagtgtttcgctcagcattccccccatgtagatcaggtcgatgagccactgcttaccccacgggcgaccgtggcagtggctgcgttggcggcctgcctatggggcaacccataggacgctctaaagtggacatggtgcgaagagtctattgagctagttagtagtcctccggcccctgaatgcggctaatcctaactgcggagcgcatgtcctcaaaccagagggtggtgcgtcgtaatgggtaactctgcagcggaaccgactactttgggtgtccgtgtttcttttgttcttataatggctgcttatggtgacaatcgaggaattgttaccatatagctattggattggccatccggtgtgcaacagagctattatctacttgtttgtcggatacatccccttaacacctaaatccttcaacacattgcattatattttaacattgaacgcgagaaa

SEQ ID NO: 18925 - DNA, 554 bp, synthetic construct
  source 1..554: mol_type = other DNA
tgagtatcaatagactgcttacgcggttgaaggagaaaacgtccgttatccggctaactacttcgagaaacttagtaacaccatcgaagctgcagggtgtttcgctcagcacttcccccgtgtagatcaggccgatgagtcaccgcaatccccacgggcgaccgtggcggtggctgcgttggcggcctgcctatggggcaacccataggacgccctaaagtggacatggtgcgaagagtctattgagctagttagtagtcctccggcccctgaatgcggctaatcctaactgcggagcacataccctcaagccagagggtggtgtgtcgtaacgggtaactctgcagcggaaccgactactttgggtgtccgtgtttccttttactcttactgtggctgcttatggtgacaattcaagaattgttaccatatagctattggattggccatccggtgtctaacagagctattgtgtacttatttgttgggtacatttcattatcttacacatcccttagcacattacattttattgtgaaactaaatacaagaag

SEQ ID NO: 18926 - DNA, 646 bp, synthetic construct
  source 1..646: mol_type = other DNA
caattcgtaatttagaagtaatacacaccattgatcaacagcaagcatggcgcgccagccatgtttagatcaagtacttctgtttccccggactgagtatcaatagactgctcacgcggttgaaggagaaaacgttcgttacccggctaactacttcgagaaacctagtagcaccatcgaaactgcagagtgtttcgttcagcacttccccgtgtagatcaggtcgatgagtcactgcaatccccacgggcgaccgtggcagtggctgcgttggcggcctgcctatgggcctacccataggacgctctaatgtggacatggtgtgaagagtctattgagctagttagtagtcctccggcccctgaatgcggctaatcctaactgcggagcgcatatcctcaatccagggggtggtgcgtcgtaacgggcaactctgcagcggaaccgactactttgggtgtccgtgtttccttttactcttatattggctgcttatggtgacaattgagagattgttaccatatagctattgggttggccatccagtgtctaacagagcaattgtatacttatttgttggattcattccgctatcatatacatccattagcaccttatactatattataagattgaacacaagaaa

SEQ ID NO: 18927 - DNA, 549 bp, synthetic construct
  source 1..549: mol_type = other DNA
tatcaatagactgctcacgcggttgaaggagaaaacgttcgttacccggctaactacttcgagaaacctagtaacaccattgaaactgcggagtgtttcgctcagcattccccccatgtagatcaggtcgatgagtcactgcttaccccacgggcgaccgtggcagtggctgcgttggcggcctgcctatggggcaacccataggacgctctaaagtggacatggtgcgaagagtctattgagctagttagtagtcctccggcccctgaatgcggctaatcctaactgcggagcgcatgtcctcaaaccagagggtggtgcgtcgtaatgggtaactctgcagcggaaccgactactttgggtgtccgtgtttcttttgttcttataatggctgcttatggtgacaatcgaggaattgttaccatatagctattggattggccatccggtgtgcaacagagctattatctacttgtttgtcggatacatccccttaacacctaaatccttcaacacattgcattatattttaacattgaacgcgagaaa

SEQ ID NO: 18928 - DNA, 549 bp, synthetic construct
  source 1..549: mol_type = other DNA
tatcaatagtctgctcacgcggttgaaggagaaaacgttcgttatccggctaactacttcgagaaacctagtaacaccattgaaactgcggagtgtttcgctcagcatttcccccatgtagatcaggtcgatgagtcactgcttaccccacgggcgaccgtggcagtggctgcgttggcggcctgcctatggggcaacccataggacgctctaaagtggacatggtgcgaagagtctattgagctagttagtagtcctccggcccctgaatgcggctaatcctaactgcggagcgcatgtcctcaaaccagagggtggtgcgtcgtaatgggtaactctgcagcggaaccgactactttgggtgtccgtgtttcttttgttcttataatggctgcttatggtgacaatcgaggaattgttaccatatagctattggattggccatccggtgtgcaacagagctattatctacttgtttgtcggatacattcccttaacacctaaatccctcaacacattgcactatattctaacattgaacgcgagaaa

SEQ ID NO: 18929 - DNA, 607 bp, synthetic construct
  source 1..607: mol_type = other DNA
aggcataacgctccagttgtgtcttgatcaagcacttctgtttccccggactgagtatcaatagactgctcgcgcggttgaaggagaaaacgttcgttatccggctagctacttcggaaaacctagtaacaccatgaaagttgcggagagcttcgttcagcactcccccagtgtagatcaggtcgatgagtcaccgcattccccacgggcgaccgtggcggtggctgcgttggcggcctgcccatggggtaacccatggggcgctctaatacggacatggtgtgaagagtctactgagctagttagtagtcctccggcccctgaatgcggctaatcccaactgcggagcacacgcccacaagccagcgggtagtgtgtcgtaatgggcaactctgcagcggaaccgactactttgggtgtccgtgtttccttttatctttatattggctgcttatggtgacaatcaaagaattgttaccatatagctattggattggccatccggtgtgcaacagagcaattatttaccaatttattggttttgtaccattaaccttgaattctgtgaccacccttaattatatcttgacccttaacacagctaaac

SEQ ID NO: 18930 - DNA, 563 bp, synthetic construct
  source 1..563: mol_type = other DNA
tccccggactgagtatcaatagactgcttacgcggttgaaggagaaaacgttcgttacccggctaactacttcgagaaacttagtaacaccgtcgaagctgcagggtgtttcgctcagcacttcccccgtgtagatcaggccgatgagtcaccgcaatccccacgggcgaccgtggcggtggctgcgttggcggcctgcctatggggcaacccataggacgccctaaagtggacatggtgcgaagagtctattgagctagttagtagtcctccggcccctgaatgcggctaatcctaactgcggagcacataccctcaagccagagggtggtgtgtcgtaacgggtaactctgcagcggaaccgactactttgggtgtccgtgtttccttttattcttactgtggctgcttatggtgacaattcaagaattgttaccatatagctattggattggccatccggtgtctaacagagctattgtgtacttatttgttgggtacgttccattatcttacacatcccttaacacattacattttattgtgaagctaaatacaagaag

SEQ ID NO: 18931 - DNA, 563 bp, synthetic construct
  source 1..563: mol_type = other DNA
tccccggactgagtatcaatagactgcttacgcggttgaaggagaaaacgttcgttacccggctaactacttcgagaaacttagtaacaccatcgaagctgcagggtgtttcgctcagcacttcccccgtgtagatcaggccgatgagtcaccgcaatccccacgggcgaccgtggcggtggctgcgttggcggcctgcctatggggcaacccataggacgccctaaagtggacatggtgcgaagagtctattgagctagttagtagtcctccggcccctgaatgcggctaatcctaactgcggagcacataccctcaagccagagggtggtgtgtcgtaacgggtaactctgcagcggaaccgactactttgggtgtccgtgtttccttttattcttactgtggctgcttatggtgacaattcaagaattgttaccatatagctattggattggccatccggtgtctaacagagctattgtgtacttatttgttgggtacgttccattatcttacacatcccttaacacattacattttattgtgaagctaaatacaagaag

SEQ ID NO: 18932 - DNA, 563 bp, synthetic construct
  source 1..563: mol_type = other DNA
tccccggactgagtatcaatagactgcttacgcggttgaaggagaaaacgttcgttacccggctaactacttcgagaaacttagtaacaccatcgaagctgcagggtgtttcgctcagcacttcccccgtgtagatcaggccgatgagtcaccgcaatccccacgggcgaccgtggcggtggctgcgttggcggcctgcctatggggcaacccataggacgccctaaagtggacatggtgcgaagagtctattgagctagttagtagtcctccggcccctgaatgcggctaatcctaactgcggagcacacaccctcaagccagagggtggtgtgtcgtaacgggtaactctgcagcggaaccgactactttgggtgtccgtgtttccttttattcttactgtggctgcttatggtgacaattcaagaattgttaccatatagctattggattggccatccggtgtctaacagagctattgtgtacttatttgttgggtacgttccattatcttacacatcccttaacacattacattttattgtgaagctaaatacaagaag

SEQ ID NO: 18933 - DNA, 563 bp, synthetic construct
  source 1..563: mol_type = other DNA
tccccggactgagtatcaatagactgcttacgcggttgaaggagaaaacgttcgttacccggctaactacttcgagaaacttagtaacaccatcgaagctgcagggtgtttcgctcagcacttcccccgtgtagatcaggccgatgagtcaccgcaatccccacgggcgaccgtggcggtggctgcgttggcggcctgcctatggggcaacccataggacgccctaaagtggacatggtgcgaagagtctattgagctagttagtagtcctccggcccctgaatgcggctaatcctaactgcggagcacataccctcaagccagagggtggtgtgtcgtaacgggtaactctgcagcggaaccgactactttgggtgtccgtgtttccttttattcttactgtggctgcttatggtgacaattcaagaattgttaccatatagctattggattggccatccggtgtctaacagagctattgtctacttatttgttgggtacgttccattatcttacacatcccttaacacattacattttattgtgaagctaaatacaagaag

SEQ ID NO: 18934 - DNA, 563 bp, synthetic construct
  source 1..563: mol_type = other DNA
tccccggactgagtatcaatagactgctcacgcggttgaaggagaaaacgttcgttacccggctaactacttcgagaaacttagtaacaccatcgaagctgcagggtgtttcgctcagcacttcccccgtgtagatcaggccgatgagtcaccgcaatccccacgggcgaccgtggcggtggctgcgttggcggcctgcctatggggcaacccataggacgccctaaagtggacatggtgcgaagagtctattgagctagttagtagtcctccggcccctgaatgcggctaatcctaactgcggagcacacaccctcaagccagagggtggtgtgtcgtaacgggtaactctgcagcggaaccgactactttgggtgtccgtgtttccttttattcttactgtggctgcttatggtgacaattcaagaattgttaccatatagctattggattggccatccggtgtctaacagagctattgtgtacttatttgttgggtacgttccattatcttacacatcccttaacacattacattttattgtgaagctaaatacaagaag

SEQ ID NO: 18935 - DNA, 563 bp, synthetic construct
  source 1..563: mol_type = other DNA
tccccggactgagtatcaatagactgcttacgcggttgaaggagaaaacgttcgttacccggctaactacttcgagaaacttagtaacaccatcgaagctgcagggtgtttcgctcagcacttcccccgtgtagatcaggccgatgagtcaccgcaatccccacgggcgaccgtggcggtggctgcgttggcggcctgcctatggggcaacccataggacgccctaaagtggacatggtgcgaagagtctattgagctagttagtagtcctccggcccctgaatgcggctaatcctaactgcggagcacataccctcaagccagagggtggtgtgtcgtgacgggtaactctgcagcggaaccgactactttgggtgtccgtgtttccttttattcttactgtggctgcttatggtgacaattcaagaattgttaccatatagctattggattggccatccggtgtctaacagagctattgtgtacttatttgttgggtacgttccattatcttacacatcccttaacacattacattttattgtgaagctaaatacaagaag

SEQ ID NO: 18936 - DNA, 563 bp, synthetic construct
  source 1..563: mol_type = other DNA
tccccggactgagtatcaatagactgcttacgcggttgaaggagaaaacgttcgttacccggctaactacttcgagaaacttagtaacgccatcgaagctgcagggtgtttcgctcagcacttcccccgtgtagatcaggccgatgagtcaccgcaatccccacgggcgatcgtggcggtggctgcgttggcggcctgcctatggggcaacccataggacgccctaaagtggacatggtgcgaagagtctattgagctagttagtagtcctccggcccctgaatgcggctaatcctaactgcggagcacataccctcaagccagagggtggtgtgtcgtaacgggtaactctgcagcggaaccgactactttgggtgtccgtgtttccttttattcttactgtggctgcttatggtgacaattcaagaattgttaccatatagctattggattggccatccggtgtctaacagagctattgtgtactcatttgttgggtacgttccattatcttacacatcccttaacacattacattttattgtgaagctaaatacaagaag

SEQ ID NO: 18937 - DNA, 563 bp, synthetic construct
  source 1..563: mol_type = other DNA
tccccggactgagtatcaatagactgcttacgcggttgaaggagaaaacgttcgttacccggctaactacttcgagaaacttagtaacgccatcgaagctgcagggtgtttcgctcagcacttcccccgtgtagatcaggccgatgagtcaccgcaatccccacgggcgaccgtggcggtggctgcgttggcggcctgcctatggggcaacccataggacgccctaaagtggacatggtgcgaagagtctattgagctagttagtagtcctccggcccctgaatgcggctaatcctaactgcggagcacataccctcaagccagagggtggtgtgtcgtaacgggtaactctgcagcggaaccgactactttgggtgtccgtgtttccttttattcttactgtggctgcttatggtgacaattcaagaattgttaccatatagctattggattggccatccggtgtctaacagagctattgtgtactcatttgttgggtacgttccattatcttacacatcccttaacacattacattttattgtgaagctaaatacaagaag

SEQ ID NO: 18938 - DNA, 535 bp, synthetic construct
  source 1..535: mol_type = other DNA
cgcggttgaaggagaaaacgttcgttatccggctagctacttcggaaaacctagtaacaccatgaaagttgcggagagcttcgttcagcacttccccagtgtagatcaggtcgatgagtcaccgcattccccacgggcgaccgtggcggtggctgcgttggcggcctgcccatggggtaacccatggggcgctctaatacagacatggtgtgaagagtctactgagctagttagtagtcctccggcccctgaatgcggctaatcctaactgcggagcacacgcccacaagccagcgggtagtgtgtcgtaacgggtaactctgcagcggaaccgactactttgggtgtccgtgtttccttttatctttatattggctgcttatggtgacaatcaaagaattgttaccatatagctattggattggccatccggtgtgcaacagagcaatcatttacctatttattggtttcgtaccattaactttgaattctgtgaccactctaaattatatcttgaccctcaacacagttaaac

SEQ ID NO: 18939 - DNA, 563 bp, synthetic construct
  source 1..563: mol_type = other DNA
tccccggactgagtatcaatagactgcttacgcggttgaaggagaaaacgttcgttacccggctagctacttcgagaaacttagtaacaccatcgaagctgcagggtgtttcgctcagcacttcccccgtgtagatcaggccgatgagtcaccgcaatccccacgggcgaccgtggcggtggctgcgttggcggcctgcctatggggcaacccataggacgccctaaagtggacatggtgcgaagagtctattgagctagttagtagtcctccggcccctgaatgcggctaatcctaactgcggagcacataccctcaagccagagggtggtgtgtcgtaacgggtaactctgcagcggaaccgactactttgggtgtccgtgtttccttttattcttactgtggctgcttatggtgacaattcaagaattgttaccatatagctattggattggccatccggtgtctaacagagctattgtgtacttatttgttgggtacgttccattatcttacacatcccttaacacattacattttattgtgaagctaaatacaagaag

SEQ ID NO: 18940 - DNA, 562 bp, synthetic construct
  source 1..562: mol_type = other DNA
ccccggactgagtatcaatagactgcttgcgcggttgaaggagaaaacgttcgttatccggctaactacttcgagaaacttagtaacgccatcgaagctgcagggtgtttcgctcagcacttcccccgtgtagatcaggccgatgagtcaccgcaatccccacgggcgaccgtggcggtggctgcgttggcggcctgcctatggggcaacccataggacgtcctaaagtggacatggtgtgaagagtctattgagctagttagtagtcctccggcccctgaatgcggctaatcctaactgcggagcacatgccctcgagccagagggtggtgtgtcgtaacgggcaactctgcagcggaaccgactactttgggtgtccgtgtttccttttattcttattgtggctgcttatggtgacaattcaaggattgttaccatatagctattggattggccatccggtatctaacagagctattgtgtacttatttgttggatacgttccattatcttacacatcccttaacacattacattttattgtgaagctaaatacaagaag

SEQ ID NO: 18941 - DNA, 556 bp, synthetic construct
  source 1..556: mol_type = other DNA
tgagtatcaataggctgctcgcgcggctgaaggagaaaacgttcgttacccggccaactacttcgagaagcttagtatcaccatgaacgatgcagagtgtttcgttcagcacaaccccagtgtagatcaggctgatgagtcactgcaatccccatgggcgaccatggcagtggctgcgttggcggcctgcccatggagaaatccatgggacgctctaattctgacatggtgtgaagagcctattgagctagctggtagtcctccggcccctgaatgcggctaatcctaactgcggagcacatgctcacaaaccagtgggtggtgtgtcgtaatgggcaactctgcagcggaaccgactactttgggtgtccgtgtttccttttattcttatgttggctgcttatggtgacaattaaagaattgttaccatatagctattggattggccatccggtgtgcaacagagcaattgtttacctatttgttggttttgtaccactatcactgaagtctgtgaccactcttgagttcatcttgaccctcaactcaatcaaac

SEQ ID NO: 18942 - DNA, 560 bp, synthetic construct
  source 1..560: mol_type = other DNA
tccccggactgagtatcaataggctgcttacgcggctgaaagagaaaacgttcgttacccggccaactacttcgagaagcttagtaccaccatcaacgaggcagagtgtttcgctcggcactaccccagtgtagatcaggctgatgagtcactgcattccccatgggcgaccatggcagtggctgcgttggcggcctgcccatggagagatccataggacgctctaatttggacatggtgcgaagagcctattgagctagttggtagtcctccggcccctgaatgcggctaatcctaactgcggagcgcacacccacataccagtgggcagtgtgtcgtaacgggcaactctgcagcggaaccgactactttgggtgtccgtgtttccatttattcttatattggctgcttatggtgacaatcgaagagttgttaccatatagctattggattggccatccggtgtgtaacagagcaatcgtctaccagtttattggttttgtaccactacattaaagtctgtaacacattaatttcatcttgaccctaaacacacaagc

SEQ ID NO: 18943 - DNA, 560 bp, synthetic construct; identical to SEQ ID NO: 608
  source 1..560: mol_type = other DNA

SEQ ID NO: 18944 - DNA, 620 bp, synthetic construct
  source 1..620: mol_type = other DNA
cacgatcaatagtaggcataacgctccagttatgtcttgatcaagcacttctgtttccccggactgagtatcaatagactgctcgcgcggttgaaggagaaaacgttcgttatccggctagctacttcggaaaacctagtaacaccatgaaagttgcggagagcttcgttcagcactcccccagtgtagatcaggtcgatgagtcaccgcattccccacgggcgaccgtggcggtggctgcgttggcggcctgcccatggggtaacccatggggcgctctaatacggacatggtgtgaagagtctactgagctagttagtagtcctccggcccctgaatgcggctaatcccaactgcggagcacacgcccacaagccagcgggtagtgtgtcgtaacgggcaactctgcagcggaaccgactactttgggtgtccgtgtttccttttatctttatattggctgcttatggtgacaattaaagaattgttaccatatagctattggattggccatccggtgtgcaacagagcaattatttaccaatttattggttttgtaccattaaccttgaattctgtgaccacccttaattatatcttgacccttaacgcagctaaac

SEQ ID NO: 18945 - DNA, 581 bp, synthetic construct
  source 1..581: mol_type = other DNA
ggttttcgtcaagcacttctgtttccccggacttagtaccaataggctgtacccacggctgaaagggaaaacgttcgttatccggctacctacttcgagaagcctagtatcatcattgaatgtctcaagtgttacgctcagcacaaccccagtgtagttcaggctgatgagtcaccgaattccccacgggcgaccgtgtcggtggctgcgttggcggcctgcctgcgagtttcactcgcaggacgcttgattcatgacatggtgcgaagagcctattgagctaggtagtagtcctccggcccctgaatgcggctaatcccaaccacggagcatccactgacaaaccagtcagcagggtgtcgtaacgggtaactctgtggcggaaccgactactttgggtgtccgtgtttcctgttttacttactctggctgcttatggtgacaatttacggattgttaccatatagctattggattggccatccggattacaagcaaataatattattgtttgtgggatttcttcccttgaatcacactaattacttcattttattaattgttttaaagttagttgcatc

SEQ ID NO: 18946 - DNA, 620 bp, synthetic construct
  source 1..620: mol_type = other DNA
ctatcacgaccaatagtaggcgtggcgcgccagccacgtcttggtcaagcacttctgtttccccggaccgatatcaatagactgctcacgcggttgaaggagaaaacgttcgttatccggctaactacttcgagaaacctagtagcatcgtgaaagttgcggagtgtttcgctcagcacttcccccgtgtagatcaggtcgatgagtcactgtgaaccccacgggcgaccgtgacagtggctgcgttggcggcctgcccatggggtaacccatgggacgctctaatacagacacggtgtgaagagtctattgagctagttggtagtcctccggcccctgaatgcggctaatcctaactgcggagcgcgcaccctcaatccagggggcagcgcgtcgtaatgggtaactctgcagcggaaccgactactttgggtgtccgtgtttccttttattccttattggctgcttatggtgacaattgaaaagttgttaccatatagctattggattggccatccggtaaccaacagagctattgtttacctgtttgttgggtacgtccctctcaatttcaaggtcattaaaactcttgattatatattacttctcaactgtgagaa

SEQ ID NO: 18947 - DNA, 492 bp, synthetic construct
  source 1..492: mol_type = other DNA
ggaaaacctagtaacaccatgaaagttgcggagagcttcgttcagcactcccccagtgtagatcaggtcgatgagtcaccgcattccccacgggcgaccgtggcggtggctgcgttggcggcctgcccatggggcaacccatggggcgctctaatacagacatggtgtgaagagtctactgagctagttagtagtcctccggcccctgaatgcggctaatcccaactgcggagcacacgcccacaagccagcgggtagtgtgtcgtaacgggtaactctgcagcggaaccgactactttgggtgtccgtgtttccttttatctttatattggctgcttatggtgacaattaaagaattgttaccatatagctattggattggccatccggtgtgcaacagagcaatcatttacctatttattggttttgtaccattaactttgaattctgtgaccacccttaattatatcttgacccttaacacaactaaac

SEQ ID NO: 18948 - DNA, 424 bp, synthetic construct
  source 1..424: mol_type = other DNA
cgatgagtcactgcaatccccacgggcgaccgtggcagtggctgcgctggcggcctgcctatggggcaacccataggacgctctaatgtggacatggtgtgaagagtctattgagctagttagtagtcctccggcccctgaatgcggctaatcctaactgcggagcacatgccttcaatccagagggtagtgtgtcgtaatgggcaactctgcagcggaaccgactactttgggtgtccgtgtttccttttattctcacattggctgcttatggtgacaattacagaattgttaccatatagctattggattggccatccggtgtgcaatagagctattatatacctatttgttggctttgtaccactgaccttaaaatctttaaccactcttgagtgtatattaacccttaatacaatcaaac

SEQ ID NO: 18949 - DNA, 602 bp, synthetic construct
  source 1..602: mol_type = other DNA
taacgctccagttatgtcttgatcaagcacttctgtttccccggactgagtatcaatagactgctcgcgcggttgaaggagaaaacgttcgttatccggctagctacttcggaaaacctagtaacaccatgaaagttgcggagagcttcgttcagcacttccccagtgtagatcaggtcgatgagtcaccgcattccccacgggcgaccgtggcggtggctgcgttggcggcctgcccatggggtaacccatggggcgctccaatacggacatggtgtgaagagtctactgagctagttagtagtcctccggcccctgaatgcggctaatcccaactgcggagcacacgcccacaagccagcgggtagtgtgtcgtaacgggtaactctgcagcggaaccgactactttgggtgtccgtgtttccttttatctttatattggctgcttatggtgacaattaaagaattgttaccatatagctattggattggccatccggtgtgcaacagagcaattatttaccaatttgttggttttgtaccattaaccttgaattctgtgaccacccttaattatatcttgacccttaacgcagctaaac

SEQ ID NO: 18950 - DNA, 562 bp, synthetic construct
  source 1..562: mol_type = other DNA
ccccggactgagtatcaataagctgctcacgtggctgaaggagaaaacgttcgttatccggctaactacttcgagaaacttagtaacgccatcgaagctgcagggtgtttcgctcagcacttcccccgtgtagatcgggccgatgagtcaccgcgttccccacgggcgaccgtggcggtggctgcgttggcggcctgcccatggagcaatccataggacgctctaaagcggacatggtgcgaagagtctattgagctaattggtagtcctccggccccggaatgcggctaatcctaactgcggagcagatacccacatgtcagtgggcagtcggtcgtaacgggcaacgctgcagcagaaccgactactgtgggtgtccgtgtttccttttattcttactgtggctgcttatggtgacaattcaaggattgttaccatatagctattggattggccatccggtatctaacagagctattgtgtacttatttgttggatacgttccattatcttacacatcccttaacacattacattttattgtgaagctaaatacaagaag

SEQ ID NO: 18951 - DNA, 550 bp, synthetic construct; identical to SEQ ID NO: 592
  source 1..550: mol_type = other DNA

SEQ ID NO: 18952 - DNA, 565 bp, synthetic construct
  source 1..565: mol_type = other DNA
tccccggactgagtatcaatagactgctcgcgcggttgaaggagaaaacgttcgttatccggctagctacttcggaaaacctagtaacaccatgaaagttgcggagagcttcgttcagcactcccccagtgtagatcaggtcgatgagtcaccgcattccccacgggcgaccgtggcggtggctgcgttggcggcctgcccatggggtaacccatggggcgctctaatacggacatggtgtgaagagtctactgagctagttagtagtcctccggcccctgaatgcggctaatcccaactgcggagcacacgcccacaagccagcgggtagtgtgtcgtaacgggtaactctgcagcggaaccgactactttgggtgtccgtgtttccttttatctttatattggctgcttatggtgacaattaaagaattgttaccatatagctattggattggccatccggtgtgcaacagagcaattatttaccaatttattggttttgtaccattaaccttgaattctgtgaccacccttaattatatcttgacccttaacgcagctaaac

SEQ ID NO: 18953 - DNA, 647 bp, synthetic construct
  source 1..647: mol_type = other DNA
ccccaatgaaacttagaagcagcaaaccacgatcaatagtaggcataacgctccagttatgtcttgatcaagcacttctgtttccccggactgagtatcaatagactgcgcgagcggttgaaggagaaaacgttcgttatccggctagctacttcggaaaacctagtaacaccatgaaagttgcggagagcttcgttcagcactcccccagtgtagatcaggtcgatgagccaccgcattccccacgggcgaccgtggcggtggctgcgttggcggcctgcccatggggtaacccatggggcgctctaatgcggacatggtgtgaagagtctactgagctagctagtagtcctccggcccctgaatgcggctaatcccaactgcggagcacacgcccacaagccagcgggtagtgtgtcgtaacgggtaactctgcagcggaaccgactactttgggtgtccgtgtttccttttatctttatattggctgcttatggtgacaattaaagaattgttaccatatagctattggattggccatccggtgtgcaacagagcaattatttaccaatttattggttttgtaccattaaccttgaactctgtgaccacccttaattatatcttgacccttaacgcagctaaac

SEQ ID NO: 18954 - DNA, 407 bp, synthetic construct
  source 1..407: mol_type = other DNA
ccccacgggcgaccgtggcggtggctgcgttggcggcctgcccatggggtaacccatggggcgctctaatacagacatggtgtgaagagtctactgagctagttagtagtcctccggcccctgaatgcggctaatcccaactgcggagcacacgcccacaagccagcgggtagtgtgtcgtaacgggtaactctgcagcggaaccgactactttgggtgtccgtgtttccttttatctttatattggctgcttatggtgacaattaaagaattgttaccatatagctattggattggccatccggtgtgcaacagagcaatcatttacctatttattggttttgtaccattaactttaaattctgtgaccacccttaattatatcttggcccttaacacagctagac

SEQ ID NO: 18955 - DNA, 533 bp, synthetic construct
  source 1..533: mol_type = other DNA
cggttgaaggagaaaacgttcgttatccggctagctacttcggaaaacctagtaacaccatgaaagttgcggagagcttcgttcagcactcccccagtgtagatcaggtcgatgagccaccgcattccccacgggcgaccgtggcggtggctgcgttggcggcctgcccatggggtaacccatggggcgctctaatgcggacatggtgtgaagagtctactgagctagctagtagtcctccggcccctgaatgcggctaatcccaactgcggagcacacgcccacaagccagcgggtagtgtgtcgtaacgggtaactctgcagcggaaccgactactttgggtgtccgtgtttccttttatctttatattggctgcttatggtgacaattaaagaattgttaccatatagctattggattggccatccggtgtgcaacagagcaattatttaccaatttattggttttgtaccattaaccttgaactctgtgaccacccttaattatatcttgacccttaacgcagctaaac

SEQ ID NO: 18956 - DNA, 594 bp, synthetic construct
  source 1..594: mol_type = other DNA
cagctatgtcttgatcaagcacttctgtttccccggaccgagtatcaatagactgttcacgcggttgaaggagaaagcgtccgttatccggctaactacttcgagaaacccagtaacgccattgaaactgcagagtgtttcgctccacacttcccccgtgtagatcaggtcgatgagtcactgcaatccccacgggcgaccgtggcagtggctgcgctggcggcctgcctatggggcaacccataggacgctctaatgtggacatggtgtgaagagtctattgagctagttagtagtcctccggcccctgaatgcggctaatcctaactgcggagcacatgctctcaatccagagggtagtgtgtcgtaatgggcaactctgcagcggaaccgactactttgggtgtccgtgtttccttttattcttacattggctgcttatggtgacaatcactgaattgttaccatatagctattggattggccatccggtgtgcaacagagctattatatacctatttgttggctttgtaccactaaccttaaaatctacaaccactctcaactatatattaacccttaatacaatcaaac

SEQ ID NO: 18957 - DNA, 394 bp, synthetic construct
  source 1..394: mol_type = other DNA
cgtggcggtggctgcgctggcggcctgcctatggggtaacccataggacgctctaatgtggacatggtgcgaagagtctattgagctagttagtagtcctccggcccctgaatgcggctaatcctaactgcggagcacatgccttcaatccagagggtagtgtgtcgtaatgggcaactctgcagcggaaccgactactttgggtgtccgtgtttccttttattcccacattggctgcttatggtgacaattatagaattgttaccatatagctattggattggccatccggtgtgcaatagagctattatatatctatttgttggctttgtaccactgacctcaaaatctgtaaccacccttaagtatatattaaccctcaatacaatcaaac

SEQ ID NO: 18958 - DNA, 557 bp, synthetic construct; identical to SEQ ID NO: 603
  source 1..557: mol_type = other DNA

SEQ ID NO: 18959 - DNA, 291 bp, synthetic construct
  source 1..291: mol_type = other DNA
cggcccctgaatgcggctaatcctaactgcggagcacatgccctcaatccagggggtggtgtgtcgtaacgggcaactctgcagcggaaccgactactttgggtgtccgtgtttccttttattcttatattggctgcttatggtgacaattgagagattgttaccatatagctattggattggccatccattaacgaacagagctttgatatatttgttcgtgggtttcgttccactcaccaatcgtgcagtccatactctaaagcacattttgattctgaacaatagaaa

SEQ ID NO: 18960 - DNA, 289 bp, synthetic construct
  source 1..289: mol_type = other DNA
gcccctgaatgcggctaatcctaactgcggagcgcataccctcaacccagagggtggtgcgtcgtaacgggcaactctgcagcggaaccgactactttgggtgtccgtgtttccttttatttttatactggctgcttatggtgacgattgaaagattgttaccatatagctattggattggccatccagtgactaacagagctttgatatacctgtttgtgggttttgttccactcaccaatcgtacagtttatactttgaagtacattttaatcctgaataatagaaa

SEQ ID NO: 18961 - DNA, 288 bp, synthetic construct
  source 1..288: mol_type = other DNA
gcccctgaatgcggctaatcctaactgcggagcgcgcaccctcaatccagtgggcagcgcgtcgtaatgggtaactctgcagcggaaccgactactttgggtgtccgtgtttcctgttattccttattggctgcttatggtgacaattgaaaagttgttaccatatagctattggattggccatccggtaaccaacagagctattgtttatctgttcattgggtgcgtccctctcaatctcaaggtcattcaaactcttgattatatactatttctcaattgtaagaa

SEQ ID NO: 18962 - DNA, 289 bp, synthetic construct
  source 1..289: mol_type = other DNA
ggcccctgaatgcggctaatcctaactgcggagcgcatgccctcaaaccagagggtggtgcgtcgtaacgggcaactctgcagcggaaccgactactttgggtgtccgtgtttcctttattctcatattggctgcttatggtgacaatcgaggaattgttgccatatagctattggattggccatccggtgtgcaatagagcaattatctacttgttcgttggatatattccgttaacacttaaacccctcaacacattgcactacattttaaccctaaacgcaagaaa

SEQ ID NO: 18963 - DNA, 289 bp, synthetic construct
  source 1..289: mol_type = other DNA
ggcccctgaatgcggctaatcctaactgcggggcgcgcaccctcagtccagggggcagcgcgtcgtaatgggtaactccgcagcggaaccgactactttgggtgtccgtgtttccttttattccttattggctgcttatggtgacaattgaaaagttgttaccatatagctattggattggccatccggtaactaacagagctattgtttacctgtttattggatacgtccctctcgatctcaaggccattcaaactcttgattatatactacttctcaactgtaagaa

SEQ ID NO: 18964 - DNA, 288 bp, synthetic construct
  source 1..288: mol_type = other DNA
gcccctgaatgcggctaatcctaactgtggagcgcgcaccctcagcccagggggcagcgcgtcgtaatgggtaactccgcagcggaaccgactactttgggtgtccgtgtttccttttattccttattggctgcttatggtgacaattgagaagttgttaccatatagctattggattggccacccggtaaccaacagagctattgtttacctgtttattggatacgtccctctcgatctcaaggccattcaaactcttgattatatactacttctcaactgtaagaa

SEQ ID NO: 18965 - DNA, 288 bp, synthetic construct
  source 1..288: mol_type = other DNA
gcccctgaatgcggctaatcctaactgtggagcgcgcaccctcagcccagggggcagcgcgtcgtaatgggtaactccgcagcggaaccgactactttgggtgtccgtgtttccttttattccttattggctgcttatggtgacaattgagaagttgttaccatatagctattggattggccacccggtaaccaacagagctattgtttacctgtttattggatacgtccctctcgatctcaaggctattcaaactcttgattatatactacttctcaactgtaagaa

SEQ ID NO: 18966 - DNA, 286 bp, synthetic construct
  source 1..286: mol_type = other DNA
tgaatgcggctaatcccaactgcggagcacacgcccacaagccagcgggtagtgtgtcgtaacgggtaactctgcagcggaaccgactactttgggtgtccgtgtttccttttatctttatattggctgcttatggtgacaattaaagaattgttaccatatagctattggattggccatccggtgtgcaacagagcaattatttaccaatttattggttttgtaccattaaccttgaattctgtgaccacccttaattatatcttgacccttaacgcagctaaac

SEQ ID NO: 18967 - DNA, 290 bp, synthetic construct
  source 1..290: mol_type = other DNA
ggcccctgaatgcggctaatcctaactgcggagcacacgccctcaacccagggggttgtgtgtcgtaacgggtaactctgcagcggaaccgactactttgggtgtccgtgtttcctattattcttatattggctgcttatggtgacaattgagagattgttaccatatagctattggattggccatccgatatctaacagagctttggtatatcagttcattggctttgtgcctttgtcatctacagtttattcaactctagtgttcttaatataccttaatagtaagaa

SEQ ID NO: 18968 - DNA, 291 bp, synthetic construct
  source 1..291: mol_type = other DNA
cggcccctgaatgcggctaatcctaactgcggagcatgtactcacaatccagtgggcagcatgtcgtaacgggtaactctgcagcggaaccgactactttgggtgtccgtgtttccttttattcttatattggctgcttatggtgacaattgaaagattgttgccatatagctattggattggccatccggtgtctaacagagctctgatttatcagtttgttggttttgtgcctttatcacctacagtttacttaaccttagtgtttttgatacatcttaacagcaagaa

SEQ ID NO: 18969 - DNA, 290 bp, synthetic construct
  source 1..290: mol_type = other DNA
ggcccctgaatgcggctaatcctaactgcggagcacatgccctcaatccagggggtggtgtgtcgtaacgggcaactctgcagcggaaccgactacttcgggtgtccgtgtttccttttattctcatattggctgcttatggtgacaattgagagattgttaccatatagctattggattggccatccggtgtctaacagagctctggtttatcaatttgttggctttgtgcctttgtcacctacagtttattcaactttggtgtttttactacatcttaacaacaagaa

SEQ ID NO: 18970 - DNA, 290 bp, synthetic construct
  source 1..290: mol_type = other DNA
ggcccctgaatgcggctaatcctaactgcggagcacataccttcaacccagagggtggtgtgtcgtaacgggcaactctgcagcggaaccgactactttgggtgtccgtgtttccttttattcctatattggctgcttatggtgacaattgagagattgttgccatatagctattggattggccatccggtgtcaaacagagccctagtttaccagttcgttggttttgtacctttatcacccacagtctattcaaccttggtatttctaattcaccttaatagcaagaa

SEQ ID NO: 18971 - DNA, 554 bp, synthetic construct
  source 1..554: mol_type = other DNA
gatatcaatagactgttcacacggtcgaaggagaaagcgttcgttatccggctaactacttcgagaaacccagtagcgccattgaaactgcagagtgtttcgctccacacttcccccgtgtagatcaggtcgatgagtcactgcaatccccacgggcgaccgtggcagtggctgcgttggcggcctgcctatggggtaacccataggacgctctaatgtggacatggtgcgaagagtctattgagctagttagtagtcctccggcccctgaatgcggctaatcctaactgcggagcacatgccttcaatccagagggtagtgtgtcgtaatgggcaactctgcagcggaaccgactactttgggtgtccgtgtttccttttattctcacattggctgcttatggtgacaattacagaattgttaccatatagctattggattggccatccggtgtgcaatagagctattatatacctatttgttggctttgtaccactaaccttaaaatctgtaatcactctcaagtatatattgacccttaatacaattaaac

SEQ ID NO: 18972 - DNA, 495 bp, synthetic construct
  source 1..495: mol_type = other DNA
tacttcgagaagcctagtaacaccatgaaagttgcggagtgtttcgctcagcacttcccccgtgtagatcaggccgatgagtcactgcaaaccccacgggtgaccgtggcagtggctgcgctggcggcctgcccatggggtaacccatgggacgctctaatacagacatggtgtgaagagcctattgagctagttagtggtcctccggcccctgaatgcggctaatcctaactgcggagcacgcaccctcaacccagggggcggcgtgtcgtaatgggtaactctgcagcggaaccgactactttgggtgtccgtgtttccttttattccttattggctgcttatggtgacaattgaaaagttgttaccatatagctattggattggccatccggtatctaatagagctattgtttacctattcattggatacatccctcttagtcttaaagccattcaaactctcaactacatattgctccttaattgtaggaa

SEQ ID NO: 18973 - DNA, 286 bp, synthetic construct
  source 1..286: mol_type = other DNA
tgaatgcggctaatcccaactgcggagcacacgcccacaagccagcgggtagtgtgtcgtaacgggtaactctgcagcggaaccgactactttgggtgtccgtgtttccttttatctttatattggctgcttatggtgacaattaaagaattgttaccatatagctattggattggccatccggtgtgcaacagagcaattatttaccaatttattggttttgtaccattaaccttgaactctgtgaccacccttaattatatcttgacccttaacgcagctaaac

SEQ ID NO: 18974 - DNA, 276 bp, synthetic construct
  source 1..276: mol_type = other DNA
gctaatcctaactgcggagcacacgccctcaatccagggggtggtgtgtcgtaacgggcaactctgcagcggaaccgactactttgggtgtccgtgtttccttttattcttatattggctgcttatggtgacaattgagagattgttaccatatagctattggattggccatccggtgtctaatagagctctggtttatcaatttgttggctttgtgcctttgtcatctacagtttattcaactttagtgtttttaatatatcttaacaacaagaa

SEQ ID NO: 18975 - DNA, 495 bp, synthetic construct
  source 1..495: mol_type = other DNA
tacttcgagaagcctagtaacaccatgaaagttgcggagtgtttcgctcagcacttcccccgtgtagatcaggccgatgagtcactgcaaaccccacgggtgaccgtggcagtggctgcgctggcggcctgcccatggggtaacccatgggacgctctaatacagacatggtgtgaagagtctattgagctagttagtggtcctccggcccctgaatgcggctaatcctaactgcggagcacgcaccctcaacccagggggcggcgtgtcgtaatgggtaactctgcagcggaaccgactactttgggtgtccgtgtttccttttattccttattggctgcttatggtgacaattgaaaagttgttaccatatagctattggattggccatccggtatctaatagagctattgtttacctattcattggatacatccctcttagtcttaaagccattcaaactctcaactacatattgctccttaattgtaggaa

SEQ ID NO: 18976 - DNA, 560 bp, synthetic construct
  source 1..560: mol_type = other DNA
ggactgagtatcaatagactgctcgcgcggttgaaggagaaaacgttcgttatccggctagctacttcggaaaacctagtaacaccatgaaagttgcggagagcttcgttcagcactcccccagtgtagatcaggtcgatgagtcaccgcattccccacgggcgaccgtggcggtggctgcgttggcggcctgcccatggggtaacccatggggcgctctaatacggacatggtgtgaagagtctactgagctagttagtagtcctccggcccctgaatgcggctaatcccaactgcggagcacacgcccacaagccagcgggtagtgtgtcgtaacgggtaactctgcagcggaaccgactactttgggtgtccgtgtttccttttacctttatattggctgcttatggtgacaattaaagaattgttaccatatagctattggattggccatccagtgtgcaacagagcaattatttaccaatttattggttttgtaccattaaccttgaattctgtgatcacccttaattatattttgacccttaacgcagctaaac

SEQ ID NO: 18977 - DNA, 549 bp, synthetic construct
  source 1..549: mol_type = other DNA
tatcaatagactgctcacgcggttgaaggagaaaacgttcgttatccggctaactacttcgagaaacctagtagcatcgtgaaagttgcggagtgtttcgctcagcacttcccccgtgtagatcaggtcgatgagtcactgtgaaccccacgggcgaccgtgacagtggctgcgttggcggcctgcccatggggtaacccatgggacgctctaatacagacacggtgtgaagagtctattgagctagttggtagtcctccggcccctgaatgcggctaatcctaactgcggagcgcgcaccctcaatccagggggcagcgcgtcgtaatgggtaactctgcagcggaaccgactactttgggtgtccgtgtttccttttattccttattggctgcttatggtgacaattgaaaagttgttaccatatagctattggattggccatccggtaaccaacagagctattgtttacctgtttgttgggtacgtccctctcaatttcaaggtcattaaaactcttgattatatattacttctcaactgtgagaa

SEQ ID NO: 18978 - DNA, 265 bp, synthetic construct
  source 1..265: mol_type = other DNA
gcggagcacacgcccacaagccagcgggtagtgtgtcgtaacgggtaactctgcagcggaaccgactactttgggtgtccgtgtttccttttatctttatattggctgcttatggtgacaattaaagaattgttaccatatagctattggattggccatccggtgtgcaacagagcaattatttaccaatttattggttttgtaccattaaccttgaattctgtgaccactcttaattatatcttgactcttaacgcagctaaac

SEQ ID NO: 18979 - DNA, 550 bp, synthetic construct
  source 1..550: mol_type = other DNA
tcaatagactgttcacacggtcgaaggagaaagcgttcgttatccggctaactacttcgagaaacccagtagcgccattgaaactgcagagtgtttcgctccacacttcccccgtgtagatcaggtcgatgagtcactgcaatccccacgggcgaccgtggcagtggctgcgttggcggcctgcctatggggtaacccataggacgctctaatgtggacatggtgcgaagagtctattgagctagttagtagtcctccggcccctgaatgcggctaatcctaactgcggagcacatgccttcaatccagagggtagtgtgtcgtaatgggcaactctgcagcggaaccgactactttgggtgtccgtgtttccttttattctcacattggctgcttatggtgacaattacagaattgttaccatatagctattggattggccatccggtgtgcaatagagctattatatacctatttgttggctttgtaccactaaccttaaaatctgtaatcactctcaagtatatattgacccttaatacaattaaac

SEQ ID NO: 18980 - DNA, 720 bp, synthetic construct
  source 1..720: mol_type = other DNA
caagagtagtgggttccactgggggctagcactctgattctgcggaatctttgtgcgcctgttttataaccctcccccgacttgcaccttagaagttatgtacgttgatcaacagcaggcgtggcacaccagccatgtcttgatcaagcacttctgtgcccccggactgagtatcaatagactgctcacgtggtcgaaggagaaaacgttcgttatccggctaactacttcgagaaacctagtaacaccactgaaactgcggagtgtttcgctcagcacttcccccgtgtagatcaggtcgatgagtcactgcttaccccacgggtgaccgtggcagtggctgcgttggcggcctgcctatggggcaacccataggacgctctaaagtggacatggtgcgaagagtctattgagctagttagtagtcctccggcccctgaatgcggctaatcctaactgcggagcgcatgcccccaaaccagagggtggtgcgtcgtaacgggtaactctgcagcggaaccgactactttgggtgtccgtgtttcttttattctcataatggctgcttatggtgacaattgaggaattgttaccatatagctattggattggccatccggtgtgtaacagagctattatctacttgtttgttggatacattccattaacacctaaatccttcaatacattgcattacattctaacgctgaacgcaagaaa

SEQ ID NO: 18981 - DNA, 695 bp, synthetic construct
  source 1..695: mol_type = other DNA
ctagcactccgattctgcggaatctttgtgcgcctgttttataacccccccccgacttgcaacttagaagttatgtacgttgatcaacagcaggcgtggcacaccagccatgtcttgatcaagcacttctgtaaccccggactgagtatcaatagactgctcacgtggtcgaaagagaaaacgttcgttatccggctaactacttcgagaaacctagtagcaccactgaaactgcggagtgtttcgctcagcacttcccccgtgtagatcaggtcgatgagtcactgcttaccccacgggtgaccgtggcagtggctgcgttggcggcctgcctatggggcaacccataggacgctctaaagtggacatggtgtgaagagtctattgagctagttagtagtcctccggcccctgaatgcggctaatcctaactgcggagcgcatgcccccaaaccagagggtggtgcgtcgtaacgggtaactctgcagcggaaccgactactttgggtgtccgtgtttcttttattctcataatggctgcttatggtgacaattgaggaattgttaccatatagctattggattggccatccggtgtgcaacagagctattatctacttgtttgttggatacattccattgacatctaaatccttcaatacattgcactatattctaacgttgaacacaagaaa

SEQ ID NO: 18982 - DNA, 619 bp, synthetic construct
  source 1..619: mol_type = other DNA
acgatcaatagtaggcataacgctccagttatgtcttgatcaagcacttctgtttccccggactgagtatcaatagactgcgcgagcggttgaaggagaaaacgttcgttatccggctagctacttcggaaaacctagtaacaccatgaaagttgcggagagcttcgttcagcactcccccagtgtagatcaggtcgatgagccaccgcattccccacgggcgaccgtggcggtggctgcgttggcggcctgcccatggggtaacccatggggcgctctaatgcggacatggtgtgaagagtctactgagctagctagtagtcctccggcccctgaatgcggctaatcccaactgcggagcacacgcccacaagccagcgggtagtgtgtcgtaacgggtaactctgcagcggaaccgactactttgggtgtccgtgtttccttttatctttatattggctgcttatggtgacaattaaagaattgttaccatatagctattggattggccatccggtgtgcaacagagcaattatttaccaatttattggttttgtaccattaaccttgaactctgtgaccacccttaattatatcttgacccttaacgcagctaaac

SEQ ID NO: 18983 - DNA, 745 bp, synthetic construct
  source 1..745: mol_type = other DNA
ttaaaacagcctgtgggttgttcccacccacagggcccactgggcgctagcacactgattctgcgggatctttgtgcgcctgttttataacccttcccctaagcagcaacttagaagctttgcacaatcacgaccagcagtgggcgtggcgcgccagtcacgtcttggtcaagcacttctgtatccccggactgagtatcaatagactgctcacgcggttgaaggagaaaacgttcgttacccggctagctacttcgagaaacctagtagcaccgtgaaagttgcggagtgtttcgctcagcacttcccccgtgtagatcaggtcgatgagtcactgtaaaccccacgggcgaccgtgacagtggctgcgttggcggcctgcccatggggtaacccatgggacgctctaatacagacatggtgtgaagagtctattgagctagttagtagtcctccggcccctgaatgcggctaatcctaactgcggagcgcgcaccctcaacccagggggcggcgtgtcgtaatgggtaactctgcagcggaaccgactactttgggtgtccgtgtttccttttattctttattggctgcttatggtgacaattgaaaagttgttaccgtatagctattggattggccatccggtgtctaacagagctattgtttacctattcattggatacgtccctcttaatctcaaagtcattcaaactcttgattatatattgctccttaactgtaagaa

SEQ ID NO: 18984 - DNA, 372 bp, synthetic construct
  source 1..372: mol_type = other DNA
gcctgcccatggggtaacccatggggcgctctaatacggacatggtgtgaagagtctactgagctagttagtagtcctccggcccctgaatgcggctaatcccaactgcggagcacacgcccacaaaccagcgggtagtgtgtcgtaacgggtaactctgcagcggaaccgactactttgggtgtccgtgtttccttttatctttatattggctgcttatggtgacaattaaagaattgttaccatatagctattggattggccatccggtgtgcaacagagcaattatttaccaatttattggttttgtaccattaaccttgaattctgtgaccacccttaattatatcttgacccttaacgcagctaaac

SEQ ID NO: 18985 - DNA, 440 bp, synthetic construct
  source 1..440: mol_type = other DNA
cccccgtgtagatcaggtcgatgagtcactgtgaaccccacgggcgaccgtgacagtggctgcgttggcggcctgcccatggggtaacccatgggacgctctaatacagacacggtgtgaagagtctattgagctagttggtagtcctccggcccctgaatgcggctaatcctaactgcggagcgcgcaccctcaatccagggggcagcgcgtcgtaatgggtaactctgcagcggaaccgactactttgggtgtccgtgtttcctttttattacttattggctgcttatggtgacaattgaaaagttgttaccatatagctattggattggccatccggtaatcaacagagctattgtttacttgtttgtaggatacgtccctctcaatttcaaagtcattaaaactcttgattatatattactcctcaactgtgagaa

SEQ ID NO: 18986 - DNA, 705 bp, synthetic construct
  source 1..705: mol_type = other DNA
ggcgctagcactctgattctacggaatctttgtgcgcctgttttacaacccctcccaatttgcaacttagaagcaatacacaacactgatcaacagcaggcatggcgcaccagccatgtcttgatcaagcacttctgttttccccggactgagtatcaatagactgctcacgcggttgaaggagaaagcgtccgttatccggctaactacttcgagaaacctagtagcaccattgaagctgcggagtgtttcgctcggcacttcccccgtgtagatcaggtcgatgagtcactgcaatccccacgggcgaccgtggcagtggctgcgctggcggcctgcctatggggcaacccataggacgctctaatgtggacatggtgcgaagagtctattgagctagttagtagtcctccggcccctgaatgcggctaatcctaactgcggagcacatgccctcaacccagagggtagtgtgtcgtaacgggcaactctgcagcggaaccgactactttgggtgtccgtgtttccttttatttttacattggctgcttatggtgacaatcacagaattgttaccatatagctattggattggccatccggtgtgcaatagagctattatatacctatttgttggctttgtaccactaaccttaaaatctataaccaccctcaactttatattaactctcaatacagtcaaac

SEQ ID NO: 18987 - DNA, 296 bp, synthetic construct
  source 1..296: mol_type = other DNA
tcctccggcccctgaatgcggctaatcctaactgcggagcgcatgccctcaatccagggggtggtgtgtcgtaacgggcaactctgcagcggaaccgactactttgggtgtccgtgtttccttttattcttacattggctgcttatggtgacaattgagagattgttaccatatagctattggattggccatccagtgaccaacagagctttgatatacttgtttgtgggtttcgttccactcactaatcgtacagtccatactctaaagcacattttgattctgaacaatagaaa

SEQ ID NO: 18988 - DNA, 637 bp, synthetic construct; identical to SEQ ID NO: 763
  source 1..637: mol_type = other DNA

SEQ ID NO: 18989 - DNA, 643 bp, synthetic construct
  source 1..643: mol_type = other DNA
agcagtaacttagaagctttacacaatcacgaccaatagtaggcgtggcgcgccagtcacgtcttggtcaagcacctctgttccccggactgagtatcaatagactgctcacgcggttgaaggagaaaacgttcgttatccggctaactacttcgagaaacctagtagcaccgtgaaagttgcggagtgtttcgctcagcacttcccccgtgtagatcaggtcgatgagtcactgtaaaccccacgggcgaccgtgacagtggctgcgttggcggcctgcccatggggtgacccatgggacgctctaatacagacatggtgtgaagagtctattgagctagttagtagtcctccggcccctgaatgcggctaatcctaactgcggagcacgcaccctcaacccagggggcggcgtgtcgtaatgggtaactctgcagcggaaccgactactttgggtgtccgtgtttccttttatttcttactggctgcttatggtgacaattgaaaagttgttaccatatagctattggattggccacccggtgtctaacagagctattgtttacctatttactggatacgtccctcttaatctcaaggccattcaaactcttaattatatattgctccttaactgtaagaa

SEQ ID NO: 18990 - DNA, 636 bp, synthetic construct
  source 1..636: mol_type = other DNA
acttagaagcttcacacaatcacgaccaatagtaggcgtggcgcgccagtcacgtctcggtcaagcacttctgttccccggactgagtatcaatagactgcttacgcggttgaaggagaaaacgttcgttatccggctaactacttcgagaaacctagtagcaccgtgaaagttgcggagcgtttcgctcagcacttcccccgtgtagatcaggccgatgagtcactgtaaaccccacgggcgaccgtgacagtggctgcgttggcggcctgcccatggggtaacccatgggacgctctaatacagacatggtgtgaagagtctattgagctagttagtagtcctccggcccctgaatgcggctaatcctaactgcggagcacgcaccctcaacccagggggcggcgtgtcgtaatgggtaactctgcagcggaaccgactactttgggtgtccgtgtttccttttattccttactggctgcttatggtgacaattgaaaagttgttaccatatagctattggattggccatccggtgtctaacagagctattgtttacctatttactggatacgtccctcttaatctcaaggccattcaaactcttaattatatattgctccttaattgtaagaa

SEQ ID NO: 18991 - DNA, 637 bp, synthetic construct
  source 1..637: mol_type = other DNA
acttagaagttttgcacaatcacgaccaatagtaggcgtggcgcgccagtcacgtcttggtcaagcactcctgttcccccggactgagtatcaatagactgctcgcgcggttgaaggagaaaacgttcgttatccggctaactacttcgagaagcctagtagcaccgtgaaagttgcggagtgtttcgctcagcacttcccccgtgtagatcaggtcgatgagtcactgtaaaccccacgggcgaccgtgacagtggctgcgttggcggcctgcccatggggtaacccatgggacgctctaatacagacatggtgtgaagagtctattgagctagttagtagtcctccggcccctgaatgcggctaatcctaactgcggagcacgcaccctcaacccagggggcggcgtgtcgtaatgggtaactctgcagcggaaccgactactttgggtgtccgtgtttccttttattccttactggctgcttatggtgacaattgaaaagttgttaccatatagctattggattggccatccggtgtctaacagagctattgtttacctattcattggatacgtccctcttaatctcaaggtcattcaaactcttaattatatattgctccttaactgcaagaa

SEQ ID NO: 18992 - DNA, 637 bp, synthetic construct
  source 1..637: mol_type = other DNA
acttagaagcttcacacaatcacgaccaatagtaggcgtggcgcgccagtcacgtcttggtcaggcacttctgttcccccggactgagtatcaatagactgctcacgcggttgaaggagaaaacgttcgttatccggctaactacttcgagaaacctagtagcaccatgaaagttgcggagtgtttcgctcagcacttcccccgtgtagatcaggtcgatgagtcactgtaaaccccacgggcgaccgtgacagtggctgcgttggcggcctgcccatggggtaacccatgggacgctctaatacagacatggtgtgaagagtctattgagctagttagtagtcctccggcccctgaatgcggctaatcctaactgcggagcacgcaccctcaacccagggggcggcgtgtcgtaatgggtaactctgcagcggaaccgactactttgggtgtccgtgtttctttttattccttactggctgcttatggtgacaattgaaaagttgttaccatacagctattggattggccatccggtgtctaacagagctattgtttacctatttattggatacgtccctcttaatctcaaggctactcaaactcttaattatatattgctccttaactgtaagaa

SEQ ID NO: 18993 - DNA, 637 bp, synthetic construct
  source 1..637: mol_type = other DNA
acttagaagcttcacacaatcacgaccaatagtaggcgtggcgcgccagtcacgtcttggtcaagcacttctgttcccccggactgagtatcaatagactgctcacgcggttgaaggagaaaacgttcgttatccggctaactacttcgagaaacctagtagcaccgtgaaagttgcggagtgtttcgctcagcacttcccccgtgtagatcaggtcgatgagtcactgtaaaccccacgggcgaccgtgacagtggctgcgttggcggcctgcccatggggtaacccatgggacgctctaatacagacatggtgtgaagagtctattgagctagttagtagtcctccggcccctgaatgcggctaatcctaactgcggagcacgcaccctcaacccagggggcggcgtgtcgtaatgggtaactctgcagcggaaccgactactttgggtgtccgtgtttccttttattccttactggctgcttatggtgacaattgaaaagttgttaccatatagctattggattggccatccggtgtctaacagagccattgtttacctatttattggatacgtcccccttaatctcaaggccattcaaactcttaattatatattgctccttaactgtaagaa

SEQ ID NO: 18994 - DNA, 637 bp, synthetic construct
  source 1..637: mol_type = other DNA
acttagaagcttcacacaatcacgaccaatagtaggcgtggcgcgccagtcacgttttggtcaagcacttctgttcccccggactgagtatcaatagactgctcacgcggttgaaggagaaaacgttcgttatccggctaactacttcgagaaacctagtagcaccgtgaaagttgcggagtgtttcgctcagcacttcccccgtgtagatcaggtcgatgagtcactgtaaaccccacgggcgaccgtgacagtggctgcgttggcggcctgcccatggggtaacccatgggacgctctaatacagacatggtgtgaagagtctattgagctagttagtagtcctccggcccctgaatgcggctaatcctaactgcggagcacgcaccctcaacccagggggcggcgtgtcgtaatgggtaactctgcagcggaaccgactactttgggtgtccgtgtttccttttattccttactggctgcttatggtgacaattgaaaagttgttaccatatagctattggattggccatccggtgtctaacagagctattgtttacctatttattggatacgtccctcttaatctcaaggtcattcaaactcttaattatatattgctccttaactgtaagaa

SEQ ID NO: 18995 - DNA, 637 bp, synthetic construct
  source 1..637: mol_type = other DNA
acttagaagttttacgcaattacgaccagtagtgggcgtggcgcgccagtcacgtcttggtcaagcacttctgtatccccggactgagtatcaatagactgctcacgcggttgaaggagaaaacgttcgttatccggctaactacttcgagaaacctagtagcaccgtgaaagttgcggagtgtttcgctcagcacttcccccgtgtagatcaggtcgatgagtcactgtaaaccccacgggcgaccgtgacagtggctgcgttggcggcctgcccatggggtaacccatgggacgctctaatacagacatggtgtgaagagtctattgagctagttagtagtcctccggcccctgaatgcggctaatcctaactgcggagcacgcaccctcaacccagggggcggcgtgtcgtaatgggtaactctgcagcggaaccgactactttgggtgtccgtgtttccttttattccttattggctgcttatggtgacaattgagaagttgttaccatatagctattggattggccatccggtgtctaacagagctattatttacctatttattggatacgtccctcttgatttcaaggccattcaaactcttgattatatattgctccttaactgcaagaa

SEQ ID NO: 18996 - DNA, 637 bp, synthetic construct
  source 1..637: mol_type = other DNA
acttagaagcttcacacaatcacgaccaatagtaggcgtggcgcgccagtcacgtcttggtcaagcacttctgttcccccggactgagtatcaatagactgctcacgcggttgaaggagaaaacgttcgttatccggctaactacttcgagaaacctagtagcaccgtgaaagttgcggagtgtttcgctcagcacttcccccgtgtagatcaggtcgatgagtcactgtaaaccccacgggcgaccgtgacagtggctgcgttggcggcctgcccatggggtaacccatgggacgctctaatacagacatggtgtgaagagtctattgagctagttagtagtcctccggcccctgaatgcggctaatcctaactgcggagcacgcaccctcaacccagggggcggcgtgtcgtaatgggtaactctgcagcggaaccgactactttgggtgtccgtgtttccttttattccttactggctgcttatggtgacaattgaaaagttgttaccatatagctattggattggccatccggtgtctaacagagctattgtttacctatttattggatacgtccctcttgatctcaaggccattcaaactcttaattatatattgctccttaactgtaagaa

SEQ ID NO: 18997 - DNA, 637 bp, synthetic construct
  source 1..637: mol_type = other DNA
acttgaaagcttcacacaatcacgaccaatagtaggcgtggcgcgccagtcacgtcttggtcaagcacttctgttcccccggactgagtatcaatagactgctcacgcggttgaaggagaaaacgttcgttatccggctaactacttcgagaaacctagtagcaccgtgaaagttgcggagtgtttcgctcagcacttcccccgtgtagatcaggtcgatgagtcactgtaaaccccacgggcgaccgtgacagtggctgcgttggcggcctgcccatggggtaacccatgggacgctctaatacagacatggtgtgaagagtctattgagctagttagtagtcctccggcccctgaatgcggctaatcctaactgcggagcacgcaccctcaacccagggggcggcgtgtcgtaacgggtaactctgcagcggaaccgactactttgggtgtccgtgtttcctgttattccttactggctgcttatggtgacaattgaaaagttgttaccatatagctattggattggccatccggtgtctaacagagctattgtttacctatttattggatacgtccctcttaatctcaagaccattcaaactcttaattatatattgctccttaactgtaagaa

SEQ ID NO: 18998 - DNA, 637 bp, synthetic construct
  source 1..637: mol_type = other DNA
atttagaagctttacacaatcacgaccagtagtgggcgtggcgcgccagtcacgtcttggtcaagcacttctgtatccccggactgagtatcaatagactgctcgcgcggttgaaggagaaaacgttcgttatccggctaactacttcgagaaacctagtagtaccatgaaagttgcggagtgtttcgctcagcacttcccccgtgtagatcaggtcgatgagtcactgtaaaccccacgggcgaccgtgacagtggctgcgctggcggcctgcccatggggcaacccatgggacgctctaatacagacatggtgtgaagagtctattgagctagttagtagtcctccggcccctgaatgcggctaatcctaactgcggagcacgcaccctcaacccagggggcggcgtgtcgtaatgggtaactctgcagcggaaccgactactttgggtgtccgtgtttccttttattccttattggctgcttatggtgacaattgaaaagttgttaccatatagctattggattggccatccggtgtctaacagagctattgtttacttatttattggatacgtccctcttaatctcaaggccattcaaactctcgattacatattgttccttaactgtaagaa
